United States Patent Application Publication US 2011/0183924 A1 - sequence listing, part 278

SEQ ID NO: 847154 - protein, 819 aa, Homo sapiens
RGRPGEPSGRAPVRRRPRPEAEVGRPSREARARDRRPRGADEECRTQEGRVRGDRARGRRQGKAGLGGRWSGHPALKMHKRKGPPGPPGRGAAAARQLGLLVDLSPDGLMIPEDGANDEELEAEFLALVGGQPPALEKLKGKGPLPMEAIEKMASLCMRDPDEDEEEGTDEDDLEADDDLLAELNEVLGEEQKASETPPPVAQPKPEAPHPGLETTLQERLALYQTAIESARQAGDSAKMRRYDRGLKTLENLLASIRKGNAIDEADIPPPVAIGKGPASTPTYSPAPTQPAPRIASAPEPRVTLEGPSATAPASSPGLAKPQMPPGPCSPGPLAQLQSRQRDYKLAALHAKQQGDTTAAARHFRVAKSFDAVLEALSRGEPVDLSCLPPPPDQLPPDPPSPPSQPPTPATAPSTTEVPPPPRTLLEALEQRMERYQVAAAQAKSKGDQRKARMHERIVKQYQDAIRAHKAGRAVDVAELPVPPGFPPIQGLEATKPTQQSLVGVLETAMKLANQDEGPEDEEDEVPKKQNSPVAPTAQPKAPPSRTPQSGSAPTAKAPPKATSTRAQQQLAFLEGRKKQLLQAALRAKQKNDVEGAKMHLRQAKGLEPMLEASRNGLPVDITKVPPAPVNKDDFALVQRPGPGLSQEAARRYGELTKLIRQQHEMCLNHSNQFTQLGNITETTKFEKLAEDCKRSMDILKQAFVRGLPTPTARFEQRTFSVIKIFPDLSSNDMLLFIVKGINLPTPPGLSPGDLDVFVRFDFPYPNVEEAQKDKTSVIKNTDSPEFKEQFKLCINRSHRGFRRAIQTKGIKFEVVHKG

SEQ ID NO: 847155 - protein, 574 aa, Homo sapiens
KVFGENCLNREAEVAVAKIVLLHSSLDDTVILCLKKEKKGSPLNDHCCHHQTLILGDWTHHRRYEISNILSLPLQQNSPVAPTAQPKAPPSRTPQSGSAPTAKAPPKATSTRAQQQLAFLEGRKKQLLQAALRAKQKNDVEGAKMHLRQAKGLEPMLEASRNGLPVDITKVPPAPVNKDDFALVQRPGPGLSQEAARRYGELTKLIRQQHEMCLNHSNQFTQLGNITETTKFEKLAEDCKRSMDILKQAFVRGLPTPTARFEQRTFSVIKIFPDLSSNDMLLFIVKGINLPTPPGLSPGDLDVFVRFDFPYPNVEEAQKDKTSVIKNTDSPEFKEQFKLCINRSHRGFRRAIQTKGIKFEVVHKGGLFKTDRVLGTAQLKLDALEIACEVREILEVLDGRRPTGGRLEVMVRIREPLTAQQLETTTERWLVIDPVPAAVPTQVAGPKGKAPPVPAPARESGNRSARPLHSLSVLAFDQERLERKILALRQARRPVPPEVAQQYQDIMQRSQWQRAQLEQGGVGIRREYAAQLERQLQFYTEAARRLGNDGSRDAAKEALYRRNLVESELQRLRR

SEQ ID NO: 847156 - protein, 1028 aa, Homo sapiens
RGRPGEPSGRAPVRRRPRPEAEVGRPSREARARDRRPRGADEECRTQEGRVRGDRARGRRQGKAGLGGRWSGHPALKMHKRKGPPGPPGRGAAAARQLGLLVDLSPDGLMIPEDGANDEELEAEFLALVGGQPPALEKLKGKGPLPMEAIEKMASLCMRDPDEDEEEGTDEDDLEADDDLLAELNEVLGEEQKASETPPPVAQPKPEAPHPGLETTLQERLALYQTAIESARQAGDSAKMRRYDRGLKTLENLLASIRKGNAIDEADIPPPVAIGKGPASTPTYSPAPTQPAPRIASAPEPRVTLEGPSATAPASSPGLAKPQMPPGPCSPGPLAQLQSRQRDYKLAALHAKQQGDTTAAARHFRVAKSFDAVLEALSRGEPVDLSCLPPPPDQLPPDPPSPPSQPPTPATAPSTTEVPPPPRTLLEALEQRMERYQVAAAQAKSKGDQRKARMHERIVKQYQDAIRAHKAGRAVDVAELPVPPGFPPIQGLEATKPTQQSLVGVLETAMKLANQDEGPEDEEDEVPKKQNSPVAPTAQPKAPPSRTPQSGSAPTAKAPPKATSTRAQQQLAFLEGRKKQLLQAALRAKQKNDVEGAKMHLRQAKGLEPMLEASRNGLPVDITKVPPAPVNKDDFALVQRPGPGLSQEAARRYGELTKLIRQQHEMCLNHSNQFTQLGNITETTKFEKLAEDCKRSMDILKQAFVRGLPTPTARFEQRTFSVIKIFPDLSSNDMLLFIVKGINLPTPPGLSPGDLDVFVRFDFPYPNVEEAQKDKTSVIKNTDSPEFKEQFKLCINRSHRGFRRAIQTKGIKFEVVHKGGLFKTDRVLGTAQLKLDALEIACEVREILEVLDGRRPTGGRLEVMVRIREPLTAQQLETTTERWLVIDPVPAAVPTQVAGPKGKAPPVPAPARESGNRSARPLHSLSVLAFDQERLERKILALRQARRPVPPEVAQQYQDIMQRSQWQRAQLEQGGVGIRREYAAQLERQLQFYTEAARRLGNDGSRDAAKEALYRRNLVESELQRLRR

SEQ ID NO: 847157 - protein, 236 aa, Homo sapiens
MAAGWAPGEGSSSEPTILSPLYTHAHRGLFKTDRVLGTAQLKLDALEIACEVREILEVLDGRRPTGGRLEVMVRIREPLTAQQLETTTERWLVIDPVPAAVPTQVAGPKGKAPPVPAPARESGNRSARPLHSLSVLAFDQERLERKILALRQARRPVPPEVAQQYQDIMQRSQWQRAQLEQGGVGIRREYAAQLERQLQFYTEAARRLGNDGSRDAAKEALYRRNLVESELQRLRR

SEQ ID NO: 847158 - protein, 530 aa, Homo sapiens
RGRPGEPSGRAPVRRRPRPEAEVGRPSREARARDRRPRGADEECRTQEGRVRGDRARGRRQGKAGLGGRWSGHPALKMHKRKGPPGPPGRGAAAARQLGLLVDLSPDGLMIPEDGANDEELEAEFLALVGGQPPALEKLKGKGPLPMEAIEKMASLCMRDPDEDEEEGTDEDDLEADDDLLAELNEVLGEEQKASETPPPVAQPKPEAPHPGLETTLQERLALYQTAIESARQAGDSAKMRRYDRGLKTLENLLASIRKGNAIDEADIPPPVAIGKGPASTPTYSPAPTQPAPRIASAPEPRVTLEGPSATAPASSPGLAKPQMPPGPCSPGPLAQLQSRQRDYKLAALHAKQQGDTTAAARHFRVAKSFDAVLEALSRGEPVDLSCLPPPPDQLPPDPPSPPSQPPTPATAPSTTEVPPPPRTLLEALEQRMERYQVAAAQAKSKGDQRKARMHERIVKQYQDAIRAHKAGRAVDVAELPVPPGFPPIQGLEATKPTQQSLVGVLETAMKLANQDEGPEDEEDEVPKKV

SEQ ID NO: 847159 - protein, 1028 aa, Homo sapiens; identical to SEQ ID NO: 847156

SEQ ID NO: 847160 - protein, 699 aa, Homo sapiens
RGRPGEPSGRAPVRRRPRPEAEVGRPSREARARDRRPRGADEECRTQEGRVRGDRARGRRQGKAGLGGRWSGHPALKMHKRKGPPGPPGRGAAAARQLGLLVDLSPDGLMIPEDGANDEELEAEFLALVGGQPPALEKLKGKGPLPMEAIEKMASLCMRDPDEDEEEGTDEDDLEADDDLLAELNEVLGEEQKASETPPPVAQPKPEAPHPGLETTLQERLALYQTAIESARQAGDSAKMRRYDRGLKTLENLLASIRKGNAIDEADIPPPVAIGKGPASTPTYSPAPTQPAPRIASAPEPRVTLEGPSATAPASSPGLAKPQMPPGPCSPGPLAQLQSRQRDYKLAALHAKQQGDTTAAARHFRVAKSFDAVLEALSRGEPVDLSCLPPPPDQLPPDPPSPPSQPPTPATAPSTTEVPPPPRTLLEALEQRMERYQVAAAQAKSKGDQRKARMHERIVKQYQDAIRAHKAGRAVDVAELPVPPGFPPIQGLEATKPTQQSLVGVLETAMKLANQDEGPEDEEDEVPKKQNSPVAPTAQPKAPPSRTPQSGSAPTAKAPPKATSTRAQQQLAFLEGRKKQLLQAALRAKQKNDVEGAKMHLRQAKGLEPMLEASRNGLPVDITKVPPAPVNKDDFALVQRPGPGLSQEAARRYGELTKLIRQQHEMCLNHSNQFTQLGNITEPPSLKSWRRTVSGAWTF

SEQ ID NO: 847161 - protein, 189 aa, Homo sapiens
KVFGENCLNREAEVAVAKIVLLHSSLDDTVILCLKKEKKGSPLNDHCCHHQTLILGDWTHHRRYEISNILSLPLQQNSPVAPTAQPKAPPSRTPQSGSAPTAKAPPKATSTRAQQQLAFLEGRKKQLLQAALRAKQKNDVEGAKMHLRQAKGLEPMLEASRNGLPVDITKCRLPFNKEGCKEADVGTDS

SEQ ID NO: 847162 - protein, 105 aa, Homo sapiens
MKAKGVWVPNSVPFPREIRAATGPTMLLRTTLRRYAKKRRRFLLVSDEVGPSRPGDYDSRRAPQSKAGRAWTRNRMWLAARVAERAGKWPRGQTRWWDSASSPLA

SEQ ID NO: 847163 - protein, 99 aa, Homo sapiens
GRYQVVSSLAEARGEMATGTDQVVGLGLVAVSLIIFTYYTAWVILLPFIDSQHVIHKYFLPRAYAVAIPLAAGLLLLLFVGLFISYVMLKSKRVTKKAQ

SEQ ID NO: 847164 - protein, 68 aa, Homo sapiens
MATGTDQVVGLGLVAVSLIIFTYYTAWVILLVCHSPRPLLTFPEPWHRQSNYYIGSRHGAGFIACLIS

SEQ ID NO: 847165 - protein, 31 aa, Homo sapiens
MQEARNTTRRKGDTDHADARMRARREQHGGR

SEQ ID NO: 847166 - protein, 105 aa, Homo sapiens; identical to SEQ ID NO: 847162

SEQ ID NO: 847167 - protein, 105 aa, Homo sapiens; identical to SEQ ID NO: 847162

SEQ ID NO: 847168 - protein, 105 aa, Homo sapiens; identical to SEQ ID NO: 847162

SEQ ID NO: 847169 - protein, 125 aa, Homo sapiens [sequence omitted]

SEQ ID NO: 847170 - protein, 105 aa, Homo sapiens; identical to SEQ ID NO: 847162

SEQ ID NO: 847171 - protein, 130 aa, Homo sapiens
MATGTDQVVGLGLVAVSLIIFTYYTAWVILLPFIDSQHVIHKYFLPRAYAVAIPLAAGLLLLLFVGKSSPPPLDPGQGFGKTPPLNMLPHFGGAGSCLPRTHPWGFPVHPSRLPVSNLWVSWCPRLFGLQ

SEQ ID NO: 847172 - protein, 252 aa, Homo sapiens
MGSELIGRLAPRLGLAEPDMLRKAEEYLRLSRVKCVGLSARTTETSSAVMCLDLAASWMKCPLDRAYLIKLSGLNKETYQSCLKSFECLLGLNSNIGIRDLAVQFSCIEAVNMASKILKSYESSLPQTQQVDLDLSRPLFTSAALLSACKILKLKVDKNKMVATSGVKKAIFDRLCKQLEKIGQQVDREPGDVATPPRKRKKIVVEAPAKEMEKVEEMPHKPQKDEDLTQDYEEWKRKILENAASAQKATAE

SEQ ID NO: 847173 - protein, 203 aa, Homo sapiens
MCLDLAASWMKCPLDRAYLIKLSGLNKETYQSCLKSFECLLGLNSNIGIRDLAVQFSCIEAVNMASKILKSYESSLPQTQQVDLDLSRPLFTSAALLSACKILKLKVDKNKMVATSGVKKAIFDRLCKQLEKIGQQVDREPGDVATPPRKRKKIVVEAPAKEMEKVEEMPHKPQKDEDLTQDYEEWKRKILENAASAQKATAE

SEQ ID NO: 847174 - protein, 252 aa, Homo sapiens; identical to SEQ ID NO: 847172

SEQ ID NO: 847175 - protein, 203 aa, Homo sapiens; identical to SEQ ID NO: 847173

SEQ ID NO: 847176 - protein, 150 aa, Homo sapiens
MGSELIGRLAPRLGLAEPDMLRKAEEYLRLSRVKCVGLSARTTETSSAVMCLDLAASWMKCPLDRAYLIKLSGLNKETYQSCLKSFECLLGLNSNIGIRDLAVQFSCIEAVNMASKILKSYESSLPQTQQVDLDLSRPLFTSAALLSACK

SEQ ID NO: 847177 - protein, 459 aa, Homo sapiens
MASSASLETMVPPACPRAGASPATSKTLAFSIERIMAKTSEPRAPFEPRPGALEADGSQGKKLLNLCSPLPCMIPLQPLGYEVPSKTLLSYSELWKSSLRAGGGGGGGGGGGGGGGGAPVCGASGLCKTNCGVCCKAELGLAPSALPAGRVIKPQVINQAVGLPASGSLYYFNYLDSTAYPPSELLSGHLFPSGLLNAQAPAALAAHPKLFLLENAKLAGLAADKFPHPAPYPHKERLPAPLEQVLKENSALTAERGGVKGHSKLPGGSADGKPKNFTCEVCGKVFNAHYNLTRHMPVHTGARPFVCKVCGKGFRQASTLCRHKIIHTQEKPHKCNQCGKAFNRSSTLNTHIRIHAGYKPFVCEFCGKGFHQKGNYKNHKLTHSGEKQYKCTICNKAFHQVYNLTFHMHTHNDKKPFTCATCGKGFCRNFDLKKHVRKLHDSVGPAAPSAKDLTRTVQS

SEQ ID NO: 847178 - protein, 109 aa, Homo sapiens
RVGNIQLLYLSGPVLVMISLLTEAVPQKQTCNRRNRSQWSLTLSPRMEYSGVISAHCKLRLLGSCHSPALASRVAGTTGACHHARLIFVFLVETGFHRISQDGLDLLTS

SEQ ID NO: 847179 - protein, 358 aa, Homo sapiens
MASSASLETMVPPACPRAGASPATSKTLAFSIERIMAKTSEPRAPFEPRPGALEADGSQGKKLLNLCSPLPCMIPLQPLGYEVPSKTLLSYSELWKSSLRAGGGGGGGGGGGGGGGGAPVCGASGLCKTNCGVCCKAELGLAPSALPAGRVIKPQVINQAVGLPASGSLYYFNYLDSTAYPPSELLSGHLFPSGLLNAQAPAALAAHPKLFLLENAKLAGLAADKFPHPAPYPHKERLPAPLEQVLKENSALTAERGGVKGHSKLPGGSADGKPKNFTCEVCGKVFNAHYNLTRHMPVHTGARPFVCKVCGKGFRQASTLCRHKIIHTQVHPPLEFEHPKNRYFCLCFADVSSATGTA

SEQ ID NO: 847180 - protein, 358 aa, Homo sapiens; identical to SEQ ID NO: 847179

SEQ ID NO: 847181 - protein, 304 aa, Homo sapiens
MASSASLETMVPPACPRAGASPATSKTLAFSIERIMAKTSEPRAPFEPRPGALEADGSQGKKLLNLCSPLPCMIPLQPLGYEVPSKTLLSYSELWKSSLRAGGGGGGGGGGGGGGGGAPVCGASGLCKTNCGVCCKAELGLAPSALPAGRVIKPQVINQAVGLPASGSLYYFNYLDSTAYPPSELLSGHLFPSGLLNAQAPAALAAHPKLFLLENAKLAGLAADKFPHPAPYPHKERLPAPLEQVLKENSALTAERGGVKGHSKLPGGSADGKPKNFTCEVCGKVFNAHYNLTRHLRQRVLQKL

SEQ ID NO: 847182 - protein, 503 aa, Homo sapiens
RVDHASEKRHAAWLGTHLLGGGGKRLRGERLRPGPAWLGSAPRAMASSASLETMVPPACPRAGASPATSKTLAFSIERIMAKTSEPRAPFEPRPGALEADGSQGKKLLNLCSPLPCMIPLQPLGYEVPSKTLLSYSELWKSSLRAGGGGGGGGGGGGGGGGAPVCGASGLCKTNCGVCCKAELGLAPSALPAGRVIKPQVINQAVGLPASGSLYYFNYLDSTAYPPSELLSGHLFPSGLLNAQAPAALAAHPKLFLLENAKLAGLAADKFPHPAPYPHKERLPAPLEQVLKENSALTAERGGVKGHSKLPGGSADGKPKNFTCEVCGKVFNAHYNLTRHMPVHTGARPFVCKVCGKGFRQASTLCRHKIIHTQEKPHKCNQCGKAFNRSSTLNTHIRIHAGYKPFVCEFCGKGFHQKGNYKNHKLTHSGEKQYKCTICNKAFHQVYNLTFHMHTHNDKKPFTCATCGKGFCRNFDLKKHVRKLHDSVGPAAPSAKDLTRTVQS

SEQ ID NO: 847183 - protein, 358 aa, Homo sapiens; identical to SEQ ID NO: 847179

SEQ ID NO: 847184 - protein, 106 aa, Homo sapiens
MPSICSCDKQKSLQTWPNVPWGAKSPPIENYCSKLWSLTLSPRMEYSGVISAHCKLRLLGSCHSPALASRVAGTTGACHHARLIFVFLVETGFHRISQDGLDLLTS

SEQ ID NO: 847185 - protein, 358 aa, Homo sapiens; identical to SEQ ID NO: 847179

SEQ ID NO: 847186 - protein, 608 aa, Homo sapiens
RKWREGVKMAPSSKSERNSGAGSGGGGPGGAGGKRAAGRRREHVLKQLERVKISGQLSPRLFRKLPPRVCVSLKNIVDEDFLYAGHIFLGFSKCGRYVLSYTSSSGDDDFSFYIYHLYWWEFNVHSKLKLVRQVRLFQDEEIYSDLYLTVCEWPSDASKVIVFGFNTRSANGMLMNMMMMSDENHRDIYVSTVAVPPPGRCAACQDASRAHPGDPNAQCLRHGFMLHTKYQVVYPFPTFQPAFQLKKDQVVLLNTSYSLVACAVSVHSAGDRSFCQILYDHSTCPLAPASPPEPQSPELPPALPSFCPEAAPARSSGSPEPSPAIAKAKEFVADIFRRAKEAKGGVPEEARPALCPGPSGSRCRAHSEPLALCGETAPRDSPPASEAPASEPGYVNYTKLYYVLESGEGTEPEDELEDDKISLPFVVTDLRGRNLRPMRERTAVQGQYLTVEQLTLDFEYVINEVIRHDATWGHQFCSFSDYDIVILEVCPETNQVLINIGLLLLAFPSPTEEGQLRPKTYHTSLKVAWDLNTGIFETVSVGDLTEVKGQTSGSVWSSYRKSCVDMVMKWLVPESSGRYVNRMTNEALHKGCSLKVLADSERYTWIVL

SEQ ID NO: 847187 - protein, 594 aa, Homo sapiens
RKWREGVKMAPSSKSERNSGAGSGGGGPGGAGGKRAAGRRREHVLKQLERVKISGQLSPRLFRKLPPRVCVSLKNIVDEDFLYAGHIFLGFSKCGRYVLSYTSSSGDDDFSFYIYHLYWWEFNVHSKLKLVRQVRLFQDEEIYSDLYLTVCEWPSDASKVIVFGFNTRSANGMLMNMMMMSDENHRDIYVSTVAVPPPGRCAACQDASRAHPGDPNAQCLRHGFMLHTKYQVVYPFPTFQPAFQLKKDQVVLLNTSYSLVACAVSVHSAGDRSFCQILYDHSTCPLAPASPPEPQSPELPPALPSFCPEAAPARSSGSPEPSPAIAKAKEFVADIFRRAKEAKGGVPEEARPALCPGPSGSRCRAHSEPLALCGETAPRDSPPASEAPASEPGYVNYTKLYYVLESGEGTEPEDELEDDKISLPFVVTDLRGRNLRPMRERTAVQGQYLTVEQLTLDFEYVINEVIRHDATWGHQFCSFSDYDIVILEVCPETNQVLINIGLLLLAFPSPTEEGQLRPKTYHTSLKVAWDLNTGIFETVSVGDLTEVKGQTSGSVWSSYRKSCVDMVMKWLVPESSGRYVNRMTNEALHKGGAR

SEQ ID NO: 847188 - protein, 594 aa, Homo sapiens; identical to SEQ ID NO: 847187

SEQ ID NO: 847189 - protein, 552 aa, Homo sapiens
RKWREGVKMAPSSKSERNSGAGSGGGGPGGAGGKRAAGRRREHVLKQLERVKISGQLSPRLFRKLPPRVCVSLKNIVDEDFLYAGHIFLGFSKCGRYVLSYTSSSGDDDFSFYIYHLYWWEFNVHSKLKLVRQVRLFQDEEIYSDLYLTVCEWPSDASKVIVFGFNTRSANGMLMNMMMMSDENHRDIYVSTVAVPPPGRCAACQDASRAHPGDPNAQCLRHGFMLHTKYQVVYPFPTFQPAFQLKKDQVVLLNTSYSLVACAVSVHSAGDRSFCQILYDHSTCPLAPASPPEPQSPELPPALPSFCPEAAPARSSGSPEPSPAIAKAKEFVADIFRRAKEAKGGVPEEARPALCPGPSGSRCRAHSEPLALCGETAPRDSPPASEAPASEPGYVNYTKLYYVLESGEGTEPEDELEDDKISLPFVVTDLRGRNLRPMRERTAVQGQYLTVEQLTLDFEYVINEVIRHDATWGHQFCSFSDYDIVILEVCPETNQVLINIGLLLLAFPSPTEEGQLRPKTYHTSLKVAWDLNTGIFETVSVGDLTEVKGQTR

SEQ ID NO: 847190 - protein, 666 aa, Homo sapiens
RKWREGVKMAPSSKSERNSGAGSGGGGPGGAGGKRAAGRRREHVLKQLERVKISGQLSPRLFRKLPPRVCVSLKNIVDEDFLYAGHIFLGFSKCGRYVLSYTSSSGDDDFSFYIYHLYWWEFNVHSKLKLVRQVRLFQDEEIYSDLYLTVCEWPSDASKVIVFGFNTRSANGMLMNMMMMSDENHRDIYVSTVAVPPPGRCAACQDASRAHPGDPNAQCLRHGFMLHTKYQVVYPFPTFQPAFQLKKDQVVLLNTSYSLVACAVSVHSAGDRSFCQILYDHSTCPLAPASPPEPQSPELPPALPSFCPEAAPARSSGSPEPSPAIAKAKEFVADIFRRAKEAKGGVPEEARPALCPGPSGSRCRAHSEPLALCGETAPRDSPPASEAPASEPGYVNYTKLYYVLESGEGTEPEDELEDDKISLPFVVTDLRGRNLRPMRERTAVQGQYLTVEQLTLDFEYVINEVIRHDATWGHQFCSFSDYDIVILEVCPETNQVLINIGLLLLAFPSPTEEGQLRPKTYHTSLKVAWDLNTGIFETVSVGDLTEVKGQTSQVLINIGLLLLAFPSPTEEGQLRPKTYHTSLKVAWDLNTGIFETVSVGDLTEVKGQTSGSVWSSYRKSCVDMVMKWLVPESSGRYVNRMTNEALHKGCSLKVLADSERYTWIVL

SEQ ID NO: 847191 - protein, 247 aa, Homo sapiens
WAWAWPLVHLPFSRLQLWTAPPASEAPASEPGYVNYTKLYYVLESGEGTEPEDELEDDKISLPFVVTDLRGRNLRPMRERTAVQGQYLTVEQLTLDFEYVINEVIRHDATWGHQFCSFSDYDIVILEVCPETNQVLINIGLLLLAFPSPTEEGQLRPKTYHTSLKVAWDLNTGIFETVSVGDLTEVKGQTSGSVWSSYRKSCVDMVMKWLVPESSGRYVNRMTNEALHKGCSLKVLADSERYTWIVL

SEQ ID NO: 847192 - protein, 201 aa, Homo sapiens
PPLPASPELEDDKISLPFVVTDLRGRNLRPMRERTAVQGQYLTVEQLTLDFEYVINEVIRHDATWGHQFCSFSDYDIVILEVCPETNQVLINIGLLLLAFPSPTEEGQLRPKTYHTSLKVAWDLNTGIFETVSVGDLTEVKGQTSGSVWSSYRKSCVDMVMKWLVPESSGRYVNRMTNEALHKGCSLKVLADSERYTWIVL

SEQ ID NO: 847193 - protein, 576 aa, Homo sapiens
MSLSPISLGALEGRNVDLLQISGQLSPRLFRKLPPRVCVSLKNIVDEDFLYAGHIFLGFSKCGRYVLSYTSSSGDDDFSFYIYHLYWWEFNVHSKLKLVRQVRLFQDEEIYSDLYLTVCEWPSDASKVIVFGFNTRSANGMLMNMMMMSDENHRDIYVSTVAVPPPGRCAACQDASRAHPGDPNAQCLRHGFMLHTKYQVVYPFPTFQPAFQLKKDQVVLLNTSYSLVACAVSVHSAGDRSFCQILYDHSTCPLAPASPPEPQSPELPPALPSFCPEAAPARSSGSPEPSPAIAKAKEFVADIFRRAKEAKGGVPEEARPALCPGPSGSRCRAHSEPLALCGETAPRDSPPASEAPASEPGYVNYTKLYYVLESGEGTEPEDELEDDKISLPFVVTDLRGRNLRPMRERTAVQGQYLTVEQLTLDFEYVINEVIRHDATWGHQFCSFSDYDIVILEVCPETNQVLINIGLLLLAFPSPTEEGQLRPKTYHTSLKVAWDLNTGIFETVSVGDLTEVKGQTSGSVWSSYRKSCVDMVMKWLVPESSGRYVNRMTNEALHKGCSLKVLADSERYTWIVL

SEQ ID NO: 847194 - protein, 517 aa, Homo sapiens
RKWREGVKMAPSSKSERNSGAGSGGGGPGGAGGKRAAGRRREHVLKQLERVKISGQLSPRLFRKLPPRVCVSLKNIVDEDFLYAGHIFLGFSKCGRYVLSYTSSSGDDDFSFYIYHLYWWEFNVHSKLKLVRQVRLFQDEEIYSDLYLTVCEWPSDASKVIVFGFNTRSANGMLMNMMMMSDENHRDIYVSTVAVPPPGRCAACQDASRAHPGDPNAQCLRHGFMLHTKYQVVYPFPTFQPAFQLKKDQVVLLNTSYSLVACAVSVHSAGDRSFCQILYDHSTCPLAPASPPEPQSPELPPALPSFCPEAAPARSSGSPEPSPAIAKAKEFVADIFRRAKEAKGGVPEEARPALCPGPSGSRCRAHSEPLALCGETAPRDSPPASEAPASEPGYVNYTKLYYVLESGEGTEPEDELEDDKISLPFVVTDLRGRNLRPMRERTAVQGQYLTVEQLTLDFEYVINEVIRHDATWGHQFCSFSDYDIVILEVCPETNQVLINIGLLLLAFPSPTEEGQLR

SEQ ID NO: 847195 - protein, 517 aa, Homo sapiens; identical to SEQ ID NO: 847194

SEQ ID NO: 847196 - protein, 608 aa, Homo sapiens; identical to SEQ ID NO: 847186

SEQ ID NO: 847197 - protein, 477 aa, Homo sapiens
RKWREGVKMAPSSKSERNSGAGSGGGGPGGAGGKRAAGRRREHVLKQLERVKISGQLSPRLFRKLPPRVCVSLKNIVDEDFLYAGHIFLGFSKCGRYVLSYTSSSGDDDFSFYIYHLYWWEFNVHSKLKLVRQVRLFQDEEIYSDLYLTVCEWPSDASKVIVFGFNTRSANGMLMNMMMMSDENHRDIYVSTVAVPPPGRCAACQDASRAHPGDPNAQCLRHGFMLHTKYQVVYPFPTFQPAFQLKKDQVVLLNTSYSLVACAVSVHSAGDRSFCQILYDHSTCPLAPASPPEPQSPELPPALPSFCPEAAPARSSGSPEPSPAIAKAKEFVADIFRRAKEAKGGVPEEARPALCPGPSGSRCRAHSEPLALCGETAPRDSPPASEAPASEPGYVNYTKLYYVLESGEGTEPEDGERGAGIGSVWSSYRKSCVDMVMKWLVPESSGRYVNRMTNEALHKGCSLKVLADSERYTWIVL

SEQ ID NO: 847198 - protein, 127 aa, Homo sapiens
MSLSPISLGALEGRNVDLLQISGQLSPRLFRKLPPRVCVSLKNIVDEDFLYAGHIFLGFSKCGRYVLSYTSSSGDDDFSFYIYHLYWWEFNVHSKLKLVGRLQHQAGPSDGVVQQVTATSEPQVPWV

SEQ ID NO: 847199 - protein, 67 aa, Homo sapiens
WAGLAGGWFERRVIQRKAVTPRCGTGCKKAWWALGQTLVGTRGALGALTGGRGVQKGRMSKRECQRS

SEQ ID NO: 847200 - protein, 67 aa, Homo sapiens
LGRQPGMSLWLTFLNAQAHSFVFKYTCGWLEHRSTELSKIFSAFFREPWLVLVDVPAPSSTMNIFKN

SEQ ID NO: 847201 - protein, 1183 aa, Homo sapiens
MRMSVGLHLPLHVICDVARVCGTCYLGFHAAGSASCAQWDRTLEGRHTSLGRWPGGTKELCSAPGLLAHLPSPEALFPLPCPPTCREDDHSIIKSESWVGPRALKRLSKAGRGGYTPVIPALWEAQVRGSLSQEIKTILANMVKPRLYKNRKMSWVWWRAPVVPATQEAEAGESLETQEVEVAVSRDCATALQPGNRVRLCLKKKKKKKKDLANKHEEESESLTRPPRFGQATAKVSCPRSHGQLKLGNGRNSARLLFPCFCDEMLPSGSRSPGELLPLLVQFPAMGNSYGAMTCLTRWLRRGQKGLDDVSRAANCTSSCQLCKRICPSALGVWRGWENPGHLISNPVPRWVPSTPMPWGPGQWAAGGCVLGTSPMVWFGDPFQEPRRGTHRSRARISMSRSEEHRLWGQPDLCLRLAVVTRGSHITVGLSRPCLCRVDDAGSTCVLWWVHRGCAAGRLALTPLLQARELQSPVSCPHEPSAAGPEPQHALGTIPSPLPWIWVSVGLCRSGKATSSRSRSFSSSSSRSSSRMVSRRSVSRLLQALLLPLQALQQLLGQTEAQAWLLSELHGTQRPGAPSLPKKRHGTGLQALSWPETSLAKRKTPTLTCWALSWHCPCSRSLCSCSSTRARWASASSRLPRSSSRSWSRLSSCFSRARCLACRDYAGTDKQGGCETHRARPSHVELRRLQHLLPLGCYPPGVCVCVYGNAGHMRGRVGVGGSWQQADAHRTWSRPGSQLEEPRPLERRWLALGVSPPLPSSHTQTPLGEEFWELSFSSPRVSSVTSSHVAEAHISYHPLNGKQEELTLDCSESWLHLSLAVWPWATSLTSLNKAVSSFVKWGRQEYLPPVAVARSKHQRLRRLKPGSQQTPDYMAAVTVCKAQRTAPTWGEKGFPYPGPMSDPGDSQLNSWLLAELLRVQTQPRQPPDLPLSLGNRSPTPSTTLLRTPVRPHCPEHSYAPGPGSPSACPVLPLADGLIACHGRPAQRPPPPRSHSGFPWQMWPSLPAPLSHLAGECGYTCSSLPVGRSSRVRPHWAVSVPGSLFPQCLVQGRLSVKVSQPPHLEASQGADAQYEMIPHSLTVEPSFPAAYIADAQASEGPGLTSWWRTMLSTRAFSLSSSVLAQQTCWPAPSSRPTNSCTCASNCCTCSSSCCTCLSAAALRSPSSCSCWAFASAALSGHGMG

SEQ ID NO: 847202 - protein, 1132 aa, Homo sapiens
MLPSGSRSPGELLPLLVQFPAMGNSYGAMTCLTRWLRRGQKGLDDVSRAANCTSSCQLCKRICPSALGVWRGWENPGHLISNPVPRWVPSTPMPWGPGQWAAGGCVLGTSPMVWFGDPFQEPRRGTHRSRARISMSRSEEHRLWGQPDLCLRLAVVTRGSHITVGLSRPCLCRVDDARSTCVLWWVHRGCAAGRLALTPLLQARELQSPVSCPHEPSAAGPEPQHALGTIPSPLPWIWVSVGLCRSGKATSSRSRSFSSSSSRSSSRMVSRRSVSRLLQALLLPLQALQQLLGQTEAQAWLLSELHGTQRPGAPSLPKKRHGTGLQALSWPETSLAKRKTPTLTCWALSWHCPCSRSLCSCSSTRARWASASSRLPRSSSRSWSRLSSCFSRARCLACRDYAGTDKQGGCETHRARPSHVELRRLQHLLPLGCYPPGVCVCVYGNAGHMRGRVGVGGSWQQADAHRTWSRPGSQLEEPRPLERRWLALGVSPPLPSSHTQTPLGEEFWELSFSSPRVSSVTSSHVAEAHISYHPLNGKQEELTLDCSESWLHLSLAVWPWATSLTSLNKAVSSFVKWGRQEYLPPVAVARSKHQRLRRLKPGSQQTPDDMAAVTVCKAQRTAPTWGEKGFPYPGPMSDPGDSQLNSWLLAELLRVQTQPRQPPDLPLSLGNRSPTPSTTLLRTPVRPHCPEHSYAPGPGSPSACPVLPLADGLIACHGRPAQRPPPPRSHSGFPWQMWPSLPAPLSHLAGECGYTCSSLPVGRSSRVRPHWAVSVPGSLFPQCLVQGRLSVKVSQPPHLEASQGADAQYEMIPHSLTVEPSFPAAYIADAQASEGPGLTSWWRTMLSTRAFSLSSSVLAQQTCWPAPSSRPTNSCTCASNCCTCSSSCCTCLSAAALRSPSSCSCWAFASAALSGHGMGWAGERCTTSDLGRELTSHLWASESSATKWGSRPHLRWVWKIEGAFSVGGGNPVWSSPIVWLVRPTLLWLVPFNFALDAQGTEMDDAHPATPLAVRCGMGAYDGAPYPQPVWTPAAVSVLSPGWPSLSLGHLFLWQPRERPFRGSHGPGRRPSCPVCPVEWRQPIACRGAACGHGRSSREAGGSGWALTHPASHGLAAMCLHLSGPWCRPWRQL

SEQ ID NO: 847203 - protein, 1236 aa, Homo sapiens
MVSRRSVSRLLQALLLPLQALQQLLGQTEAQAWLLSELHGTQRPGAPSLPKKRHGTGLQALSWPETSLAKRKTPTLTCWALSWHCPCSRSLCSCSSTRARWASASSRLPRSSSRSWSRLSSCFSRARCLACRDYAGTDKQGGCETHRARPSHVELRRLQHLLPLGCYPPGVCVCVYGNAGHMRGRVGVGGSWQQADAHRTWSRPGSQLEEPRPLERRWLALGVSPPLPSSHTQTPLGEEFWELSFSSPRVSSVTSSHVAEAHISYHPLNGKQEELTLDCSESWLHLSLAVWPWATSLTSLNKAVSSFVKWGRQEYLPPVAVARSKHQRLRRLKPGSQQTPDDMAAVTVCKAQRTAPTWGEKGFPYPGPMSDPGDSQLNSWLLAELLRVQTQPRQPPDLPLSLGNRSPTPSTTLLRTPVRPHCPEHSYAPGPGSPSACPVLPLADGLIACHGRPAQRPPPPRSHSGFPWQMWPSLPAPLSHLAGECGYTCSSLPVGRSSRVRPHWAVSVPGSLFPQCLVQGRLSVKVSQPPHLEASQGADAQYEMIPHSLTVEPSFPAAYIADAQASEGPGLTSWWRTMLSTRAFSLSSSVLAQQTCWPAPSSRPTNSCTCASNCCTCSSSCCTCLSAAALRSPSSCSCWAFASAALSGHGMGWAGERCTTSDLGRELTSHLWASESSATKWGSRPHLRWVWKIEGAFSVGGGNPVWSSPIVWLVRPTLLWLVPFNFALDAQGTEMDDAHPATPLAVRCGMGAYDGAPYPQPVWTPAAVSVLSPGWPSLSLGHLFLWQPRERPFRGSHGPGRRPSCPVCPVEWRQPIACRGAACGHGRSSREAGGSGWPLPTLLLMGWLPCVYTSLGLGVVHGGNCDEAQKGQIPQASHQWALAIFWCQELCLYMAFATTREAALLGWKCQGNNSLEVALNELTVQVDTYLGSLTDRWTSLGKRPSPAPGGPSGTEITVSPPDEHPLPCCPPFPASCLCPSLGSSTQTTCPGSPVSQTSMQRLWQSPWAPGVWPLGHRPVSSCCLSCSHSDRHCSSSSACRRRAPCSCFSACSSLPACFLRPSFCPSASSSWALRASTCLLRRVRSFLCSAAQRPTVAAGSGLSPMLSCTSCWNWPKDEGRFWLCHRLMTTLPTFCRLPWTLAHASQGTRAVSMVWEWTLLVFLKVVAGNCREALTGMLSGSWQVWGKPSTGEEGLINLVVRYSGLLAGSPLVVGLEVGVSLWFAPFCVQKKTRESR

SEQ ID NO: 847204 - protein, 1132 aa, Homo sapiens
MLPSGSRSPGELLPLLVQFPAMGNSYGAMTCLTRWLRRGQKGLDDVSRAANCTSSCQLCKRICPSALGVWRGWENPGHLISNPVPRWVPSTPMPWGPGQWAAGGCVLGTSPMVWFGDPFQEPRRGTHRSRARISMSRSEEHRLWGQPDLCLRLAVVTRGSHITVGLSRPCLCRVDDAGSTCVLWWVHRGCAAGRLALTPLLQARELQSPVSCPHEPSAAGPEPQHALGTIPSPLPWIWVSVGLCRSGKATSSRSRSFSSSSSRSSSRMVSRRSVSRLLQALLLPLQALQQLLGQTEAQAWLLSELHGTQRPGAPSLPKKRHGTGLQALSWPETSLAKRKTPTLTCWALSWHCPCSRSLCSCSSTRARWASASSRLPRSSSRSWSRLSSCFSRARCLACRDYAGTDKQGGCETHRARPSHVELRRLQHLLPLGCYPPGVCVCVYGNAGHMRGRVGVGGSWQQADAHRTWSRPGSQLEEPRPLERRWLALGVSPPLPSSHTQTPLGEEFWELSFSSPRVSSVTSSHVAEAHISYHPLNGKQEELTLDCSESWLHLSLAVWPWATSLTSLNKAVSSFVKWGCQEYLPPVAVARSKHQRLRRLKPGSQQTPDDMAAVTVCKAQRTAPTWGEKGFPYPGPMSDPGDSQLNSWLLAELLRVQTQPRQPPDLPLSLGNRSPTPSTTLLRTPVRPHCPEHSYAPGPGSPSACPVLPLADGLIACHGRPAQRPPPPRSHSGFPWQMWPSLPAPLSHLAGECGYTCSSLPVGRSSRVRPHWAVSVPGSLFPQCLVQGRLSVKVSQPPHLEASQGADAQYEMIPHSLTVEPSFPAAYIADAQASEGPGLTSWWRTMLSTRAFSLSSSVLAQQTCWPAPSSRPTNSCTCASNCCTCSSSCCTCLSAAALRSPSSCSCWAFASAALSGHGMGWAGERCTTSDLGRELTSHLWASESSATKWGSRPHLRWVWKIEGAFSVGGGNPVWSSPIVWLVRPTLLWLVPFNFALDAQGTEMDDAHPATPLAVRCGMGAYDGAPYPQPVWTPAAVSVLSPGWPSLSLGHLFLWQPRERPFRGSHGPGRRPSCPVCPVEWRQPIACRGAACGHGRSSREAGGSGWALTHPASHGLAAMCLHLSGPWCRPWRQL

SEQ ID NO: 847205 - protein, 90 aa, Homo sapiens
QVDLFKRRVVRRLASLKTRRCRLNRAAQGLPDPGAETCAVCLDYFCNKQWLRVLPCKHEFHRDCVDPWLMLQQTCPLCKFNVLGNRYSDD

SEQ ID NO: 847206 - protein, 348 aa, Homo sapiens
MRKMSEEEFYLFKNISSVGPWDGPQYHIAPVWAFYLQAAFMGTVFLIGFPLNAMVLVATLRYKKLRQPLNYILVNVSFGGFLLCIFSVFPVFVASCNGYFVFGRHVCALEGFLGTVAGLVTGWSLAFLAFERYIVICKPFGNFRFSSKHALTVVLATWTIGIGVSIPPFFGWSWFIPEGLQCSCGPDWYTVGTKYRSESYTWFLFIFCFIVPLSLICFSYTQLLRALKAVAAQQQESATTQKAEREVSRMVVVMVGSFCVCYVPYAAFAMYMVNNRNHGLDLRLVTIPSFFSKSACIYNPIIYCFMNKQFQACIMKMVCGKAMTDESDTCSSQKTEVSTVSSTQVGPN

SEQ ID NO: 847207 - protein, 526 aa, Homo sapiens
MNALGLGQYKNSEKSVCRRHRNQCHSVTEATIIVKNTSAVMDSSVIQRKKVAVIGGGLVGSLQACFLAKRNFQIDVYEAREDTRVATFTRGRSINLALSHRGRQALKAVGLEDQIVSQGIPMRARMIHSLSGKKSAIPYGTKSQYILSVSRENLNKDLLTAAEKYPNVKMHFNHRLLKCNPEEGMITVLGSDKVPKDVTCDLIVGCDGAYSTVRSHLMKKPRFDYSQQYIPHGYMELTIPPKNGDYAMEPNYLHIWPRNTFMMIALPNMNKSFTCTLFMPFEEFEKLLTSNDVVDFFQKYFPDAIPLIGEKLLVQDFFLLPAQPMISVKCSSFHFKSHCVLLGDAAHAIVPFFGQGMNAGFEDCLVFDELMDKFSNDLSLCLPVFSRLRIPDDHAISDLSMYNYIEMRAHVNSSWFIFQKNMERFLHAIMPSTFIPLYTMVTFSRIRYHEAVQRWHWQKKVINKGLFFLGSLIAISSTYLLIHYMSPRSFLRLRRPWNWIAHFRNTTCFPAKAVDSLEQISNLISR

SEQ ID NO: 847208 - protein, 526 aa, Homo sapiens; identical to SEQ ID NO: 847207

SEQ ID NO: 847209 - protein, 526 aa, Homo sapiens; identical to SEQ ID NO: 847207

SEQ ID NO: 847210 - protein, 451 aa, Homo sapiens
MNALGLGQYKNSEKSVCRRHRNQCHSVTEATIIVKNTSAVMDSSVIQRKKVAVIGGGLIVSQGIPMRARMIHSLSGKKSAIPYGTKSQYILSVSRENLNKDLLTAAEKYPNVKMQSDKVPKDVTCDLIVGCDGAYSTVRSHLMKKPRFDYSQQYIPHGYMELTIPPKNGDYAMEPNYLHIWPRNTFMMIALPNMNKSFTCTLFMPFEEFEKLLTSNDVVDFFQKYFPDAIPLIGEKLLVQDFFLLPAQPMISVKCSSFHFKSHCVLLGDAAHAIVPFFGQGMNAGFEDCLVFDELMDKFSNDLSLCLPVFSRLRIPDDHAISDLSMYNYIEMRAHVNSSWFIFQKNMERFLHAIMPSTFIPLYTMVTFSRIRYHEAVQRWHWQKKVINKGLFFLGSLIAISSTYLLIHYMSPRSFLRLRRPWNWIAHFRNTTCFPAKAVDSLEQISNLISR

SEQ ID NO: 847211 - protein, 526 aa, Homo sapiens; identical to SEQ ID NO: 847207

SEQ ID NO: 847212 - protein, 526 aa, Homo sapiens; identical to SEQ ID NO: 847207

SEQ ID NO: 847213 - protein, 271 aa, Homo sapiens [sequence omitted]

SEQ ID NO: 847214 - protein, 513 aa, Homo sapiens
MNALGLGQYKNSEKSVCRRHRNQCHSVTEATIIVKNTSAVMDSSVIQRKKVAVIGGGLVGSLQACFLAKRNFQIDVYEAREDTRVATFTRGRSINLALSHRGRQALKAVGLEDQIVSQGIPMRARMIHSLSGKKSAIPYGTKSQYILSVSRENLNKDLLTAAEKYPNVKMHFNHRLLKCNPEEGMITVLGSDKVPKDVTCDLIVGCDGAYSTVRSHLMKKPRFDYSQQYIPHGYMELTIPPKNGDYAMEPNYLHIWPRNTFMMIALPNMNKSFTCTLFMPFEEFEKLLTSNDVVDFFQKYFPDAIPLIGEKLLVQDFFLLPAQPMISVKCSSFHFKSHCVLLGDAAHAIVPFFGQGMNAGFEDCLVFDELMDKFSNDLSLCLPVFSRLRIPDDHAISDLSMYNYIEKNMERFLHAIMPSTFIPLYTMVTFSRIRYHEAVQRWHWQKKVINKGLFFLGSLIAISSTYLLIHYMSPRSFLRLRRPWNWIAHFRNTTCFPAKAVDSLEQISNLISR

SEQ ID NO: 847215 - protein, 267 aa, Homo sapiens
MNALGLGQYKNSEKSVCRRHRNQCHSVTEATIIVKNTSAVMDSSVIQRKKVAVIGGGLVGSLQACFLAKRNFQIDVYEAREDTRVATFTRGRSINLALSHRGRQALKAVGLEDQIVSQGIPMRARMIHSLSGKKSAIPYGTKSQYILSVSRENLNKDLLTAAEKYPNVKMHFNHRLLKCNPEEGMITVLGSDKVPKDVTCDLIVGCDGAYSTVRSHLMKKPRFDYSQQYIPHGYMELTIPPKNGDYAMEPNYLHIWPRNTFITTAQP

SEQ ID NO: 847216 - protein, 513 aa, Homo sapiens; identical to SEQ ID NO: 847214

SEQ ID NO: 847217 - protein, 470 aa, Homo sapiens
MNALGLGQYKNSEKSVCRRHRNQCHSVTEATIIVKNTSAVMDSSVIQRKKVAVIGGGLIVSQGIPMRARMIHSLSGKKSAIPYGTKSQYILSVSRENLNKDLLTAAEKYPNVKMHFNHRLLKCNPEEGMITVLGSDKVPKDVTCDLIVGCDGAYSTVRSHLMKKPRFDYSQQYIPHGYMELTIPPKNGDYAMEPNYLHIWPRNTFMMIALPNMNKSFTCTLFMPFEEFEKLLTSNDVVDFFQKYFPDAIPLIGEKLLVQDFFLLPAQPMISVKCSSFHFKSHCVLLGDAAHAIVPFFGQGMNAGFEDCLVFDELMDKFSNDLSLCLPVFSRLRIPDDHAISDLSMYNYIEMRAHVNSSWFIFQKNMERFLHAIMPSTFIPLYTMVTFSRIRYHEAVQRWHWQKKVINKGLFFLGSLIAISSTYLLIHYMSPRSFLRLRRPWNWIAHFRNTTCFPAKAVDSLEQISNLISR

SEQ ID NO: 847218 - protein, 507 aa, Homo sapiens
MNALGLGQYKNSEKSVCRRHRNQCHSVTEATIIVKNTSAVMDSSVIQRKKVAVIGGGLVGSLQACFLAKRNFQIDVYEAREDTRVATFTRGRSINLALSHRGRQALKAVGLEDQIVSQGIPMRARMIHSLSGKKSAIPYGTKSQYILSVSRENLNKDLLTAAEKYPNVKMQSDKVPKDVTCDLIVGCDGAYSTVRSHLMKKPRFDYSQQYIPHGYMELTIPPKNGDYAMEPNYLHIWPRNTFMMIALPNMNKSFTCTLFMPFEEFEKLLTSNDVVDFFQKYFPDAIPLIGEKLLVQDFFLLPAQPMISVKCSSFHFKSHCVLLGDAAHAIVPFFGQGMNAGFEDCLVFDELMDKFSNDLSLCLPVFSRLRIPDDHAISDLSMYNYIEMRAHVNSSWFIFQKNMERFLHAIMPSTFIPLYTMVTFSRIRYHEAVQRWHWQKKVINKGLFFLGSLIAISSTYLLIHYMSPRSFLRLRRPWNWIAHFRNTTCFPAKAVDSLEQISNLISR

SEQ ID NO: 847219 - protein, 405 aa, Homo sapiens
MRARMIHSLSGKKSAIPYGTKSQYILSVSRENLNKDLLTAAEKYPNVKMHFNHRLLKCNPEEGMITVLGSDKVPKDVTCDLIVGCDGAYSTVRSHLMKKPRFDYSQQYIPHGYMELTIPPKNGDYAMEPNYLHIWPRNTFMMIALPNMNKSFTCTLFMPFEEFEKLLTSNDVVDFFQKYFPDAIPLIGEKLLVQDFFLLPAQPMISVKCSSFHFKSHCVLLGDAAHAIVPFFGQGMNAGFEDCLVFDELMDKFSNDLSLCLPVFSRLRIPDDHAISDLSMYNYIEMRAHVNSSWFIFQKNMERFLHAIMPSTFIPLYTMVTFSRIRYHEAVQRWHWQKKVINKGLFFLGSLIAISSTYLLIHYMSPRSFLRLRRPWNWIAHFRNTTCFPAKAVDSLEQISNLISR

SEQ ID NO: 847220 - protein, 526 aa, Homo sapiens; identical to SEQ ID NO: 847207

SEQ ID NO: 847221 - protein, 165 aa, Homo sapiens
MNALGLGQYKNSEKSVCRRHRNQCHSVTEATIIVKNTSAVMDSSVIQRKKVAVIGGGLVGSLQACFLAKRNFQIDVYEAREDTRVATFTRGRSINLALSHRGRQALKAVGLEDQIVSQGIPMRARMIHSLSGKKSAIPYGTKSQYILSVSRENLNKDLLTGKSNV

SEQ ID NO: 847222 - protein, 722 aa, Homo sapiens
ATMAQGLEVALTDLQSSRNNVRHHTEEITVDHLLVRRGQAFNLTLYFRNRSFQPGLDNIIFVVETGPLPDLALGTRAVFSLARHHSPSPWIAWLETNGATSTEVSLCAPPTAAVGRYLLKIHIDSFQGSVTAYQLGEFILLFNPWCPEDAVYLDSEPQRQEYVMNDYGFIYQGSKNWIRPCPWNYGQFEDKIIDICLKLLDKSLHFQTDPATDCALRGSPVYVSRVVCAMINSNDDNGVLNGNWSENYTDGANPAEWTGSVAILKQWNATGCQPVRYGQCWVFAAVMCTVMRCLGIPTRVITNFDSGHDTDGNLIIDEYYDNTGRILGNKKKDTIWNFHVWNECWMARKDLPPAYGGWQVLDATPQEMSNGVYCCGPASVRAIKEGEVDLNYDTPFVFSMVNADCMSWLVQGGKEQKLHQDTSSVGNFISTKSIQSDERDDITENYKYEEGSLQERQVFLKALQKLKARSFHGSQRGAELQPSRPTSLSQDSPRSLHTPSLRPSDVVQVSLKFKLLDPPNMGQDICFVLLALNMSSQFKDLKVNLSAQSLLHDGSPLSPFWQDTAFITLSPKEAKTYPCKISYSQYSQYLSTDKLIRISALGEEKSSPEKILVNKIITLSYPSITINVLGAAVVNQPLSIQVIFSNPLSEQVEDCVLTVEGSGLFKKQQKVFLGVLKPQHQASIILETVPFKSGQRQIQANMRSNKFKDIKGYRNVYVDFAL

SEQ ID NO: 847223 - protein, 640 aa, Homo sapiens
ATMAQGLEVALTDLQSSRNNVRHHTEEITVDHLLVRRGQAFNLTLYFRNRSFQPGLDNIIFVVETEDAVYLDSEPQRQEYVMNDYGFIYQGSKNWIRPCPWNYGQFEDKIIDICLKLLDKSLHFQTDPATDCALRGSPVYVSRVVCAMINSNDDNGVLNGNWSENYTDGANPAEWTGSVAILKQWNATGCQPVRYGQCWVFAAVMCTVMRCLGIPTRVITNFDSGHDTDGNLIIDEYYDNTGRILGNKKKDTIWNFHVWNECWMARKDLPPAYGGWQVLDATPQEMSNGVYCCGPASVRAIKEGEVDLNYDTPFVFSMVNADCMSWLVQGGKEQKLHQDTSSVGNFISTKSIQSDERDDITENYKYEEGSLQERQVFLKALQKLKARSFHGSQRGAELQPSRPTSLSQDSPRSLHTPSLRPSDVVQVSLKFKLLDPPNMGQDICFVLLALNMSSQFKDLKVNLSAQSLLHDGSPLSPFWQDTAFITLSPKEAKTYPCKISYSQYSQYLSTDKLIRISALGEEKSSPEKILVNKIITLSYPSITINVLGAAVVNQPLSIQVIFSNPLSEQVEDCVLTVEGSGLFKKQQKVFLGVLKPQHQASIILETVPFKSGQRQIQANMRSNKFKDIKGYRNVYVDFAL

SEQ ID NO: 847224 - protein, 377 aa, Homo sapiens
MARKDLPPAYGGWQVLDATPQEMSNGVYCCGPASVRAIKEGEVDLNYDTPFVFSMVNADCMSWLVQGGKEQKLHQDTSSVGNFISTKSIQSDERDDITENYKYEEGSLQERQVFLKALQKLKARSFHGSQRGAELQPSRPTSLSQDSPRSLHTPSLRPSDVVQVSLKFKLLDPPNMGQDICFVLLALNMSSQFKDLKVNLSAQSLLHDGSPLSPFWQDTAFITLSPKEAKTYPCKISYSQYSQYLSTDKLIRISALGEEKSSPEKILVNKIITLSYPSITINVLGAAVVNQPLSIQVIFSNPLSEQVEDCVLTVEGSGLFKKQQKVFLGVLKPQHQASIILETVPFKSGQRQIQANMRSNKFKDIKGYRNVYVDFAL

SEQ ID NO: 847225 - protein, 453 aa, Homo sapiens
MGSVLGLCSMASWIPCLCGSAPCLLCRCCPSGNNSTVTRLIYALFLLVGVCVACVMLIPGMEEQLNKIPGFCENEKGVVPCNILVGYKAVYRLCFGLAMFYLLLSLLMIKVKSSSDPRAAVHNGFWFFKFAAAIAIIIGAFFIPEGTFTTVWFYVGMAGAFCFILIQLVLLIDFAHSWNESWVEKMEEGNSRCWYAALLSATALNYLLSLVAIVLFFVYYTHPASCSENKAFISVNMLLCVGASVMSILPKIQESQPRSGLLQSSVITVYTMYLTWSAMTNEPETNCNPSLLSIIGYNTTSTVPKEGQSVQWWHAQGIIGLILFLLCVFYSSIRTSNNSQVNKLTLTSDESTLIEDGGARSDGSLEDGDDVHRAVDNERDGVTYSYSFFHFMLFLASLYIMMTLTNWYRYEPSREMKSQWTAVWVKISSSWIGIVLYVWTLVAPLVLTNRDFD

SEQ ID NO: 847226 - protein, 453 aa, Homo sapiens; identical to SEQ ID NO: 847225

SEQ ID NO: 847227 - protein, 453 aa, Homo sapiens; identical to SEQ ID NO: 847225

SEQ ID NO: 847228 - protein, 453 aa, Homo sapiens; identical to SEQ ID NO: 847225

SEQ ID NO: 847229 - protein, 430 aa, Homo sapiens
MGSVLGLCSMASWIPCLCGSAPCLLCRCCPSGNNSTVTRLIYALFLLVGVCVACVMLIPGMEEQLNKIPGFCENEKGVVPCNILVGYKAVYRLCFGLAMFYLLLSLLMIKVKSSSDPRAAVHNGFWFFKFAAAIAIIIGAFFIPEGTFTTVWFYVGMAGAFCFILIQLVLLIDFAHSWNESWVEKMEEGNSRCWYAALLSATALNYLLSLVAIVLFFVYYTHPASCSENKAFISVNMLLCVGASVMSILPKIQESQPRSGLLQSSVITVYTMYLTWSAMTNEPETNCNPSLLSIIGYNTTSTVPKEGQSVQWWHAQGIIGLILFLLCVFYSSIRTSNNSQVNKLTLTSDESTLIEDGGARSDGSLEDGDDVHRAVDNERDGVTYSYSFFHFMLFLASLYIMMTLTNWYRYEPSREMKSQWTAVLVETTPL

SEQ ID NO: 847230 - protein, 64 aa, Homo sapiens
IEDGGARSDGSLEDGDDVHRAVDNERDGVTYSYSFFHFMLFLASLYIMMTLTNWYRVFIFHENS

SEQ ID NO: 847231 - protein, 453 aa, Homo sapiens; identical to SEQ ID NO: 847225

SEQ ID NO: 847232 - protein, 453 aa, Homo sapiens; identical to SEQ ID NO: 847225

SEQ ID NO: 847233 - protein, 74 aa, Homo sapiens
PISGHFIAEHYMFLKGHETYIMMTLTNWYRYEPSREMKSQWTAVWVKISSSWIGIVLYVWTLVAPLVLTNRDFD

SEQ ID NO: 847234 - protein, 453 aa, Homo sapiens; identical to SEQ ID NO: 847225

SEQ ID NO: 847235 - protein, 413 aa, Homo sapiens
MGSVLGLCSMASWIPCLCGSAPCLLCRCCPSGNNSTVTRLIYALFLLVGVCVACVMLIPGMEEQLNKIPGFCENEKGVVPCNILVGYKAVYRLCFGLAMFYLLLSLLMIKVKSSSDPRAAVHNGFWFFKFAAAIAIIIGAFFIPEGTFTTVWFYVGMAGAFCFILIQLVLLIDFAHSWNESWVEKMEEGNSRCWYAALLSATALNYLLSLVAIVLFFVYYTHPASCSENKAFISVNMLLCVGASVMSILPKIQESQPRSGLLQSSVITVYTMYLTWSAMTNEPETNCNPSLLSIIGYNTTSTVPKEGQSVQWWHAQGIIGLILFLLCVFYSSIRTSNNSQVNKLTLTSDESTLIEDGGARSDGSLEDGDDVHRAVDNERDGVTYSYSFFHFMLFLASLYIMMTLTNWYRGQNF

SEQ ID NO: 847236 - protein, 119 aa, Homo sapiens
MHLINSLTLRPWGLRALADHGCPGARRPPPLGSLPRFRWTPTGNTPGPSSRPLLAPIPPPPARSVPLLQPRHQLGREELAPTQTYWFDEGRAHGSATGPGHPVLVSRGSPPGLSGGWVL

SEQ ID NO: 847237 - protein, 134 aa, Homo sapiens
MIFSMLRKLPKVTCRDVLPEIRAICIEEIGCWMQSYSTSFLTDSYLKYIGWTLHDKHREVRVKCVKALKGLYGNRDLTARLELFTGRFKDWMVSMIVDREYSVAVEAVRLLILILKNMEGVLMDVDCESVYPIV

SEQ ID NO: 847238 - protein, 117 aa, Homo sapiens
RFFSERPQQGQKGGGRPPSWSGVYSEPWCLAVSERWCLAVSERWCLAVSDRWCLAVSDRWCLARATLSCFGCAMPMYQVKPYHRVCAPLRVEPTCMYWLPNMHGRSGGPALGTGHLQ

SEQ ID NO: 847239 - protein, 134 aa, Homo sapiens; identical to SEQ ID NO: 847237

SEQ ID NO: 847240 - protein, 116 aa, Homo sapiens
MIFSMLRKLPKVTCRDVLPEIRAICIEEIGCWMQSYSTSFLTDSYLKYIGWTLHDKHREVRVKCVKALKGLYGNRDLTARLELFTGRFKDWMVSMIVDREYSVAVEAVRLLILILK

SEQ ID NO: 847241 - protein, 119 aa, Homo sapiens; identical to SEQ ID NO: 847236

SEQ ID NO: 847242 - protein, 179 aa, Homo sapiens
MIFSMLRKLPKVTCRDVLPEIRAICIEEIGCWMQSYSTSFLTDSYLKYIGWTLHDKHREVRVKCVKALKGLYGNRDLTARLELFTGRFKDWMVSMIVDREYSVAVEAVRLLILILKLFYPECEIRTMGGREQRQSPGAQRTFFQLLLSFFVESKVTYTEITLAVVHRTYKWAGVGGSRL

SEQ ID NO: 847243 - protein, 134 aa, Homo sapiens; identical to SEQ ID NO: 847237

SEQ ID NO: 847244 - protein, 119 aa, Homo sapiens; identical to SEQ ID NO: 847236

SEQ ID NO: 847245 - protein, 246 aa, Homo sapiens
MAWQVSLLELEDRLQCPICLEVFKESLMLQCGHSYCKGCLVSLSYHLDTKVRCPMCWQVVDGSSSLPNVSLAWVIEALRLPGDPEPKVCVHHRNPLSLFCEKDQELICGLCGLLGSHQHHPVTPVSTVCSRMKEELAALFSELKQEQKKVDELIAKLVKNRTRIVNESDVFSWVIRREFQELRHPVDEEKARCLEGIGGHTRGLVASLDMQLEQAQGTRERLAQAECVLEQFGNEDHHEFIWVSGQ

SEQ ID NO: 847246 - protein, 174 aa, Homo sapiens
MAWQVVDGSSSLPNVSLAWVIEALRLPGDPEPKVCVHHRNPLSLFCEKDQELICGLCGLLGSHQHHPVTPVSTVCSRMKEELAALFSELKQEQKKVDELIAKLVSEFQELRHPVDEEKARCLEGIGGHTRGLVASLDMQLEQAQGTRERLAQAECVLEQFGNEDHHEFIWVSGQ

SEQ ID NO: 847247 - protein, 134 aa, Homo sapiens; identical to SEQ ID NO: 847237

SEQ ID NO: 847248 - protein, 134 aa, Homo sapiens; identical to SEQ ID NO: 847237

SEQ ID NO: 847249 - protein, 205 aa, Homo sapiens
MIFSMLRKLPKVTCRDVLPEIRAICIEEIGCWMQSYSTSFLTDSYLKYIGWTLHDKHREVRVKCVKALKGLYGNRDLTARLELFTGRFKDWMVSMIVDREYSVAVEAVRLLILILKLFYPECEIRTMGGREQRQSPGAQRTFFQLLLSFFVESKLHDHAAYLVDNLWDCAGTQLKDWEGLTSLLLEKDQSTCHMEPGPGTFHLLG

SEQ ID NO: 847250 - protein, 50 aa, Homo sapiens
MGGREQRQSPGAQRTFFQLLLSFFVESKLHNHAANLVENPGVGGGAALES

SEQ ID NO: 847251 - protein, 117 aa, Homo sapiens; identical to SEQ ID NO: 847238

SEQ ID NO: 847252 - protein, 134 aa, Homo sapiens; identical to SEQ ID NO: 847237

SEQ ID NO: 847253 - protein, 117 aa, Homo sapiens
VFFPNARSRVRREVVALRRGLACIPSLGVWRFPSVGVWRFPSVGVWRFPTVGVWRFPTVGVWHAPPSLALVAPCRCTRLRLKKKKKGWRPAWVTDQDPDSGIKTKNRMWLVFCNQDV

SEQ ID NO: 847254 - protein, 117 aa, Homo sapiens; identical to SEQ ID NO: 847238

SEQ ID NO: 847255 - protein, 85 aa, Homo sapiens
VFFPNARSRVRREVVALRRGLACIPSLGVWRFPSVGVWRFPSVGVWRFPTVGVWRFPTVGVWHAPPSLALVAPCRCTRQEDKKMI

SEQ ID NO: 847256 - protein, 134 aa, Homo sapiens; identical to SEQ ID NO: 847237

SEQ ID NO: 847257 - protein, 134 aa, Homo sapiens; identical to SEQ ID NO: 847237

SEQ ID NO: 847258 - protein, 116 aa, Homo sapiens; identical to SEQ ID NO: 847240

SEQ ID NO: 847259 - protein, 119 aa, Homo sapiens; identical to SEQ ID NO: 847236

SEQ ID NO: 847260 - protein, 134 aa, Homo sapiens; identical to SEQ ID NO: 847237

SEQ ID NO: 847261 - protein, 134 aa, Homo sapiens; identical to SEQ ID NO: 847237

SEQ ID NO: 847262 - protein, 115 aa, Homo sapiens
MKEELAALFSELKQEQKKVDELIAKLVKNRTRIVNESDVFSWVIRREFQELRHPVDEEKARCLEGIGGHTRGLVASLDMQLEQAQGTRERLAQAECVLEQFGNEDHHEFIWVSGQ

SEQ ID NO: 847263 - protein, 183 aa, Homo sapiens [sequence omitted]

SEQ ID NO: 847264 - protein, 134 aa, Homo sapiens; identical to SEQ ID NO: 847237

SEQ ID NO: 847265 - protein, 134 aa, Homo sapiens; identical to SEQ ID NO: 847237

SEQ ID NO: 847266 - protein, 134 aa, Homo sapiens; identical to SEQ ID NO: 847237

SEQ ID NO: 847267 - protein, 205 aa, Homo sapiens; identical to SEQ ID NO: 847249

SEQ ID NO: 847268 - protein, 147 aa, Homo sapiens
YPYHTVLRRNRRAETGVSLSRRSTQRLEELKLVYPYHGVVRRNRRAEDHRCNDGPQLNPHAPPSPAPRPRCLLSRQPVGLCRDSAEGLGGSDKPAAGEGPEHVPHGARARDLPPPRVKPGEIACFTCTRQERWHGVGETWSWKVANL

SEQ ID NO: 847269 - protein, 151 aa, Homo sapiens
MGAGATLPTATARAPHAWGELPARRQAMQPPLRLRSQDQPGQEGPGDTEASQTEPGSSAVTLQEQPSLSQNESDVFSWVIRREFQELRHPVDEEKARCLEGIGGHTRGLVASLDMQLEQAQGTRERLAQAECVLEQFGNEDHHEFIWVSGQ

SEQ ID NO: 847270 - protein, 662 aa, Homo sapiens
MGCEGPGLKRWRTRPPGAHGSCSGGDQTGVGVGGGMEGLAGYVYKAASEGKVLTLAALLLNRSESDIRYLLGYVSQQGGQRSTPLIIAARNGHAKVVRLLLEHYRVQTQQTGTVRFDGYVIDGATALWCAAGAGHFEVVKLLVSHGANVNHTTVTNSTPLRAACFDGRLDIVKYLVENNANISIANKYDNTCLMIAAYKGHTDVVRYLLEQRADPNAKAHCGATALHFAAEAGHIDIVKELIKWRAAIVVNGHGMTPLKVAAESCKADVVELLLSHADCDRRSRIEALELLGASFANDRENYDIIKTYHYLYLAMLERFQDGDNILEKEVLPPIHAYGNRTECRNPQELESIRQDRDALHMEGLIVRERILGADNIDVSHPIIYRGAVYADNMEFEQCIKLWLHALHLRQKGNRNTHKDLLRFAQVFSQMIHLNETVKAPDIECVLRCSVLEIEQSMNRVKNISDADVHNAMDNYECNLYTFLYLVCISTKTQCSEEDQCKINKQIYNLIHLDPRTREGFTLLHLAVNSNTPVDDFHTNDVCSFPNALVTKLLLDCGAEVNAVDNEGNSALHIIVQYNRPISDFLTLHSIIISLVEAGAHTDMTNKQNKTPLDKSTTGVSEILLKTQMKMSLKCLAARAVRANDINYQDQIPRTLEEFVGFH

SEQ ID NO: 847271 - protein, 662 aa, Homo sapiens; identical to SEQ ID NO: 847270

SEQ ID NO: 847272 - protein, 662 aa, Homo sapiens; identical to SEQ ID NO: 847270

SEQ ID NO: 847273 - protein, 588 aa, Homo sapiens
MGCEGPGLKRWRTRPPGAHGSCSGGDQTGVGVGGGMEGLAGYVYKAASEGKVLTLAALLLNRSESDIRYLLGYVSQQGGQRSTPLIIAARNGHAKVVRLLLEHYRVQTQQTGTVRFDGYVIDGATALWCAAGAGHFEVVKLLVSHGANVNHTTVTNSTPLRAACFDGRLDIVKYLVENNANISIANKYDNTCLMIAAYKGHTDVVRYLLEQRADPNAKAHCGATALHFAAEAGHIDIVKELIKWRAAIVVNGHGMTPLKVAAESCKADVVELLLSHADCDRRSRIEALELLGASFANDRENYDIIKTYHYLYLAMLERFQDGDNILEKEVLPPIHAYGNRTECRNPQELESIRQDRDALHMEGLIVRERILGADNIDVSHPIIYRGAVYADNMEFEQCIKLWLHALHLRQKVCISTKTQCSEEDQCKINKQIYNLIHLDPRTREGFTLLHLAVNSNTPVDDFHTNDVCSFPNALVTKLLLDCGAEVNAVDNEGNSALHIIVQYNRPISDFLTLHSIIISLVEAGAHTDMTNKQNKTPLDKSTTGVSEILLKTQMKMSLKCLAARAVRANDINYQDQIPRTLEEFVGFH

SEQ ID NO: 847274 - protein, 662 aa, Homo sapiens; identical to SEQ ID NO: 847270

SEQ ID NO: 847275 - protein, 662 aa, Homo sapiens; identical to SEQ ID NO: 847270

SEQ ID NO: 847276 - protein, 662 aa, Homo sapiens; identical to SEQ ID NO: 847270

SEQ ID NO: 847277 - protein, 588 aa, Homo sapiens; identical to SEQ ID NO: 847273

SEQ ID NO: 847278 - protein, 176 aa, Homo sapiens
APSYVCASVSVASAVRPLCPSISSVQQFVLLFSSPLAVGCVFSAVGRGVVSLYLLCCFVSALASRSVSLCVLLRLLRGILALLVSFVPGCIWSCWPCVLLCLAVVSADGVCCAARVSVAVVGVVTVLGHAVPERAFVVMVVFVLLPDVVSSWFVVSGVSLRSVFVCSLRFTCAVEL

SEQ ID NO: 847279 - protein, 518 aa, Homo sapiens
MFLRAGLAALSPLLRSLRPSPVAAMSTGTFVVSQPLNYRGGARVEPADASGTEKAFEPATGRVIATFTCSGEKEVNLAVQNAKAAFKIWSQKSGMERCRILLEAARIIREREDEIATMECINNGKSIFEARLDIDISWQCLEYYAGLAASMAGEHIQLPGGSFGYTRREPLGVCVGIGAWNYPFQIASWKSAPALACGNAMVFKPSPFTPVSALLLAEIYSEAGVPPGLFNVVQGGAATGQFLCQHPDVAKVSFTGSVPTGMKIMEMSAKGIKPVTLELGGKSPLIIFSDCDMNNAVKGALMANFLTQGQVCCNGTRVFVQKEILDKFTEEVVKQTQRIKIGDPLLEDTRMGPLINRPHLERVLGFVKVAKEQGAKVLCGGDIYVPEDPKLKDGYYMRPCVLTNCRDDMTCVKEEIFGPVMSILSFDTEAEVLERANDTTFGLAAGVFTRDIQRAHRVVAELQAGTCFINNYNVSPVELPFGGYKKSGFGRENGRVTIEYYSQLKTVCVEMGDVESAF

SEQ ID NO: 847280 - protein, 518 aa, Homo sapiens; identical to SEQ ID NO: 847279

SEQ ID NO: 847281 - protein, 318 aa, Homo sapiens [sequence omitted]

SEQ ID NO: 847282 - protein, 244 aa, Homo sapiens
MFLRAGLAALSPLLRSLRPSPVAAMSTGTFVVSQPLNYRGGARVEPADASGTEKAFEPATGRVIATFTCSGEKEVNLAVQNAKAAFKIWSQKSGMERCRILLEAARIIREREDEIATMECINNGKSIFEARLDIDISWQCLEYYAGLAASMAGEHIQLPGGSFGYTRREPLGVCVGIGAWNYPFQIASWKSAPALACGWCTSWALQCGAGRGCHRPVSVSASRCGQSLLHWKCAHWHEDHGDVS

SEQ ID NO: 847283 - protein, 415 aa, Homo sapiens
MFLRAGLAALSPLLRSLRPSPVAAMSTGTFVVSQPLNYRGGARVEPADASGTEKAFEPATGRVIATFTCSGEKEVNLAVQNAKAAFKIWSQKSGMERCRILLEAARIIREREDEIATMECINNGKSIFEARLDIDISWQCLEYYAGLAASMAGEHIQLPGGSFGYTRREPLGVCVGIGAWNYPFQIASWKSAPALACGNAMVFKPSPFTPVSALLLAEIYSEAGVPPGLFNVVQGGAATGQFLCQHPDVAKVSFTGSVPTGMKIMEMSAKGIKPVTLELGGKSPLIIFSDCDMNNAVKGALMANFLTQGQVCCNGTRVFVQKEILDKFTEEVVKQTQRIKIGDPLLEDTRMGPLINRPHLERVLGFVKVAKEQGAKVLCGGDIYVPEDPKLKDGYYMRPCVLSMSSFCLLLDDLN

SEQ ID NO: 847284 - protein, 286 aa, Homo sapiens
MFLRAGLAALSPLLRSLRPSPVAAMSTGTFVVSQPLNYRGGARVEPADASGTEKAFEPATGRVIATFTCSGEKEVNLAVQNAKAAFKIWSQKSGMERCRILLEAARIIREREDEIATMECINNGKSIFEARLDIDISWQCLEYYAGLAASMAGEHIQLPGGSFGYTRREPLGVCVGIGAWNYPFQIASWKSAPALACGNAMVFKPSPFTPVSALLLAEIYSEAGVPPGLFNVVQGGAATGQFLCQHPDVAKVSFTGVVNRPKDEIGIPSGDTGWSLITATLDILVF

SEQ ID NO: 847285 - protein, 214 aa, Homo sapiens
  misc_feature (184)..(185): Xaa can be any naturally occurring amino acid
  misc_feature (214)..(214): Xaa can be any naturally occurring amino acid
MFLRAGLAALSPLLRSLRPSPVAAMSTGTFVVSQPLNYRGGARVEPADASGTEKAFEPATGRVIATFTCSGEKEVNLAVQNAKAAFKIWSQEREDEIATMECINNGKSIFEARLDIDISWQCLEYYAGLAASMAGEHIQLPGGSFGYTRREPLGVCVGIGAWNYPFQIASWKSAPALACVHGFXXLLHCSDALLNYRSCVLWVSCVRRGCTAVX

SEQ ID NO: 847286 - protein, 424 aa, Homo sapiens
MERCRILLEAARIIREREDEIATMECINNGKSIFEARLDIDISWQCLEYYAGLAASMAGEHIQLPGGSFGYTRREPLGVCVGIGAWNYPFQIASWKSAPALACGNAMVFKPSPFTPVSALLLAEIYSEAGVPPGLFNVVQGGAATGQFLCQHPDVAKVSFTGSVPTGMKIMEMSAKGIKPVTLELGGKSPLIIFSDCDMNNAVKGALMANFLTQGQVCCNGTRVFVQKEILDKFTEEVVKQTQRIKIGDPLLEDTRMGPLINRPHLERVLGFVKVAKEQGAKVLCGGDIYVPEDPKLKDGYYMRPCVLTNCRDDMTCVKEEIFGPVMSILSFDTEAEVLERANDTTFGLAAGVFTRDIQRAHRVVAELQAGTCFINNYNVSPVELPFGGYKKSGFGRENGRVTIEYYSQLKTVCVEMGDVESAF

SEQ ID NO: 847287 - protein, 335 aa, Homo sapiens
  misc_feature (2)..(3): Xaa can be any naturally occurring amino acid
  misc_feature (6)..(7): Xaa can be any naturally occurring amino acid
VXXGRXXSAPALACGNAMVFKPSPFTPVSALLLAEIYSEAGVPPGLFNVVQGGAATGQFLCQHPDVAKVSFTGSVPTGMKIMEMSAKGIKPVTLELGGKSPLIIFSDCDMNNAVKGALMANFLTQGQVCCNGTRVFVQKEILDKFTEEVVKQTQRIKIGDPLLEDTRMGPLINRPHLERVLGFVKVAKEQGAKVLCGGDIYVPEDPKLKDGYYMRPCVLTNCRDDMTCVKEEIFGPVMSILSFDTEAEVLERANDTTFGLAAGVFTRDIQRAHRVVAELQAGTCFINNYNVSPVELPFGGYKKSGFGRENGRVTIEYYSQLKTVCVEMGDVESAF

SEQ ID NO: 847288 - protein, 342 aa, Homo sapiens
SRVGQEKLGQAALSSRGLEDSLRLWRQGHYTHFRMKSCGSMLGLWGQRLPAAWVLLLLPFLPLLLLAAPAPHRASYKPVIVVHGLFDSSYSFRHLLEYINETHPGTVVTVLDLFDGRESLRPLWEQVQGFREAVVPIMAKAPQGVHLICYSQGGLVCRALLSVMDDHNVDSFISLSSPQMGQYGDTDYLKWLFPTSMRSNLYRICYSPWGQEFSICNYWHDPHHDDLYLNASSFLALINGERDHPNATVWRKNFLRVGHLVLIGGPDDGVITPWQSSFFGFYDANETVLEMEEQLVYLRDSFGLKTLLARGAIVRCPMAGISHTAWHSNRTLYETCIEPWLS

SEQ ID NO: 847289 - protein, 158 aa, Homo sapiens
EVGRIKAGKSDFRVAGGNEAWRGLLSIPRICLLLFPLPTGLNGSLRLFPPQHLGRNGIFHCPSCPGSVLRGTLARLPEKAPDVTDLRDPKQPALPPPIRHSPAFSFLTLPPATVGSRLGISKQRVERGLRTQARWESALFKGPGLLLTGIKELRVVHG

SEQ ID NO: 847290 - protein, 246 aa, Homo sapiens
MLGLWGQRLPAAWVLLLLPFLPLLLLAAPAPHRASYKPVIVVHGLFDSSYSFRHLLEYINETHPGTVVTVLDLFDGRESLRPLWEQVQGFREAVVPIMAKAPQGVHLICYSQGGLVCRALLSVMDDHNVDSFISLSSPQMGQYGDTDYLKWLFPTSMRSNLYRICYSPWGQEFSICNYWHDPHHDDLYLNASSFLALINGERDHPNATVWRKNFLRVGHLVLIGGPDDGVITPWQSSYLRNSYDAN

SEQ ID NO: 847291 - protein, 113 aa, Homo sapiens
HRLAVQRMRWERLSRPGPGEPGVHFPQEATECPPLSLQMTASHPHPLAWTQSGSLLQADTGGPAPLQRVLQPTSVQALPDLVRWEAHLQHLQVRDGEMGPQEPQLGPVLRVLS

SEQ ID NO: 847292 - protein, 341 aa, Homo sapiens
HGPGVGARGGGLIAGRLFRGRRVLPSPSHALITPFSGGSMLGLWGQRLPAAWVLLLLPFLPLLLLAAPAPHRASYKPVIVVHGLFDSSYSFRHLLEYINETHPGTVVTVLDLFDGRESLRPLWEQVQGFREAVVPIMAKAPQGVHLICYSQGGLVCRALLSVMDDHNVDSFISLSSPQMGQYGDTDYLKWLFPTSMRSNLYRICYSPWGQEFSICNYWHDPHHDDLYLNASSFLALINGERDHPNATVWRKNFLRVGHLVLIGGPDDGVITPWQSSFFGFYDANETVLEMEEQLVYLRDSFGLKTLLARGAIVRCPMAGISHTAWHSNRTLYETCIEPWLS

SEQ ID NO: 847293 - protein, 564 aa, Homo sapiens
MLGLWGQRLPAAWVLLLLPFLPLLLLAAPAPHRASYKPVIVVHGLFDSSYSFRHLLEYINETHPGTVVTVLDLFDGRESLRPLWEQVQGFREAVVPIMAKAPQGVHLICYSQGGLVCRALLSVMDDHNVDSFISLSSPQMGQYGDTDYLKWLFPTSMRSNLYRICYSPWGQEFSICNYWHDPHHDDLYLNASSFLALINGERDHPNATVWRKNFLRVGHLVLIGGPDDGVITPWQSSFFGFYDANETVLEMEEQLPARPTHQSELLLLRLVCLKPPRRKKPACRVQRQKRIMGSRAELCTLLGGFSFLLLLIPGEGAKGGSLRESQGVCSKQTLVVPLHYNESYSQPVYKPYLTLCAGRRICSTYRTMYRVMWREVRREVQQTHAVCCQGWKKRHPGALTCEAICAKPCLNGGVCVRPDQCECAPGWGGKHCHVGSFTCGCPHDLVLGVDGRTCMEGSPEPPTSASILSVAVREAEKDERALKQEIHELRGRLERLEQWAGQAGAWVRAVLPVPPEELQPEQVAELWGRGDRIESLSDQVLLLEERLGACSCEDNSLGLGVNHR

SEQ ID NO: 847294 - protein, 206 aa, Homo sapiens
SRGGVNRTRAFICYSQGGLVCRALLSVMDDHNVDSFISLSSPQMGQYGDTDYLKWLFPTSMRSNLYRICYSPWGQEFSICNYWHDPHHDDLYLNASSFLALINGERDHPNATVWRKNFLRVGHLVLIGGPDDGVITPWQSSFFGFYDANETVLEMEEQLVYLRDSFGLKTLLARGAIVRCPMAGISHTAWHSNRTLYETCIEPWLS

SEQ ID NO: 847295 - protein, 146 aa, Homo sapiens [sequence omitted]

SEQ ID NO: 847296 - protein, 174 aa, Homo sapiens
SRGSPAAPSSQMGQYGDTDYLKWLFPTSMRSNLYRICYSPWGQEFSICNYWHDPHHDDLYLNASSFLALINGERDHPNATVWRKNFLRVGHLVLIGGPDDGVITPWQSSFFGFYDANETVLEMEEQLVYLRDSFGLKTLLARGAIVRCPMAGISHTAWHSNRTLYETCIEPWLS

SEQ ID NO: 847297 - protein, 535 aa, Homo sapiens
MLGLWGQRLPAAWVLLLLPFLPLLLLAAPAPHRASYKPVIVVHGLFDSSYSFRHLLEYINETHPGTVVTVLDLFDGRESLRPLWEQVQGFREAVVPIMAKAPQGVHLICYSQGGLVCRALLSVMDDHNVDSFISLSSPQMGQYGDTDYLKWLFPTSMRSNLYRICYSPWGQEFSICNYWHDPHHDDLYLNASSFLALINGERDHPNATVWRKNFLRVGHLVLIGGPDDGVITPWQSSFFGFYDANETVLEMEEQLPARPTHQSELLLLRLVCLKPPRRKKPACRVQRQKRIMGSRAELCTLLGGFSFLLLLIPGEGAKGGSLRESQGVCSKQTLVVPLHYNESYSQPVYKPYLTLCAGRRICSTYRTMYRVMWREVRREVQQTHAVCCQGWKKRHPGALTCEAICAKPCLNGGVCVRPDQCECAPGWGGKHCHVDVDECRTSITLCSHHCFNTAGSFTCGCPHDLVLGVDGRTCMEGSPEPPTSASILSVAVREAEKDERALKQEIHELRGRLERLEQVSQACWVGRGQTSLSIP

SEQ ID NO: 847298 - protein, 237 aa, Homo sapiens [sequence omitted]

SEQ ID NO: 847299 - protein, 326 aa, Homo sapiens
MLGLWGQRLPAAWVLLLLPFLPLLLLAAPAPHRASYKPVIVVHGLFDSSYSFRHLLEYINETHPGTVVTVLDLFDGRESLRPLWEQVQGFREAVVPIMAKAPQGVHLICYSQGGLVCRALLSVMDDHNVDSFISLSSPQMGQYGDTDYLKWLFPTSMRSNLYRICYSPWGQEFSICNYWHDPHHDDLYLNASSFLALINGERDHPNATVWRKNFLRVGHLVLIGGPDDGVITPWQSSFLVSMMQMRRPGMEAHWLSRIFGWTPYWPGAQWGSWPVPKGGSNGFETVDCPEKYGAELAKRGGTILLGGPPSPRKGKTHHSKKHHLVV

SEQ ID NO: 847300 - protein, 246 aa, Homo sapiens; identical to SEQ ID NO: 847290

SEQ ID NO: 847301 - protein, 110 aa, Homo sapiens [sequence omitted]

SEQ ID NO: 847302 - protein, 158 aa, Homo sapiens; identical to SEQ ID NO: 847289

SEQ ID NO: 847303 - protein, 302 aa, Homo sapiens
MLGLWGQRLPAAWVLLLLPFLPLLLLAAPAPHRASYKPVIVVHGLFDSSYSFRHLLEYINETHPGTVVTVLDLFDGRESLRPLWEQVQGFREAVVPIMAKAPQGVHLICYSQGGLVCRALLSVMDDHNVDSFISLSSPQMGQYGDTDYLKWLFPTSMRSNLYRICYSPWGQEFSICNYWHDPHHDDLYLNASSFLALINGERDHPNATVWRKNFLRVGHLVLIGGPDDGVITPWQSSFFGFYDANETVLEMEEQLVYLRDSFGLKTLLARGAIVRCPMAGISHTAWHSNRTLYETCIEPWLS

SEQ ID NO: 847304 - protein, 661 aa, Homo sapiens
MLGLWGQRLPAAWVLLLLPFLPLLLLAAPAPHRASYKPVIVVHGLFDSSYSFRHLLEYINETHPGTVVTVLDLFDGRESLRPLWEQVQGFREAVVPIMAKAPQGVHLICYSQGGLVCRALLSVMDDHNVDSFISLSSPQMGQYGDTDYLKWLFPTSMRSNLYRICYSPWGQEFSICNYWHDPHHDDLYLNASSFLALINGERDHPNATVWRKNFLRVGHLVLIGGPDDGVITPWQSSFFGFYDANETVLEMEEQLPARPTHQSELLLLRLVCLKPPRRKKPACRVQRQKRIMGSRAELCTLLGGFSFLLLLIPGEGAKGGSLRERLTTEGVGPGVSSSQEPSAGGGASQEAKHNCKFRMGVRGCHLEGERGASEPLEGSGTPGSPGPGLLNLSHLILWHGRSQGVCSKQTLVVPLHYNESYSQPVYKPYLTLCAGRRICSTYRTMYRVMWREVRREVQQTHAVCCQGWKKRHPGALTCEAICAKPCLNGGVCVRPDQCECAPGWGGKHCHVDVDECRTSITLCSHHCFNTAGSFTCGCPHDLVLGVDGRTCMEGSPEPPTSASILSVAVREAEKDERALKQEIHELRGRLERLEQWAGQAGAWVRAVLPVPPEELQPEQVAELWGRGDRIESLSDQVLLLEERLGACSCEDNSLGLGVNHR

SEQ ID NO: 847305 - protein, 107 aa, Homo sapiens
SRCEPPHLAYIITTILLLSTLTIAAASLLGFSPPVLPPFSASFSNCCLYPDPHHDDLYLNASSFLALINGERDHPNATVWRKNFLRVGHLVLIGGPDDGVITPWQSR

SEQ ID NO: 847306 - protein, 584 aa, Homo sapiens
MLGLWGQRLPAAWVLLLLPFLPLLLLAAPAPHRASYKPVIVVHGLFDSSYSFRHLLEYINETHPGTVVTVLDLFDGRESLRPLWEQVQGFREAVVPIMAKAPQGVHLICYSQGGLVCRALLSVMDDHNVDSFISLSSPQMGQYGDTDYLKWLFPTSMRSNLYRICYSPWGQEFSICNYWHDPHHDDLYLNASSFLALINGERDHPNATVWRKNFLRVGHLVLIGGPDDGVITPWQSSFFGFYDANETVLEMEEQLPARPTHQSELLLLRLVCLKPPRRKKPACRVQRQKRIMGSRAELCTLLGGFSFLLLLIPGEGAKGGSLRESQGVCSKQTLVVPLHYNESYSQPVYKPYLTLCAGRRICSTYRTMYRVMWREVRREVQQTHAVCCQGWKKRHPGALTCEAICAKPCLNGGVCVRPDQCECAPGWGGKHCHVDVDECRTSITLCSHHCFNTAGSFTCGCPHDLVLGVDGRTCMEGSPEPPTSASILSVAVREAEKDERALKQEIHELRGRLERLEQWAGQAGAWVRAVLPVPPEELQPEQVAELWGRGDRIESLSDQVLLLEERLGACSCEDNSLGLGVNHR

SEQ ID NO: 847307 - protein, 535 aa, Homo sapiens; identical to SEQ ID NO: 847297

SEQ ID NO: 847308 - protein, 179 aa, Homo sapiens
MDDHNVDSFISLSSPQMGQYGDTDYLKWLFPTSMRSNLYRICYSPWGQEFSICNYWHDPHHDDLYLNASSFLALINGERDHPNATVWRKNFLRVGHLVLIGGPDDGVITPWQSSFFGFYDANETVLEMEEQLVYLRDSFGLKTLLARGAIVRCPMAGISHTAWHSNRTLYETCIEPWLS

SEQ ID NO: 847309 - protein, 270 aa, Homo sapiens
MLGLWGQRLPAAWVLLLLPFLPLLLLAAPAPHRASYKPVIVVHGLFDSSYSFRHLLEYINETHPGTVVTVLDLFDGRESLRPLWEQVQGFREAVVPIMAKAPQGVHLICYSQDTDYLKWLFPTSMRSNLYRICYSPWGQEFSICNYWHDPHHDDLYLNASSFLALINGERDHPNATVWRKNFLRVGHLVLIGGPDDGVITPWQSSFFGFYDANETVLEMEEQLVYLRDSFGLKTLLARGAIVRCPMAGISHTAWHSNRTLYETCIEPWLS

SEQ ID NO: 847310 - protein, 293 aa, Homo sapiens
MGSRAELCTLLGGFSFLLLLIPGEGAKGGSLRESQGVCSKQTLVVPLHYNESYSQPVYKPYLTLCAGRRICSTYRTMYRVMWREVRREVQQTHAVCCQGWKKRHPGALTCEAICAKPCLNGGVCVRPDQCECAPGWGGKHCHVDVDECRTSITLCSHHCFNTAGSFTCGCPHDLVLGVDGRTCMEGSPEPPTSASILSVAVREAEKDERALKQEIHELRGRLERLEQWAGQAGAWVRAVLPVPPEELQPEQVAELWGRGDRIESLSDQVLLLEERLGACSCEDNSLGLGVNHR

SEQ ID NO: 847311 - protein, 250 aa, Homo sapiens
MLGLWGQRLPAAWVLLLLPFLPLLLLAAPAPHRASYKPVIVVHGLFDSSYSFRHLLEYINETHPGTVVTVLDLFDGRESLRPLWEQVQGFREAVVPIMAKAPQGVHLICYSQGGLVCRALLSVMDDHNVDSFISLSSPQMGQYGDTDYLKWLFPTSMRSNLYRICYSPWGQEFSICNYWHDPHHDDLYLNASSFLALINGERDHPNATVWRKNFLRVGHLVLIGGPDDGVITPWQSSFLGSYVSNDTVLK

SEQ ID NO: 847312 - protein, 110 aa, Homo sapiens
NETVLEMEEQLVSPLGLLPLLAAVPPYSRALSVTPELKGSPCGEEVQDPSSNSLCLSLCLSSMLPRPFDHLEGLSAGFFWVEDSIGPGGHSEVSNGRYLPHSLALQPYPL

SEQ ID NO: 847313 - protein, 470 aa, Homo sapiens
MTPGLQHPPTVVQRPGMPSGARMPHQGAPMGPPGSPYMGSPAVRPGLAPAGMEPARKRAAPPPGQSQAQSQGQPVPTAPARSRSAKRRKMADKILPQRIRELVPESQAYMDLLAFERKLDQTIMRKRVDIQEALKRPMKQKRKLRLYISNTFNPAKPDAEDSDGSIASWELRVEGKLLDDPSKQKRKFSSFFKSLVIELDKDLYGPDNHLVEWHRTPTTQETDGFQVKRPGDLSVRCTLLLMLDYQPPQFKLDPRLARLLGLHTQSRSAIVQALWQYVKTNRLQDSHDKEYINGDKYFQQIFDCPRLKFSEIPQRLTALLLPPDPIVINHVISVDPSDQKKTACYDIDVEVEEPLKGQMSSFLLSTANQQEISALDSKIHETIESINQLKIQRDFMLSFSRDPKGYVQDLLRSQSRDLKVMTDVAGNPEEERRAEFYHQPWSQEAVSRYFYCKIQQRRQELEQSLVVRNT

SEQ ID NO: 847314 - protein, 453 aa, Homo sapiens
APRRQPFRGCLGQDELCDLGEVIFLLEPQWPHPSSGDERTCSGCLAEEHVDVNIFEKRPGMPSGARMPHQGAPMGPPGSPYMGSPAVRPGLAPAGMEPARKRAAPPPGQSQAQSQGQPVPTAPARSRSAKRRKMADKILPQRIRELVPESQAYMDLLAFERKLDQTIMRKRVDIQEALKRPMKQKRKLRLYISNTFNPAKPDAEDSDGSIASWELRVEGKLLDDPRKKKGERFSIFILPKTLGPIPRLDNTDSFVPAGLVSSRPTHPSFRIVGTRDTPKGGNPPLKGGRDTHLANTTPLGSEQQQTHRRAEDARETDYTNTYLSILPTPSHTPTPIPILYNRGVLLRLRDTLPPPHTILVSEHQQQPPQTTTTTYSIHIRSPCTIARDTVDVHIAHTTPQLTTYRHIATIHYSTDEISYFIRSVASDRPYPRSNNSYTNTHHPNTSNHTADHP

SEQ ID NO: 847315 - protein, 483 aa, Homo sapiens
MAADEVAGGARKATKSKLFEFLVHGVRPGMPSGARMPHQGAPMGPPGSPYMGSPAVRPGLAPAGMEPARKRAAPPPGQSQAQSQGQPVPTAPARSRSAKRRKMADKILPQRIRELVPESQAYMDLLAFERKLDQTIMRKRVDIQEALKRPMKQKRKLRLYISNTFNPAKPDAEDSDGSIASWELRVEGKLLDDPSKQKRKFSSFFKSLVIELDKDLYGPDNHLVEWHRTPTTQETDGFQVKRPGDLSVRCTLLLMLDYQPPQFKLDPRLARLLGLHTQSRSAIVQALWQYVKTNRLQDSHDKEYINGDKYFQQIFDCPRLKFSEIPQRLTALLLPPDPIVINHVISVDPSDQKKTACYDIDVEVEEPLKGQMSSFLLSTANQQEISALDSKIHETIESINQLKIQRDFMLSFSRDPKGYVQDLLRSQSRDLKVMTDVAGNPEEERRAEFYHQPWSQEAVSRYFYCKIQQRRQELEQSLVVRNT

SEQ ID NO: 847316 - protein, 381 aa, Homo sapiens
MADKILPQRIRELVPESQAYMDLLAFERKLDQTIMRKRVDIQEALKRPMKQKRKLRLYISNTFNPAKPDAEDSDGSIASWELRVEGKLLDDPSKQKRKFSSFFKSLVIELDKDLYGPDNHLVEWHRTPTTQETDGFQVKRPGDLSVRCTLLLMLDYQPPQFKLDPRLARLLGLHTQSRSAIVQALWQYVKTNRLQDSHDKEYINGDKYFQQIFDCPRLKFSEIPQRLTALLLPPDPIVINHVISVDPSDQKKTACYDIDVEVEEPLKGQMSSFLLSTANQQEISALDSKIHETIESINQLKIQRDFMLSFSRDPKGYVQDLLRSQSRDLKVMTDVAGNPEEERRAEFYHQPWSQEAVSRYFYCKIQQRRQELEQSLVVRNT

SEQ ID NO: 847317 - protein, 457 aa, Homo sapiens
MTPGLQHPPTVVQRPGMPSGARMPHQGAPMGPPGSPYMGSPAVRPGLAPAGMEPARKRAAPPPGQSQAQSQGQPVPTAPARSRSAKRRKMADKILPQRIRELVPESQAYMDLLAFERKLDQTIMRKQKRKLRLYISNTFNPAKPDAEDSDGSIASWELRVEGKLLDDPSKQKRKFSSFFKSLVIELDKDLYGPDNHLVEWHRTPTTQETDGFQVKRPGDLSVRCTLLLMLDYQPPQFKLDPRLARLLGLHTQSRSAIVQALWQYVKTNRLQDSHDKEYINGDKYFQQIFDCPRLKFSEIPQRLTALLLPPDPIVINHVISVDPSDQKKTACYDIDVEVEEPLKGQMSSFLLSTANQQEISALDSKIHETIESINQLKIQRDFMLSFSRDPKGYVQDLLRSQSRDLKVMTDVAGNPEEERRAEFYHQPWSQEAVSRYFYCKIQQRRQELEQSLVVRNT

SEQ ID NO: 847318 - protein, 347 aa, Homo sapiens
MAADEVAGGARKATKSKLFEFLVHGVRPGMPSGARMPHQGAPMGPPGSPYMGSPAVRPGLAPAGMEPARKRAAPPPGQSQAQSQGQPVPTAPARSRSAKRRKMADKILPQRIRELVPESQAYMDLLAFERKLDQTIMRKRVDIQEALKRPMKQKRKLRLYISNTFNPAKPDAEDSDGSIASWELRVEGKLLDDPSKQKRKFSSFFKSLVIELDKDLYGPDNHLVEWHRTPTTQETDGFQVKRPGDLSVRCTLLLMLDYQPPQFKLDPRLARLLGLHTQSRSAIVQALWQYVKTNRLQDSHDKEYINGDKYFQQVTSLLNPGIWGAGGVLQQGKYLYQGNYHPSLLDS

SEQ ID NO: 847319 - protein, 316 aa, Homo sapiens
MAADEVAGGARKATKSKLFEFLVHGVRPGMPSGARMPHQGAPMGPPGSPYMGSPAVRPGLAPAGMEPARKRAAPPPGQSQAQSQGQPVPTAPARSRSAKRRKMADKILPQRIRELVPESQAYMDLLAFERKLDQTIMRKRVDIQEALKRPMKQKRKLRLYISNTFNPAKPDAEDSDGSIASWELRVEGKLLDDPSKQKRKFSSFFKSLVIELDKDLYGPDNHLVEWHRTPTTQETDGFQVKRPGDLSVRCTLLLMLDYQPPQFKLDPRLARLLGLHTQSRSAIVQALWQYVKTNRLQDSHDKEYINGDKYFQQIPE

SEQ ID NO: 847320 - protein, 553 aa, Homo sapiens
MTPGLQHPPTVVQRPGMPSGARMPHQGAPMGPPGSPYMGSPAVRPGLAPAGMEPARKRAAPPPGQSQAQSQGQPVPTAPARSRSAKRRKMADKILPQRIRELVPESQAYMDLLAFERKLDQTIMRKRVDIQEALKRPMKQKRKLRLYISNTFNPAKPDAEDSDGSIASWELRVEGKLLDDVRPGPGLSRCPGVGMGCTENRTRCLHYGLGSQPRLGGGAGLETFQVQRISSKPTALSAANLASFCSSHLIPVSAPMVPVALPQPSKQKRKFSSFFKSLVIELDKDLYGPDNHLVEWHRTPTTQETDGFQVKRPGDLSVRCTLLLMLDYQPPQFKLDPRLARLLGLHTQSRSAIVQALWQYVKTNRLQDSHDKEYINGDKYFQQIFDCPRLKFSEIPQRLTALLLPPDPIVINHVISVDPSDQKKTACYDIDVEVEEPLKGQMSSFLLSTANQQEISALDSKIHETIESINQLKIQRDFMLSFSRDPKGYVQDLLRSQSRDLKVMTDVAGNPEEERRAEFYHQPWSQEAVSRYFYCKIQQRRQELEQSLVVRNT

SEQ ID NO: 847321 - protein, 347 aa, Homo sapiens; identical to SEQ ID NO: 847318

SEQ ID NO: 847322 - protein, 409 aa, Homo sapiens
MTPGLQHPPTVVQRPGMPSGARMPHQGAPMGPPGSPYMGSPAVRPGLAPAGMEPARKRAAPPPGQSQAQSQGQPVPTAPARSRSAKRRKMADKILPQRIRELVPESQAYMDLLAFERKLDQTIMRKRVDIQEALKRPMKQKRKLRLYISNTFNPAKPDAEDSDGSIASWELRVEGKLLDDPRKKKGERFSIFILPKTLGPIPRLDNTDSFVPAGLVSSRPTHPSFRIVGTRDTPKGGNPPLKGGRDTHLANTTPLGSEQQQTHRRAEDARETDYTNTYLSILPTPSHTPTPIPILYNRGVLLRLRDTLPPPHTILVSEHQQQPPQTTTTTYSIHIRSPCTIARDTVDVHIAHTTPQLTTYRHIATIHYRRTEISYFIRSVASDRPYPRSNNSYTNTHHPNTSNHTADHP

SEQ ID NO: 847323 - protein, 470 aa, Homo sapiens; identical to SEQ ID NO: 847313

SEQ ID NO: 847324 - protein, 296 aa, Homo sapiens
MAADEVAGGARKATKSKLFEFLVHGVRPGMPSGARMPHQGAPMGPPGSPYMGSPAVRPGLAPAGMEPARKRAAPPPGQSQAQSQGQPVPTAPARSRSAKRRKMADKILPQRIRELVPESQAYMDLLAFERKLDQTIMRKRVDIQEALKRPMKQKRKLRLYISNTFNPAKPDAEDSDGSIASWELRVEGKLLDDPSKQKRKFSSFFKSLVIELDKDLYGPDNHLVEWHRTPTTQETDGFQVKRPGDLSVRCTLLLMLDYQPPQFKLDPRLARLLGVATSVTLPPCVLTPLDPPLFGP

SEQ ID NO: 847325 - protein, 470 aa, Homo sapiens; identical to SEQ ID NO: 847313

SEQ ID NO: 847326 - protein, 518 aa, Homo sapiens
EGRQQHPHVTDEDRAPGRKRHSPGHMARHEQIPSRPEATRLPPRSLAANIWMQPASVEDGKRPGMPSGARMPHQGAPMGPPGSPYMGSPAVRPGLAPAGMEPARKRAAPPPGQSQAQSQGQPVPTAPARSRSAKRRKMADKILPQRIRELVPESQAYMDLLAFERKLDQTIMRKRVDIQEALKRPMKQKRKLRLYISNTFNPAKPDAEDSDGSIASWELRVEGKLLDDPSKQKRKFSSFFKSLVIELDKDLYGPDNHLVEWHRTPTTQETDGFQVKRPGDLSVRCTLLLMLDYQPPQFKLDPRLARLLGLHTQSRSAIVQALWQYVKTNRLQDSHDKEYINGDKYFQQIFDCPRLKFSEIPQRLTALLLPPDPIVINHVISVDPSDQKKTACYDIDVEVEEPLKGQMSSFLLSTANQQEISALDSKIHETIESINQLKIQRDFMLSFSRDPKGYVQDLLRSQSRDLKVMTDVAGNPEEERRAEFYHQPWSQEAVSRYFYCKIQQRRQELEQSLVVRNT

SEQ ID NO: 847327 - protein, 470 aa, Homo sapiens
MAADEVAGGARKATKSKLFEFLVHGVRPGMPSGARMPHQGAPMGPPGSPYMGSPAVRPGLAPAGMEPARKRAAPPPGQSQAQSQGQPVPTAPARSRSAKRRKMADKILPQRIRELVPESQAYMDLLAFERKLDQTIMRKQKRKLRLYISNTFNPAKPDAEDSDGSIASWELRVEGKLLDDPSKQKRKFSSFFKSLVIELDKDLYGPDNHLVEWHRTPTTQETDGFQVKRPGDLSVRCTLLLMLDYQPPQFKLDPRLARLLGLHTQSRSAIVQALWQYVKTNRLQDSHDKEYINGDKYFQQIFDCPRLKFSEIPQRLTALLLPPDPIVINHVISVDPSDQKKTACYDIDVEVEEPLKGQMSSFLLSTANQQEISALDSKIHETIESINQLKIQRDFMLSFSRDPKGYVQDLLRSQSRDLKVMTDVAGNPEEERRAEFYHQPWSQEAVSRYFYCKIQQRRQELEQSLVVRNT

SEQ ID NO: 847328 - protein, 347 aa, Homo sapiens; identical to SEQ ID NO: 847318

SEQ ID NO: 847329 - protein, 402 aa, Homo sapiens
MAADEVAGGARKATKSKLFEFLVHGVRPGMPSGARMPHQGAPMGPPGSPYMGSPAVRPGLAPAGMEPARKRAAPPPGQSQAQSQGQPVPTAPARSRSAKRRKMADKILPQRIRELVPESQAYMDLLAFERKLDQTIMRKRVDIQEALKRPMKQKRKLRLYISNTFNPAKPDAEDSDGSIASWELRVEGKLLDDPSKQKRKFSSFFKSLVIELDKDLYGPDNHLVEWHRTPTTQETDGFQVKRPGDLSVRCTLLLMLDYQPPQFKLDPRLARLLGLHTQSRSAIVQALWQYVKTNRLQDSHDKEYINGDKYFQQIFDCPRLKFSEIPQRLTALLLPPDPIVINHVISVDPSDQKKTACYDIDVEVEEPLKGQMSSFLLSTANQQEISALDSKVGPKPRAGVGH

SEQ ID NO: 847330 - protein, 204 aa, Homo sapiens
TEGRGRTAGAGVGARGADPRQGNHKGTSTQQIRPIFDCPRLKFSEIPQRLTALLLPPDPIVINHVISVDPSDQKKTACYDIDVEVEEPLKGQMSSFLLSTANQQEISALDSKIHETIESINQLKIQRDFMLSFSRDPKGYVQDLLRSQSRDLKVMTDVAGNPEEERRAEFYHQPWSQEAVSRYFYCKIQQRRQELEQSLVVRNT

SEQ ID NO: 847331 - protein, 78 aa, Homo sapiens
AFARFCTLFLQQKRKLRLYISNTFNPAKPDAEDSDGSIASWELRVEGKLLDDVRPGPGLSRCPGVGMGCTENRTRCLH

SEQ ID NO: 847332 - protein, 188 aa, Homo sapiens
ISEDPRGLANIITRGVKYDALSLLKLRKLDDAIEDCTNAVKLDDTYIKAYFEKSSVVSASDGEGEEGVAAGLRGIALWMTKQTQRCGEVIWSFPLPLGGIVPALDYLYRPPAEEIAQAPSVSQCLCLTPLTVSKFPLMGEDWPSCSPVRPQHGDHLLMTMPTCIFFSFMAFIITMNIWLTAISPTSLV

SEQ ID NO: 847333 - protein, 166 aa, Homo sapiens
MAQPQDSSHAPGVSGSQPFSPATFLPCRSHSPAHLLRSLQGQVKADNPTGKCLVATLLEEGHAPSPHTPTGAHDKPACASHDSHPKHAGRDKLKGKEKSAVLQLWGDRARESATRQRSSSPCPFQEEDIPSCSLYKAAAETGSPVCRGGRGSGLGWFLLFFKCRGV

SEQ ID NO: 847334 - protein, 389 aa, Homo sapiens
MEFPLAQICPQGSHEAPIPTFSTFQITDMTRRSCQNLGYTAASPQAPEAASSTGNAERAEEVPGEGSLFLQAETRAWFQKTQAHWLLQHGAAPAWFHGFITRREAERLLEPKPQGCYLVRFSESAVTFVLTYRSRTCCRHFLLAQLRDGRHVVLGEDSAHARLQDLLLHYTAHPLSPYGETLTEPLARQTPEPAGLSLRTEESNFGSKSQDPNPQYSPIIKQGQAPVPMQKEGAGEKEPSQLLRPKPPIPAKPQLPPEVYTIPVPRHRPAPRPKPSNPIYNEPDEPIAFYAMGRGSPGEAPSNIYVEVEDEGLPATLGHPVLRKSWSRPVPGGQNTGGSQLHSENSVIGQGPPLPHQPPPAWRHTLPHNLSRQVLQDRGQAWLPLGPPQ

SEQ ID NO: 847335 - protein, 371 aa, Homo sapiens [sequence omitted]

SEQ ID NO: 847336 - protein, 308 aa, Homo sapiens
GRQRRGWKCQSRVRPPLSVTHREAERLLEPKPQGCYLVRFSESAVTFVLTYRSRTCCRHFLLAQLRDGRHVVLGEDSAHARLQDLLLHYTAHPLSPYGETLTEPLARQTPEPAGLSLRTEESNFGSKSQDPNPQYSPIIKQGQAPVPMQKEGAGEKEPSQLLRPKPPIPAKPQLPPEVYTIPVPRHRPAPRPKPSNPIYNEPDEPIAFYAMGRGSPGEAPSNIYVEVEDEGLPATLGHPVLRKSWSRPVPGGQNTGGSQLHSENSVIGQGPPLPHQPPPAWRHTLPHNLSRQVLQDRGQAWLPLGPPQ

SEQ ID NO: 847337 - protein, 275 aa, Homo sapiens
MSPSTFQITDMTRRSCQNLGYTAASPQAPEAASSTGNAERAEEVPGEGSLFLQAETRAWFQKTQAHWLLQHGAAPAWFHGFITRREAERLLEPKPQGCYLVRFSESAVTFVLTYRSRTCCRHFLLAQLRDGRHVVLGEDSAHARLQDLLLHYTAHPLSPYGETLTEPLARQTPEPAGLSLRTEESNFGSKSQDPNPQYSPIIKQGQAPVPMQKEGAGEKENTGGSQLHSENSVIGQGPPLPHQPPPAWRHTLPHNLSRQVLQDRGQAWLPLGPPQ

SEQ ID NO: 847338 - protein, 103 aa, Homo sapiens
MEFPLAQICPQGSHEAPIPTFSTFQITDMTRRSCQNLGYTAASPQAPEAASSTGNAERAEEVPGEGSLFLQAETRAWFQKTQAHWLLQHGAAPAWFHGFITRR

SEQ ID NO: 847339 - protein, 371 aa, Homo sapiens [sequence omitted]

SEQ ID NO: 847340 - protein, 280 aa, Homo sapiens
GSRLSLVTLAEEREIVCSLTAPSRSRTCCRHFLLAQLRDGRHVVLGEDSAHARLQDLLLHYTAHPLSPYGETLTEPLARQTPEPAGLSLRTEESNFGSKSQDPNPQYSPIIKQGQAPVPMQKEGAGEKEPSQLLRPKPPIPAKPQLPPEVYTIPVPRHRPAPRPKPSNPIYNEPDEPIAFYAMGRGSPGEAPSNIYVEVEDEGLPATLGHPVLRKSWSRPVPGGQNTGGSQLHSENSVIGQGPPLPHQPPPAWRHTLPHNLSRQVLQDRGQAWLPLGPPQ

SEQ ID NO: 847341 - protein, 371 aa, Homo sapiens [sequence omitted]

SEQ ID NO: 847342 - protein, 1068 aa, Homo sapiens
MSRQSTLYSFFPKSPALSDANKASARASREGGRAAAAPGASPSPGGDAAWSEAGPGPRPLARSASPPKAKNLNGGLRRSVAPAAPTSCDFSPGDLVWAKMEGYPWWPCLVYNHPFDGTFIREKGKSVRVHVQFFDDSPTRGWVIKRLLKPYTGSKSKEAQKGGHFYSAKPEILRAMQRADEALNKDKIKRLELAVCDEPSEPEEEEEMEVGTTYVTDKSEEDNEIESEEEVQPKTQGSRRSSRQIKKRRVISDSESDIGGSDVEFKPDTKEEGSSDEISSGVGDSESEGLNSPVKVARKRKRMVTGNGSLKRKSSRKETPSATKQATSISSETKNTLRAFSAPQNSESQAHVSGGGDDSSRPTVWYHETLEWLKEEKRRDEHRRRPDHPDFDASTLYVPEDFLNSCTPGMRKWWQIKSQNFDLVICYKVGKFYELYHMDALIGVSELGLVFMKGNWAHSGFPEIAFGRYSDSLVQKGYKVARVEQTETPEMMEARCRKMAHISKYDRVVRREICRIITKGTQTYSVLEGDPSENYSKYLLSLKEKEEDSSGHTRAYGVCFVDTSLGKFFIGQFSDDRHCSRFRTLVAHYPPVQVLFEKGNLSKETKTILKSSLSCSLQEGLIPGSQFWDASKTLRTLLEEEYFREKLSDGIGVMLPQVLKGMTSESDSIGLTPGEKSELALSALGGCVFYLKKCLIDQELLSMANFEEYIPLDSDTVSTTRSGAIFTKAYQRMVLDAVTLNNLEIFLNGTNGSTEGTLLERVDTCHTPFGKRLLKQWLCAPLCNHYAINDRLDAIEDLMVVPDKISEVVELLKKLPDLERLLSKIHNVGSPLKSQNHPDSRAIMYEETTYSKKKIIDFLSALEGFKVMCKIIGIMEEVADGFKSKILKQVISLQTKNPEGRFPDLTVELNRWDTAFDHEKARKTGLITPKAGFDSDYDQALADIRENEQSLLEYLEKQRNRIGCRTIVYWGIGRNRYQLEIPENFTTRNLPEEYELKSTKKGCKRYWTKTIEKKLANLINAEERRDVSLKDCMRRLFYNFDKNYKDWQSAVECIAVLGKTLNKLVLRL

SEQ ID NO: 847343 - protein, 121 aa, Homo sapiens
MSRQSTLYSFFPKSPALSDANKASARASREGGRAAAAPGASPSPGGDAAWSEAGPGPRPLARSASPPKAKNLNGGLRRSVAPAAPTREFRSSPGWSAMARSQLTAISASRLQAIPQLQPPE

SEQ ID NO: 847344 - protein, 1261 aa, Homo sapiens
MEGYPWWPCLVYNHPFDGTFIREKGKSVRVHVQFFDDSPTRGWVIKRLLKPYTGSKSKEAQKGGHFYSAKPEILRAMQRADEALNKDKIKRLELAVCDEPSEPEEEEEMEVGTTYVTDKSEEDNEIESEEEVQPKTQGSRRSSRQIKKRRVISDSESDIGGSDVEFKPDTKEEGSSDEISSGVGDSESEGLNSPVKVARKRKRMVTGNGSLKRKSSRKETPSATKQATSISSETKNTLRAFSAPQNSESQAHVSGGGDDSSRPTVWYHETLEWLKEEKRRDEHRRRPDHPDFDASTLYVPEDFLNSCTPGMRKWWQIKSQNFDLVICYKVGKFYELYHMDALIGVSELGLVFMKGNWAHSGFPEIAFGRYSDSLVQKGYKVARVEQTETPEMMEARCRKMAHISKYDRVVRREICRIITKGTQTYSVLEGDPSENYSKYLLSLKEKEEDSSGHTRAYGVCFVDTSLGKFFIGQFSDDRHCSRFRTLVAHYPPVQVLFEKGNLSKETKTILKSSLSCSLQEGLIPGSQFWDASKTLRTLLEEEYFREKLSDGIGVMLPQVLKGMTSESDSIGLTPGEKSELALSALGGCVFYLKKCLIDQELLSMANFEEYIPLDSDTVSTTRSGAIFTKAYQRMVLDAVTLNNLEIFLNGTNGSTEGTLLERVDTCHTPFGKRLLKQWLCAPLCNHYAINDRLDAIEDLMVVPDKISEVVELLKKLPDLERLLSKIHNVGSPLKSQNHPDSRAIMYEETTYSKKKIIDFLSALEGFKVMCKIIGIMEEVADGFKSKILKQVISLQTKNPEGRFPDLTVELNRWDTAFDHEKARKTGLITPKAGFDSDYDQALADIRENEQSLLEYLEKQRNRIGCRTIVYWGIGRNRYQLEIPENFTTRNLPEEYELKSTKKGCKRYWTKTIEKKLANLINAEERRDVSLKDCMRRLFYNFDKNYKDWQSAVECIAVLDVLLCLANYSRGGDGPMCRPVILLPEDTPPFLELKGSRHPCITKTFFGDDFIPNDILIGCEEEEQENGKAYCVLVTGPNMGGKSTLMRQAGLLAVMAQMGCYVPAEVCRLTPIDRVFTRLGASDRIMSGESTFFVELSETASILMHATAHSLVLVDELGRGTATFDGTAIANAVVKELAETIKCRTLFSTHYHSLVEDYSQNVAVRLGHMACMVENECEDPSQETITFLYKFIKGACPKSYGFNAARLANLPEEVIQKGHRKAREFEKMNQSLRLFREVCLASERSTVDAEAVHKLLTLIKEL

SEQ ID NO: 847345 - protein, 1185 aa, Homo sapiens
MQRADEALNKDKIKRLELAVCDEPSEPEEEEEMEVGTTYVTDKSEEDNEIESEEEVQPKTQGSRRSSRQIKKRRVISDSESDIGGSDVEFKPDTKEEGSSDEISSGVGDSESEGLNSPVKVARKRKRMVTGNGSLKRKSSRKETPSATKQATSISSETKNTLRAFSAPQNSESQAHVSGGGDDSSRPTVWYHETLEWLKEEKRRDEHRRRPDHPDFDASTLYVPEDFLNSCTPGMRKWWQIKSQNFDLVICYKVGKFYELYHMDALIGVSELGLVFMKGNWAHSGFPEIAFGRYSDSLVQKGYKVARVEQTETPEMMEARCRKMAHISKYDRVVRREICRIITKGTQTYSVLEGDPSENYSKYLLSLKEKEEDSSGHTRAYGVCFVDTSLGKFFIGQFSDDRHCSRFRTLVAHYPPVQVLFEKGNLSKETKTILKSSLSCSLQEGLIPGSQFWDASKTLRTLLEEEYFREKLSDGIGVMLPQVLKGMTSESDSIGLTPGEKSELALSALGGCVFYLKKCLIDQELLSMANFEEYIPLDSDTVSTTRSGAIFTKAYQRMVLDAVTLNNLEIFLNGTNGSTEGTLLERVDTCHTPFGKRLLKQWLCAPLCNHYAINDRLDAIEDLMVVPDKISEVVELLKKLPDLERLLSKIHNVGSPLKSQNHPDSRAIMYEETTYSKKKIIDFLSALEGFKVMCKIIGIMEEVADGFKSKILKQVISLQTKNPEGRFPDLTVELNRWDTAFDHEKARKTGLITPKAGFDSDYDQALADIRENEQSLLEYLEKQRNRIGCRTIVYWGIGRNRYQLEIPENFTTRNLPEEYELKSTKKGCKRYWTKTIEKKLANLINAEERRDVSLKDCMRRLFYNFDKNYKDWQSAVECIAVLDVLLCLANYSRGGDGPMCRPVILLPEDTPPFLELKGSRHPCITKTFFGDDFIPNDILIGCEEEEQENGKAYCVLVTGPNMGGKSTLMRQAGLLAVMAQMGCYVPAEVCRLTPIDRVFTRLGASDRIMSGESTFFVELSETASILMHATAHSLVLVDELGRGTATFDGTAIANAVVKELAETIKCRTLFSTHYHSLVEDYSQNVAVRLGHMACMVENECEDPSQETITFLYKFIKGACPKSYGFNAARLANLPEEVIQKGHRKAREFEKMNQSLRLFREVCLASERSTVDAEAVHKLLTLIKEL

SEQ ID NO: 847346 - protein, 666 aa, Homo sapiens
MSLHLHHSLIGFGEDSTRSCSADCVRIQGNIFFKAYQRMVLDAVTLNNLEIFLNGTNGSTEGTLLERVDTCHTPFGKRLLKQWLCAPLCNHYAINDRLDAIEDLMVVPDKISEVVELLKKLPDLERLLSKIHNVGSPLKSQNHPDSRAIMYEETTYSKKKIIDFLSALEGFKVMCKIIGIMEEVADGFKSKILKQVISLQTKNPEGRFPDLTVELNRWDTAFDHEKARKTGLITPKAGFDSDYDQALADIRENEQSLLEYLEKQRNRIGCRTIVYWGIGRNRYQLEIPENFTTRNLPEEYELKSTKKGCKRYWTKTIEKKLANLINAEERRDVSLKDCMRRLFYNFDKNYKDWQSAVECIAVLDVLLCLANYSRGGDGPMCRPVILLPEDTPPFLELKGSRHPCITKTFFGDDFIPNDILIGCEEEEQENGKAYCVLVTGPNMGGKSTLMRQAGLLAVMAQMGCYVPAEVCRLTPIDRVFTRLGASDRIMSGESTFFVELSETASILMHATAHSLVLVDELGRGTATFDGTAIANAVVKELAETIKCRTLFSTHYHSLVEDYSQNVAVRLGHMACMVENECEDPSQETITFLYKFIKGACPKSYGFNAARLANLPEEVIQKGHRKAREFEKMNQSLRLFREVCLASERSTVDAEAVHKLLTLIKEL

SEQ ID NO: 847347 - protein, 1150 aa, Homo sapiens
MSRQSTLYSFFPKSPALSDANKASARASREGGRAAAAPGASPSPGGDAAWSEAGPGPRPLARSASPPKAKNLNGGLRRSVAPAAPTSCDFSPGDLVWAKMEGYPWWPCLVYNHPFDGTFIREKGKSVRVHVQFFDDSPTRGWVIKRLLKPYTGSKSKEAQKGGHFYSAKPEILRAMQRADEALNKDKIKRLELAVCDEPSEPEEEEEMEVGTTYVTDKSEEDNEIESEEEVQPKTQGSRRSSRQIKKRRVISDSESDIGGSDVEFKPDTKEEGSSDEISSGVGDSESEGLNSPVKVARKRKRMVTGNGSLKRKSSRKETPSATKQATSISSETKNTLRAFSAPQNSESQAHVSGGGDDSSRPTVWYHETLEWLKEEKRRDEHRRRPDHPDFDASTLYVPEDFLNSCTPGMRKWWQIKSQNFDLVICYKVGKFYELYHMDALIGVSELGLVFMKGNWAHSGFPEIAFGRYSDSLVQKGYKVARVEQTETPEMMEARCRKMAHISKYDRVVRREICRIITKGTQTYSVLEGDPSENYSKYLLSLKEKEEDSSGHTRAYGVCFVDTSLGKFFIGQFSDDRHCSRFRTLVAHYPPVQVLFEKGNLSKETKTILKSSLSCSLQEGLIPGSQFWDASKTLRTLLEEEYFREKLSDGIGVMLPQVLKGMTSESDSIGLTPGEKSELALSALGGCVFYLKKCLIDQELLSMANFEEYIPLDSDTVSTTRSGAIFTKAYQRMVLDAVTLNNLEIFLNGTNGSTEGTLLERVDTCHTPFGKRLLKQWLCAPLCNHYAINDRLDAIEDLMVVPDKISEVVELLKKLPDLERLLSKIHNVGSPLKSQNHPDSRAIMYEETTYSKKKIIDFLSALEGFKVMCKIIGIMEEVADGFKSKILKQVISLQTKNPEGRFPDLTVELNRWDTAFDHEKARKTGLITPKAGFDSDYDQALADIRENEQSLLEYLEKQRNRIGCRTIVYWGIGRNRYQLEIPENFTTRNLPEEYELKSTKKGCKRYWTKTIEKKLANLINAEERRDVSLKDCMRRLFYNFDKNYKDWQSAVECIAVLDVLLCLANYSRGGDGPMCRPVILLPEDTPPFLELKGSRHPCITKTFFGDDFIPNDILIGCEEEEQENGKAYCVLVTGPNMGGKSTLMRQVTDS

SEQ ID NO: 847348 - protein, 1126 aa, Homo sapiens
MSRQSTLYSFFPKSPALSDANKASARASREGGRAAAAPGASPSPGGDAAWSEAGPGPRPLARSASPPKAKNLNGGLRRSVAPAAPTSCDFSPGDLVWAKMEGYPWWPCLVYNHPFDGTFIREKGKSVRVHVQFFDDSPTRGWVIKRLLKPYTGSKSKEAQKGGHFYSAKPEILRAMQRADEALNKDKIKRLELAVCDEPSEPEEEEEMEVGTTYVTDKSEEDNEIESEEEVQPKTQGSRRSSRQIKKRRVISDSESDIGGSDVEFKPDTKEEGSSDEISSGVGDSESEGLNSPVKVARKRKRMVTGNGSLKRKSSRKETPSATKQATSISSETKNTLRAFSAPQNSESQAHVSGGGDDSSRPTVWYHETLEWLKEEKRRDEHRRRPDHPDFDASTLYVPEDFLNSCTPGMRKWWQIKSQNFDLVICYKVGKFYELYHMDALIGVSELGLVFMKGNWAHSGFPEIAFGRYSDSLVQKGYKVARVEQTETPEMMEARCRKMAHISKYDRVVRREICRIITKGTQTYSVLEGDPSENYSKYLLSLKEKEEDSSGHTRAYGVCFVDTSLGKFFIGQFSDDRHCSRFRTLVAHYPPVQVLFEKGNLSKETKTILKSSLSCSLQEGLIPGSQFWDASKTLRTLLEEEYFREKLSDGIGVMLPQVLKGMTSESDSIGLTPGEKSELALSALGGCVFYLKKCLIDQELLSMANFEEYIPLDSDTVSTTRSGAIFTKAYQRMVLDAVTLNNLEIFLNGTNGSTEGTLLERVDTCHTPFGKRLLKQWLCAPLCNHYAINDRLDAIEDLMVVPDKISEVVELLKKLPDLERLLSKIHNVGSPLKSQNHPDSRAIMYEETTYSKKKIIDFLSALEGFKVMCKIIGIMEEVADGFKSKILKQVISLQTKNPEGRFPDLTVELNRWDTAFDHEKARKTGLITPKAGFDSDYDQALADIRENEQSLLEYLEKQRNRIGCRTIVYWGIGRNRYQLEIPENFTTRNLPEEYELKSTKKGCKRYWTKTIEKKLANLINAEERRDVSLKDCMRRLFYNFDKNYKDWQSAVECIAVLDVLLCLANYSRGGDGPMCRPVILLTSRKAFSNFKPVLRQETSNTFLQSLNAPVPFTGSEQGMKFSLELL

SEQ ID NO: 847349 - protein, 159 aa, Homo sapiens [sequence omitted]

SEQ ID NO: 847350 - protein, 1360 aa, Homo sapiens
MSRQSTLYSFFPKSPALSDANKASARASREGGRAAAAPGASPSPGGDAAWSEAGPGPRPLARSASPPKAKNLNGGLRRSVAPAAPTSCDFSPGDLVWAKMEGYPWWPCLVYNHPFDGTFIREKGKSVRVHVQFFDDSPTRGWVIKRLLKPYTGSKSKEAQKGGHFYSAKPEILRAMQRADEALNKDKIKRLELAVCDEPSEPEEEEEMEVGTTYVTDKSEEDNEIESEEEVQPKTQGSRRSSRQIKKRRVISDSESDIGGSDVEFKPDTKEEGSSDEISSGVGDSESEGLNSPVKVARKRKRMVTGNGSLKRKSSRKETPSATKQATSISSETKNTLRAFSAPQNSESQAHVSGGGDDSSRPTVWYHETLEWLKEEKRRDEHRRRPDHPDFDASTLYVPEDFLNSCTPGMRKWWQIKSQNFDLVICYKVGKFYELYHMDALIGVSELGLVFMKGNWAHSGFPEIAFGRYSDSLVQKGYKVARVEQTETPEMMEARCRKMAHISKYDRVVRREICRIITKGTQTYSVLEGDPSENYSKYLLSLKEKEEDSSGHTRAYGVCFVDTSLGKFFIGQFSDDRHCSRFRTLVAHYPPVQVLFEKGNLSKETKTILKSSLSCSLQEGLIPGSQFWDASKTLRTLLEEEYFREKLSDGIGVMLPQVLKGMTSESDSIGLTPGEKSELALSALGGCVFYLKKCLIDQELLSMANFEEYIPLDSDTVSTTRSGAIFTKAYQRMVLDAVTLNNLEIFLNGTNGSTEGTLLERVDTCHTPFGKRLLKQWLCAPLCNHYAINDRLDAIEDLMVVPDKISEVVELLKKLPDLERLLSKIHNVGSPLKSQNHPDSRAIMYEETTYSKKKIIDFLSALEGFKVMCKIIGIMEEVADGFKSKILKQVISLQTKNPEGRFPDLTVELNRWDTAFDHEKARKTGLITPKAGFDSDYDQALADIRENEQSLLEYLEKQRNRIGCRTIVYWGIGRNRYQLEIPENFTTRNLPEEYELKSTKKGCKRYWTKTIEKKLANLINAEERRDVSLKDCMRRLFYNFDKNYKDWQSAVECIAVLDVLLCLANYSRGGDGPMCRPVILLPEDTPPFLELKGSRHPCITKTFFGDDFIPNDILIGCEEEEQENGKAYCVLVTGPNMGGKSTLMRQAGLLAVMAQMGCYVPAEVCRLTPIDRVFTRLGASDRIMSGESTFFVELSETASILMHATAHSLVLVDELGRGTATFDGTAIANAVVKELAETIKCRTLFSTHYHSLVEDYSQNVAVRLGHMACMVENECEDPSQETITFLYKFIKGACPKSYGFNAARLANLPEEVIQKGHRKAREFEKMNQSLRLFREVCLASERSTVDAEAVHKLLTLIKEL

SEQ ID NO: 847351 - protein, 191 aa, Homo sapiens
MSRQSTLYSFFPKSPALSDANKASARASREGGRAAAAPGASPSPGGDAAWSEAGPGPRPLARSASPPKAKNLNGGLRRSVAPAAPTSCDFSPGDLVWAKMEGYPWWPCLVYNHPFDGTFIREKGKSVRVHVQFFDDSPTRGWVIKRLLKPYTGKSHYCHVCVFVCVCVCVRETDRQADFFLYDEIKCILPQ

SEQ ID NO: 847352 - protein, 1261 aa, Homo sapiens; identical to SEQ ID NO: 847344

SEQ ID NO: 847353 - protein, 1360 aa, Homo sapiens; identical to SEQ ID NO: 847350

SEQ ID NO: 847354 - protein, 1367 aa, Homo sapiens
  misc_feature (1330)..(1331): Xaa can be any naturally occurring amino acid
  misc_feature (1334)..(1334): Xaa can be any naturally occurring amino acid
  misc_feature (1337)..(1339): Xaa can be any naturally occurring amino acid
  misc_feature (1346)..(1346): Xaa can be any naturally occurring amino acid
  misc_feature (1349)..(1349): Xaa can be any naturally occurring amino acid
  misc_feature (1353)..(1353): Xaa can be any naturally occurring amino acid
MSRQSTLYSFFPKSPALSDANKASARASREGGRAAAAPGASPSPGGDAAWSEAGPGPRPLARSASPPKAKNLNGGLRRSVAPAAPTSCDFSPGDLVWAKMEGYPWWPCLVYNHPFDGTFIREKGKSVRVHVQFFDDSPTRGWVIKRLLKPYTGSKSKEAQKGGHFYSAKPEILRAMQRADEALNKDKIKRLELAVCDEPSEPEEEEEMEVGTTYVTDKSEEDNEIESEEEVQPKTQGSRRSSRQIKKRRVISDSESDIGGSDVEFKPDTKEEGSSDEISSGVGDSESEGLNSPVKVARKRKRMVTGNGSLKRKSSRKETPSATKQATSISSETKNTLRAFSAPQNSESQAHVSGGGDDSSRPTVWYHETLEWLKEEKRRDEHRRRPDHPDFDASTLYVPEDFLNSCTPGMRKWWQIKSQNFDLVICYKVGKFYELYHMDALIGVSELGLVFMKGNWAHSGFPEIAFGRYSDSLVQKGYKVARVEQTETPEMMEARCRKMAHISKYDRVVRREICRIITKGTQTYSVLEGDPSENYSKYLLSLKEKEEDSSGHTRAYGVCFVDTSLGKFFIGQFSDDRHCSRFRTLVAHYPPVQVLFEKGNLSKETKTILKSSLSCSLQEGLIPGSQFWDASKTLRTLLEEEYFREKLSDGIGVMLPQVLKGMTSESDSIGLTPGEKSELALSALGGCVFYLKKCLIDQELLSMANFEEYIPLDSDTVSTTRSGAIFTKAYQRMVLDAVTLNNLEIFLNGTNGSTEGTLLERVDTCHTPFGKRLLKQWLCAPLCNHYAINDRLDAIEDLMVVPDKISEVVELLKKLPDLERLLSKIHNVGSPLKSQNHPDSRAIMYEETTYSKKKIIDFLSALEGFKVMCKIIGIMEEVADGFKSKILKQVISLQTKNPEGRFPDLTVELNRWDTAFDHEKARKTGLITPKAGFDSDYDQALADIRENEQSLLEYLEKQRNRIGCRTIVYWGIGRNRYQLEIPENFTTRNLPEEYELKSTKKGCKRYWTKTIEKKLANLINAEERRDVSLKDCMRRLFYNFDKNYKDWQSAVECIAVLDVLLCLANYSRGGDGPMCRPVILLPEDTPPFLELKGSRHPCITKTFFGDDFIPNDILIGCEEEEQENGKAYCVLVTGPNMGGKSTLMRQAGLLAVMAQMGCYVPAEVCRLTPIDRVFTRLGASDRIMSGESTFFVELSETASILMHATAHSLVLVDELGRGTATFDGTAIANAVVKELAETIKCRTLFSTHYHSLVEDYSQNVAVRLGHMACMVENECEDPSQETITFLYKFIKGACPKSYGFNAARLANLPEEVIQKGHRKKKKKKKKRNIXXNLXEKXXXKLDDEDXKKXVKFXKRKIIDMTTLEALS

SEQ ID NO: 847355 - protein, 387 aa, Homo sapiens
QSSSFTALLGRFQLVFFWQIASGEILKKGCKRYWTKTIEKKLANLINAEERRDVSLKDCMRRLFYNFDKNYKDWQSAVECIAVLDVLLCLANYSRGGDGPMCRPVILLPEDTPPFLELKGSRHPCITKTFFGDDFIPNDILIGCEEEEQENGKAYCVLVTGPNMGGKSTLMRQAGLLAVMAQMGCYVPAEVCRLTPIDRVFTRLGASDRIMSGESTFFVELSETASILMHATAHSLVLVDELGRGTATFDGTAIANAVVKELAETIKCRTLFSTHYHSLVEDYSQNVAVRLGHMACMVENECEDPSQETITFLYKFIKGACPKSYGFNAARLANLPEEVIQKGHRKAREFEKMNQSLRLFREVCLASERSTVDAEAVHKLLTLIKEL

SEQ ID NO: 847356 - protein, 86 aa, Homo sapiens
GGGKPRNLLPEVRRPSPKSVGSASKLEGLVSAPLPGGGGHLRCVQLRALAGLAPRLGWSAAPHLPGSDPEPFPAGRGPPNNRLLSR

SEQ ID NO: 847357 - protein, 152 aa, Homo sapiens
MASSLNEDPEGSRITYVKGDLFACPKTDSLAHCISEDCRMGAGIAVLFKKKFGGVQELLNQQKKSGEVAVLKRDGRYIYYLITKKRASHKPTYENLQKSLEAMKSHCLKNGVTDLSMPRIGCGLDRLQWENVSAMIEEVFEATDIKITVYTL

SEQ ID NO: 847358 - protein, 152 aa, Homo sapiens; identical to SEQ ID NO: 847357

SEQ ID NO: 847359 - protein, 152 aa, Homo sapiens; identical to SEQ ID NO: 847357

SEQ ID NO: 847360 - protein, 86 aa, Homo sapiens; identical to SEQ ID NO: 847356

SEQ ID NO: 847361 - protein, 86 aa, Homo sapiens; identical to SEQ ID NO: 847356

SEQ ID NO: 847362 - protein, 86 aa, Homo sapiens; identical to SEQ ID NO: 847356

SEQ ID NO: 847363 - protein, 86 aa, Homo sapiens; identical to SEQ ID NO: 847356

SEQ ID NO: 847364 - protein, 69 aa, Homo sapiens
AQKRPSQLIVTPASASDPPSLDLKAQVTFLITTRSRIGCGLDRLQWENVSAMIEEVFEATDIKITVYTL

SEQ ID NO: 847365 - protein, 152 aa, Homo sapiens; identical to SEQ ID NO: 847357

SEQ ID NO: 847366 - protein, 86 aa, Homo sapiens; identical to SEQ ID NO: 847356

SEQ ID NO: 847367 - protein, 86 aa, Homo sapiens; identical to SEQ ID NO: 847356

SEQ ID NO: 847368 - protein, 118 aa, Homo sapiens
MRKGINLLRVRFQAPNGLVLQPGQETETAWLGSKTEVCGPATANGAGKRGNDEPKGVVTAPGRRPGRSGLGGGARRSRGSGRTNGPLSPPGRQRGRAHRAPRRGRASPVASRTRDPAA

SEQ ID NO: 847369 - protein, 152 aa, Homo sapiens; identical to SEQ ID NO: 847357

SEQ ID NO: 847370 - protein, 152 aa, Homo sapiens; identical to SEQ ID NO: 847357

SEQ ID NO: 847371 - protein, 152 aa, Homo sapiens; identical to SEQ ID NO: 847357

SEQ ID NO: 847372 - protein, 86 aa, Homo sapiens; identical to SEQ ID NO: 847356

SEQ ID NO: 847373 - protein, 86 aa, Homo sapiens; identical to SEQ ID NO: 847356

SEQ ID NO: 847374 - protein, 152 aa, Homo sapiens; identical to SEQ ID NO: 847357

SEQ ID NO: 847375 - protein, 517 aa, Homo sapiens
MASGPGSQEREGLLIVKLEEDCAWSQELPPPDPGPSPEASHLRFRRFRFQEAAGPREALSRLQELCHGWLRPEMRTKEQILELLVLEQFLTILPQEIQSRVQELHPESGEEAVTLVEDMQRELGRLRQQEKRNLRTWKVFRLYALRTSTLRCCFLTRPEGRCPGVLSWEDLMTGRKGIGRLPQRVEWSRPWQEPQVAENWGDRRNCSQRNSIYVTLCGKNFSNNSNLIRHQRIHAAERLCMGVDCTEIFGGNPRFLSLHRAHLGEEAHKCLECGKCFSQNTHLTRHQRTHTGEKPYQCNICGKCFSCNSNLHRHQRTHTGEKPYKCPECGEIFAHSSNLLRHQRIHTGERPYKCPECGKSFSRSSHLVIHERTHERERLYPFSECGEAVSDSTPFLTNHGAHKAEKKLFECLTCGKSFRQGMHLTRHQRTHTGEKPYKCTLCGENFSHRSNLIRHQRIHTGEKPYTCHECGDSFSHSSNRIRHLRTHTGERPYKCSECGESFSRSSRLMSHQRTHTG

SEQ ID NO: 847376 - protein, 556 aa, Homo sapiens
MASGPGSQEREGLLIVKLEEDCAWSQELPPPDPGPSPEASHLRFRRFRFQEAAGPREALSRLQELCHGWLRPEMRTKEQILELLVLEQFLTILPQEIQSRVQELHPESGEEAVTLVEDMQRELGRLRQQSLTFPVRRSQAPRWDKEESYGIPVSRAAEEGLSPRGPAPGEEKFENLEGVPSVCSENIHPQVLLPDQARGEVPWSPELGRPHDRSQGDWAPPPEGGMEQALAGASSGRELGRPKELQPKKLHLCPLCGKNFSNNSNLIRHQRIHAAERLCMGVDCTEIFGGNPRFLSLHRAHLGEEAHKCLECGKCFSQNTHLTRHQRTHTGEKPYQCNICGKCFSCNSNLHRHQRTHTGEKPYKCPECGEIFAHSSNLLRHQRIHTGERPYKCPECGKSFSRSSHLVIHERTHERERLYPFSECGEAVSDSTPFLTNHGAHKAEKKLFECLTCGKSFRQGMHLTRHQRTHTGEKPYKCTLCGENFSHRSNLIRHQRIHTGEKPYTCHECGDSFSHSSNRIRHLRTHTGERPYKCSECGESFSRSSRLMSHQRTHTG

SEQ ID NO: 847377 - protein, 683 aa, Homo sapiens
MASGPGSQEREGLLIVKLEEDCAWSQELPPPDPGPSPEASHLRFRRFRFQEAAGPREALSRLQELCHGWLRPEMRTKEQILELLVLEQFLTILPQEIQSRVQELHPESGEEAVTLVEDMQRELGRLRQQVTNHGRGTEVLLEEPLPLETARESPSFKLEPMETERSPGPRLQELLGPSPQRDPQAVKERALSAPWLSLFPPEGNMEDKEMTGPQLPESLEDVAMYISQEEWGHQDPSKRALSRDTVQESYENVDSLESHIPSQEVPGTQVGQGGKLWDPSVQSCKEGLSPRGPAPGEEKFENLEGVPSVCSENIHPQVLLPDQARGEVPWSPELGRPHDRSQGDWAPPPEGGMEQALAGASSGRELGRPKELQPKKLHLCPLCGKNFSNNSNLIRHQRIHAAERLCMGVDCTEIFGGNPRFLSLHRAHLGEEAHKCLECGKCFSQNTHLTRHQRTHTGEKPYQCNICGKCFSCNSNLHRHQRTHTGEKPYKCPECGEIFAHSSNLLRHQRIHTGERPYKCPECGKSFSRSSHLVIHERTHERERLYPFSECGEAVSDSTPFLTNHGAHKAEKKLFECLTCGKSFRQGMHLTRHQRTHTGEKPYKCTLCGENFSHRSNLIRHQRIHTGEKPYTCHECGDSFSHSSNRIRHLRTHTGERPYKCSECGESFSRSSRLMSHQRTHTG

SEQ ID NO: 847378 - protein, 683 aa, Homo sapiens; identical to SEQ ID NO: 847377

SEQ ID NO: 847379 - protein, 681 aa, Homo sapiens
MASGPGSQEREGLLIVKLEEDCAWSQELPPPDPGPSPEASHLRFRRFRFQEAAGPREALSRLQELCHGWLRPEMRTKEQILELLVLEQFLTILPQEIQSRVQELHPESGEEAVTLVEDMQRELGRLRQQVTNHGRGTEVLLEEPLPLETARESPSFKLEPMETERSPGPRLQELLGPSPQRDPQAVKERALSAPWLSLFPPEGNMEDKEMTGPQLPESLEDVAMYISQEEWGHQDPSKRALSRDTVQESYENVDSLESHIPSQEVPGTQVGQGGKLWDPSVQSCKEGLSPRGPAPGEEKFENLEGVPSVCSENIHPQVLLPDQARGEVPWSPELGRPHDRSQGDWAPPPEGGMEQALAGASSGRELGRPKELQPKKLHLCPLCGKNFSNNSNLIRHQRIHAAERLCMGVDCTEIFGGNPRFLSLHRAHLGEEAHKCLECGKCFSQNTHLTRHQRTHTGEKPYQCNICGKCFSCNSNLHRHQRTHTGEKPYKCPECGEIFAHSSNLLRHQRIHTGERPYKCPECGKSFSRSSHLVIHERTHERERLYPFSECGEAVSDSTPFLTNHGAHKAEKKLFECLTCGKSFRQGMHLTRHQRTHTGEKPYKCTLCGENFSHRSNLIRHQRIHTGEKPYTCHECGDSFSHSSNRIRHLRTHTGERPYKCSECGESFSRSSRLMSHQRTL

SEQ ID NO: 847380 - protein, 618 aa, Homo sapiens
MASGPGSQEREGLLIVKLEEDCAWSQELPPPDPGPSPEASHLRFRRFRFQEAAGPREALSRLQELCHGWLRPEMRTKEQILELLVLEQFLTILPQEIQSRVQELHPESGEEAVTLVEDMQRELGRLRQQVTNHGRGTEVLLEEPLPLETARESPSFKLEPMETERSPGPRLQELLGPSPQRDPQAVKERALSAPWLSLFPPEGNMEDKEMTGPQLPESLEDVAMYISQEEWGHQDPSKRALSRDTVQESYENVDSLESHIPSQEVPGTQVGQGGKLWDPSVQSCKEGLSPRGPAPGEEKFENLEGVPSVCSENIHPQVLLPDQARGEVPWSPELGRPHDRSQGDWAPPPEGGMEQALAGASSGRELGRPKELQPKKLHLCPLCGKNFSNNSNLIRHQRIHAAERLCMGVDCTEIFGGNPRFLSLHRAHLGEEAHKCLECGKCFSQNTHLTRHQRTHTGEKPYQCNICGKCFSCNSNLHRHQRTHTGEKPYKCPECGEIFAHSSNLLRHQRIHTGERPYKCPECGKSFSRSSHLVIHERTHERERLYPFSECGEAVSDSTPFLTNHGAHKAEKKLFECLTCGKSFRQGMHLTRHQRTHTGEKPYKSDNPLWRMRFPPPV

SEQ ID NO: 847381 - protein, 681 aa, Homo sapiens; identical to SEQ ID NO: 847379

SEQ ID NO: 847382 - protein, 683 aa, Homo sapiens; identical to SEQ ID NO: 847377

SEQ ID NO: 847383 - protein, 598 aa, Homo sapiens
MASGPGSQEREGLLIVKLEEDCAWSQELPPPDPGPSPEASHLRFRRFRFQEAAGPREALSRLQELCHGWLRPEMRTKEQILELLVLEQFLTILPQEIQSRVQELHPESGEEAVTLVEDMQRELGRLRQQLPESLEDVAMYISQEEWGHQDPSKRALSRDTVQESYENVDSLESHIPSQEVPGTQVGQGGKLWDPSVQSCKEGLSPRGPAPGEEKFENLEGVPSVCSENIHPQVLLPDQARGEVPWSPELGRPHDRSQGDWAPPPEGGMEQALAGASSGRELGRPKELQPKKLHLCPLCGKNFSNNSNLIRHQRIHAAERLCMGVDCTEIFGGNPRFLSLHRAHLGEEAHKCLECGKCFSQNTHLTRHQRTHTGEKPYQCNICGKCFSCNSNLHRHQRTHTGEKPYKCPECGEIFAHSSNLLRHQRIHTGERPYKCPECGKSFSRSSHLVIHERTHERERLYPFSECGEAVSDSTPFLTNHGAHKAEKKLFECLTCGKSFRQGMHLTRHQRTHTGEKPYKCTLCGENFSHRSNLIRHQRIHTGEKPYTCHECGDSFSHSSNRIRHLRTHTGERPYKCSECGESFSRSSRLMSHQRTHTG

SEQ ID NO: 847384 - protein, 683 aa, Homo sapiens; identical to SEQ ID NO: 847377

SEQ ID NO: 847385 - protein, 683 aa, Homo sapiens; identical to SEQ ID NO: 847377

SEQ ID NO: 847386 - protein, 681 aa, Homo sapiens; identical to SEQ ID NO: 847379

SEQ ID NO: 847387 - protein, 694 aa, Homo sapiens
MASGPGSQEREGLLIVKLEEDCAWSQELPPPDPGPSPEASHLRFRRFRFQEAAGPREALSRLQELCHGWLRPEMRTKEQILELLVLEQFLTILPQEIQSRVQELHPESGEEAVTLVEDMQRELGRLRQQVTNHGRGTEVLLEEPLPLETARESPSFKLEPMETERSPGPRLQELLGPSPQRDPQAVKERALSAPWLSLFPPEGNMEDKEMTGPQLPESLEDVAMYISQEEWGHQDPSKRALSRDTVQESYENVDSLESHIPSQEVPGTQVGQGGKLWDPSVQSCKEGLSPRGPAPGEEKFENLEGVPSVCSENIHPQVLLPDQARGEVPWSPELGRPHDRSQGDWAPPPEGGMEQALAGASSGRELGRPKELQPKKLHLCPLCGKNFSNNSNLIRHQRIHAAERLCMGVDCTEIFGGNPRFLSLHRAHLGEEAHKCLECGKCFSQNTHLTRHQRTHTGEKPYQCNICGKCFSCNSNLHRHQRTHTGEKPYKCPECGEIFAHSSNLLRHQRIHTGERPYKCPECGKSFSRSSHLVIHERTHERERLYPFSECGEAVSDSTPFLTNHGAHKAEKKLFECLTCGKSFRQGMHLTRHQRTHTGEKPYKCTLCGENFSHRSNLIRHQRIHTGEKPYTCHECGDSFSHSSNRIRHLRTHTGERPYKCSECGESFSRSSRLMSHQRTPDNPLWRMRFPPPV

SEQ ID NO: 847388 - protein, 772 aa, Homo sapiens
MAEAHQAVAFQFTVTPDGVDFRLSREALKHVYLSGINSWKKRLIRIKNGILRGVYPGSPTSWLVVIMATVGSSFCNVDISLGLVSCIQRCLPQGCGPYQTPQTRALLSMAIFSTGVWVTGIFFFRQTLKLLLCYHGWMFEMHGKTSNLTRIWAMCIRLLSSRHPMLYSFQTSLPKLPVPRVSATIQRYLESVRPLLDDEEYYRMELLAKEFQDKTAPRLQKYLVLKSWWASNYVSDWWEEYIYLRGRSPLMVNSNYYVMDLVLIKNTDVQAARLGNIIHAMIMYRRKLDREEIKPVMALGIVPMCSYQMERMFNTTRIPGKDTDVLQHLSDSRHVAVYHKGRFFKLWLYEGARLLKPQDLEMQFQRILDDPSPPQPGEEKLAALTAGGRVEWAQARQAFFSSGKNKAALEAIERAAFFVALDEESYSYDPEDEASLSLYGKALLHGNCYNRWFDKSFTLISFKNGQLGLNAEHAWADAPIIGHLWEFVLGTDSFHLGYTETGHCLGKPNPALAPPTRLQWDIPKQCQAVIESSYQVAKALADDVELYCFQFLPFGKGLIKKCRTSPDAFVQIALQLAHFRDRGKFCLTYEASMTRMFREGRTETVRSCTSESTAFVQAMMEGSHTKADLRDLFQKAAKKHQNMYRLAMTGAGIDRHLFCLYLVSKYLGVSSPFLAEVLSEPWRLSTSQIPQSQIRMFDPEQHPNHLGAGGGFGPVADDGYGVSYMIAGENTIFFHISSKFSSSETNAQRFGNHIRKALLDIADLFQVPKAYS

SEQ ID NO: 847389 - protein, 227 aa, Homo sapiens
GLAGGAGRGQPLVAGWGARGVADWLGASRRGWRRGRPKRARAPICPRPRCRPTPRMAEAHQAVAFQFTVTPDGVDFRLSREALKHVYLSGINSWKKRLIRIKNGILRGVYPGSPTSWLVVIMATVGSSFCNVDISLGLVSCIQRCLPQGCGPYQTPQTRALLSMAIFSTGVWVTGIFFFRQTLKLLLCYHGWMFEMHGKTSNLTRIWAVSSSQWRGSGTWVETLWTP

SEQ ID NO: 847390 - protein, 395 aa, Homo sapiens; identical to SEQ ID NO: 847046

SEQ ID NO: 847391 - protein, 772 aa, Homo sapiens; identical to SEQ ID NO: 847388

SEQ ID NO: 847392 - protein, 772 aa, Homo sapiens; identical to SEQ ID NO: 847388

SEQ ID NO: 847393 - protein, 772 aa, Homo sapiens; identical to SEQ ID NO: 847388

SEQ ID NO: 847394 - protein, 772 aa, Homo sapiens; identical to SEQ ID NO: 847388

SEQ ID NO: 847395 - protein, 799 aa, Homo sapiens
MAEAHQAVAFQFTVTPDGVDFRLSREALKHVYLSGINSWKKRLIRIKNGILRGVYPGSPTSWLVVIMATVGSSFCNVDISLGLVSCIQRCLPQGCGPYQTPQTRALLSMAIFSTGVWVTGIFFFRQTLKLLLCYHGWMFEMHGKTSNLTRIWAMCIRLLSSRHPMLYSFQTSLPKLPVPRVSATIQRYLESVRPLLDDEEYYRMELLAKEFQDKTAPRLQKYLVLKSWWASNYVSDWWEEYIYLRGRSPLMVNSNYYVMDLVLIKNTDVQAARLGNIIHAMIMYRRKLDREEIKPVMALGIVPMCSYQMERMFNTTRIPGKDTDVLQHLSDSRHVAVYHKGRFFKLWLYEGARLLKPQDLEMQFQRILDDPSPPQPGEEKLAALTAGGRVEWAQARQAFFSSGKNKAALEAIERAAFFVALDEESYSYDPEDEASLSLYGKALLHGNCYNRWFDKSFTLISFKNGQLGLNAEHAWADAPIIGHLWEFVLGTDSFHLGYTETGHCLGKPNPALAPPTRLQWDIPKQCQAVIESSYQVAKALADDVELYCFQFLPFGKGLIKKCRTSPDAFVQIALQLAHFRVGAPPPAAERAGGTRVHLPDSPLCISQDRGKFCLTYEASMTRMFREGRTETVRSCTSESTAFVQAMMEGSHTKADLRDLFQKAAKKHQNMYRLAMTGAGIDRHLFCLYLVSKYLGVSSPFLAEVLSEPWRLSTSQIPQSQIRMFDPEQHPNHLGAGGGFGPVADDGYGVSYMIAGENTIFFHISSKFSSSETNAQRFGNHIRKALLDIADLFQVPKAYS

SEQ ID NO: 847396 - protein, 772 aa, Homo sapiens; identical to SEQ ID NO: 847388

SEQ ID NO: 847397 - protein, 721 aa, Homo sapiens
MAEAHQAVAFQFTVTPDGVDFRLSREALKHVYLSGINSWKKRLIRIKNGILRGVYPGSPTSWLVVIMATVGSSFCNVDISLGLVSCIQRCLPQGCGPYQTPQTRALLSMAIFSTGVWVTGIFFFRQTLKLLLCYHGWMFEMHGKTSNLTRIWAMCIRLLSSRHPMLYSFQTSLPKLPVPRVSATIQRYLESVRPLLDDEEYYRMELLAKEFQDKTAPRLQKYLVLKSWWASNYVSDWWEEYIYLRGRSPLMVNSNYYVMDLVLIKNTDVQAARLGNIIHAMIMYRRKLDREEIKPVMALGIVPMCSYQMERMFNTTRIPGKDTDVLQHLSDSRHVAVYHKGRFFKLWLYEGARLLKPQDLEMQFQRILDDPSPPQPGEEKLAALTAGGRVEWAQARQAFFSSGKNKAALEAIERAAFFVALDEESYSYDPEDEASLSLYGKALLHGNCYNRWFDKSFTLISFKNGQLGLNAEHAWADAPIIGHLWEFVLGTDSFHLGYTETGHCLGKPNPALAPPTRLQWDIPKQCQAVIESSYQVAKALADDVELYCFQFLPFGKGLIKKCRTSPDAFVQIALQLAHFRDRGKFCLTYEASMTRMFREGRTETVRSCTSESTAFVQAMMEGSHTKADLRDLFQKAAKKHQNMYRLAMTGAGIDRHLFCLYLVSKYLGVSSPFLAEVLSEPWRLSTSQIPQSQIRMFDPEQHPNHLGAGGGFGPVSAPEGG

SEQ ID NO: 847398 - protein, 135 aa, Homo sapiens [sequence omitted]

SEQ ID NO: 847399 - protein, 341 aa, Homo sapiens
MAEAHQAVAFQFTVTPDGVDFRLSREALKHVYLSGINSWKKRLIRIKNGILRGVYPGSPTSWLVVIMATVGSSFCNVDISLGLVSCIQRCLPQGCGPYQTPQTRALLSMAIFSTGVWVTGIFFFRQTLKLLLCYHGWMFEMHGKTSNLTRIWAMCIRLLSSRHPMLYSFQTSLPKLPVPRVSATIQRYLESVRPLLDDEEYYRMELLAKEFQDKTAPRLQKYLVLKSWWASNYVSDWWEEYIYLRGRSPLMVNSNYYVMDLVLIKNTDVQAARLGNIIHAMIMYRRKLDREEIKPVMALGIVPMCSYQMERMFNTTRIPGKDTGLLVLREREWKHPAQGLV

SEQ ID NO: 847400 - protein, 127 aa, Homo sapiens
MAAEATAVAGSGAVGGCLAKDGLQQSKCPDTTPKRRRASSLSRDAERRAYQWCREYLGGAWRRVQPEELRVYPVRWEVRGQPLRCADRGQGSAAGPSGCSMFSPPSCARAWGGAGPAWPGGGRGRGR

SEQ ID NO: 847401 - protein, 135 aa, Homo sapiens [sequence omitted]

SEQ ID NO: 847402 - protein, 158 aa, Homo sapiens
MAQFHGMEMPFTKEPHWLFGTMERYLKQIQDLPPTGLPEMNLLEMYSLKDEMGNLRKLLESTPSPVVFCHNDIQEGRRRHLSLLTQDGRARGLWSEQNLTPFPQGTSCCSQSQKMLTASCWWTSSTAVITIGEAGKMASHRSVPIGLLKTGQLPRAFG

SEQ ID NO: 847403 - protein, 827 aa, Homo sapiens
GLAGGAGRGQPLVAGWGARGVADWLGASRRGWRRGRPKRARAPICPRPRCRPTPRMAEAHQAVAFQFTVTPDGVDFRLSREALKHVYLSGINSWKKRLIRIKNGILRGVYPGSPTSWLVVIMATVGSSFCNVDISLGLVSCIQRCLPQGCGPYQTPQTRALLSMAIFSTGVWVTGIFFFRQTLKLLLCYHGWMFEMHGKTSNLTRIWAMCIRLLSSRHPMLYSFQTSLPKLPVPRVSATIQRYLESVRPLLDDEEYYRMELLAKEFQDKTAPRLQKYLVLKSWWASNYVSDWWEEYIYLRGRSPLMVNSNYYVMDLVLIKNTDVQAARLGNIIHAMIMYRRKLDREEIKPVMALGIVPMCSYQMERMFNTTRIPGKDTDVLQHLSDSRHVAVYHKGRFFKLWLYEGARLLKPQDLEMQFQRILDDPSPPQPGEEKLAALTAGGRVEWAQARQAFFSSGKNKAALEAIERAAFFVALDEESYSYDPEDEASLSLYGKALLHGNCYNRWFDKSFTLISFKNGQLGLNAEHAWADAPIIGHLWEFVLGTDSFHLGYTETGHCLGKPNPALAPPTRLQWDIPKQCQAVIESSYQVAKALADDVELYCFQFLPFGKGLIKKCRTSPDAFVQIALQLAHFRDRGKFCLTYEASMTRMFREGRTETVRSCTSESTAFVQAMMEGSHTKADLRDLFQKAAKKHQNMYRLAMTGAGIDRHLFCLYLVSKYLGVSSPFLAEVLSEPWRLSTSQIPQSQIRMFDPEQHPNHLGAGGGFGPVADDGYGVSYMIAGENTIFFHISSKFSSSETNAQRFGNHIRKALLDIADLFQVPKAYS

SEQ ID NO: 847404 - protein, 38 aa, Homo sapiens
MSWYELEPPGPRTCSALSQLQGKGSGGQPRALVAASVG

SEQ ID NO: 847405 - protein, 772 aa, Homo sapiens; identical to SEQ ID NO: 847388

SEQ ID NO: 847406 - protein, 772 aa, Homo sapiens; identical to SEQ ID NO: 847388

SEQ ID NO: 847407 - protein, 772 aa, Homo sapiens; identical to SEQ ID NO: 847388

SEQ ID NO: 847408 - protein, 714 aa, Homo sapiens
MASSGACTLAAPPAGWSSSWQQWVPPSATWTSPWGWCGPYQTPQTRALLSMAIFSTGVWVTGIFFFRQTLKLLLCYHGWMFEMHGKTSNLTRIWAMCIRLLSSRHPMLYSFQTSLPKLPVPRVSATIQRYLESVRPLLDDEEYYRMELLAKEFQDKTAPRLQKYLVLKSWWASNYVSDWWEEYIYLRGRSPLMVNSNYYVMDLVLIKNTDVQAARLGNIIHAMIMYRRKLDREEIKPVMALGIVPMCSYQMERMFNTTRIPGKDTDVLQHLSDSRHVAVYHKGRFFKLWLYEGARLLKPQDLEMQFQRILDDPSPPQPGEEKLAALTAGGRVEWAQARQAFFSSGKNKAALEAIERAAFFVALDEESYSYDPEDEASLSLYGKALLHGNCYNRWFDKSFTLISFKNGQLGLNAEHAWADAPIIGHLWEFVLGTDSFHLGYTETGHCLGKPNPALAPPTRLQWDIPKQCQAVIESSYQVAKALADDVELYCFQFLPFGKGLIKKCRTSPDAFVQIALQLAHFRDRGKFCLTYEASMTRMFREGRTETVRSCTSESTAFVQAMMEGSHTKADLRDLFQKAAKKHQNMYRLAMTGAGIDRHLFCLYLVSKYLGVSSPFLAEVLSEPWRLSTSQIPQSQIRMFDPEQHPNHLGAGGGFGPVADDGYGVSYMIAGENTIFFHISSKFSSSETNAQRFGNHIRKALLDIADLFQVPKAYS

SEQ ID NO: 847409 - protein, 772 aa, Homo sapiens; identical to SEQ ID NO: 847388

SEQ ID NO: 847410 - protein, 453 aa, Homo sapiens
MAEAHQAVAFQFTVTPDGVDFRLSREALKHVYLSGINSWKKRLIRIKNGILRGVYPGSPTSWLVVIMATVGSSFCNVDISLGLVSCIQRCLPQGCGPYQTPQTRALLSMAIFSTGVWVTGIFFFRQTLKLLLCYHGWMFEMHGKTSNLTRIWAMCIRLLSSRHPMLYSFQTSLPKLPVPRVSATIQRYLESVRPLLDDEEYYRMELLAKEFQDKTAPRLQKYLVLKSWWASNYVSDWWEEYIYLRGRSPLMVNSNYYVMDLVLIKNTDVQAARLGNIIHAMIMYRRKLDREEIKPVMALGIVPMCSYQMERMFNTTRIPGKDTDVLQHLSDSRHVAVYHKGRFFKLWLYEGARLLKPQDLEMQFQRILDDPSPPQPGEEKLAALTAGGRVEWAQARQAFFSSGKNKAALEAIERAAFFVALDEESYSYDPEDEASLSLYGKALLHGNCYNRCI

SEQ ID NO: 847411 - protein, 225 aa, Homo sapiens [sequence omitted]

SEQ ID NO: 847412 - protein, 135 aa, Homo sapiens [sequence omitted]

SEQ ID NO: 847413 - protein, 159 aa, Homo sapiens
MNLLEMYSLKDEMGNLRKLLESTPSPVVFCHNDIQEGRRRHLSLLTQDGRARGLWSEQNLTPFPQGTSCCSQSQKMLTASCWWTSSTAVITIGALTLGTIFVSGFMIILTRNGLSTKQGPQTTPLKNSSCILFVITWQRQRKVRPSPKRSRENWKKICW

SEQ ID NO: 847414 - protein, 136 aa, Homo sapiens
PSDCLLRTLLLKMSWPAVPFLHQLNVMPPRHDPESCLEEPYPQLTLPMSWQCQAVIESSYQVAKALADDVELYCFQFLPFGKGLIKKCRTSPDAFVQIALQLAHFRVGAPPPAAERAGWYQGPPARFTPLYIPGQG

SEQ ID NO: 847415 - protein, 254 aa, Homo sapiens
MGAAVFFGCTFVAFGPAFALFLITVAGDPLRVIILVAGAFFWLVSLLLASVVWFILVHVTDRSDARLQYGLLIFGAAVSVLLQEVFRFAYYKLLKKADEGLASLSEDGRSPISIRQMAYVSGLSFGIISGVFSVINILADALGPGVVGIHGDSPYYFLTSAFLTAAIILLHTFWGVVFFDACERRRYWALGLVVGSHLLTSGLTFLNPWYEASLLPIYAVTVSMGLWAFITAGGSLRSIQRSLLSSCVRTDYLD

SEQ ID NO: 847416 - protein, 254 aa, Homo sapiens; identical to SEQ ID NO: 847415

SEQ ID NO: 847417 - protein, 138 aa, Homo sapiens
MAYVSGLSFGIISGVFSVINILADALGPGVVGIHGDSPYYFLTSAFLTAAIILLHTFWGVVFFDACERRRYWALGLVVGSHLLTSGLTFLNPWYEASLLPIYAVTVSMGLWAFITAGGSLRSIQRSLLSSCVRTDYLD

SEQ ID NO: 847418 - protein, 270 aa, Homo sapiens
REYQEHQQDHQHQGILSRQQGQGDQGDQLHQDVHLTHLKMGQMDPLRVIILFAGAFFWLVSLLLASVVWFILVHVTDRSDARLQYGLLIFGAAVSVLLQEVFRFAYYKLLKKADEGLASLSEDGRSPISIRQMAYVSGLSFGIISGVFSVINILADALGPGVVGIHGDSPYYFLTSAFLTAAIILLHTFWGVVFFDACERRRYWALGLVVGSHLLTSGLTFLNPWYEASLLPIYAVTVSMGLWAFITAGGSLRSIQRSLLSSCVRTDYLD

SEQ ID NO: 847419 - protein, 229 aa, Homo sapiens
MGAAVFFGCTFVAFGPAFALFLITVAGDPLRVIILVAGAFFWLVSLLLASVVWFILVHVTDRSDARLQYGLLIFGAAVSVLLQEVFRFAYYKLLKKADEGLASLSEDGRSPISIRQMAYGVVGIHGDSPYYFLTSAFLTAAIILLHTFWGVVFFDACERRRYWALGLVVGSHLLTSGLTFLNPWYEASLLPIYAVTVSMGLWAFITAGGSLRSIQRSLLSSCVRTDYLD

SEQ ID NO: 847420 - protein, 192 aa, Homo sapiens
RDAAGRYRGSPALTNTLITVAGDPLRVIILVAGKADEGLASLSEDGRSPISIRQMAYVSGLSFGIISGVFSVINILADALGPGVVGIHGDSPYYFLTSAFLTAAIILLHTFWGVVFFDACERRRYWALGLVVGSHLLTSGLTFLNPWYEASLLPIYAVTVSMGLWAFITAGGSLRSIQRSLLSSCVRTDYLD

SEQ ID NO: 847421 - protein, 142 aa, Homo sapiens
MRSSLPPVSGLSFGIISGVFSVINILADALGPGVVGIHGDSPYYFLTSAFLTAAIILLHTFWGVVFFDACERRRYWALGLVVGSHLLTSGLTFLNPWYEASLLPIYAVTVSMGLWAFITAGGSLRSIQRSLLSSCVRTDYLD

SEQ ID NO: 847422 - protein, 113 aa, Homo sapiens
LSSDPMKGDETHPITSCRSAFLTAAIILLHTFWGVVFFDACERRRYWALGLVVGSHLLTSGLTFLNPWYEASLLPIYAVTVSMGLWAFITAGGSLRSIQRSLLSSCVRTDYLD

SEQ ID NO: 847423 - protein, 264 aa, Homo sapiens
MGAAVFFGCTFVAFGPAFALFLITVAGDPLRVIILVAGAFFWLVSLLLASVVWFILVHVTDRSDARLQYGLLIFGAAVSVLLQEVFRFAYYKLLKKADEGLASLSEDGRSPISIRQMAYVSGLSFGIISGVFSVINILADALGPGVVGIHGDSPYYFLTSAFLTAAIILLHTFWGVVFFDACERRRYWALGLVVGSHLLTSGLTFLNPWYEASLLPIYAVTVSMGLWAFITAGGSLRSIQRSLLCSALALSILSPFLSCREACP

SEQ ID NO: 847424 - protein, 257 aa, Homo sapiens
  misc_feature (212)..(212): Xaa can be any naturally occurring amino acid
  misc_feature (214)..(214): Xaa can be any naturally occurring amino acid
  misc_feature (225)..(225): Xaa can be any naturally occurring amino acid
  misc_feature (247)..(247): Xaa can be any naturally occurring amino acid
  misc_feature (256)..(256): Xaa can be any naturally occurring amino acid
MGAAVFFGCTFVAFGPAFALFLITVAGDPLRVIILVAGAFFWLVSLLLASVVWFILVHVTDRSDARLQYGLLIFGAAVSVLLQEVFRFAYYKLLKKADEGLASLSEDGRSPISIRQMAYVSGLSFGIISGVFSVINILADALGPGVVGIHGDSPYYFLTSAFLTAAIILLHTFWGVVFFDACERRRYWALGLVVGSHLLTSGLTIPEPPGNXGXAWLPNLMASQXVFQWGLLGPFNQQAGKGSPPGXYFKRQAPWXA

SEQ ID NO: 847425 - protein, 161 aa, Homo sapiens
MGAAVFFGCTFVAFGPAFALFLITVAGDPLRVIILVAGAFFWLVSLLLASVVWFILVHVTDRSDARLQYGLLIFGAAVSVLLQEVFRFAYYKLLKKADEGLASLSEDGRSPISIRQMAYVSGLSFGIISGVFSVINILADALGPGVVGIHGDSPYYFLTSG

SEQ ID NO: 847426 - protein, 141 aa, Homo sapiens
  misc_feature (96)..(96): Xaa can be any naturally occurring amino acid
  misc_feature (98)..(98): Xaa can be any naturally occurring amino acid
  misc_feature (109)..(109): Xaa can be any naturally occurring amino acid
  misc_feature (131)..(131): Xaa can be any naturally occurring amino acid
  misc_feature (140)..(140): Xaa can be any naturally occurring amino acid
MAYVSGLSFGIISGVFSVINILADALGPGVVGIHGDSPYYFLTSAFLTAAIILLHTFWGVVFFDACERRRYWALGLVVGSHLLTSGLTIPEPPGNXGXAWLPNLMASQXVFQWGLLGPFNQQAGKGSPPEXNFKRQAPWXA

SEQ ID NO: 847427 - protein, 254 aa, Homo sapiens; identical to SEQ ID NO: 847415

SEQ ID NO: 847428 - protein, 318 aa, Homo sapiens
MGAAVFFGCTFVAFGPAFALFLITVAGDPLRVIILVAGAFFWLVSLLLASVVWFILVHVTDRSDARLQYGLLIFGAAVSVLLQEVFRFAYYKLLKKADEGLASLSEDGRSPISIRQMAYVSGLSFGIISGVFSVINILADALGPGVVGIHGDSPYYFLTSAFLTAAIILLHTFWGVVFFDACERRRYWALGLVVGSHLLTSGLTFLNPWYEASLLPIYAVTVSMGLWAFITAGGSLRSIQRSLLCRPTAGGQSGDGVFCPAHPTRGLREPRGDPWAWGALLMSSPCISPSPVLDSAGCQEKGPSLAIALEMKLMEAQG

SEQ ID NO: 847429 - protein, 254 aa, Homo sapiens; identical to SEQ ID NO: 847415

SEQ ID NO: 847430 - protein, 197 aa, Homo sapiens
MGAAVFFGCTFVAFGPAFALFLITVAGDPLRVIILVAGKADEGLASLSEDGRSPISIRQMAYVSGLSFGIISGVFSVINILADALGPGVVGIHGDSPYYFLTSAFLTAAIILLHTFWGVVFFDACERRRYWALGLVVGSHLLTSGLTFLNPWYEASLLPIYAVTVSMGLWAFITAGGSLRSIQRSLLSSCVRTDYLD

SEQ ID NO: 847431 - protein, 169 aa, Homo sapiens
HSSKALVIETKADEGLASLSEDGRSPISIRQMAYVSGLSFGIISGVFSVINILADALGPGVVGIHGDSPYYFLTSAFLTAAIILLHTFWGVVFFDACERRRYWALGLVVGSHLLTSGLTFLNPWYEASLLPIYAVTVSMGLWAFITAGGSLRSIQRSLLSSCVRTDYLD

SEQ ID NO: 847432 - protein, 167 aa, Homo sapiens
MGAAVFFGCTFVAFGPAFALFLITVAGDPLRVIILVAGAFFWLVSLLLASVVWFILVHVTDRSDARLQYGLLIFGAAVSVLLQEVFRFAYYKLLKKADEGLASLSEDGRSPISIRQMAYVSGLSFGIISGVFSVINILADALGPGVVGIHGDSPYYFLTSDIPEPLV

SEQ ID NO: 847433 - protein, 254 aa, Homo sapiens; identical to SEQ ID NO: 847415

SEQ ID NO: 847434 - protein, 161 aa, Homo sapiens
MGAAVFFGCTFVAFGPAFALFLITVAGDPLRVIILVAGAFFWLVSLLLASVVWFILVHVTDRSDARLQYGLLIFGAAVSVLLQEVFRFAYYKLLKKADEGLASLSEDGRSPISIRQMAYVSGLSFGIISGVFSVINILADALGPGVVGIHGDSPYYFLTSV

SEQ ID NO: 847435 - protein, 207 aa, Homo sapiens
MGAAVFFGCTFVAFGPAFALFLITVAGDPLRVIILVAGKADEGLASLSEDGRSPISIRQMAYVSGLSFGIISGVFSVINILADALGPGVVGIHGDSPYYFLTSAFLTAAIILLHTFWGVVFFDACERRRYWALGLVVGSHLLTSGLTFLNPWYEASLLPIYAVTVSMGLWAFITAGGSLRSIQRSLLCSALALSILSPFLSCREACP

SEQ ID NO: 847436 - protein, 757 aa, Homo sapiens [sequence omitted]

SEQ ID NO: 847437 - protein, 140 aa, Homo sapiens
MALGEEKAEAEASEDTKAQSYGRGSCRELGEPWTFPWGPNRGGGCMPPTALERLEREVLNRSAFVLRGGAMTRGDYPLLTINYGLGTFGRPLIPPWAMAHPFVKEKGPQTPRSLNKCWPPVLWNIAAESVSGKCNWPRVV

SEQ ID NO: 847438 - protein, 757 aa, Homo sapiens [sequence omitted]

SEQ ID NO: 847439 - protein, 757 aa, Homo sapiens [sequence omitted]

SEQ ID NO: 847440 - protein, 554 aa, Homo sapiens
MALGEEKAEAEASEDTKAQSYGRGSCRERELDIPGPMSGEQPPRLEAEGGLISPVWGAEGIPAPTCWIGTDPGSPSRAHQPQASDANREPVAERSEPALSGLPPATMGSGDLLLSGESQVEKTKLSSSEEFPQTLSLPRTTTICSGHDADTEDDPSLADLPQALDLSQQPHSSGLSCLSQWKSVLSPGSAAQPSSCSISASSTGSSLQGHQERAEPRGGSLAKVSSSLEPVVPQEPSSVVGLGPRPQWSPQPVFSGGDASGLGRRRLSFQAEYWACVLPDSLPPSPDRHSPLWNPNKEYEDLLDYTYPLRPGPQLPKHLDSRVPADPVLQDSGVDLDSFSVSPASTLKSPTNVSPNCPPAEATALPFSGPREPSLKQWPSRVPQKQGGMGLASWSQLASTPRAPGSRDARWERREPALRGAKDRLTIGKHLDMGSPQLRTRDRGWPSPRPEREKRTSQSARRPTCTESRWKSEEEVESDDEYLALPARLTQVSSLVSYLGSISTLVTLPTGDIKGQSPLEVSDSDGPASFPSSSSQSHFPGKEENREKNHWCNV

SEQ ID NO: 847441 - protein, 757 aa, Homo sapiens [sequence omitted]

SEQ ID NO: 847442 - protein, 188 aa, Homo sapiens
MALGEEKAEAEASEDTKAQSYGRGSCRERELDIPGPMSGEQPPRLEAEGGLISPVWGAEGIPAPTCWIGTDPGSPSRAHQPQASDANREPVAERSEPALSGLPPATMGSGDLLLSGESQVEKTKLSSSEEFPQTLSLPRTTTICSGHDADTEDDPSLADLPQALDLSQQPHSSGLSCLSQHFAVSWKS

SEQ ID NO: 847443 - protein, 160 aa, Homo sapiens [sequence omitted]

SEQ ID NO: 847444 - protein, 700 aa, Homo sapiens
MALGEEKAEAEASEDTKAQSYGRGSCRERELDIPGPMSGEQPPRLEAEGGLISPVWGAEGIPAPTCWIGTDPGSPSRAHQPQASDANREPVAERSEPALSGLPPATMGSGDLLLSGESQVEKTKLSSSEEFPQTLSLPRTTTICSGHDADTEDDPSLADLPQALDLSQQPHSSGLSCLSQWKSVLSPGSAAQPSSCSISASSTGSSLQGHQERAEPRGGSLAKVSSSLEPVVPQEPSSVVGLGPRPQWSPQPVFSGGDASGLGRRRLSFQAEYWACVLPDSLPPSPDRHSPLWNPNKEYEDLLDYTYPLRPGPQLPKHLDSRVPADPVLQDSGVDLDSFSVSPASTLKSPTNVSPNCPPAEATALPFSGPREPSLKQWPSRVPQKQGGMGLASWSQLASTPRAPGSRDARWERREPALRGAKDRLTIGKHLDMGSPQLRTRDRGWPSPRPEREKRTSQSARRPTCTESRWKSEEEVESDDEYLALPARLTQVSSLVSYLGSISTLVTLPTGDIKGQSPLEVSDSDGPASFPSSSSQSQLPPGAALQGSGDPEGQNPCFLRSFVRAHDSAGEGSLGSSQALGVSSGLLKTRPSLPARLDRWPFSDPDVEGQLPRKGGEQGKESLVQCVKTFCCQLEELICWLYNVADVTDHGTAARSNLTSLKSSLQLYRVICGPGSGLFPHKSVAKLLDYKVKSQITKIW

SEQ ID NO: 847445 - protein, 757 aa, Homo sapiens [sequence omitted]

SEQ ID NO: 847446 - protein, 502 aa, Homo sapiens
MALGEEKAEAEASEDTKAQSYGRGSCRERELDIPGPMSGEQPPRLEAEGGLISPVWGAEGIPAPTCWIGTDPGSPSRAHQPQASDANREPVAERSEPALSGLPPATMGSGDLLLSGESQVEKTKLSSSEEFPQTLSLPRTTTICSGHDADTEDDPSLADLPQALDLSQQPHSSGLSCLSQWKSVLSPGSAAQPSSCSISASSTGSSLQGHQERAEPRGGSLAKVSSSLEPVVPQEPSSVVGLGPRPQWSPQPVFSGGDASGLGRRRLSFQAEYWACVLPDSLPPSPDRHSPLWNPNKEYEDLLDYTYPLRPGPQLPKHLDSRVPADPVLQDSGVDLDSFSVSPASTLKSPTNVSPNCPPAEATALPFSGPREPSLKQWPSRVPQKQGGMGLASWSQLASTPRAPGSRDARWERREPALRGAKDRLTIGKHLDMGSPQLRTRDRGWPSPRPEREKRTSQSARRPTCTESRWKSEEEVESDDEYLALPARLTQVGPVAILRPRC

SEQ ID NO: 847447 - protein, 620 aa, Homo sapiens
MALGEEKAEAEASEDTKAQSYGRGSCRERELDIPGPMSGEQPPRLEAEGGLISPVWGAEGIPAPTCWIGTDPGSPSRAHQPQASDANREPVAERSEPALSGLPPATMGSGDLLLSGESQVEKTKLSSSEEFPQTLSLPRTTTICSGHDADTEDDPSLADLPQALDLSQQPHSSGLSCLSQWKSVLSPGSAAQPSSCSISASSTGSSLQGHQERAEPRGGSLAKVSSSLEPVVPQEPSSVVGLGPRPQWSPQPVFSGGDASGLGRRRLSFQAEYWACVLPDSLPPSPDRHSPLWNPNKEYEDLLDYTYPLRPGPQLPKHLDSRVPADPVLQDSGVDLDSFSVSPASTLKSPTNVSPNCPPAEATALPFSGPREPSLKQWPSRVPQKQGGMGLASWSQLASTPRAPGSRDARWERREPALRGAKDRLTIGKHLDMGSPQLRTRDRGWPSPRPEREKRTSQSARRPTCTESRWKSEEEVESDDEYLALPARLTQTFCCQLEELICWLYNVADVTDHGTAARSNLTSLKSSLQLYRQFKKDIDEHQSLTESVLQKGEILLQCLLENTPVLEDVLGRIAKQSGELESHADRLYDSILASLDMLAGCTLIPDKKPMAAMEHPCEGV

SEQ ID NO: 847448 - protein, 95 aa, Homo sapiens
RVLMAEIGEDLDKSDVSSLIFLMKDYMGRGKISKEKSFLDLVVELEKLNLVAPDQLDLLEKCLKNIHRIDLKTKIQKYKQSDILLSAGRADLLAV

SEQ ID NO: 847449 - protein, 673 aa, Homo sapiens
FCSPGKARWRRRSPDPMVAGGRPLSAGSDLSGESQVEKTKLSSSEEFPQTLSLPRTTTICSGHDADTEDDPSLADLPQALDLSQQPHSSGLSCLSQWKSVLSPGSAAQPSSCSISASSTGSSLQGHQERAEPRGGSLAKVSSSLEPVVPQEPSSVVGLGPRPQWSPQPVFSGGDASGLGRRRLSFQAEYWACVLPDSLPPSPDRHSPLWNPNKEYEDLLDYTYPLRPGPQLPKHLDSRVPADPVLQDSGVDLDSFSVSPASTLKSPTNVSPNCPPAEATALPFSGPREPSLKQWPSRVPQKQGGMGLASWSQLASTPRAPGSRDARWERREPALRGAKDRLTIGKHLDMGSPQLRTRDRGWPSPRPEREKRTSQSARRPTCTESRWKSEEEVESDDEYLALPARLTQVSSLVSYLGSISTLVTLPTGDIKGQSPLEVSDSDGPASFPSSSSQSQLPPGAALQGSGDPEGQNPCFLRSFVRAHDSAGEGSLGSSQALGVSSGLLKTRPSLPARLDRWPFSDPDVEGQLPRKGGEQGKESLVQCVKTFCCQLEELICWLYNVADVTDHGTAARSNLTSLKSSLQLYRQFKKDIDEHQSLTESVLQKGEILLQCLLENTPVLEDVLGRIAKQSGELESHADRLYDSILASLDMLAGCTLIPDKKPMAAMEHPCEGV

SEQ ID NO: 847450 - protein, 627 aa, Homo sapiens
MALGEEKAEAEASEDTKAQSYGRGSCRERELDIPGPMSGEQPPRLEAEGGLISPVWGAEGIPAPTCWIGTDPGSPSRAHQPQASDANREPVAERSEPALSGLPPATMGSGDLLLSGESQVEKTKLSSSEEFPQTLSLPRTTTICSGHDADTEDDPSLADLPQALDLSQQPHSSGLSCLSQWKSVLSPGSAAQPSSCSISASSTGSSLQGHQERAEPRGGSLAKVSSSLEPVVPQEPSSVVGLGPRPQWSPQPVFSGGDASGLGRRRLSFQAEYWACVLPDSLPPSPDRHSPLWNPNKEYEDLLDYTYPLRPGPQLPKHLDSRVPADPVLQDSGVDLDSFSVSPASTLKSPTNVSPNCPPAEATALPFSGPREPSLKQWPSRVPQKQGGMGLASWSQLASTPRAPGSRDARWERREPALRGAKDRLTIGKHLDMGSPQLRTRDRGWPSPRPEREKRTSQSARRPTCTESRWKSEEEVESDDEYLALPARLTQVSSLVSYLGSISTLVTLPTGDIKGQSPLEVSDSDGPASFPSSSSQSQLPPGAALQGSGDPEGQNPCFLRSFVRAHDSAGEGSLGSSQALGVSSGLLKTRPSLPARLDRWPFSDPDVEGQLPRKGGEQGHFAVSWKS

SEQ ID NO: 847451 - protein, 160 aa, Homo sapiens [sequence omitted]

SEQ ID NO: 847452 - protein, 114 aa, Homo sapiens [sequence omitted]

SEQ ID NO: 847453 - protein, 123 aa, Homo sapiens
LSPGWSCFDAEYALILRTRLRERAPYYSRALLRTARPARMWLPPRRVSRYFRCQKLALRRLLLPSSSRKVPRAMMAGLRDIAPLVNLPFRARWTSDASPGDPGAQRCDILSGLELQFCRPNTG

SEQ ID NO: 847454 - protein, 554 aa, Homo sapiens; identical to SEQ ID NO: 847440

SEQ ID NO: 847455 - protein, 188 aa, Homo sapiens; identical to SEQ ID NO: 847442

SEQ ID NO: 847456 - protein, 261 aa, Homo sapiens
MSISGVSMPTLGPLTSTLGPFRSPSSLGTEMSISPFILGPFKFKSMSLMEICGLLKCTSGILNLGPLSFPSGPSMSTSGPFRSLSTLGSETSTSPFTLGPFRCKSKSGIEILGALMFISGILNLGPFNFPSGPSILTSGVSMSKLGPFMSISGPLRSPSTLGRETSTSPFTLGPFKLKSMSGMEILGALMFISGILNFGPLSFASGPSILTSGASMSTLGPEISMSALGRVTSTSGPSPLNPGMLNLGIFTLGIFRCQSGP

SEQ ID NO: 847457 - protein, 261 aa, Homo sapiens; identical to SEQ ID NO: 847456

SEQ ID NO: 847458 - protein, 115 aa, Homo sapiens
MSTLGPLMSTSGAFRSPSILGRETSTSPFTLGPFRCKSKSGMEILGALMFISGILNLGPFSFASGPSIFTSGTSTSTLGPETSRSALGRFTSTSGPSPLKPGMLILGIFILGIFR

SEQ ID NO: 847459 - protein, 135 aa, Homo sapiens
STFPFILGPLRSRSTSGKDILGALKCISGILNFGPFNFPSGPSRLRSGALVSTFGAEMSTFALDRFTSNSGPSPLRLGMLNLGILIFGIFKFQSGPCISTSGALTSTFGPFRSPSSFGTVISYSTFTLGPFICKS

SEQ ID NO: 847460 - protein, 254 aa, Homo sapiens
VTLGADISSDGIFKDGPLSLASGPSKSRRGPLRSTSGPFKVPSTLGTDTSKSPFTLGPFKSRSTSGMEILGVLKCISGILNLGPFSFPSGPSRLTSGASMSTLGPETTTSALGKFTSTSGPSPLRLGMLNLGIFILGIFRLQSRPWPSTSGALISTLGPLMSTSGTCISPSIFGAEISTFPFILGPLRSRSTSGKDILGALKCISGILNFGPFNFPSGPSRLRSGALVSTFGAEMSTFALDRFTSNSGPSPLRL

SEQ ID NO: 847461 - protein, 261 aa, Homo sapiens; identical to SEQ ID NO: 847456

SEQ ID NO: 847462 - protein, 159 aa, Homo sapiens
MSTLGPLMSTSGAFRSPSILGRETSTSPFTLGPFRCKSKSGMEILGALMFISGILNLGPFSFASGPSIFTSGTSTSTLGPETSRSALGRFTSTSGPSPLKPGMLILGIFILGIFRCQSGPRTSTSGALISTLGPLISKSGTFMSPSTFGRDTSISPFTL

SEQ ID NO: 847463 - protein, 112 aa, Homo sapiens
MEWEHWKGAVFCDGMGTLEEALSFGCLSCTFCLTSWIMASHTWLMTESVSPICRWTPAPLSTPGPPLLLLHLFLSILKSPLKEKSSQEHPPLCLTDKEVCRCDHPTRSGQYG

SEQ ID NO: 847464 - protein, 233 aa, Homo sapiens
SLQSPPTSALGGRAGPGEGAGAGTRCAGAEAEMASAGGEDCESPAPEADRPHQRPFLIGVSGGTASGKSTVCEKIMELLGQNEVEQRQRKVVILSQDRFYKVLTAEQKAKALKGQYNFDHPDAFDNDLMHRTLKNIVEGKTVEVPTYDFVTHSRLPETTVVYPADVVLFEGILVFYSQEIRDMFHLRLFVDTDSDVRLSRRDKEVCRCDHPTRSGQYGCHQPDRAAHPGHSEW

SEQ ID NO: 847465 - protein, 234 aa, Homo sapiens
MELLGQNEVEQRQRKVVILSQDRFYKVLTAEQKAKALKGQYNFDHPDAFDNDLMHRTLKNIVEGKTVEVPTYDFVTHSRLPETTVVYPADVVLFEGILVFYSQEIRDMFHLRLFVDTDSDVRLSRRVLRDVRRGRDLEQILTQYTTFVKPAFEEFCLPTKKYADVIIPRGVDNMVAINLIVQHIQDILNGDICKWHRGGSNGRSYKRTFSEPGDHPGMLTSGKRSHLESSSRPH

SEQ ID NO: 847466 - protein, 127 aa, Homo sapiens
MFHLRLFVDTDSDVRLSRRVLRDVRRGRDLEQILTQYTTFVKPAFEEFCLPTKKYADVIIPRGVDNMVAINLIVQHIQDILNGDICKWHRGGSNGRSYKRTFSEPGDHPGMLTSGKRSHLESSSRPH

SEQ ID NO: 847467 - protein, 193 aa, Homo sapiens [sequence omitted]

SEQ ID NO: 847468 - protein, 309 aa, Homo sapiens
SLQSPPTSALGGRAGPGEGAGAGTRCAGAEAEMASAGGEDCESPAPEADRPHQRPFLIGVSGGTASGKSTVCEKIMELLGQNEVEQRQRKVVILSQDRFYKVLTAEQKAKALKGQYNFDHPDAFDNDLMHRTLKNIVEGKTVEVPTYDFVTHSRLPETTVVYPADVVLFEGILVFYSQEIRDMFHLRLFVDTDSDVRLSRRVLRDVRRGRDLEQILTQYTTFVKPAFEEFCLPTKKYADVIIPRGVDNMVAINLIVQHIQDILNGDICKWHRGGSNGRSYKRTFSEPGDHPGMLTSGKRSHLESSSRPH

SEQ ID NO: 847469 - protein, 193 aa, Homo sapiens [sequence omitted]

SEQ ID NO: 847470 - protein, 255 aa, Homo sapiens
SLQSPPTSALGGRAGPGEGAGAGTRCAGAEAEMASAGGEDCESPAPEADRPHQRPFLIGVSGGTASGKSTVCEKIMELLGQNEVEQRQRKVVILSQDRFYKVLTAEQKAKALKGQYNFDHPDAFDNDLMHRTLKNIVEGKTVEVPTYDFVTHSRLPETTVVYPADVVLFEGILVFYSQEIRDMFHLRLFVDTDSDVRLSRRVLRDVRRGRDLEQILTQYTTFVKPAFEEFCLPVPVLAASEPIFPFHKDTWDPVL

SEQ ID NO: 847471 - protein, 309 aa, Homo sapiens; identical to SEQ ID NO: 847468

SEQ ID NO: 847472 - protein, 339 aa, Homo sapiens
SLQSPPTSALGGRAGPGEGAGAGTRCAGAEAEMASAGGEDCESPAPEADRPHQRPFLIGVSGGTASGKSTVCEKIMELLGQNEVEQRQRKVVILSQDRFYKVLTAEQKAKALKGQYNFDHPDAFDNDLMHRTLKNIVEGKTVEVPTYDFVTHSRLPETTVVYPADVVLFEGILVFYSQEIRDMFHLRLFVDTDSDVRLSRRGEGGRGPPCLPGRGWRQVLRSEARLPLAAAVLRDVRRGRDLEQILTQYTTFVKPAFEEFCLPTKKYADVIIPRGVDNMVAINLIVQHIQDILNGDICKWHRGGSNGRSYKRTFSEPGDHPGMLTSGKRSHLESSSRPH

SEQ ID NO: 847473 - protein, 297 aa, Homo sapiens
SLQSPPTSALGGRAGPGEGAGAGTRCAGAEAEMASAGGEDCESPAPEADRPHQRPFLIGVSGGTASGKSTVCEKIMELLGQNEVEQRQRKVVILSQDRFYKVLTAEQKAKALKGQYNFDHPDAFDNDLMHRTLKNIVEGKTVEVPTYDFVTHSRLPETTVVYPADVVLFEGILVFYSQEIRDMFHLRLFVDTDSDVRLSRRVLRDVRRGRDLEQILTQYTTFVKPAFEEFCLPTKKYADVIIPRGVDNMVAINLIVQHIQDILNGDICKWHRGGSNGRSYKRTSGKRSHLESSSRPH

SEQ ID NO: 847474 - protein, 251 aa, Homo sapiens
SLQSPPTSALGGRAGPGEGAGAGTRCAGAEAEMASAGGEDCESPAPEADRPHQRPFLIGVSGGTASGKSTVCEKIMELLGQNEVEQRQRKVVILSQDRFYKVLTAEQKAKALKGQYNFDHPDAFDNDLMHRTLKNIVEGKTVEVPTYDFVTHSRLPETTVVYPADVVLFEGILVFYSQEIRDMFHLRLFVDTDSDVRLSRRVLRDVRRGRDLEQILTQYTTFVKPAFEEFCLPLHFLPHFLDHGLSHLADD

SEQ ID NO: 847475 - protein, 251 aa, Homo sapiens; identical to SEQ ID NO: 847474

SEQ ID NO: 847476 - protein, 72 aa, Homo sapiens
MEADCVCGLETLCLQQSPFPRAPLRLPETTVVYPADVVLFEGILVFYSQEIRDMFHLRLFVDTDSDVRLSRR

SEQ ID NO: 847477 - protein, 67 aa, Homo sapiens
SPGRNGGPSLKRLSVELDVALRGREWRSRPLYPRPQRGRWPRVALRQLRGLGKGAAEAMEEKSSQSA

SEQ ID NO: 847478 - protein, 93 aa, Homo sapiens
GAAGASPARAVLLTRRSGAQPQLSPTAGERLAGPPRLPRPGGGRAVRALILALASRGRLRPLRPALPRAPGPRRSERAAGRLGGAAEGSHSVT

SEQ ID NO: 847479 - protein, 174 aa, Homo sapiens [sequence omitted]

SEQ ID NO: 847480 - protein, 93 aa, Homo sapiens; identical to SEQ ID NO: 847478

SEQ ID NO: 847481 - protein, 48 aa, Homo sapiens
MRFLEGSLQGHISLATNPALGRWHVGSTCPSMPKHRPWSLRKSSNFLY

SEQ ID NO: 847482 - protein, 48 aa, Homo sapiens; identical to SEQ ID NO: 847481

SEQ ID NO: 847483 - protein, 128 aa, Homo sapiens
ACGWPPPHPRSAPGGPNPSPAPTLEGDGRVVDQYVEPPVLLAQEVAQGADALQVVDVQLVEARAQALRLQLLHGRLAPRHVPRGKLDNPPAQEGTSRLIPPPRHLWLQPHPGPCWHSSSSRGWGWPPQ

SEQ ID NO: 847484 - protein, 132 aa, Homo sapiens
QGARLGPWAAARGPWIPQCPHTHHAQPWSHHYSHRGPGPGPEMTVGSTILINVQVTGSLSLALAGVVVTPVEHSLMGDMPWWRTHLWLSYVRTRGEEEMDTASGASLTPRTALVIIPILVSPTLLPQLDPGL

SEQ ID NO: 847485 - protein, 126 aa, Homo sapiens [sequence omitted]

SEQ ID NO: 847486 - protein, 102 aa, Homo sapiens
GEEGKGEREREKEREKDREEREKEKEREKEEREKKEEKEEEEEKEKKKKRKRKRKKKEKKEKKKEEEEKKKEEEEEEEKKKKRKKKEEEETIAKDIMSRCAV

SEQ ID NO: 847487 - protein, 154 aa, Homo sapiens
REQQMTRRPGEDLPMRTTRDLPSAPEPRTQPPPTPARGTKPVHNCDSLGPLGHRRKRKFTLAPTRRRKQKGRKKGTAAWTTCRGQLEERLVNGRVLAPAPSAQCVPPDVPFGGAKAGVKIYPKNYTDNELEKITRRFTMELAKKGFIVFVSRQF

SEQ ID NO: 847488 - protein, 232 aa, Homo sapiens
REQQMTRRPGEDLPMRTTRDLPSAPEPRTQPPPTPARGTKPVHNCDSLGPLGHRRKRKFTLAPTRRRKQKGRKKGTAAWTTCRGQLEERLVNGRVLAPAPSAQCVPPGPRPSRFSPTPPSESAASAPAVALPSSLHLARGVLAEGQGSCAAWRGLLDAVQKPGDTFGSGRPGVTVPGANGLWLDWESTSSSVKMTDEGDLAFWGCPIALFWPEAVDHACNPSPLGGRGRRIA

SEQ ID NO: 847489 - protein, 232 aa, Homo sapiens; identical to SEQ ID NO: 847488

SEQ ID NO: 847490 - protein, 232 aa, Homo sapiens; identical to SEQ ID NO: 847488

SEQ ID NO: 847491 - protein, 364 aa, Homo sapiens
LRKWSAGSAPEEGYGSAPEVGCGGVQRAVRLARRRRGRRTRSRQRGRLGSPGAPQQEDAMDDKELIEYFKSQMKEDPDMASAVAAIRTLLEFLKRDKGETIQGLRANLTSAIETLCGVDSSVAVSSGGELFLRFISLASLEYSDYSKCKKIMIERGELFLRRISLSRNKIADLCHTFIKDGATILTHAYSRVVLRVLEAAVAAKKRFSVYVTESQPDLSGKKMAKALCHLNVPVTVVLDAAVGYIMEKADLVIVGAEGVVENGGIINKIGTNQMAVCAKAQNKPFYVVAESFKFVRLFPLNQQDVPDKFKYKADTLKVAQTGQDLKEEHPWVDYTAPSLITLLFTDLGVLTPSAVSDELIKLYL

SEQ ID NO: 847492 - protein, 364 aa, Homo sapiens; identical to SEQ ID NO: 847491

SEQ ID NO: 847493 - protein, 364 aa, Homo sapiens; identical to SEQ ID NO: 847491

SEQ ID NO: 847494 - protein, 112 aa, Homo sapiens
LVCLGLKVENGGIINKIGTNQMAVCAKAQNKPFYVVAESFKFVRLFPLNQQDVPDKFKYKADTLKVAQTGQDLKEEHPWVDYTAPSLITLLFTDLGVLTPSAVSDELIKLYL

SEQ ID NO: 847495 - protein, 364 aa, Homo sapiens; identical to SEQ ID NO: 847491

SEQ ID NO: 847496 - protein, 364 aa, Homo sapiens; identical to SEQ ID NO: 847491

SEQ ID NO: 847497 - protein, 272 aa, Homo sapiens
LRKWSAGSAPEEGYGSAPEVGCGGVQRAVRLARRRRGRRTRSRQRGRLGSPGAPQQEDAMDDKELIEYFKSQMKEDPDMASAVAAIRTLLEFLKRDKGETIQGLRANLTSAIETLCGVDSSVAVSSGGELFLRFISLASLEYSDYSKCKKIMIERGELFLRRISLSRNKIADLCHTFIKDGATILTHAYSRVVLRVLEAAVAAKKRFSVYVTESQPDLSGKKMAKALCHLNVPVTVVLDAAVGCLHPPLHSRLICLKHARCRRKAATPLCHK

SEQ ID NO: 847498 - protein, 299 aa, Homo sapiens
LRKWSAGSAPEEGYGSAPEVGCGGVQRAVRLARRRRGRRTRSRQRGRLGSPGAPQQEDAMDDKELIEYFKSQMKEDPDMASAVAAIRTLLEFLKRDKGETIQGLRANLTSAIETLCGVDSSVAVSSGGELFLRFISLASLEYSDYSKCKKIMIERGELFLRRISLSRNKIADLCHTFIKDGATILTHAYSRVVLRVLEAAVAAKKRFSVYVTESQPDLSGKKMAKALCHLNVPVTVVLDAAVGYIMEKADLVIVGAEGVVENGGIINKVRASVLPSSLLKTWRCLADLGHHSSVDYGSF

SEQ ID NO: 847499 - protein, 285 aa, Homo sapiens
LRKWSAGSAPEEGYGSAPEVGCGGVQRAVRLARRRRGRRTRSRQRGRLGSPGAPQQEDAMDDKELIEYFKSQMKEDPDMASAVAAIRTLLEFLKRDKGETIQGLRANLTSAIETLCGVDSSVAVSSGGELFLRFISLASLEYSDYSKCKKIMIERGELFLRRISLSRNKIADLCHTFIKDGATILTHAYSRVVLRVLEAAVAAKKRFSVYVTESQPDLSGKKMAKALCHLNVPVTVVLDAAVGGECPSSPAIITSPTPCWLTASFQIESLSPVHKATPGSVLLLN

SEQ ID NO: 847500 - protein, 85 aa, Homo sapiens
MSLWVHLWHWNQQSSSKSEIPKSTVLIVLLPVVNKPFSNSSSVILPFLSFFKSLVSLRSSSMSSSSISEPEEFEKSSNRGPLERR

SEQ ID NO: 847501 - protein, 364 aa, Homo sapiens; identical to SEQ ID NO: 847491

SEQ ID NO: 847502 - protein, 142 aa, Homo sapiens [sequence omitted]

SEQ ID NO: 847503 - protein, 110 aa, Homo sapiens
MKSFFSPYIMEKADLVIVGAEGVVETQNKPFYVVAESFKFVRLFPLNQQDVPDKFKYKADTLKVAQTGQDLKEEHPWVDYTAPSLITLLFTDLGVLTPSAVSDELIKLYL

SEQ ID NO: 847504 - protein, 71 aa, Homo sapiens
GQSTKYSVPTNVYFSPQYKADTLKVAQTGQDLKEEHPWVDYTAPSLITLLFTDLGVLTPSAVSDELIKLYL

SEQ ID NO: 847505 - protein, 299 aa, Homo sapiens; identical to SEQ ID NO: 847498

SEQ ID NO: 847506 - protein, 84 aa, Homo sapiens
PHGLFLLSRFDDDKGFWCQGLEGGKTRCLGRSKGRRYPDMDTESRLFLTDFFRNHNLELSKLLSRLGQPVPSWLREELQHSSLG

SEQ ID NO: 847507 - protein, 982 aa, Homo sapiens
MLQLWKVVRPARQLELHRLILLLIAFSLGSMGFLAYYVSTSPKAKEPLPLPLGDCSSGGAAGPGPARPPVPPRPPRPPETARTEPVVLVFVESAYSQLGQEIVAILESSRFRYSTELAPGRGDMPTLTDNTHGRYVLVIYENLLKYVNLDAWSRELLDRYCVEYGVGIIGFFRAHEHSLLSAQLKGFPLFLHSNLGLRDYQVNPSAPLLHLTRPSRLEPGPLPGDDWTIFQSNHSTYEPVLLASLRPAEPAVPGPVLRRARLPTVVQDLGLHDGIQRVLFGHGLSFWLHKLIFVDAVAYLTGKRLCLDLDRYILVDIDDIFVGKEGTRMKVADVEALLTTQNKLRTLVPNFTFNLGFSGKFYHTGELIPLLLWHIIVCPVPSLSTSLGRQVEEKGQGLGSDCCEELVVGMNLGSHGWLDGKLAVGQIESLRQGSGMEGGQCCYKIKEGTGADWLWSVVSVVVIGTEEEDAGDDMLLKHRKEFWWFPHMWSHMQPHLFHNRSVLADQMRLNKQFALEHGIPTDLGYAVAPHHSGVYPIHTQLYEAWKSVWGIQVTSTEEYPHLRPARYRRGFIHNGIMVLPRQTCGLFTHTIFYNEYPGGSRELDRSIRGGELFLTVLLNPISIFMTHLSNYGNDRLGLYTFESLVRFLQCWTRLRLQTLPPVPLAQKYFELFPQERSPLWQNPCDDKRHKDIWSKEKTCDRLPKFLIVGPQKTGTTAIHFFLSLHPAVTSSFPSPSTFEEIQFFNSPNYHKGIDWYMDFFPVPSNASTDFLFEKSATYFDSEVVPRRGAALLPRAKIITVLTNPADRAYSWYQHQRAHGDPVALNYTFYQVISASSQTPLALRSLQNRCLVPGYYSTHLQRWLTYYPSGQLLIVDGQELRTNPAASMESIQKFLGITPFLNYTRTLRFDDDKGFWCQGLEGGKTRCLGRSKGRRYPDMDTESRLFLTDFFRNHNLELSKLLSRLGQPVPSWLREELQHSSLG

SEQ ID NO: 847508 - protein, 886 aa, Homo sapiens
MLQLWKVVRPARQLELHRLILLLIAFSLGSMGFLAYYVSTSPKAKEPLPLPLGDCSSGGAAGPGPARPPVPPRPPRPPETARTEPVVLVFVESAYSQLGQEIVAILESSRFRYSTELAPGRGDMPTLTDNTHGRYVLVIYENLLKYVNLDAWSRELLDRYCVEYGVGIIGFFRAHEHSLLSAQLKGFPLFLHSNLGLRDYQVNPSAPLLHLTRPSRLEPGPLPGDDWTIFQSNHSTYEPVLLASLRPAEPAVPGPVLRRARLPTVVQDLGLHDGIQRVLFGHGLSFWLHKLIFVDAVAYLTGKRLCLDLDRYILVDIDDIFVGKEGTRMKVADVEALLTTQNKLRTLVPNFTFNLGFSGKFYHTGTEEEDAGDDMLLKHRKEFWWFPHMWSHMQPHLFHNRSVLADQMRLNKQFALEHGIPTDLGYAVAPHHSGVYPIHTQLYEAWKSVWGIQVTSTEEYPHLRPARYRRGFIHNGIMVLPRQTCGLFTHTIFYNEYPGGSRELDRSIRGGELFLTVLLNPISIFMTHLSNYGNDRLGLYTFESLVRFLQCWTRLRLQTLPPVPLAQKYFELFPQERSPLWQNPCDDKRHKDIWSKEKTCDRLPKFLIVGPQKTGTTAIHFFLSLHPAVTSSFPSPSTFEEIQFFNSPNYHKGIDWYMDFFPVPSNASTDFLFEKSATYFDSEVVPRRGAALLPRAKIITVLTNPADRAYSWYQHQRAHGDPVALNYTFYQVISASSQTPLALRSLQNRCLVPGYYSTHLQRWLTYYPSGQLLIVDGQELRTNPAASMESIQKFLGITPFLNYTRTLRFDDDKGFWCQGLEGGKTRCLGRSKGRRYPDMDTEVSKARGRGIPLHFQDLILCPTSYHFCLHFLLSVPSFPYGFFPEP

SEQ ID NO: 847509 - protein, 815 aa, Homo sapiens
MLQLWKVVRPARQLELHRLILLLIAFSLGSMGFLAYYVSTSPKAKEPLPLPLGDCSSGGAAGPGPARPPVPPRPPRPPETARTEPVVLVFVESAYSQLGQEIVAILESSRFRYSTELAPGRGDMPTLTDNTHGRYVLVIYENLLKYVNLDAWSRELLDRYCVEYGVGIIGFFRAHEHSLLSAQLKGFPLFLHSNLGLRDYQVNPSAPLLHLTRPSRLEPGPLPGDDWTIFQSNHSTYEPVLLASLRPAEPAVPGPVLRRARLPTVVQDLGLHDGIQRVLFGHGLSFWLHKLIFVDAVAYLTGKRLCLDLDRYILVDIDDIFVGKEGTRMKVADVEALLTTQNKLRTLVPNFTFNLGFSGKFYHTGTEEEDAGDDMLLKHRKEFWWFPHMWSHMQPHLFHNRSVLADQMRLNKQFALEHGIPTDLGYAVAPHHSGVYPIHTQLYEAWKSVWGIQVTSTEEYPHLRPARYRRGFIHNGIMVLPRQTCGLFTHTIFYNEYPGGSRELDRSIRGGELFLTVLLNPISIFMTHLSNYGNDRLGLYTFESLVRFLQCWTRLRLQTLPPVPLAQKYFELFPQERSPLWQNPCDDKRHKDIWSKEKTCDRLPKFLIVGPQKTGTTAIHFFLSLHPAVTSSFPSPSTFEEIQFFNSPNYHKGIDWYMDFFPVPSNASTDFLFEKSATYFDSEVVPRRGAALLPRAKIITVLTNPADRAYSWYQHQRAHGDPVALNYTFYQVISASSQTPLALRSLQNRCLVPGYYSTHLQRWLTYYPSGQLLIVDGQELRTNPAASMESIQKFLGLMMIRDFGARDLKVVRLAV

SEQ ID NO: 847510 - protein, 1069 aa, Homo sapiens
MLQLWKVVRPARQLELHRLILLLIAFSLGSMGFLAYYVSTSPKAKEPLPLPLGDCSSGGAAGPGPARPPVPPRPPRPPETARTEPVVLVFVESAYSQLGQEIVAILESSRFRYSTELAPGRGDMPTLTDNTHGRYVLVIYENLLKYVNLDAWSRELLDRYCVEYGVGIIGFFRAHEHSLLSAQLKGFPLFLHSNLGLRDYQVNPSAPLLHLTRPSRLEPGPLPGDDWTIFQSNHSTYEPVLLASLRPAEPAVPGPVLRRARLPTVVQDLGLHDGIQRVLFGHGLSFWLHKLIFVDAVAYLTGKRLCLDLDRYILVDIDDIFVGKEGTRMKVADVEALLTTQNKLRTLVPNFTFNLGFSGKFYHTGELIPLLLWHIIVCPVPSLSTSLGRQVEEKGQGLGSDCCEELVVGMNLGSHGWLDGKLAVGQIESLRQGSGMEGGQCCYKIKEGTGADWLWSVVSVVVIGTEEEDAGDDMLLKHRKEFWWFPHMWSHMQPHLFHNRSVLADQMRLNKQFALEHGIPTDLGYAVAPHHSGVYPIHTQLYEAWKSVWGIQVTSTEEYPHLRPARYRRGFIHNGIMVRDSQYRLESNSNISDSFQHALTYVLYQLPVQVWGYIIGGRKVKKFNTLSKSFIAITSDSVLYEIPVSSIYFSFYLSNLICFFFSLQVLPRQTCGLFTHTIFYNEYPGGSRELDRSIRGGELFLTVLLNPISIFMTHLSNYGNDRLGLYTFESLVRFLQCWTRLRLQTLPPVPLAQKYFELFPQERSPLWQNPCDDKRHKDIWSKEKTCDRLPKFLIVGPQKTGTTAIHFFLSLHPAVTSSFPSPSTFEEIQFFNSPNYHKGIDWYMDFFPVPSNASTDFLFEKSATYFDSEVVPRRGAALLPRAKIITVLTNPADRAYSWYQHQRAHGDPVALNYTFYQVISASSQTPLALRSLQNRCLVPGYYSTHLQRWLTYYPSGQLLIVDGQELRTNPAASMESIQKFLGITPFLNYTRTLRFDDDKGFWCQGLEGGKTRCLGRSKGRRYPDMDTESRLFLTDFFRNHNLELSKLLSRLGQPVPSWLREELQHSSLG

SEQ ID NO: 847511 - protein, 57 aa, Homo sapiens
MTHLSNYGNDRLGLYTFESLVRFLQCWTRLRLQTLPPVPLAQKYFELFPQERSPLWQ

SEQ ID NO: 847512 - protein, 883 aa, Homo sapiens
MLQLWKVVRPARQLELHRLILLLIAFSLGSMGFLAYYVSTSPKAKEPLPLPLGDCSSGGAAGPGPARPPVPPRPPRPPETARTEPVVLVFVESAYSQLGQEIVAILESSRFRYSTELAPGRGDMPTLTDNTHGRYVLVIYENLLKYVNLDAWSRELLDRYCVEYGVGIIGFFRAHEHSLLSAQLKGFPLFLHSNLGLRDYQVNPSAPLLHLTRPSRLEPGPLPGDDWTIFQSNHSTYEPVLLASLRPAEPAVPGPVLRRARLPTVVQDLGLHDGIQRVLFGHGLSFWLHKLIFVDAVAYLTGKRLCLDLDRYILVDIDDIFVGKEGTRMKVADVEALLTTQNKLRTLVPNFTFNLGFSGKFYHTGTEEEDAGDDMLLKHRKEFWWFPHMWSHMQPHLFHNRSVLADQMRLNKQFALEHGIPTDLGYAVAPHHSGVYPIHTQLYEAWKSVWGIQVTSTEEYPHLRPARYRRGFIHNGIMVLPRQTCGLFTHTIFYNEYPGGSRELDRSIRGGELFLTVLLNPISIFMTHLSNYGNDRLGLYTFESLVRFLQCWTRLRLQTLPPVPLAQKYFELFPQERSPLWQNPCDDKRHKDIWSKEKTCDRLPKFLIVGPQKTGTTAIHFFLSLHPAVTSSFPSPSTFEEIQFFNSPNYHKGIDWYMDFFPVPSNASTDFLFEKSATYFDSEVVPRRGAALLPRAKIITVLTNPADRAYSWYQHQRAHGDPVALNYTFYQVISASSQTPLALRSLQNRCLVPGYYSTHLQRWLTYYPSGQLLIVDGQELRTNPAASMESIQKFLGITPFLNYTRTLRFDDDKGFWCQGLEGGKTRCLGRSKGRRYPDMDTESRLFLTDFFRNHNLELSKLLSRLGQPVPSWLREELQHSSLG

SEQ ID NO: 847513 - protein, 815 aa, Homo sapiens; identical to SEQ ID NO: 847509

SEQ ID NO: 847514 - protein, 1043 aa, Homo sapiens
MLQLWKVVRPARQLELHRLILLLIAFSLGSMGFLAYYVSTSPKAKEPLPLPLGDCSSGGAAGPGPARPPVPPRPPRPPETARTEPVVLVFVESAYSQLGQEIVAILESSRFRYSTELAPGRGDMPTLTDNTHGRYVLVIYENLLKYVNLDAWSRELLDRYCVEYGVGIIGFFRAHEHSLLSAQLKGFPLFLHSNLGLRDYQVNPSAPLLHLTRPSRLEPGPLPGDDWTIFQSNHSTYEPVLLASLRPAEPAVPGPVLRRARLPTVVQDLGLHDGIQRVLFGHGLSFWLHKLIFVDAVAYLTGKRLCLDLDRYILVDIDDIFVGKEGTRMKVADVEALLTTQNKLRTLVPNFTFNLGFSGKFYHTGELIPLLLWHIIVCPVPSLSTSLGRQVEEKGQGLGSDCCEELVVGMNLGSHGWLDGKLAVGQIESLRQGSGMEGGQCCYKIKEGTGADWLWSVVSVVVIGTEEEDAGDDMLLKHRKEFWWFPHMWSHMQPHLFHNRSVLADQMRLNKQFALVRPLDLFPIISPSHASFSTFPYMGYPFPILCVFLYLEASPPSLPSTPQTSPGPGESLCHSQEHGIPTDLGYAVAPHHSGVYPIHTQLYEAWKSVWGIQVTSTEEYPHLRPARYRRGFIHNGIMVLPRQTCGLFTHTIFYNEYPGGSRELDRSIRGGELFLTVLLNPISIFMTHLSNYGNDRLGLYTFESLVRFLQCWTRLRLQTLPPVPLAQKYFELFPQERSPLWQNPCDDKRHKDIWSKEKTCDRLPKFLIVGPQKTGTTAIHFFLSLHPAVTSSFPSPSTFEEIQFFNSPNYHKGIDWYMDFFPVPSNASTDFLFEKSATYFDSEVVPRRGAALLPRAKIITVLTNPADRAYSWYQHQRAHGDPVALNYTFYQVISASSQTPLALRSLQNRCLVPGYYSTHLQRWLTYYPSGQLLIVDGQELRTNPAASMESIQKFLGITPFLNYTRTLRFDDDKGFWCQGLEGGKTRCLGRSKGRRYPDMDTESRLFLTDFFRNHNLELSKLLSRLGQPVPSWLREELQHSSLG

SEQ ID NO: 847515 - protein, 815 aa, Homo sapiens; identical to SEQ ID NO: 847509

SEQ ID NO: 847516 - protein, 102 aa, Homo sapiens
MNEAEIVDVALGILIESRKQEKACEQPALAGADNPEHSPPCSVSPHTSSGSSSEEEDSGKQALAPGLSPSQRPGGSSSACSRSPEEEEEEDVLKYVREIFFS

SEQ ID NO: 847517 - protein, 102 aa, Homo sapiens; identical to SEQ ID NO: 847516

SEQ ID NO: 847518 - protein, 102 aa, Homo sapiens; identical to SEQ ID NO: 847516

SEQ ID NO: 847519 - protein, 102 aa, Homo sapiens; identical to SEQ ID NO: 847516

SEQ ID NO: 847520 - protein, 102 aa, Homo sapiens; identical to SEQ ID NO: 847516

SEQ ID NO: 847521 - protein, 102 aa, Homo sapiens; identical to SEQ ID NO: 847516

SEQ ID NO: 847522 - protein, 102 aa, Homo sapiens; identical to SEQ ID NO: 847516

SEQ ID NO: 847523 - protein, 157 aa, Homo sapiens
METLQSETKTRVLPSWLTAQVATKNVAPMKAPKRMRMAAVPVAAARLPATRTVYCMNEAEIVDVALGILIESRKQEKACEQPALAGADNPEHSPPCSVSPHTSSGSSSEEEDSGKQALAPGLSPSQRPGGSSSACSRSPEEEEEEDVLKYVREIFFS

SEQ ID NO: 847524 - protein, 102 aa, Homo sapiens; identical to SEQ ID NO: 847516

SEQ ID NO: 847525 - protein, 218 aa, Homo sapiens
MVSAQASAGEVSAHASRASSRFFLPVAAPPLCIKRVCRHSLCSRLGRGVLSLRRRGGADRRVGLVVTPRLWRAVGNTVVSVVPPRVAAGLRVSPVRGGVGCCAPVFCSSAPPLAGVVWGCVRFSAVWCYWCARVFFSTSLARLVFLDRPRRLCRLAVIYNSGCSAILGRPPLFTQELLGCVAITFGAPRGEIRRRRPPFFFFCFFFFFFFFFFVFVFY

SEQ ID NO: 847526 - protein, 102 aa, Homo sapiens; identical to SEQ ID NO: 847516

SEQ ID NO: 847527 - protein, 102 aa, Homo sapiens; identical to SEQ ID NO: 847516

SEQ ID NO: 847528 - protein, 717 aa, Homo sapiens
MSRRSQRLTRYSQGDDDGSSSSGGSSVAGSQSTLFKDSPLRTLKRKSSNMKRLSPAPQLGPSSDAHTSYYSESLVHESWFPPRSSLEELHGDANWGEDLRVRRRRGTGGSESSRASGLVGRKATEDFLGSSSGYSSEDDYVGYSDVDQQSSSSRLRSAVSRAGSLLWMVATSPGRLFRLLYWWAGTTWYRLTTAASLLDVFVLTRRFSSLKTFLWFLLPLLLLTCLTYGAWYFYPYGLQTFHPALVSWWAAKDSRRPDEGWEARDSSPHFQAEQRVMSRVHSLERRLEALAAEFSSNWQKEAMRLERLELRQGAPGQGGGGGLSHEDTLALLEGLVSRREAALKEDFRRETAARIQEELSALRAEHQQDSEDLFKKIVRASQESEARIQQLKSEWQSMTQESFQESSVKELRRLEDQLAGLQQELAALALKQSSVAEEVGLLPQQIQAVRDDVESQFPAWISQFLARGGGGRVGLLQREEMQAQLRELESKILTHVAEMQGKSAREAAASLSLTLQKEGVIGVTEEQVHHIVKQALQRYSEDRIGLADYALESGGASVISTRCSETYETKTALLSLFGIPLWYHSQSPRVILQPDVHPGNCWAFQGPQGFAVVRLSARIRPTAVTLEHVPKALSPNSTISSAPKDFAIFGFDEDLQQEGTLLGKFTYDQDGEPIQTFHFQAPTMATYQVVELRILTNWGHPEYTCIYRFRVHGEPAH

SEQ ID NO: 847529 - protein, 671 aa, Homo sapiens
MSRRSQRLTRYSQGDDDGSSSSGGSSVAGSQSTLFKDSPLRTLKRKSSNMKRLSPAPQLGPSSDAHTSYYSESLVHESWFPPRSSLEELHGDANWGYSDVDQQSSSSRLRSAVSRAGSLLWMVATSPGRLFRLLYWWAGTTWYRLTTAASLLDVFVLTRRFSSLKTFLWFLLPLLLLTCLTYGAWYFYPYGLQTFHPALVSWWAAKDSRRPDEGWEARDSSPHFQAEQRVMSRVHSLERRLEALAAEFSSNWQKEAMRLERLELRQGAPGQGGGGGLSHEDTLALLEGLVSRREAALKEDFRRETAARIQEELSALRAEHQQDSEDLFKKIVRASQESEARIQQLKSEWQSMTQESFQESSVKELRRLEDQLAGLQQELAALALKQSSVAEEVGLLPQQIQAVRDDVESQFPAWISQFLARGGGGRVGLLQREEMQAQLRELESKILTHVAEMQGKSAREAAASLSLTLQKEGVIGVTEEQVHHIVKQALQRYSEDRIGLADYALESGGASVISTRCSETYETKTALLSLFGIPLWYHSQSPRVILQPDVHPGNCWAFQGPQGFAVVRLSARIRPTAVTLEHVPKALSPNSTISSAPKDFAIFGFDEDLQQEGTLLGKFTYDQDGEPIQTFHFQAPTMATYQVVELRILTNWGHPEYTCIYRFRVHGEPAH

SEQ ID NO: 847530 - protein, 441 aa, Homo sapiens [sequence omitted]

SEQ ID NO: 847531 - protein, 680 aa, Homo sapiens
MALCWNVSGIFSLSFCVGCVGVVFGKHYHPRVPHSVALSLPFQAEQRVMSRVHSLERRLEALAAEFSSNWQKEAMRLERLELRQGAPGQGGGGGLSHEDTLALLEGLVSRREAALKEDFRRETAARIQEELSALRAEHQQDSEDLFKKIVRASQESEARIQQLKSEWQRYWAPPAGLGLLLPSPTHSPGRTGEQSRRAESSDHLAKQMVGGGVETQLRTPAQGLSLRCHGGEQGGPEGGGQAVGEDRDSFIDTASFLTASHNCLLMPQMSMLVEDVEAEAEYILDSGLRKGAGSELAPWDRQGFCSQNPQERPCPFSGSQGVLGTRSPDGSPLGGPLSSLVWPYLPPKRSEAYSSLSGTSMTQESFQESSVKELRRLEDQLAGLQQELAALALKQSSVAEEVGLLPQQIQAVRDDVESQFPAWISQFLARGGGGRVGLLQREEMQAQLRELESKILTHVAEMQGKSAREAAASLSLTLQKEGVIGVTEEQVHHIVKQALQRYSEDRIGLADYALESGGASVISTRCSETYETKTALLSLFGIPLWYHSQSPRVILQPDVHPGNCWAFQGPQGFAVVRLSARIRPTAVTLEHVPKALSPNSTISSAPKDFAIFGFDEDLQQEGTLLGKFTYDQDGEPIQTFHFQAPTMATYQVVELRILTNWGHPEYTCIYRFRVHGEPAH

SEQ ID NO: 847532 - protein, 489 aa, Homo sapiens
MALCWNVSGIFSLSFCVGCVGVVFGKHYHPRVPHSVALSLPFQAEQRVMSRVHSLERRLEALAAEFSSNWQKEAMRLERLELRQGAPGQGGGGGLSHEDTLALLEGLVSRREAALKEDFRRETAARIQEELSALRAEHQQDSEDLFKKIVRASQESEARIQQLKSEWQSMTQESFQESSVKELRRLEDQLAGLQQELAALALKQSSVAEEVGLLPQQIQAVRDDVESQFPAWISQFLARGGGGRVGLLQREEMQAQLRELESKILTHVAEMQGKSAREAAASLSLTLQKEGVIGVTEEQVHHIVKQALQRYSEDRIGLADYALESGGASVISTRCSETYETKTALLSLFGIPLWYHSQSPRVILQPDVHPGNCWAFQGPQGFAVVRLSARIRPTAVTLEHVPKALSPNSTISSAPKDFAIFGFDEDLQQEGTLLGKFTYDQDGEPIQTFHFQAPTMATYQVVELRILTNWGHPEYTCIYRFRVHGEPAH

SEQ ID NO: 847533 - protein, 246 aa, Homo sapiens
PHSRSAGLRRPHCPPARACPASPLFACPLRPGPGRCVALSGAPPAGSPRGKGARPGGGLASDAPGRARSRRGSRFSSGEESTSHLIMSRRSQRLTRYSQGDDDGSSSSGGSSVAGSQSTLFKDSPLRTLKRKSSNMKRLSPAPQLGPSSDAHTSYYSESLVHESWFPPRSSLEELHGDANWGEDLRVRRRRGTGGSESSRASGLVGRKATEDFLGSSSGYSSEDDYVGYSDVDQQSSSSRLRSAAH

SEQ ID NO: 847534 - protein, 464 aa, Homo sapiens
MALCWNVSGIFSLSFCVGCVGVVFGKHYHPRVPHSVALSLPFQAEQRVMSRVHSLERRLEALAAEFSSNWQKEAMRLERLELRQGAPGQGGGGGLSHEDTLALLEGLVSRREAALKEDFRRETAARIQEELSALRAEHQQDSEDLFKKIVRASQESEARIQQLKSEWQSMTQESFQESSVKELRRLEDQLAGLQQELAALALKQSSVAEEVGLLPQQIQAVRDDVESQFPAWISQFLARGGGGRVGLLQREEMQAQLRELESKILTHVAEMQGKSAREAAASLSLTLQKEGVIGVTEEQVHHIVKQALQRYSEDRIGLADYALESGGASVISTRCSETYETKTALLSLFGIPLWYHSQSPRVILQPDVHPGNCWAFQGPQGFAVVRLSARIRPTAVTLEHVPKALSPNSTISSAPKDFAIFGFDEDLQQEGTLLGKFTYDQDGEPIQTFHFQVCLHRPPHLTRP

SEQ ID NO: 847535 - protein, 355 aa, Homo sapiens
MALCWNVSGIFSLSFCVGCVGVVFGKHYHPRVPHSVALSLPFQAEQRVMSRVHSLERRLEALAAEFSSNWQKEAMRLERLELRQGAPGQGGGGGLSHEDTLALLEGLVSRREAALKEDFRRETAARIQEELSALRAEHQQDSEDLFKKIVRASQESEARIQQLKSEWQSMTQESFQESSVKELRRLEDQLAGLQQELAALALKQSSVAEEVGLLPQQIQAVRDDVESQFPAWISQFLARGGGGRVGLLQREEMQAQLRELESKILTHVAEMQGKSAREAAASLSLTLQKEGVIGVTEEVRPTCPSPHTHPQLSSLGALDSPTLPAPWQVPGWKCQAGGFACCGAGMGGWQCAHIC

SEQ ID NO: 847536 - protein, 52 aa, Homo sapiens
LLLSLQAPQGDTPLGSYRWNLSSRPGSVSSLPEVEGAAWGSFRERRCKLSCE

SEQ ID NO: 847537 - protein, 489 aa, Homo sapiens; identical to SEQ ID NO: 847532

SEQ ID NO: 847538 - protein, 769 aa, Homo sapiens
MVSPPSAGQRLRGVPVWAAGAFRFSSGEESTSHLIMSRRSQRLTRYSQGDDDGSSSSGGSSVAGSQSTLFKDSPLRTLKRKSSNMKRLSPAPQLGPSSDAHTSYYSESLVHESWFPPRSSLEELHGDANWGECGALRPGALLPRPPARYSSQCPLQSPGFPPQSTSLPRPHFSEALGGPEEPLVLPCTGEDLRVRRRRGTGGSESSRASGLVGRKATEDFLGSSSGYSSEDDYVWAGTTWYRLTTAASLLDVFVLTRRFSSLKTFLWFLLPLLLLTCLTYGAWYFYPYGLQTFHPALVSWWAAKDSRRPDEGWEARDSSPHFQAEQRVMSRVHSLERRLEALAAEFSSNWQKEAMRLERLELRQGAPGQGGGGGLSHEDTLALLEGLVSRREAALKEDFRRETAARIQEELSALRAEHQQDSEDLFKKIVRASQESEARIQQLKSEWQSMTQESFQESSVKELRRLEDQLAGLQQELAALALKQSSVAEEVGLLPQQIQAVRDDVESQFPAWISQFLARGGGGRVGLLQREEMQAQLRELESKILTHVAEMQGKSAREAAASLSLTLQKEGVIGVTEEQVHHIVKQALQRYSEDRIGLADYALESGGASVISTRCSETYETKTALLSLFGIPLWYHSQSPRVILQPDVHPGNCWAFQGPQGFAVVRLSARIRPTAVTLEHVPKALSPNSTISSAPKDFAIFGFDEDLQQEGTLLGKFTYDQDGEPIQTFHFQAPTMATYQVVELRILTNWGHPEYTCIYRFRVHGEPAH

SEQ ID NO: 847539 - protein, 762 aa, Homo sapiens
PHSRSAGLRRPHCPPARACPASPLFACPLRPGPGRCVALSGAPPAGSPRGKGARPGGGLASDAPGRARSRRGSRFSSGEESTSHLIMSRRSQRLTRYSQGDDDGSSSSGGSSVAGSQSTLFKDSPLRTLKRKSSNMKRLSPAPQLGPSSDAHTSYYSESLVHESWFPPRSSLEELHGDANWGEDLRVRRRRGTGGSESSRASGLVGRKATEDFLGSSSGYSSEDDYVWAGTTWYRLTTAASLLDVFVLTRRFSSLKTFLWFLLPLLLLTCLTYGAWYFYPYGLQTFHPALVSWWAAKDSRRPDEGWEARDSSPHFQAEQRVMSRVHSLERRLEALAAEFSSNWQKEAMRLERLELRQGAPGQGGGGGLSHEDTLALLEGLVSRREAALKEDFRRETAARIQEELSALRAEHQQDSEDLFKKIVRASQESEARIQQLKSEWQSMTQESFQESSVKELRRLEDQLAGLQQELAALALKQSSVAEEVGLLPQQIQAVRDDVESQFPAWISQFLARGGGGRVGLLQREEMQAQLRELESKILTHVAEMQGKSAREAAASLSLTLQKEGVIGVTEEQVHHIVKQALQRYSEDRIGLADYALESGGASVISTRCSETYETKTALLSLFGIPLWYHSQSPRVILQPDVHPGNCWAFQGPQGFAVVRLSARIRPTAVTLEHVPKALSPNSTISSAPKDFAIFGFDEDLQQEGTLLGKFTYDQDGEPIQTFHFQAPTMATYQVVELRILTNWGHPEYTCIYRFRVHGEPAH

SEQ ID NO: 847540 - protein, 320 aa, Homo sapiens [sequence omitted]

SEQ ID NO: 847541 - protein, 489 aa, Homo sapiens; identical to SEQ ID NO: 847532

SEQ ID NO: 847542 - protein, 489 aa, Homo sapiens; identical to SEQ ID NO: 847532

SEQ ID NO: 847543 - protein, 372 aa, Homo sapiens
PHSRSAGLRRPHCPPARACPASPLFACPLRPGPGRCVALSGAPPAGSPRGKGARPGGGLASDAPGRARSRRGSRFSSGEESTSHLIMSRRSQRLTRYSQGDDDGSSSSGGSSVAGSQSTLFKDSPLRTLKRKSSNMKRLSPAPQLGPSSDAHTSYYSESLVHESWFPPRSSLEELHGDANWGEDLRVRRRRGTGGSESSRASGLVGRKATEDFLGSSSGYSSEDDYVGYSDVDQQSSSSRLRSAVSRAGSLLWMVATSPGRLFRLLYWWAGTTWYRLTTAASLLDVFVLTRRFSSLKTFLWFLLPLLLLTCLTYGAWYFYPYGLQTFHPALVSWWAAKDSRRPDEGWEARDSSPHFQAGFQERTKATRPLRP

SEQ ID NO: 847544 - protein, 191 aa, Homo sapiens
MQTIKCVVVGDGAVGKTCLLISYTTNKFPSEYVPTVFDNYAVTVMIGGEPYTLGLFDTAGQEDYDRLRPLSYPQTDVFLVCFSVVSPSSFENVKEKWVPEITHHCPKTPFLLVGTQIDLRDDPSTIEKLAKNKQKPITPETAEKLARDLKAVKYVECSALTQKGLKNVFDEAILAALEPPEPKKSRRCVLL

SEQ ID NO: 847545 - protein, 191 aa, Homo sapiens
MQTIKCVVVGDGAVGKTCLLISYTTNKFPSEYVPTVFDNYAVTVMIGGEPYTLGLFDTAGQEDYDRLRPLSYPQTDVFLVCFSVVSPSSFENVKEKWVPEITHHCPKTPFLLVGTQIDLRDDPSTIEKLAKNKQKPITPETAEKLARDLKAVKYVECSALTQRGLKNVFDEAILAALEPPETQPKRKCCIF

SEQ ID NO: 847546 - protein, 167 aa, Homo sapiens
MQTIKCVVVGDGAVGKTCLLISYTTNKFPSEYVPTVFDNYAVTVMIGGEPYTLGLFDTAGQEDYDRLRPLSYPQTDVFLVCFSVVSPSSFENVKEKWVPEITHHCPKTPFLLVGTQIDLRDDPSTIEKLAKNKQKPITPETAEKLARDLKAVKYVECSALTQKVRMA

SEQ ID NO: 847547 - protein, 191 aa, Homo sapiens; identical to SEQ ID NO: 847544

SEQ ID NO: 847548 - protein, 191 aa, Homo sapiens; identical to SEQ ID NO: 847544

SEQ ID NO: 847549 - protein, 191 aa, Homo sapiens; identical to SEQ ID NO: 847544

SEQ ID NO: 847550 - protein, 191 aa, Homo sapiens; identical to SEQ ID NO: 847544

SEQ ID NO: 847551 - protein, 191 aa, Homo sapiens; identical to SEQ ID NO: 847544

SEQ ID NO: 847552 - protein, 191 aa, Homo sapiens; identical to SEQ ID NO: 847544

SEQ ID NO: 847553 - protein, 191 aa, Homo sapiens; identical to SEQ ID NO: 847544

SEQ ID NO: 847554 - protein, 96 aa, Homo sapiens
STSCSSPLNSMPYRILTAGISCPLYTLTDCLVSVQCMIALKARPETAEKLARDLKAVKYVECSALTQKGLKNVFDEAILAALEPPEPKKSRRCVLL

SEQ ID NO: 847555 - protein, 191 aa, Homo sapiens; identical to SEQ ID NO: 847544

SEQ ID NO: 847556 - protein, 191 aa, Homo sapiens; identical to SEQ ID NO: 847544

SEQ ID NO: 847557 - protein, 191 aa, Homo sapiens; identical to SEQ ID NO: 847544

SEQ ID NO: 847558 - protein, 191 aa, Homo sapiens; identical to SEQ ID NO: 847544

SEQ ID NO: 847559 - protein, 191 aa, Homo sapiens; identical to SEQ ID NO: 847544

SEQ ID NO: 847560 - protein, 191 aa, Homo sapiens; identical to SEQ ID NO: 847544

SEQ ID NO: 847561 - protein, 191 aa, Homo sapiens; identical to SEQ ID NO: 847544

SEQ ID NO: 847562 - protein, 158 aa, Homo sapiens
MRVFDNYAVTVMIGGEPYTLGLFDTAGQEDYDRLRPLSYPQTDVFLVCFSVVSPSSFENVKEKWVPEITHHCPKTPFLLVGTQIDLRDDPSTIEKLAKNKQKPITPETAEKLARDLKAVKYVECSALTQKGLKNVFDEAILAALEPPEPKKSRRCVLL

SEQ ID NO: 847563 - protein, 191 aa, Homo sapiens; identical to SEQ ID NO: 847544

SEQ ID NO: 847564 - protein, 191 aa, Homo sapiens; identical to SEQ ID NO: 847544

SEQ ID NO: 847565 - protein, 192 aa, Homo sapiens
MQTIKCVVVGDGAVGKTCLLISYTTNKFPSEYVPTVFDNYAVTVMIGGEPYTLGLFDTAGQEDYDRLRPLSYPQTDVFLVCFSVVSPSSFENVKEKWVPEITHHCPKTPFLLVGTQIDLRDDPSTIEKLTCRYRHQPLCTVSSRTRYFSPPTHNSQGPWATPNHPQHSPSPYVLPEGSAVCLSRQASSSRPR

SEQ ID NO: 847566 - protein, 339 aa, Homo sapiens
MNWELLLWLLVLCALLLLLVQLLRFLRADGDLTLLWAEWQGRRPEWELTDMVVWVTGASSGIGEELAYQLSKLGVSLVLSARRVHELERVKRRCLENGNLKEKDILVLPLDLTDTGSHEAATKAVLQEFGRIDILVNNGGMSQRSLCMDTSLDVYRKLIELNYLGTVSLTKCVLPHMIERKQGKIVTVNSILGIISVPLSIGYCASKHALRGFFNGLRTELATYPGIIVSNICPGPVQSNIVENSLAGEVTKTIGNNGDQSHKMTTSRCVRLMLISMANDLKEVWISEQPFLLVTYLWQYMPTWAWWITNKMGKKRIENFKSGVDADSSYFKIFKTKHD

SEQ ID NO: 847567 - protein, 339 aa, Homo sapiens; identical to SEQ ID NO: 847566

SEQ ID NO: 847568 - protein, 339 aa, Homo sapiens; identical to SEQ ID NO: 847566

SEQ ID NO: 847569 - protein, 339 aa, Homo sapiens; identical to SEQ ID NO: 847566

SEQ ID NO: 847570 - protein, 225 aa, Homo sapiens
MNWELLLWLLVLCALLLLLVQLLRFLRADGDLTLLWAEWQGRRPEWELTDMVVWVTGASSGIGEELAYQLSKLGVSLVLSARRVHELERVKRRCLENGNLKEKDILVLPLDLTDTGSHEAATKAVLQEFGRIDILVNNGGMSQRSLCMDTSLDVYRKLIELNYLGTVSLTKCVLPHMIERKQGKIVTVNSILGIISVPLSIGYCASKHALRGFFNGLRTELATYL

SEQ ID NO: 847571 - protein, 259 aa, Homo sapiens
MNWELLLWLLVLCALLLLLVQLLRFLRADGDLTLLWAEWQGRRPEWELTDMVVWVTGASSGIGEELAYQLSKLGVSLVLSARRVHELERVKRRCLENGNLKEKDILVLPLDLTDTGSHEAATKAVLQEFGRGFFNGLRTELATYPGIIVSNICPGPVQSNIVENSLAGEVTKTIGNNGDQSHKMTTSRCVRLMLISMANDLKEVWISEQPFLLVTYLWQYMPTWAWWITNKMGKKRIENFKSGVDADSSYFKIFKTKHD

SEQ ID NO: 847572 - protein, 221 aa, Homo sapiens
MNWELLLWLLVLCALLLLLVQLLRFLRADGDLTLLWAEWQGRRPEWELTDMVVWVTGASSGIGEELAYQLSKLGVSLVLSARRVHELERVKRRCLENGNLKEKDILVLPLDLTDTGSHEAATKAVLQEFGRIDILVNNGGMSQRSLCMDTSLDVYRKLIELNYLGTVSLTKCVLPHMIERKQGKIVTVNSILGIISVPLSIGYCASKHALRVRLLKLNSDR

SEQ ID NO: 847573 - protein, 137 aa, Homo sapiens
MNWELLLWLLVLCALLLLLVQLLRFLRADGDLTLLWAEWQGRRPEWELTDMVVWVTGASSGIGEELAYQLSKLGVSLVLSARRVHELERVKRRCLENGNLKEKDILVLPLDLTDTGSHEAATKAVLQEFGRVSSILY

SEQ ID NO: 847574 - protein, 382 aa, Homo sapiens
TKAVLQEFGRIDILVNNGGMSQRSLCMDTSLDVYSNPRLLRVRNYKTKFPAKAKVDLNKSKGKAKRIDIDRDLKGSRNGTLHPTEETEWELTDMVVWVTGASSGIGEELAYQLSKLGVSLVLSARRVHELERVKRRCLENGNLKEKDILVLPLDLTDTGSHEAATKAVLQEFGRIDILVNNGGMSQRSLCMDTSLDVYRKLIELNYLGTVSLTKCVLPHMIERKQGKIVTVNSILGIISVPLSIGYCASKHALRGFFNGLRTELATYPGIIVSNICPGPVQSNIVENSLAGEVTKTIGNNGDQSHKMTTSRCVRLMLISMANDLKEVWISEQPFLLVTYLWQYMPTWAWWITNKMGKKRIENFKSGVDADSSYFKIFKTKHD

SEQ ID NO: 847575 - protein, 339 aa, Homo sapiens; identical to SEQ ID NO: 847566

SEQ ID NO: 847576 - protein, 241 aa, Homo sapiens
EYPGDGGIIAASVGSSTGSHEAATKLSSRRFGRIDILVNNGGMSQRSLCMDTSLDVYRKLIELNYLGTVSLTKCVLPHMIERKQGKIVTVNSILGIISVPLSIGYCASKHALRGFFNGLRTELATYPGIIVSNICPGPVQSNIVENSLAGEVTKTIGNNGDQSHKMTTSRCVRLMLISMANDLKEVWISEQPFLLVTYLWQYMPTWAWWITNKMGKKRIENFKSGVDADSSYFKIFKTKHD

SEQ ID NO: 847577 - protein, 168 aa, Homo sapiens
MNWELLLWLLVLCALLLLLVQLLRFLRADGDLTLLWAEWQGRRPGEDRPKPLPSGRPGSELPRRVRVSGGSAVIPGPLWVAWSFPKARLPLTQGLRVGEEEARAKKPLCLLYWSEDGMDLPFRLGNLSRECQTVKRALESAVLLRTLTSYAGLKGFWCCLRGRYFEKQ

SEQ ID NO: 847578 - protein, 563 aa, Homo sapiens
MWAVLRLALRPCARASPAGPRAYHGDSVASLGTQPDLGSALYQENYKQMKALVNQLHERVEHIKLGGGEKARALHISRGKLLPRERIDNLIDPGSPFLELSQFAGYQLYDNEEVPGGGIITGIGRVSGVECMIIANDATVKGGAYYPVTVKKQLRAQEIAMQNRLPCIYLVDSGGAYLPRQADVFPDRDHFGRTFYNQAIMSSKNIAQIAVVMGSCTAGGAYVPAMADENIIVRKQGTIFLAGPPLVKAATGEEVSAEDLGGADLHCRKSGVSDHWALDDHHALHLTRKVVRNLNYQKKLDVTIEPSEEPLFPADELYGIVGANLKRSFDVREVIARIVDGSRFTEFKAFYGDTLVTGFARIFGYPVGIVGNNGVLFSESAKKGTHFVQLCCQRNIPLLFLQNITGFMVGREYEAEGIAKDGAKMVAAVACAQVPKITLIIGGSYGAGNYGMCGRAYSPRFLYIWPNARISVMGGEQAANVLATITKDQRAREGKQFSSADEAALKEPIIKKFEEEGNPYYSSARVWDDGIIDPADTRLVLGLSFSAALNAPIEKTDFGIFRM

SEQ ID NO: 847579 - protein, 563 aa, Homo sapiens; identical to SEQ ID NO: 847578

SEQ ID NO: 847580 - protein, 563 aa, Homo sapiens; identical to SEQ ID NO: 847578

SEQ ID NO: 847581 - protein, 563 aa, Homo sapiens; identical to SEQ ID NO: 847578

SEQ ID NO: 847582 - protein, 525 aa, Homo sapiens
MWAVLRLALRPCARASPAGPRAYHGDSVASLGTQPDLGSALYQENYKQMKALVNQLHERVEHIKLGGGEKARALHISRGKLLPRERIDNLIDPGSPFLELSQFAGYQLYDNEEVPGGGIITGIGRVSGVECMIIANDATVKGGAYYPVTVKKQLRAQEIAMQNRLPCIYLVDSGGAYLPRQADVFPDRDHFGRTFYNQAIMSSKNIAQVKAATGEEVSAEDLGGADLHCRKSGVSDHWALDDHHALHLTRKVVRNLNYQKKLDVTIEPSEEPLFPADELYGIVGANLKRSFDVREVIARIVDGSRFTEFKAFYGDTLVTGFARIFGYPVGIVGNNGVLFSESAKKGTHFVQLCCQRNIPLLFLQNITGFMVGREYEAEGIAKDGAKMVAAVACAQVPKITLIIGGSYGAGNYGMCGRAYSPRFLYIWPNARISVMGGEQAANVLATITKDQRAREGKQFSSADEAALKEPIIKKFEEEGNPYYSSARVWDDGIIDPADTRLVLGLSFSAALNAPIEKTDFGIFRM

SEQ ID NO: 847583 - protein, 334 aa, Homo sapiens
NTADTSSPVAALTKGGPAKKMVPCLRTMMFSSAMAGTEAPPAVQEPMTTAICAPQQLTRKVVRNLNYQKKLDVTIEPSEEPLFPADELYGIVGANLKRSFDVREVIARIVDGSRFTEFKAFYGDTLVTGFARIFGYPVGIVGNNGVLFSESAKKGTHFVQLCCQRNIPLLFLQNITGFMVGREYEAEGIAKDGAKMVAAVACAQVPKITLIIGGSYGAGNYGMCGRAYSPRFLYIWPNARISVMGGEQAANVLATITKDQRAREGKQFSSADEAALKEPIIKKFEEEGNPYYSSARVWDDGIIDPADTRLVLGLSFSAALNAPIEKTDFGIFRM

SEQ ID NO: 847584 - protein, 358 aa, Homo sapiens
MWAVLRLALRPCARASPAGPRAYHGDSVASLGTQPDLGSALYQENYKQMKALVNQLHERVEHIKLGGGEKARALHISRGKLLPRERIDNLIDPGSPFLELSQFAGYQLYDNEEVPGGGIITGIGRVSGVECMIIANDATVKGGAYYPVTVKKQLRAQEIAMQNRLPCIYLVDSGGAYLPRQADVFPDRDHFGRTFYNQAIMSSKNIAQIAVVMGSCTAGGAYVPAMADENIIVRKQGTIFLAGPPLVKAATGEEVSAEDLGGADLHCRKSGVSDHWALDDHHALHLTRKVVRNLNYQKKLDVTIEPSEEPLFPADELYGIVGANLKRSFDVREVIARIVDGSRFTEFKAFYGDTLVTV

SEQ ID NO: 847585 - protein, 409 aa, Homo sapiens
MWAVLRLALRPCARASPAGPRAYHGDSVASLGTQPDLGSALYQENYKQMKALVNQLHERVEHIKLGGGEKARALHISRGKLLPRERIDNLIDPGSPFLELSQFAGYQLYDNEEVPGGGIITGIGRVSGVECMIIANDATVKGGAYYPVTVKKQLRAQEIAMQNRLPCIYLVDSGGAYLPRQADVFPDRDHFGRTFYNQAIMSSKNIAQIAVVMGSCTAGGAYVPAMADENIIVRKQGTIFLAGPPLVKAATGEEVSAEDLGGADLHCRKSGVSDHWALDDHHALHLTRKVVRNLNYQKKLDVTIEPSEEPLFPADELYGIVGANLKRSFDVREVIARIVDGSRFTEFKAFYGDTLVTGFARIFGYPVGIVGNNGVLFSESAKKVLTLSVMLPRNSSAVPQTYAEFEGTG

SEQ ID NO: 847586 - protein, 541 aa, Homo sapiens
MWAVLRLALRPCARASPAGPRAYHGDSVASLGTQPDLGSALYQENYKQMKALVNQLHERVEHIKLGGGEKARALHISRGKLLPRERIDNLIDPGSPFLELSQFAGYQLYDNEEVPGGGIITGIGRVSGVECMIIANDATVKGGAYYPVTVKKQLRAQEIAMQNRLPCIYLVDSGGAYLPRQADVFPDRDHFGRTFYNQAIMSSKNIAQVKAATGEEVSAEDLGGADLHCRKSGVSDHWALDDHHALHLTRKVVRNLNYQKKLDVTIEPSEEPLFPADELYGIVGANLKRSFDVREVIARIVDGSRFTEFKAFYGDTLVTALGKAQDINLFELSFDGFARIFGYPVGIVGNNGVLFSESAKKGTHFVQLCCQRNIPLLFLQNITGFMVGREYEAEGIAKDGAKMVAAVACAQVPKITLIIGGSYGAGNYGMCGRAYSPRFLYIWPNARISVMGGEQAANVLATITKDQRAREGKQFSSADEAALKEPIIKKFEEEGNPYYSSARVWDDGIIDPADTRLVLGLSFSAALNAPIEKTDFGIFRM

SEQ ID NO: 847587 - protein, 563 aa, Homo sapiens; identical to SEQ ID NO: 847578

SEQ ID NO: 847588 - protein, 563 aa, Homo sapiens; identical to SEQ ID NO: 847578

SEQ ID NO: 847589 - protein, 511 aa, Homo sapiens
ELRFKRGKASLHQRGGEKARALHISRGKLLPRERIDNLIDPGSPFLELSQFAGYQLYDNEEVPGGGIITGIGRVSGVECMIIANDATVKGGAYYPVTVKKQLRAQEIAMQNRLPCIYLVDSGGAYLPRQADVFPDRDHFGRTFYNQAIMSSKNIAQIAVVMGSCTAGGAYVPAMADENIIVRKQGTIFLAGPPLVKAATGEEVSAEDLGGADLHCRKSGVSDHWALDDHHALHLTRKVVRNLNYQKKLDVTIEPSEEPLFPADELYGIVGANLKRSFDVREVIARIVDGSRFTEFKAFYGDTLVTGFARIFGYPVGIVGNNGVLFSESAKKGTHFVQLCCQRNIPLLFLQNITGFMVGREYEAEGIAKDGAKMVAAVACAQVPKITLIIGGSYGAGNYGMCGRAYSPRFLYIWPNARISVMGGEQAANVLATITKDQRAREGKQFSSADEAALKEPIIKKFEEEGNPYYSSARVWDDGIIDPADTRLVLGLSFSAALNAPIEKTDFGIFRM

SEQ ID NO: 847590 - protein, 563 aa, Homo sapiens; identical to SEQ ID NO: 847578

SEQ ID NO: 847591 - protein, 482 aa, Homo sapiens
MWAVLRLALRPCARASPAGPRAYHGDSVASLGTQPDLGSALYQENYKQMKALVNQLHERVEHIKLGGGEKARALHISRGKLLPRERIDNLIDPGSPFLELSQFAGYQLYDNEEVPGGGIITGIGRVSGVECMIIANDATVKGGAYYPVTVKKQLRAQEIAMQNRLPCIYLVDSGGAYLPRQADVFPDRDHFGRTFYNQAIMSSKNIAQIAVVMGSCTAGGAYVPAMADENIIVRKQGTIFLAGPPLVKAATGEEVSAEDLGGADLHCRKSGVSDHWALDDHHALHLTRKVVRNLNYQKKLDVTIEPSEEPLFPADELYGIVGANLKRSFDVREVIARIVDGSRFTEFKAFYGDTLVTGFARIFGYPVGIVGNNGVLFSESAKKGTHFVQLCCQRNIPLLFLQNITGFMVGREYEAEGIAKDGAKMVAAVACAQVPKITLIIGGSYGAGNYGMCGRAYSFPTLCSCKTLSTSFVINSSFSYKH

SEQ ID NO: 847592 - protein, 248 aa, Homo sapiens
VRVSDDSCKTQCHAVTFALWELIEMLAISRNQKLLQAGEENQVLELLIHRDGEFQELMKLALNQGKIHHEMQVLEKEVEKRDSDIQQLQKQLKEAEQILATAVYQAKEKLKSIEKARKGAISSEEIIKYAHRISASNAVCAPLTWVPGDPRRPYPTDLEMRSGLLGQMNNPSTNGVNGHLPGDALAAGRLPDVLAPQYPWQSNDMSMNMLPPNHSSDFLLEPPGHNKENEDDVEIMSTDSSSSSSESD

SEQ ID NO: 847593 - protein, 249 aa, Homo sapiens
ATHLRQLALRVRRWRDSGENGCVFECGEKEKERLGGGLGVAGGNSTRERLLSALEDLEVLSRELIEMLAISRNQKLLQAGEENQVLELLIHRDGEFQELMKLALNQGKIHHEMQVLEKEVEKRDSDIQQLQKQLKEAEQILATAVYQAKEKLKSIEKARKEKKKKKKKLGGGLGLGKVFGNHGLGEGAQRVQGPGPKRTQRNRGQDKGPGSSPLKRAGEHEGVVKIPGDRRANGLFTGTRSAIWAPGGR

SEQ ID NO: 847594 - protein, 276 aa, Homo sapiens
PRTCVSSLCACAGGGTLGKMAASSSVAGGNSTRERLLSALEDLEVLSRELIEMLAISRNQKLLQAGEENQVLELLIHRDGEFQELMKLALNQGKIHHEMQVLEKEVEKRDSDIQQLQKQLKEAEQILATAVYQAKEKLKSIEKARKGAISSEEIIKYAHRISASNAVCAPLTWVPGDPRRPYPTDLEMRSGLLGQMNNPSTNGVNGHLPGDALAAGRLPDVLAPQYPWQSNDMSMNMLPPNHSSDFLLEPPGHNKENEDDVEIMSTDSSSSSSESD

SEQ ID NO: 847595 - protein, 248 aa, Homo sapiens
EGPGGDRAVLNRSSMCMCVVSLLARINQESQAISISMLRPASVLELLIHRDGEFQELMKLALNQGKIHHEMQVLEKEVEKRDSDIQQLQKQLKEAEQILATAVYQAKEKLKSIEKARKGAISSEEIIKYAHRISASNAVCAPLTWVPGDPRRPYPTDLEMRSGLLGQMNNPSTNGVNGHLPGDALAAGRLPDVLAPQYPWQSNDMSMNMLPPNHSSDFLLEPPGHNKENEDDVEIMSTDSSSSSSESD

SEQ ID NO: 847596 - protein, 183 aa, Homo sapiens
LAVLIFYRAGQVNGLVLAMVGTDKGKHRLSPYCLATAVYQAKEKLKSIEKARKGAISSEEIIKYAHRISASNAVCAPLTWVPGDPRRPYPTDLEMRSGLLGQMNNPSTNGVNGHLPGDALAAGRLPDVLAPQYPWQSNDMSMNMLPPNHSSDFLLEPPGHNKENEDDVEIMSTDSSSSSSESD

SEQ ID NO: 847597 - protein, 290 aa, Homo sapiens
ATHLRQLALRVRRWRDSGENGCVFECGEKEKERLGGGLGVAGGNSTRERLLSALEDLEVLSRELIEMLAISRNQKLLQAGEENQVLELLIHRDGEFQELMKLALNQGKIHHEMQVLEKEVEKRDSDIQQLQKQLKEAEQILATAVYQAKEKLKSIEKARKGAISSEEIIKYAHRISASNAVCAPLTWVPGDPRRPYPTDLEMRSGLLGQMNNPSTNGVNGHLPGDALAAGRLPDVLAPQYPWQSNDMSMNMLPPNHSSDFLLEPPGHNKENEDDVEIMSTDSSSSSSESD

SEQ ID NO: 847598 - protein, 225 aa, Homo sapiens
ATHLRQLALRVRRWRDSGENGCVFECGEKEKERLGGGLGVAGGNSTRERLLSALEDLEVLSRELIEMLAISRNQKLLQAGEENQVLELLIHRDGEFQELMKLALNQGKIHHEMQVLEKEVEKRDRDPRRPYPTDLEMRSGLLGQMNNPSTNGVNGHLPGDALAAGRLPDVLAPQYPWQSNDMSMNMLPPNHSSDFLLEPPGHNKENEDDVEIMSTDSSSSSSESD

SEQ ID NO: 847599 - protein, 290 aa, Homo sapiens; identical to SEQ ID NO: 847597

SEQ ID NO: 847600 - protein, 109 aa, Homo sapiens
MCSTELGSWDPRRPYPTDLEMRSGLLGQMNNPSTNGVNGHLPGDALAAGRLPDVLAPQYPWQSNDMSMNMLPPNHSSDFLLEPPGHNKENEDDVEIMSTDSSSSSSESD

SEQ ID NO: 847601 - protein, 78 aa, Homo sapiens
VRRRRSGWEAVWEWRVVTAHESGCCLRLRTWRSCLGNAASLRAGLELGRGTDPGAGRPCVCARSRGSAGRASSGVSGA

SEQ ID NO: 847602 - protein, 290 aa, Homo sapiens; identical to SEQ ID NO: 847597

SEQ ID NO: 847603 - protein, 290 aa, Homo sapiens; identical to SEQ ID NO: 847597

SEQ ID NO: 847604 - protein, 290 aa, Homo sapiens; identical to SEQ ID NO: 847597

SEQ ID NO: 847605 - protein, 254 aa, Homo sapiens
ATHLRQLALRVRRWRDSGENGCVFEWELIEMLAISRNQKLLQAGEENQVLELLIHRDGEFQELMKLALNQGKIHHEMQVLEKEVEKRDSDIQQLQKQLKEAEQILATAVYQAKEKLKSIEKARKGAISSEEIIKYAHRISASNAVCAPLTWVPGDPRRPYPTDLEMRSGLLGQMNNPSTNGVNGHLPGDALAAGRLPDVLAPQYPWQSNDMSMNMLPPNHSSDFLLEPPGHNKENEDDVEIMSTDSSSSSSESD

SEQ ID NO: 847606 - protein, 290 aa, Homo sapiens; identical to SEQ ID NO: 847597

SEQ ID NO: 847607 - protein, 248 aa, Homo sapiens; identical to SEQ ID NO: 847592

SEQ ID NO: 847608 - protein, 290 aa, Homo sapiens; identical to SEQ ID NO: 847597

SEQ ID NO: 847609 - protein, 167 aa, Homo sapiens
ATHLRQLALRVRRWRDSGENGCVFECGEKEKERLGGGLGVAGGNSTRERLLSALEDLEVLSRELIEMLAISRNQKLLQAGEENQVLELLIHRDGEFQELMKLALNQGKIHHEMQVLEKEVEKRDSDIQQLQKQLKEAEQILATAVYQAKEKLKSIEKARKVMLYVLH

SEQ ID NO: 847610 - protein, 143 aa, Homo sapiens
ATHLRQLALRVRRWRDSGENGCVFECGEKEKERLGGGLGVAGGNSTRERLLSALEDLEVLSRELIEMLAISRNQKLLQAGEENQVLELLIHRDGEFQELMKLALNQGKIHHEMQVLEKEVEKRDSDIQQLQKQLKEAEQILVS

SEQ ID NO: 847611 - protein, 67 aa, Homo sapiens
PCVVPGVLGLVLSGSATTIRLGPIPTTAVESAPFSDILRGIPAIWSNFVEPGLYENKSGLQSFQIPS

SEQ ID NO: 847612 - protein, 612 aa, Homo sapiens
MAAAGRLPSSWALFSPLLAGLALLGVGPVPARALHNVTAELFGAEAWGTLAAFGDLNSDKQTDLFVLRERNDLIVFLADQNAPYFKPKVKVSFKNHSALITSVVPGDYDGDSQMDVLLTYLPKNYAKSELGAVIFWGQNQTLDPNNMTILNRTFQDEPLIMDFNGDLIPDIFGITNESNQPQILLGGNLSWHPALTTTSKMRIPHSHAFIDLTEDFTADLFLTTLNATTSTFQFEIWENLDGNFSVSTILEKPQNMMVVGQSAFADFDGDGHMDHLLPGCEDKNCQKSTIYLVRSGMKQWVPVLQDFSNKGTLWGFVPFVDEQQPTEIPIPITLHIGDYNMDGYPDALVILKNTSGSNQQAFLLENVPCNNASCEEARRMFKVYWELTDLNQIKDAMVATFFDIYEDGILDIVVLSKGYTKNDFAIHTLKNNFEADAYFVKVIVLSGLCSNDCPRKITPFGVNQPGPYIMYTTVDANGYLKNGSAGQLSQSAHLALQLPYNVLGLGRSANFLDHLYVGIPRPSGEKSIRKQEWTAIIPNSQLIVIPYPHNVPRSWSAKLYLTPSNIVLLTAIALIGVCVFILAIIGILHWQEKKADDREKRQEAHRFHFDAM

SEQ ID NO: 847613 - protein, 612 aa, Homo sapiens; identical to SEQ ID NO: 847612

SEQ ID NO: 847614 - protein, 545 aa, Homo sapiens
MAAAGRLPSSWALFSPLLAGLALLGVGPVPARALHNVTAELFGAEAWGTLAAFGDLNSDKQTDLFVLRERNDLIVFLADQNAPYFKPKVKVSFKNHSALITSVVPGDYDGDSQMDVLLTYLPKNYAKSELGAVIFWGQNQTLDPNNMTILNRTFQDEPLIMDFNGDLIPDIFGITNESNQPQILLGGNLSWHPALTTTSKMRIPHSHAFIDLTEDFTADLFLTTLNATTSTFQFEIWENLDGNFSVSTILEKPQNMMVVGQSAFADFDGDGHMDHLLPGCEDKNCQKSTIYLVRSGMKQWVPVLQDFSNKGTLWGFVPFVDEQQPTEIPIPITLHIGDYNMDGYPDALVILKNTSGSNQQAFLLENVPCNNASCEEARRMFKVYWELTDLNQIKDAMVATFFDIYEDGILDIVVLSKGYTKNDFAIHTLKNNFEADAYFVKVIVLSGLCSNDCPRKITPFGVNQPGPYIMYTTVDANGYLKNGSAGQLSQSAHLALQLPYNVLGLGRSANFLDHLYVGIPRPSGEKSIPSQCPSKLECQTVSYTK

SEQ ID NO: 847615 - protein, 649 aa, Homo sapiens
MAAAGRLPSSWALFSPLLAGLALLGVGPVPARALHNVTAELFGAEAWGTLAAFGDLNSDKQTDLFVLRERNDLIVFLADQNAPYFKPKVKVSFKNHSALITSVVPGDYDGDSQMDVLLTYLPKNYAKSELGAVIFWGQNQTLDPNNMTILNRTFQDEPLIMDFNGDLIPDIFGITNESNQPQILLGGNLSWHPALTTTSKMRIPHSHAFIDLTEDFTAESPSVSRLEIRILAHCNLRLLGSSDSSASASQVAGTTDLFLTTLNATTSTFQFEIWENLDGNFSVSTILEKPQNMMVVGQSAFADFDGDGHMDHLLPGCEDKNCQKSTIYLVRSGMKQWVPVLQDFSNKGTLWGFVPFVDEQQPTEIPIPITLHIGDYNMDGYPDALVILKNTSGSNQQAFLLENVPCNNASCEEARRMFKVYWELTDLNQIKDAMVATFFDIYEDGILDIVVLSKGYTKNDFAIHTLKNNFEADAYFVKVIVLSGLCSNDCPRKITPFGVNQPGPYIMYTTVDANGYLKNGSAGQLSQSAHLALQLPYNVLGLGRSANFLDHLYVGIPRPSGEKSIRKQEWTAIIPNSQLIVIPYPHNVPRSWSAKLYLTPSNIVLLTAIALIGVCVFILAIIGILHWQEKKADDREKRQEAHRFHFDAM

SEQ ID NO: 847616 - protein, 597 aa, Homo sapiens
MAAAGRLPSSWALFSPLLAGLALLGVGPVPARALHNVTAELNSDKQTDLFVLRERNDLIVFLADQNAPYFKPKVKVSFKNHSALITSVVPGDYDGDSQMDVLLTYLPKNYAKSELGAVIFWGQNQTLDPNNMTILNRTFQDEPLIMDFNGDLIPDIFGITNESNQPQILLGGNLSWHPALTTTSKMRIPHSHAFIDLTEDFTADLFLTTLNATTSTFQFEIWENLDGNFSVSTILEKPQNMMVVGQSAFADFDGDGHMDHLLPGCEDKNCQKSTIYLVRSGMKQWVPVLQDFSNKGTLWGFVPFVDEQQPTEIPIPITLHIGDYNMDGYPDALVILKNTSGSNQQAFLLENVPCNNASCEEARRMFKVYWELTDLNQIKDAMVATFFDIYEDGILDIVVLSKGYTKNDFAIHTLKNNFEADAYFVKVIVLSGLCSNDCPRKITPFGVNQPGPYIMYTTVDANGYLKNGSAGQLSQSAHLALQLPYNVLGLGRSANFLDHLYVGIPRPSGEKSIRKQEWTAIIPNSQLIVIPYPHNVPRSWSAKLYLTPSNIVLLTAIALIGVCVFILAIIGILHWQEKKADDREKRQEAHRFHFDAM

SEQ ID NO: 847617 - protein, 585 aa, Homo sapiens
MISYSEINLQKQRYLKLPSDPFGVYNTYQTLRKRKTEETTASGNDLIVFLADQNAPYFKPKVKVSFKNHSALITSVVPGDYDGDSQMDVLLTYLPKNYAKSELGAVIFWGQNQTLDPNNMTILNRTFQDEPLIMDFNGDLIPDIFGITNESNQPQILLGGNLSWHPALTTTSKMRIPHSHAFIDLTEDFTADLFLTTLNATTSTFQFEIWENLDGNFSVSTILEKPQNMMVVGQSAFADFDGDGHMDHLLPGCEDKNCQKSTIYLVRSGMKQWVPVLQDFSNKGTLWGFVPFVDEQQPTEIPIPITLHIGDYNMDGYPDALVILKNTSGSNQQAFLLENVPCNNASCEEARRMFKVYWELTDLNQIKDAMVATFFDIYEDGILDIVVLSKGYTKNDFAIHTLKNNFEADAYFVKVIVLSGLCSNDCPRKITPFGVNQPGPYIMYTTVDANGYLKNGSAGQLSQSAHLALQLPYNVLGLGRSANFLDHLYVGIPRPSGEKSIRKQEWTAIIPNSQLIVIPYPHNVPRSWSAKLYLTPSNIVLLTAIALIGVCVFILAIIGILHWQEKKADDREKRQEAHRFHFDAM

SEQ ID NO: 847618 - protein, 305 aa, Homo sapiens
MTPCQNLKTRVVIPGSILIPCSSETPQLGMAASAHQWDSLDPDPADLHKLNQQAFLLENVPCNNASCEEARRMFKVYWELTDLNQIKDAMVATFFDIYEDGILDIVVLSKGYTKNDFAIHTLKNNFEADAYFVKVIVLSGLCSNDCPRKITPFGVNQPGPYIMYTTVDANGYLKNGSAGQLSQSAHLALQLPYNVLGLGRSANFLDHLYVGIPRPSGEKSIRKQEWTAIIPNSQLIVIPYPHNVPRSWSAKLYLTPSNIVLLTAIALIGVCVFILAIIGILHWQEKKADDREKRQEAHRFHFDAM

SEQ ID NO: 847619 - protein, 310 aa, Homo sapiens
MAAAGRLPSSWALFSPLLAGLALLGVGPVPARALHNVTAELFGAEAWGTLAAFGDLNSDKQTDLFVLRERNDLIVFLADQNAPYFKPKVKVSFKNHSALITSVVPGDYDGDSQMDVLLTYLPKNYAKSELGAVIFWGQNQTLDPNNMTILNRTFQDEPLIMDFNGDLIPDIFGITNESNQPQILLGGNLSWHPALTTTSKMRIPHSHAFIDLTEDFTAAHLFLTTLNAHHQYLPARPYGQQLDGHTLCTTLLFGTKLHKMTGWLEPTRLVRTCSETAPMGTFNLPRGENRHCAKSATNRGKRADAWGKPT

SEQ ID NO: 847620 - protein, 612 aa, Homo sapiens; identical to SEQ ID NO: 847612

SEQ ID NO: 847621 - protein, 612 aa, Homo sapiens; identical to SEQ ID NO: 847612

SEQ ID NO: 847622 - protein, 612 aa, Homo sapiens; identical to SEQ ID NO: 847612

SEQ ID NO: 847623 - protein, 609 aa, Homo sapiens
MAAAGRLPSSWALFSPLLAGLALLGVGPVPARALHNVTAELFGAEAWGTLAAFGDLNSDKQTDLFVLRERNDLIVFLADQNAPYFKPKVKVSFKNHSALITSVVPGDYDGDSQMDVLLTYLPKNYAKSELGAVIFWGQNQTLDPNNMTILNRTFQDEPLIMDFNGDLIPDIFGITNESNQPQILLGGNLSWHPALTTTSKMRIPHSHAFIDLTEDFTADLFLTTLNATTSTFQFEIWENLDGNFSVSTILEKPQNMMVVGQSAFADFDGDGHMDHLLPGCEDKNCQKSTIYLVRSGMKQWVPVLQDFSNKGTLWGFVPFVDEQQPTEIPIPITLHIGDYNMDGYPDALVILKNTSGSNQQAFLLENVPCNNASCEEARRMFKVYWELTDLNQIKDAMVATFFDIYEDGILDIVVLSKGYTKNDFAIHTLKNNFEADAYFVKVIVLSGLCSNDCPRKITPFGVNQPGPYIMYTTVDANGYLKNGSAGQLSQSAHLALQLPYNVLGLGRSANFLDHLYVGIPRPSGEKSIRKQEWTAIIPNSQLIVIPYPHNVPRSWSAKLYLTPSNIVLLTAIALIGVCVFILAIIGILHWQEKKAADTVCSREALGCLV

SEQ ID NO: 847624 - protein, 445 aa, Homo sapiens [sequence omitted]

SEQ ID NO: 847625 - protein, 414 aa, Homo sapiens
MAAAGRLPSSWALFSPLLAGLALLGVGPVPARALHNVTAELFGAEAWGTLAAFGDLNSDKQTDLFVLRERNDLIVFLADQNAPYFKPKVKVSFKNHSALITSVVPGDYDGDSQMDVLLTYLPKNYAKSELGAVIFWGQNQTLDPNNMTILNRTFQDEPLIMDFNGDLIPDIFGITNESNQPQILLGGNLSWHPALTTTSKMRIPHSHAFIDLTEDFTADLFLTTLNATTSTFQFEIWENLDGNFSVSTILEKPQNMMVVGQSAFADFDGDGHMDHLLPGCEDKNCQKSTIYLVRSGMKQWVPVLQDFSNKGTLWGFVPFVDEQQPTEIPIPITLHIGDYNMDGYPDALVILKNTSGSNQQAFLLENVPCNNASCEEARRMFKVYWELRRVLVTSRLISFTPWNLPRSIIHPFNQ

SEQ ID NO: 847626 - protein, 143 aa, Homo sapiens
MYTTVDANGYLKNGSAGQLSQSAHLALQLPYNVLGLGRSANFLDHLYVGIPRPSGEKSIRKQEWTAIIPNSQLIVIPYPHNVPRSWSAKLYLTPSNIVLLTAIALIGVCVFILAIIGILHWQEKKADDREKRQEAHRFHFDAM

SEQ ID NO: 847627 - protein, 121 aa, Homo sapiens
CVKSGSAIEVVCIDKLDLGGMQQQQQLASARNRRLAQQMENRPSVQAALKLKQKSLKQRLGKSNIQARLGRPIGALARGAIGGRGLPIIQRGLPRGGLRGGRATRTLLRGGMSLRGQCCVP

SEQ ID NO: 847628 - protein, 249 aa, Homo sapiens
MAAQSAPKVVLKSTTKMSLNERFTNMLKNKQPTPVNIRASMQQQQQLASARNRRLAQQMENRPSVQAALKLKQKSLKQRLGKSNIQARLGRPIGALARGAIGGRGLPIIQRGLPRGGLRGGRATRTLLRGGMSLRGQNLLRGGRAVAPRMGLRRGGVRGRGGPGRGGLGRGAMGRGGIGGRGRGMIGRGRGGFGGRGRGRGRGRGALARPVLTKEQLDNQLDAYMSKTKGHLDAELDAYMAQTDPETND

SEQ ID NO: 847629 - protein, 249 aa, Homo sapiens; identical to SEQ ID NO: 847628

SEQ ID NO: 847630 - protein, 249 aa, Homo sapiens; identical to SEQ ID NO: 847628

SEQ ID NO: 847631 - protein, 258 aa, Homo sapiens
MAAQSAPKVVLKSTTKMSLNERFTNMLKNKQPTPVNIRASMQQQQQLASARNRRLAQQMENRPSVQAALKLKQKSLKQRLGKSNIQARLGRPIGALARGAIGGRGLPIIQRGLPRGGLRGGRATRTLLRGGMSLRGQNLLRGGRAVAPRMGLRRGGVRGRGGPGRGGLGRGAMGRGGIGGRGRGMIGRGRGGFGGRGRGRGRGRGALARPVLTKEQLDNQLDAYMSKTNEACPSSHERLLLVNTSVNNLEITDEKKSD

SEQ ID NO: 847632 - protein, 249 aa, Homo sapiens; identical to SEQ ID NO: 847628

SEQ ID NO: 847633 - protein, 313 aa, Homo sapiens
AGQTSTGRGGHFVLDTEQELAAAADERQERAGRVRPVPGPPAGAVVAAPGGALASVSFDSRDSKMAAQSAPKVVLKSTTKMSLNERFTNMLKNKQPTPVNIRASMQQQQQLASARNRRLAQQMENRPSVQAALKLKQKSLKQRLGKSNIQARLGRPIGALARGAIGGRGLPIIQRGLPRGGLRGGRATRTLLRGGMSLRGQNLLRGGRAVAPRMGLRRGGVRGRGGPGRGGLGRGAMGRGGIGGRGRGMIGRGRGGFGGRGRGRGRGRGALARPVLTKEQLDNQLDAYMSKTKGHLDAELDAYMAQTDPETND

SEQ ID NO: 847634 - protein, 217 aa, Homo sapiens
MMILVFSAVQQQQQLASARNRRLAQQMENRPSVQAALKLKQKSLKQRLGKSNIQARLGRPIGALARGAIGGRGLPIIQRGLPRGGLRGGRATRTLLRGGMSLRGQNLLRGGRAVAPRMGLRRGGVRGRGGPGRGGLGRGAMGRGGIGGRGRGMIGRGRGGFGGRGRGRGRGRGALARPVLTKEQLDNQLDAYMSKTKGHLDAELDAYMAQTDPETND

SEQ ID NO: 847635 - protein, 118 aa, Homo sapiens
MSLRGQNLLRGGRAVAPRMGLRRGGVRGRGGPGRGGLGRGAMGRGGIGGRGRGMIGRGRGGFGGRGRGRGRGRGALARPVLTKEQLDNQLDAYMSKTKGHLDAELDAYMAQTDPETND

SEQ ID NO: 847636 - protein, 118 aa, Homo sapiens; identical to SEQ ID NO: 847635

SEQ ID NO: 847637 - protein, 141 aa, Homo sapiens
MAAQSAPKVVLKSTTKMSLNERFTNMLKNKQPTPVNIRASMQQQQQLASARNRRLAQQMENRPSVQAALKLKQKSLKQRLGKSNIQARLGRPIGALARGAIGGRGLPIIQRGLPRGGLRGGRATRTLLRGGMSLRGQCCVP

SEQ ID NO: 847638 - protein, 66 aa, Homo sapiens
VDYYYKFAAASTRGRGRGRGRGALARPVLTKEQLDNQLDAYMSKTKGHLDAELDAYMAQTDPETND

SEQ ID NO: 847639 - protein, 249 aa, Homo sapiens; identical to SEQ ID NO: 847628

SEQ ID NO: 847640 - protein, 224 aa, Homo sapiens
MLKNKQPTPVNIRASMQQQQQLASARNRRLAQQMENRPSVQAALKLKQKSLKQRLGKSNIQARLGRPIGALARGAIGGRGLPIIQRGLPRGGLRGGRATRTLLRGGMSLRGQNLLRGGRAVAPRMGLRRGGVRGRGGPGRGGLGRGAMGRGGIGGRGRGMIGRGRGGFGGRGRGRGRGRGALARPVLTKEQLDNQLDAYMSKTKGHLDAELDAYMAQTDPETND

SEQ ID NO: 847641 - protein, 204 aa, Homo sapiens
MDDCKVAQGKKLKLLWKKEKFREFQFWQKSLKQRLGKSNIQARLGRPIGALARGAIGGRGLPIIQRGLPRGGLRGGRATRTLLRGGMSLRGQNLLRGGRAVAPRMGLRRGGVRGRGGPGRGGLGRGAMGRGGIGGRGRGMIGRGRGGFGGRGRGRGRGRGALARPVLTKEQLDNQLDAYMSKTKGHLDAELDAYMAQTDPETND

SEQ ID NO: 847642 - protein, 204 aa, Homo sapiens; identical to SEQ ID NO: 847641

SEQ ID NO: 847643 - protein, 190 aa, Homo sapiens
MAAQSAPKVVLKSTTKMSLNERFTNMLKNKQPTPVNIRASMQQQQQLASARNRRLAQQMENRPSVQAALKLKQKSLKQRLGKSNIQARLGRPIGALARGAIGGRGLPIIQRGLPRGGLRGGRATRTLLRGGMSLRGQNLLRGGRAVAPRMGLRRGGVRGRGGPGRGGLGRGAMGRGGIGGRAAYDRSEKT

SEQ ID NO: 847644 - protein, 158 aa, Homo sapiens
AGQTSTGRGGHFVLDTEQELAAAADERQERAGRVSRRIGRLDSQRQNLLRGGRAVAPRMGLRRGGVRGRGGPGRGGLGRGAMGRGGIGGRGRGMIGRGRGGFGGRGRGRGRGRGALARPVLTKEQLDNQLDAYMSKTKGHLDAELDAYMAQTDPETND

SEQ ID NO: 847645 - protein, 141 aa, Homo sapiens; identical to SEQ ID NO: 847637

SEQ ID NO: 847646 - protein, 358 aa, Homo sapiens
  misc_feature (306)..(306): Xaa can be any naturally occurring amino acid
MAAQSAPKVVLKSTTKMSLNERFTNMLKNKQPTPVNIRASMQQQQQLASARNRRLAQQMENRPSVQAALKLKQKSLKQRLGKSNIQARLGRPIGALARGAIGGRGLPIIQRGLPRGGLRGGRATRTLLRGGMSLRGGVRGRGGPGRGGLGRGAMGRGGIGGRAAYDRSEKRGLRGPLSSSVAGGALPLLPRSRSWSSLPFRWLSLCPPRLVASPAARSPPRLAPSPAPRPRPALLSRPLLPAWLSPRPLPPPSPPPSPRSSPFLRSLFPALRCRAPSGPFPGLCSLAHAFSPSLAPRRSFVRGFAXFSSRPPPARASCLLFVPGASPCALLGRLPLPVPSRFAVSSTPSSSSSASPSA

SEQ ID NO: 847647 - protein, 357 aa, Homo sapiens
MAAQSAPKVVLKSTTKMSLNERFTNMLKNKQPTPVNIRASMQQQQQLASARNRRLAQQMENRPSVQAALKLKQKSLKQRLGKSNIQARLGRPIGALARGAIGGRGLPIIQRGLPRGGLRGGRATRTLLRGGMSLRGGVRGRGGPGRGGLGRGAMGRGGIGGRAAYDTSFKMPFATPLLSHGRLSIPPRPPSLCPPRSAPPRPLLVRSSVRSPARSLSLRPLSPPSPPSLALLLRLLSLHPRSSPPLLGILSAAASLPLRPPHLFRPSAFLCLPLHSLSPLTSTPASARSTSSPLALSALSPPALAPSPPPLPPRFGRLLSASSTRVARRRSPLPPLPPLRPGVLVAPPRSVPSAASR

SEQ ID NO: 847648 - protein, 95 aa, Homo sapiens
MRRNLIDAGWTYHNRLWTYLPPACAFSVFLLLFDTVLYETLLSFDLVFCFCFFRGEGGFPLLCPDFSLNTNALALWLEHPLPTSVSPHLSYALTC

SEQ ID NO: 847649 - protein, 141 aa, Homo sapiens
MKDNKIMNNQDAIEKAVSRGQCLYKISSYTSYPMHDFYRCHTCNTTDRNAICVNCIKKCHQGHDVEFIRHDRYVAHLLDILPNYFPPHFSNIWVSFCFRFFCDCGAGTLSNPCTLAGEPTHDTDTLYDSAPPIESNTLQHN

SEQ ID NO: 847650 - protein, 927 aa, Homo sapiens
MNSVRAANRRPRRVSRPRPVQQQQQQPPQQPPPQPPQQQPPQQQPPPPPQQQQQQQPPPPPPPPPPLPQERNNVGERDDDVPADMVAEESGPGAQNSPYQLRRKTLLPKRTACPTKNSMEGASTSTTENFGHRAKRARVSGKSQDLSAAPAEQYLQEKLPDEVVLKIFSYLLEQDLCRAACVCKRFSELANDPNLWKRLYMEVFEYTRPMMHPEPGKFYQINPEEYEHPNPWKESFQQLYKGAHVKPGFAEHFYSNPARYKGRENMLYYDTIEDALGGVQEAHFDGLIFVHSGIYTDEWIYIESPITMIGAAPGKVADKVIIENTRDSTFVFMEGSEDAYVGYMTIRFNPDDKSAQHHNAHHCLEITVNCSPIIDHCIIRSTCTVGSAVCVSGQGACPTIKHCNISDCENVGLYITDHAQGIYEDNEISNNALAGIWVKNHGNPIIRRNHIHHGRDVGVFTFDHGMGYFESCNIHRNRIAGFEVKAYANPTVVRCEIHHGQTGGIYVHEKGRGQFIENKIYANNFAGVWITSNSDPTIRGNSIFNGNQGGVYIFGDGRGLIEGNDIYGNALAGIQIRTNSCPIVRHNKIHDGQHGGIYVHEKGQGVIEENEVYSNTLAGVWVTTGSTPVLRRNRIHSGKQVGVYFYDNGHGVLEDNDIYNHMYSGVQIRTGSNPKIRRNKIWGGQNGGILVYNSGLGCIEDNEIFDNAMAGVWIKTDSNPTLRRNKIHDGRDGGICIFNGGRGLLEENDIFRNAQAGVLISTNSHPILRKNRIFDGFAAGIEITNHATATLEGNQIFNNRFGGLFLASGVNVTMKDNKIMNNQDAIEKAVSRGQCLYKISSYTSYPMHDFYRCHTCNTTDRNAICVNCIKKCHQGHDVEFIRHDRFFCDCGAGTLSNPCTLAGEPTHDTDTLYDSAPPIESNTLQHN

SEQ ID NO: 847651 - protein, 927 aa, Homo sapiens; identical to SEQ ID NO: 847650

SEQ ID NO: 847652 - protein, 927 aa, Homo sapiens; identical to SEQ ID NO: 847650

SEQ ID NO: 847653 - protein, 927 aa, Homo sapiens; identical to SEQ ID NO: 847650

SEQ ID NO: 847654 - protein, 903 aa, Homo sapiens
MNSVRAANRRPRRVSRPRPVQQQQQQPPQQPPPQPPQQQPPQQQPPPPPQQQQQQQPPPPPPPPPPLPQERNNVGERDDDVPADMVAEESGPGAQNSPYQLRRKTLLPKRTACPTKNSMEGASTSTTENFGHRAKRARVSGKSQDLSAAPAEQYLQEKLPDEVVLKIFSYLLEQDLCRAACVCKRFSELANDPNLWKRLYMEVFEYTRPMMHPEPGKFYQINPEEYEHPNPWKESFQQLYKGAHVKPGFAEHFYSNPARYKGRENMLYYDTIEDALGGVQEAHFDGLIFVHSGIYTDEWIYIESPITMIGAAPGKVADKVIIENTRDSTFVFMEGSEDAYVGYMTIRFNPDDKSAQHHNAHHCLEITVNCSPIIDHCIIRSTCTVGSAVCVSGQGACPTIKHCNISDCENVGLYITDHAQGIYEDNEISNNALAGIWVKNHGNPIIRRNHIHHGRDVGVFTFDHGMGYFESCNIHRNRIAGFEVKAYANPTVVRCEIHHGQTGGIYVHEKGRGQFIENKIYANNFAGVWITSNSDPTIRGNSIFNGNQGGVYIFGDGRGLIEGNDIYGNALAGIQIRTNSCPIVRHNKIHDGQHGGIYVHEKGQGVIEENEVYSNTLAGVWVTTGSTPVLRRNRIHSGKQVGVYFYDNGHGVLEDNDIYNHMYSGVQIRTGSNPKIRRNKIWGGQNGGILVYNSGLGCIEDNEIFDNAMAGVWIKTDSNPTLRRNKIHDGRDGGICIFNGGRGLLEENDIFRNAQAGVLISTNSHPILRKNRIFDGFAAGIEITNHATATLEGNQIFNNRFGGLFLASGVNVTMKDNKIMNNQDAIEKAVSRGQCLYKISSYTSYPMHDFYRCHTCNTTDRNAICVNCIKKCHQGHDVEFIRHDRFFCDCGAGTLSNPCTLAG

SEQ ID NO: 847655 - protein, 204 aa, Homo sapiens
MNSVRAANRRPRRVSRPRPVQQQQQQPPQQPPPQPPQQQPPQQQPPPPPQQQQQQQPPPPPPPPPPLPQERNNVGERDDDVPADMVAEESGPGAQNSPYQLRRKTLLPKRTACPTKNSMEGASTSTTENFGHRAKRARVSGKSQDLSAAPAEQYLQEKLPDEVVLKIFSYLLEQDLCRAACVCKRFSELANDPNFVARRSGSRL

SEQ ID NO: 847656 - protein, 909 aa, Homo sapiens
MNSVRAANRRPRRVSRPRPVQQQQQQPPQQPPPQPPQQQPPQQQPPPPPQQQQQQQPPPPPPPPPPLPQERNNVGERDDDVPADMVAEESGPGAQNSPYQLRRKTLLPKRTACPTKNSMEGASTSTTENFGHRAKRARVSGKSQDLSAAPAEQYLQEKLPDEVVLKIFSYLLEQDLCRAACVCKRFSELANDPNLWKRLYMEVFEYTRPMMHPEPGKFYQINPEEYEHPNPWKESFQQLYKGAHVKPGFAEHFYSNPARYKGRENMLYYDTIEDALGGVQEAHFDGLIFVHSGIYTDEWIYIESPITMIGAAPGKVADKVIIVGLYDNKFNPDDKSAQHHNAHHCLEITVNCSPIIDHCIIRSTCTVGSAVCVSGQGACPTIKHCNISDCENVGLYITDHAQGIYEDNEISNNALAGIWVKNHGNPIIRRNHIHHGRDVGVFTFDHGMGYFESCNIHRNRIAGFEVKAYANPTVVRCEIHHGQTGGIYVHEKGRGQFIENKIYANNFAGVWITSNSDPTIRGNSIFNGNQGGVYIFGDGRGLIEGNDIYGNALAGIQIRTNSCPIVRHNKIHDGQHGGIYVHEKGQGVIEENEVYSNTLAGVWVTTGSTPVLRRNRIHSGKQVGVYFYDNGHGVLEDNDIYNHMYSGVQIRTGSNPKIRRNKIWGGQNGGILVYNSGLGCIEDNEIFDNAMAGVWIKTDSNPTLRRNKIHDGRDGGICIFNGGRGLLEENDIFRNAQAGVLISTNSHPILRKNRIFDGFAAGIEITNHATATLEGNQIFNNRFGGLFLASGVNVTMKDNKIMNNQDAIEKAVSRGQCLYKISSYTSYPMHDFYRCHTCNTTDRNAICVNCIKKCHQGHDVEFIRHDRFFCDCGAGTLSNPCTLAGEPTHDTDTLYDSAPPIESNTLQHN

SEQ ID NO: 847657 - protein, 927 aa, Homo sapiens; identical to SEQ ID NO: 847650

SEQ ID NO: 847658 - protein, 770 aa, Homo sapiens
MNSVRAANRRPRRVSRPRPVQQQQQQPPQQPPPQPPQQQPPQQQPPPPPQQQQQQQPPPPPPPPPPLPQERNNVGERDDDVPADMVAEESGPGAQNSPYQLRRKTLLPKRTACPTKNSMEGASTSTTENFGHRAKRARVSGKSQDLSAAPAEQYLQEKLPDEVVLKIFSYLLEQDLCRAACVCKRFSELANDPNLWKRLYMEVFEYTRPMMHPEPGKFYQINPEEYEHPNPWKESFQQLYKGAHVKPGFAEHFYSNPARYKGRENMLYYDTIEDALGGVQEAHFDGLIFVHSGIYTDEWIYIESPITMIGAAPGKVADKVIIENTRDSTFVFMEGSEDAYVGYMTIRFNPDDKSAQHHNAHHCLEITVNCSPIIDHCIIRSTCTVGSAVCVSGQGACPTIKHCNISDCENVGLYITDHAQGIYEDNEISNNALAGIWVKNHGNPIIRRNHIHHGRDVGVFTFDHGMGYFESCNIHRNRIAGFEVKAYANPTVVRCEIHHGQTGGIYVHEKGRGQFIENKIYANNFAGVWITSNSDPTIRGNSIFNGNQGGVYIFGDGRGLIEGNDIYGNALAGIQIRTNSCPIVRHNKIHDGQHGGIYVHEKGQGVIEENEVYSNTLAGVWVTTGSTPVLRRNRIHSGKQVGVYFYDNGHGVLEDNDIYNHMYSGVQIRTGSNPKIRRNKIWGGQNGGILVYNSGLGCIEDNEIFDNAMAGVWIKTDSNPTLRRNKIHDGRDGGICIFNGGRGIVVNFALVKNPVFHYSSISLMINDIAN

SEQ ID NO: 847659 - protein, 669 aa, Homo sapiens
MNSVRAANRRPRRVSRPRPVQQQQQQPPQQPPPQPPQQQPPQQQPPPPPQQQQQQQPPPPPPPPPPLPQERNNVGERDDDVPADMVAEESGPGAQNSPYQLRRKTLLPKRTACPTKNSMEGASTSTTENFGHRAKRARVSGKSQDLSAAPAEQYLQEKLPDEVVLKIFSYLLEQDLCRAACVCKRFSELANDPNLWKRLYMEVFEYTRPMMHPEPGKFYQINPEEYEHPNPWKESFQQLYKGAHVKPGFAEHFYSNPARYKGRENMLYYDTIEDALGGVQEAHFDGLIFVHSGIYTDEWIYIESPITMIGAAPGKVADKVIIENTRDSTFVFMEGSEDAYVGYMTIRFNPDDKSAQHHNAHHCLEITVNCSPIIDHCIIRSTCTVGSAVCVSGQGACPTIKHCNISDCENVGLYITDHAQGIYEDNEISNNALAGIWVKNHGNPIIRRNHIHHGRDVGVFTFDHGMGYFESCNIHRNRIAGFEVKAYANPTVVRCEIHHGQTGGIYVHEKGRGQFIENKIYANNFAGVWITSNSDPTIRGNSIFNGNQGGVYIFGDGRGLIEGNDIYGNALAGIQIRTNSCPIVRHNKIHDGQHGGIYVHEKGQGVIEENEVYSNTLAGVWVTTGSTPVLRRNRIHSGKQVGVYFYDNGHGVLEDNDIYNHMYSGVQIR

SEQ ID NO: 847660 - protein, 441 aa, Homo sapiens
MNSVRAANRRPRRVSRPRPVQQQQQQPPQQPPPQPPQQQPPQQQPPPPPQQQQQQQPPPPPPPPPPLPQERNNVGERDDDVPADMVAEESGPGAQNSPYQLRRKTLLPKRTACPTKNSMEGASTSTTENFGHRAKRARVSGKSQDLSAAPAEQYLQEKLPDEVVLKIFSYLLEQDLCRAACVCKRFSELANDPNLWKRLYMEVFEYTRPMMHPEPGKFYQINPEEYEHPNPWKESFQQLYKGAHVKPGFAEHFYSNPARYKGRENMLYYDTIEDALGGVQEAHFDGLIFVHSGIYTDEWIYIESPITMIGAAPGKVADKVIIENTRDSTFVFMEGSEDAYVGYMTIRFNPDDKSAQHHNAHHCLEITVNCSPIIDHCIIRSTCTVGSAVCVSGQGACPTIKHCNISDCENVGLYITDHAQGIYEDNEISNNALAGICVVSH

SEQ ID NO: 847661 - protein, 159 aa, Homo sapiens
MNSVRAANRRPRRVSRPRPVQQQQQQPPQQPPPQPPQQQPPQQQPPPPPQQQQQQQPPPPPPPPPPLPQERNNVGERDDDVPADMVAEESGPGAQNSPYQLRRKTLLPKRTACPTKNSMEGASTSTTENFGHRAKRARVSGKSQDLSGISCGKVTNRVK

SEQ ID NO: 847662 - protein, 167 aa, Homo sapiens
MATEVHNLQELRRSASLATKVFIQRDYSDGTICQFQTKFPPELDSRIERQLFEETVKTLNGFYAEAEKIGGSSYLEGCLACATAYFIFLCMETHYEKVLKKISRYIQEQNEKIFAPRGLLLTDPVERGMRVIEISIYEDRCSSGSSSSGSSSGSGSSSGGGGGAGAR

SEQ ID NO: 847663 - protein, 167 aa, Homo sapiens; identical to SEQ ID NO: 847662

SEQ ID NO: 847664 - protein, 167 aa, Homo sapiens; identical to SEQ ID NO: 847662

SEQ ID NO: 847665 - protein, 305 aa, Homo sapiens
MASRKENAKSANRVLRISQLDALELNKALEQLVWSQFTQCFHGFKPGLLARFEPEVKACLWVFLWRFTIYSKNATVGQSVLNIKYKNDFSPNLRYQPPSKNQKIWYAVCTIGGRWLEERCYDLFRNHHLASFGKVKQCVNFVIGLLKLGGLINFLIFLQRGKFATLTERLLGIHSVFCKPQNIREVGFEYMNRELLWHGFAEFLIFLLPLINVQKLKAKLSSWCIPLTGAPNSDNTLATSGKECALCGEWPTMPHTIGCEHIFCYFCAKSSFLFDVYFTCPKCGTEVHSLQPLKSGIEMSEVNAL

SEQ ID NO: 847666 - protein, 305 aa, Homo sapiens; identical to SEQ ID NO: 847665

SEQ ID NO: 847667 - protein, 305 aa, Homo sapiens; identical to SEQ ID NO: 847665

SEQ ID NO: 847668 - protein, 305 aa, Homo sapiens; identical to SEQ ID NO: 847665

SEQ ID NO: 847669 - protein, 305 aa, Homo sapiens; identical to SEQ ID NO: 847665

SEQ ID NO: 847670 - protein, 305 aa, Homo sapiens; identical to SEQ ID NO: 847665

SEQ ID NO: 847671 - protein, 305 aa, Homo sapiens; identical to SEQ ID NO: 847665

SEQ ID NO: 847672 - protein, 499 aa, Homo sapiens
MAQFAFESDLHSLLQLDAPIPNAPPARWQRKAKEAAGPAPSPMRAANRSHSAGRTPGRTPGKSSSKVQTTPSKPGGDRYIPHRSAAQMEVASFLLSKENQPENSQTPTKKEHQKAWALNLNGFDVEEAKILRLSGKPQNAPEGYQNRLKVLYSQKATPGSSRKTCRYIPSLPDRILDAPEIRNDYYLNLVDWSSGNVLAVALDNSVYLWSASSGDILQLLQMEQPGEYISSVAWIKEGNYLAVGTSSAEVQLWDVQQQKRLRNMTSHSARVGSLSWNSYILSSGSRSGHIHHHDVRVAEHHVATLSGHSQEVCGLRWAPDGRHLASGGNDNLVNVWPSAPGEGGWVPLQTFTQHQGAVKAVAWCPWQSNVLATGGGTSDRHIRIWNVCSGACLSAVDAHSQVCSILWSPHYKELISGHGFAQNQLVIWKYPTMAKVAELKGHTSRVLSLTMSPDGATVASAAADETLRLWRCFELDPARRREREKASAAKSSLIHQGIR

SEQ ID NO: 847673 - protein, 499 aa, Homo sapiens; identical to SEQ ID NO: 847672

SEQ ID NO: 847674 - protein, 499 aa, Homo sapiens; identical to SEQ ID NO: 847672

SEQ ID NO: 847675 - protein, 499 aa, Homo sapiens; identical to SEQ ID NO: 847672

SEQ ID NO: 847676 - protein, 499 aa, Homo sapiens; identical to SEQ ID NO: 847672

SEQ ID NO: 847677 - protein, 548 aa, Homo sapiens
MAQFAFESDLHSLLQLDAPIPNAPPARWQRKAKEAAGPAPSPMRAANRSHSAGRTPGRTPGKSSSKVQTTPSKPGGDRYIPHRSAAQMEVASFLLSKENQPENSQTPTKKEHQKAWALNLNGFDVEEAKILRLSGKPQNAPEGKTRSSWFLEGGVSSSPGLSTDICLLFLSKIEGKGGVDFPSVYTHSVATGYQNRLKVLYSQKATPGSSRKTCRYIPSLPDRILDAPEIRNDYYLNLVDWSSGNVLAVALDNSVYLWSASSGDILQLLQMEQPGEYISSVAWIKEGNYLAVGTSSAEVQLWDVQQQKRLRNMTSHSARVGSLSWNSYILSSGSRSGHIHHHDVRVAEHHVATLSGHSQEVCGLRWAPDGRHLASGGNDNLVNVWPSAPGEGGWVPLQTFTQHQGAVKAVAWCPWQSNVLATGGGTSDRHIRIWNVCSGACLSAVDAHSQVCSILWSPHYKELISGHGFAQNQLVIWKYPTMAKVAELKGHTSRVLSLTMSPDGATVASAAADETLRLWRCFELDPARRREREKASAAKSSLIHQGIR

SEQ ID NO: 847678 - protein, 306 aa, Homo sapiens
MAQFAFESDLHSLLQLDAPIPNAPPARWQRKAKEAAGPAPSPMRAANRSHSAGRTPGRTPGKSSSKVQTTPSKPGGDRYIPHRSAAQMEVASFLLSKENQPENSQTPTKKEHQKAWALNLNGFDVEEAKILRLSGKPQNAPEGYQNRLKVLYSQKATPGSSRKTCRYIPSLPDRILDAPEIRNDYYLNLVDWSSGNVLAVALDNSVYLWSASSGDILQLLQMEQPGEYISSVAWIKEGNYLAVGTSSAEVQLWDVQQQKRLRNMTSHSARVGSLSWNSYILSRSHIPGPESDHEPRWGHSGIRSSR

SEQ ID NO: 847679 - protein, 151 aa, Homo sapiens
VPVDQHQGAAKAVAWCPWQSNVLATGGGTSDRHIRIWNVCSGACLSAVDAHSQVCSILWSPHYKELISGHGFAQNQLVIWKYPTMAKVAELKGHTSRVLSLTMSPDGATVASAAADETLRLWRCFELDPARRREREKASAAKSSLIHQGIR

SEQ ID NO: 847680 - protein, 189 aa, Homo sapiens
EPRWGRGQGEGVLGRKGLQPRVALILWPARSEGVPFCPLSTVASFPPGLRRHQLQGPLPLRALPWHSSRSRVTCTRCFSWMHPSPMHPLRAGSAKPRKPQARPPHPCGPPTDPTAPAGLRAELLVSEVPKELSESSLHTFSLGSLVRLSSLSPPQANPVPRFRPLLANLAVTAISPIAVLPRWRWPASS

SEQ ID NO: 847681 - protein, 499 aa, Homo sapiens; identical to SEQ ID NO: 847672

SEQ ID NO: 847682 - protein, 499 aa, Homo sapiens; identical to SEQ ID NO: 847672

SEQ ID NO: 847683 - protein, 499 aa, Homo sapiens; identical to SEQ ID NO: 847672

SEQ ID NO: 847684 - protein, 499 aa, Homo sapiens; identical to SEQ ID NO: 847672

SEQ ID NO: 847685 - protein, 501 aa, Homo sapiens
HPQCTPCALGMGASRVKLDAPIPNAPPARWQRKAKEAAGPAPSPMRAANRSHSAGRTPGRTPGKSSSKVQTTPSKPGGDRYIPHRSAAQMEVASFLLSKENQPENSQTPTKKEHQKAWALNLNGFDVEEAKILRLSGKPQNAPEGYQNRLKVLYSQKATPGSSRKTCRYIPSLPDRILDAPEIRNDYYLNLVDWSSGNVLAVALDNSVYLWSASSGDILQLLQMEQPGEYISSVAWIKEGNYLAVGTSSAEVQLWDVQQQKRLRNMTSHSARVGSLSWNSYILSSGSRSGHIHHHDVRVAEHHVATLSGHSQEVCGLRWAPDGRHLASGGNDNLVNVWPSAPGEGGWVPLQTFTQHQGAVKAVAWCPWQSNVLATGGGTSDRHIRIWNVCSGACLSAVDAHSQVCSILWSPHYKELISGHGFAQNQLVIWKYPTMAKVAELKGHTSRVLSLTMSPDGATVASAAADETLRLWRCFELDPARRREREKASAAKSSLIHQGIR

SEQ ID NO: 847686 - protein, 436 aa, Homo sapiens
MAQFAFESDLHSLLQLDAPIPNAPPARWQRKAKEAAGPAPSPMRAANRSHSAGRTPGRTPGKSSSKVQTTPSKPGGDRYIPHRSAAQMEVASFLLSKENQPENSQTPTKKEHQKAWALNLNGFDVEEAKILRLSGKPQNAPEGYQNRLKVLYSQKATPGSSRKTCRYIPSLPDRILDAPEIRNDYYLNLVDWSSGNVLAVALDNSVYLWSASSGDILQLLQMEQPGEYISSVAWIKEGNYLAVGTSSAEVQLWDVQQQKRLRNMTSHSARVGSLSWNSYILSSGSRSGHIHHHDVRVAEHHVATLSGHSQEVCGLRWAPDGRHLASGGNDNLVNVWPSAPGEGGWVPLQTFTQHQGAVKAVAWCPWQSNVLATGGGTSDRHIRIWNVCSGACLSAVDAHSQVCSILWSPHYKESHIPGPESDHEPRWGHSGIRSSR

SEQ ID NO: 847687 - protein, 151 aa, Homo sapiens
SPYRPANSGGHAVAWCPWQSNVLATGGGTSDRHIRIWNVCSGACLSAVDAHSQVCSILWSPHYKELISGHGFAQNQLVIWKYPTMAKVAELKGHTSRVLSLTMSPDGATVASAAADETLRLWRCFELDPARRREREKASAAKSSLIHQGIR

SEQ ID NO: 847688 - protein, 115 aa, Homo sapiens [sequence omitted]

SEQ ID NO: 847689 - protein, 125 aa, Homo sapiens
AAEGDRDLVCSPLPSWSSGNPGPTENQSPEEMSQDKGLTCLSSSCGVTWSVAPTTPTSIPSVGETELIPLDSLVPEMCAPLLKDSHCKDEKPEGYTGEAEGSWCTGNGPWESSFCGLVQPQIPMF

SEQ ID NO: 847690 - protein, 816 aa, Homo sapiens
MGDTVVEPAPLKPTSEPTSGPPGNNGGSLLSVITEGVGELSVIDPEVAQKACQEVLEKVKLLHGGVAVSSRGTPLELVNGDGVDSEIRCLDDPPAQIREEEDEMGAAVASGTAKGARRRRQNNSAKQSWLLRLFESKLFDISMAISYLYNSKEPGVQAYIGNRLFCFRNEDVDFYLPQLLNMYIHMDEDVGDAIKPYIVHRCRQSINFSLQCALLLGAYSSDMHISTQRHSRGTKLRKLILSDELKPAHRKRELPSLSPAPDTGLSPSKRTHQRSKSDATASISLSSNLKRTASNPKVENEDEELSSSTESIDNSFSSPVRLAPEREFIKSLMAIGKRLATLPTKEQKTQRLISELSLLNHKLPARVWLPTAGFDHHVVRVPHTQAVVLNSKDKAPYLIYVEVLECENFDTTSVPARIPENRIRSTRSVENLPECGITHEQRAGSFSTVPNYDNDDEAWSVDDIGELQVELPEVHTNSCDNISQFSVDSITSQESKEPVFIAAGDIRRRLSEQLAHTPTAFKRDPEDPSAVALKEPWQEKVRRIREGSPYGHLPNWRLLSVIVKCGDDLRQELLAFQVLKQLQSIWEQERVPLWIKPYKILVISADSGMIEPVVNAVSIHQVKKQSQLSLLDYFLQEHGSYTTEAFLSAQRNFVQSCAGYCLVCYLLQVKDRHNGNILLDAEGHIIHIDFGFILSSSPRNLGFETSAFKLTTEFVDVMGGLDGDMFNYYKMLMLQGLIAARKHMDKVVQIVEIMQQGSQLPCFHGSSTIRNLKERFHMSMTEEQLQLLVEQMVDGSMRSITTKLYDGFQYLTNGIM

SEQ ID NO: 847691 - protein, 801 aa, Homo sapiens
MGDTVVEPAPLKPTSEPTSGPPGNNGGSLLSVITEGVGELSVIDPEVAQKACQEVLEKVKLLHGGVAVSSRGTPLELVNGDGVDSEIRCLDDPPAQIREEEDEMGAAVASGTAKGARRRRQNNSAKQSWLLRLFESKLFDISMAISYLYNSKEPGVQAYIGNRLFCFRNEDVDFYLPQLLNMYIHMDEDVGDAIKPYIVHRCRQSINFSLQCALLLGAYSSDMHISTQRHSRGTKLRKLILSDELKPAHRKRELPSLSPAPDTGLSPSKRTHQRSKSDATASISLSSNLKRTASNPKVENEDEPVRLAPEREFIKSLMAIGKRLATLPTKEQKTQRLISELSLLNHKLPARVWLPTAGFDHHVVRVPHTQAVVLNSKDKAPYLIYVEVLECENFDTTSVPARIPENRIRSTRSVENLPECGITHEQRAGSFSTVPNYDNDDEAWSVDDIGELQVELPEVHTNSCDNISQFSVDSITSQESKEPVFIAAGDIRRRLSEQLAHTPTAFKRDPEDPSAVALKEPWQEKVRRIREGSPYGHLPNWRLLSVIVKCGDDLRQELLAFQVLKQLQSIWEQERVPLWIKPYKILVISADSGMIEPVVNAVSIHQVKKQSQLSLLDYFLQEHGSYTTEAFLSAQRNFVQSCAGYCLVCYLLQVKDRHNGNILLDAEGHIIHIDFGFILSSSPRNLGFETSAFKLTTEFVDVMGGLDGDMFNYYKMLMLQGLIAARKHMDKVVQIVEIMQQGSQLPCFHGSSTIRNLKERFHMSMTEEQLQLLVEQMVDGSMRSITTKLYDGFQYLTNGIM

SEQ ID NO: 847692 - protein, 801 aa, Homo sapiens; identical to SEQ ID NO: 847691

SEQ ID NO: 847693 - protein, 801 aa, Homo sapiens; identical to SEQ ID NO: 847691

SEQ ID NO: 847694 - protein, 764 aa, Homo sapiens
MGDTVVEPAPLKPTSEPTSGPPGNNGGSLLSVITEGVGELSVIDPEVAQKACQEVLEKVKLLHGGVAVSSRGTPLELVNGDGVDSEIRCLDDPPAQIREEEDEMGAAVASGTAKGARRRRQNNSAKQSWLLRLFESKLFDISMAISYLYNSKEPGVQAYIGNRLFCFRNEDVDFYLPQLLNMYIHMDEDVGDAIKPYIVHRCRQSINFSLQCALLLGAYSSDMHISTQRHSRGTKLRKLILSDELKPAHRKRELPSLSPAPDTGLSPSKRTHQRSKSDATASISLSSNLKRTASNPKVENEDEPVRLAPEREFIKSLMAIGKRLATLPTKEQKTQRLISELSLLNHKLPARVWLPTAGFDHHVVRVPHTQAVVLNSKDKAPYLIYVEVLECENFDTTSVPARIPENRIRSTRSVENLPECGITHEQRAGSFSTVPNYDNDDEAWSVDDIGELQVELPEVHTNSCDNISQFSVDSITSQESKEPVFIAAGDIRRRLSEQLAHTPTAFKRDPEDPSAVALKEPWQEKVRRIREGSPYGHLPNWRLLSVIVKCGDDLRQELLAFQVLKQLQSIWEQERVPLWIKPYKILVISADSGMIEPVVNAVSIHQVKKQSQLSLLDYFLQEHGSYTTEAFLSAQRNFVQSCAGYCLVCYLLQVKDRHNGNILLDAEGHIIHIDFGFILSSSPRNLGFETSAFKLTTEFVDVMGGLDGDMFNYYKMLMLQGLIAARKHMDKVVQIVEIMQQGGAGVRSGAIVPQASPLSRSPGA

SEQ ID NO: 847695 - protein, 752 aa, Homo sapiens
MGDTVVEPAPLKPTSEPTSGPPGNNGGSLLSVITEGVGELSVIDPEVAQKACQEVLEKVKLLHGGVAVSSRGTPLELVNGDGVDSEIRCLDDPPAQIREEEDEMGAAVASGTAKGARRRRQNNSAKQSWLLRLFESKLFDISMAISYLYNSKEPGVQAYIGNRLFCFRNEDVDFYLPQLLNMYIHMDEDVGDAIKPYIVHRCRQSINFSLQCALLLGAYSSDMHISTQRHSRGTKLRKLILSDELKPAHRKRELPSLSPAPDTGLSPSKRTHQRSKSDATASISLSSNLKRTASNPKVENEDEPVRLAPEREFIKSLMAIGKRLATLPTKEQKTQRLISELSLLNHKLPARVWLPTAGFDHHVVRVPHTQAVVLNSKDKAPYLIYVEVLECENFDTTSVPARIPENRIRSTRSVENLPECGITHEQRAGSFSTVPNYDNDDEAWSVDDIGELQVELPEVHTNSCDNISQFSVDSITSQESKEPVFIAAGDIRRRLSEQLAHTPTAFKRDPEDPSAVALKEPWQEKVRRIREGSPYGHLPNWRLLSVIVKCGDDLRQELLAFQVLKQLQSIWEQERVPLWIKPYKILVISADSGMIEPVVNAVSIHQVKKQSQLSLLDYFLQEHGSYTTEAFLSAQRNFVQSCAGYCLVCYLLQVKDRHNGNILLDAEGHIIHIDFGFILSSSPRNLGFETSAFKLTTEFVDVMGGLDGDMFNYYKMLMLQGLIAARKHMDKVLSFLASMAPAPFETSKRGST

SEQ ID NO: 847696 - protein, 743 aa, Homo sapiens
APQRYQPDVNKVGGTPLELVNGDGVDSEIRCLDDPPAQIREEEDEMGAAVASGTAKGARRRRQNNSAKQSWLLRLFESKLFDISMAISYLYNSKEPGVQAYIGNRLFCFRNEDVDFYLPQLLNMYIHMDEDVGDAIKPYIVHRCRQSINFSLQCALLLGAYSSDMHISTQRHSRGTKLRKLILSDELKPAHRKRELPSLSPAPDTGLSPSKRTHQRSKSDATASISLSSNLKRTASNPKVENEDEPVRLAPEREFIKSLMAIGKRLATLPTKEQKTQRLISELSLLNHKLPARVWLPTAGFDHHVVRVPHTQAVVLNSKDKAPYLIYVEVLECENFDTTSVPARIPENRIRSTRSVENLPECGITHEQRAGSFSTVPNYDNDDEAWSVDDIGELQVELPEVHTNSCDNISQFSVDSITSQESKEPVFIAAGDIRRRLSEQLAHTPTAFKRDPEDPSAVALKEPWQEKVRRIREGSPYGHLPNWRLLSVIVKCGDDLRQELLAFQVLKQLQSIWEQERVPLWIKPYKILVISADSGMIEPVVNAVSIHQVKKQSQLSLLDYFLQEHGSYTTEAFLSAQRNFVQSCAGYCLVCYLLQVKDRHNGNILLDAEGHIIHIDFGFILSSSPRNLGFETSAFKLTTEFVDVMGGLDGDMFNYYKMLMLQGLIAARKHMDKVVQIVEIMQQGSQLPCFHGSSTIRNLKERFHMSMTEEQLQLLVEQMVDGSMRSITTKLYDGFQYLTNGIM

SEQ ID NO: 847697 - protein, 509 aa, Homo sapiens
MNRPAWKLNEIPVRLAPEREFIKSLMAIGKRLATLPTKEQKTQRLISELSLLNHKLPARVWLPTAGFDHHVVRVPHTQAVVLNSKDKAPYLIYVEVLECENFDTTSVPARIPENRIRSTRSVENLPECGITHEQRAGSFSTVPNYDNDDEAWSVDDIGELQVELPEVHTNSCDNISQFSVDSITSQESKEPVFIAAGDIRRRLSEQLAHTPTAFKRDPEDPSAVALKEPWQEKVRRIREGSPYGHLPNWRLLSVIVKCGDDLRQELLAFQVLKQLQSIWEQERVPLWIKPYKILVISADSGMIEPVVNAVSIHQVKKQSQLSLLDYFLQEHGSYTTEAFLSAQRNFVQSCAGYCLVCYLLQVKDRHNGNILLDAEGHIIHIDFGFILSSSPRNLGFETSAFKLTTEFVDVMGGLDGDMFNYYKMLMLQGLIAARKHMDKVVQIVEIMQQGSQLPCFHGSSTIRNLKERFHMSMTEEQLQLLVEQMVDGSMRSITTKLYDGFQYLTNGIM

SEQ ID NO: 847698 - protein, 344 aa, Homo sapiens
EQLFRKAPGMSPAAMNTGSLLLLAGDAVHRELGDVVTAVGIQCGEETAFKRDPEDPSAVALKEPWQEKVRRIREGSPYGHLPNWRLLSVIVKCGDDLRQELLAFQVLKQLQSIWEQERVPLWIKPYKILVISADSGMIEPVVNAVSIHQVKKQSQLSLLDYFLQEHGSYTTEAFLSAQRNFVQSCAGYCLVCYLLQVKDRHNGNILLDAEGHIIHIDFGFILSSSPRNLGFETSAFKLTTEFVDVMGGLDGDMFNYYKMLMLQGLIAARKHMDKVVQIVEIMQQGSQLPCFHGSSTIRNLKERFHMSMTEEQLQLLVEQMVDGSMRSITTKLYDGFQYLTNGIM

SEQ ID NO: 847699 - protein, 145 aa, Homo sapiens
MAGDPPPWCHVASVLLLKVPASVRLTTASSSPLFPLLRHNGNILLDAEGHIIHIDFGFILSSSPRNLGFETSAFKLTTEFVDVMGGLDGDMFNYYKMLMLQGLIAARKHMDKVVQIVEIMQQGGAGVRSGAIVPQASPLSRSPGA

SEQ ID NO: 847700 - protein, 801 aa, Homo sapiens; identical to SEQ ID NO: 847691

SEQ ID NO: 847701 - protein, 657 aa, Homo sapiens
MGDTVVEPAPLKPTSEPTSGPPGNNGGSLLSVITEGVGELSVIDPEVAQKACQEVLEKVKLLHGGVAVSSRGTPLELVNGDGVDSEIRCLDDPPAQIREEEDEMGAAVASGTAKGARRRRQNNSAKQSWLLRLFESKLFDISMAISYLYNSKEPGVQAYIGNRLFCFRNEDVDFYLPQLLNMYIHMDEDVGDAIKPYIVHRCRQSINFSLQCALLLGAYSSDMHISTQRHSRGTKLRKLILSDELKPAHRKRELPSLSPAPDTGLSPSKRTHQRSKSDATASISLSSNLKRTASNPKVENEDEPVRLAPEREFIKSLMAIGKRLATLPTKEQKTQRLISELSLLNHKLPARVWLPTAGFDHHVVRVPHTQAVVLNSKDKAPYLIYVEVLECENFDTTSVPARIPENRIRSTRSVENLPECGITHEQRAGSFSTVPNYDNDDEAWSVDDIGELQVELPEVHTNSCDNISQFSVDSITSQESKEPVFIAAGDIRRRLSEQLAHTPTAFKRDPEDPSAVALKEPWQEKVRRIREGSPYGHLPNWRLLSVIVKCGDDLRQELLAFQVLKQLQSIWEQERVPLWIKPYKILVISADSGMIEPVVNAVSIHQVKKQSQLSLLDYFLQEHGSYTTEAFLSAQRNFVQSCAGYCLVCYLLQVKDR

SEQ ID NO: 847702 - protein, 362 aa, Homo sapiens
MGDTVVEPAPLKPTSEPTSGPPGNNGGSLLSVITEGVGELSVIDPEVAQKACQEVLEKVKLLHGGVAVSSRGTPLELVNGDGVDSEIRCLDDPPAQIREEEDEMGAAVASGTAKGARRRRQNNSAKQSWLLRLFESKLFDISMAISYLYNSKEPGVQAYIGNRLFCFRNEDVDFYLPQLLNMYIHMDEDVGDAIKPYIVHRCRQSINFSLQCALLLGAYSSDMHISTQRHSRGTKLRKLILSDELKPAHRKRELPSLSPAPDTGLSPSKRTHQRSKSDATASISLSSNLKRTASNPKVENEDEPVRLAPEREFIKSLMAIGKRLATLPTKEQKTQRLISELSLLNHKLEVSHSLISNYTTKL

SEQ ID NO: 847703 - protein, 229 aa, Homo sapiens
MGDTVVEPAPLKPTSEPTSGPPGNNGGSLLSVITEGVGELSVIDPEVAQKACQEVLEKVKLLHGGVAVSSRGTPLELVNGDGVDSEIRCLDDPPAQIREEEDEMGAAVASGTAKGARRRRQNNSAKQSWLLRLFESKLFDISMAISYLYNSKEPGVQAYIGNRLFCFRNEDVDFYLPQLLNMYIHMDEDVGDAIKPYIVHRCRQSINFSLHVLSPASTPHCPSHRKREA

SEQ ID NO: 847704 - protein, 157 aa, Homo sapiens
MAGDPPPWCHVASVLLLKVPASVRLTTASSSPLFPLLRHNGNILLDAEGHIIHIDFGFILSSSPRNLGFETSAFKLTTEFVDVMGGLEEMTLAEKRGRVRVRALKATVKRNDSEGGAMVGDDTGREARAGVQATIPVAQEEPGHEQVRTVAQNIVEG

SEQ ID NO: 847705 - protein, 828 aa, Homo sapiens
MRFLEARSLAVAMGDTVVEPAPLKPTSEPTSGPPGNNGGSLLSVITEGVGELSVIDPEVAQKACQEVLEKVKLLHGGVAVSSRGTPLELVNGDGVDSEIRCLDDPPAQIREEEDEMGAAVASGTAKGARRRRQNNSAKQSWLLRLFESKLFDISMAISYLYNSKEPGVQAYIGNRLFCFRNEDVDFYLPQLLNMYIHMDEDVGDAIKPYIVHRCRQSINFSLQCALLLGAYSSDMHISTQRHSRGTKLRKLILSDELKPAHRKRELPSLSPAPDTGLSPSKRTHQRSKSDATASISLSSNLKRTASNPKVENEDEELSSSTESIDNSFSSPVRLAPEREFIKSLMAIGKRLATLPTKEQKTQRLISELSLLNHKLPARVWLPTAGFDHHVVRVPHTQAVVLNSKDKAPYLIYVEVLECENFDTTSVPARIPENRIRSTRSVENLPECGITHEQRAGSFSTVPNYDNDDEAWSVDDIGELQVELPEVHTNSCDNISQFSVDSITSQESKEPVFIAAGDIRRRLSEQLAHTPTAFKRDPEDPSAVALKEPWQEKVRRIREGSPYGHLPNWRLLSVIVKCGDDLRQELLAFQVLKQLQSIWEQERVPLWIKPYKILVISADSGMIEPVVNAVSIHQVKKQSQLSLLDYFLQEHGSYTTEAFLSAQRNFVQSCAGYCLVCYLLQVKDRHNGNILLDAEGHIIHIDFGFILSSSPRNLGFETSAFKLTTEFVDVMGGLDGDMFNYYKMLMLQGLIAARKHMDKVVQIVEIMQQGSQLPCFHGSSTIRNLKERFHMSMTEEQLQLLVEQMVDGSMRSITTKLYDGFQYLTNGIM

SEQ ID NO: 847706 - protein, 801 aa, Homo sapiens; identical to SEQ ID NO: 847691

SEQ ID NO: 847707 - protein, 828 aa, Homo sapiens; identical to SEQ ID NO: 847705

SEQ ID NO: 847708 - protein, 801 aa, Homo sapiens; identical to SEQ ID NO: 847691

SEQ ID NO: 847709 - protein, 764 aa, Homo sapiens; identical to SEQ ID NO: 847694

SEQ ID NO: 847710 - protein, 208 aa, Homo sapiens
MIEPVVNAVSIHQVKKQSQLSLLDYFLQEHGSYTTEAFLSAQRNFVQSCAGYCLVCYLLQVKDRHNGNILLDAEGHIIHIDFGFILSSSPRNLGFETSAFKLTTEFVDVMGGLDGDMFNYYKMLMLQGLIAARKHMDKVVQIVEIMQQGSQLPCFHGSSTIRNLKERFHMSMTEEQLQLLVEQMVDGSMRSITTKLYDGFQYLTNGIM

SEQ ID NO: 847711 - protein, 764 aa, Homo sapiens; identical to SEQ ID NO: 847694

SEQ ID NO: 847712 - protein, 587 aa, Homo sapiens
  misc_feature (531)..(531): Xaa can be any naturally occurring amino acid
MGDTVVEPAPLKPTSEPTSGPPGNNGGSLLSVITEGVGELSVIDPEVAQKACQEVLEKVKLLHGGVAVSSRGTPLELVNGDGVDSEIRCLDDPPAQIREEEDEMGAAVASGTAKGARRRRQNNSAKQSWLLRLFESKLFDISMAISYLYNSKEPGVQAYIGNRLFCFRNEDVDFYLPQLLNMYIHMDEDVGDAIKPYIVHRCRQSINFSLQCALLLGAYSSDMHISTQRHSRGTKLRKLILSDELKPAHRKRELPSLSPAPDTGLSPSKRTHQRSKSDATASISLSSNLKRTASNPKVENEDEPVRLAPEREFIKSLMAIGKRLATLPTKEQKTQRLISELSLLNHKLPARVWLPTAGFDHHVVRVPHTQAVVLNSKDKAPYLIYVEVLECENFDTTSVPARIPENRIRSTRSVENLPECGITHEQRAGSFSTVPNYDNDDEAWSVDDIGELQVELPEVHTNSCDNISQFSVDSITSQESKEPVFIAAGDIRRRLSEQLAHTPTAFKRDPEDPSAVALKEPWQEKVRRIRXGPPRHTPKGVRQACRGGCLGKLAQGERRAREGRMPGQQRLGTERKQNGQRKSRNQR

SEQ ID NO: 847713 - protein, 229 aa, Homo sapiens; identical to SEQ ID NO: 847703

SEQ ID NO: 847714 - protein, 178 aa, Homo sapiens
KIHKSNTRGPFAWRVFVYLFGLIWFRFVWKKGLCPPSLCRFTHLSQPGPVQPLPGGLGIWMLEVTGCPGRLVTSEAEPRPRVGPLTAKRLTRLDRAIPEMLRSLNSASSSKISRKRAVRKNVFPVRRLPARPSRNPASIPRPDLLRESCSIREGEKSLIAITACSRQLTRLLRLLWNR

SEQ ID NO: 847715 - protein, 182 aa, Homo sapiens
MAPNEGEEETKIKKKQQGESSERHTTRGRDERARGNNNTGPEPQESSSVRGGRDNTTRTTDGGGVQQHNRLEETAPNPNEKEEDHTPSAEKEEKARKKKNVAKQEKAENQQRHEHDSNTDAEAPDKQVENEAEKRTEKEKEEARAPAHRGRGQDQKAEKRKKIDTTSRRQEANTSEQESSTR

SEQ ID NO: 847716 - protein, 579 aa, Homo sapiens
MPSASCDTLLDDIEDIVSQEDSKPQDRHFVRKDVVPKVRRRNTQKYLQEEENSPPSDSTIPGIQKIWIRTWGCSHNNSDGEYMAGQLAAYGYKITENASDADLWLLNSCTVKNPAEDHFRNSIKKAQEENKKIVLAGCVPQAQPRQDYLKGLSIIGVQQIDRVVEVVEETIKGHSVRLLGQKKDNGRRLGGARLDLPKIRKNPLIEIISINTGCLNACTYCKTKHARGNLASYPIDELVDRAKQSFQEGVCEIWLTSEDTGAYGRDIGTNLPTLLWKLVEVIPEGAMLRLGMTNPPYILEHLEEMAKILNHPRVYAFLHIPVQSASDSVLMEMKREYCVADFKRVVDFLKEKVPGITIATDIICGFPGETDQDFQETVKLVEEYKFPSLFINQFYPRPGTPAAKMEQVPAQVKKQRTKDLSRVFHSYSPYDHKIGERQQVLVTEESFDSKFYVAHNQFYEQVLVPKNPAFMGKMVEVDIYESGKHFMKGQPVSDAKVYTPSISKPLAKGEVSGLTKDFRNGLGNQLSSGSHTSAASQCDSASSRMVLPMPRLHQDCALRMSVGLALLGLLFAFFVKVYN

SEQ ID NO: 847717 - protein, 496 aa, Homo sapiens
MPSASCDTLLDDIEDIVSQEDSKPQDRHFVRKDVVPKVRRRNTQKYLQEEENSPPSDSTIPGIQKIWIRTWGCSHNNSDGEYMAGQLAAYGYKITENASDADLWLLNSCTVKNPAEDHFRNSIKKAQEENKKIVLAGCVPQAQPRQDYLKGLSIIGVQQIDRVVEVVEETIKGHSVRLLGQKKDNGRRLGGARLDLPKIRKNPLIEIISINTGCLNACTYCKTKHARGNLASYPIDELVDRAKQSFQEGVCEIWLTSEDTGAYGRDIGTNLPTLLWKLVEVIPEGAMLRLGMTNPPYILEHLEEMAKILNHPRVYAFLHIPVQSASDSVLMEMKREYCVADFKRVVDFLKEKVPGITIATDIICGFPGETDQDFQETVKLVEEYKFPSLFINQFYPRPGTPAAKMEQVPAQVKKQRTKDLSRVFHSYSPYDHKDFRNGLGNQLSSGSHTSAASQCDSASSRMVLPMPRLHQDCALRMSVGLALLGLLFAFFVKVYN

SEQ ID NO: 847718 - protein, 205 aa, Homo sapiens
MTNPPYILEHLEEMAKILNHPRVYAFLHIPVQSASDSVLMEMKREYCVADFKRVVDFLKEKVPGITIATDIICGFPGETDQDFQETVKLVEEYKFPSLFINQFYPRPGTPAAKMEQVPAQVKKQRTKDLSRVFHSYSPYDHKDFRNGLGNQLSSGSHTSAASQCDSASSRMVLPMPRLHQDCALRMSVGLALLGLLFAFFVKVYN

SEQ ID NO: 847719 - protein, 579 aa, Homo sapiens; identical to SEQ ID NO: 847716

SEQ ID NO: 847720 - protein, 106 aa, Homo sapiens
MVEVDIYESGKHFMKGQPVSDAKVYTPSISKPLAKGEVSGLTKDFRNGLGNQLSSGSHTSAASQCDSASSRMVLPMPRLHQDCALRMSVGLALLGLLFAFFVKVYN

SEQ ID NO: 847721 - protein, 536 aa, Homo sapiens
MPSASCDTLLDDIEDIVSQEDSKPQDRHFVRKDVVPKVRRRNTQKYLQEEENSPPSDSTIPGIQKIWIRTWGCSHNNSDGEYMAGQLAAYGYKITENASDADLWLLNSCTVKNPAEDHFRNSIKKAQEENKKIVLAGCVPQAQPRQDYLKGLSIIGVQQIDRVVEVVEETIKGHSVRLLGQKKDNGRRLGGARLDLPKIRKNPLIEIISINTGCLNACTYCKTKHARGNLASYPIDELVDRAKQSFQEGVCEIWLTSEDTGAYGRDIGTNLPTLLWKLVEVIPEGAMLRLGMTNPPYILEHLEEMAKILNHPRVYAFLHIPVQSASDSVLMEMKREYCVADFKRVVDFLKEKVPGITIATDIICGFPGETDQDFQETVKLVEEYKFPSLFINQFYPRPGTPAAKMEQVPAQVKKQRTKDLSRVFHSYSPYDHKIGERQQVLVTEESFDSKFYVAHNQFYEQVLVPKNPAFMGKMVEVDIYESGKHFMKGQPVSDAKVYTPSISKPLAKGEVSGLTKVSKRCSPLYPASKTAAVEAQ

SEQ ID NO: 847722 - protein, 251 aa, Homo sapiens [sequence omitted]

SEQ ID NO: 847723 - protein, 175 aa, Homo sapiens
MPSASCDTLLDDIEDIVSQEDSKPQDRHFVRKDVVPKVRRRNTQKYLQEEENSPPSDSTIPGIQKIWIRTWGCSHNNSDGEYMAGQLAAYGYKITENASDADLWLLNSCTVKNPAEDHFRNSIKKAQEENKKIVLAGCVPQAQPRQDYLKGLSIIGVQQIDRVVEVVEETIKGNR

SEQ ID NO: 847724 - protein, 160 aa, Homo sapiens
MPSASCDTLLDDIEDIVSQEDSKPQDRHFVRKDVVPKVRRRNTQKYLQEEENSPPSDSTIPGIQKIWIRTWGCSHNNSDGEYMAGQLAAYGYKITENASDADLWLLNSCTVKNPAEDHFRNSIKSCPEQALFFPAVIHLRCDLLLLTVRHDCEVSPATWN

SEQ ID NO: 847725 - protein, 106 aa, Homo sapiens; identical to SEQ ID NO: 847720

SEQ ID NO: 847726 - protein, 257 aa, Homo sapiens
MPSASCDTLLDDIEDIVSQEDSKPQDRHFVRKDVVPKVRRRNTQKYLQEEENSPPSDSTIPGIQKIWIRTWGCSHNNSDGEYMAGQLAAYGYKITENASDADLWLLNSCTVKNPAEDHFRNSIKKAQEENKKIVLAGCVPQAQPRQDYLKGLSIIGVQQIDRVVEVVEETIKGHSVRLLGQKKDNGRRLGGARLDLPKIRKNPLIEIISINTGCLNACTYCKTKHARGNLASYPIDELVDRAKQSFQGSLHLLLYQK

SEQ ID NO: 847727 - protein, 175 aa, Homo sapiens; identical to SEQ ID NO: 847723

SEQ ID NO: 847728 - protein, 651 aa, Homo sapiens
MADSAELKQMVMSLRVSELQVLLGYAGRNKHGRKHELLTKALHLLKAGCSPAVQMKIKELYRRRFPQKIMTPADLSIPNVHSSPMPATLSPSTIPQLTYDGHPASSPLLPVSLLGPKHELELPHLTSALHPVHPDIKLQKLPFYDLLDELIKPTSLASDNSQRFRETCFAFALTPQQVQQISSSMDISGTKCDFTVQVQLRFCLSETSCPQEDHFPPNLCVKVNTKPCSLPGYLPPTKNGVEPKRPSRPINITSLVRLSTTVPNTIVVSWTAEIGRNYSMAVYLVKQLSSTVLLQRLRAKGIRNPDHSRALIKEKLTADPDSEIATTSLRVSLLCPLGKMRLTIPCRALTCSHLQCFDATLYIQMNEKKPTWVCPVCDKKAPYEHLIIDGLFMEILKYCTDCDEIQFKEDGTWAPMRSKKEVQEVSASYNGVDGCLSSTLEHQVASHHQSSNKNKKVEVIDLTIDSSSDEEEEEPSAKRTCPSLSPTSPLNNKGILSLPHQASPVSRTPSLPAVDTSYINTSLIQDYRHPFHMTPMPYDLQGLDFFPFLSGDNQHYNTSLLAAAAAAVSDDQDLLHSSRFFPYTSSQMFLDQLSAGGSTSLPTTNGSSSGSNSSLVSSNSLRESHSHTVTNRSSTDTASIFGIIPDIISLD

SEQ ID NO: 847729 - protein, 156 aa, Homo sapiens
  misc_feature (11)..(11): Xaa can be any naturally occurring amino acid
TLRLGSEAWVXLHPSLPAVDTSYINTSLIQDYRHPFHMTPMPYDLQGLDFFPFLSGDNQHYNTSLLAAAAAAVSDDQDLLHSSRFFPYTSSQMFLDQLSAGGSTSLPTTNGSSSGSNSSLVSSNSLRESHSHTVTNRSSTDTASIFGIIPDIISLD

SEQ ID NO: 847730 - protein, 175 aa, Homo sapiens
MADSAELKQMVMSLRVSELQVLLGYAGRNKHGRKHELLTKALHLLKAGCSPAVQMKIKELYRRRFPQKIMTPADLSIPNVHSSPMPATLSPSTIPQLTYDGHPASSPLLPVSLLGPKHELELPHLTSALHPVHPDIKLQKLPFYDLLDELIKPTSLEVRLLYDSIWLLLQDEFSF

SEQ ID NO: 847731 - protein, 651 aa, Homo sapiens; identical to SEQ ID NO: 847728

SEQ ID NO: 847732 - protein, 642 aa, Homo sapiens
MVMSLRVSELQVLLGYAGRNKHGRKHELLTKALHLLKAGCSPAVQMKIKELYRRRFPQKIMTPADLSIPNVHSSPMPATLSPSTIPQLTYDGHPASSPLLPVSLLGPKHELELPHLTSALHPVHPDIKLQKLPFYDLLDELIKPTSLASDNSQRFRETCFAFALTPQQVQQISSSMDISGTKCDFTVQVQLRFCLSETSCPQEDHFPPNLCVKVNTKPCSLPGYLPPTKNGVEPKRPSRPINITSLVRLSTTVPNTIVVSWTAEIGRNYSMAVYLVKQLSSTVLLQRLRAKGIRNPDHSRALIKEKLTADPDSEIATTSLRVSLLCPLGKMRLTIPCRALTCSHLQCFDATLYIQMNEKKPTWVCPVCDKKAPYEHLIIDGLFMEILKYCTDCDEIQFKEDGTWAPMRSKKEVQEVSASYNGVDGCLSSTLEHQVASHHQSSNKNKKVEVIDLTIDSSSDEEEEEPSAKRTCPSLSPTSPLNNKGILSLPHQASPVSRTPSLPAVDTSYINTSLIQDYRHPFHMTPMPYDLQGLDFFPFLSGDNQHYNTSLLAAAAAAVSDDQDLLHSSRFFPYTSSQMFLDQLSAGGSTSLPTTNGSSSGSNSSLVSSNSLRESHSHTVTNRSSTDTASIFGIIPDIISLD

SEQ ID NO: 847733 - protein, 611 aa, Homo sapiens
MADSAELKQMVMSLRVSELQVLLGYAGRNKHGRKHELLTKALHLLKAGCSPAVQMKIKELYRRRFPQKIMTPADLSIPNVHSSPMPATLSPSTIPQLTYDGHPASSPLLPVSLLGPKHELELPHLTSALHPVHPDIKLQKLPFYDLLDELIKPTSLASDNSQRFRETCFAFALTPQQVQQISSSMDISGTKCDFTVQVQLREPKRPSRPINITSLVRLSTTVPNTIVVSWTAEIGRNYSMAVYLVKQLSSTVLLQRLRAKGIRNPDHSRALIKEKLTADPDSEIATTSLRVSLLCPLGKMRLTIPCRALTCSHLQCFDATLYIQMNEKKPTWVCPVCDKKAPYEHLIIDGLFMEILKYCTDCDEIQFKEDGTWAPMRSKKEVQEVSASYNGVDGCLSSTLEHQVASHHQSSNKNKKVEVIDLTIDSSSDEEEEEPSAKRTCPSLSPTSPLNNKGILSLPHQASPVSRTPSLPAVDTSYINTSLIQDYRHPFHMTPMPYDLQGLDFFPFLSGDNQHYNTSLLAAAAAAVSDDQDLLHSSRFFPYTSSQMFLDQLSAGGSTSLPTTNGSSSGSNSSLVSSNSLRESHSHTVTNRSSTDTASIFGIIPDIISLD

SEQ ID NO: 847734 - protein, 508 aa, Homo sapiens
MADSAELKQMVMSLRVSELQVLLGYAGRNKHGRKHELLTKALHLLKAGCSPAVQMKIKELYRRRFPQKIMTPADLSIPNVHSSPMPATLSPSTIPQLTYDGHPASSPLLPVSLLGPKHELELPHLTSALHPVHPDIKLQKLPFYDLLDELIKPTSLASDNSQRFRETCFAFALTPQQVQQISSSMDISGTKCDFTVQVQLRFCLSETSCPQEDHFPPNLCVKVNTKPCSLPGYLPPTKNGVEPKRPSRPINITSLVRLSTTVPNTIVVSWTAEIGRNYSMAVYLVKQLSSTVLLQRLRAKGIRNPDHSRALIKEKLTADPDSEIATTSLRVSLLCPLGKMRLTIPCRALTCSHLQCFDATLYIQMNEKKPTWVCPVCDKKAPYEHLIIDGLFMEILKYCTDCDEIQFKEDGTWAPMRSKKEVQEVSASYNGVDGCLSSTLEHQVASHHQSSNKNKKVEVIDLTIDSSSDEEEEEPSAKRTAAGVCPQSRRLKYNRSDVIARYELVCLY

SEQ ID NO: 847735 - protein, 325 aa, Homo sapiens
MADSAELKQMVMSLRVSELQVLLGYAGRNKHGRKHELLTKALHLLKAGCSPAVQMKIKELYRRRFPQKIMTPADLSIPNVHSSPMPATLSPSTIPQLTYDGHPASSPLLPVSLLGPKHELELPHLTSALHPVHPDIKLQKLPFYDLLDELIKPTSLASDNSQRFRETCFAFALTPQQVQQISSSMDISGTKCDFTVQVQLRFCLSETSCPQEDHFPPNLCVKVNTKPCSLPGYLPPTKNGVEPKRPSRPINITSLVRLSTTVPNTIVVSWTAEIGRNYSMAVYLVKQLSSTVLLQRLRAKGIRNPDHSRALSTYDKLISLIQLFC

SEQ ID NO: 847736 - protein, 160 aa, Homo sapiens
MADSAELKQMVMSLRVSELQVLLGYAGRNKHGRKHELLTKALHLLKAGCSPAVQMKIKELYRRRFPQKIMTPADLSIPNVHSSPMPATLSPSTIPQLTYDGHPASSPLLPVSLLGPKHELELPHLTSALHPVHPDIKLQKLPFYDLLDELIKPTSLAEII

SEQ ID NO: 847737 - protein, 651 aa, Homo sapiens; identical to SEQ ID NO: 847728

SEQ ID NO: 847738 - protein, 651 aa, Homo sapiens; identical to SEQ ID NO: 847728

SEQ ID NO: 847739 - protein, 651 aa, Homo sapiens; identical to SEQ ID NO: 847728

SEQ ID NO: 847740 - protein, 633 aa, Homo sapiens
MADSAELKQMVMSLRVSELQVLLGYAGRNKHGRKHELLTKALHLLKAGCSPAVQMKIKELYRRRFPQKIMTPADLSIPNVHSSPMPATLSPSTIPQLTYDGHPASSPLLPVSLLGPKHELELPHLTSALHPVHPDIKLQKLPFYDLLDELIKPTSLASDNSQRFRETCFAFALTPQQVQQISSSMDISGTKCDFTVQVQLRFCLSETSCPQEDHFPPNLCVKVNTKPCSLPGYLPPTKNGVEPKRPSRPINITSLVRLSTTVPNTIVVSWTAEIGRNYSMAVYLVKQLSSTVLLQRLRAKGIRNPDHSRALIKEKLTADPDSEIATTSLRVSLLCPLGKMRLTIPCRALTCSHLQCFDATLYIQMNEKKPTWVCPVCDKKAPYEHLIIDGLFMEILKYCTDCDEIQFKEDGTWAPMRSKKEVQEVSASYNGVDGCLSSTLEHQVASHHQSSNKEEEPSAKRTCPSLSPTSPLNNKGILSLPHQASPVSRTPSLPAVDTSYINTSLIQDYRHPFHMTPMPYDLQGLDFFPFLSGDNQHYNTSLLAAAAAAVSDDQDLLHSSRFFPYTSSQMFLDQLSAGGSTSLPTTNGSSSGSNSSLVSSNSLRESHSHTVTNRSSTDTASIFGIIPDIISLD

SEQ ID NO: 847741 - protein, 642 aa, Homo sapiens; identical to SEQ ID NO: 847732

SEQ ID NO: 847742 - protein, 643 aa, Homo sapiens
  misc_feature (609)..(609): Xaa can be any naturally occurring amino acid
  misc_feature (614)..(614): Xaa can be any naturally occurring amino acid
  misc_feature (616)..(616): Xaa can be any naturally occurring amino acid
  misc_feature (619)..(620): Xaa can be any naturally occurring amino acid
  misc_feature (622)..(622): Xaa can be any naturally occurring amino acid
MADSAELKQMVMSLRVSELQVLLGYAGRNKHGRKHELLTKALHLLKAGCSPAVQMKIKELYRRRFPQKIMTPADLSIPNVHSSPMPATLSPSTIPQLTYDGHPASSPLLPVSLLGPKHELELPHLTSALHPVHPDIKLQKLPFYDLLDELIKPTSLASDNSQRFRETCFAFALTPQQVQQISSSMDISGTKCDFTVQVQLRFCLSETSCPQEDHFPPNLCVKVNTKPCSLPGYLPPTKNGVEPKRPSRPINITSLVRLSTTVPNTIVVSWTAEIGRNYSMAVYLVKQLSSTVLLQRLRAKGIRNPDHSRALIKEKLTADPDSEIATTSLRVSLLCPLGKMRLTIPCRALTCSHLQCFDATLYIQMNEKKPTWVCPVCDKKAPYEHLIIDGLFMEILKYCTDCDEIQFKEDGTWAPMRSKKEVQEVSASYNGVDGCLSSTLEHQVASHHQSSNKNKKVEVIDLTIDSSSDEEEEEPSAKRTCPSLSPTSPLNNKGILSLPHQASPVSRTPSLPAVDTSYINTSLIQDYRHPFHMTPMPYDLQGLDFFPFLSGDNQHYNTSLLAAAAAAVSDDQDLLHSSRFFPYTSRCSVSSRKKGGGGGGGPPQKGGFXKPLFXPXSFXXPXKPPQPMEAVVAVTAAWFLPTA

SEQ ID NO: 847743 - protein, 319 aa, Homo sapiens
LLLCVRSGVCFAHIAARRVRAGVVVLLSCVGVVAARRRVSCWVAVVCLWAADIGVRVGGAVLGEAERFRLVRVAPSARRCPLWGGLFRIGAWCGVVLVGFGVGFVAIIVACAFGTMCAVVLVRGVAELWYATGPNFVWVAAVRQVRVAVGPIRRGARGSHGAAMCSDRWRSLRSGPLGCGGGAVPRCVSVVCESCVPVEGAGGPVAVREGMENTARSGRQGNGVSVGEERKEGAAAGSPRPRACLGPRVLRGQGQGQESCLCRGRLDLGHQRSGHGCRAHNRDRYTRSLAPGWARHRPASPTAAGTVGGTPPTVNPEVP

SEQ ID NO: 847744 - protein, 204 aa, Homo sapiens
MFVLVEMVDTVRIPPWQFERKLNDSIAEELNKKLANKVVYNVGLCICLFDITKLEDAYVFPGDGASHTKVHFRCVVFHPFLDEILIGKIKGCSPEGVHVSLGFFDDILIPPESLQQPAKFDEAEQVWVWEYETEEGAHDLYMDTGEEIRFRVVDESFVDTSPTGPSSADATTSSEELPKKEAPYTLVGSISEPGLGLLSWWTSN

SEQ ID NO: 847745 - protein, 204 aa, Homo sapiens; identical to SEQ ID NO: 847744

SEQ ID NO: 847746 - protein, 239 aa, Homo sapiens
GRVAQARAAVRGAAVRGAWCVVRDTSGGEPPAQAGMFVLVEMVDTVRIPPWQFERKLNDSIAEELNKKLANKVVYNVGLCICLFDITKLEDAYVFPGDGASHTKVHFRCVVFHPFLDEILIGKIKGCSPEGVHVSLGFFDDILIPPESLQQPAKFDEAEQVWVWEYETEEGAHDLYMDTGEEIRFRVVDESFVDTSPTGPSSADATTSSEELPKKEAPYTLVGSISEPGLGLLSWWTSN

SEQ ID NO: 847747 - protein, 222 aa, Homo sapiens
MFVLVEMVDTVRIPPWQFERKLNDSIAEELNKKLANKVVYNVGLCICLFDITKLEDAYVFPGDGASHTKVHFRCVVFHPFLDEILIGKIKGCSPEGVHGTVALTPQTRLGNTVGAGVSLGFFDDILIPPESLQQPAKFDEAEQVWVWEYETEEGAHDLYMDTGEEIRFRVVDESFVDTSPTGPSSADATTSSEELPKKEAPYTLVGSISEPGLGLLSWWTSN

SEQ ID NO: 847748 - protein, 126 aa, Homo sapiens
MRPKRGPEGTEARGCLQWQRRQKPPIGAWQRQVCVEGGWVRQGRPPGPTQDASVKLKAPPSWEHPLPHPATRGCQSPFTRLGQDLGSALVLFVSQSRKSPITSDPLCLLTVRPRVAPSLSFWPLTS

SEQ ID NO: 847749 - protein, 204 aa, Homo sapiens; identical to SEQ ID NO: 847744

SEQ ID NO: 847750 - protein, 152 aa, Homo sapiens
MFVLVEMVDTVRIPPWQFERKLNDSIAEELNKKLANKVVYNVGLCICLFDITKLEDAYVFPGDGASHTKVHFRCVVFHPFLDEILIGKIKGCSPEGVHVSLGFFDDILIPPESLQQPAKFDEAEQCGFGVKTGRSQTLLTREEPSGWPTCES

SEQ ID NO: 847751 - protein, 204 aa, Homo sapiens; identical to SEQ ID NO: 847744

SEQ ID NO: 847752 - protein, 145 aa, Homo sapiens
MFVLVEMVDTVRIPPWQFERKLNDSIAEELNKKLANKFLSGFFRCTFFIPPQSQLQQPAKFDEAEQVWVWEYETEEGAHDLYMDTGEEIRFRVVDESFVDTSPTGPSSADATTSSEELPKKEAPYTLVGSISEPGLGLLSWWTSN

SEQ ID NO: 847753 - protein, 204 aa, Homo sapiens; identical to SEQ ID NO: 847744

SEQ ID NO: 847754 - protein, 479 aa, Homo sapiens
MAALEKMTFPKKMTFPEKPSHKKYRAALKKEKRKKRRQELARLRDSGLSQEEEEDTFIEEQQLEEEKLLERERERLHEEWLLREQKAQEEFRIKKEKEEAAKKWLEEQERKLKEQWKEQQRKEREEEEQKQQEKKEKEEAVQKMLDQAENDLENSTTWQNPEPPVDFRVMEKDRANCPFYSKTGACRFGDRCSRKHNFPTSSPTLLIKSMFTTFGMEQCRRDDYDPDASLEYSEEETYQQFLDFYEDVLPEFKNVGKVIQFKVSCNLEPHLRGNVYVQYQSEEECQAALSLFNGRWYAGRQLQCEFCPVTRWKMAICGLFEIQQCPRGKHCNFLHVFRNPNNEFWEANRDIYLSSDQTGSSFGKNSERREKMGHHDHYYSRQRGRRNPSPDHTYKRNGESERKKSSHRGKKSHKRTSKSRERHNSPSRGRNRHRSWDQGRRSQSRRSHRSRSQSSSRCRSRGRRKSGNRDRTVQSPQSK

SEQ ID NO: 847755 - protein, 504 aa, Homo sapiens
MYVQQLDLTYFLRLRMSEGSGGAGKMAALEKMTFPKKMTFPEKPSHKKYRAALKKEKRKKRRQELARLRDSGLSQEEEEDTFIEEQQLEEEKLLERERERLHEEWLLREQKAQEEFRIKKEKEEAAKKWLEEQERKLKEQWKEQQRKEREEEEQKQQEKKEKEEAVQKMLDQAENDLENSTTWQNPEPPVDFRVMEKDRANCPFYSKTGACRFGDRCSRKHNFPTSSPTLLIKSMFTTFGMEQCRRDDYDPDASLEYSEEETYQQFLDFYEDVLPEFKNVGKVIQFKVSCNLEPHLRGNVYVQYQSEEECQAALSLFNGRWYAGRQLQCEFCPVTRWKMAICGLFEIQQCPRGKHCNFLHVFRNPNNEFWEANRDIYLSSDQTGSSFGKNSERREKMGHHDHYYSRQRGRRNPSPDHTYKRNGESERKKSSHRGKKSHKRTSKSRERHNSPSRGRNRHRSWDQGRRSQSRRSHRSRSQSSSRCRSRGRRKSGNRDRTVQSPQSK

SEQ ID NO: 847756 - protein, 616 aa, Homo sapiens
RAGFLPGFCRVSPCGSWVVETLVKMACAAARSPADQDRFICIYPAYLNNKKTIAEGRRIPISKAVENPTATEIQDVCSAVGLNVFLEKNKMYSREWNRDVQYRGRVRVQLKQEDGSLCLVQFLITLRMSEGSGGAGKMAALEKMTFPKKMTFPEKPSHKKYRAALKKEKRKKRRQELARLRDSGLSQEEEEDTFIEEQQLEEEKLLERERERLHEEWLLREQKAQEEFRIKKEKEEAAKKWLEEQERKLKEQWKEQQRKEREEEEQKQQEKKEKEEAVQKMLDQAENDLENSTTWQNPEPPVDFRVMEKDRANCPFYSKTGACRFGDRCSRKHNFPTSSPTLLIKSMFTTFGMEQCRRDDYDPDASLEYSEEETYQQFLDFYEDVLPEFKNVGKVIQFKVSCNLEPHLRGNVYVQYQSEEECQAALSLFNGRWYAGRQLQCEFCPVTRWKMAICGLFEIQQCPRGKHCNFLHVFRNPNNEFWEANRDIYLSSDQTGSSFGKNSERREKMGHHDHYYSRQRGRRNPSPDHTYKRNGESERKKSSHRGKKSHKRTSKSRERHNSPSRGRNRHRSWDQGRRSQSRRSHRSRSQSSSRCRSRGRRKSGNRDRTVQSPQSK

SEQ ID NO: 847757 - protein, 1009 aa, Homo sapiens
GAVHAGTAVGGACARIMAAEWASRFWLWATLLIPAAAVYEDQVGKFDWRQQYVGKVKFASLEFSPGSKKLVVATEKNVIAALNSRTGEILWRHVDKGTAEGAVDAMLLHGQDVITVSNGGRIMRSWETNIGGLNWEITLDSGSFQALGLVGLQESVRYIAVLKKTTLALHHLSSGHLKWVEHLPESDSIHYQMVYSYGSGVVWALGVVPFSHVNIVKFNVEDGEIVQQVRVSTPWLQHLSGACGVVDEAVLVCPDPSSRSLQTLALETEWELRQIPLQSLDLEFGSGFQPRVLPTQPNPVDASRAQFFLHLSPSHYALLQYHYGTLSLLKNFPQTALVSFATTGEKTVAAVMACRNEVQKSSSSEDGSMGSFSEKSSSKDSLACFNQTYTINLYLVETGRRLLDTTITFSLEQSGTRPERLYIQVFLKKDDSVGYRALVQTEDHLLLFLQQLAGKVVLWSREESLAEVVCLEMVDLPLTGAQAELEGEFGKKADGLLGMFLKRLSSQLILLQAWTSHLWKMFYDARKPRSQIKNEINIDTLARDEFNLQKMMVMVTASGKLFGIESSSGTILWKQYLPNVKPDSSFKLMVQRTTAHFPHPPQCTLLVKDKESGMSSLYVFNPIFGKWSQVAPPVLKRPILQSLLLPVMDQDYAKVLLLIDDEYKVTAFPATRNVLRQLHELAPSIFFYLVDAEQGRLCGYRLRKDLTTELSWELTIPPEVQRIVKVKGKRSSEHVHSQGRVMGDRSVLYKSLNPNLLAVVTESTDAHHERTFIGIFLIDGVTGRIIHSSVQKKAKGPVHIVHSENWVVYQYWNTKARRNEFTVLELYEGTEQYNATAFSSLDRPQLPQVLQQSYIFPSSISAMEATITERGITSRHLLIGLPSGAILSLPKALLDPRRPEIPTEQSREENLIPYSPDVQIHAERFINYNQTVSRMRGIYTAPSGLESTCLVVAYGLDIYQTRVYPSKQFDVLKDDYDYVLISSVLFGLVFATMITKRLAQVKLLNRAWR

SEQ ID NO: 847758 - protein, 1009 aa, Homo sapiens; identical to SEQ ID NO: 847757

SEQ ID NO: 847759 - protein, 1009 aa, Homo sapiens; identical to SEQ ID NO: 847757

SEQ ID NO: 847760 - protein, 658 aa, Homo sapiens
MACRNEVQKSSSSEDGSMGSFSEKSSSKDSLACFNQTYTINLYLVETGRRLLDTTITFSLEQSGTRPERLYIQVFLKKDDSVGYRALVQTEDHLLLFLQQLAGKVVLWSREESLAEVVCLEMVDLPLTGAQAELEGEFGKKADGLLGMFLKRLSSQLILLQAWTSHLWKMFYDARKPRSQIKNEINIDTLARDEFNLQKMMVMVTASGKLFGIESSSGTILWKQYLPNVKPDSSFKLMVQRTTAHFPHPPQCTLLVKDKESGMSSLYVFNPIFGKWSQVAPPVLKRPILQSLLLPVMDQDYAKVLLLIDDEYKVTAFPATRNVLRQLHELAPSIFFYLVDAEQGRLCGYRLRKDLTTELSWELTIPPEVQRIVKVKGKRSSEHVHSQGRVMGDRSVLYKSLNPNLLAVVTESTDAHHERTFIGIFLIDGVTGRIIHSSVQKKAKGPVHIVHSENWVVYQYWNTKARRNEFTVLELYEGTEQYNATAFSSLDRPQLPQVLQQSYIFPSSISAMEATITERGITSRHLLIGLPSGAILSLPKALLDPRRPEIPTEQSREENLIPYSPDVQIHAERFINYNQTVSRMRGIYTAPSGLESTCLVVAYGLDIYQTRVYPSKQFDVLKDDYDYVLISSVLFGLVFATMITKRLAQVKLLNRAWR

SEQ ID NO: 847761 - protein, 915 aa, Homo sapiens
GAVHAGTAVGGACARIMAAEWASRFWLWATLLIPAAAVYEDQVGKFDWRQQYVGKVKFASLEFSPGSKKLVVATEKNVIAALNSRTGEILWRHVDKGTAEGAVDAMLLHGQDVITVSNGGRIMRSWETNIGGLNWEITLDSGSFQALGLVGLQESVRYIAVLKKTTLALHHLSSGHLKWVEHLPESDSIHYQMVYSYGSGVVWALGVVPFSHVNIVKFNVEDGEIVQQVRVSTPWLQHLSGACGVVDEAVLVCPDPSSRSLQTLALETEWELRQIPLQSLDLEFGSGFQPRVLPTQPNPVDASRAQFFLHLSPSHYALLQYHYGTLSLLKNFPQTALVSFATTGEKTVAAVMACRNEVQKSSSSEDGSMGSFSEKSSSKDSLACFNQTYTINLYLVETGRRLLDTTITFSLEQSGTRPERLYIQVFLKKDDSVGYRALVQTEDHLLLFLQQLAGKVVLWSREESLAEVVCLEMVDLPLTGAQAELEGEFGKKADGLLGMFLKRLSSQLILLQAWTSHLWKMFYDARKPRSQIKNEINIDTLARDEFNLQKMMVMVTASGKLFGIESSSGTILWKQYLPNVKPDSSFKLMVQRTTAHFPHPPQCTLLVKDKESGMSSLYVFNPIFGKWSQVAPPVLKRPILQSLLLPVMDQDYAKVLLLIDDEYKVTAFPATRNVLRQLHELAPSIFFYLVDAEQGRLCGYRLRKDLTTELSWELTIPPEVQRIVKVKGKRSSEHVHSQGRVMGDRSVLYKSLNPNLLAVVTESTDAHHERTFIGIFLIDGVTGRIIHSSVQKKAKGPVHIVHSENWVVYQYWNTKARRNEFTVLELYEGTEQYNATAFSSLDRPQLPQVLQQSYIFPSSISAMEATITERGITSRHLLSFAGSPPPRDPNRTKQRGELNPVFSRCTDTRRAIHQL

SEQ ID NO: 847762 - protein, 918 aa, Homo sapiens
GAVHAGTAVGGACARIMAAEWASRFWLWATLLIPAAAVYEDQVGKFDWRQQYVGKVKFASLEFSPGSKKLVVATEKNVIAALNSRTGEILWRHVDKGTAEGAVDAMLLHGQDVITVSNGGRIMRSWETNIGGLNWEITLDSGSFQALGLVGLQESVRYIAVLKKTTLALHHLSSGHLKWVEHLPESDSIHYQMVYSYGSGVVWALGVVPFSHVNIVKFNVEDGEIVQQVRVSTPWLQHLSGACGVVDEAVLVCPDPSSRSLQTLALETEWELRQIPLQSLDLEFGSGFQPRVLPTQPNPVDASRAQFFLHLSPSHYALLQYHYGTLSLLKNFPQTALVSFATTGEKTVAAVMACRNEVQKSSSSEDGSMGSFSEKSSSKDSLACFNQTYTINLYLVETGRRLLDTTITFSLEQSGTRPERLYIQVFLKKDDSVGYRALVQTEDHLLLFLQQLAGKVVLWSREESLAEVVCLEMVDLPLTGAQAELEGEFGKKADGLLGMFLKRLSSQLILLQAWTSHLWKMFYDARKPRSQIKNEINIDTLARDEFNLQKMMVMVTASGKLFGIESSSGTILWKQYLPNVKPDSSFKLMVQRTTAHFPHPPQCTLLVKDKESGMSSLYVFNPIFGKWSQVAPPVLKRPILQSLLLPVMDQDYAKVLLLIDDEYKVTAFPATRNVLRQLHELAPSIFFYLVDAEQGRLCGYRLRKDLTTELSWELTIPPEVQRIVKVKGKRSSEHVHSQGRVMGDRSVLYKSLNPNLLAVVTESTDAHHERTFIGIFLIDGVTGRIIHSSVQKKAKGPVHIVHSENWVVYQYWNTKARRNEFTVLELYEGTEQYNATAFSSLDRPQLPQVLQQSYIFPSSISAMEATITERGITSRHLLIGLPSGAILSLPKALLDPRRPEIPTEQSRCTDTRRAIHQL

SEQ ID NO: 847763 - protein, 318 aa, Homo sapiens
CPHLVTFLSGDVLDLTTELSWELTIPPEVQRIVKVKGKRSSEHVHSQGRVMGDRSVLYKSLNPNLLAVVTESTDAHHERTFIGIFLIDGVTGRIIHSSVQKKAKGPVHIVHSENWVVYQYWNTKARRNEFTVLELYEGTEQYNATAFSSLDRPQLPQVLQQSYIFPSSISAMEATITERGITSRHLLIGLPSGAILSLPKALLDPRRPEIPTEQSREENLIPYSPDVQIHAERFINYNQTVSRMRGIYTAPSGLESTCLVVAYGLDIYQTRVYPSKQFDVLKDDYDYVLISSVLFGLVFATMITKRLAQVKLLNRAWR

SEQ ID NO: 847764 - protein, 918 aa, Homo sapiens; identical to SEQ ID NO: 847762

SEQ ID NO: 847765 - protein, 109 aa, Homo sapiens [sequence omitted]

SEQ ID NO: 847766 - protein, 1009 aa, Homo sapiens; identical to SEQ ID NO: 847757

SEQ ID NO: 847767 - protein, 658 aa, Homo sapiens; identical to SEQ ID NO: 847760

SEQ ID NO: 847768 - protein, 658 aa, Homo sapiens; identical to SEQ ID NO: 847760

SEQ ID NO: 847769 - protein, 495 aa, Homo sapiens
MSSLYVFNPIFGKWSQVAPPVLKRPILQSLLLPVMDQDYAKVLLLIDDEYKVLSSEGMENMLAESGLGPGGQTQRPGDGVLSAPSTCLGSKAIPKRNDGCVCICENSEFLTELNVNPKLSSNQLICSFILKALFDGKFPNSFLGLSGFFKVTAFPATRNVLRQLHELAPSIFFYLVDAEQGRLCGYRLRKDLTTELSWELTIPPEVQRIVKVKGKRSSEHVHSQGRVMGDRSVLYKSLNPNLLAVVTESTDAHHERTFIGIFLIDGVTGRIIHSSVQKKAKGPVHIVHSENWVVYQYWNTKARRNEFTVLELYEGTEQYNATAFSSLDRPQLPQVLQQSYIFPSSISAMEATITERGITSRHLLIGLPSGAILSLPKALLDPRRPEIPTEQSREENLIPYSPDVQIHAERFINYNQTVSRMRGIYTAPSGLESTCLVVAYGLDIYQTRVYPSKQFDVLKDDYDYVLISSVLFGLVFATMITKRLAQVKLLNRAWR

SEQ ID NO: 847770 - protein, 106 aa, Homo sapiens
NACKGPGPKFPGWANYYYKIRGPGGTKQVSRMRGIYTAPSGLESTCLVVAYGLDIYQTRVYPSKQFDVLKDDYDYVLISSVLFGLVFATMITKRLAQVKLLNRAWR

SEQ ID NO: 847771 - protein, 408 aa, Homo sapiens
GAVHAGTAVGGACARIMAAEWASRFWLWATLLIPAAAVYEDQVGKFDWRQQYVGKVKFASLEFSPGSKKLVVATEKNVIAALNSRTGEILWRHVDKGTAEGAVDAMLLHGQDVITVSNGGRIMRSWETNIGGLNWEITLDSGSFQALGLVGLQESVRYIAVLKKTTLALHHLSSGHLKWVEHLPESDSIHYQMVYSYGSGVVWALGVVPFSHVNIVKFNVEDGEIVQQVRVSTPWLQHLSGACGVVDEAVLVCPDPSSRSLQTLALETEWELRQIPLQSSRSLGIWKVDSRWPGILAVAPAPEPQMARRCRGRQLSFSWHLGPPKGPATGSWLGQLAQLSANKRACHDSVARRDNTTGYITPPAKDLVATRKGYEAPMLRPKRQTWWGANATTGNRGLGDLGPEGAQF

SEQ ID NO: 847772 - protein, 1176 aa, Homo sapiens
RGRGGCQGISGRGREEAAAAAAGRAGSRGKEKERKEEGGESSEEEAGPAGHLTSRRRRRRRRRRAAGEAAPPPARRSSQRSRPRTRWSRAAAKATGAGAVGRSAAAAAAAEEEEAGVGAEATAMAFLKLRDQPSLVQAIFNGDPDEVRALIFKKEDVNFQDNEKRTPLHAAAYLGDAEIIELLILSGARVNAKDSKWLTPLHRAVASCSEEAVQVLLKHSADVNARDKNWQTPLHIAAANKAVKCAEALVPLLSNVNVSDRAGRTALHHAAFSGHGEMVKLLLSRGANINAFDKKDRRAIHWAAYMGHIEVVKLLVSHGAEVTCKDKKSYTPLHAAASSGMISVVKYLLDLGVDMNEPNAYGNTPLHVACYNGQDVVVNELIDCGAIVNQKNEKGFTPLHFAAASTHGALCLELLVGNGADVNMKSKDGKTPLHMTALHGRFSRSQTIIQSGAVIDCEDKNGNTPLHIAARYGHELLINTLITSGADTAKRGIHGMFPLHLAALSGFSDCCRKLLSSGFDIDTPDDFGRTCLHAAAAGGNLECLNLLLNTGADFNKKDKFGRSPLHYAAANCNYQCLFALVGSGASVNDLDERGCTPLHYAATSDTDGKCLEYLLRNDANPGIRDKQGYNAVHYSAAYGHRLCLQLIASETPLDVLMETSGTDMLSDSDNRATISPLHLAAYHGHHQALEVLVQSLLDLDVRNSSGRTPLDLAAFKGHVECVDVLINQGASILVKDYILKRTPIHAAATNGHSECLRLLIGNAEPQNAVDIQDGNGQTPLMLSVLNGHTDCVYSLLNKGANVDAKDKWGRTALHRGAVTGHEECVDALLQHGAKCLLRDSRGRTPIHLSAACGHIGVLGALLQSAASMDANPATADNHGYTALHWACYNGHETCVELLLEQEVFQKTEGNAFSPLHCAVINDNEGAAEMLIDTLGASIVNATDSKGRTPLHAAAFTDHVECLQLLLSHNAQVNSVDSTGKTPLMMAAENGQTNTVEMLVSSASAELTLQDNSKNTALHLACSKGHETSALLILEKITDRNLINATNAALQTPLHVAARNGLTMVVQELLGKGASVLAVDENGYTPALACAPNKDVADCLALILATMMPVSSSSPLSSLTFNAINRYTNTSKTVSFEALPIMRNEPSSYCSFNNIGGEQEYLYTDVDELNDSDSETY

SEQ ID NO: 847773 - protein, 687 aa, Homo sapiens
MKGRYVMMSKDGKTPLHMTALHGRFSRSQTIIQSGAVIDCEDKNGNTPLHIAARYGHELLINTLITSGADTAKRGIHGMFPLHLAALSGFSDCCRKLLSSGFDIDTPDDFGRTCLHAAAAGGNLECLNLLLNTGADFNKKDKFGRSPLHYAAANCNYQCLFALVGSGASVNDLDERGCTPLHYAATSDTDGKCLEYLLRNDANPGIRDKQGYNAVHYSAAYGHRLCLQLIASETPLDVLMETSGTDMLSDSDNRATISPLHLAAYHGHHQALEVLVQSLLDLDVRNSSGRTPLDLAAFKGHVECVDVLINQGASILVKDYILKRTPIHAAATNGHSECLRLLIGNAEPQNAVDIQDGNGQTPLMLSVLNGHTDCVYSLLNKGANVDAKDKWGRTALHRGAVTGHEECVDALLQHGAKCLLRDSRGRTPIHLSAACGHIGVLGALLQSAASMDANPATADNHGYTALHWACYNGHETCVELLLEQEVFQKTEGNAFSPLHCAVINDNEGAAEMLIDTLGASIVNATDSKGRTPLHAAAFTDHVECLQLLLSHNAQVNSVDSTGKTPLMMAAENGQTNTVEMLVSSASAELTLQDNSKNTALHLACSKGHETSALLILEKITDRNLINATNAALQTPLHVAARNGLTMVVQELLGKGASVLAVDENGKRHFDIHVEIQPKRKDPTVSQC

SEQ ID NO: 847774 - protein, 438 aa, Homo sapiens
MHFNRETISPLHLAAYHGHHQALEVLVQSLLDLDVRNSSGRTPLDLAAFKGHVECVDVLINQGASILVKDYILKRTPIHAAATNGHSECLRLLIGNAEPQNAVDIQDGNGQTPLMLSVLNGHTDCVYSLLNKGANVDAKDKWGRTALHRGAVTGHEECVDALLQHGAKCLLRDSRGRTPIHLSAACGHIGVLGALLQSAASMDANPATADNHGYTALHWACYNGHETCVELLLEQEVFQKTEGNAFSPLHCAVINDNEGAAEMLIDTLGASIVNATDSKGRTPLHAAAFTDHVECLQLLLSHNAQVNSVDSTGKTPLMMAAENGQTNTVEMLVSSASAELTLQDNSKNTALHLACSKGHETSALLILEKITDRNLINATNAALQTPLHVAARNGLTMVVQELLGKGASVLAVDENGKRHFDIHVEIQPKRKDPTVSQC

SEQ ID NO: 847775 - protein, 365 aa, Homo sapiens
SPAEENVFMLLILTLVLLEVDRLVQLGVRSSVICLGFLTPLMLSVLNGHTDCVYSLLNKGANVDAKDKWGRTALHRGAVTGHEECVDALLQHGAKCLLRDSRGRTPIHLSAACGHIGVLGALLQSAASMDANPATADNHGYTALHWACYNGHETCVELLLEQEVFQKTEGNAFSPLHCAVINDNEGAAEMLIDTLGASIVNATDSKGRTPLHAAAFTDHVECLQLLLSHNAQVNSVDSTGKTPLMMAAENGQTNTVEMLVSSASAELTLQDNSKNTALHLACSKGHETSALLILEKITDRNLINATNAALQTPLHVAARNGLTMVVQELLGKGASVLAVDENGKRHFDIHVEIQPKRKDPTVSQC

SEQ ID NO: 847776 - protein, 1013 aa, Homo sapiens
MSRVCIVVLEEVEDESPAFISKLPQENKSLHSPPSGNVLVRPSLVQAIFNGDPDEVRALIFKKEDVNFQDNEKRTPLHAAAYLGDAEIIELLILSGARVNAKDSKWLTPLHRAVASCSEEAVQVLLKHSADVNARDKNWQTPLHIAAANKAVKCAEALVPLLSNVNVSDRAGRTALHHAAFSGHGEMVKLLLSRGANINAFDKKDRRAIHWAAYMGHIEVVKLLVSHGAEVTCKDKKSYTPLHAAASSGMISVVKYLLDLGVDMNEPNAYGNTPLHVACYNGQDVVVNELIDCGAIVNQKNEKGFTPLHFAAASTHGALCLELLVGNGADVNMKSKDGKTPLHMTALHGRFSRSQTIIQSGAVIDCEDKNGNTPLHIAARYGHELLINTLITSGADTAKRGIHGMFPLHLAALSGFSDCCRKLLSSGFDIDTPDDFGRTCLHAAAAGGNLECLNLLLNTGADFNKKDKFGRSPLHYAAANCNYQCLFALVGSGASVNDLDERGCTPLHYAATSDTDGKCLEYLLRNDANPGIRDKQGYNAVHYSAAYGHRLCLQLIASETPLDVLMETSGTDMLSDSDNRATISPLHLAAYHGHHQALEVLVQSLLDLDVRNSSGRTPLDLAAFKGHVECVDVLINQGASILVKDYILKRTPIHAAATNGHSECLRLLIGNAEPQNAVDIQDGNGQTPLMLSVLNGHTDCVYSLLNKGANVDAKDKWGRTALHRGAVTGHEECVDALLQHGAKCLLRDSRGRTPIHLSAACGHIGVLGALLQSAASMDANPATADNHGYTALHWACYNGHETCVELLLEQEVFQKTEGNAFSPLHCAVINDNEGAAEMLIDTLGASIVNATDSKGRTPLHAAAFTDHVECLQLLLSHNAQVNSVDSTGKTPLMMAAENGQTNTVEMLVSSASAELTLQDNSKNTALHLACSKGHETSALLILEKITDRNLINATNAALQTPLHVAARNGLTMVVQELLGKGASVLAVDENGKRHFDIHVEIQPKRKDPTVSQC

SEQ ID NO: 847777 - protein, 489 aa, Homo sapiens
QGRRAQEARAQCAGYQATPGQGVSAVGVMVSRVQLPPEIQLAQRLAGNEQVTRDRAVRKLRKYIVARTQRAAGGFTHDELLKVWKGLFYCMWMQDKPLLQEELGRTISQLVHAFQTTEAQHLFLQAFWQTMNREWTGIDRLRLDKFYMLMRMVLNESLKVLKMQGWEERQIEELLELLMTEILHPSSQAPNGVKSHFIEIFLEELTKVGAEELTADQNLKFIDPFCRIAARTKDSLVLNNITRGIFETIVEQAPLAIEDLLNELDTQDEEVASDSDESSEGGERGDALSQKRSEKPPAGSICRAEPEAGEEQAGDDRDSGGPVLQFDYEAVANRLFEMASRQSTPSQNRKRLYKVIRKLQDLAGGIFPEDEIPEKACRRLLEGRRQKKTKKQKRLLRLQQERGKGEKEPPSPGMERKRSRRRGVGADPEARAEAGEQPGTAERALLRDQPRGRGQRGARQRRRTPRPLTSARAKAANVQEPEKKKKRRE

SEQ ID NO: 847778 - protein, 345 aa, Homo sapiens [sequence omitted]

SEQ ID NO: 847779 - protein, 137 aa, Homo sapiens
SPRLPSPSSLHFFPPLLSLISGAAFRVGPLATRVWLACDALTRGNPGSAADHSGPGAAYLQWRGLSTVPGRAGGPWQEWGAEEAHGGPPTPRWEAFPVTLSMLNWPQGLGIHPFPCPELRAIEAVHLISHEAVASSL

SEQ ID NO: 847780 - protein, 100 aa, Homo sapiens
RKRAGAGERAGLGKRVKCVETRCPRRGLRSRPQVGVTLRLASPRGLSWAEPVRSPAGLLLPPPTWSPCLCPSPQSILSIEARVTSVGTKHTSFPLIPQPL

SEQ ID NO: 847781 - protein, 432 aa, Homo sapiens
QGRRAQEARAQCAGYQATPGQGVSAVGVMVSRVQLPPEIQLAQRLAGNEQVTRDRAVRKLRKYIVARTQRAAGGFTHDELLKVWKGLFYCMWMQDKPLLQEELGRTISQLVHAFQTTEAQHLFLQAFWQTMNREWTGIDRLRLDKFYMLMRMVLNESLKVLKMQGWEERQIEELLELLMTEILHPSSQAPNGVKSHFIEIFLEELTKVGAEELTADQNLKFIDPFCRIAARTKDSLVLNNITRGIFETIVEQAPLAIEDLLNELDTQDEEVASDSDESSEGGERGDALSQKRSEKPPAGSICRAEPEAGEEQAGDDRDSGGPVLQFDYEAVANRLFEMASRQSTPSQNRKRLYKVIRKLQDLAGGIFPEDEIPEKACRRLLEGRRQKKTKKQKRLLRLQQERGRTRGCVSHGAGVLTCLLLPWMGVTCSVSP

SEQ ID NO: 847782 - protein, 399 aa, Homo sapiens [sequence omitted]

SEQ ID NO: 847783 - protein, 399 aa, Homo sapiens [sequence omitted]

SEQ ID NO: 847784 - protein, 446 aa, Homo sapiens
PGEAGAGGACSVCWVPGDSGTGGLGRRRHGGFTHDELLKVWKGLFYCMWMQDKPLLQEELGRTISQLVHAFQTTEAQHLFLQAFWQTMNREWTGIDRLRLDKFYMLMRMVLNESLKVLKMQGWEERQIEELLELLMTEILHPSSQAPNGVKSHFIEIFLEELTKVGAEELTADQNLKFIDPFCRIAARTKDSLVLNNITRGIFETIVEQAPLAIEDLLNELDTQDEEVASDSDESSEGGERGDALSQKRSEKPPAGSICRAEPEAGEEQAGDDRDSGGPVLQFDYEAVANRLFEMASRQSTPSQNRKRLYKVIRKLQDLAGGIFPEDEIPEKACRRLLEGRRQKKTKKQKRLLRLQQERGKGEKEPPSPGMERKRSRRRGVGADPEARAEAGEQPGTAERALLRDQPRGRGQRGARQRRRTPRPLTSARAKAANVQEPEKKKKRRE

SEQ ID NO: 847785 - protein, 338 aa, Homo sapiens
  misc_feature (7)..(7): Xaa can be any naturally occurring amino acid
TRERPPXVVLKMQGWEERQIEELLELLMTEILHPSSQAPNGVKSHFIEIFLEELTKVGAEELTADQNLKFIDPFCRIAARTKDSLVLNNITRGIFETIVEQAPLAIEDLLNELDTQDEEVASDSDESSEGGERGDALSQKRSEKPPAGSICRAEPEAGEEQAGDDRDSGGPVLQFDYEAVANRLFEMASRQSTPSQNRKRLYKVIRKLQDLAGGIFPEDEIPEKACRRLLEGRRQKKTKKQKRLLRLQQERGKGEKEPPSPGMERKRSRRRGVGADPEARAEAGEQPGTAERALLRDQPRGRGQRGARQRRRTPRPLTSARAKAANVQEPEKKKKRRE

SEQ ID NO: 847786 - protein, 489 aa, Homo sapiens; identical to SEQ ID NO: 847777

SEQ ID NO: 847787 - protein, 359 aa, Homo sapiens [sequence omitted]

SEQ ID NO: 847788 - protein, 149 aa, Homo sapiens
SGPAPSPRPTHLVGDVLGLGGGRLRGGGRPAHHLGGDGGNLARGLGEGTRRLLSPSRRWGHVTRGRNQGAGRRHFGFGVPCGVAVAPQEGTRGAGRGAGRGAGSLATTRRRLGLRAQRWCREGAPPSRGWYRLSGRRVTRTGAGARPGV

SEQ ID NO: 847789 - protein, 432 aa, Homo sapiens; identical to SEQ ID NO: 847781

SEQ ID NO: 847790 - protein, 314 aa, Homo sapiens
QGRRAQEARAQCAGYQATPGQGVSAVGVMVSRVQLPPEIQLAQRLAGNEQVTRDRAVRKLRKYIVARTQRAAGGFTHDELLKVWKGLFYCMWMQDKPLLQEELGRTISQLVHAFQTTEAQHLFLQAFWQTMNREWTGIDRLRLDKFYMLMRMVLNESLKVLKMQGWEERQIEELLELLMTEILHPSSQAPNGVKSHFIEIFLEELTKVGAEELTADQNLKFIDPFCRIAARTKDSLVLNNITRGIFETIVEQAPLAIEDLLNELDTQDEEVASDSDESSEGGERGDALSQKRSEKPPAGGGHTAPGFSSGPVLG

SEQ ID NO: 847791 - protein, 472 aa, Homo sapiens
SGPAPSPRPTHLVGDVLGLGGGRLRGGGRPAHHLGGDGGNLARGLGEGTRRLLSPSGFTHDELLKVWKGLFYCMWMQDKPLLQEELGRTISQLVHAFQTTEAQHLFLQAFWQTMNREWTGIDRLRLDKFYMLMRMVLNESLKVLKMQGWEERQIEELLELLMTEILHPSSQAPNGVKSHFIEIFLEELTKVGAEELTADQNLKFIDPFCRIAARTKDSLVLNNITRGIFETIVEQAPLAIEDLLNELDTQDEEVASDSDESSEGGERGDALSQKRSEKPPAGSICRAEPEAGEEQAGDDRDSGGPVLQFDYEAVANRLFEMASRQSTPSQNRKRLYKVIRKLQDLAGGIFPEDEIPEKACRRLLEGRRQKKTKKQKRLLRLQQERGKGEKEPPSPGMERKRSRRRGVGADPEARAEAGEQPGTAERALLRDQPRGRGQRGARQRRRTPRPLTSARAKAANVQEPEKKKKRRE

SEQ ID NO: 847792 - protein, 431 aa, Homo sapiens
VSEDPPLLTAVYLLVFGTEAMIKKCAWGTQAHFWMQDKPLLQEELGRTISQLVHAFQTTEAQHLFLQAFWQTMNREWTGIDRLRLDKFYMLMRMVLNESLKVLKMQGWEERQIEELLELLMTEILHPSSQAPNGVKSHFIEIFLEELTKVGAEELTADQNLKFIDPFCRIAARTKDSLVLNNITRGIFETIVEQAPLAIEDLLNELDTQDEEVASDSDESSEGGERGDALSQKRSEKPPAGSICRAEPEAGEEQAGDDRDSGGPVLQFDYEAVANRLFEMASRQSTPSQNRKRLYKVIRKLQDLAGGIFPEDEIPEKACRRLLEGRRQKKTKKQKRLLRLQQERGKGEKEPPSPGMERKRSRRRGVGADPEARAEAGEQPGTAERALLRDQPRGRGQRGARQRRRTPRPLTSARAKAANVQEPEKKKKRRE

SEQ ID NO: 847793 - protein, 119 aa, Homo sapiens
HPRGESREWLWPSWPIATPHRKQRAPGGTFFYFQKNKRHSSGPKCVCKTRNGKWLLDGPQIFKVRWIPSLPTHLPPRPSRLHKNTEFAGPGKEGRRLKHKTSCYAPGTKTVPKKSPCIL

SEQ ID NO: 847794 - protein, 232 aa, Homo sapiens
MALASGPARRALAGSGQLGLGGFGAPRRGAYEWGVRSTRKSEPPPLDRVYEIPGLEPITFAGKMHFVPWLARPIFPPWDRGYKDPRFYRSPPLHEHPLYKDQACYIFHHRCRLLEGVKQALWLTKTKLIEGLPEKVLSLVDDPRNHIENQDECVLNVISHARLWQTTEEIPKRETYCPVIVDNLIQLCKSQILKHPSLARRICVQNSTFSATWNRESLLLQVRGSGWSPTEH

SEQ ID NO: 847795 - protein, 232 aa, Homo sapiens; identical to SEQ ID NO: 847794

SEQ ID NO: 847796 - protein, 232 aa, Homo sapiens; identical to SEQ ID NO: 847794

SEQ ID NO: 847797 - protein, 232 aa, Homo sapiens; identical to SEQ ID NO: 847794

SEQ ID NO: 847798 - protein, 232 aa, Homo sapiens; identical to SEQ ID NO: 847794

SEQ ID NO: 847799 - protein, 188 aa, Homo sapiens
EIVVDLEDAYFSTGHFAGKMHFVPWLARPIFPPWDRGYKDPRFYRSPPLHEHPLYKDQACYIFHHRCRLLEGVKQALWLTKTKLIEGLPEKVLSLVDDPRNHIENQDECVLNVISHARLWQTTEEIPKRETYCPVIVDNLIQLCKSQILKHPSLARRICVQNSTFSATWNRESLLLQVRGSGWSPTEH

SEQ ID NO: 847800 - protein, 165 aa, Homo sapiens
IQGRRLRLPPWDRGYKDPRFYRSPPLHEHPLYKDQACYIFHHRCRLLEGVKQALWLTKTKLIEGLPEKVLSLVDDPRNHIENQDECVLNVISHARLWQTTEEIPKRETYCPVIVDNLIQLCKSQILKHPSLARRICVQNSTFSATWNRESLLLQVRGSGWSPTEH

SEQ ID NO: 847801 - protein, 181 aa, Homo sapiens
EIVVDLEDAYFSTGHFAGKMHFVPWLARPIFPPWDRGYKDPRFYRSPPLHEHPLYKDQACYIFHHRCRLLEGVKQALWLTKTKLIEGLPEKVLSLVDDPRNHIENQDECVLNVISHARLWQTTEEIPKRETYCPVIVDNLIQLCKSQILKHPSLARRICVQNSTFSATWNRGRDVQRTQVF

SEQ ID NO: 847802 - protein, 131 aa, Homo sapiens
TWRGPGGGLEAIRSGVKQALWLTKTKLIEGLPEKVLSLVDDPRNHIENQDECVLNVISHARLWQTTEEIPKRETYCPVIVDNLIQLCKSQILKHPSLARRICVQNSTFSATWNRESLLLQVRGSGWSPTEH

SEQ ID NO: 847803 - protein, 72 aa, Homo sapiens
RPIFPPWDRGYKDPRFYRSPPLHEHPLYKDQACYIFHHRCRLLEGEAPGRAARDRVPLTSTDPDPLWLWARH

SEQ ID NO: 847804 - protein, 232 aa, Homo sapiens; identical to SEQ ID NO: 847794

SEQ ID NO: 847805 - protein, 232 aa, Homo sapiens; identical to SEQ ID NO: 847794

SEQ ID NO: 847806 - protein, 232 aa, Homo sapiens; identical to SEQ ID NO: 847794

SEQ ID NO: 847807 - protein, 232 aa, Homo sapiens; identical to SEQ ID NO: 847794

SEQ ID NO: 847808 - protein, 232 aa, Homo sapiens; identical to SEQ ID NO: 847794

SEQ ID NO: 847809 - protein, 232 aa, Homo sapiens; identical to SEQ ID NO: 847794

SEQ ID NO: 847810 - protein, 248 aa, Homo sapiens
KAKSDRVVGIGRSRGPRQRGGGPQETLCFPGPMLGLGGFGAPRRGAYEWGVRSTRKSEPPPLDRVYEIPGLEPITFAGKMHFVPWLARPIFPPWDRGYKDPRFYRSPPLHEHPLYKDQACYIFHHRCRLLEGVKQALWLTKTKLIEGLPEKVLSLVDDPRNHIENQDECVLNVISHARLWQTTEEIPKRETYCPVIVDNLIQLCKSQILKHPSLARRICVQNSTFSATWNRESLLLQVRGSGWSPTEH

SEQ ID NO: 847811 - protein, 131 aa, Homo sapiens; identical to SEQ ID NO: 847802

SEQ ID NO: 847812 - protein, 124 aa, Homo sapiens
TWRGPGGGLEAIRSGVKQALWLTKTKLIEGLPEKVLSLVDDPRNHIENQDECVLNVISHARLWQTTEEIPKRETYCPVIVDNLIQLCKSQILKHPSLARRICVQNSTFSATWNRGRDVQRTQVF

SEQ ID NO: 847813 - protein, 111 aa, Homo sapiens [sequence omitted]

SEQ ID NO: 847814 - protein, 188 aa, Homo sapiens; identical to SEQ ID NO: 847799

SEQ ID NO: 847815 - protein, 70 aa, Homo sapiens
SNCFNRKEIALHVSMPCYQKKENKGENWFIQNYNSKTRHQNTALADFLESNFSSILTCDGEPSRDKLFIS

SEQ ID NO: 847816 - protein, 121 aa, Homo sapiens
GFCHVGQAGLELLTSSDLPASASQNPGITGLSHHAWPVLICLSISFFVLLTKDMLLCLVGFFSCGFLNPIQPLVPSPASSHSFAQLLGLPLTHREQPPTMDCTVLFAPLNLSCLQNDTSAN

SEQ ID NO: 847817 - protein, 129 aa, Homo sapiens
MEDGGQREERKRNAKCGQPPRVKIEGSVMQVLDRRRQVGRAPQPPPQKRPPPGLSDPWGAGSASPRPHVAPAPMVPVPWMETASSGGQMWCSGIQSHFLPGHACPAASLAAFSPYLPGDPGWGTRAPGG

SEQ ID NO: 847818 - protein, 782 aa, Homo sapiens
MAAAMETEQLGVEIFETADCEENIESQDRPKLEPFYVERYSWSQLKKLLADTRKYHGYMMAKAPHDFMFVKRNDPDGPHSDRIYYLAMSGENRENTLFYSEIPKTINRAAVLMLSWKPLLDLFQATLDYGMYSREEELLRERKRIGTVGIASYDYHQGSGTFLFQAGSGIYHVKDGGPQGFTQQPLRPNLVETSCPNIRMDPKLCPADPDWIAFIHSNDIWISNIVTREERRLTYVHNELANMEEDARSAGVATFVLQEEFDRYSGYWWCPKAETTPSGGKILRILYEENDESEVEIIHVTSPMLETRRADSFRYPKTGTANPKVTFKMSEIMIDAEGRIIDVIDKELIQPFEILFEGVEYIARAGWTPEGKYAWSILLDRSQTRLQIVLISPELFIPVEDDVMERQRLIESVPDSVTPLIIYEETTDIWINIHDIFHVFPQSHEEEIEFIFASECKTGFRHLYKITSILKESKYKRSSGGLPAPSDFKCPIKEEIAITSGEWEVLGRHGSNIQVDEVRRLVYFEGTKDSPLEHHLYVVSYVNPGEVTRLTDRGYSHSCCISQHCDFFISKYSNQKNPHCVSLYKLSSPEDDPTCKTKEFWATILDSAGPLPDYTPPEIFSFESTTGFTLYGMLYKPHDLQPGKKYPTVLFIYGGPQVAIAGAPVTLWIFYDTGYTERYMGHPDQNEQGYYLGSVAMQAEKFPSEPNRLLLLHGFLDENVHFAHTSILLSFLVRAGKPYDLQIYPQERHSIRVPESGEHYELHLLHYLQENLGSRIAALKVI

SEQ ID NO: 847819 - protein, 108 aa, Homo sapiens
MAAAMETEQLGVEIFETADCEENIESQDRPKLEPFYVERYSWSQLKKLLADTRKYHGYMMAKAPHDFMFVKRNDPDGPHSDRIYYLGNKSLIDHDRFSKSKMPEIASS

SEQ ID NO: 847820 - protein, 898 aa, Homo sapiens
MWKRSEQMKIKSGKCNMAAAMETEQLGVEIFETADCEENIESQDRPKLEPFYVERYSWSQLKKLLADTRKYHGYMMAKAPHDFMFVKRNDPDGPHSDRIYYLAMSGENRENTLFYSEIPKTINRAAVLMLSWKPLLDLFQATLDYGMYSREEELLRERKRIGTVGIASYDYHQGSGTFLFQAGSGIYHVKDGGPQGFTQQPLRPNLVETSCPNIRMDPKLCPADPDWIAFIHSNDIWISNIVTREERRLTYVHNELANMEEDARSAGVATFVLQEEFDRYSGYWWCPKAETTPSGGKILRILYEENDESEVEIIHVTSPMLETRRADSFRYPKTGTANPKVTFKMSEIMIDAEGRIIDVIDKELIQPFEILFEGVEYIARAGWTPEGKYAWSILLDRSQTRLQIVLISPELFIPVEDDVMERQRLIESVPDSVTPLIIYEETTDIWINIHDIFHVFPQSHEEEIEFIFASECKTGFRHLYKITSILKESKYKRSSGGLPAPSDFKCPIKEEIAITSGEWEVLGRHGSNIQVDEVRRLVYFEGTKDSPLEHHLYVVSYVNPGEVTRLTDRGYSHSCCISQHCDFFISKYSNQKNPHCVSLYKLSSPEDDPTCKTKEFWATILDSAGPLPDYTPPEIFSFESTTGFTLYGMLYKPHDLQPGKKYPTVLFIYGGPQVQLVNNRFKGVKYFRLNTLASLGYVVVVIDNRGSCHRGLKFEGAFKYKMGQIEIDDQVEGLQYLASRYDFIDLDRVGIHGWSYGGYLSLMALMQRSDIFRVAIAGAPVTLWIFYDTGYTERYMGHPDQNEQGYYLGSVAMQAEKFPSEPNRLLLLHGFLDENVHFAHTSILLSFLVRAGKPYDLQIYPQERHSIRVPESGEHYELHLLHYLQENLGSRIAALKVI

SEQ ID NO: 847821 - protein, 892 aa, Homo sapiens
MCLVFLGKCNMAAAMETEQLGVEIFETADCEENIESQDRPKLEPFYVERYSWSQLKKLLADTRKYHGYMMAKAPHDFMFVKRNDPDGPHSDRIYYLAMSGENRENTLFYSEIPKTINRAAVLMLSWKPLLDLFQATLDYGMYSREEELLRERKRIGTVGIASYDYHQGSGTFLFQAGSGIYHVKDGGPQGFTQQPLRPNLVETSCPNIRMDPKLCPADPDWIAFIHSNDIWISNIVTREERRLTYVHNELANMEEDARSAGVATFVLQEEFDRYSGYWWCPKAETTPSGGKILRILYEENDESEVEIIHVTSPMLETRRADSFRYPKTGTANPKVTFKMSEIMIDAEGRIIDVIDKELIQPFEILFEGVEYIARAGWTPEGKYAWSILLDRSQTRLQIVLISPELFIPVEDDVMERQRLIESVPDSVTPLIIYEETTDIWINIHDIFHVFPQSHEEEIEFIFASECKTGFRHLYKITSILKESKYKRSSGGLPAPSDFKCPIKEEIAITSGEWEVLGRHGSNIQVDEVRRLVYFEGTKDSPLEHHLYVVSYVNPGEVTRLTDRGYSHSCCISQHCDFFISKYSNQKNPHCVSLYKLSSPEDDPTCKTKEFWATILDSAGPLPDYTPPEIFSFESTTGFTLYGMLYKPHDLQPGKKYPTVLFIYGGPQVQLVNNRFKGVKYFRLNTLASLGYVVVVIDNRGSCHRGLKFEGAFKYKMGQIEIDDQVEGLQYLASRYDFIDLDRVGIHGWSYGGYLSLMALMQRSDIFRVAIAGAPVTLWIFYDTGYTERYMGHPDQNEQGYYLGSVAMQAEKFPSEPNRLLLLHGFLDENVHFAHTSILLSFLVRAGKPYDLQIYPQERHSIRVPESGEHYELHLLHYLQENLGSRIAALKVI

SEQ ID NO: 847822 - protein, 898 aa, Homo sapiens; identical to SEQ ID NO: 847820

SEQ ID NO: 847823 - protein, 780 aa, Homo sapiens
MYEAGFEIGRGSLGSHTLDLFQATLDYGMYSREEELLRERKRIGTVGIASYDYHQGSGTFLFQAGSGIYHVKDGGPQGFTQQPLRPNLVETSCPNIRMDPKLCPADPDWIAFIHSNDIWISNIVTREERRLTYVHNELANMEEDARSAGVATFVLQEEFDRYSGYWWCPKAETTPSGGKILRILYEENDESEVEIIHVTSPMLETRRADSFRYPKTGTANPKVTFKMSEIMIDAEGRIIDVIDKELIQPFEILFEGVEYIARAGWTPEGKYAWSILLDRSQTRLQIVLISPELFIPVEDDVMERQRLIESVPDSVTPLIIYEETTDIWINIHDIFHVFPQSHEEEIEFIFASECKTGFRHLYKITSILKESKYKRSSGGLPAPSDFKCPIKEEIAITSGEWEVLGRHGSNIQVDEVRRLVYFEGTKDSPLEHHLYVVSYVNPGEVTRLTDRGYSHSCCISQHCDFFISKYSNQKNPHCVSLYKLSSPEDDPTCKTKEFWATILDSAGPLPDYTPPEIFSFESTTGFTLYGMLYKPHDLQPGKKYPTVLFIYGGPQVQLVNNRFKGVKYFRLNTLASLGYVVVVIDNRGSCHRGLKFEGAFKYKMGQIEIDDQVEGLQYLASRYDFIDLDRVGIHGWSYGGYLSLMALMQRSDIFRVAIAGAPVTLWIFYDTGYTERYMGHPDQNEQGYYLGSVAMQAEKFPSEPNRLLLLHGFLDENVHFAHTSILLSFLVRAGKPYDLQIYPQERHSIRVPESGEHYELHLLHYLQENLGSRIAALKVI

SEQ ID NO: 847824 - protein, 882 aa, Homo sapiens
MAAAMETEQLGVEIFETADCEENIESQDRPKLEPFYVERYSWSQLKKLLADTRKYHGYMMAKAPHDFMFVKRNDPDGPHSDRIYYLAMSGENRENTLFYSEIPKTINRAAVLMLSWKPLLDLFQATLDYGMYSREEELLRERKRIGTVGIASYDYHQGSGTFLFQAGSGIYHVKDGGPQGFTQQPLRPNLVETSCPNIRMDPKLCPADPDWIAFIHSNDIWISNIVTREERRLTYVHNELANMEEDARSAGVATFVLQEEFDRYSGYWWCPKAETTPSGGKILRILYEENDESEVEIIHVTSPMLETRRADSFRYPKTGTANPKVTFKMSEIMIDAEGRIIDVIDKELIQPFEILFEGVEYIARAGWTPEGKYAWSILLDRSQTRLQIVLISPELFIPVEDDVMERQRLIESVPDSVTPLIIYEETTDIWINIHDIFHVFPQSHEEEIEFIFASECKTGFRHLYKITSILKESKYKRSSGGLPAPSDFKCPIKEEIAITSGEWEVLGRHGSNIQVDEVRRLVYFEGTKDSPLEHHLYVVSYVNPGEVTRLTDRGYSHSCCISQHCDFFISKYSNQKNPHCVSLYKLSSPEDDPTCKTKEFWATILDSAGPLPDYTPPEIFSFESTTGFTLYGMLYKPHDLQPGKKYPTVLFIYGGPQVQLVNNRFKGVKYFRLNTLASLGYVVVVIDNRGSCHRGLKFEGAFKYKMGQIEIDDQVEGLQYLASRYDFIDLDRVGIHGWSYGGYLSLMALMQRSDIFRVAIAGAPVTLWIFYDTGYTERYMGHPDQNEQGYYLGSVAMQAEKFPSEPNRLLLLHGFLDENVHFAHTSILLSFLVRAGKPYDLQIYPQERHSIRVPESGEHYELHLLHYLQENLGSRIAALKVI

SEQ ID NO: 847825 - protein, 882 aa, Homo sapiens; identical to SEQ ID NO: 847824

SEQ ID NO: 847826 - protein, 831 aa, Homo sapiens
MAAAMETEQLGVEIFETADCEENIESQDRPKLEPFYVERYSWSQLKKLLADTRKYHGYMMAKAPHDFMFVKRNDPDGPHSDRIYYLAMSGENRENTLFYSEIPKTINRAAVLMLSWKPLLDLFQATLDYGMYSREEELLRERKRIGTVGIASYDYHQGSGTFLFQAGSGIYHVKDGGPQGFTQQPLRPNLVETSCPNIRMDPKLCPADPDWIAFIHSNDIWISNIVTREERRLTYVHNELANMEEDARSAGVATFVLQEEFDRYSGYWWCPKAETTPSGGKILRILYEENDESEVEIIHVTSPMLETRRADSFRYPKTGTANPKVTFKMSEIMIDAEGRIIDVIDKELIQPFEILFEGVEYIARAGWTPEGKYAWSILLDRSQTRLQIVLISPELFIPVEDDVMERQRLIESVPDSVTPLIIYEETTDIWINIHDIFHVFPQSHEEEIEFIFASECKTGFRHLYKITSILKESKYKRSSGGLPAPSDFKCPIKEEIAITSGEWEVLGRHGSNIQVDEVRRLVYFEGTKDSPLEHHLYVVSYVNPGEVTRLTDRGYSHSCCISQHCDFFISKYSNQKNPHCVSLYKLSSPEDDPTCKTKEFWATILDSAGPLPDYTPPEIFSFESTTGFTLYGMLYKPHDLQPGKKYPTVLFIYGGPQVQLVNNRFKGVKYFRLNTLASLGYVVVVIDNRGSCHRGLKFEGAFKYKMVAIAGAPVTLWIFYDTGYTERYMGHPDQNEQGYYLGSVAMQAEKFPSEPNRLLLLHGFLDENVHFAHTSILLSFLVRAGKPYDLQIYPQERHSIRVPESGEHYELHLLHYLQENLGSRIAALKVI

SEQ ID NO: 847827 - protein, 913 aa, Homo sapiens
MAAAMETEQLGVEIFETADCEENIESQDRPKLEPFYVERYSWSQLKKLLADTRKYHGYMMAKAPHDFMFVKRNDPDGPHSDRIYYLAMSGENRENTLFYSEIPKTINRAAVLMLSWKPLLDLFQATLDYGMYSREEELLRERKRIGTVGIASYDYHQGSGTFLFQAGSGIYHVKDGGPQGFTQQPLRPNLVETSCPNIRMDPKLCPADPDWIAFIHSNDIWISNIVTREERRLTYVHNELANMEEDARSAGVATFVLQEEFDRYSGYWWCPKAETTPSGGKILRILYEENDESEVEIIHVTSPMLETRRADSFRYPKTGTANPKVTFKMSEIMIDAEGRIIDVIDKELIQPFEILFEGVEYIARAGWTPEGKYAWSILLDRSQTRLQIVLISPELFIPVEDDVMERQRLIESVPDSVTPLIIYEETTDIWINIHDIFHVFPQSHEEEIEFIFASECKTGFRHLYKITSILKESKYKRSSGGLPAPSDFKCPIKEEIAITSGEWEVLGRHGSNIQVDEVRRLVYFEGTKDSPLEHHLYVVSYVNPGEVTRLTDRGYSHSCCISQHCDFFISKYSNQKNPHCVSLYKLSSPEDDPTCKTKEFWATILDSAGPLPDYTPPEIFSFESTTGFTLYGMLYKPHDLQPGKKYPTVLFIYGGPQVQLVNNRFKGVKYFRLNTLASLGYVVVVIDNRGSCHRGLKFEGAFKYKMEALNATFYEMPHVLSAALGNDENPMFLLHSKAVTVFASVIGHAEEDMGIFSHSQFFDLMLYSHGQIEIDDQVEGLQYLASRYDFIDLDRVGIHGWSYGGYLSLMALMQRSDIFRVAIAGAPVTLWIFYDTGYTERYMGHPDQNEQGYYLGSVAMQAEKFPSEPNRLLLLHGFLDENVHFAHTSILLSFLVRAGKPYDLQVSYSTFSS

SEQ ID NO: 847828 - protein, 241 aa, Homo sapiens [sequence omitted]

SEQ ID NO: 847829 - protein, 882 aa, Homo sapiens; identical to SEQ ID NO: 847824

SEQ ID NO: 847830 - protein, 709 aa, Homo sapiens
MAAAMETEQLGVEIFETADCEENIESQDRPKLEPFYVERYSWSQLKKLLADTRKYHGYMMAKAPHDFMFVKRNDPDGPHSDRIYYLAMSGENRENTLFYSEIPKTINRAAVLMLSWKPLLDLFQATLDYGMYSREEELLRERKRIGTVGIASYDYHQGSGTFLFQAGSGIYHVKDGGPQGFTQQPLRPNLVETSCPNIRMDPKLCPADPDWIAFIHSNDIWISNIVTREERRLTYVHNELANMEEDARSAGVATFVLQEEFDRYSGYWWCPKAETTPSGGKILRILYEENDESEVEIIHVTSPMLETRRADSFRYPKTGTANPKVTFKMSEIMIDAEGRIQVDEVRRLVYFEGTKDSPLEHHLYVVSYVNPGEVTRLTDRGYSHSCCISQHCDFFISKYSNQKNPHCVSLYKLSSPEDDPTCKTKEFWATILDSAGPLPDYTPPEIFSFESTTGFTLYGMLYKPHDLQPGKKYPTVLFIYGGPQVQLVNNRFKGVKYFRLNTLASLGYVVVVIDNRGSCHRGLKFEGAFKYKMGQIEIDDQVEGLQYLASRYDFIDLDRVGIHGWSYGGYLSLMALMQRSDIFRVAIAGAPVTLWIFYDTGYTERYMGHPDQNEQGYYLGSVAMQAEKFPSEPNRLLLLHGFLDENVHFAHTSILLSFLVRAGKPYDLQIYPQERHSIRVPESGEHYELHLLHYLQENLGSRIAALKVI

SEQ ID NO: 847831 - protein, 898 aa, Homo sapiens; identical to SEQ ID NO: 847820

SEQ ID NO: 847832 - protein, 831 aa, Homo sapiens; identical to SEQ ID NO: 847826

SEQ ID NO: 847833 - protein, 613 aa, Homo sapiens
MAAAMETEQLGVEIFETADCEENIESQDRPKLEPFYVERYSWSQLKKLLADTRKYHGYMMAKAPHDFMFVKRNDPDGPHSDRIYYLAMSGENRENTLFYSEIPKTINRAAVLMLSWKPLLDLFQATLDYGMYSREEELLRERKRIGTVGIASYDYHQGSGTFLFQAGSGIYHVKDGGPQGFTQQPLRPNLVETSCPNIRMDPKLCPADPDWIAFIHSNDIWISNIVTREERRLTYVHNELANMEEDARSAGVATFVLQEEFDRYSGYWWCPKAETTPSGGKILRILYEENDESEVEIIHVTSPMLETRRADSFRYPKTGTANPKVTFKMSEIMIDAEGRIIDVIDKELIQPFEILFEGVEYIARAGWTPEGKYAWSILLDRSQTRLQIVLISPELFIPVEDDVMERQRLIESVPDSVTPLIIYEETTDIWINIHDIFHVFPQSHEEEIEFIFASECKTGFRHLYKITSILKESKYKRSSGGLPAPSDFKCPIKEEIAITSGEWEVLGRHGSNIQVDEVRRLVYFEGTKDSPLEHHLYVVSYVNPGEVTRLTDRGYSHSCCISQHCDFFISKYSNQKNPHCVSLYKLSSPEDDPTCKTKEFWATILDSAGAVGE

SEQ ID NO: 847834 - protein, 833 aa, Homo sapiens
MAAAMETEQLGVEIFETADCEENIESQDRPKLEPFYVERYSWSQLKKLLADTRKYHGYMMAKAPHDFMFVKRNDPDGPHSDRIYYLAMSGENRENTLFYSEIPKTINRAAVLMLSWKPLLDLFQATLDYGMYSREEELLRERKRIGTVGIASYDYHQGSGTFLFQAGSGIYHVKDGGPQGFTQQPLRPNLVETSCPNIRMDPKLCPADPDWIAFIHSNDIWISNIVTREERRLTYVHNELANMEEDARSAGVATFVLQEEFDRYSGYWWCPKAETTPSGGKILRILYEENDESEVEIIHVTSPMLETRRADSFRYPKTGTANPKVTFKMSEIMIDAEGRIIDVIDKELIQPFEILFEGVEYIARAGWTPEGKYAWSILLDRSQTRLQIVLISPELFIPVEDDVMERQRLIESVPDSVTPLIIYEETTDIWINIHDIFHVFPQSHEEEIEFIFASECKTGFRHLYKITSILKESKYKRSSGGLPAPSDFKCPIKEEIAITSGEWEVLGRHGSNIQVDEVRRLVYFEGTKDSPLEHHLYVVSYVNPGEVTRLTDRGYSHSCCISQHCDFFISKYSNQKNPHCVSLYKLSSPEDDPTCKTKEFWATILDSAGPLPDYTPPEIFSFESTTGFTLYGMLYKPHDLQPGKKYPTVLFIYGGPQGQIEIDDQVEGLQYLASRYDFIDLDRVGIHGWSYGGYLSLMALMQRSDIFRVAIAGAPVTLWIFYDTGYTERYMGHPDQNEQGYYLGSVAMQAEKFPSEPNRLLLLHGFLDENVHFAHTSILLSFLVRAGKPYDLQIYPQERHSIRVPESGEHYELHLLHYLQENLGSRIAALKVI

SEQ ID NO: 847835 - protein, 713 aa, Homo sapiens
MAAAMETEQLGVEIFETADCEENIESQDRPKLEPFYVERYSWSQLKKLLADTRKYHGYMMAKAPHDFMFVKRNDPDGPHSDRIYYLAMSGENRENTLFYSEIPKTINRAAVLMLSWKPLLDLFQATLDYGMYSREEELLRERKRIGTVGIASYDYHQGSGTFLFQAGSGIYHVKDGGPQGFTQQPLRPNLVETSCPNIRMDPKLCPADPDWIAFIHSNDIWISNIVTREERRLTYVHNELANMEEDARSAGVATFVLQEEFDRYSGYWWCPKAETTPSGGKILRILYEENDESEVEIIHVTSPMLETRRADSFRYPKTGTANPKVTFKMSEIMIDAEGRIIDVIDKELIQPFEILFEGVEYIARAGWTPEGKYAWSILLDRSQTRLQIVLISPELFIPVEDDVMERQRLIESVPDSVTPLIIYEETTDIWINIHDIFHVFPQSHEEEIEFIFASECKTGFRHLYKITSILKESKYKRSSGGLPAPSDFKCPIKEEIAITSGEWEVLGRHGSNIQVDEVRRLVYFEGTKDSPLEHHLYVVSYVNPGEVTRLTDRGYSHSCCISQHCDFFISKYSNQKNPHCVSLYKLSSPEDDPTCKTKEFWATILDSAGPLPDYTPPEIFSFESTTGFTLYGMLYKPHDLQPGKKYPTVLFIYGGPQVQLVNNRFKGVKYFRLNTLASLGYVVVVIDNRGSCHRGLKFEGAFKYKMEALNATF

SEQ ID NO: 847836 - protein, 624 aa, Homo sapiens
MNSGGGFGLGLGFGLTPTSVIQVTNLSSAVTSEQMRTLFSFLGEIEELRLYPPDNAPLAFSSKVCYVKFRDPSSVGVAQHLTNTVFIDRALIVVPCAEGKIPEESKALSLLAPAPTMTSLMPGAGLLPIPTPNPLTTLGVSLSSLGAIPAAALDPNIATLGEIPQPPLMGNVDPSKIDEIRRTVYVGNLNSQTTTADQLLEFFKQVGEVKFVRMAGDETQPTRFAFVEFADQNSVPRALAFNGVMFGDRPLKINHSNNAIVKPPEMTPQAAAKELEEVMKRVREAQSFISAAIEPESGKSNERKGGRSRSHTRSKSRSSSKSHSRRKRSQSKHRSRSHNRSRSRQKDRRRSKSPHKKRSKSRERRKSRSRSHSRDKRKDTREKIKEKERVKEKDREKEREREKEREKEKERGKNKDRDKEREKDREKDKEKDREREREKEHEKDRDKEKEKEQDKEKEREKDRSKEIDEKRKKDKKSRTPPRSYNASRRSRSSSRERRRRRSRSSSRSPRTSKTIKRKSSRSPSPRSRNKKDKKREKERDHISERRERERSTSMRKSSNDRDGKEKLEKNSTSLKEKEHNKEPDSSVSKEVDDKDAPRTEENKIQHNGNCQLNEENLSTKTEAV

SEQ ID NO: 847837 - protein, 508 aa, Homo sapiens
MTSLMPGAGLLPIPTPNPLTTLGVSLSSLGAIPAAALDPNIATLGEIPQPPLMGNVDPSKIDEIRRTVYVGNLNSQTTTADQLLEFFKQVGEVKFVRMAGDETQPTRFAFVEFADQNSVPRALAFNGVMFGDRPLKINHSNNAIVKPPEMTPQAAAKELEEVMKRVREAQSFISAAIEPESGKSNERKGGRSRSHTRSKSRSSSKSHSRRKRSQSKHRSRSHNRSRSRQKDRRRSKSPHKKRSKSRERRKSRSRSHSRDKRKDTREKIKEKERVKEKDREKEREREKEREKEKERGKNKDRDKEREKDREKDKEKDREREREKEHEKDRDKEKEKEQDKEKEREKDRSKEIDEKRKKDKKSRTPPRSYNASRRSRSSSRERRRRRSRSSSRSPRTSKTIKRKSSRSPSPRSRNKKDKKREKERDHISERRERERSTSMRKSSNDRDGKEKLEKNSTSLKEKEHNKEPDSSVSKEVDDKDAPRTEENKIQHNGNCQLNEENLSTKTEAV

SEQ ID NO: 847838 - protein, 508 aa, Homo sapiens; identical to SEQ ID NO: 847837

SEQ ID NO: 847839 - protein, 508 aa, Homo sapiens; identical to SEQ ID NO: 847837

SEQ ID NO: 847840 - protein, 624 aa, Homo sapiens; identical to SEQ ID NO: 847836

SEQ ID NO: 847841 - protein, 624 aa, Homo sapiens; identical to SEQ ID NO: 847836

SEQ ID NO: 847842 - protein, 624 aa, Homo sapiens; identical to SEQ ID NO: 847836

SEQ ID NO: 847843 - protein, 311 aa, Homo sapiens
MNSGGGFGLGLGFGLTPTSVIQVTNLSSAVTSEQMRTLFSFLGEIEELRLYPPDNAPLAFSSKVCYVKFRDPSSVGVAQHLTNTVFIDRALIVVPCAEGKIPEESKALSLLAPAPTMTSLMPGAGLLPIPTPNPLTTLGVSLSSLGAIPAAALDPNIATLGEIPQPPLMGNVDPSKIDEIRRTVYVGNLNSQTTTADQLLEFFKQVGEVKFVRMAGDETQPTRFAFVEFADQNSVPRALAFNGVMFGDRPLKINHSNNAIVKPPEMTPQAAAKELEEVMKRVREAQSFISAAIEPGWLHSTSLCNDFLGCF

SEQ ID NO: 847844 - protein, 113 aa, Homo sapiens
MNSGGGFGLGLGFGLTPTSVIQVTNLSSAVTSEQMRTLFSFLGEIEELRLYPPDNAPLAFSSKVCYVKFRDPSSVGVAQHLTNTVFIDRALIVVPCAEDDYDWPRQTCYTCLS

SEQ ID NO: 847845 - protein, 87 aa, Homo sapiens
MNSGGGFGLGLGFGLTPTSVIQVTNLSSAVTSEQMRTLFSFLGEIEELRLYPPDQRTLFIFPTNIVYDKLSSMPFNAGVVVAPISNI

SEQ ID NO: 847846 - protein, 108 aa, Homo sapiens
MNSGGGFGLGLGFGLTPTSVIQVTNLSSAVTSEQMRTLFSFLGEIEELRLYPPDNAPLAFSSKVCYVKFRDPSSVGVAQHLTNTVFIDRALIVVPCAEGWYLAFFPLI

SEQ ID NO: 847847 - protein, 624 aa, Homo sapiens; identical to SEQ ID NO: 847836

SEQ ID NO: 847848 - protein, 508 aa, Homo sapiens; identical to SEQ ID NO: 847837

SEQ ID NO: 847849 - protein, 311 aa, Homo sapiens; identical to SEQ ID NO: 847843

SEQ ID NO: 847850 - protein, 359 aa, Homo sapiens
MTPQAAAKELEEVMKRVREAQSFISAAIEPESGKSNERKGGRSRSHTRSKSRSSSKSHSRRKRSQSKHRSRSHNRSRSRQKDRRRSKSPHKKRSKSRERRKSRSRSHSRDKRKDTREKIKEKERVKEKDREKEREREKEREKEKERGKNKDRDKEREKDREKDKEKDREREREKEHEKDRDKEKEKEQDKEKEREKDRSKEIDEKRKKDKKSRTPPRSYNASRRSRSSSRERRRRRSRSSSRSPRTSKTIKRKSSRSPSPRSRNKKDKKREKERDHISERRERERSTSMRKSSNDRDGKEKLEKNSTSLKEKEHNKEPDSSVSKEVDDKDAPRTEENKIQHNGNCQLNEENLSTKTEAV

SEQ ID NO: 847851 - protein, 152 aa, Homo sapiens
MEAAEQARNALQVDLAEAEKRREALWEKNTHLEAQLQKAEEAGAELQEISGTSKNRNKKDKKREKERDHISERRERERSTSMRKSSNDRDGKEKLEKNSTSLKEKEHNKEPDSSVSKEVDDKDAPRTEENKIQHNGNCQLNEENLSTKTEAV

SEQ ID NO: 847852 - protein, 311 aa, Homo sapiens; identical to SEQ ID NO: 847843

SEQ ID NO: 847853 - protein, 128 aa, Homo sapiens
MNSGGGFGLGLGFGLTPTSVIQVTNLSSAVTSEQMRTLFSFLGEIEELRLYPPEVSAGARLGEGRGRHRDLGSRGVEESADAGARCMSRDRAGLPWCPYLIRAPGFRRPALLSRIWGVNYCTEPLPRI

SEQ ID NO: 847854 - protein, 615 aa, Homo sapiens
QSRAGPYRQAIALMAALAAAAKKVWSARRLLVLLFTPLALLPVVFALPPKEGRCLFVILLMAVYWCTEALPLSVTALLPIVLFPFMGILPSNKVCPQYFLDTNFLFLSGLIMASAIEEWNLHRRIALKILMLVGVQPARLILGMMVTTSFLSMWLSNTASTAMMLPIANAILKSLFGQKEVRKDPSQESEENTAAVRRNGLHTVPTEMQFLASTEAKDHPGETEVPLDLPADSRKEDEYRRNIWKGFLISIPYSASIGGTATLTGTAPNLILLGQLKSFFPQCDVVNFGSWFIFAFPLMLLFLLAGWLWISFLYGGLSFRGWRKNKSEIRTNAEDRARAVIREEYQNLGPIKFAEQAVFILFCMFAILLFTRDPKFIPGWASLFNPGFLSDAVTGVAIVTILFFFPSQRPSLKWWFDFKAPNTETEPLLTWKKAQETVPWNIILLLGGGFAMAKGCEESGLSVWIGGQLHPLENVPPALAVLLITVVIAFFTEFASNTATIIIFLPVLAELAIRLRVHPLYLMIPGTVGCSFAFMLPVSTPPNSIAFASGHLLVKDMVRTGLLMNLMGVLLLSLAMNTWAQTIFQLGTFPDWADMYSVNVTALPPTLANDTFRTL

SEQ ID NO: 847855 - protein, 555 aa, Homo sapiens
MAVYWCTEALPLSVTALLPIVLFPFMGILPSNKVCPQYFLDTNFLFLSGLIMASAIEEWNLHRRIALKILMLVGVQPARLILGMMVTTSFLSMWLSNTASTAMMLPIANAILKSLFGQKEVRKDPSQESEENTAAVRRNGLHTVPTEMQFLASTEAKDHPGETEVPLDLPADSRKEDEYRRNIWKGFLISIPYSASIGGTATLTGTAPNLILLGQLKSFFPQCDVVNFGSWFIFAFPLMLLFLLAGWLWISFLYGGLSFRGWRKNKSEIRTNAEDRARAVIREEYQNLGPIKFAEQAVFILFCMFAILLFTRDPKFIPGWASLFNPGFLSDAVTGVAIVTILFFFPSQRPSLKWWFDFKAPNTETEPLLTWKKAQETVPWNIILLLGGGFAMAKGCEESGLSVWIGGQLHPLENVPPALAVLLITVVIAFFTEFASNTATIIIFLPVLAELAIRLRVHPLYLMIPGTVGCSFAFMLPVSTPPNSIAFASGHLLVKDMVRTGLLMNLMGVLLLSLAMNTWAQTIFQLGTFPDWADMYSVNVTALPPTLANDTFRTL

SEQ ID NO: 847856 - protein, 101 aa, Homo sapiens
FVTVRTRIAVLSLRPPVWWNSLPVSTPPNSIAFASGHLLVKDMVRTGLLMNLMGVLLLSLAMNTWAQTIFQLGTFPDWADMYSVNVTALPPTLANDTFRTL

SEQ ID NO: 847857 - protein, 223 aa, Homo sapiens
MNPLRRCPDGPLLGRVSESRVVLEFSRLPIVLFPFMGILPSNKVCPQYFLDTNFLFLSGLIMASAIEEWNLHRRIALKILMLVGVQPARLILGMMVTTSFLSMWLSNTASTAMMLPIANAIRLRVHPLYLMIPGTVGCSFAFMLPVSTPPNSIAFASGHLLVKDMVRTGLLMNLMGVLLLSLAMNTWAQTIFQLGTFPDWADMYSVNVTALPPTLANDTFRTL

SEQ ID NO: 847858 - protein, 615 aa, Homo sapiens; identical to SEQ ID NO: 847854

SEQ ID NO: 847859 - protein, 185 aa, Homo sapiens
MAVYWCTEALPLSVTALLPIVLFPFMGILPSNKVCPQYFLDTNFLFLSGLIMASAIEEWNLHRRIALKILMLVGVQPARLILGMMVTTSFLSMWLSNTASTAMMLPIANAILKSLFGQKEVRKDPSQESEENTGIEPNTFLSEERLKLQAPLVIRLGQITESGQWNMSGNDVCNFRVLSFLPGGM

SEQ ID NO: 847860 - protein, 476 aa, Homo sapiens
QSRAGPYRQAIALMAALAAAAKKVWSARRLLVLLFTPLALLPVVFALPPKEGRCLFVILLMAVYWCTEALPLSVTALLPIVLFPFMGILPSNKVCPQYFLDTNFLFLSGLIMASAIEEWNLHRRIALKILMLVGVQPARLILGMMVTTSFLSMWLSNTASTAMMLPIANAILKSLFGQKEVRKDPSQESEENTAAVRRNGLHTVPTEMQFLASTEAKDHPGETEVPLDLPADSRKEDEYRRNIWKGFLISIPYSASIGGTATLTGTAPNLILLGQLKSFFPQCDVVNFGSWFIFAFPLMLLFLLAGWLWISFLYGGLSFRGWRKNKSEIRTNAEDRARAVIREEYQNLGPIKFAEQAVFILFCMFAILLFTRDPKFIPGWASLFNPGFLSDAVTGVAIVTILFFFPSQRPSLKWWFDFKGKVVKAGVSVGSVRTAAWSVVIKGLEPPTALTTWSFLLLLSLSEPLPCLGTEGCPRW

SEQ ID NO: 847861 - protein, 545 aa, Homo sapiens
QSRAGPYRQAIALMAALAAAAKKVWSARRLLVLLFTPLALLPVVFALPPKEGRCLFVILLMAVYWCTEALPLSVTALLPIVLFPFMGILPSNKVCPQYFLDTNFLFLSGLIMASAIEEWNLHRRIALKILMLVGVQPARLILGMMVTTSFLSMWLSNTASTAMMLPIANAILKSLFGQKEVRKDPSQESEENTAAVRRNGLHTVPTEMQFLASTEAKDHPGETEVPLDLPADSRKEDEYRRNIWKGFLISIPYSASIGGTATLTGTAPNLILLGQLKSFFPQCDVVNFGSWFIFAFPLMLLFLLAGWLWISFLYGGLSFRGWRKNKSEIRTNAEDRARAVIREEYQNLGPIKFAEQAVFILFCMFAILLFTRDPKFIPGWASLFNPGFLSDAVTGVAIVTILFFFPSQRPSLKWWFDFKAPNTETEPLLTWKKAQETVPWNIILLLGGGFAMAKGCEESGLSVWIGGQLHPLENVPPALAVLLITVVIAFFTEFASNTATIIIFLPVLAELAIRLRVHPLYLMIPGTVGCSFAFMLPVSTPPNSK

SEQ ID NO: 847862 - protein, 185 aa, Homo sapiens; identical to SEQ ID NO: 847859

SEQ ID NO: 847863 - protein, 615 aa, Homo sapiens; identical to SEQ ID NO: 847854

SEQ ID NO: 847864 - protein, 413 aa, Homo sapiens
MGLHSSGKKWISEIKDHPGETEVPLDLPADSRKEDEYRRNIWKGFLISIPYSASIGGTATLTGTAPNLILLGQLKSFFPQCDVVNFGSWFIFAFPLMLLFLLAGWLWISFLYGGLSFRGWRKNKSEIRTNAEDRARAVIREEYQNLGPIKFAEQAVFILFCMFAILLFTRDPKFIPGWASLFNPGFLSDAVTGVAIVTILFFFPSQRPSLKWWFDFKAPNTETEPLLTWKKAQETVPWNIILLLGGGFAMAKGCEESGLSVWIGGQLHPLENVPPALAVLLITVVIAFFTEFASNTATIIIFLPVLAELAIRLRVHPLYLMIPGTVGCSFAFMLPVSTPPNSIAFASGHLLVKDMVRTGLLMNLMGVLLLSLAMNTWAQTIFQLGTFPDWADMYSVNVTALPPTLANDTFRTL

SEQ ID NO: 847865 - protein, 321 aa, Homo sapiens
ICNRSYENRCPLLAAASVVEFAQPVLGAQPHSRAQPLTSSCLASSRGWLWISFLYGGLSFRGWRKNKSEIRTNAEDRARAVIREEYQNLGPIKFLSDAVTGVAIVTILFFFPSQRPSLKWWFDFKAPNTETEPLLTWKKAQETVPWNIILLLGGGFAMAKGCEESGLSVWIGGQLHPLENVPPALAVLLITVVIAFFTEFASNTATIIIFLPVLAELAIRLRVHPLYLMIPGTVGCSFAFMLPVSTPPNSIAFASGHLLVKDMVRTGLLMNLMGVLLLSLAMNTWAQTIFQLGTFPDWADMYSVNVTALPPTLANDTFRTL

SEQ ID NO: 847866 - protein, 615 aa, Homo sapiens; identical to SEQ ID NO: 847854

SEQ ID NO: 847867 - protein, 401 aa, Homo sapiens
QSRAGPYRQAIALMAALAAAAKKVWSARRLLVLLFTPLALLPVVFALPPKEGRCLFVILLMAVYWCTEALPLSVTALLPIVLFPFMGILPSNKVCPQYFLDTNFLFLSGLIMASAIEEWNLHRRIALKILMLVGVQPARLILGMMVTTSFLSMWLSNTASTAMMLPIANAILKSLFGQKEVRKDPSQESEENTAAVRRNGLHTVPTEMQFLASTEAKDHPGETEVPLDLPADSRKEDEYRRNIWKGFLISIPYSASIGGTATLTGTAPNLILLGQLKSFFPQCDVVNFGSWFIFAFPLMLLFLLAGWLWISFLYGGLSFRGWRKNKSEIRTNAEDRARAVIREEYQNLGPIKFAEQAVFILFCMFAILLFTRDPKFIPGWASLFNPGCKMGIISISTIQKM

SEQ ID NO: 847868 - protein, 352 aa, Homo sapiens
QSRAGPYRQAIALMAALAAAAKKVWSARRLLVLLFTPLALLPVVFALPPKEGRCLFVILLMAVYWCTEALPLSVTALLPIVLFPFMGILPSNKVCPQYFLDTNFLFLSGLIMASAIEEWNLHRRIALKILMLVGVQPARLILGMMVTTSFLSMWLSNTASTAMMLPIANAILKSLFGQKEVRKDPSQESEENTAAVRRNGLHTVPTEMQFLASTEAKDHPGETEVPLDLPADSRKEDEYRRNIWKGFLISIPYSASIGGTATLTGTAPNLILLGQLKSFFPQCDVVNFGSWFIFAFPLMLLFLLAGWLWISFLYGGLSFRGWRKNKSEIRTNAEDRARARREQRFSYERLRF

SEQ ID NO: 847869 - protein, 1455 aa, Homo sapiens
MGGACSSFTTSSSPTIYSTSVTDSKAMQVESCSSAVGVSNRGVSEKQLTSNTVQQHPSTPKRHTVLYISPPPEDLLDNSRMSCQDEGCGLESEQSCSMWMEDSPSNFSNMSTSSYNDNTEVPRKSRKRNPKQRPGVKRRDCEESNMDIFDADSAKAPHYVLSQLTTDNKGNSKAGNGTLENQKGTGVKKSPMLCGQYPVKSEGKELKIVVQPETQHRARYLTEGSRGSVKDRTQQGFPTVKLEGHNEPVVLQVFVGNDSGRVKPHGFYQACRVTGRNTTPCKEVDIEGTTVIEVGLDPSNNMTLAVDCVGILKLRNADVEARIGIAGSKKKSTRARLVFRVNIMRKDGSTLTLQTPSSPILCTQPAGVPEILKKSLHSCSVKGEEEVFLIGKNFLKGTKVIFQENVSDENSWKSEAEIDMELFHQNHLIVKVPPYHDQHITLPVSVGIYVVTNAGRSHDVQPFTYTPDPAAAGALNVNVKKEISSPARPCSFEEAMKAMKTTGCNLDKVNIIPNALMTPLIPSSMIKSEDVTPMEVTAEKRSSTIFKTTKSVGSTQQTLENISNIAGNGSFSSPSSSHLPSENEKQQQIHAKAYNPETLTTIQTQDISQPGTFPAVSASSQLPNSDALLQQATQFQTRETQSREILQSDGTVVNLSQLTEASQQQQQSPLQEQAQTLQQQISSNIFPSPNSVSQLQNTIQQLQAGSFTGSTASGSSGSVDLVQQVLEAQQQLSSVLFSAPDGNENVQEQLSADIFQQVSQIQSGVSPGMFSSTEPTVHTRPDNLLPGRAESVHPQSENTLSNQQQQQQQQQQVMESSAAMVMEMQQSICQAAAQIQSELFPSTASANGNLQQSPVYQQTSHMMSALSTNEDMQMQCELFSSPPAVSGNETSTTTTQQVATPGTTMFQTSSSGDGEETGTQAKQIQNSVFQTMVQMQHSGDNQPQVNLFSSTKSMMSVQNSGTQQQGNGLFQQGNEMMSLQSGNFLQQSSHSQAQLFHPQNPIADAQNLSQETQGSLFHSPNPIVHSQTSTTSSEQMQPPMFHSQSTIAVLQGSSVPQDQQSTNIFLSQSPMNNLQTNTVAQEAFFAAPNSISPLQSTSNSEQQAAFQQQAPISHIQTPMLSQEQAQPPQQGLFQPQVALGSLPPNPMPQSQQGTMFQSQHSIVAMQSNSPSQEQQQQQQQQQQQQQQQQQSILFSNQNTMATMASPKQPPPNMIFNPNQNPMANQEQQNQSIFHQQSNMAPMNQEQQPMQFQSQSTVSSLQNPGPTQSESSQTPLFHSSPQIQLVQGSPSSQEQQVTLFLSPASMSALQTSINQQDMQQSPLYSPQNNMPGIQGATSSPQPQATLFHNTAGGTMNQLQNSPGSSQQTSGMFLFGIQNNCSQLLTSGPATLPDQLMAISQPGQPQNEGQPPVTTLLSQQMPENSPLASSINTNQNIEKIDLLVSLQNQGNNLTGSF

SEQ ID NO: 847870 - protein, 1484 aa, Homo sapiens
MSQTSGGEAGSPPPAVVAADASSAPSSSSMGGACSSFTTSSSPTIYSTSVTDSKAMQVESCSSAVGVSNRGVSEKQLTSNTVQQHPSTPKRHTVLYISPPPEDLLDNSRMSCQDEGCGLESEQSCSMWMEDSPSNFSNMSTSSYNDNTEVPRKSRKRNPKQRPGVKRRDCEESNMDIFDADSAKAPHYVLSQLTTDNKGNSKAGNGTLENQKGTGVKKSPMLCGQYPVKSEGKELKIVVQPETQHRARYLTEGSRGSVKDRTQQGFPTVKLEGHNEPVVLQVFVGNDSGRVKPHGFYQACRVTGRNTTPCKEVDIEGTTVIEVGLDPSNNMTLAVDCVGILKLRNADVEARIGIAGSKKKSTRARLVFRVNIMRKDGSTLTLQTPSSPILCTQPAGVPEILKKSLHSCSVKGEEEVFLIGKNFLKGTKVIFQENVSDENSWKSEAEIDMELFHQNHLIVKVPPYHDQHITLPVSVGIYVVTNAGRSHDVQPFTYTPDPAAAGALNVNVKKEISSPARPCSFEEAMKAMKTTGCNLDKVNIIPNALMTPLIPSSMIKSEDVTPMEVTAEKRSSTIFKTTKSVGSTQQTLENISNIAGNGSFSSPSSSHLPSENEKQQQIHAKAYNPETLTTIQTQDISQPGTFPAVSASSQLPNSDALLQQATQFQTRETQSREILQSDGTVVNLSQLTEASQQQQQSPLQEQAQTLQQQISSNIFPSPNSVSQLQNTIQQLQAGSFTGSTASGSSGSVDLVQQVLEAQQQLSSVLFSAPDGNENVQEQLSADIFQQVSQIQSGVSPGMFSSTEPTVHTRPDNLLPGRAESVHPQSENTLSNQQQQQQQQQQVMESSAAMVMEMQQSICQAAAQIQSELFPSTASANGNLQQSPVYQQTSHMMSALSTNEDMQMQCELFSSPPAVSGNETSTTTTQQVATPGTTMFQTSSSGDGEETGTQAKQIQNSVFQTMVQMQHSGDNQPQVNLFSSTKSMMSVQNSGTQQQGNGLFQQGNEMMSLQSGNFLQQSSHSQAQLFHPQNPIADAQNLSQETQGSLFHSPNPIVHSQTSTTSSEQMQPPMFHSQSTIAVLQGSSVPQDQQSTNIFLSQSPMNNLQTNTVAQEAFFAAPNSISPLQSTSNSEQQAAFQQQAPISHIQTPMLSQEQAQPPQQGLFQPQVALGSLPPNPMPQSQQGTMFQSQHSIVAMQSNSPSQEQQQQQQQQQQQQQQQQQSILFSNQNTMATMASPKQPPPNMIFNPNQNPMANQEQQNQSIFHQQSNMAPMNQEQQPMQFQSQSTVSSLQNPGPTQSESSQTPLFHSSPQIQLVQGSPSSQEQQVTLFLSPASMSALQTSINQQDMQQSPLYSPQNNMPGIQGATSSPQPQATLFHNTAGGTMNQLQNSPGSSQQTSGMFLFGIQNNCSQLLTSGPATLPDQLMAISQPGQPQNEGQPPVTTLLSQQMPENSPLASSINTNQNIEKIDLLVSLQNQGNNLTGSF

SEQ ID NO: 847871 - protein, 1455 aa, Homo sapiens; identical to SEQ ID NO: 847869

SEQ ID NO: 847872 - protein, 1455 aa, Homo sapiens
MGGACSSFTTSSSPTIYSTSVTDSKAMQVESCSSAVGVSNRGVSEKQLTSNTVQQHPSTPKRHTVLYISPPPEDLLDNSRMSCQDEGCGLESEQSCSMWMEDSPSNFSNMSTSSYNDNTEVPRKSRKRNPKQRPGVKRRDCEESNMDIFDADSAKAPHYVLSQLTTDNKGNSKAGNGTLENQKGTGVKKSPMLCGQYPVKSEGKELKIVVQPETQHRARYLTEGSRGSVKDRTQQGFPTVKLEGHNEPVVLQVFVGNDSGRVKPHGFYQACRVTGRNTTPCKEVDIEGTTVIEVGLDPSNNMTLAVDCVGILKLRNADVEARIGIAGSKKKSTRARLVFRVNIMRKDGSTLTLQTPSSPILCTQPAGVPEILKKSLHSCSVKGEEEVFLIGKNFLKGTKVIFQENVSDENSWKSEAEIDMELFHQNHLIVKVPPYHDQHITLPVSVGIYVVTNAGRSHDVQPFTYTPDPAAAGALNVNVKKEISSPARPCSFEEAMKAMKTTGCNLDKVNIIPNALMTPLIPSSMIKSEDVTPMEVTAEKRSSTIFKTTKSVGSTQQTLENISNIAGNGSFSSPSSSHLPSENEKQQQIQPKAYNPETLTTIQTQDISQPGTFPAVSASSQLPNSDALLQQATQFQTRETQSREILQSDGTVVNLSQLTEASQQQQQSPLQEQAQTLQQQISSNIFPSPNSVSQLQNTIQQLQAGSFTGSTASGSSGSVDLVQQVLEAQQQLSSVLFSAPDGNENVQEQLSADIFQQVSQIQSGVSPGMFSSTEPTVHTRPDNLLPGRAESVHPQSENTLSNQQQQQQQQQQVMESSAAMVMEMQQSICQAAAQIQSELFPSTASANGNLQQSPVYQQTSHMMSALSTNEDMQMQCELFSSPPAVSGNETSTTTTQQVATPGTTMFQTSSSGDGEETGTQAKQIQNSVFQTMVQMQHSGDNQPQVNLFSSTKSMMSVQNSGTQQQGNGLFQQGNEMMSLQSGNFLQQSSHSQAQLFHPQNPIADAQNLSQETQGSLFHSPNPIVHSQTSTTSSEQMQPPMFHSQSTIAVLQGSSVPQDQQSTNIFLSQSPMNNLQTNTVAQEAFFAAPNSISPLQSTSNSEQQAAFQQQAPISHIQTPMLSQEQAQPPQQGLFQPQVALGSLPPNPMPQSQQGTMFQSQHSIVAMQSNSPSQEQQQQQQQQQQQQQQQQQSILFSNQNTMATMASPKQPPPNMIFNPNQNPMANQEQQNQSIFHQQSNMAPMNQEQQPMQFQSQSTVSSLQNPGPTQSESSQTPLFHSSPQIQLVQGSPSSQEQQVTLFLSPASMSALQTSINQQDMQQSPLYSPQNNMPGIQGATSSPQPQATLFHNTAGGTMNQLQNSPGSSQQTSGMFLFGIQNNCSQLLTSGPATLPDQLMAISQPGQPQNEGQPPVTTLLSQQMPENSPLASSINTNQNIEKIDLLVSLQNQGNNLTGSF

SEQ ID NO: 847873 - protein, 594 aa, Homo sapiens
MPSDFISLLSADLDLESPKSLYSRDSLKLHPSQNFHRAGLLEESVYDLLPKELQLPPSRETSVASMSQTSGGEAGSPPPAVVAADASSAPSSSSMGGACSSFTTSSSPTIYSTSVTDSKAMQVESCSSAVGVSNRGVSEKQLTSNTVQQHPSTPKRHTVLYISPPPEDLLDNSRMSCQDEGCGLESEQSCSMWMEDSPSNFSNMSTSSYNDNTEVPRKSRKRNPKQRPGVKRRDCEESNMDIFDADSAKAPHYVLSQLTTDNKGNSKAGNGTLENQKGTGVKKSPMLCGQYPVKSEGKELKIVVQPETQHRARYLTEGSRGSVKDRTQQGFPTVKLEGHNEPVVLQVFVGNDSGRVKPHGFYQACRVTGRNTTPCKEVDIEGTTVIEVGLDPSNNMTLAVDCVGILKLRNADVEARIGIAGSKKKSTRARLVFRVNIMRKDGSTLTLQTPSSPILCTQPAGVPEILKKSLHSCSVKGEEEVFLIGKNFLKGTKVIFQENVSDENSWKSEAEIDMELFHQNHLIVKVPPYHDQHITLPVSVGIYVVTNAGRSHDVQPFTYTPDPAAAGALNVNVKKEISSPARPCSFEEAMKGTK

SEQ ID NO: 847874 - protein, 117 aa, Homo sapiens
MGLLASIGENMYSVFTLELYTADASSAPSSSSMGGACSSFTTSSSPTIYSTSVTDSKAMQVESCSSAVGVSNRGVSEKQLTSNTVQQHPSTPKRHTVLYISPPPEDLLDNSRMSCQD

SEQ ID NO: 847875 - protein, 1419 aa, Homo sapiens
MPSDFISLLSADLDLESPKSLYSRDSLKLHPSQNFHRAGLLEESVYDLLPKELQLPPSRETSVASMSQTSGGEAGSPPPAVVAADASSAPSSSSMGGACSSFTTSSSPTIYSTSVTDSKAMQVESCSSAVGVSNRGVSEKQLTSNTVQQHPSTPKRHTVLYISPPPEDLLDNSRMSCQDEGCGLESEQSCSMWMEDSPSNFSNMSTSSYNDNTEVPRKSRKRNPKQRPGVKRRDCEESNMDIFDADSAKAPHYVLSQLTTDNKGNSKAGNGTLENQKGTGVKKSPMLCGQYPVKSEGKELKIVVQPETQHRARYLTEGSRGSVKDRTQQGFPTVKLEGHNEPVVLQVFVGNDSGRVKPHGFYQACRVTGRNTTPCKEVDIEGTTVIEVGLDPSNNMTLAVDCVGILKLRNADVEARIGIAGSKKKSTRARLVFRVNIMRKDGSTLTLQTPSSPILCTQPAGVPEILKKSLHSCSVKGEEEVFLIGKNFLKGTKVIFQENVSDENSWKSEAEIDMELFHQNHLIVKVPPYHDQHITLPVSVGIYVVTNAGRSHDVQPFTYTPDPAAAGALNVNVKKEISSPARPCSFEEAMKAMKTTGCNLDKVNIIPNALMTPLIPSSMIKSEDVTPMEVTAEKRSSTIFKTTKSVGSTQQTLENISNIAGNGSFSSPSSSHLPSENEKQQQIQPKAYNPETLTTIQTQDISQPGTFPAVSASSQLPNSDALLQQATQFQTRETQSREILQSDGTVVNLSQLTEASQQQQQSPLQEQAQTLQQQISSNIFPSPNSVSQLQNTIQQLQAGSFTGSTASGSSGSVDLVQQVLEAQQQLSSVLFSAPDGNENVQEQLSADIFQQVSQIQSGVSPGMFSSTEPTVHTRPDNLLPGRAESVHPQSENTLSNQQQQQQQQQQVMESSAAMVMEMQQSICQAAAQIQSELFPSTASANGNLQQSPVYQQTSHMMSALSTNEDMQMQCELFSSPPAVSGNETSTTTTQQVATPGTTMFQTSSSGDGEETGTQAKQIQNSVFQTMVQMQHSGDNQPQVNLFSSTKSMMSVQNSGTQQQGNGLFQQGNEMMSLQSGNFLQQSSHSQAQLFHPQNPIADAQNLSQETQGSLFHSPNPIVHSQTSTTSSEQMQPPMFHSQSTIAVLQGSSVPQDQQSTNIFLSQSPMNNLQTNTVAQEAFFAAPNSISPLQSTSNSEQQAAFQQQAPISHIQTPMLSQEQAQPPQQGLFQPQVALGSLPPNPMPQSQQGTMFQSQHSIVAMQSNSPSQEQQQQQQQQQQQQQQQQQSILFSNQNTMATMASPKQPPPNMIFNPNQNPMANQEQQNQSIFHQQSNMAPMNQEQQPMQFQSQSTVSSLQNPGPTQSESSQTPLFHSSPQIQLVQGSPSSQEQQVTLFLSPASMSALQTGRAEGDPGYDDDLQH

SEQ ID NO: 847876 - protein, 309 aa, Homo sapiens
MGLTVPLYTLLCKPQRVGGCPGDDTPVPCETPGQPGPSAAGLWGPSPARADLSLLSALSPALSSARGRPPQARRHQVVANTFSLPGAPARGHLPASPPPTLAAGPFPGSGTAAARAAPAGSEAHVAAVPWRASPPSGGRHGSSALPGTPLRACAVPHGGGAQIPVSGGGGGGDRQFSLRRNTKRTLWLSPFPFPVLNPSPGHRESVPVEFPLHLAIVSSVLGPVEVTTLEEEAAAAALASPPPVRCPRSRRGGAAATAAPPLPLPSGRAGSSCDALGLHLIAQRGPRPGIAQVPLLARFSEVTPITEFS

SEQ ID NO: 847877 - protein, 1531 aa, Homo sapiens
MPSDFISLLSADLDLESPKSLYSRESVYDLLPKELQLPPSRETSVASMSQTSGGEAGSPPPAVVAADASSAPSSSSMGGACSSFTTSSSPTIYSTSVTDSKAMQVESCSSAVGVSNRGVSEKQLTSNTVQQHPSTPKRHTVLYISPPPEDLLDNSRMSCQDEGCGLESEQSCSMWMEDSPSNFSNMSTSSYNDNTEVPRKSRKRNPKQRPGVKRRDCEESNMDIFDADSAKAPHYVLSQLTTDNKGNSKAGNGTLENQKGTGVKKSPMLCGQYPVKSEGKELKIVVQPETQHRARYLTEGSRGSVKDRTQQGFPTVKLEGHNEPVVLQVFVGNDSGRVKPHGFYQACRVTGRNTTPCKEVDIEGTTVIEVGLDPSNNMTLAVDCVGILKLRNADVEARIGIAGSKKKSTRARLVFRVNIMRKDGSTLTLQTPSSPILCTQPAGVPEILKKSLHSCSVKGEEEVFLIGKNFLKGTKVIFQENVSDENSWKSEAEIDMELFHQNHLIVKVPPYHDQHITLPVSVGIYVVTNAGRSHDVQPFTYTPDPAAAGALNVNVKKEISSPARPCSFEEAMKAMKTTGCNLDKVNIIPNALMTPLIPSSMIKSEDVTPMEVTAEKRSSTIFKTTKSVGSTQQTLENISNIAGNGSFSSPSSSHLPSENEKQQQIQPKAYNPETLTTIQTQDISQPGTFPAVSASSQLPNSDALLQQATQFQTRETQSREILQSDGTVVNLSQLTEASQQQQQSPLQEQAQTLQQQISSNIFPSPNSVSQLQNTIQQLQAGSFTGSTASGSSGSVDLVQQVLEAQQQLSSVLFSAPDGNENVQEQLSADIFQQVSQIQSGVSPGMFSSTEPTVHTRPDNLLPGRAESVHPQSENTLSNQQQQQQQQQQVMESSAAMVMEMQQSICQAAAQIQSELFPSTASANGNLQQSPVYQQTSHMMSALSTNEDMQMQCELFSSPPAVSGNETSTTTTQQVATPGTTMFQTSSSGDGEETGTQAKQIQNSVFQTMVQMQHSGDNQPQVNLFSSTKSMMSVQNSGTQQQGNGLFQQGNEMMSLQSGNFLQQSSHSQAQLFHPQNPIADAQNLSQETQGSLFHSPNPIVHSQTSTTSSEQMQPPMFHSQSTIAVLQGSSVPQDQQSTNIFLSQSPMNNLQTNTVAQEAFFAAPNSISPLQSTSNSEQQAAFQQQAPISHIQTPMLSQEQAQPPQQGLFQPQVALGSLPPNPMPQSQQGTMFQSQHSIVAMQSNSPSQEQQQQQQQQQQQQQQQQQSILFSNQNTMATMASPKQPPPNMIFNPNQNPMANQEQQNQSIFHQQSNMAPMNQEQQPMQFQSQSTVSSLQNPGPTQSESSQTPLFHSSPQIQLVQGSPSSQEQQVTLFLSPASMSALQTSINQQDMQQSPLYSPQNNMPGIQGATSSPQPQATLFHNTAGGTMNQLQNSPGSSQQTSGMFLFGIQNNCSQLLTSGPATLPDQLMAISQPGQPQNEGQPPVTTLLSQQMPENSPLASSINTNQNIEKIDLLVSLQNQGNNLTGSF

SEQ ID NO: 847878 - protein, 1455 aa, Homo sapiens; identical to SEQ ID NO: 847869

SEQ ID NO: 847879 - protein, 451 aa, Homo sapiens
MEMQDLVIELKPEPDAQPQQAPRLGPFSPKEVSSAGRFGGEPHHSPGPMPAGAALLALGPRNPWTLWTPLTPNYPDRQPWTDKHPDLLTCGRCLQTFPLEAITAFMDHKKLGCQLFRGPSRGQGSEREELKALSCLRCGKQFTVAWKLLRHAQWDHGLSIYQTESEAPEAPLLGLAEVAAAVSAVVGPAAEAKSPRASGSGLTRRSPTCPVCKKTLSSFSNLKVHMRSHTGERPYACDQCPYACAQSSKLNRHKKTHRQVPPQSPLMADTSQEQASAAPPEPAVHAAAPTSTLPCSGGEGAGAAATAGVQEPGAPGSGAQAGPGGDTWGAITTEQRTDPANSQKASPKKMPKSGGKSRGPGGSCEFCGKHFTNSSNLTVHRRSHTGERPYTCEFCNYACAQSSKLNRHRRMHGMTPGSTRFECPHCHVPFGLRATLDKHLRQKHPEAAGEA

SEQ ID NO: 847880 - protein, 546 aa, Homo sapiens
MSRRKAGSAPRRVEPAPAANPDDEMEMQDLVIELKPEPDAQPQQAPRLGPFSPKEVSSAGRFGGEPHHSPGPMPAGAALLALGPRNPWTLWTPLTPNYPGEHPGPWAQPPLPLTLGWDPSLWAWAPRPALSPSPRPAPQAPFCPSVSPLLQHPQPPSWPHPTLTTRFLPADRQPWTDKHPDLLTCGRCLQTFPLEAITAFMDHKKLGCQLFRGPSRGQGSEREELKALSCLRCGKQFTVAWKLLRHAQWDHGLSIYQTESEAPEAPLLGLAEVAAAVSAVVGPAAEAKSPRASGSGLTRRSPTCPVCKKTLSSFSNLKVHMRSHTGERPYACDQCPYACAQSSKLNRHKKTHRQVPPQSPLMADTSQEQASAAPPEPAVHAAAPTSTLPCSGGEGAGAAATAGVQEPGAPGSGAQAGPGGDTWGAITTEQRTDPANSQKASPKKMPKSGGKSRGPGGSCEFCGKHFTNSSNLTVHRRSHTGERPYTCEFCNYACAQSSKLNRHRRMHGMTPGSTRFECPHCHVPFGLRATLDKHLRQKHPEAAGEA

SEQ ID NO: 847881 - protein, 96 aa, Homo sapiens
KVGGHTHTLVQREAHLMTHHGQQAAEVTLPKGGSCPLLLGFQGFLSYGTLLDFRNLWPQGGSASIRGKATAEAIRAPGQPEHRHGNVHWSLHCLGC

SEQ ID NO: 847882 - protein, 451 aa, Homo sapiens; identical to SEQ ID NO: 847879

SEQ ID NO: 847883 - protein, 151 aa, Homo sapiens [sequence omitted]

SEQ ID NO: 847884 - protein, 477 aa, Homo sapiens
PLFPNKAPGNFLPRSAPPARGSPAPGREAQMGEPRAGAALDDGSGWTGSEEGSEEGTGGSEGAGGDGGPDAEGVWSPDIEQSFQEALAIYPPCGRRKIILSDEGKMYGRNELIARYIKLRTGKTRTRKQVSSHIQVLARRKSREIQSKLKDQVSKDKAFQTMATMSSAQLISAPSLQAKLGPTGPQASELFQFWSGGSGPPWNVPDVKPFSQTPFTLSLTPPSTDLPGYEPPQALSPLPPPTPSPPAWQARGLGTARLQLVEFSAFVEPPDAVDSYQRHLFVHISQHCPSPGAPPLESVDVRQIYDKFPEKKGGLRELYDRGPPHAFFLVKFWADLNWGPSGEEAGAGGSISSGGFYGVSSQYESLEHMTLTCSSKVCSFGKQVVEKVETERAQLEDGRFVYRLLRSPMCEYLVNFLHKLRQLPERYMMNSVLENFTILQVVTNRDTQELLLCTAYVFEVSTSERGAQHHIYRLVRD

SEQ ID NO: 847885 - protein, 266 aa, Homo sapiens
PTFPKQSSRQLSPSQRPARPRLPSPRPGGRKAPAGVGDPALGCAQMGEPRAGAALDDGSGWTGSEEGSEEGTGGSEGAGGDGGPDAEGVWSPDIEQSFQEALAIYPPCGRRKIILSDEGKMYGRNELIARYIKLRTGKTRTRKQVSSHIQVLARRKSREIQSKLKDQVSKDKAFQTMATMSSAQLISAPSLQAKLGPTGPQASELFQFWSGGSGPPWNVPDVKPFSQTPFTLSLTPPSTDLPGRNSFPEAPQQISPNVSLARTVSH

SEQ ID NO: 847886 - protein, 447 aa, Homo sapiens
MGEPRAGAALDDGSGWTGSEEGSEEGTGGSEGAGGDGGPDAEGVWSPDIEQSFQEALAIYPPCGRRKIILSDEGKMYGRNELIARYIKLRTGKTRTRKQVSSHIQVLARRKSREIQSKLKDQVSKDKAFQTMATMSSAQLISAPSLQAKLGPTGPQASELFQFWSGGSGPPWNVPDVKPFSQTPFTLSLTPPSTDLPGYEPPQALSPLPPPTPSPPAWQARGLGTARLQLVEFSAFVEPPDAVDSYQRHLFVHISQHCPSPGAPPLESVDVRQIYDKFPEKKGGLRELYDRGPPHAFFLVKFWADLNWGPSGEEAGAGGSISSGGFYGVSSQYESLEHMTLTCSSKVCSFGKQVVEKVETERAQLEDGRFVYRLLRSPMCEYLVNFLHKLRQLPERYMMNSVLENFTILQVVTNRDTQELLLCTAYVFEVSTSERGAQHHIYRLVRD

SEQ ID NO: 847887 - protein, 554 aa, Homo sapiens
LPHTQESRPPAPAPSDPGVQAPDPPPSVLGVRAPAPPPSDSGVQAPDPPPSDPGIPPSSSSLRPRSPGPQPLLPQTQWSRVPALSASSPLRVGFGGSLLSSVFLQAQMGEPRAGAALDDGSGWTGSEEGSEEGTGGSEGAGGDGGPDAEGVWSPDIEQSFQEALAIYPPCGRRKIILSDEGKMYGRNELIARYIKLRTGKTRTRKQVSSHIQVLARRKSREIQSKLKDQVSKDKAFQTMATMSSAQLISAPSLQAKLGPTGPQASELFQFWSGGSGPPWNVPDVKPFSQTPFTLSLTPPSTDLPGYEPPQALSPLPPPTPSPPAWQARGLGTARLQLVEFSAFVEPPDAVDSYQRHLFVHISQHCPSPGAPPLESVDVRQIYDKFPEKKGGLRELYDRGPPHAFFLVKFWADLNWGPSGEEAGAGGSISSGGFYGVSSQYESLEHMTLTCSSKVCSFGKQVVEKVETERAQLEDGRFVYRLLRSPMCEYLVNFLHKLRQLPERYMMNSVLENFTILQVVTNRDTQELLLCTAYVFEVSTSERGAQHHIYRLVRD

SEQ ID NO: 847888 - protein, 571 aa, Homo sapiens
LPHTQESRPPAPAPSDPGVQAPDPPPSVLGVRAPAPPPSDSGVQAPDPPPSDPGIPPSSSSLRPRSPGPQPLLPQTQWSRVPALSASSPLRVGFGGSLLSSVFLQAQMGEPRAGAALDDGSGWTGSEEGSEEGTGGSEGAGGDGGPDAEGVWSPDIEQSFQEALAIYPPCGRRKIILSDEGKMYGRNELIARYIKLRTGKTRTRKQVSSHIQVLARRKSREIQSKLKDQVSKDKAFQTMATMSSAQLISAPSLQAKLGPTGPQASELFQFWSGGSGPPWNVPDVKPFSQTPFTLSLTPPSTDLPGYEPPQALSPLPPPTPSPPAWQARGLGTARLQLVEFSAFVEPPDAVDSYQRHLFVHISQHCPSPGAPPLESVDVRQIYDKFPEKKGGLRELYDRGPPHAFFLVKFWADLNWGPSGEEAGAGGSISSGGFYGVSSQYESLEHMTLTCSSKVCSFGKQVVEKVETERAQLEDGRFVYRLLRSPMCEYLVNFLHKLRQLPERYMMNSVLENFTILQVVTNRDTQELLLCTAYVFEVSTSERGAQHHKVKMNPFCAGAEPGGPWTFFFFLI

SEQ ID NO: 847889 - protein, 328 aa, Homo sapiens
LPHTQESRPPAPAPSDPGVQAPDPPPSVLGVRAPAPPPSDSGVQAPDPPPSDPGIPPSSSSLRPRSPGPQPLLPQTQWSRVPALSASSPLRVGFGGSLLSSVFLQAQMGEPRAGAALDDGSGWTGSEEGSEEGTGGSEGAGGDGGPDAEGVWSPDIEQSFQEALAIYPPCGRRKIILSDEGKMYGRNELIARYIKLRTGKTRTRKQVSSHIQVLARRKSREIQSKLKDQVSKDKAFQTMATMSSAQLISAPSLQAKLGPTGPQASELFQFWSGGSGPPWNVPDVKPFSQTPFTLSLTPPSTDLPGRNSFPEAPQQISPNVSLARTVSH

SEQ ID NO: 847890 - protein, 129 aa, Homo sapiens
VSQVHEPHLCSVATWSVVSSHMWALGTVLDGTDFHPIEHFHPWKVLLASAASPPRLWPPVPSPECWSFSSHPPNPSASSSSKFLVFCVFSLPSKTWFLFSPLSFYFFFEMESCSVTQEYNGVISAHCNI

SEQ ID NO: 847891 - protein, 554 aa, Homo sapiens; identical to SEQ ID NO: 847887

SEQ ID NO: 847892 - protein, 362 aa, Homo sapiens
PTFPKQSSRQLSPSQRPARPRLPSPRPGGRNELIARYIKLRTGKTRTRKQVSSHIQVLARRKSREIQSKLKASELFQFWSGGSGPPWNVPDVKPFSQTPFTLSLTPPSTDLPGYEPPQALSPLPPPTPSPPAWQARGLGTARLQLVEFSAFVEPPDAVDSYQRHLFVHISQHCPSPGAPPLESVDVRQIYDKFPEKKGGLRELYDRGPPHAFFLVKFWADLNWGPSGEEAGAGGSISSGGFYGVSSQYESLEHMTLTCSSKVCSFGKQVVEKVETERAQLEDGRFVYRLLRSPMCEYLVNFLHKLRQLPERYMMNSVLENFTILQVVTNRDTQELLLCTAYVFEVSTSERGAQHHIYRLVRD

SEQ ID NO: 847893 - protein, 294 aa, Homo sapiens
LPHTQESRPPAPAPSDPGVQAPDPPPSVLGVRAPAPPPSDSGVQAPDPPPSDPGIPPSSSSLRPRSPGPQPLLPQTQWSRVPALSASSPLRVGFGGSLLSSVFLQAQMGEPRAGAALDDGSGWTGSEEGSEEGTGGSEGAGGDGGPDAEGVWSPDIEQSFQEALAIYPPCGRRKIILSDEGKMYGRNELIARYIKLRTGKTRTRKQVSSHIQVLARRKSREIQSKLKDQVSKDKAFQTMATMSSAQLISAPSLQAKLGPTGPQASELFQFWSGGSGPPWNVPEFRRKKMFPRGV

SEQ ID NO: 847894 - protein, 207 aa, Homo sapiens
LPHTQESRPPAPAPSDPGVQAPDPPPSVLGVRAPAPPPSDSGVQAPDPPPSDPGIPPSSSSLRPRSPGPQPLLPQTQWSRVPALSASSPLRVGFGGSLLSSVFLQAQMGEPRAGAALDDGSGWTGSEEGSEEGTGGSEGAGGDGGPDAEGVWSPDIEQSFQASELFQFWSGGSGPPWNVPDVKPFSQTPFTLSLTPPSTDLPAARGS

SEQ ID NO: 847895 - protein, 40 aa, Homo sapiens
MDLWASVWDGPVFLGSSSHGQVQVQGRSCFLCVHLSSRHV

SEQ ID NO: 847896 - protein, 464 aa, Homo sapiens
SGWRGSGGRCGPGRAGAEAERAAGPAQPRPEPTMRRLRRLAHLVLFCPFSKRLQGRLPGLRVRCIFLAWLGVFAGSWLVYVHYSSYSERCRGHVCQVVICDQYRKGIISGSVCQDLCELHMVEWRTCLSVAPGQQVYSGLWRDKDVTIKCGIEETLDSKARSDAAPRRELVLFDKPTRGTSIKEFREMTLGFLKANLGDLPSLPALVGQVLLMADFNKDNRVSLAEAKSVWALLQRNEFLLLLSLQEKEHASRLLGYCGDLYLTEGVPHGAWHAAALPPLLRPLLPPALQGALQQWLGPAWPWRAKIAIGLLEFVEELFHGSYGTFYMCETTLANVGYTATYDFKMADLQQVAPEATVRRFLQGRRCEHSTDCTYGRDCRAPCDRLMRQCKGDLIQPNLAKVCALLRGYLLPGAPADLREELGTQLRTCTTLSGLASQVEAHHSLVLSHLKTLLWKKISNTKYS

SEQ ID NO: 847897 - protein, 464 aa, Homo sapiens; identical to SEQ ID NO: 847896

SEQ ID NO: 847898 - protein, 252 aa, Homo sapiens [sequence omitted]

SEQ ID NO: 847899 - protein, 464 aa, Homo sapiens; identical to SEQ ID NO: 847896

SEQ ID NO: 847900 - protein, 464 aa, Homo sapiens; identical to SEQ ID NO: 847896

SEQ ID NO: 847901 - protein, 373 aa, Homo sapiens
LVRGWGEHCDQYRKGIISGSVCQDLCELHMVEWRTCLSVAPGQQVYSGLWRDKDVTIKCGIEETLDSKARSDAAPRRELVLFDKPTRGTSIKEFREMTLGFLKANLGDLPSLPALVGQVLLMADFNKDNRVSLAEAKSVWALLQRNEFLLLLSLQEKEHASRLLGYCGDLYLTEGVPHGAWHAAALPPLLRPLLPPALQGALQQWLGPAWPWRAKIAIGLLEFVEELFHGSYGTFYMCETTLANVGYTATYDFKMADLQQVAPEATVRRFLQGRRCEHSTDCTYGRDCRAPCDRLMRQCKGDLIQPNLAKVCALLRGYLLPGAPADLREELGTQLRTCTTLSGLASQVEAHHSLVLSHLKTLLWKKISNTKYS

SEQ ID NO: 847902 - protein, 433 aa, Homo sapiens
AGLPLQPTAPSCSHQWHDPGPRHCLCEGLAAFQLQQVEAPASFGPVGKGLSGAGVWLPRPARLHLSPQCDQYRKGIISGSVCQDLCELHMVEWRTCLSVAPGQQVYSGLWRDKDVTIKCGIEETLDSKARSDAAPRRELVLFDKPTRGTSIKEFREMTLGFLKANLGDLPSLPALVGQVLLMADFNKDNRVSLAEAKSVWALLQRNEFLLLLSLQEKEHASRLLGYCGDLYLTEGVPHGAWHAAALPPLLRPLLPPALQGALQQWLGPAWPWRAKIAIGLLEFVEELFHGSYGTFYMCETTLANVGYTATYDFKMADLQQVAPEATVRRFLQGRRCEHSTDCTYGRDCRAPCDRLMRQCKGDLIQPNLAKVCALLRGYLLPGAPADLREELGTQLRTCTTLSGLASQVEAHHSLVLSHLKTLLWKKISNTKYS

SEQ ID NO: 847903 - protein, 336 aa, Homo sapiens
MKKEHVLHCQFSAWYPFFRGVTIKSVILPLPQNVKDYLLDDGTLVVSGRDDPPTHSQPDSDDEAEEIQWSDDENTATLTAPEFPEFATKVQEAINSLGGSVFPKLNWSAPRDAYWIAMNSSLKCKTLSDIFLLFKSSDFITRDFTQPFIHCTDDSPDPCIEYELVLRKWCELIPGAEFRCFVKENKLIGISQRDYTQYYDHISKQKEEIRRCIQDFFKKHIQYKFLDEDFVFDIYRDSRGKVWLIDFNPFGEVTDSLLFTWEELISENNLNGDFSEVDAQEQDSPAFRCTNSEVTVQPSPYLSYRLPKDFVDLSTGEDAHKLIDFLKLKRNQQEDD

SEQ ID NO: 847904 - protein, 124 aa, Homo sapiens
SSDPLNTTNSTLARPLTAYNPPLYRVPERTIPVRRLPHNSLPRPGPALIVSQLLGRSRSRAHKSALLAAYSPHSVIYTPRPTPPLIPFSNKDSQLRHAPRPVFQAPHPVPILTFQAWGRNNQKP

SEQ ID NO: 847905 - protein, 336 aa, Homo sapiens; identical to SEQ ID NO: 847903

SEQ ID NO: 847906 - protein, 360 aa, Homo sapiens
MKKEHVLHCQFSAWYPFFRGVTIKSVILPLPQNVKDYLLDDGTLVVSGRDDPPTHSQPDSDDEAEEIQWSDDENTATLTAPEFPEFATKVQEAINSLGGSVFPKLNWSAPRDAYWIAMNSSLKCKTLSDIFLLFKSSDFITRDFTQPFIHCTDDSPDPCIEYELVLRKWCELIPGAEFRCFVKENKLIGISQRDYTQYYDHISKQKEEIRRCIQDFFKKHIQYKFLDEDFFSVSQAGVQWCDRGSCSFHLPGSVVFDIYRDSRGKVWLIDFNPFGEVTDSLLFTWEELISENNLNGDFSEVDAQEQDSPAFRCTNSEVTVQPSPYLSYRLPKDFVDLSTGEDAHKLIDFLKLKRNQQEDD

SEQ ID NO: 847907 - protein, 336 aa, Homo sapiens; identical to SEQ ID NO: 847903

SEQ ID NO: 847908 - protein, 290 aa, Homo sapiens
MKKEHVLHCQFSAWYPFFRGVTIKSVILPLPQNVKDYLLDDGTLVVSGRDDPPTHSQPDSDDEAEEIQWSDDENTATLTAPEFPEFATKVQEAINSLGGSVFPKLNWSAPRDAYWIAMNSSLKCKTLSDIFLLFKSSDFITRDFTQPFIHCTDDSPDPCIEYELVLRKWCELIPGAEFRCFVKENKLIGISQRDYTQYYDHISKQKEEIRRCIQDFFKKHIQYKFLDEDFVFDIYRDSRGKVWLIDFNPFGEVTDSLLFTWEELISENNLNGDFSEVDAQEQKRNQQEDD

SEQ ID NO: 847909 - protein, 224 aa, Homo sapiens
  misc_feature (44)..(44): Xaa can be any naturally occurring amino acid
MNVEARSGMSAGVPVVRSLQQVQSTSLHVFNLRRAIQLLLMILXDPCIEYELVLRKWCELIPGAEFRCFVKENKLIGISQRDYTQYYDHISKQKEEIRRCIQDFFKKHIQYKFLDEDFVFDIYRDSRGKVWLIDFNPFGEVTDSLLFTWEELISENNLNGDFSEVDAQEQDSPAFRCTNSEVTVQPSPYLSYRLPKDFVDLSTGEDAHKLIDFLKLKRNQQEDD

SEQ ID NO: 847910 - protein, 293 aa, Homo sapiens
MKKEHVLHCQFSAWYPFFRGVTIKSVILPLPQNVKDYLLDDGTLVVSGRDDPPTHSQPDSDDEAEEIQWSDDENTATLTAPEFPEFATKVQEAINSLGGSVFPKLNWSAPRDAYWIAMNSSLKCKTLSDIFLLFKSSDFITRDFTQPFIHCTDDSPDPCIEYELVLRKWCELIPGAEFRCFVKENKLIGISQRDYTQYYDHISKQKEEIRRCIQDFFKKHIQYKFLDEDFVFDIYRDSRDSPAFRCTNSEVTVQPSPYLSYRLPKDFVDLSTGEDAHKLIDFLKLKRNQQEDD

SEQ ID NO: 847911 - protein, 109 aa, Homo sapiens
MFVFVFSLSVLQGKVWLIDFNPFGEVTDSLLFTWEELISENNLNGDFSEVDAQEQDSPAFRCTNSEVTVQPSPYLSYRLPKDFVDLSTGEDAHKLIDFLKLKRNQQEDD

SEQ ID NO: 847912 - protein, 336 aa, Homo sapiens; identical to SEQ ID NO: 847903

SEQ ID NO: 847913 - protein, 336 aa, Homo sapiens; identical to SEQ ID NO: 847903

SEQ ID NO: 847914 - protein, 336 aa, Homo sapiens; identical to SEQ ID NO: 847903

SEQ ID NO: 847915 - protein, 304 aa, Homo sapiens
MKKEHVLHCQFSAWYPFFRGVTIKSVILPLPQNVKDYLLDDGTLVVSGRDDPPTHSQPDSDDEAEEIQWSDDENTATLTDAYWIAMNSSLKCKTLSDIFLLFKSSDFITRDFTQPFIHCTDDSPDPCIEYELVLRKWCELIPGAEFRCFVKENKLIGISQRDYTQYYDHISKQKEEIRRCIQDFFKKHIQYKFLDEDFVFDIYRDSRGKVWLIDFNPFGEVTDSLLFTWEELISENNLNGDFSEVDAQEQDSPAFRCTNSEVTVQPSPYLSYRLPKDFVDLSTGEDAHKLIDFLKLKRNQQEDD

SEQ ID NO: 847916 - protein, 286 aa, Homo sapiens
MKKEHVLHCQFSAWYPFFRGVTIKSVILPLPQNVKDYLLDDGTLVVSGRDDPPTHSQPDSDDEAEEIQWSDDENTATLTAPEFPEFATKVQEAINSLGGSVFPKLNWSAPRDAYWIAMNSSLKCKTLSDIFLLFKSSDFITRDFTQPFIHCTDDSPDPCIEYELVLRKWCELIPGAEFRCFVKENKLIGISQRDYTQYYDHISKQKEEIRRCIQDFFKKHIQYKFLDEDFVFDIYRDSRGKVWLIDFNPFGEVTDSLLFTWEELISENNLNGDFSEVDAQEQVQHF

SEQ ID NO: 847917 - protein, 109 aa, Homo sapiens; identical to SEQ ID NO: 847911

SEQ ID NO: 847918 - protein, 144 aa, Homo sapiens
MKKEHVLHCQFSAWYPFFRGVTIKSVILPLPQNVKDYLLDDGTLVVSGRDDPPTHSQPDSDDEAEEIQWSDDENTATLTAPEFPEFATKVQEAINSLGGSVFPKLNWSAPRDAYWIAMNSSLKCKTLSDIFLLFKSSLSHSALT

SEQ ID NO: 847919 - protein, 1609 aa, Homo sapiens
MRGSHRAAPALRPRGRLWPVLAVLAAAAAAGCAQAAMDECTDEGGRPQRCMPEFVNAAFNVTVVATNTCGTPPEEYCVQTGVTGVTKSCHLCDAGQPHLQHGAAFLTDYNNQADTTWWQSQTMLAGVQYPSSINLTLHLGKAFDITYVRLKFHTSRPESFAIYKRTREDGPWIPYQYYSGSCENTYSKANRGFIRTGGDEQQALCTDEFSDISPLTGGNVAFSTLEGRPSAYNFDNSPVLQEWVTATDIRVTLNRLNTFGDEVFNDPKVLKSYYYAISDFAVGGRCKCNGHASECMKNEFDKLVCNCKHNTYGVDCEKCLPFFNDRPWRRATAESASECLPCDCNGRSQECYFDPELYRSTGHGGHCTNCQDNTDGAHCERCRENFFRLGNNEACSSCHCSPVGSLSTQCDSYGRCSCKPGVMGDKCDRCQPGFHSLTEAGCRPCSCDPSGSIDECNVETGRCVCKDNVEGFNCERCKPGFFNLESSNPRGCTPCFCFGHSSVCTNAVGYSVYSISSTFQIDEDGWRAEQRDGSEASLEWSSERQDIAVISDSYFPRYFIAPAKFLGKQVLSYGQNLSFSFRVDRRDTRLSAEDLVLEGAGLRVSVPLIAQGNSYPSETTVKYVFRLHEATDYPWRPALTPFEFQKLLNNLTSIKIRGTYSERSAGYLDDVTLASARPGPGVPATWVESCTCPVGYGGQFCEMCLSGYRRETPNLGPYSPCVLCACNGHSETCDPETGVCNCRDNTAGPHCEKCSDGYYGDSTAGTSSDCQPCPCPGGSSCAVVPKTKEVVCTNCPTGTTGKRCELCDDGYFGDPLGRNGPVRLCRLCQCSDNIDPNAVGNCNRLTGECLKCIYNTAGFYCDRCKDGFFGNPLAPNPADKCKACNCNPYGTMKQQSSCNPVTGQCECLPHVTGQDCGACDPGFYNLQSGQGCERCDCHALGSTNGQCDIRTGQCECQPGITGQHCERCEVNHFGFGPEGCKPCDCHPEGSLSLQCKDDGRCECREGFVGNRCDQCEENYFYNRSWPGCQECPACYRLVKDKVADHRVKLQELESLIANLGTGDEMVTDQAFEDRLKEAEREVMDLLREAQDVKDVDQNLMDRLQRVNNTLSSQISRLQNIRNTIEETGNLAEQARAHVENTERLIEIASRELEKAKVAAANVSVTQPESTGDPNNMTLLAEEARKLAERHKQEADDIVRVAKTANDTSTEAYNLLLRTLAGENQTAFEIEELNRKYEQAKNISQDLEKQAARVHEEAKRAGDKAVEIYASVAQLSPLDSETLENEANNIKMEAENLEQLIDQKLKDYEDLREDMRGKELEVKNLLEKGKTEQQTADQLLARADAAKALAEEAAKKGRDTLQEANDILNNLKDFDRRVNDNKTAAEEALRKIPAINQTITEANEKTREAQQALGSAAADATEAKNKAHEAERIASAVQKNATSTKAEAERTFAEVTDLDNEVNNMLKQLQEAEKELKRKQDDADQDMMMAGMASQAAQEAEINARKAKNSVTSLLSIINDLLEQLGQLDTVDLNKLNEIEGTLNKAKDEMKVSDLDRKVSDLENEAKKQEAAIMDYNRDIEEIMKDIRNLEDIRKTLPSGCFNTPSIEKP

SEQ ID NO: 847920 - protein, 1609 aa, Homo sapiens; identical to SEQ ID NO: 847919

SEQ ID NO: 847921 - protein, 158 aa, Homo sapiens
MRGSHRAAPALRPRGRLWPVLAVLAAAAAAGCAQAAMDECTDEGGRPQRCMPEFVNAAFNVTVVATNTCGTPPEEYCVQTGVTGVTKSCHLCDAGQPHLQHGAAFLTDYNNQADTTWWQSQTMLAGVQYPSSINLTLHLDDTWNKLHIKMSDMKIRRA

SEQ ID NO: 847922 - protein, 154 aa, Homo sapiens
MRGSHRAAPALRPRGRLWPVLAVLAAAAAAGCAQAAMDECTDEGGRPQRCMPEFVNAAFNVTVVATNTCGTPPEEYCVQTGVTGVTKSCHLCDAGQPHLQHGAAFLTDYNNQADTTWWQSQTMLAGVQYPSSINLTLHLVSATWEAEAEGSFEL

SEQ ID NO: 847923 - protein, 1540 aa, Homo sapiens
MRGSHRAAPALRPRGRLWPVLAVLAAAAAAGCAQAAMDECTDEGAAAAALHARVRQRRFQRDCGGHQHVWDSARGILCADRGDRGHQVLSPVRRRAAPPAARGSLPDRYSGSCENTYSKANRGFIRTGGDEQQALCTDEFSDISPLTGGNVAFSTLEGRPSAYNFDNSPVLQEWVTATDIRVTLNRLNTFGDEVFNDPKVLKSYYYAISDFAVGGRCKCNGHASECMKNEFDKLVCNCKHNTYGVDCEKCLPFFNDRPWRRATAESASECLPCDCNGRSQECYFDPELYRSTGHGGHCTNCQDNTDGAHCERCRENFFRLGNNEACSSCHCSPVGSLSTQCDSYGRCSCKPGVMGDKCDRCQPGFHSLTEAGCRPCSCDPSGSIDECNVETGRCVCKDNVEGFNCERCKPGFFNLESSNPRGCTPCFCFGHSSVCTNAVGYSVYSISSTFQIDEDGWRAEQRDGSEASLEWSSERQDIAVISDSYFPRYFIAPAKFLGKQVLSYGQNLSFSFRVDRRDTRLSAEDLVLEGAGLRVSVPLIAQGNSYPSETTVKYVFRLHEATDYPWRPALTPFEFQKLLNNLTSIKIRGTYSERSAGYLDDVTLASARPGPGVPATWVESCTCPVGYGGQFCEMCLSGYRRETPNLGPYSPCVLCACNGHSETCDPETGVCNCRDNTAGPHCEKCSDGYYGDSTAGTSSDCQPCPCPGGSSCAVVPKTKEVVCTNCPTGTTGKRCELCDDGYFGDPLGRNGPVRLCRLCQCSDNIDPNAVGNCNRLTGECLKCIYNTAGFYCDRCKDGFFGNPLAPNPADKCKACNCNPYGTMKQQSSCNPVTGQCECLPHVTGQDCGACDPGFYNLQSGQGCERCDCHALGSTNGQCDIRTGQCECQPGITGQHCERCEVNHFGFGPEGCKPCDCHPEGSLSLQCKDDGRCECREGFVGNRCDQCEENYFYNRSWPGCQECPACYRLVKDKVADHRVKLQELESLIANLGTGDEMVTDQAFEDRLKEAEREVMDLLREAQDVKDVDQNLMDRLQRVNNTLSSQISRLQNIRNTIEETGNLAEQARAHVENTERLIEIASRELEKAKVAAANVSVTQPESTGDPNNMTLLAEEARKLAERHKQEADDIVRVAKTANDTSTEAYNLLLRTLAGENQTAFEIEELNRKYEQAKNISQDLEKQAARVHEEAKRAGDKAVEIYASVAQLSPLDSETLENEANNIKMEAENLEQLIDQKLKDYEDLREDMRGKELEVKNLLEKGKTEQQTADQLLARADAAKALAEEAAKKGRDTLQEANDILNNLKDFDRRVNDNKTAAEEALRKIPAINQTITEANEKTREAQQALGSAAADATEAKNKAHEAERIASAVQKNATSTKAEAERTFAEVTDLDNEVNNMLKQLQEAEKELKRKQDDADQDMMMAGMASQAAQEAEINARKAKNSVTSLLSIINDLLEQLGQLDTVDLNKLNEIEGTLNKAKDEMKVSDLDRKVSDLENEAKKQEAAIMDYNRDIEEIMKDIRNLEDIRKTLPSGCFNTPSIEKP

SEQ ID NO: 847924 - protein, 1609 aa, Homo sapiens; identical to SEQ ID NO: 847919

SEQ ID NO: 847925 - protein, 718 aa, Homo sapiens [sequence omitted]

SEQ ID NO: 847926 - protein, 587 aa, Homo sapiens
ESWPCVKLVSASYRRVKDKVADHRVKLQELESLIANLGTGDEMVTDQAFEDRLKEAEREVMDLLREAQDVKDVDQNLMDRLQRVNNTLSSQISRLQNIRNTIEETGNLAEQARAHVENTERLIEIASRELEKAKVAAANVSVTQPESTGDPNNMTLLAEEARKLAERHKQEADDIVRVAKTANDTSTEAYNLLLRTLAGENQTAFEIEELNRKYEQAKNISQDLEKQAARVHEEAKRAGDKAVEIYASVAQLSPLDSETLENEANNIKMEAENLEQLIDQKLKDYEDLREDMRGKELEVKNLLEKGKTEQQTADQLLARADAAKALAEEAAKKGRDTLQEANDILNNLKDFDRRVNDNKTAAEEALRKIPAINQTITEANEKTREAQQALGSAAADATEAKNKAHEAERIASAVQKNATSTKAEAERTFAEVTDLDNEVNNMLKQLQEAEKELKRKQDDADQDMMMAGMASQAAQEAEINARKAKNSVTSLLSIINDLLEQLGQLDTVDLNKLNEIEGTLNKAKDEMKVSDLDRKVSDLENEAKKQEAAIMDYNRDIEEIMKDIRNLEDIRKTLPSGCFNTPSIEKP

SEQ ID NO: 847927 - protein, 1609 aa, Homo sapiens; identical to SEQ ID NO: 847919

SEQ ID NO: 847928 - protein, 976 aa, Homo sapiens
MRGSHRAAPALRPRGRLWPVLAVLAAAAAAGCAQAAMDECTDEGGRPQRCMPEFVNAAFNVTVVATNTCGTPPEEYCVQTGVTGVTKSCHLCDAGQPHLQHGAAFLTDYNNQADTTWWQSQTMLAGVQYPSSINLTLHLGKAFDITYVRLKFHTSRPESFAIYKRTREDGPWIPYQYYSGSCENTYSKANRGFIRTGGDEQQALCTDEFSDISPLTGGNVAFSTLEGRPSAYNFDNSPVLQEWVTATDIRVTLNRLNTFGDEVFNDPKVLKSYYYAISDFAVGGRCKCNGHASECMKNEFDKLVCNCKHNTYGVDCEKCLPFFNDRPWRRATAESASECLPCDCNGRSQECYFDPELYRSTGHGGHCTNCQDNTDGAHCERCRENFFRLGNNEACSSCHCSPVGSLSTQCDSYGRCSCKPGVMGDKCDRCQPGFHSLTEAGCRPCSCDPSGSIDECNVETGRCVCKDNVEGFNCERCKPGFFNLESSNPRGCTPCFCFGHSSVCTNAVGYSVYSISSTFQIDEDGWRAEQRDGSEASLEWSSERQDIAVISDSYFPRYFIAPAKFLGKQVLSYGQNLSFSFRVDRRDTRLSAEDLVLEGAGLRVSVPLIAQGNSYPSETTVKYVFRLHEATDYPWRPALTPFEFQKLLNNLTSIKIRGTYSERSAGYLDDVTLASARPGPGVPATWVESCTCPVGYGGQFCEMCLSGYRRETPNLGPYSPCVLCACNGHSETCDPETGVCNCRDNTAGPHCEKCSDGYYGDSTAGTSSDCQPCPCPGGSSCAVVPKTKEVVCTNCPTGTTGKRCELCDDGYFGDPLGRNGPVRLCRLCQCSDNIDPNAVGNCNRLTGECLKCIYNTAGFYCDRCKDGFFGNPLAPNPADKCKACNCNPYGTMKQQSSCNPVTGQCECLPHVTGQDCGACDPGFYNLQSGQGCESAKLVWVKFTPASLRPQWGGLVWFPFNFLFVICFSPPPVWYIF

SEQ ID NO: 847929 - protein, 976 aa, Homo sapiens; identical to SEQ ID NO: 847928

SEQ ID NO: 847930 - protein, 644 aa, Homo sapiens
MRGSHRAAPALRPRGRLWPVLAVLAAAAAAGCAQAAMDECTDEGGRPQRCMPEFVNAAFNVTVVATNTCGTPPEEYCVQTGVTGVTKSCHLCDAGQPHLQHGAAFLTDYNNQADTTWWQSQTMLAGVQYPSSINLTLHLGKAFDITYVRLKFHTSRPESFAIYKRTREDGPWIPYQYYSGSCENTYSKANRGFIRTGGDEQQALCTDEFSDISPLTGGNVAFSTLEGRPSAYNFDNSPVLQEWVTATDIRVTLNRLNTFGDEVFNDPKVLKSYYYAISDFAVGGRCKCNGHASECMKNEFDKLVCNCKHNTYGVDCEKCLPFFNDRPWRRATAESASECLPCDCNGRSQECYFDPELYRSTGHGGHCTNCQDNTDGAHCERCRENFFRLGNNEACSSCHCSPVGSLSTQCDSYGRCSCKPGVMGDKCDRCQPGFHSLTEAGCRPCSCDPSGSIDECNVETGRCVCKDNVEGFNCERCKPGFFNLESSNPRGCTPCFCFGHSSVCTNAVGYSVYSISSTFQIDEDGWRAEQRDGSEASLEWSSERQDIAVISDSYFPRYFIAPAKFLGKQVLSYGQNLSFSFRVDRRDTRLSAEDLVLEGAGLRVSVPLIAQGNSYPSETTVKYVFRLHEATDYPWSTDASGSSR

SEQ ID NO: 847931 - protein, 144 aa, Homo sapiens
KCVLELVSDFDRRVNDNKTAAEEALRKIPAINQTITEANEKTREAQQALGSAAADATEAKNKAHEAERIASAVQKNATSTKAEAERTFAEVTDLDNEVNNMLKQLQEAEKELKRKQDDADQDMMMAGMVRGFGIFAHWQKVNSV

SEQ ID NO: 847932 - protein, 1632 aa, Homo sapiens
MRGSHRAAPALRPRGRLWPVLAVLAAAAAAGCAQAAMDECTDEGGRPQRCMPEFVNAAFNVTVVATNTCGTPPEEYCVQTGVTGVTKSCHLCDAGQPHLQHGAAFLTDYNNQADTTWWQSQTMLAGVQYPSSINLTLHLGKAFDITYVRLKFHTSRPESFAIYKRTREDGPWIPYQYYSGSCENTYSKANRGFIRTGGDEQQALCTDEFSDISPLTGGNVAFSTLEGRPSAYNFDNSPVLQEWVTATDIRVTLNRLNTFGDEVFNDPKVLKSYYYAISDFAVGGRCKCNGHASECMKNEFDKLVCNCKHNTYGVDCEKCLPFFNDRPWRRATAESASECLPCDCNGRSQECYFDPELYRSTGHGGHCTNCQDNTDGAHCERCRENFFRLGNNEACSSCHCSPVGSLSTQCDSYGRCSCKPGVMGDKCDRCQPGFHSLTEAGCRPCSCDPSGSIDECNVETGRCVCKDNVEGFNCERCKPGFFNLESSNPRGCTPCFCFGHSSVCTNAVGYSVYSISSTFQIDEDGWRAEQRDGSEASLEWSSERQDIAVISDSYFPRYFIAPAKFLGKQVLSYGQNLSFSFRVDRRDTRLSAEDLVLEGAGLRVSVPLIAQGNSYPSETTVKYVFRLHEATDYPWRPALTPFEFQKLLNNLTSIKIRGTYSERSAGYLDDVTLASARPGPGVPATWVESCTCPVGYGGQFCEMCLSGYRRETPNLGPYSPCVLCACNGHSETCDPETGVCNCRDNTAGPHCEKCSDGYYGDSTAGTSSDCQPCPCPGGSSCAVVPKTKEVVCTNCPTGTTGKRCELCDDGYFGDPLGRNGPVRLCRLCQCSDNIDPNAVGNCNRLTGECLKCIYNTAGFYCDRCKDGFFGNPLAPNPADKCKACNCNPYGTMKQQSSCNPVTGQCECLPHVTGQDCGACDPGFYNLQSGQGCERCDCHALGSTNGQCDIRTGQCECQPGITGQHCERCEVNHFGFGPEGCKPCDCHPEGSLSLQCKDDGRCECREGFVGNRCDQCEENYFYNRSWPGCQECPACYRLVKDKVADHRVKLQELESLIANLGTGDEMVTDQAFEDRLKEAEREVMDLLREAQDVKGTHDGTVHDFCEMDQSLDVAPKEDVDQNLMDRLQRVNNTLSSQISRLQNIRNTIEETGNLAEQARAHVENTERLIEIASRELEKAKVAAANVSVTQPESTGDPNNMTLLAEEARKLAERHKQEADDIVRVAKTANDTSTEAYNLLLRTLAGENQTAFEIEELNRKYEQAKNISQDLEKQAARVHEEAKRAGDKAVEIYASVAQLSPLDSETLENEANNIKMEAENLEQLIDQKLKDYEDLREDMRGKELEVKNLLEKGKTEQQTADQLLARADAAKALAEEAAKKGRDTLQEANDILNNLKDFDRRVNDNKTAAEEALRKIPAINQTITEANEKTREAQQALGSAAADATEAKNKAHEAERIASAVQKNATSTKAEAERTFAEVTDLDNEVNNMLKQLQEAEKELKRKQDDADQDMMMAGMASQAAQEAEINARKAKNSVTSLLSIINDLLEQLGQLDTVDLNKLNEIEGTLNKAKDEMKVSDLDRKVSDLENEAKKQEAAIMDYNRDIEEIMKDIRNLEDIRKTLPSGCFNTPSIEKP

SEQ ID NO: 847933 - protein, 1609 aa, Homo sapiens; identical to SEQ ID NO: 847919

SEQ ID NO: 847934 - protein, 894 aa, Homo sapiens
MQLEADKILTLPKLLLRPVLRYFTDPAFDRAAGPHCEKCSDGYYGDSTAGTSSDCQPCPCPGGSSCAVVPKTKEVVCTNCPTGTTGKRCELCDDGYFGDPLGRNGPVRLCRLCQCSDNIDPNAVGNCNRLTGECLKCIYNTAGFYCDRCKDGFFGNPLAPNPADKCKACNCNPYGTMKQQSSCNPVTGQCECLPHVTGQDCGACDPGFYNLQSGQGCERCDCHALGSTNGQCDIRTGQCECQPGITGQHCERCEVNHFGFGPEGCKPCDCHPEGSLSLQCKDDGRCECREGFVGNRCDQCEENYFYNRSWPGCQECPACYRLVKDKVADHRVKLQELESLIANLGTGDEMVTDQAFEDRLKEAEREVMDLLREAQDVKDVDQNLMDRLQRVNNTLSSQISRLQNIRNTIEETGNLAEQARAHVENTERLIEIASRELEKAKVAAANVSVTQPESTGDPNNMTLLAEEARKLAERHKQEADDIVRVAKTANDTSTEAYNLLLRTLAGENQTAFEIEELNRKYEQAKNISQDLEKQAARVHEEAKRAGDKAVEIYASVAQLSPLDSETLENEANNIKMEAENLEQLIDQKLKDYEDLREDMRGKELEVKNLLEKGKTEQQTADQLLARADAAKALAEEAAKKGRDTLQEANDILNNLKDFDRRVNDNKTAAEEALRKIPAINQTITEANEKTREAQQALGSAAADATEAKNKAHEAERIASAVQKNATSTKAEAERTFAEVTDLDNEVNNMLKQLQEAEKELKRKQDDADQDMMMAGMASQAAQEAEINARKAKNSVTSLLSIINDLLEQLGQLDTVDLNKLNEIEGTLNKAKDEMKVSDLDRKVSDLENEAKKQEAAIMDYNRDIEEIMKDIRNLEDIRKTLPSGCFNTPSIEKP

SEQ ID NO: 847935 - protein, 1401 aa, Homo sapiens
MRGSHRAAPALRPRGRLWPVLAVLAAAAAAGCAQAAMDECTDEGGRPQRCMPEFVNAAFNVTVVATNTCGTPPEEYCVQTGVTGVTKSCHLCDAGQPHLQHGAAFLTDYNNQADTTWWQSQTMLAGVQYPSSINLTLHLGKAFDITYVRLKFHTSRPESFAIYKRTREDGPWIPYQYYSGSCENTYSKANRGFIRTGGDEQQALCTDEFSDISPLTGGNVAFSTLEGRPSAYNFDNSPVLQEWVTATDIRVTLNRLNTFGDEVFNDPKVLKSYYYAISDFAVGGRCKCNGHASECMKNEFDKLVCNCKHNTYGVDCEKCLPFFNDRPWRRATAESASECLPCDCNGRSQECYFDPELYRSTGHGGHCTNCQDNTDGAHCERCRENFFRLGNNEACSSCHCSPVGSLSTQCDSYGRCSCKPGVMGDKCDRCQPGFHSLTEAGCRPCSCDPSGSIDECNVETGRCVCKDNVEGFNCERCKPGFFNLESSNPRGCTPCFCFGHSSVCTNAVGYSVYSISSTFQIDEDGWRAEQRDGSEASLEWSSERQDIAVISDSYFPRYFIAPAKFLGKQVLSYGQNLSFSFRVDRRDTRLSAEDLVLEGAGLRVSVPLIAQGNSYPSETTVKYVFRLHEATDYPWRPALTPFEFQKLLNNLTSIKIRGTYSERSAGYLDDVTLASARPGPGVPATWVESCTCPVGYGGQFCEMCLSGYRRETPNLGPYSPCVLCACNGHSETCDPETGVCNCRDNTAGPHCEKCSDGYYGDSTAGTSSDCQPCPCPGGSSCAVVPKTKEVVCTNCPTGTTGKRCELCDDGYFGDPLGRNGPVRLCRLCQCSDNIDPNAVGNCNRLTGECLKCIYNTAGFYCDRCKDGFFGNPLAPNPADKCKACNCNPYGTMKQQSSCNPVTGQCECLPHVTGQDCGACDPGFYNLQSGQGCERCDCHALGSTNGQCDIRTGQCECQPGITGQHCERCEVNHFGFGPEGCKPCDCHPEGSLSLQCKDDGRCECREGFVGNRCDQCEENYFYNRSWPGCQECPACYRLVKDKVADHRVKLQELESLIANLGTGDEMVTDQAFEDRLKEAEREVMDLLREAQDVKDVDQNLMDRLQRVNNTLSSQISRLQNIRNTIEETGNLAEQARAHVENTERLIEIASRELEKAKVAAANVSVTQPESTGDPNNMTLLAEEARKLAERHKQEADDIVRVAKTANDTSTEAYNLLLRTLAGENQTAFEIEELNRKYEQAKNISQDLEKQAARVHEEAKRAGDKAVEIYASVAQLSPLDSETLENEANNIKMEAENLEQLIDQKLKDYEDLREDMRGKELEVKNLLEKGKTEQQTADQLLARADAAKALAEEAAKKGRDTLQEANDILNNLKDCDRRLLRMNKIVRTRTPLRKINTTPSENS

SEQ ID NO: 847936 - protein, 923 aa, Homo sapiens
MRGSHRAAPALRPRGRLWPVLAVLAAAAAAGCAQAAMDECTDEGGRPQRCMPEFVNAAFNVTVVATNTCGTPPEEYCVQTGVTGVTKSCHLCDAGQPHLQHGAAFLTDYNNQADTTWWQSQTMLAGVQYPSSINLTLHLGKAFDITYVRLKFHTSRPESFAIYKRTREDGPWIPYQYYSGSCENTYSKANRGFIRTGGDEQQALCTDEFSDISPLTGGNVAFSTLEGRPSAYNFDNSPVLQEWVTATDIRVTLNRLNTFGDEVFNDPKVLKSYYYAISDFAVGGRCKCNGHASECMKNEFDKLVCNCKHNTYGVDCEKCLPFFNDRPWRRATAESASECLPCDCNGRSQECYFDPELYRSTGHGGHCTNCQDNTDGAHCERCRENFFRLGNNEACSSCHCSPVGSLSTQCDSYGRCSCKPGVMGDKCDRCQPGFHSLTEAGCRPCSCDPSGSIDECNVETGRCVCKDNVEGFNCERCKPGFFNLESSNPRGCTPCFCFGHSSVCTNAVGYSVYSISSTFQIDEDGWRAEQRDGSEASLEWSSERQDIAVISDSYFPRYFIAPAKFLGKQVLSYGQNLSFSFRVDRRDTRLSAEDLVLEGAGLRVSVPLIAQGNSYPSETTVKYVFRLHEATDYPWRPALTPFEFQKLLNNLTSIKIRGTYSERSAGYLDDVTLASARPGPGVPATWVESCTCPVGYGGQFCEMCLSGYRRETPNLGPYSPCVLCACNGHSETCDPETGVCNCRDNTAGPHCEKCSDGYYGDSTAGTSSDCQPCPCPGGSSCAVVPKTKEVVCTNCPTGTTGKRCELCDDGYFGDPLGRNGPVRLCRLCQCSDNIDPNAVGNCNRLTGECLKCIYNTAGFYCDRCKDGFFGNPLAPNPADKCKACNCNPYGTMKQQSSCNPVTGQCECLPHVTGRTVVLALQGG

SEQ ID NO: 847937 - protein, 541 aa, Homo sapiens
MRGSHRAAPALRPRGRLWPVLAVLAAAAAAGCAQAAMDECTDEGGRPQRCMPEFVNAAFNVTVVATNTCGTPPEEYCVQTGVTGVTKSCHLCDAGQPHLQHGAAFLTDYNNQADTTWWQSQTMLAGVQYPSSINLTLHLGKAFDITYVRLKFHTSRPESFAIYKRTREDGPWIPYQYYSGSCENTYSKANRGFIRTGGDEQQALCTDEFSDISPLTGGNVAFSTLEGRPSAYNFDNSPVLQEWVTATDIRVTLNRLNTFGDEVFNDPKVLKSYYYAISDFAVGGRCKCNGHASECMKNEFDKLVCNCKHNTYGVDCEKCLPFFNDRPWRRATAESASECLPCDCNGRSQECYFDPELYRSTGHGGHCTNCQDNTDGAHCERCRENFFRLGNNEACSSCHCSPVGSLSTQCDSYGRCSCKPGVMGDKCDRCQPGFHSLTEAGCRPCSCDPSGSIDECNVETGRCVCKDNVEGFNCERCKPGFFNLESSNPRGCTPCFCFGHSSVCTNAVGYSVYSISSTFQIGNLDLIPQPVRTVRLHLKYF

SEQ ID NO: 847938 - protein, 422 aa, Homo sapiens
MSSSCSGLSRVLVAVATALVSASSPCPQAWGPPGVQYGQPGRSVKLCCPGVTAGDPVSWFRDGEPKLLQGPDSGLGHELVLAQADSTDEGTYICQTLDGALGGTVTLQLGYPPARPVVSCQAADYENFSCTWSPSQISGLPTRYLTSYRKKTVLGADSQRRSPSTGPWPCPQDPLGAARCVVHGAEFWSQYRINVTEVNPLGASTRLLDVSLQSILRPDPPQGLRVESVPGYPRRLRASWTYPASWPCQPHFLLKFRLQYRPAQHPAWSTVEPAGLEEVITDAVAGLPHAVRVSARDFLDAGTWSTWSPEAWGTPSTGTIPKEIPAWGQLHTQPEVEPQVDSPAPPRPSLQPHPRLLDHRDSVEQVAVLASLGILSFLGLVAGALALGLWLRLRRGGKDGSPKPGFLASVIPVDRRPGAPNL

SEQ ID NO: 847939 - protein, 473 aa, Homo sapiens [sequence omitted]

SEQ ID NO: 847940 - protein, 422 aa, Homo sapiens; identical to SEQ ID NO: 847938

SEQ ID NO: 847941 - protein, 399 aa, Homo sapiens
MSLTSEVPSTGVQYGQPGRSVKLCCPGVTAGDPVSWFRDGEPKLLQGPDSGLGHELVLAQADSTDEGTYICQTLDGALGGTVTLQLGYPPARPVVSCQAADYENFSCTWSPSQISGLPTRYLTSYRKKTVLGADSQRRSPSTGPWPCPQDPLGAARCVVHGAEFWSQYRINVTEVNPLGASTRLLDVSLQSILRPDPPQGLRVESVPGYPRRLRASWTYPASWPCQPHFLLKFRLQYRPAQHPAWSTVEPAGLEEVITDAVAGLPHAVRVSARDFLDAGTWSTWSPEAWGTPSTGTIPKEIPAWGQLHTQPEVEPQVDSPAPPRPSLQPHPRLLDHRDSVEQVAVLASLGILSFLGLVAGALALGLWLRLRRGGKDGSPKPGFLASVIPVDRRPGAPNL

SEQ ID NO: 847942 - protein, 119 aa, Homo sapiens
MGQEPPYFTPLLPLAPGRSHPRCGGPGREGVEAGAEGEGEGRGRWRQRPRKMSSSCSGLSRVLVAVATALVSASSPCPQAWGPPGVQYGQPGRSVKLCCPGVTAGPSSPPCCLLPSSRL

SEQ ID NO: 847943 - protein, 389 aa, Homo sapiens
MSSSCSGLSRVLVAVATALVSASSPCPQAWGPPGVQYGQPGRSVKLCCPGVTAGDPVSWFRDGEPKLLQGPDSGLGHELVLAQADSTDEGTYICQTLDGALGGTVTLQLGYPPARPVVSCQAADYENFSCTWSPSQISGLPTRYLTSYRKKTVLGADSQRRSPSTGPWPCPQDPLGAARCVVHGAEFWSQYRINVTEVNPLGASTRLLDVSLQSILRPDPPQGLRVESVPGYPRRLRASWTYPASWPCQPHFLLKFRLQYRPAQHPAWSTVEPAGLEEVITDAVAGLPHAVRVSARDFLDAGTWSTWSPEAWGTPSTGTIPKEIPAWGQLHTQPEVEPQVDSPAPPRPSLQPHPRLLDHRDSVEQVAVLASLGILSFLGLVAGALALGL

SEQ ID NO: 847944 - protein, 392 aa, Homo sapiens
MSSSCSGLSRVLVAVATALVSASSPCPQAWGPPGVQYGQPGRSVKLCCPGVTAGDPVSWFRDGEPKLLQGPDSGLGHELVLAQADSTDEGTYICQTLDGALGGTVTLQLGYPPARPVVSCQAADYENFSCTWSPSQISGLPTRYLTSYRKKTVLGADSQRRSPSTGPWPCPQDPLGAARCVVHGAEFWSQYRINVTEVNPLGASTRLLDVSLQSILRPDPPQGLRVESVPGYPRRLRASWTYPASWPCQPHFLLKFRLQYRPAQHPAWSTVEPAGLEEVITDAVAGLPHAVRVSARDFLDAGTWSTWSPEAWGTPSTGTIPKEIPAWGQLHTQPEVEPQVDSPAPPRPSLQPHPRLLDHRDSVEQVAVLASLGILSFLGLVAGALALGLCGK

SEQ ID NO: 847945 - protein, 197 aa, Homo sapiens
MGWGFAVFKPQYPAKFENHCPTQPSFFFILSGVRGTFSFSNHLASGSCFQSCCSRVDRPSGGDPGIQLQTLSQAASSVRDGQEVSGGGGGGGDWQLESPMGQEPPYFTPLLPLAPGRSHPRCGGPGREGVEAGAEGEGEGRGRWRQRPRKMSSSCSGLSRVLVAVATALVSASSPCPQAWGPPGEKNPALQPPNSDL

SEQ ID NO: 847946 - protein, 131 aa, Homo sapiens
MSSSCSGLSRVLVAVATALVSASSPCPQAWGPPGVQYGQPGRSVKLCCPGVTAGDPVSWFRDGEPKLLQGPDSGLGHELVLAQADSTDEGTYICQTCISNLQLKGACTSDFTPELEFCSRNVCNVYICVHV

SEQ ID NO: 847947 - protein, 392 aa, Homo sapiens; identical to SEQ ID NO: 847944

SEQ ID NO: 847948 - protein, 399 aa, Homo sapiens; identical to SEQ ID NO: 847941

SEQ ID NO: 847949 - protein, 399 aa, Homo sapiens; identical to SEQ ID NO: 847941

SEQ ID NO: 847950 - protein, 290 aa, Homo sapiens
LLLLNEKPVDRYLTSYRKKTVLGADSQRRSPSTGPWPCPQDPLGAARCVVHGAEFWSQYRINVTEVNPLGASTRLLDVSLQSILRPDPPQGLRVESVPGYPRRLRASWTYPASWPCQPHFLLKFRLQYRPAQHPAWSTVEPAGLEEVITDAVAGLPHAVRVSARDFLDAGTWSTWSPEAWGTPSTGTIPKEIPAWGQLHTQPEVEPQVDSPAPPRPSLQPHPRLLDHRDSVEQVAVLASLGILSFLGLVAGALALGLWLRLRRGGKDGSPKPGFLASVIPVDRRPGAPNL

SEQ ID NO: 847951 - protein, 197 aa, Homo sapiens; identical to SEQ ID NO: 847945

SEQ ID NO: 847952 - protein, 197 aa, Homo sapiens; identical to SEQ ID NO: 847945

SEQ ID NO: 847953 - protein, 164 aa, Homo sapiens
MGQEPPYFTPLLPLAPGRSHPRCGGPGREGVEAGAEGEGEGRGRWRQRPRKMSSSCSGLSRVLVAVATALVSASSPCPQAWGPPGVQYGQPGRSVKLCCPGVTAGDPVSWFRDGEPKLLQGPDSGLGHELVLAQADSTDEGTYICQKLEFCSRNVCNVYICVHV

SEQ ID NO: 847954 - protein, 570 aa, Homo sapiens
MESLGLHTVTLSDGTTAYVQQAVKGEKLLEGQVIQLEDGTTAYIHQVTVQKEALSFEDGQPVQLEDGSMAYIHRTPREGYDPSTLEAVQLEDGSTAYIHHPVAVPSESTILAVQTEVGLEDLAAEDDEGFSADAVVALEQYASKVLHDSQIPRNGKGQQVGDRAFRCGYKGCGRLYTTAHHLKVHERAHTGDRPYRCDFPSCGKAFATGYGLKSHVRTHTGEKPYKCPEELCSKAFKTSGDLQKHVRTHTGERPFQCPFEGCGRSFTTSNIRKVHVRTHTGERPYTCPEPHCGRGFTSATNYKNHVRIHTGEKPYVCTVPGCGKRFTEYSSLYKHHVVHTHCKPYTCSTCGKTYRQTSTLAMHKRSAHGELEATEESEQALYEQQQLEAASAAEESPPPKRPRIAYLSEVKEERDDIPAQVAMVTEEDGAPQVALITQDGAQQVSLSPEDLQALGSAISMVTQHGSTTLTIPSPDADLATSGTHTVTMVSADGTQTQPVTIITSGAVVAEDSSVASLRHQQVALLATANGTHIAVQLEEQQTLEEAINVATAAMQQGAVTLETTVSESGC

SEQ ID NO: 847955 - protein, 570 aa, Homo sapiens; identical to SEQ ID NO: 847954

SEQ ID NO: 847956 - protein, 570 aa, Homo sapiens; identical to SEQ ID NO: 847954

SEQ ID NO: 847957 - protein, 573 aa, Homo sapiens
AGLRRARFRSRPPGLQEPRNQDKLDGCRGEAGGGVDRARYFLYGFRGPVEARQEERKVRRPWNLDIARASCARAGGLWRRRVVGPALVAGPGAWRSVGGVALGGCQVPSESTILAVQTEVGLEDLAAEDDEGFSADAVVALEQYASKVLHDSQIPRNGKGQQVGDRAFRCGYKGCGRLYTTAHHLKVHERAHTGDRPYRCDFPSCGKAFATGYGLKSHVRTHTGEKPYKCPEELCSKAFKTSGDLQKHVRTHTGERPFQCPFEGCGRSFTTSNIRKVHVRTHTGERPYTCPEPHCGRGFTSATNYKNHVRIHTGEKPYVCTVPGCGKRFTEYSSLYKHHVVHTHCKPYTCSTCGKTYRQTSTLAMHKRSAHGELEATEESEQALYEQQQLEAASAAEESPPPKRPRIAYLSEVKEERDDIPAQVAMVTEEDGAPQVALITQDGAQQVSLSPEDLQALGSAISMVTQHGSTTLTIPSPDADLATSGTHTVTMVSADGTQTQPVTIITSGAVVAEDSSVASLRHQQVALLATANGTHIAVQLEEQQTLEEAINVATAAMQQGAVTLETTVSESGC

SEQ ID NO: 847958 - protein, 568 aa, Homo sapiens [sequence omitted]

SEQ ID NO: 847959 - protein, 532 aa, Homo sapiens
CVPPSSLGRIHIGISRLFPQVLHDSQIPRNGKGQQVGDRAFRCGYKGCGRLYTTAHHLKVRLLADSRQLCSLPSQAVILPFCFDWNWSLPSRCWREEMRVHRNASTERLTHMNGTGGKRIRVLKKTKEPWSYPCSSELCDCLSSQVHERAHTGDRPYRCDFPSCGKAFATGYGLKSHVRTHTGEKPYKCPEELCSKAFKTSGDLQKHVRTHTGERPFQCPFEGCGRSFTTSNIRKVHVRTHTGERPYTCPEPHCGRGFTSATNYKNHVRIHTGEKPYVCTVPGCGKRFTEYSSLYKHHVVHTHCKPYTCSTCGKTYRQTSTLAMHKRSAHGELEATEESEQALYEQQQLEAASAAEESPPPKRPRIAYLSEVKEERDDIPAQVAMVTEEDGAPQVALITQDGAQQVSLSPEDLQALGSAISMVTQHGSTTLTIPSPDADLATSGTHTVTMVSADGTQTQPVTIITSGAVVAEDSSVASLRHQQVALLATANGTHIAVQLEEQQTLEEAINVATAAMQQGAVTLETTVSESGC

SEQ ID NO: 847960 - protein, 75 aa, Homo sapiens
LNYVIACPHRCMNELIQVTVHTDVTSPAVERPLPQVTCLVGCFQLRVEGSRSVWDLSEGNPTPGCFPGETTVRVL

SEQ ID NO: 847961 - protein, 515 aa, Homo sapiens
MESLGLHTVTLSDGTTAYVQQAVKGEKLLEGQVIQLEDGTTAYIHQVTVQKEALSFEDGQPVQLEDGSMAYIHRTPREGYDPSTLEAVQLEDGSTAYIHHPVAVPSESTILAVQTEVGLEDLAAEDDEGFSADAVVALEQYASKVLHDSQIPRNGKGQQVGDRAFRCGYKGCGRLYTTAHHLKVHERAHTGDRPYRCDFPSCGKAFATGYGLKSHVRTHTGEKPYKCPEELCSKAFKTSGDLQKHVRTHTGERPFQCPFEGCGRSFTTSNIRKVHVRTHTGERPYTCPEPHCGRGFTSATNYKNHVRIHTGEKPYVCTVPGCGKRFTEYSSLYKHHVVHTHCKPYTCSTCGKTYRQTSTLAMHKRSAHGELEATEESEQALYEQQQLEAASAAEESPPPKRPRIAYLSEVKEERDDIPAQVAMVTEEDGAPQVALITQDGAQQVTIITSGAVVAEDSSVASLRHQQVALLATANGTHIAVQLEEQQTLEEAINVATAAMQQGAVTLETTVSESGC

SEQ ID NO: 847962 - protein, 570 aa, Homo sapiens; identical to SEQ ID NO: 847954

SEQ ID NO: 847963 - protein, 608 aa, Homo sapiens
MESLGLHTVTLSDGTTAYVQQAVKGEKLLEGQVIQLEDGTTAYIHQVTVQKGEGTTNTPCLVEGSLTAPTKGPLHGTELQGKAGIALVTEALSFEDGQPVQLEDGSMAYIHRTPREGYDPSTLEAVQLEDGSTAYIHHPVAVPSESTILAVQTEVGLEDLAAEDDEGFSADAVVALEQYASKVLHDSQIPRNGKGQQVGDRAFRCGYKGCGRLYTTAHHLKVHERAHTGDRPYRCDFPSCGKAFATGYGLKSHVRTHTGEKPYKCPEELCSKAFKTSGDLQKHVRTHTGERPFQCPFEGCGRSFTTSNIRKVHVRTHTGERPYTCPEPHCGRGFTSATNYKNHVRIHTGEKPYVCTVPGCGKRFTEYSSLYKHHVVHTHCKPYTCSTCGKTYRQTSTLAMHKRSAHGELEATEESEQALYEQQQLEAASAAEESPPPKRPRIAYLSEVKEERDDIPAQVAMVTEEDGAPQVALITQDGAQQVSLSPEDLQALGSAISMVTQHGSTTLTIPSPDADLATSGTHTVTMVSADGTQTQPVTIITSGAVVAEDSSVASLRHQQVALLATANGTHIAVQLEEQQTLEEAINVATAAMQQGAVTLETTVSESGC

SEQ ID NO: 847964 - protein, 446 aa, Homo sapiens
CVPPSSLGRIHIGISRLFPQVLHDSQIPRNGKGQQVGDRAFRCGYKGCGRLYTTAHHLKVHERAHTGDRPYRCDFPSCGKAFATGYGLKSHVRTHTGEKPYKCPEELCSKAFKTSGDLQKHVRTHTGERPFQCPFEGCGRSFTTSNIRKVHVRTHTGERPYTCPEPHCGRGFTSATNYKNHVRIHTGEKPYVCTVPGCGKRFTEYSSLYKHHVVHTHCKPYTCSTCGKTYRQTSTLAMHKRSAHGELEATEESEQALYEQQQLEAASAAEESPPPKRPRIAYLSEVKEERDDIPAQVAMVTEEDGAPQVALITQDGAQQVSLSPEDLQALGSAISMVTQHGSTTLTIPSPDADLATSGTHTVTMVSADGTQTQPVTIITSGAVVAEDSSVASLRHQQVALLATANGTHIAVQLEEQQTLEEAINVATAAMQQGAVTLETTVSESGC

SEQ ID NO: 847965 - protein, 499 aa, Homo sapiens
MESLGLHTVTLSDGTTAYVQQAVKGEKLLEGQVIQLEDGTTAYIHQVTVQKEALSFEDGQPVQLEDGSMAYIHRTPREGYDPSTLEAVQLEDGSTAYIHHPVAVPSESTILAVQTEVGLEDLAAEDDEGFSADAVVALEQYASKVLHDSQIPRNGKGQQVGDRAFRCGYKGCGRLYTTAHHLKVHERAHTGDRPYRCDFPSCGKAFATGYGLKSHVRTHTGEKPYKCPEELCSKAFKTSGDLQKHVRTHTGERPFQCPFEGCGRSFTTSNIRKVHVRTHTGERPYTCPEPHCGRGFTSATNYKNHVRIHTGEKPYVCTVPGCGKRFTEYSSLYKHHVVHTHCKPYTCSTCGKTYRQTSTLAMHKRSAHGELEATEESEQALYEQQQLEAASAAEESPPPKRPRIAYLSEVKEERDDIPAQVAMVTEEDGAPQVALITQDGAQQVSLSPEDLQALGSAISMVTQHGSTTLTIPSPDADLATSGTHTVTMVSADGTQTQPV

SEQ ID NO: 847966 - protein, 333 aa, Homo sapiens [sequence omitted]

SEQ ID NO: 847967 - protein, 192 aa, Homo sapiens
HGRRRVSGAPGPAYSAGVGGVGLGARAAAALCPLGTLLLGGAGRHGGGRRPLLGPSMPRPPRGYPACRSRAAAPGWRWGRAEAAEVLRATGGWQWAGERGRQARLGLGLWRRGTLCLGSLTAPPGSPERGTGGEGGGSWAPCAAGPRGARVAAGSAGPDRVNGRAWPVPRGAPAATALAAGTGVLRGRSLPF

SEQ ID NO: 847968 - protein, 192 aa, Homo sapiens; identical to SEQ ID NO: 847967

SEQ ID NO: 847969 - protein, 152 aa, Homo sapiens
MEGAGFPGLLAPLIPRGSAGSAWAPAPPLRFVRWAHCFWEGRADMVAAAAPSSALACRGRLAATRLAGPERQPRGGDGVAPRQRRFCGRLEVGSGREKEEGRRGWASASGAAVPKDFAAENCGCTASGKKLRILPGHLCQGTVHHCVFSVFR

SEQ ID NO: 847970 - protein, 253 aa, Homo sapiens
MEGAGFPGLLAPLIPRGSAGSAWAPAPPLRFVRWAHCFWEGRADMVAAAAPSSALACRGRLAATRLAGPERQPRGGDGVSAACCACCDVLLAGGDVDVFCACSVPCEEKHGRCMCWLCLCALLCPSFVSASVRYTLWIICVMAFDLVPPALGGLSSLWMDGWDNGVLCGGGIVLGVYACELALDCLCCVALIDGAAVLGDLLSCGIVVPCGPREPGGFKVAKENSRFVAQVRPAAVCGPTGQRQESNAHLRPG

SEQ ID NO: 847971 - protein, 763 aa, Homo sapiens
MEHHLQRAISAQQVYGEKRDNMVIPVPEAESNIAYYESIYPGEFKMPKQLIHIQPFSLDAEQPDYDLDSEDEVFVNKLKKKMDICPLQFEEMIDRLEKGSGQQPVSLQEAKLLLKEDDELIREVYEYWIKKRKNCRGPSLIPSVKQEKRDGSSTNDPYVAFRRRTEKMQTRKNRKNDEASYEKMLKLRRDLSRAVTILEMIKRREKSKRELLHLTLEIMEKRYNLGDYNGEIMSEVMAQRQPMKPTYAIPIIPITNSSQFKHQEAMDVKEFKVNKQDKADLIRPKRKYEKKPKVLPSSAAATPQQTSPAALPVFNAKDLNQYDFPSSDEEPLSQVLSGSSEAEEDNDPDGPFAFRRKAGCQYYAPHLDQTGNWPWTSPKDGGLGDVRYRYCLTTLTVPQRCIGFARRRVGRGGRVLLDRAHSDYDSVFHHLDLEMLSSPQHSPVNQFANTSETNTSDKSFSKDLSQILVNIKSCRWRHFRPRTPSLHDSDNDELSCRKLYRSINRTGTAQPGTQTCSTSTQSKSSSGSAHFAFTAEQYQQHQQQLALMQKQQLAQIQQQQANSNSSTNTSQGFVSKTLDSASAQFAASALVTSEQLMGFKMKDDVVLGIGVNGVLPASGVYKGLHLSSTTPTALVHTSPSTAGSALLQPSNITQTSSSHSALSHQVTAANSATTQVLIGNNIRLTVPSSVATVNSIAPINARHIPRTLSAVPSSALKLAAAANCQVSKVPSSSSVDSVPRENHESEKPALNNIADNTVAMEVT

SEQ ID NO: 847972 - protein, 103 aa, Homo sapiens
AGRARAAARCSVGNGWGWLKSAQWSFNVRHVGHGVLKRASERGAERHSLPPSRLVLVPGRRALRSAPQVPGSGWRVGTEPPVLHDPAGRGRFPRAERYLLRLR

SEQ ID NO: 847973 - protein, 836 aa, Homo sapiens
MSKLSFRARALDASKPLPVFRCEDLPDLHEYASINRAVPQMPTGMEKEEESEHHLQRAISAQQVYGEKRDNMVIPVPEAESNIAYYESIYPGEFKMPKQLIHIQPFSLDAEQPDYDLDSEDEVFVNKLKKKMDICPLQFEEMIDRLEKGSGQQPVSLQEAKLLLKEDDELIREVYEYWIKKRKNCRGPSLIPSVKQEKRDGSSTNDPYVAFRRRTEKMQTRKNRKNDEASYEKMLKLRRDLSRAVTILEMIKRREKSKRELLHLTLEIMEKRYNLGDYNGEIMSEVMAQRQPMKPTYAIPIIPITNSSQFKHQEAMDVKEFKVNKQDKADLIRPKRKYEKKPKVLPSSAAATPQQTSPAALPVFNAKDLNQYDFPSSDEEPLSQVLSGSSEAEEDNDPDGPFAFRRKAGCQYYAPHLDQTGNWPWTSPKDGGLGDVRYRYCLTTLTVPQRCIGFARRRVGRGGRVLLDRAHSDYDSVFHHLDLEMLSSPQHSPVNQFANTSETNTSDKSFSKDLSQILVNIKSCRWRHFRPRTPSLHDSDNDELSCRKLYRSINRTGTAQPGTQTCSTSTQSKSSSGSAHFAFTAEQYQQHQQQLALMQKQQLAQIQQQQANSNSSTNTSQNLASNQQKSGFRLNIQGLERTLQGFVSKTLDSASAQFAASALVTSEQLMGFKMKDDVVLGIGVNGVLPASGVYKGLHLSSTTPTALVHTSPSTAGSALLQPSNITQTSSSHSALSHQVTAANSATTQVLIGNNIRLTVPSSVATVNSIAPINARHIPRTLSAVPSSALKLAAAANCQVSKVPSSSSVDSVPRENHESEKPALNNIADNTVAMEVT

SEQ ID NO: 847974 - protein, 682 aa, Homo sapiens
MDICPLQFEEMIDRLEKGSGQQPVSLQEAKLLLKEDDELIREVYEYWIKKRKNCRGPSLIPSVKQEKRDGSSTNDPYVAFRRRTEKMQTRKNRKNDEASYEKMLKLRRDLSRAVTILEMIKRREKSKRELLHLTLEIMEKRYNLGDYNGEIMSEVMAQRQPMKPTYAIPIIPITNSSQFKHQEAMDVKEFKVNKQDKADLIRPKRKYEKKPKVLPSSAAATPQQTSPAALPVFNAKDLNQYDFPSSDEEPLSQVLSGSSEAEEDNDPDGPFAFRRKAGCQYYAPHLDQTGNWPWTSPKDGGLGDVRYRYCLTTLTVPQRCIGFARRRVGRGGRVLLDRAHSDYDSVFHHLDLEMLSSPQHSPVNQFANTSETNTSDKSFSKDLSQILVNIKSCRWRHFRPRTPSLHDSDNDELSCRKLYRSINRTGTAQPGTQTCSTSTQSKSSSGSAHFAFTAEQYQQHQQQLALMQKQQLAQIQQQQANSNSSTNTSQGFVSKTLDSASAQFAASALVTSEQLMGFKMKDDVVLGIGVNGVLPASGVYKGLHLSSTTPTALVHTSPSTAGSALLQPSNITQTSSSHSALSHQVTAANSATTQVLIGNNIRLTVPSSVATVNSIAPINARHIPRTLSAVPSSALKLAAAANCQVSKVPSSSSVDSVPRENHESEKPALNNIADNTVAMEVT

SEQ ID NO: 847975 - protein, 836 aa, Homo sapiens; identical to SEQ ID NO: 847973

SEQ ID NO: 847976 - protein, 166 aa, Homo sapiens
MGLLRDEALAEVKDMEQLLALGKEARACPYYGSRLAIPAAQLVVLPYQMLLHAATRQAAGIRLQDQVVIIDEAHNLIDTITGMHSVEVSGSQLCQAHSQLLQYVERYGVVKAKNLMYLKQILYLLEKFVAVLGGESLVPLLTPGLQNSLGCFFLGCPSGHLSSLCF

SEQ ID NO: 847977 - protein, 801 aa, Homo sapiens
MSKLSFRARALDASKPLPVFRCEDLPDLHEYASINRAVPQMPTGMEKEEESEHHLQRAISAQQVYGEKRDNMVIPVPEAESNIAYYESIYPGEFKMPKQLIHIQPFSLDAEQPDYDLDSEDEVFVNKLKKKMDICPLQFEEMIDRLEKGSGQQPVSLQEAKLLLKEDDELIREVYEYWIKKRKNCRGPSLIPSVKQEKRDGSSTNDPYVAFRRRTEKMQTRKNRKNDEASYEKMLKLRRDLSRAVTILEMIKRREKSKRELLHLTLEIMEKRYNLGDYNGEIMSEVMAQRQPMKPTYAIPIIPITNSSQFKHQEAMDVKEFKVNKQDKADLIRPKRKYEKKPKVLPSSAAATPQQTSPAALPVFNAKDLNQYDFPSSDEEPLSQVLSGSSEAEEDNDPDGPFAFRRKAGCQYYAPHLDQTGNWPWTSPKDGGLGDVRYRYCLTTLTVPQRCIGFARRRVGRGGRVLLDRAHSDYDSVFHHLDLEMLSSPQHSPVNQFANTSETNTSDKSFSKDLSQILVNIKSCRWRHFRPRTPSLHDSDNDELSCRKLYRSINRTGTAQPGTQTCSTSTQSKSSSGSAHFAFTAEQYQQHQQQLALMQKQQLAQIQQQQANSNSSTNTSQGFVSKTLDSASAQFAASALVTSEQLMGFKMKDDVVLGIGVNGVLPASGVYKGLHLSSTTPTALVHTSPSTAGSALLQPSNITQTSSSHSALSHQVTAANSATTQVLIGNNIRLTVPSSVATVNSIAPINARHIPRTLSAVPSSALKLAAAANCQVSKVPSSSSVDSVPRSLMLQFFFSYC

SEQ ID NO: 847978 - protein, 618 aa, Homo sapiens
MSKLSFRARALDASKPLPVFRCEDLPDLHEYASINRAVPQMPTGMEKEEESEHHLQRAISAQQVYGEKRDNMVIPVPEAESNIAYYESIYPGEFKMPKQLIHIQPFSLDAEQPDYDLDSEDEVFVNKLKKKMDICPLQFEEMIDRLEKGSGQQPVSLQEAKLLLKEDDELIREVYEYWIKKRKNCRGPSLIPSVKQEKRDGSSTNDPYVAFRRRTEKMQTRKNRKNDEASYEKMLKLRRDLSRAVTILEMIKRREKSKRELLHLTLEIMEKRYNLGDYNGEIMSEVMAQRQPMKPTYAIPIIPITNSSQFKHQEAMDVKEFKVNKQDKADLIRPKRKYEKKPKVLPSSAAATPQQTSPAALPVFNAKDLNQYDFPSSDEEPLSQVLSGSSEAEEDNDPDGPFAFRRKAGCQYYAPHLDQTGNWPWTSPKDGGLGDVRYRYCLTTLTVPQRCIGFARRRVGRGGRVLLDRAHSDYDSVFHHLDLEMLSSPQHSPVNQFANTSETNTSDKSFSKDLSQILVNIKSCRWRHFRPRTPSLHDSDNDELSCRKLYRSINRTGTAQPGTQTCSTSTQSKSSSGSAHFGMLTVNDVRFYRNVRSNHFPFVRLCGLLHLWLKVLFS

SEQ ID NO: 847979 - protein, 103 aa, Homo sapiens; identical to SEQ ID NO: 847972

SEQ ID NO: 847980 - protein, 103 aa, Homo sapiens; identical to SEQ ID NO: 847972

SEQ ID NO: 847981 - protein, 120 aa, Homo sapiens [sequence omitted]

SEQ ID NO: 847982 - protein, 836 aa, Homo sapiens; identical to SEQ ID NO: 847973

SEQ ID NO: 847983 - protein, 784 aa, Homo sapiens
LTLEDPRTVRQMPTVMQKEEEIEHHLQRAISAQQVYGEKRDNMVIPVPEAESNIAYYESIYPGEFKMPKQLIHIQPFSLDAEQPDYDLDSEDEVFVNKLKKKMDICPLQFEEMIDRLEKGSGQQPVSLQEAKLLLKEDDELIREVYEYWIKKRKNCRGPSLIPSVKQEKRDGSSTNDPYVAFRRRTEKMQTRKNRKNDEASYEKMLKLRRDLSRAVTILEMIKRREKSKRELLHLTLEIMEKRYNLGDYNGEIMSEVMAQRQPMKPTYAIPIIPITNSSQFKHQEAMDVKEFKVNKQDKADLIRPKRKYEKKPKVLPSSAAATPQQTSPAALPVFNAKDLNQYDFPSSDEEPLSQVLSGSSEAEEDNDPDGPFAFRRKAGCQYYAPHLDQTGNWPWTSPKDGGLGDVRYRYCLTTLTVPQRCIGFARRRVGRGGRVLLDRAHSDYDSVFHHLDLEMLSSPQHSPVNQFANTSETNTSDKSFSKDLSQILVNIKSCRWRHFRPRTPSLHDSDNDELSCRKLYRSINRTGTAQPGTQTCSTSTQSKSSSGSAHFAFTAEQYQQHQQQLALMQKQQLAQIQQQQANSNSSTNTSQGFVSKTLDSASAQFAASALVTSEQLMGFKMKDDVVLGIGVNGVLPASGVYKGLHLSSTTPTALVHTSPSTAGSALLQPSNITQTSSSHSALSHQVTAANSATTQVLIGNNIRLTVPSSVATVNSIAPINARHIPRTLSAVPSSALKLAAAANCQVSKVPSSSSVDSVPRENHESEKPALNNIADNTVAMEVT

SEQ ID NO: 847984 - protein, 836 aa, Homo sapiens; identical to SEQ ID NO: 847973

SEQ ID NO: 847985 - protein, 836 aa, Homo sapiens; identical to SEQ ID NO: 847973

SEQ ID NO: 847986 - protein, 272 aa, Homo sapiens
MSKLSFRARALDASKPLPVFRCEDLPDLHEYASINRAVPQMPTGMEKEEESEHHLQRAISAQQVYGEKRDNMVIPVPEAESNIAYYESIYPGEFKMPKQLIHIQPFSLDAEQPDYDLDSEDEVFVNKLKKKMDICPLQFEEMIDRLEKGSGQQPVSLQEAKLLLKEDDELIREVYEYWIKKRKNCRGPSLIPSVKQEKRDGSSTNDPYVAFRRRTEKMQTRKNRKNDEASYEKMLKLRRDLSRAVTILEMIKRREKSKRELLHLTLEIMEKR

SEQ ID NO: 847987 - protein, 356 aa, Homo sapiens
MSRPLLITFTPATDPSDLWKDGQQQPQPEKPESTLDGAAARAFYEALIGDESSAPDSQRSQTEPARERKRKKRRIMKAPAAEAVAEGASGRHGQGRSLEAEDKMTHRILRAAQEGDLPELRRLLEPHEAGGAGGNINARDAFWWTPLMCAARAGQGAAVSYLLGRGAAWVGVCELSGRDAAQLAEEAGFPEVARMVRESHGETRSPENRSPTPSLQYCENCDTHFQDSNHRTSTAHLLSLSQGPQPPNLPLGVPISSPGFKLLLRGGWEPGMGLGPRGEGRANPIPTVLKRDQEGLGYRSAPQPRVTHFPAWDTRAVAGRERPPRVATLSWREERRREEKDRAWERDLRTYMNLEF

SEQ ID NO: 847988 - protein, 356 aa, Homo sapiens; identical to SEQ ID NO: 847987

SEQ ID NO: 847989 - protein, 356 aa, Homo sapiens; identical to SEQ ID NO: 847987

SEQ ID NO: 847990 - protein, 342 aa, Homo sapiens
MSRPLLITFTPATDPSDLWKDGQQQPQPEKPESTLDGAAARAFYEALIGDESSAPDSQRSQTEPARERKRKKRRIMKAPAAEAVAEGASGRHGQGRSLEAEDKMTHRILRAAQEGDLPELRRLLEPHEAGGAGGNINARDAFWWTPLMCAARAGQGAAVSYLLGRGAAWVGVCELSGRDAAQLAEEAGFPEVARMVRESHGETRSPENRSPTPSLQYCENCDTHFQDSNHRTSTAHLLSLSQGPQPPNLPLGVPISRMGLGPRGEGRANPIPTVLKRDQEGLGYRSAPQPRVTHFPAWDTRAVAGRERPPRVATLSWREERRREEKDRAWERDLRTYMNLEF

SEQ ID NO: 847991 - protein, 209 aa, Homo sapiens [sequence omitted]

SEQ ID NO: 847992 - protein, 341 aa, Homo sapiens
VLWGYQAGMLLVTHCCVLSSGQGHAVSYLLGRGAAWVGVCELSGRDAAQLAEEAGFPEVARMVRESHGGEKEGGRRHGQGRSLEAEDKMTHRILRAAQEGDLPELRRLLEPHEAGGAGGNINARDAFWWTPLMCAARAGQGAAVSYLLGRGAAWVGVCELSGRDAAQLAEEAGFPEVARMVRESHGETRSPENRSPTPSLQYCENCDTHFQDSNHRTSTAHLLSLSQGPQPPNLPLGVPISSPGFKLLLRGGWEPGMGLGPRGEGRANPIPTVLKRDQEGLGYRSAPQPRVTHFPAWDTRAVAGRERPPRVATLSWREERRREEKDRAWERDLRTYMNLEF

SEQ ID NO: 847993 - protein, 129 aa, Homo sapiens
MSRPLLITFTPATDPSDLWKDGQQQPQPEKPESTLDGAAARAFYEALIGDESSAPDSQRSQTEPARERKRKKRRIMKAPAAEAVAEGASGRHGQGRSLEAEDKMTHRILRAAQEGDLPELRRTGLGSGI

SEQ ID NO: 847994 - protein, 108 aa, Homo sapiens
INHLWFIHFSGSYFEEAKQKPGSHMQVPPESEGAASPGGMIRSPPCQSGFTFRSQTLLGVPHLFFQPPWTKNCPASCKSHFPQEEFPDYSQFTDFTNISPYTMCQEYR

SEQ ID NO: 847995 - protein, 356 aa, Homo sapiens; identical to SEQ ID NO: 847987

SEQ ID NO: 847996 - protein, 356 aa, Homo sapiens; identical to SEQ ID NO: 847987

SEQ ID NO: 847997 - protein, 356 aa, Homo sapiens; identical to SEQ ID NO: 847987

SEQ ID NO: 847998 - protein, 340 aa, Homo sapiens
MSRPLLITFTPATDPKSTLDGAAARAFYEALIGDESSAPDSQRSQTEPARERKRKKRRIMKAPAAEAVAEGASGRHGQGRSLEAEDKMTHRILRAAQEGDLPELRRLLEPHEAGGAGGNINARDAFWWTPLMCAARAGQGAAVSYLLGRGAAWVGVCELSGRDAAQLAEEAGFPEVARMVRESHGETRSPENRSPTPSLQYCENCDTHFQDSNHRTSTAHLLSLSQGPQPPNLPLGVPISSPGFKLLLRGGWEPGMGLGPRGEGRANPIPTVLKRDQEGLGYRSAPQPRVTHFPAWDTRAVAGRERPPRVATLSWREERRREEKDRAWERDLRTYMNLEF

SEQ ID NO: 847999 - protein, 209 aa, Homo sapiens [sequence omitted]

SEQ ID NO: 848000 - protein, 2040 aa, Homo sapiens
AGVLEDPSKRIRTDLQKVSDLSAPFSQSAGVDQKELSFSPSLLKIFCQLFSIHVDAINIMVLKVDTSESLWHIQISRSRFLLDSDGKRLICEVSLCKINSKVLKSGQLEDTCLVELSLALDLCLKVGISSRHLTAITVDVWTLHAELHEGLFQSQLLCQGPSLASKPVPCSEVTENLVEPTLPGLFLLQQLPDQVKVKMENTSVVLSMNSQKRHLTWTLKLLQFLYHRDEDQLPLRSFTANSDMAQMSTELLLEDGLLLSQSRQRIVCLNSLKASVQVTTIDLSASLVLNTCIIHYRHQEFSHWLHLLALETQGSSSPVLKQRKKRTFPQILAPIIFSTSISNVNISIQLGDTPPFALGFNSISLDYQHLRPQSIHQRGVLTVDHLCWRVGSDSHIQRAPHPPNMHVWGEALVLDSFTLQGSYNQPLGLSSTQSDTLFLDCTIRGLQVEASDTCAQCLSRILSLMGPQSGKSAVSRHSSFGESVSLLWKVDLKVEDMNLFTLSALVGASEVRLDTLTILGSAETSTVGIQGLVLALVKSVTEKMQPCCKAPDIPTPVLSLSMLSITYHSSIRSLEVQCGAGLTLLWSPPDHMYLYQHVLATLQCRDLLRATVFPETVPSLALETSGTTSELEGRAPEPLPPKRLLNLTLEVSTAKLTAFVAEDKFITLAAESVSLSRHGGSLQAYCPELAAGFDGNSIFNFKEVEVQLLPELEEMILHRNPFPALQTLRNRVWLLSFGSVSVEFPYQYDFSRTLDEAVGVQKWLKGLHQGTRAWASPSPVPLPPDLLLKVEHFSWVFLDDVFEVKLHDNYELMKDESKESAKRLQLLDAKVAALRKQHGELLPARKIEELYASLERKNIEIYIQRSRRLYGNTPMRRALLTWSLAGLELVALADASFHGPEHVVEQVQELDPGSPFPPEGLDLVIQWCRMLKCNVKSFLVRIRDYPRYLFEIRDWRLMGRLVGTEQSGQPCSRRRQILHLGLPWGNVAVERNMPPLKFYHDFHSEIFQYTVVWGPCWDPAWTLIGQCVDLLTKPSADPSPPLPWWDKSRLLFHGDWHMDIEQANLHQLATEDPYNTTENMHWEWSHLSFHWKPGQFVFKGDLDINVRTASKYDDCCFLHLPDLCMTLDLQWLCHGNPHDHHSVTLRAPEFLPEVPLGQLHDSYRAFRSENLNLSIKMDLTRHSGTISQPRILLYSSTLRWMQNFWATWTSVTRPICRGKLFNNLKPSKKKLGQHYKQLSYTALFPQLQVHYWASFAQQRGIQIECSQGHVFTRGTQRLIPQAGTVMRRLISDWSVTQMVSDLSQVTVHLMASPTEENADHCLDPLVTKTHLLSLSSLTYQRHSNRTAEEELSARDGDPTFHTHQLHLVDLRISWTTTNRDIAFGLYDGYKKAAVLKRNLSTEALKGLKIDPQMPAKKPKRGVPTSASAPPRVNTPSFSGQPDKGSSGGAYMLQKLIEETDRFVVFTEEESGMSDQLCGIAACQTDDIYNRNCLIELVNCQMVLRGAETEGCVIVSAAKAQLLQCQHHPAWYGDTLKQKTSWTCLLDGMQYFATTESSPTEQDGRQLWLEVKNIEEHRQRSLDSVQELMESGQAVGGMVTTTTDWNQPAEAQQAQQVQRIISRCNCRMYYISYSHDIDPELATQIKPPEVLENQEKEDLLKKQEGAVDTFTLIHHELEISTNPAQYAMILDIVNNLLLHVEPKRKEHSEKKQRVRFQLEISSNPEEQRSSILHLQEAVRQHVAQIRQLEKQMYSIMKSLQDDSKNENLLDLNQKLQLQLNQEKANLQLESEELNILIRCFKDFQLQRANKMELRKQQEDVSVVRRTEFYFAQARWRLTEEDGQLGIAELELQRFLYSKVNKSDDTAEHLLELGWFTMNNLLPNAVYKVVLRPQSSCQSGRQLALRLFSKVRPPVGGISVKEHFEVNVVPLTIQLTHQFFHRMMGFFFPGRSVEDDEVGDEEDKSKLVTTGIPVVKPRQLIATDDAVPLGPGKGVAQGLTRSSGVRRSFRKSPEVPNMPLMIEKWESLEVLFGVAWDFFGFL

SEQ ID NO: 848001 - protein, 2114 aa, Homo sapiens
AGVLEDPSKRIRTDLQKVSDLSAPFSQSAGVDQKELSFSPSLLKIFCQLFSIHVDAINIMVLKVDTSESLWHIQISRSRFLLDSDGKRLICEVSLCKINSKVLKSGQLEDTCLVELSLALDLCLKVGISSRHLTAITVDVWTLHAELHEGLFQSQLLCQGPSLASKPVPCSEVTENLVEPTLPGLFLLQQLPDQVKVKMENTSVVLSMNSQKRHLTWTLKLLQFLYHRDEDQLPLRSFTANSDMAQMSTELLLEDGLLLSQSRQRIVCLNSLKASVQVTTIDLSASLVLNTCIIHYRHQEFSHWLHLLALETQGSSSPVLKQRKKRTFPQILAPIIFSTSISNVNISIQLGDTPPFALGFNSISLDYQHLRPQSIHQRGVLTVDHLCWRVGSDSHIQRAPHPPNMHVWGEALVLDSFTLQGSYNQPLGLSSTQSDTLFLDCTIRGLQVEASDTCAQCLSRILSLMGPQSGKSAVSRHSSFGESVSLLWKVDLKVEDMNLFTLSALVGASEVRLDTLTILGSAETSTVGIQGLVLALVKSVTEKMQPCCKAPDIPTPVLSLSMLSITYHSSIRSLEVQCGAGLTLLWSPPDHMYLYQHVLATLQCRDLLRATVFPETVPSLALETSGTTSELEGRAPEPLPPKRLLNLTLEVSTAKLTAFVAEDKFITLAAESVSLSRHGGSLQAYCPELAAGFDGNSIFNFKEVEVQLLPELEEMILHRNPFPALQTLRNRVWLLSFGSVSVEFPYQYDFSRTLDEAVGVQKWLKGLHQGTRAWASPSPVPLPPDLLLKVEHFSWVFLDDVFEVKLHDNYELMKDESKESAKRLQLLDAKVAALRKQHGELLPARKIEELYASLERKNIEIYIQRSRRLYGNTPMRRALLTWSLAGLELVALADASFHGPEHVVEQVQELDPGSPFPPEGLDLVIQWCRMLKCNVKSFLVRIRDYPRYLFEIRDWRLMGRLVGTEQSGQPCSRRRQILHLGLPWGNVAVERNMPPLKFYHDFHSEIFQYTVVWGPCWDPAWTLIGQCVDLLTKPSADPSPPLPWWDKSRLLFHGDWHMDIEQANLHQLATEDPYNTTENMHWEWSHLSFHWKPGQFVFKGDLDINVRTASKYDDCCFLHLPDLCMTLDLQWLCHGNPHDHHSVTLRAPEFLPEVPLGQLHDSYRAFRSENLNLSIKMDLTRHSGTISQPRILLYSSTLRWMQNFWATWTSVTRPICRGKLFNNLKPSKKKLGQHYKQLSYTALFPQLQVHYWASFAQQRGIQIECSQGHVFTRGTQRLIPQAGTVMRRLISDWSVTQMVSDLSQVTVHLMASPTEENADHCLDPLVTKTHLLSLSSLTYQRHSNRTAEEELSARDGDPTFHTHQLHLVDLRISWTTTNRDIAFGLYDGYKKAAVLKRNLSTEALKGLKIDPQMPAKKPKRGVPTSASAPPRVNTPSFSGQPDKGSSGGAYMLQKLIEETDRFVVFTEEESGMSDQLCGIAACQTDDIYNRNCLIELVNCQMVLRGAETEGCVIVSAAKAQLLQCQHHPAWYGDTLKQKTSWTCLLDGMQYFATTESSPTEQDGRQLWLEVKNIEEHRQRSLDSVQELMESGQAVGGMVTTTTDWNQPAEAQQAQQVQRIISRCNCRMYYISYSHDIDPELATQIKPPEVLENQEKEDLLKKQEGAVDTFTLIHHELEISTNPAQYAMILDIVNNLLLHVEPKRKEHSEKKQRVRFQLEISSNPEEQRSSILHLQEAVRQHVAQIRQLEKQMYSIMKSLQDDSKNENLLDLNQKLQLQLNQEKANLQLESEELNILIRCFKDFQLQRANKMELRKQQEDVSVVRRTEFYFAQARWRLTEEDGQLGIAELELQRFLYSKVNKSDDTAEHLLELGWFTMNNLLPNAVYKVNVVPLTIQLTHQFFHRMMGFFFPGRSVEDDEVGDEEDKSKLVTTGIPVVKPRQLIATDDAVPLGPGKGVAQGLTRSSGVRRSFRKSPEHPVDDIDKMKERAAMNNSFIYIKIPQVPLCVSYKGEKNSVDWGDLNLVLPCLEYHNNTWTWLDFAMAVKRDSRKALVAQVIKEKLRLKSATGSEVRGKLETKSDLNMQQQEEEEKARLLIGLSVGDKNPGKKSIFGRRK

SEQ ID NO: 848002 - protein, 2238 aa, Homo sapiens
AGVLEDPSKRIRTDLQKVSDLSAPFSQSAGVDQKELSFSPSLLKIFCQLFSIHVDAINIMVLKVDTSESLWHIQISRSRFLLDSDGKRLICEVSLCKINSKVLKSGQLEDTCLVELSLALDLCLKVGISSRHLTAITVDVWTLHAELHEGLFQSQLLCQGPSLASKPVPCSEVTENLVEPTLPGLFLLQQLPDQVKVKMENTSVVLSMNSQKRHLTWTLKLLQFLYHRDEDQLPLRSFTANSDMAQMSTELLLEGSWVGVLVLSENGRTRYSLCSCPIWSPESNLSVTGEWKEENILRENEPQLTSFDDSLLIPLPASDPLPVLPLALPVLSSDLSSGLFTDGLLLSQSRQRIVCLNSLKASVQVTTIDLSASLVLNTCIIHYRHQEFSHWLHLLALETQGSSSPVLKQRKKRTFPQILAPIIFSTSISNVNISIQLGDTPPFALGFNSISLDYQHLRPQSIHQRGVLTVDHLCWRVGSDSHIQRAPHPPNMHVWGEALVLDSFTLQGSYNQPLGLSSTQSDTLFLDCTIRGLQVEASDTCAQCLSRILSLMGPQSGKSAVSRHSSFGESVSLLWKVDLKVEDMNLFTLSALVGASEVRLDTLTILGSAETSTVGIQGLVLALVKSVTEKMQPCCKAPDIPTPVLSLSMLSITYHSSIRSLEVQCGAGLTLLWSPPDHMYLYQHVLATLQCRDLLRATVFPETVPSLALETSGTTSELEGRAPEPLPPKRLLNLTLEVSTAKLTAFVAEDKFITLAAESVSLSRHGGSLQAYCPELAAGFDGNSIFNFKEVEVQLLPELEEMILHRNPFPALQTLRNRVWLLSFGSVSVEFPYQYDFSRTLDEAVGVQKWLKGLHQGTRAWASPSPVPLPPDLLLKVEHFSWVFLDDVFEVKLHDNYELMKDESKESAKRLQLLDAKVAALRKQHGELLPARKIEELYASLERKNIEIYIQRSRRLYGNTPMRRALLTWSLAGLELVALADASFHGPEHVVEQVQELDPGSPFPPEGLDLVIQWCRMLKCNVKSFLVRIRDYPRYLFEIRDWRLMGRLVGTEQSGQPCSRRRQILHLGLPWGNVAVERNMPPLKFYHDFHSEIFQYTVVWGPCWDPAWTLIGQCVDLLTKPSADPSPPLPWWDKSRLLFHGDWHMDIEQANLHQLATEDPYNTTENMHWEWSHLSFHWKPGQFVFKGDLDINVRTASKYDDCCFLHLPDLCMTLDLQWLCHGNPHDHHSVTLRAPEFLPEVPLGQLHDSYRAFRSENLNLSIKMDLTRHSGTISQPRILLYSSTLRWMQNFWATWTSVTRPICRGKLFNNLKPSKKKLGQHYKQLSYTALFPQLQVHYWASFAQQRGIQIECSQGHVFTRGTQRLIPQAGTVMRRLISDWSVTQMVSDLSQVTVHLMASPTEENADHCLDPLVTKTHLLSLSSLTYQRHSNRTAEEELSARDGDPTFHTHQLHLVDLRISWTTTNRDIAFGLYDGYKKAAVLKRNLSTEALKGLKIDPQMPAKKPKRGVPTSASAPPRVNTPSFSGQPDKGSSGGAYMLQKLIEETDRFVVFTEEESGMSDQLCGIAACQTDDIYNRNCLIELVNCQMVLRGAETEGCVIVSAAKAQLLQCQHHPAWYGDTLKQKTSWTCLLDGMQYFATTESSPTEQDGRQLWLEVKNIEEHRQRSLDSVQELMESGQAVGGMVTTTTDWNQPAEAQQAQQVQRIISRCNCRMYYISYSHDIDPELATQIKPPEVLENQEKEDLLKKQEGAVDTFTLIHHELEISTNPAQYAMILDIVNNLLLHVEPKRKEHSEKKQRVRFQLEISSNPEEQRSSILHLQEAVRQHVAQIRQLEKQMYSIMKSLQDDSKNENLLDLNQKLQLQLNQEKANLQLESEELNILIRCFKDFQLQRANKMELRKQQEDVSVVRRTEFYFAQARWRLTEEDGQLGIAELELQRFLYSKVNKSDDTAEHLLELGWFTMNNLLPNAVYKVVLRPQSSCQSGRQLALRLFSKVRPPVGGISVKEHFEVNVVPLTIQLTHQFFHRMMGFFFPGRSVEDDEVGDEEDKSKLVTTGIPVVKPRQLIATDDAVPLGPGKGVAQGLTRSSGVRRSFRKSPEHPVDDIDKMKERAAMNNSFIYIKIPQVPLCVSYKGEKNSVDWGDLNLVLPCLEYHNNTWTWLDFAMAVKRDSRKALVAQVIKEKLRLKSATGSEVRGKLETKSDLNMQQQEEEEKARLLIGLSVGDKNPGKKSIFGRRK

SEQ ID NO: 848003 - protein, 2151 aa, Homo sapiens
AGVLEDPSKRIRTDLQKVSDLSAPFSQSAGVDQKELSFSPSLLKIFCQLFSIHVDAINIMVLKVDTSESLWHIQISRSRFLLDSDGKRLICEVSLCKINSKVLKSGQLEDTCLVELSLALDLCLKVGISSRHLTAITVDVWTLHAELHEGLFQSQLLCQGPSLASKPVPCSEVTENLVEPTLPGLFLLQQLPDQVKVKMENTSVVLSMNSQKRHLTWTLKLLQFLYHRDEDQLPLRSFTANSDMAQMSTELLLEDGLLLSQSRQRIVCLNSLKASVQVTTIDLSASLVLNTCIIHYRHQEFSHWLHLLALETQGSSSPVLKQRKKRTFPQILAPIIFSTSISNVNISIQLGDTPPFALGFNSISLDYQHLRPQSIHQRGVLTVDHLCWRVGSDSHIQRAPHPPNMHVWGEALVLDSFTLQGSYNQPLGLSSTQSDTLFLDCTIRGLQVEASDTCAQCLSRILSLMGPQSGKSAVSRHSSFGESVSLLWKVDLKVEDMNLFTLSALVGASEVRLDTLTILGSAETSTVGIQGLVLALVKSVTEKMQPCCKAPDIPTPVLSLSMLSITYHSSIRSLEVQCGAGLTLLWSPPDHMYLYQHVLATLQCRDLLRATVFPETVPSLALETSGTTSELEGRAPEPLPPKRLLNLTLEVSTAKLTAFVAEDKFITLAAESVSLSRHGGSLQAYCPELAAGFDGNSIFNFKEVEVQLLPELEEMILHRNPFPALQTLRNRVWLLSFGSVSVEFPYQYDFSRTLDEAVGVQKWLKGLHQGTRAWASPSPVPLPPDLLLKVEHFSWVFLDDVFEVKLHDNYELMKDESKESAKRLQLLDAKVAALRKQHGELLPARKIEELYASLERKNIEIYIQRSRRLYGNTPMRRALLTWSLAGLELVALADASFHGPEHVVEQVQELDPGSPFPPEGLDLVIQWCRMLKCNVKSFLVRIRDYPRYLFEIRDWRLMGRLVGTEQSGQPCSRRRQILHLGLPWGNVAVERNMPPLKFYHDFHSEIFQYTVVWGPCWDPAWTLIGQCVDLLTKPSADPSPPLPWWDKSRLLFHGDWHMDIEQANLHQLATEDPYNTTENMHWEWSHLSFHWKPGQFVFKGDLDINVRTASKYDDCCFLHLPDLCMTLDLQWLCHGNPHDHHSVTLRAPEFLPEVPLGQLHDSYRAFRSENLNLSIKMDLTRHSGTISQPRILLYSSTLRWMQNFWATWTSVTRPICRGKLFNNLKPSKKKLGQHYKQLSYTALFPQLQVHYWASFAQQRGIQIECSQGHVFTRGTQRLIPQAGTVMRRLISDWSVTQMVSDLSQVTVHLMASPTEENADHCLDPLVTKTHLLSLSSLTYQRHSNRTAEEELSARDGDPTFHTHQLHLVDLRISWTTTNRDIAFGLYDGYKKAAVLKRNLSTEALKGLKIDPQMPAKKPKRGVPTSASAPPRVNTPSFSGQPDKGSSGGAYMLQKLIEETDRFVVFTEEESGMSDQLCGIAACQTDDIYNRNCLIELVNCQMVLRGAETEGCVIVSAAKAQLLQCQHHPAWYGDTLKQKTSWTCLLDGMQYFATTESSPTEQDGRQLWLEVKNIEEHRQRSLDSVQELMESGQAVGGMVTTTTDWNQPAEAQQAQQVQRIISRCNCRMYYISYSHDIDPELATQIKPPEVLENQEKEDLLKKQEGAVDTFTLIHHELEISTNPAQYAMILDIVNNLLLHVEPKRKEHSEKKQRVRFQLEISSNPEEQRSSILHLQEAVRQHVAQIRQLEKQMYSIMKSLQDDSKNENLLDLNQKLQLQLNQEKANLQLESEELNILIRCFKDFQLQRANKMELRKQQEDVSVVRRTEFYFAQARWRLTEEDGQLGIAELELQRFLYSKVNKSDDTAEHLLELGWFTMNNLLPNAVYKVVLRPQSSCQSGRQLALRLFSKVRPPVGGISVKEHFEVNVVPLTIQLTHQFFHRMMGFFFPGRSVEDDEVGDEEDKSKLVTTGIPVVKPRQLIATDDAVPLGPGKGVAQGLTRSSGVRRSFRKSPEHPVDDIDKMKERAAMNNSFIYIKIPQVPLCVSYKGEKNSVDWGDLNLVLPCLEYHNNTWTWLDFAMAVKRDSRKALVAQVIKEKLRLKSATGSEVRGKLETKSDLNMQQQEEEEKARLLIGLSVGDKNPGKKSIFGRRK

SEQ ID NO: 848004 - protein, 2151 aa, Homo sapiens; identical to SEQ ID NO: 848003

SEQ ID NO: 848005 - protein, 2151 aa, Homo sapiens; identical to SEQ ID NO: 848003

SEQ ID NO: 848006 - protein, 1876 aa, Homo sapiens
AGVLEDPSKRIRTDLQKVSDLSAPFSQSAGVDQKELSFSPSLLKIFCQLFSIHVDAINIMVLKVDTSESLWHIQISRSRFLLDSDGKRLICEVSLCKINSKVLKSGQLEDTCLVELSLALDLCLKVGISSRHLTAITVDVWTLHAELHEGLFQSQLLCQGPSLASKPVPCSEVTENLVEPTLPGLFLLQQLPDQVKVKMENTSVVLSMNSQKRHLTWTLKLLQFLYHRDEDQLPLRSFTANSDMAQMSTELLLEDGLLLSQSRQRIVCLNSLKASVQVTTIDLSASLVLNTCIIHYRHQEFSHWLHLLALETQGSSSPVLKQRKKRTFPQILAPIIFSTSISNVNISIQLGDTPPFALGFNSISLDYQHLRPQSIHQRGVLTVDHLCWRVGSDSHIQRAPHPPNMHVWGEALVLDSFTLQGSYNQPLGLSSTQSDTLFLDCTIRGLQVEASDTCAQCLSRILSLMGPQSGKSAVSRHSSFGESVSLLWKVDLKVEDMNLFTLSALVGASEVRLDTLTILGSAETSTVGIQGLVLALVKSVTEKMQPCCKAPDIPTPVLSLSMLSITYHSSIRSLEVQCGAGLTLLWSPPDHMYLYQHVLATLQCRDLLRATVFPETVPSLALETSGTTSELEGRAPEPLPPKRLLNLTLEVSTAKLTAFVAEDKFITLAAESVSLSRHGGSLQAYCPELAAGFDGNSIFNFKEVEVQLLPELEEMILHRNPFPALQTLRNRVWLLSFGSVSVEFPYQYDFSRTLDEAVGVQKWLKGLHQGTRAWASPSPVPLPPDLLLKVEHFSWVFLDDVFEVKLHDNYELMKDESKESAKRLQLLDAKVAALRKQHGELLPARKIEELYASLERKNIEIYIQRSRRLYGNTPMRRALLTWSLAGLELVALADASFHGPEHVVEQVQELDPGSPFPPEGLDLVIQWCRMLKCNVKSFLVRIRDYPRYLFEIRDWRLMGRLVGTEQSGQPCSRRRQILHLGLPWGNVAVERNMPPLKFYHDFHSEIFQYTVVWGPCWDPAWTLIGQCVDLLTKPSADPSPPLPWWDKSRLLFHGDWHMDIEQANLHQLATEDPYNTTENMHWEWSHLSFHWKPGQFVFKGDLDINVRTASKYDDCCFLHLPDLCMTLDLQWLCHGNPHDHHSVTLRAPEFLPEVPLGQLHDSYRAFRSENLNLSIKMDLTRHSGTISQPRILLYSSTLRWMQNFWATWTSVTRPICRGKLFNNLKPSKKKLGQHYKQLSYTALFPQLQVHYWASFAQQRGIQIECSQGHVFTRGTQRLIPQAGTVMRRLISDWSVTQMVSDLSQVTVHLMASPTEENADHCLDPLVTKTHLLSLSSLTYQRHSNRTAEEELSARDGDPTFHTHQLHLVDLRISWTTTNRDIAFGLYDGYKKAAVLKRNLSTEALKGLKIDPQMPAKKPKRGVPTSASAPPRVNTPSFSGQPDKGSSGGAYMLQKLIEETDRFVVFTEEESGMSDQLCGIAACQTDDIYNRNCLIELVNCQMVLRGAETEGCVIVSAAKAQLLQCQHHPAWYGDTLKQKTSWTCLLDGMQYFATTESSPTEQDGRQLWLEVKNIEEHRQRSLDSVQELMESGQAVGGMVTTTTDWNQPAEAQQAQQVQRIISRCNCRMYYISYSHDIDPELATQIKPPEVLENQEKEDLLKKQEGAVDTFTLIHHELEISTNPAQYAMILDIVNNLLLHVEPKRKEHSEKKQRVRFQLEISSNPEEQRSSILHLQEAVRQHVAQIRQLEKQMYSIMKSLQDDSKNENLLDLNQKLQLQLNQEKANLQLESEELNILIRCFKDFQLQRANKMELRKQQEDVSVVRRTEFYFAQARWRLTEEDGQLGIAELELQRFLYSKVSGVYGHTKAAVLRDIDLA

SEQ ID NO: 848007 - protein, 1801 aa, Homo sapiens
AGVLEDPSKRIRTDLQKVSDLSAPFSQSAGVDQKELSFSPSLLKIFCQLFSIHVDAINIMVLKVDTSESLWHIQISRSRFLLDSDGKRLICEVSLCKINSKVLKSGQLEDTCLVELSLALDLCLKVGISSRHLTAITVDVWTLHAELHEGLFQSQLLCQGPSLASKPVPCSEVTENLVEPTLPGLFLLQQLPDQVKVKMENTSVVLSMNSQKRHLTWTLKLLQFLYHRDEDQLPLRSFTANSDMAQMSTELLLEDGLLLSQSRQRIVCLNSLKASVQVTTIDLSASLVLNTCIIHYRHQEFSHWLHLLALETQGSSSPVLKQRKKRTFPQILAPIIFSTSISNVNISIQLGDTPPFALGFNSISLDYQHLRPQSIHQRGVLTVDHLCWRVGSDSHIQRAPHPPNMHVWGEALVLDSFTLQGSYNQPLGLSSTQSDTLFLDCTIRGLQVEASDTCAQCLSRILSLMGPQSGKSAVSRHSSFGESVSLLWKVDLKVEDMNLFTLSALVGASEVRLDTLTILGSAETSTVGIQGLVLALVKSVTEKMQPCCKAPDIPTPVLSLSMLSITYHSSIRSLEVQCGAGLTLLWSPPDHMYLYQHVLATLQCRDLLRATVFPETVPSLALETSGTTSELEGRAPEPLPPKRLLNLTLEVSTAKLTAFVAEDKFITLAAESVSLSRHGGSLQAYCPELAAGFDGNSIFNFKEVEVQLLPELEEMILHRNPFPALQTLRNRVWLLSFGSVSVEFPYQYDFSRTLDEAVGVQKWLKGLHQGTRAWASPSPVPLPPDLLLKVEHFSWVFLDDVFEVKLHDNYELMKDESKESAKRLQLLDAKVAALRKQHGELLPARKIEELYASLERKNIEIYIQRSRRLYGNTPMRRALLTWSLAGLELVALADASFHGPEHVVEQVQELDPGSPFPPEGLDLVIQWCRMLKCNVKSFLVRIRDYPRYLFEIRDWRLMGRLVGTEQSGQPCSRRRQILHLGLPWGNVAVERNMPPLKFYHDFHSEIFQYTVVWGPCWDPAWTLIGQCVDLLTKPSADPSPPLPWWDKSRLLFHGDWHMDIEQANLHQLATEDPYNTTENMHWEWSHLSFHWKPGQFVFKGDLDINVRTASKYDDCCFLHLPDLCMTLDLQWLCHGNPHDHHSVTLRAPEFLPEVPLGQLHDSYRAFRSENLNLSIKMDLTRHSGTISQPRILLYSSTLRWMQNFWATWTSVTRPICRGKLFNNLKPSKKKLGQHYKQLSYTALFPQLQVHYWASFAQQRGIQIECSQGHVFTRGTQRLIPQAGTVMRRLISDWSVTQMVSDLSQVTVHLMASPTEENADHCLDPLVTKTHLLSLSSLTYQRHSNRTAEEELSARDGDPTFHTHQLHLVDLRISWTTTNRDIAFGLYDGYKKAAVLKRNLSTEALKGLKIDPQMPAKKPKRGVPTSASAPPRVNTPSFSGQPDKGSSGGAYMLQKLIEETDRFVVFTEEESGMSDQLCGIAACQTDDIYNRNCLIELVNCQMVLRGAETEGCVIVSAAKAQLLQCQHHPAWYGDTLKQKTSWTCLLDGMQYFATTESSPTEQDGRQLWLEVKNIEEHRQRSLDSVQELMESGQAVGGMVTTTTDWNQPAEAQQAQQVQRIISRCNCRMYYISYSHDIDPELATQIKPPEVLENQEKEDLLKKQEGAVDTFTLIHHELEISTNPAQYAMILDIVNNLLLHVEPKRKEHSEKKQRVRFQLEISSNPEEQRSSILHLQEAVRQHVAQIRQLEKQMYSIMKSLQDDSKNENLLDLNQKLQLQLNQEKANLQLESEELNILIRCFKD

SEQ ID NO: 848008 - protein, 1668 aa, Homo sapiens
AGVLEDPSKRIRTDLQKVSDLSAPFSQSAGVDQKELSFSPSLLKIFCQLFSIHVDAINIMVLKVDTSESLWHIQISRSRFLLDSDGKRLICEVSLCKINSKVLKSGQLEDTCLVELSLALDLCLKVGISSRHLTAITVDVWTLHAELHEGLFQSQLLCQGPSLASKPVPCSEVTENLVEPTLPGLFLLQQLPDQVKVKMENTSVVLSMNSQKRHLTWTLKLLQFLYHRDEDQLPLRSFTANSDMAQMSTELLLEDGLLLSQSRQRIVCLNSLKASVQVTTIDLSASLVLNTCIIHYRHQEFSHWLHLLALETQGSSSPVLKQRKKRTFPQILAPIIFSTSISNVNISIQLGDTPPFALGFNSISLDYQHLRPQSIHQRGVLTVDHLCWRVGSDSHIQRAPHPPNMHVWGEALVLDSFTLQGSYNQPLGLSSTQSDTLFLDCTIRGLQVEASDTCAQCLSRILSLMGPQSGKSAVSRHSSFGESVSLLWKVDLKVEDMNLFTLSALVGASEVRLDTLTILGSAETSTVGIQGLVLALVKSVTEKMQPCCKAPDIPTPVLSLSMLSITYHSSIRSLEVQCGAGLTLLWSPPDHMYLYQHVLATLQCRDLLRATVFPETVPSLALETSGTTSELEGRAPEPLPPKRLLNLTLEVSTAKLTAFVAEDKFITLAAESVSLSRHGGSLQAYCPELAAGFDGNSIFNFKEVEVQLLPELEEMILHRNPFPALQTLRNRVWLLSFGSVSVEFPYQYDFSRTLDEAVGVQKWLKGLHQGTRAWASPSPVPLPPDLLLKVEHFSWVFLDDVFEVKLHDNYELMKDESKESAKRLQLLDAKVAALRKQHGELLPARKIEELYASLERKNIEIYIQRSRRLYGNTPMRRALLTWSLAGLELVALADASFHGPEHVVEQVQELDPGSPFPPEGLDLVIQWCRMLKCNVKSFLVRIRDYPRYLFEIRDWRLMGRLVGTEQSGQPCSRRRQILHLGLPWGNVAVERNMPPLKFYHDFHSEIFQYTVVWGPCWDPAWTLIGQCVDLLTKPSADPSPPLPWWDKSRLLFHGDWHMDIEQANLHQLATEDPYNTTENMHWEWSHLSFHWKPGQFVFKGDLDINVRTASKYDDCCFLHLPDLCMTLDLQWLCHGNPHDHHSVTLRAPEFLPEVPLGQLHDSYRAFRSENLNLSIKMDLTRHSGTISQPRILLYSSTLRWMQNFWATWTSVTRPICRGKLFNNLKPSKKKLGQHYKQLSYTALFPQLQVHYWASFAQQRGIQIECSQGHVFTRGTQRLIPQAGTVMRRLISDWSVTQMVSDLSQVTVHLMASPTEENADHCLDPLVTKTHLLSLSSLTYQRHSNRTAEEELSARDGDPTFHTHQLHLVDLRISWTTTNRDIAFGLYDGYKKAAVLKRNLSTEALKGLKIDPQMPAKKPKRGVPTSASAPPRVNTPSFSGQPDKGSSGGAYMLQKLIEETDRFVVFTEEESGMSDQLCGIAACQTDDIYNRNCLIELVNCQMVLRGAETEGCVIVSAAKAQLLQCQHHPAWYGDTLKQKTSWTCLLDGMQYFATTESSPTEQDGRQLWLEVKNIEEHRQRSLDSVQELMESGQAVGGMVTTTTDWNQPAEAQQAQQVQRIISRCNCRMYYISYSHDIDPELATQIKPPEVLENQEKEDLLKKQEERWIP

SEQ ID NO: 848009 - protein, 1480 aa, Homo sapiens
AGVLEDPSKRIRTDLQKVSDLSAPFSQSAGVDQKELSFSPSLLKIFCQLFSIHVDAINIMVLKVDTSESLWHIQISRSRFLLDSDGKRLICEVSLCKINSKVLKSGQLEDTCLVELSLALDLCLKVGISSRHLTAITVDVWTLHAELHEGLFQSQLLCQGPSLASKPVPCSEVTENLVEPTLPGLFLLQQLPDQVKVKMENTSVVLSMNSQKRHLTWTLKLLQFLYHRDEDQLPLRSFTANSDMAQMSTELLLEDGLLLSQSRQRIVCLNSLKASVQVTTIDLSASLVLNTCIIHYRHQEFSHWLHLLALETQGSSSPVLKQRKKRTFPQILAPIIFSTSISNVNISIQLGDTPPFALGFNSISLDYQHLRPQSIHQRGVLTVDHLCWRVGSDSHIQRAPHPPNMHVWGEALVLDSFTLQGSYNQPLGLSSTQSDTLFLDCTIRGLQVEASDTCAQCLSRILSLMGPQSGKSAVSRHSSFGESVSLLWKVDLKVEDMNLFTLSALVGASEVRLDTLTILGSAETSTVGIQGLVLALVKSVTEKMQPCCKAPDIPTPVLSLSMLSITYHSSIRSLEVQCGAGLTLLWSPPDHMYLYQHVLATLQCRDLLRATVFPETVPSLALETSGTTSELEGRAPEPLPPKRLLNLTLEVSTAKLTAFVAEDKFITLAAESVSLSRHGGSLQAYCPELAAGFDGNSIFNFKEVEVQLLPELEEMILHRNPFPALQTLRNRVWLLSFGSVSVEFPYQYDFSRTLDEAVGVQKWLKGLHQGTRAWASPSPVPLPPDLLLKVEHFSWVFLDDVFEVKLHDNYELMKDESKESAKRLQLLDAKVAALRKQHGELLPARKIEELYASLERKNIEIYIQRSRRLYGNTPMRRALLTWSLAGLELVALADASFHGPEHVVEQVQELDPGSPFPPEGLDLVIQWCRMLKCNVKSFLVRIRDYPRYLFEIRDWRLMGRLVGTEQSGQPCSRRRQILHLGLPWGNVAVERNMPPLKFYHDFHSEIFQYTVVWGPCWDPAWTLIGQCVDLLTKPSADPSPPLPWWDKSRLLFHGDWHMDIEQANLHQLATEDPYNTTENMHWEWSHLSFHWKPGQFVFKGDLDINVRTASKYDDCCFLHLPDLCMTLDLQWLCHGNPHDHHSVTLRAPEFLPEVPLGQLHDSYRAFRSENLNLSIKMDLTRHSGTISQPRILLYSSTLRWMQNFWATWTSVTRPICRGKLFNNLKPSKKKLGQHYKQLSYTALFPQLQVHYWASFAQQRGIQIECSQGHVFTRGTQRLIPQAGTVMRRLISDWSVTQMVSDLSQVTVHLMASPTEENADHCLDPLVTKTHLLSLSSLTYQRHSNRTAEEELSARDGDPTFHTHQLHLVDLRISWTTTNRDIAFGLYDGYKKAAVLKRNLSTEALKGLKIDPQMPAKKPKRGVPTSASAPPRVNTPSFSGQPDKGSSGGKLGEMRLFGFGFRTWIWAWTGVLKGLSHGASI

SEQ ID NO: 848010 - protein, 129 aa, Homo sapiens
GLFRGPLWMQVSVLSFSNTRETVEIDNLWISSKLLSHDLPHYVALCFGEVRIRTDLQKVSDLSAPFSQSAGVDQKELSFSPSLLKIFCQLFSIHVDAINIMVLKVDTSESLWHIQISRSRFLLDSDGKR

SEQ ID NO: 848011 - protein, 2151 aa, Homo sapiens; identical to SEQ ID NO: 848003

SEQ ID NO: 848012 - protein, 2101 aa, Homo sapiens
AGVLEDPSKRIRTDLQKVSDLSAPFSQSAGVDQKELSFSPSLLKIFCQLFSIHVDAINIMVLKVDTSESLWHIQISRSRFLLDSDGKRLICEVSLCKINSKVLKSGQLEDTCLVELSLALDLCLKVGISSRHLTAITVDVWTLHAELHEGLFQSQLLCQGPSLASKPVPCSEVTENLVEPTLPGLFLLQQLPDQVKVKMENTSVVLSMNSQKRHLTWTLKLLQFLYHRDEDQLPLRSFTANSDMAQMSTELLLEDGLLLSQSRQRIVCLNSLKASVQVTTIDLSASLVLNTCIIHYRHQEFSHWLHLLALETQGSSSPVLKQRKKRTFPQILAPIIFSTSISNVNISIQLGDTPPFALGFNSISLDYQHLRPQSIHQRGVLTVDHLCWRVGSDSHIQRAPHPPNMHVWGEALVLDSFTLQGSYNQPLGLSSTQSDTLFLDCTIRGLQVEASDTCAQCLSRILSLMGPQSGKSAVSRHSSFGESVSLLWKVDLKVEDMNLFTLSALVGASEVRLDTLTILGSAETSTVGIQGLVLALVKSVTEKMQPCCKAPDIPTPVLSLSMLSITYHSSIRSLEVQCGAGLTLLWSPPDHMYLYQHVLATLQCRDLLRATVFPETVPSLALETSGTTSELEGRAPEPLPPKRLLNLTLEVSTAKLTAFVAEDKFITLAAESVSLSRHGGSLQAYCPELAAGFDGNSIFNFKEVEVQLLPELEEMILHRNPFPALQTLRNRVWLLSFGSVSVEFPYQYDFSRTLDEAVGVQKWLKGLHQGTRAWASPSPVPLPPDLLLKVEHFSWVFLDDVFEVKLHDNYELMKDESKESAKRLQLLDAKVAALRKQHGELLPARKIEELYASLERKNIEIYIQRSRRLYGNTPMRRALLTWSLAGLELVALADASFHGPEHVVEQVQELDPGSPFPPEGLDLVIQWCRMLKCNVKSFLVRIRDYPRYLFEIRDWRLMGRLVGTEQSGQPCSRRRQILHLGLPWGNVAVERNMPPLKFYHDFHSEIFQYTVVWGPCWDPAWTLIGQCVDLLTKPSADPSPPLPWWDKSRLLFHGDWHMDIEQANLHQLATEDPYNTTENMHWEWSHLSFHWKPGQFVFKGDLDINVRTASKYDDCCFLHLPDLCMTLDLQWLCHGNPHDHHSVTLRAPEFLPEVPLGQLHDSYRAFRSENLNLSIKMDLTRHSGTISQPRILLYSSTLRWMQNFWATWTSVTRPICRGKLFNNLKPSKKKLGQHYKQLSYTALFPQLQVHYWASFAQQRGIQIECSQGHVFTRGTQRLIPQAGTVMRRLISDWSVTQMVSDLSQVTVHLMASPTEENADHCLDPLVTKTHLLSLSSLTYQRHSNRTAEEELSARDGDPTFHTHQLHLVDLRISWTTTNRDIAFGLYDGYKKAAVLKRNLSTEALKGLKIDPQMPAKKPKRGVPTSASAPPRVNTPSFSGQPDKGSSGGAYMLQKLIEETDRFVVFTEEESGMSDQLCGIAACQTDDIYNRNCLIELVNCQMVLRGAETEGCVIVSAAKAQLLQCQHHPAWYGDTLKQKTSWTCLLDGMQYFATTESSPTEQDGRQLWLEVKNIEEHRQRSLDSVQELMESGQAVGGMVTTTTDWNQPAEAQQAQQVQRIISRCNCRMYYISYSHDIDPELATQIKPPEVLENQEKEDLLKKQEGAVDTFTLIHHELEISTNPAQYAMILDIVNNLLLHVEPKRKEHSEKKQRVRFQLEISSNPEEQRSSILHLQEAVRQHVAQIRQLEKQMYSIMKSLQDDSKNENLLDLNQKLQLQLNQEKANLQLESEELNILIRCFKDFQLQRANKMELRKQQEDVSVVRRTEFYFAQARWRLTEEDGQLGIAELELQRFLYSKVNKSDDTAEHLLELGWFTMNNLLPNAVYKVVLRPQSSCQSGRQLALRLFSKVRPPVGGISVKEHFEVNVVPLTIQLTHQFFHRMMGFFFPGRSVEDDEVGDEEDKSKLVTTGIPVVKPRQLIATDDAVPLGPGKGVAQGLTRSSGVRRSFRKSPEHPVDDIDKMKERAAMNNSFIYIKIPQVPLCVSYKGEKNSVDWGDLNLVLPCLEYHNNTWTWLDFAMAVKRDSRKALVAQVSRQGSWLFG

SEQ ID NO: 848013 - protein, 1747 aa, Homo sapiens [sequence omitted]

SEQ ID NO: 848014 - protein, 2151 aa, Homo sapiens; identical to SEQ ID NO: 848003

SEQ ID NO: 848015 - protein, 2151 aa, Homo sapiens; identical to SEQ ID NO: 848003

SEQ ID NO: 848016 - protein, 2053 aa, Homo sapiens
AGVLEDPSKRIRTDLQKVSDLSAPFSQSAGVDQKELSFSPSLLKIFCQLFSIHVDAINIMVLKVDTSESLWHIQISRSRFLLDSDGKRLICEVSLCKINSKVLKSGQLEDTCLVELSLALDLCLKVGISSRHLTAITVDVWTLHAELHEGLFQSQLLCQGPSLASKPVPCSEVTENLVEPTLPGLFLLQQLPDQVKVKMENTSVVLSMNSQKRHLTWTLKLLQFLYHRDEDQLPLRSFTANSDMAQMSTELLLEDGLLLSQSRQRIVCLNSLKASVQVTTIDLSASLVLNTCIIHYRHQEFSHWLHLLALETQGSSSPVLKQRKKRTFPQILAPIIFSTSISNVNISIQLGDTPPFALGFNSISLDYQHLRPQSIHQRGVLTVDHLCWRVGSDSHIQRAPHPPNMHVWGEALVLDSFTLQGSYNQPLGLSSTQSDTLFLDCTIRGLQVEASDTCAQCLSRILSLMGPQSGKSAVSRHSSFGESVSLLWKVDLKVEDMNLFTLSALVGASEVRLDTLTILGSAETSTVGIQGLVLALVKSVTEKMQPCCKAPDIPTPVLSLSMLSITYHSSIRSLEVQCGAGLTLLWSPPDHMYLYQHVLATLQCRDLLRATVFPETVPSLALETSGTTSELEGRAPEPLPPKRLLNLTLEVSTAKLTAFVAEDKFITLAAESVSLSRHGGSLQAYCPELAAGFDGNSIFNFKEVEVQLLPELEEMILHRNPFPALQTLRNRVWLLSFGSVSVEFPYQYDFSRTLDEAVGVQKWLKGLHQGTRAWASPSPVPLPPDLLLKVEHFSWVFLDDVFEVKLHDNYELMKDESKESAKRLQLLDAKVAALRKQHGELLPARKIEELYASLERKNIEIYIQRSRRLYGNTPMRRALLTWSLAGLELVALADASFHGPEHVVEQVQELDPGSPFPPEGLDLVIQWCRMLKCNVKSFLVRIRDYPRYLFEIRDWRLMGRLVGTEQSGQPCSRRRQILHLGLPWGNVAVERNMPPLKFYHDFHSEIFQYTVVWGPCWDPAWTLIGQCVDLLTKPSADPSPPLPWWDKSRLLFHGDWHMDIEQANLHQLATEDPYNTTENMHWEWSHLSFHWKPGQFVFKGDLDINVRTASKYDDCCFLHLPDLCMTLDLQWLCHGNPHDHHSVTLRAPEFLPEVPLGQLHDSYRAFRSENLNLSIKMDLTRHSGTISQPRILLYSSTLRWMQNFWATWTSVTRPICRGKLFNNLKPSKKKLGQHYKQLSYTALFPQLQVHYWASFAQQRGIQIECSQGHVFTRGTQRLIPQAGTVMRRLISDWSVTQMVSDLSQVTVHLMASPTEENADHCLDPLVTKTHLLSLSSLTYQRHSNRTAEEELSARDGDPTFHTHQLHLVDLRISWTTTNRDIAFGLYDGYKKAAVLKRNLSTEALKGLKIDPQMPAKKPKRGVPTSASAPPRVNTPSFSGQPDKGSSGGAYMLQKLIEETDRFVVFTEEESGMSDQLCGIAACQTDDIYNRNCLIELVNCQMVLRGAETEGCVIVSAAKAQLLQCQHHPAWYGDTLKQKTSWTCLLDGMQYFATTESSPTEQDGRQLWLEVKNIEEHRQRSLDSVQELMESGQAVGGMVTTTTDWNQPAEAQQAQQVQRIISRCNCRMYYISYSHDIDPELATQIKPPEVLENQEKEDLLKKQEGAVDTFTLIHHELEISTNPAQYAMILDIVNNLLLHVEPKRKEHSEKKQRVRFQLEISSNPEEQRSSILHLQEAVRQHVAQIRQLEKQMYSIMKSLQDDSKNENLLDLNQKLQLQLNQEKANLQLESEELNILIRCFKDFQLQRANKMELRKQQEDVSVVRRTEFYFAQARWRLTEEDGQLGIAELELQRFLYSKVNKSDDTAEHLLELGWFTMNNLLPNAVYKVVLRPQSSCQSGRQLALRLFSKVRPPVGGISVKEHFEVNVVPLTIQLTHQFFHRMMGFFFPGRSVEDDEVGDEEDKSKLVTTGIPVVKPRQLIATDDAVPLGPGKGVAQGLTRSSGVRRSFRKSPEHPVDDIDKMKERAAMNNSFIYIKIPQVPLCVSYKSQAQCGE

SEQ ID NO: 848017 - protein, 265 aa, Homo sapiens
MEDPLPCTPWSGRQLALRLFSKVRPPVGGISVKEHFEVNVVPLTIQLTHQFFHRMMGFFFPGRSVEDDEVGDEEDKSKLVTTGIPVVKPRQLIATDDAVPLGPGKGVAQGLTRSSGVRRSFRKSPEHPVDDIDKMKERAAMNNSFIYIKIPQVPLCVSYKGEKNSVDWGDLNLVLPCLEYHNNTWTWLDFAMAVKRDSRKALVAQVIKEKLRLKSATGSEVRGKLETKSDLNMQQQEEEEKARLLIGLSVGDKNPGKKSIFGRRK

SEQ ID NO: 848018 - protein, 219 aa, Homo sapiens
MGMSSLKLLKYVLFFFNLLFWICGCCILGFGIYLLIHNNFGVLFHNLPSLTLGNVFVIVGSIIMVVAFLGCMGSIKENKCLLMSFFILLLIILLAEVTLAILLFVYEQKLNEYVAKGLTDSIHRYHSDNSTKAAWDSIQSFLQCCGINGTSDWTSGPPASCPSDRKVEGCYAKARLWFHSNFLYIGIITICVCVIEVLGMSFALTLNCQIDKTSQTIGL

SEQ ID NO: 848019 - protein, 164 aa, Homo sapiens
MGMSSLKLLKYVLFFFNLLFWICGCCILGFGIYLLIHNNFGVLFHNLPSLTLGNVFVIVGSIIMVVAFLGCMGSIKENKCLLMSFFILLLIILLAEVTLAILLFVYEQKLNEYVAKGLTDSIHRYHSDNSTKAAWDSIQSFVLGMSFALTLNCQIDKTSQTIGL

SEQ ID NO: 848020 - protein, 219 aa, Homo sapiens; identical to SEQ ID NO: 848018

SEQ ID NO: 848021 - protein, 107 aa, Homo sapiens
MGMSSLKLLKYVLFFFNLLFWICGCCILGFGIYLLIHNNFGVLFHNLPSLTLGNVFVIVGSIIMVVAFLGCMGSIKENKCLLMSVLGMSFALTLNCQIDKTSQTIGL

SEQ ID NO: 848022 - protein, 205 aa, Homo sapiens
MGMSSLKLLKYVLFFFNLLFWICGCCILGFGIYLLIHNNFGVLFHNLPSLTLGNVFVIVGSIIMVVAFLGCMGSIKENKCLLMSFFILLLIILLAEVTLAILLFVYEQKLNEYVAKGLTDSIHRYHSDNSTKAAWDSIQSFLQCCGINGTSDWTSGPPASCPSDRKVEGCYAKARLWFHSNFLYIGIITICVCVIEGKSLTTGLL

SEQ ID NO: 848023 - protein, 162 aa, Homo sapiens
  misc_feature (160)..(160): Xaa can be any naturally occurring amino acid
MGMSSLKLLKYVLFFFNLLFWICGCCILGFGIYLLIHNNFGVLFHNLPSLTLGNVFVIVGSIIMVVAFLGCMGSIKAEVTLAILLFVYEQKLNEYVAKGLTDSIHRYHSDNSTKAAWDSIQSFLQCCGINGTSDWTSGPPASCPSDRKVELLSKPDCGSXHF

SEQ ID NO: 848024 - protein, 219 aa, Homo sapiens; identical to SEQ ID NO: 848018

SEQ ID NO: 848025 - protein, 191 aa, Homo sapiens
MGMSSLKLLKYVLFFFNLLFWICGCCILGFGIYLLIHNNFGVLFHNLPSLTLGNVFVIVGSIIMVVAFLGCMGSIKENKCLLMSFFILLLIILLAEVTLAILLFVYEQKLNEYVAKGLTDSIHRYHSDNSTKAAWDSIQSFLQCCGINGTSDWTSGPPASCPSDRKVEVLGMSFALTLNCQIDKTSQTIGL

SEQ ID NO: 848026 - protein, 219 aa, Homo sapiens; identical to SEQ ID NO: 848018

SEQ ID NO: 848027 - protein, 219 aa, Homo sapiens; identical to SEQ ID NO: 848018

SEQ ID NO: 848028 - protein, 107 aa, Homo sapiens; identical to SEQ ID NO: 848021

SEQ ID NO: 848029 - protein, 219 aa, Homo sapiens; identical to SEQ ID NO: 848018

SEQ ID NO: 848030 - protein, 216 aa, Homo sapiens
MGMSSLKLLKYVLFFFNLLFWICGCCILGFGIYLLIHNNFGVLFHNLPSLTLGNVFVIVGSIIMVVAFLGCMGSIKENKCLLMSFFILLLIILLAEVTLAILLFVYEQKLNEYVAKGLTDSIHRYHSDNSTKAAWDSIQSFLQCCGINGTSDWTSGPPASCPSDRKVEGCYAKARLWFHSNFLYIGIITICVCVIERVGEFLLTDPELADCKTGRP

SEQ ID NO: 848031 - protein, 279 aa, Homo sapiens
LGHSLEPLLLGSPQGPWAEGRSIQLELTTGGRGIMEGPRGWLVLCVLAISLASMVTEDLCRAPDGKKGEAGRPGRRGRPGLKGEQGEPGAPGIRTGIQGLKGDQGEPGPSGNPGKVGYPGPSGPLGARGIPGIKGTKGSPGNIKDQPRPAFSAIRRNPPMGGNVVIFDTVITNQEEPYQNHSGRFVCTVPGYYYFTFQVLSQWEICLSIVSSSRGQVRRSLGFCDTTNKGLFQVVSGGMVLQLQQGDQVWVEKDPKKGHIYQGSEADSVFSGFLIFPSA

SEQ ID NO: 848032 - protein, 279 aa, Homo sapiens; identical to SEQ ID NO: 848031

SEQ ID NO: 848033 - protein, 288 aa, Homo sapiens
LGHSLEPLLLGSPQGPWAEGRSIQLELTTGGRGIMEGPRGWLVLCVLAISLASMVTEDLCRAPDGKKGEAGRPGRRGRPGLKGEQGEPGAPGIRTGIQGLKGDQGEPGPSGNPGKVGYPGPSGPLGARGIPGIKGTKGSPGNIKDQPRPAFSAIRRNPPMGGNVVIFDTVITNQEEPYQNHSGRFVCTVPGYYYFTFQVLSQWEICLSIVSSSRGQVRRSLGFCDTTNKGLFQVVSGGMVLQLQQGDQVWVEKDPKKGHIYQGSEADSVFSGFLIFPSACLRWDPLDH

SEQ ID NO: 848034 - protein, 98 aa, Homo sapiens
LGHSLEPLLLGSPQGPWAEGRSIQLELTTGGRGIMEGPRGWLVLCVLAISLASMVTEDLCRAPDGKKGGVEKDPKKGHIYQGSEADSVFSGFLIFPSA

SEQ ID NO: 848035 - protein, 117 aa, Homo sapiens
LGHSLEPLLLGSPQGPWAEGRSIQLELTTGGRGIMEGPRGWLVLCVLAISLASMVTEDLCRAPDGKKGEAGRPGRRGRPGLKGEQGEPVSQGRTPSPTHLSGFHAPPVKWGRYCFSC

SEQ ID NO: 848036 - protein, 245 aa, Homo sapiens
MEGPRGWLVLCVLAISLASMVTEDLCRAPDGKKGEAGRPGRRGRPGLKGEQGEPGAPGIRTGIQGLKGDQGEPGPSGNPGKVGYPGPSGPLGARGIPGIKGTKGSPGNIKDQPRPAFSAIRRNPPMGGNVVIFDTVITNQEEPYQNHSGRFVCTVPGYYYFTFQVLSQWEICLSIVSSSRGQVRRSLGFCDTTNKGLFQVVSGGMVLQLQQGDQVWVEKDPKKGHIYQGSEADSVFSGFLIFPSA

SEQ ID NO: 848037 - protein, 286 aa, Homo sapiens
LGHSLEPLLLGSPQGPWAEGRSIQLELTTGGRGIMEGPRGWLVLCVLAISLASMVTEDLCRAPDGKKGEAGRPGRRGRPGLKGEQGEPGAPGIRTGIQGLKGDQGEPGPSGNPGKVGYPGPSGPLGARGIPGIKGTKGSPGNIKDQPRPAFSAIRRNPPMGGNVVIFDTVITNQEEPYQNHSGRFVCTVPGYYYFTFQVLSQWEICLSIVSSSRGQVRRSLGFCDTTNKGLFQVVSGGMVLQLQQGDQVWVEKDPKKGHIYQGSEADSVINASLIVPASDADPLEH

SEQ ID NO: 848038 - protein, 243 aa, Homo sapiens
LGHSLEPLLLGSPQGPWAEGRSIQLELTTGGRGIMEGPRGWLVLCVLAISLASMVTEDLCRAPDGKKGEAGRPGRRGRPGLKGEQGEPGAPGIRTGIQGLKGDQGEPGPSGNPGKVGYPGPSGPLGARGIPGIKGTKGSPGNIKDQPRPAFSAIRRNPPMGGNVVIFDTVITNQEEPYQNHSGRFVCTVPGYYYFTFQTPCPLAWERGSRSEDISVPGQKPPTCSSFSGMDVGPSSLPHLGLK

SEQ ID NO: 848039 - protein, 54 aa, Homo sapiens
MESFYEGEDFSETLTRAKLEELNRDLFRSTMKPVQKGWEDTDWKRSDMDAGRGV

SEQ ID NO: 848040 - protein, 118 aa, Homo sapiens
MKNIHPIYNIKSLMIKRELAKDSELRSQSWERFLPQFKHKNVNKRKEPKKKTVKKEYTPFPPPQPESQIDKELASGEYFLKANQKKRQKMEAIKAKQAEAISKRQEERNKAFIPLVSY

SEQ ID NO: 848041 - protein, 399 aa, Homo sapiens
PVGFKNSFISGATGSSLQMASPSLERPEKGAGKSEFRNQKPKPENQDESELLTVPDGWKEPAFSKEDNPRGLLEESSFATLFPKYREAYLKECWPLVQKALNEHHVNATLDLIEGSMTVCTTKKTFDPYIIIRARDLIKLLARSVSFEQAVRILQDDVACDIIKIGSLVRNKERFVKRRQRLIGPKGSTLKALELLTNCYIMVQGNTVSAIGPFSGLKEVRKVVLDTMKNIHPIYNIKSLMIKRELAKDSELRSQSWERFLPQFKHKNVNKRKEPKKKTVKKEYTPFPPPQPESQIDKELASGEYFLKANQKKRQKMEAIKAKQAEAISKRQEERNKAFIPPKEKPIVKPKEASTETKIDVASIKEKVKKAKNKKLGALTAEEIALKMEADEKKKKKKK

SEQ ID NO: 848042 - protein, 399 aa, Homo sapiens; identical to SEQ ID NO: 848041

SEQ ID NO: 848043 - protein, 399 aa, Homo sapiens; identical to SEQ ID NO: 848041

SEQ ID NO: 848044 - protein, 399 aa, Homo sapiens; identical to SEQ ID NO: 848041

SEQ ID NO: 848045 - protein, 399 aa, Homo sapiens; identical to SEQ ID NO: 848041

SEQ ID NO: 848046 - protein, 399 aa, Homo sapiens; identical to SEQ ID NO: 848041

SEQ ID NO: 848047 - protein, 702 aa, Homo sapiens
MLLFFTKSDISEIKNDWTGRKMVRKLCKSTTVCKDKYSTLNGKEESKQFNDIEFYNFRPARDLIKHEQWNTFFQTKFRAVELGLTLSFLYSKHPTLARLLWVQFVTNMDTKVPQALHSLIEVSPSHHGKKTYWDGSGLCLEQEQEINSWSLTNISKSQSRILLGCLVKHPWKFNCLQLLHFFIKCCLANKKCHVAALFYFHFLEIDPHCVTQAGVQWYNLCSLQPPPPGLRSLSCLSLLSSWGYGRPPPHPASFCIFSRGGFCHVGQAGHGGMVISATWEAEAGGSPEPVDGGCSELRSHHCTLAWVTEQDSVSKKKKKKKNENRILFVWMTCLLIFDLAEISKSSGILVYSFCQFFLLLLFDQLELNKKNVIFTFKFLFKCIPRTVSHWFNCYLMPVSLKIAVKIKHGFIVNSVESLHVTIMLFYWCIVPFTHHRDCPNTCHYWGRHCRWLLSYMAKLGNSLCKAEEGCPLEVFRFFKIAIYYESLTEIQKNSGVKYKGPEELVIEVKTGRQKWKAANICIVHSMYLCLCTCFNLQSHLIVTALRGSYSCFTDETKDVRDTFNHNLYTSESEETWIYSRAVLPLFTYPLAYMITAIQKTVHLRKAMVTHIQYSQWSALHNFHWIGAIWLVPSKKIINNGMGEFLKYKLFSHTRCDMNKELLISEHYHVLVFVLNNLEGNNLHKNPMRKLLLSIYTHYIARG

SEQ ID NO: 848048 - protein, 718 aa, Homo sapiens
MEEFSEYIDTLILSALWLHVTFLHKSDISEIKNDWTGRKMVRKLCKSTTVCKDKYSTLNGKEESKQFNDIEFYNFRPARDLIKHEQWNTFFQTKFRAVELGRLCPSSILSTLLSPAALSSVCYKYGHESTTGFAQLNGSFPFTPWSKNILGWKGLCLEQEQEINSWSLTNISKSQSRILLGCLVKHPWKFNCLQLLHFFIKCCLANKKCHVAALFYFHFLEIDPHCVTQAGVQWYNLCSLQPPPPGLRSLSCLSLLSSWGYGRPPPHPASFCIFSRGGFCHVGQAGHGGMVISATWEAEAGGSPEPVDGGCSELRSHHCTLAWVTEQDSVSKKKKKKKNENRILFVWMTCYTYFVILLKEANLRNLSLQFLTVFFVVVFDQLELNKKNVIFTFKFLFKCIPRTVSHWFNCYLMPVSLKIAVKIKHGFIVNSVESLHVTIMLFYWCIVPFTHHRDCPNTCHYWGRHCRWLLSYMAKLGNSLCKAEEGCPLEVFRFFKIAIYYESLTKSRRIVEEVQRSRELVIEVKTGRQKWKAANICIVHSMYLCLCTCFNLQSHLIVTALRGSYSCFTDETKDVRDTFNHNLYTSEQRKPGFNSRAVLPLFTYPLAYMITAIQKTVHLRKAMVTHIQYSQLVSLHNFHWIGAIWLVPSKKIINNGMGEFLKYKLFSHTRCDMNKELLISEHYHVLVFVLNNLEGNNLHKNPMRKLLLSIYTHYIARG

SEQ ID NO: 848049 - protein, 69 aa, Homo sapiens
SAPPNNLPLNIGESRPRVNRPSGSSLQMASPSLERPEKGAGKSEFRNQKPKPENQGDVMWEPKPGVCVR

SEQ ID NO: 848050 - protein, 220 aa, Homo sapiens
MASPSLERPEKGAGKSEFRNQKPKPENQDESELLTVPDGWKEPAFSKEDNPRGLLEESSFATLFPKYREAYLKECWPLVQKALNEHHVNATLDLIEGSMTVCTTKKTFDPYIIIRARDLIKLLARSVSFEQAVRILQDDVACDIIKIGSLVRNKERFVKRRQRLIGPKGSTLKALELLTNCYIMVQGNTVSAIGPFSGLKEVRTMYYLRFIFSREQIIWL

SEQ ID NO: 848051 - protein, 399 aa, Homo sapiens; identical to SEQ ID NO: 848041

SEQ ID NO: 848052 - protein, 399 aa, Homo sapiens; identical to SEQ ID NO: 848041

SEQ ID NO: 848053 - protein, 399 aa, Homo sapiens; identical to SEQ ID NO: 848041

SEQ ID NO: 848054 - protein, 399 aa, Homo sapiens; identical to SEQ ID NO: 848041

SEQ ID NO: 848055 - protein, 364 aa, Homo sapiens
PVGFKNSFISGATGSSLQMASPSLERPEKGAGKSEFRNQKPKPENQDESELLTVPDGWKEPAFSKEDNPRGLLEESSFATLFPKYREAYLKECWPLVQKALNEHHVNATLDLIEGSMTVCTTKKTFDPYIIIRARDLIKLLARSVSFEQAVRILQDDVACDIIKIGSLVRNKERFVKRRQRLIGPKGSTLKALELLTNCYIMVQGNTVSAIGPFSGLKEVRKVVLDTMKNIHPIYNIKSLMIKRELAKDSELRSQSWERFLPQFKHKNVNKRKEPKKKTVKKEYTPFPPPQPESQIDKELASGEYFLKANQKKRQKMEAIKAKQAEAISKRQEERNKAFIPPKEKPIVKPKEGNAFYDVKVFIN

SEQ ID NO: 848056 - protein, 177 aa, Homo sapiens
MASPSLERPEKGAGKSEFRNQKPKPENQDESELLTVPDGWKEPAFSKEDNPRGLLEESSFATLFPKYREAYLKECWPLVQKALNEHHVNATLDLIEGSMTVCTTKKTFDPYIIIRARDLIKLLARSVSFEQAVRILQDDVACDIIKIGSLVRNKERFVKRRQRLIGPKGSTLKVFFN

SEQ ID NO: 848057 - protein, 924 aa, Homo sapiens
MTTEQRRSLQAFQDYIRKTLDPTYILSYMAPWFREEEVQYIQAEKNNKGPMEAATLFLKFLLELQEEGWFRGFLDALDHAGYSGLYEAIESWDFKKIEKLEEYRLLLKRLQPEFKTRIIPTDIISDLSECLINQECEEILQSSTKGMMAGAEKLVECLLRSDKENWPKTLKLALEKERNKFSELWIVEKGIKDVETEDLEDKMETSDIQIFYQEDPECQNLSENSCPPSEVSDTNLYSPFKPRNYQLELALPAMKGKNTIICAPTGCGKTFVSLLICEHHLKKFPQGQKGKVVFFANQIPVYEQQKSVFSKYFERHGYRVTGISGATAENVPVEQIVENNDIIILTPQILVNNLKKGTIPSLSIFTLMIFDECHNTSKQHPYNMIMFNYLDQKLGGSSGPLPQVIGLTASVGVGDAKNTDEALDYICKLCASLDASVIATVKHNLEELEQVVYKPQKFFRKVESRISDKFKYIIAQLMRDTESLAKRICKDLENLSQIQNREFGTQKYEQWIVTVQKACMVFQMPDKDEESRICKALFLYTSHLRKYNDALIISEHARMKDALDYLKDFFSNVRAAGFDEIEQDLTQRFEEKLQELESVSRDPSNENPKLEDLCFILQEEYHLNPETITILFVKTRALVDALKNWIEGNPKLSFLKPGILTGRGKTNQNTGMTLPAQKCILDAFKASGDHNILIATSVADEGIDIAQCNLVILYEYVGNVIKMIQTRGRGRARGSKCFLLTSNAGVIEKEQINMYKEKMMNDSILRLQTWDEAVFREKILHIQTHEKFIRDSQEKPKPVPDKENKKLLCRKCKALACYTADVRVIEECHYTVLGDAFKECFVSRPHPKPKQFSSFEKRAKIFCARQNCSHDWGIHVKYKTFEIPVIKIESFVVEDIATGVQTLYSKWKDFHFEKIPFDPAEMSK

SEQ ID NO: 848058 - protein, 1028 aa, Homo sapiens
MTTEQRRSLQAFQDYIRKTLDPTYILSYMAPWFREEEVQYIQAEKNNKGPMEAATLFLKFLLELQEEGWFRGFLDALDHAGYSGLYEAIESWDFKKIEKLEEYRLLLKRLQPEFKTRIIPTDIISDLSECLINQECEEILQSSTKGMMAGAEKLVECLLRSDKENWPKTLKLALEKERNKFSELWIVEKGIKDVETEDLEDKMETSDIQIFYQEDPECQNLSENSCPPSEVSDTNLYSPFKPRNYQLELALPAMKGKNTIICAPTGCGKTFVSLLICEHHLKKFPQGQKGKVVFFANQIPVYEQQKSVFSKYFERHGYRVTGISGATAENVPVEQIVENNDIIILTPQILVNNLKKGTIPSLSIFTLMIFDECHNTSKQHPYNMIMFNYLDQKLGGSSGPLPQVSPKSDECFRRAIIFLTPIFLLFMATLKMSFSGPKSILYNSLRILFPLFICSLSKYALCASMCHTLCVSKNKKTPYPSRKELYEGLWKHCTISQTSNDFECSLQVIGLTASVGVGDAKNTDEALDYICKLCASLDASVIATVKHNLEELEQVVYKPQKFFRKVESRISDKFKYIIAQLMRDTESLAKRICKDLENLSQIQNREFGTQKYEQWIVTVQKACMVFQMPDKDEESRICKALFLYTSHLRKYNDALIISEHARMKDALDYLKDFFSNVRAAGFDEIEQDLTQRFEEKLQELESVSRDPSNENPKLEDLCFILQEEYHLNPETITILFVKTRALVDALKNWIEGNPKLSFLKPGILTGRGKTNQNTGMTLPAQKCILDAFKASGDHNILIATSVADEGIDIAQCNLVILYEYVGNVIKMIQTRGRGRARGSKCFLLTSNAGVIEKEQINMYKEKMMNDSILRLQTWDEAVFREKILHIQTHEKFIRDSQEKPKPVPDKENKKLLCRKCKALACYTADVRVIEECHYTVLGDAFKECFVSRPHPKPKQFSSFEKRAKIFCARQNCSHDWGIHVKYKTFEIPVIKIESFVVEDIATGVQTLYSKWKDFHFEKIPFDPAEMSK

SEQ ID NO: 848059 - protein, 924 aa, Homo sapiens; identical to SEQ ID NO: 848057

SEQ ID NO: 848060 - protein, 416 aa, Homo sapiens
MTTEQRRSLQAFQDYIRKTLDPTYILSYMAPWFREEEVQYIQAEKNNKGPMEAATLFLKFLLELQEEGWFRGFLDALDHAGYSGLYEAIESWDFKKIEKLEEYRLLLKRLQPEFKTRIIPTDIISDLSECLINQECEEILQSSTKGMMAGAEKLVECLLRSDKENWPKTLKLALEKERNKFSELWIVEKGIKDVETEDLEDKMETSDIQIFYQEDPECQNLSENSCPPSEVSDTNLYSPFKPRNYQLELALPAMKGKNTIICAPTGCGKTFVSLLICEHHLKKFPQGQKGKVVFFANQIPVYEQQKSVFSKYFERHGYRVTGISGATAENVPVEQIVENNDIIILTPQILVNNLKKGTIPSLSIFTLMIFDECHNTSKQHPYNMIMFNYLDQKLGGSSGPLPQSLGCCLVGVGDNI

SEQ ID NO: 848061 - protein, 924 aa, Homo sapiens; identical to SEQ ID NO: 848057

SEQ ID NO: 848062 - protein, 876 aa, Homo sapiens
MTTEQRRSLQAFQDYIRKTLDPTYILSYMAPWFREEEVQYIQAEKNNKGPMEAATLFLKFLLELQEEGWFRGFLDALDHAGYSGLYEAIESWDFKKIEKLEEYRLLLKRLQPEFKTRIIPTDIISDLSECLINQECEEILQVIKDVETEDLEDKMETSDIQIFYQEDPECQNLSENSCPPSEVSDTNLYSPFKPRNYQLELALPAMKGKNTIICAPTGCGKTFVSLLICEHHLKKFPQGQKGKVVFFANQIPVYEQQKSVFSKYFERHGYRVTGISGATAENVPVEQIVENNDIIILTPQILVNNLKKGTIPSLSIFTLMIFDECHNTSKQHPYNMIMFNYLDQKLGGSSGPLPQVIGLTASVGVGDAKNTDEALDYICKLCASLDASVIATVKHNLEELEQVVYKPQKFFRKVESRISDKFKYIIAQLMRDTESLAKRICKDLENLSQIQNREFGTQKYEQWIVTVQKACMVFQMPDKDEESRICKALFLYTSHLRKYNDALIISEHARMKDALDYLKDFFSNVRAAGFDEIEQDLTQRFEEKLQELESVSRDPSNENPKLEDLCFILQEEYHLNPETITILFVKTRALVDALKNWIEGNPKLSFLKPGILTGRGKTNQNTGMTLPAQKCILDAFKASGDHNILIATSVADEGIDIAQCNLVILYEYVGNVIKMIQTRGRGRARGSKCFLLTSNAGVIEKEQINMYKEKMMNDSILRLQTWDEAVFREKILHIQTHEKFIRDSQEKPKPVPDKENKKLLCRKCKALACYTADVRVIEECHYTVLGDAFKECFVSRPHPKPKQFSSFEKRAKIFCARQNCSHDWGIHVKYKTFEIPVIKIESFVVEDIATGVQTLYSKWKDFHFEKIPFDPAEMSK

SEQ ID NO: 848063 - protein, 202 aa, Homo sapiens [sequence omitted]

SEQ ID NO: 848064 - protein, 648 aa, Homo sapiens
MTTEQRRSLQAFQDYIRKTLDPTYILSYMAPWFREEEVQYIQAEKNNKGPMEAATLFLKFLLELQEEGWFRGFLDALDHAGYSGLYEAIESWDFKKIEKLEEYRLLLKRLQPEFKTRIIPTDIISDLSECLINQECEEILQSSTKGMMAGAEKLVECLLRSDKENWPKTLKLALEKERNKFSELWIVEKGIKDVETEDLEDKMETSDIQIFYQEDPECQNLSENSCPPSEVSDTNLYSPFKPRNYQLELALPAMKGKNTIICAPTGCGKTFVSLLICEHHLKKFPQGQKGKVVFFANQIPVYEQQKSVFSKYFERHGYRVTGISGATAENVPVEQIVENNDIIILTPQILVNNLKKGTIPSLSIFTLMIFDECHNTSKQHPYNMIMFNYLDQKLGGSSGPLPQVIGLTASVGVGDAKNTDEALDYICKLCASLDASVIATVKHNLEELEQVVYKPQKFFRKVESRISDKFKYIIAQLMRDTESLAKRICKDLENLSQIQNREFGTQKYEQWIVTVQKACMVFQMPDKDEESRICKALFLYTSHLRKYNDALIISEHARMKDALDYLKDFFSNVRAAGFDEIEQDLTQRFEEKLQELESVSRDPSNENPKLEDLCFILQEEYHLNPETITILFVKTRALVDVSFFSPCR

SEQ ID NO: 848065 - protein, 1070 aa, Homo sapiens
AAGEAPAAGRKMMKFRFRRQGADPQREKLKQELFAFNKTVEHGFPNQPSALAFDPELRIMAIGTRSGAVKIYGAPGVEFTGLHRDAATVTQMHFLTGQGRLLSLLDDSSLHLWEIVHHNGCAHLEEALSFQLPSRPGFDGASAPLSLTRVTVVLLVAAGDIAALGTEGSSVFFLDVTTLTLLEGQTLAPGEVLRSVPDDYRCGKALGPVESLQGHLRDPTKILIGYSRGLLVIWNQASQCVDHIFLGNQQLESLCWGRDSSTVVSSHSDGSYAVWSVDAGSFPTLQPTVATTPYGPFPCKAINKILWRNCESGGHFIIFSGGMPRASYGDRHCVSVLRAETLVTLDFTSRIIDFFTVHSTRPEDEFDDPQALAVLLEEELVVLDLQTPGWPAVPAPYLAPLHSSAITCSAHVASVPAKLWARIVSAGEQQSPQPVSSALSWPITGGRNLAQEPSQRGLLLTGHEDGTVRFWDASGVALRPLYKLSTAGLFQTDCEHADSLAQAAEDDWPPFRKVGCFDPYSDDPRLGVQKVALCKYTAQMVVAGTAGQVLVLELSDVPVEQAVSVAIIDLLQDREGFTWKGHERLSPRTGPLPWPAGFQPRVLVQCLPPAAVTAVTLHTEWSLVAFGTSHGFGLFEPCLARCTLHPNDSLAMEGPLSRVKSLKKSLRQSFRRIRKSRVSGKKRAANASSKLQEANAQLAEQACPHDVEMTPVQRRIEPRSADDSLSGVVRCLYFADTFLRDGAHHGPTMWAGTNSGSVFAYALEVPAAAVGGEKRPEQAVEAVLGKEVQLMHRAPVVAIAVLDGRGRPLPEPYEASRDLAQAPDMQGGHAVLIASEEQFKVFTLPKVSAKTKFKLTAHEGCRVRKVALATFASVACEDYAETCLACLTNLGDVHVFSVPGLRPQVHYSCIRKEDISGIASCVFTRHGQGFYLISPSEFERFSLSARNITEPLCSLDINWPRDATQASYRIRESPKLSQANGTPSILLAPQSLDGSPDPAHSMGPDTPEPPEAALSPMSIDSATSADTTLDTTGDVTVEDVKDFLGSSEESEKNLRNLAEDEAHACAILIK

SEQ ID NO: 848066 - protein, 1075 aa, Homo sapiens
AAGEAPAAGRKMMKFRFRRQGADPQREKLKQELFAFNKTVEHGFPNQPSALAFDPELRIMAIGTRSGAVKIYGAPGVEFTGLHRDAATVTQMHFLTGQGRLLSLLDDSSLHLWEIVHHNGCAHLEEALSFQLPSRPGFDGASAPLSLTRVTVVLLVAAGDIAALGTEGSSVFFLDVTTLTLLEGQTLAPGEVLRSVPDDYRCGKALGPVESLQGHLRDPTKILIGYSRGLLVIWNQASQCVDHIFLGNQQLESLCWGRDSSTVVSSHSDGSYAVWSVDAGSFPTLQPTVATTPYGPFPCKAINKILWRNCESGGHFIIFSGGMPRASYGDRHCVSVLRAETLVTLDFTSRIIDFFTVHSTRPEDEFDDPQALAVLLEEELVVLDLQTPGWPAVPAPYLAPLHSSAITCSAHVASVPAKLWARIVSAGEQQSPQPVSSALSWPITGGRNLAQEPSQRGLLLTGHEDGTVRFWDASGVALRPLYKLSTAGLFQTDCEHADSLAQAAEDDWPPFRKVGCFDPYSDDPRLGVQKVALCKYTAQMVVAGTAGQVLVLELSDVPVEQAVSVAIIDLLQDREGFTWKGHERLSPRTGPLPWPAGFQPRVLVQCLPPAAVTAVTLHTEWSLVAFGTSHGFGLFDYQRKSPVLARCTLHPNDSLAMEGPLSRVKSLKKSLRQSFRRIRKSRVSGKKRAANASSKLQEANAQLAEQACPHDVEMTPVQRRIEPRSADDSLSGVVRCLYFADTFLRDGAHHGPTMWAGTNSGSVFAYALEVPAAAVGGEKRPEQAVEAVLGKEVQLMHRAPVVAIAVLDGRGRPLPEPYEASRDLAQAPDMQGGHAVLIASEEQFKVFTLPKVSAKTKFKLTAHEGCRVRKVALATFASVACEDYAETCLACLTNLGDVHVFSVPGLRPQVHYSCIRKEDISGIASCVFTRHGQGFYLISPSEFERFSLSARNITEPLCSLDINWPRDATQASYRIRESPKLSQANGTPSILLAPQSLDGSPDPAHSMGPDTPEPPEAALSPMSIDSATSADTTLDTTGDVTVEDVKDFLGSSEESEKNLRNLAEDEAHACAILIK

SEQ ID NO: 848067 - protein, 1096 aa, Homo sapiens
AAGEAPAAGRKMMKFRFRRQGADPQREKLKQELFAFNKTVEHGFPNQPSALAFDPELRIMAIGTRSGAVKIYGAPGVEFTGLHRDAATVTQMHFLTGQGRLLSLLDDSSLHLWEIVHHNGCAHLEEALSFQLPSRPGFDGASAPLSLTRVTVVLLVAAGDIAALGTEGSSVFFLDVTTLTLLEGQTLAPGEVLRSVPDDYRCGKALGPVESLQGHLRDPTKILIGYSRGLLVIWNQASQCVDHIFLGNQQLESLCWGRDSSTVVSSHSDGSYAVWSVDAGSFPTLQPTVATTPYGPFPCKAINKILWRNCESGGHFIIFSGGMPRASYGDRHCVSVLRAETLVTLDFTSRIIDFFTVHSTRPEDEFDDPQALAVLLEEELVVLDLQTPGWPAVPAPYLAPLHSSAITCSAHVASVPAKLWARIVSAGEQQSPQPVSSALSWPITGGRNLAQEPSQRGLLLTGHEDGTVRFWDASGVALRPLYKLSTAGLFQTDCEHADSLAQAAEDDWPPFRKVGCFDPYSDDPRLGVQKVALCKYTAQMVVAGTAGQVLVLELSDVPVEQAVSVAIIDLLQDREGFTWKGHERLSPRTGPLPWPAGFQPRVLVQCLPPAAVTAVTLHTEWSLVAFGTSHGFGLFDYQRKSPVLARCTLHPNDSLAMEGPLSRVKSLKKSLRQSFRRIRKSRVSGKKRAANASSKLQEANAQLAEQACPHDVEMTPVQRRIEPRSADDSLSGVVRCLYFADTFLRDGAHHGPTMWAGTNSGSVFAYALEVPAAAVGGEKRPEQAVEAVLGKEVQLMHRAPVVAIAVLDGRGRPLPEPYEASRDLAQAPDMQGGHAVLIASEEQFKVFTLPKVSAKTKFKLTAHEGCRVRKVALATFASVACEDYAETCLACLTNLGDVHVFSVPGLRPQVHYSCIRKEDISGIASCVFTRHGQGFYLISPSEFERFSLSARNITEPLCSLDINWPRDATQASYRIRESPKLSQANGTPSILLAPQSLDGSPDPAHSMGPDTPEPPEAALSPMSIDSATSADTTLDTTGDVTVEDVKDFLGKARTIPTSTCPARSWSAGSLAPAWPLNIEPRLLTCRLHWDLLSCPA

SEQ ID NO: 848068 - protein, 838 aa, Homo sapiens
MPACLPAPACPQQLESLCWGRDSSTVVSSHSDGSYAVWSVDAGSFPTLQPTVATTPYGPFPCKAINKILWRNCESGGHFIIFSGGMPRASYGDRHCVSVLRAETLVTLDFTSRIIDFFTVHSTRPEDEFDDPQALAVLLEEELVVLDLQTPGWPAVPAPYLAPLHSSAITCSAHVASVPAKLWARIVSAGEQQSPQPVSSALSWPITGGRNLAQEPSQRGLLLTGHEDGTVRFWDASGVALRPLYKLSTAGLFQTDCEHADSLAQAAEDDWPPFRKVGCFDPYSDDPRLGVQKVALCKYTAQMVVAGTAGQVLVLELSDVPVEQAVSVAIIDLLQDREGFTWKGHERLSPRTGPLPWPAGFQPRVLVQCLPPAAVTAVTLHTEWSLVAFGTSHGFGLFDYQRKSPVLARCTLHPNDSLAMEGPLSRVKSLKKSLRQSFRRIRKSRVSGKKRAANASSKLQEANAQLAEQACPHDVEMTPVQRRIEPRSADDSLSGVVRCLYFADTFLRDGAHHGPTMWAGTNSGSVFAYALEVPAAAVGGEKRPEQAVEAVLGKEVQLMHRAPVVAIAVLDGRGRPLPEPYEASRDLAQAPDMQGGHAVLIASEEQFKVFTLPKVSAKTKFKLTAHEGCRVRKVALATFASVACEDYAETCLACLTNLGDVHVFSVPGLRPQVHYSCIRKEDISGIASCVFTRHGQGFYLISPSEFERFSLSARNITEPLCSLDINWPRDATQASYRIRESPKLSQANGTPSILLAPQSLDGSPDPAHSMGPDTPEPPEAALSPMSIDSATSADTTLDTTGDVTVEDVKDFLGSSEESEKNLRNLAEDEAHACAILIK

SEQ ID NO: 848069 - protein, 872 aa, Homo sapiens
MMKFRFRRQGADPQREKLKQELFAFNKTVEHGFPNQPSALAFDPELRIMAIGTRSGAVKIYGAPGVEFTGLHRDAATVTQMHFLTGQGRLLSLLDDSSLHLWEIVHHNGCAHLEEALSFQLPSRPGFDGASAPLSLTRVTVVLLVAAGDIAALGTEGSSVFFLDVTTLTLLEGQTLAPGEVLRSVPDDYRCGKDWAPLHSSAITCSAHVASVPAKLWARIVSAGEQQSPQPVSSALSWPITGGRNLAQEPSQRGLLLTGHEDGTVRFWDASGVALRPLYKLSTAGLFQTDCEHADSLAQAAEDDWPPFRKVGCFDPYSDDPRLGVQKVALCKYTAQMVVAGTAGQVLVLELSDVPVEQAVSVAIIDLLQDREGFTWKGHERLSPRTGPLPWPAGFQPRVLVQCLPPAAVTAVTLHTEWSLVAFGTSHGFGLFDYQRKSPVLARCTLHPNDSLAMEGPLSRVKSLKKSLRQSFRRIRKSRVSGKKRAANASSKLQEANAQLAEQACPHDVEMTPVQRRIEPRSADDSLSGVVRCLYFADTFLRDGAHHGPTMWAGTNSGSVFAYALEVPAAAVGGEKRPEQAVEAVLGKEVQLMHRAPVVAIAVLDGRGRPLPEPYEASRDLAQAPDMQGGHAVLIASEEQFKVFTLPKVSAKTKFKLTAHEGCRVRKVALATFASVACEDYAETCLACLTNLGDVHVFSVPGLRPQVHYSCIRKEDISGIASCVFTRHGQGFYLISPSEFERFSLSARNITEPLCSLDINWPRDATQASYRIRESPKLSQANGTPSILLAPQSLDGSPDPAHSMGPDTPEPPEAALSPMSIDSATSADTTLDTTGDVTVEDVKDFLGSSEESEKNLRNLAEDEAHACAILIK

SEQ ID NO: 848070 - protein, 611 aa, Homo sapiens
AAGEAPAAGRKMMKFRFRRQGADPQREKLKQELFAFNKTVEHGFPNQPSALAFDPELRIMAIGTRSGAVKIYGAPGVEFTGLHRDAATVTQMHFLTGQGRLLSLLDDSSLHLWEIVHHNGCAHLEEALSFQLPSRPGFDGASAPLSLTRVTVVLLVAAGDIAALGTEGSSVFFLDVTTLTLLEGQTLAPGEVLRSVPDDYRCGKALGPVESLQGHLRDPTKILIGYSRGLLVIWNQASQCVDHIFLGNQQLESLCWGRDSSTVVSSHSDGSYAVWSVDAGSFPTLQPTVATTPYGPFPCKAINKILWRNCESGGHFIIFSGGMPRASYGDRHCVSVLRAETLVTLDFTSRIIDFFTVHSTRPEDEFDDPQALAVLLEEELVVLDLQTPGWPAVPAPYLAPLHSSAITCSAHVASVPAKLWARIVSAGEQQSPQPVSSALSWPITGGRNLAQEPSQRGLLLTGHEDGTVRFWDASGVALRPLYKLSTAGLFQTDCEHADSLAQAAEDDWPPFRKVGCFDPYSDDPRLGVQKVALCKYTAQMVVAGTAGQVGLGVPWVGDVREGFLEEMSWRVWWKGRWTGTGKSQGGNRALGGAGWGEDRWEVGLSLGEPQC

SEQ ID NO: 848071 - protein, 1064 aa, Homo sapiens
MMKFRFRRQGADPQREKLKQELFAFNKTVEHGFPNQPSALAFDPELRIMAIGTRSGAVKIYGAPGVEFTGLHRDAATVTQMHFLTGQGRLLSLLDDSSLHLWEIVHHNGCAHLEEALSFQLPSRPGFDGASAPLSLTRVTVVLLVAAGDIAALGTEGSSVFFLDVTTLTLLEGQTLAPGEVLRSVPDDYRCGKALGPVESLQGHLRDPTKILIGYSRGLLVIWNQASQCVDHIFLGNQQLESLCWGRDSSTVVSSHSDGSYAVWSVDAGSFPTLQPTVATTPYGPFPCKAINKILWRNCESGGHFIIFSGGMPRASYGDRHCVSVLRAETLVTLDFTSRIIDFFTVHSTRPEDEFDDPQALAVLLEEELVVLDLQTPGWPAVPAPYLAPLHSSAITCSAHVASVPAKLWARIVSAGEQQSPQPVSSALSWPITGGRNLAQEPSQRGLLLTGHEDGTVRFWDASGVALRPLYKLSTAGLFQTDCEHADSLAQAAEDDWPPFRKVGCFDPYSDDPRLGVQKVALCKYTAQMVVAGTAGQVLVLELSDVPVEQAVSVAIIDLLQDREGFTWKGHERLSPRTGPLPWPAGFQPRVLVQCLPPAAVTAVTLHTEWSLVAFGTSHGFGLFDYQRKSPVLARCTLHPNDSLAMEGPLSRVKSLKKSLRQSFRRIRKSRVSGKKRAANASSKLQEANAQLAEQACPHDVEMTPVQRRIEPRSADDSLSGVVRCLYFADTFLRDGAHHGPTMWAGTNSGSVFAYALEVPAAAVGGEKRPEQAVEAVLGKEVQLMHRAPVVAIAVLDGRGRPLPEPYEASRDLAQAPDMQGGHAVLIASEEQFKVFTLPKVSAKTKFKLTAHEGCRVRKVALATFASVACEDYAETCLACLTNLGDVHVFSVPGLRPQVHYSCIRKEDISGIASCVFTRHGQGFYLISPSEFERFSLSARNITEPLCSLDINWPRDATQASYRIRESPKLSQANGTPSILLAPQSLDGSPDPAHSMGPDTPEPPEAALSPMSIDSATSADTTLDTTGDVTVEDVKDFLGSSEESEKNLRNLAEDEAHACAILIK

SEQ ID NO: 848072 - protein, 1096 aa, Homo sapiens; identical to SEQ ID NO: 848067

SEQ ID NO: 848073 - protein, 850 aa, Homo sapiens
  misc_feature (12)..(12): Xaa can be any naturally occurring amino acid
  misc_feature (18)..(18): Xaa can be any naturally occurring amino acid
  misc_feature (22)..(22): Xaa can be any naturally occurring amino acid
MCHRQVVDVTPXSYPCVXNPDXRGQLESLCWGRDSSTVVSSHSDGSYAVWSVDAGSFPTLQPTVATTPYGPFPCKAINKILWRNCESGGHFIIFSGGMPRASYGDRHCVSVLRAETLVTLDFTSRIIDFFTVHSTRPEDEFDDPQALAVLLEEELVVLDLQTPGWPAVPAPYLAPLHSSAITCSAHVASVPAKLWARIVSAGEQQSPQPVSSALSWPITGGRNLAQEPSQRGLLLTGHEDGTVRFWDASGVALRPLYKLSTAGLFQTDCEHADSLAQAAEDDWPPFRKVGCFDPYSDDPRLGVQKVALCKYTAQMVVAGTAGQVLVLELSDVPVEQAVSVAIIDLLQDREGFTWKGHERLSPRTGPLPWPAGFQPRVLVQCLPPAAVTAVTLHTEWSLVAFGTSHGFGLFDYQRKSPVLARCTLHPNDSLAMEGPLSRVKSLKKSLRQSFRRIRKSRVSGKKRAANASSKLQEANAQLAEQACPHDVEMTPVQRRIEPRSADDSLSGVVRCLYFADTFLRDGAHHGPTMWAGTNSGSVFAYALEVPAAAVGGEKRPEQAVEAVLGKEVQLMHRAPVVAIAVLDGRGRPLPEPYEASRDLAQAPDMQGGHAVLIASEEQFKVFTLPKVSAKTKFKLTAHEGCRVRKVALATFASVACEDYAETCLACLTNLGDVHVFSVPGLRPQVHYSCIRKEDISGIASCVFTRHGQGFYLISPSEFERFSLSARNITEPLCSLDINWPRDATQASYRIRESPKLSQANGTPSILLAPQSLDGSPDPAHSMGPDTPEPPEAALSPMSIDSATSADTTLDTTGDVTVEDVKDFLGSSEESEKNLRNLAEDEAHACAILIK

SEQ ID NO: 848074 - protein, 1075 aa, Homo sapiens; identical to SEQ ID NO: 848066

SEQ ID NO: 848075 - protein, 248 aa, Homo sapiens [sequence omitted]

SEQ ID NO: 848076 - protein, 113 aa, Homo sapiens
MLIDTLGASIVNATDSKGRTPLHAAAFTDHVECLQLLLSHNAQVNSVDSTGKTPLMMAAENGQTNTVEMLVSSASAELTLQDNSKNTALHLACSKPSEVPYIHDCLLWLDLHP

SEQ ID NO: 848077 - protein, 80 aa, Homo sapiens
GLGSEAGWSMMPVSSSSPLSSLTFNAINRYTNTSKTVSFEALPIMRNEPSSYCSFNNIGGEQEYLYTDVDELNDSDSETY

SEQ ID NO: 848078 - protein, 1241 aa, Homo sapiens
MRAVLTWRDKAEHCINDIAFKPDGTQLILAAGSRLLVYDTSDGTLLQPLKGHKDTVYCVAYAKDGKRFASGSADKSVIIWTSKLEGILKYTHNDAIQCVSYNPITHQLASCSSSDFGLWSPEQKSVSKHKSSSKIICCSWTNDGQYLALGMFNGIISIRNKNGEEKVKIERPGGSLSPIWSICWNPSSRWESFWMNRENEDAEDVIVNRYIQEIPSTLKSAVYSSQGSEAEEEEPEEEDDSPRDDNLEERNDILAVADWGQKVSFYQLSGKQIGKDRALNFDPCCISYFTKGEYILLGGSDKQVSLFTKDGVRLGTVGEQNSWVWTCQAKPDSNYVVVGCQDGTISFYQLIFSTVHGLYKDRYAYRDSMTDVIVQHLITEQKVRIKCKELVKKIAIYRNRLAIQLPEKILIYELYSEDLSDMHYRVKEKIIKKFECNLLVVCANHIILCQEKRLQCLSFSGVKEREWQMESLIRYIKVIGGPPGREGLLVGLKNGQILKIFVDNLFAIVLLKQATAVRCLDMSASRKKLAVVDENDTCLVYDIDTKELLFQEPNANSVAWNTQCEDMLCFSGGGYLNIKASTFPVHRQKLQGFVVGYNGSKIFCLHVFSISAVEVPQSAPMYQYLDRKLFKEAYQIACLGVTDTDWRELAMEALEGLDFETAKKAFIRVQDLRYLELISSIEERKKRGETNNDLFLADVFSYQGKFHEAAKLYKRSGHENLALEMYTDLCMFEYAKDFLGSGDPKETKMLITKQADWARNIKEPKAAVEMYISAGEHVKAIEICGDHGWVDMLIDIARKLDKAEREPLLLCATYLKKLDSPGYAAETYLKMGDLKSLVQLHVETQRWDEAFALGEKHPEFKDDIYMPYAQWLAENDRFEEAQKAFHKAGRQREAVQVLEQLTNNAVAESRFNDAAYYYWMLSMQCLDIAQDPAQKDTMLGKFYHFQRLAELYHGYHAIHRHTEDPFSVHRPETLFNISRFLLHSLPKDTPSGISKVKILFTLAKQSKALGAYRLARHAYDKLRGLYIPARFQKSIELGTLTIRAKPFHDSEELVPLCYRCSTNNPLLNNLGNVCINCRQPFIFSASSYDVLHLVEFYLEEGITDEEAISLIDLEVLRPKRDDRQLEIANNSSQILRLVETKDSIGDEDPFTAKLSFEQGGSEFVPVVVSRLVLRSMSRRDVLIKRWPPPLRWQYFRSLLPDASITMCPSCFQMFHSEDYELLVLQHGCCPYCRRCKDDPGP

SEQ ID NO: 848079 - protein, 1182 aa, Homo sapiens
MRAVLTWRDKAEHCINDIAFKPDGTQLILAAGSRLLVYDTSDGTLLQPLKGHKDTVYCVAYAKDGKRFASGSADKSVIIWTSKLEGILKYTHNDAIQCVSYNPITHQLASCSSSDFGLWSPEQKSVSKHKSSSKIICCSWTNDGQYLALGMFNGIISIRNKNGEEKVKIERPGGSLSPIWSICWNPSREERNDILAVADWGQKVSFYQLSGKQIGKDRALNFDPCCISYFTKGEYILLGGSDKQVSLFTKDGVRLGTVGEQNSWVWTCQAKPDSNYVVVGCQDGTISFYQLIFSTVHGLYKDRYAYRDSMTDVIVQHLITEQKVRIKCKELVKKIAIYRNRLAIQLPEKILIYELYSEDLSDMHYRVKEKIIKKFECNLLVVCANHIILCQEKRLQCLSFSGVKEREWQMESLIRYIKVIGGPPGREGLLVGLKNGQILKIFVDNLFAIVLLKQATAVRCLDMSASRKKLAVVDENDTCLVYDIDTKELLFQEPNANSVAWNTQCEDMLCFSGGGYLNIKASTFPVHRQKLQGFVVGYNGSKIFCLHVFSISAVEVPQSAPMYQYLDRKLFKEAYQIACLGVTDTDWRELAMEALEGLDFETAKKAFIRVQDLRYLELISSIEERKKRGETNNDLFLADVFSYQGKFHEAAKLYKRSGHENLALEMYTDLCMFEYAKDFLGSGDPKETKMLITKQADWARNIKEPKAAVEMYISAGEHVKAIEICGDHGWVDMLIDIARKLDKAEREPLLLCATYLKKLDSPGYAAETYLKMGDLKSLVQLHVETQRWDEAFALGEKHPEFKDDIYMPYAQWLAENDRFEEAQKAFHKAGRQREAVQVLEQLTNNAVAESRFNDAAYYYWMLSMQCLDIAQDPAQKDTMLGKFYHFQRLAELYHGYHAIHRHTEDPFSVHRPETLFNISRFLLHSLPKDTPSGISKVKILFTLAKQSKALGAYRLARHAYDKLRGLYIPARFQKSIELGTLTIRAKPFHDSEELVPLCYRCSTNNPLLNNLGNVCINCRQPFIFSASSYDVLHLVEFYLEEGITDEEAISLIDLEVLRPKRDDRQLEIANNSSQILRLVETKDSIGDEDPFTAKLSFEQGGSEFVPVVVSRLVLRSMSRRDVLIKRWPPPLRWQYFRSLLPDASITMCPSCFQMFHSEDYELLVLQHGCCPYCRRCKDDPGP

SEQ ID NO: 848080 - protein, 1292 aa, Homo sapiens
MRAVLTWRDKAEHCINDIAFKPDGTQLILAAGSRLLVYDTSDGTLLQPLKGHKDTVYCVAYAKDGKRFASGSADKSVIIWTSKLEGILKYTSWSVMSSLHLHLPFLGLHKTVRVTATDKAPKGQGGRIDCLRPSVQNQPGQKHNDAIQCVSYNPITHQLASCSSSDFGLWSPEQKSVSKHKSSSKIICCSWTNDGQYLALGMFNGIISIRNKNGEEKVKIERPGGSLSPIWSICWNPSSRWESFWMNRENEDAEDVIVNRYIQEIPSTLKSAVYSSQGSEAEEEEPEEEDDSPRDDNLEERNDILAVADWGQKVSFYQLSGKQIGKDRALNFDPCCISYFTKGEYILLGGSDKQVSLFTKDGVRLGTVGEQNSWVWTCQAKPDSNYVVVGCQDGTISFYQLIFSTVHGLYKDRYAYRDSMTDVIVQHLITEQKVRIKCKELVKKIAIYRNRLAIQLPEKILIYELYSEDLSDMHYRVKEKIIKKFECNLLVVCANHIILCQEKRLQCLSFSGVKEREWQMESLIRYIKVIGGPPGREGLLVGLKNGQILKIFVDNLFAIVLLKQATAVRCLDMSASRKKLAVVDENDTCLVYDIDTKELLFQEPNANSVAWNTQCEDMLCFSGGGYLNIKASTFPVHRQKLQGFVVGYNGSKIFCLHVFSISAVEVPQSAPMYQYLDRKLFKEAYQIACLGVTDTDWRELAMEALEGLDFETAKKAFIRVQDLRYLELISSIEERKKRGETNNDLFLADVFSYQGKFHEAAKLYKRSGHENLALEMYTDLCMFEYAKDFLGSGDPKETKMLITKQADWARNIKEPKAAVEMYISAGEHVKAIEICGDHGWVDMLIDIARKLDKAEREPLLLCATYLKKLDSPGYAAETYLKMGDLKSLVQLHVETQRWDEAFALGEKHPEFKDDIYMPYAQWLAENDRFEEAQKAFHKAGRQREAVQVLEQLTNNAVAESRFNDAAYYYWMLSMQCLDIAQDPAQKDTMLGKFYHFQRLAELYHGYHAIHRHTEDPFSVHRPETLFNISRFLLHSLPKDTPSGISKVKILFTLAKQSKALGAYRLARHAYDKLRGLYIPARFQKSIELGTLTIRAKPFHDSEELVPLCYRCSTNNPLLNNLGNVCINCRQPFIFSASSYDVLHLVEFYLEEGITDEEAISLIDLEVLRPKRDDRQLEIANNSSQILRLVETKDSIGDEDPFTAKLSFEQGGSEFVPVVVSRLVLRSMSRRDVLIKRWPPPLRWQYFRSLLPDASITMCPSCFQMFHSEDYELLVLQHGCCPYCRRCKDDPGP

SEQ ID NO: 848081 - protein, 1487 aa, Homo sapiens
GRVGAEHCINDIAFKPDGTQLILAAGSRLLVYDTSDGTLLQPLKGHKDTVYCVAYAKDGKRFASGSADKSVIIWTSKLEGILKYTHNDAIQCVSYNPITHQLASCSSSDFGLWSPEQKSVSKHKSSSKIICCSWTNDGQYLALGMFNGIISIRNKNGEEKVKIERPGGSLSPIWSICWNPSREERNDILAVADWGQKVSFYQLSGKQIGKDRALNFDPCCISYFTKGEYILLGGSDKQVSLFTKDGVRLGTVGEQNSWVWTCQAKPDSNYVVVGCQDGTISFYQLIFSTVHGLYKDRYAYRDSMTDVIVQHLITEQKVRIKCKELVKKIAIYRNRLAIQLPEKILIYELYSEDLSDMHYRVKEKIIKKFECNLLVVCANHIILCQEKRLQCLSFSGVKEREWQMESLIRYIKVIGGPPGREGLLVGLKNGQILKIFVDNLFAIVLLKQATAVRCLDMSASRKKLAVVDENDTCLVYDIDTKELLFQEPNANSVAWNTQCEDMLCFSGGGYLNIKASTFPVHRQKLQGFVVGYNGSKIFCLHVFSISAVEVPQSAPMYQYLDRKLFKEAYQIACLGVTDTDWRELAMEALEGLDFETAKKAFIRVQDLRYLELISSIEERKKRGETNNDLFLADVFSYQGKFHEAAKLYKRSGHENLALEMYTDLCMFEYAKDFLGSGDPKETKMLITKQADWARNIKEPKAAVEMYISAGEHVKAIEICGDHGWVDMLIDIARKLDKAEREPLLLCATYLKKLDSPGYAAETYLKMGDLKSLVQLHVETQRWDEAFALGEKHPEFKDDIYMPYAQWLAENDRFEEAQKAFHKAGRQREAVQVLEQLTNNAVAESRFNDAAYYYWMLSMQCLDIAQDPAQKDTMLGKFYHFQRLAELYHGYHAIHRHTEDPFSVHRPETLFNISRFLLHSLPKDTPSGISKVKILFTLAKQSKALGAYRLARHAYDKLRGLYIPARFQKSIELGTLTIRAKPFHDSEVRMQHPWAGGFSSPLRPSHAFLPGLGSFEERQLQLPLGSVPPAQAWPCQLPCASLSTSCSPRSPPGARSQPPAPASALSLASLAPCPPLGKPHTSVPRWLCLYPRPGPRADSYSRNLCPFWNQAVVLQQIYPTLPTHIPSTQPASFFHTSSLKLRARTWFRQTWVHIPAPPSPSSVSIFLHLGFPLSHRYVVRLNEPDSPRAPHGARSMVNGWLMVAAATVIPARGKVPLSAACAGVLGTGTQVTGLGYFGRPLSCFPMAWSSWARRPFPACPPGWPFLLAARPQGPEARVQGEEDTCLPRPLGSPWLFCEELVPLCYRCSTNNPLLNNLGNVCINCRQPFIFSASSYDVLHLVEFYLEEGITDEEAISLIDLEVLRPKRDDRQLEIANNSSQILRLVETKDSIGDEDPFTAKLSFEQGGSEFVPVVVSRLVLRSMSRRDVLIKRWPPPLRWQYFRSLLPDASITMCPSCFQMFHSEDYELLVLQHGCCPYCRRCKDDPGP

SEQ ID NO: 848082 - protein, 110 aa, Homo sapiens
GLSVLSPACIPCASKVDFTGPCAVHILPKSWGPSKRDVPLTFTQKTRNPTAPSHLPFQPSNKGAAGLCPALTTAKPPPLERQCVLAPGVGLMSTRASAWSYSCLPLDVPF

SEQ ID NO: 848083 - protein, 110 aa, Homo sapiens; identical to SEQ ID NO: 848082

SEQ ID NO: 848084 - protein, 1081 aa, Homo sapiens
MRAVLTWRDKAEHCINDIAFKPDGTQLILAAGSRLLVYDTSDGTLLQPLKGHKDTVYCVAYAKDGLWSPEQKSVSKHKSSSKIICCREERNDILAVADWGQKVSFYQLSGKQIGKDRALNFDPCCISYFTKGEYILLGGSDKQVSLFTKDGVRLGTVGEQNSWVWTCQAKPDSNYVVVGCQDGTISFYQLIFSTVHGLYKDRYAYRDSMTDVIVQHLITEQKVRIKCKELVKKIAIYRNRLAIQLPEKILIYELYSEDLSDMHYRVKEKIIKKFECNLLVVCANHIILCQEKRLQCLSFSGVKEREWQMESLIRYIKVIGGPPGREGLLVGLKNGQILKIFVDNLFAIVLLKQATAVRCLDMSASRKKLAVVDENDTCLVYDIDTKELLFQEPNANSVAWNTQCEDMLCFSGGGYLNIKASTFPVHRQKLQGFVVGYNGSKIFCLHVFSISAVEVPQSAPMYQYLDRKLFKEAYQIACLGVTDTDWRELAMEALEGLDFETAKKAFIRVQDLRYLELISSIEERKKRGETNNDLFLADVFSYQGKFHEAAKLYKRSGHENLALEMYTDLCMFEYAKDFLGSGDPKETKMLITKQADWARNIKEPKAAVEMYISAGEHVKAIEICGDHGWVDMLIDIARKLDKAEREPLLLCATYLKKLDSPGYAAETYLKMGDLKSLVQLHVETQRWDEAFALGEKHPEFKDDIYMPYAQWLAENDRFEEAQKAFHKAGRQREAVQVLEQLTNNAVAESRFNDAAYYYWMLSMQCLDIAQDPAQKDTMLGKFYHFQRLAELYHGYHAIHRHTEDPFSVHRPETLFNISRFLLHSLPKDTPSGISKVKILFTLAKQSKALGAYRLARHAYDKLRGLYIPARFQKSIELGTLTIRAKPFHDSEELVPLCYRCSTNNPLLNNLGNVCINCRQPFIFSASSYDVLHLVEFYLEEGITDEEAISLIDLEVLRPKRDDRQLEIANNSSQILRLVETKDSIGDEDPFTAKLSFEQGGSEFVPVVVSRLVLRSMSRRDVLIKRWPPPLRWQYFRSLLPDASITMCPSCFQMFHSEDYELLVLQHGCCPYCRRCKDDPGP

SEQ ID NO: 848085 - protein, 1164 aa, Homo sapiens
MRAVLTWRDKAEHCINDIAFKPDGTQLILAAGSRLLVYDTSDGTLLQPLKGHKDTVYCVAYAKDGKRFASGSADKSVIIWTSKLEGILKYTHNDAIQCVSYNPITHQLASCSSSDFGLWSPEQKSVSKHKSSSKIICCSWTNDGQYLALGMFNGIISIRNKNGEEKVKIERPGGSLSPIWSICWNPSREERNDILAVADWGQKVSFYQLSGKQIGKDRALNFDPCCISYFTKGEYILLGGSDKQVSLFTKDGVRLGTVGEQNSWVWTCQAKPDSNYVVVGCQDGTISFYQLIFSTVHGLYKDRYAYRDSMTDVIVQHLITEQKVRIKCKELVKKIAIYRNRLAIQLPEKILIYELYSEDLSDMHYRVKEKIIKKFECNLLVVCANHIILCQEKRLQCLSFSGVKEREWQMESLIRYIKVIGGPPGREGLLVGLKNGQILKIFVDNLFAIVLLKQATAVRCLDMSASRKKLAVVDENDTCLVYDIDTKELLFQEPNANSVAWNTQCEDMLCFSGGGYLNIKASTFPVHRQKLQGFVVGYNGSKIFCLHVFSISAVEVPQSAPMYQYLDRKLFKEAYQIACLGVTDTDWRELAMEALEGLDFETAKKERKKRGETNNDLFLADVFSYQGKFHEAAKLYKRSGHENLALEMYTDLCMFEYAKDFLGSGDPKETKMLITKQADWARNIKEPKAAVEMYISAGEHVKAIEICGDHGWVDMLIDIARKLDKAEREPLLLCATYLKKLDSPGYAAETYLKMGDLKSLVQLHVETQRWDEAFALGEKHPEFKDDIYMPYAQWLAENDRFEEAQKAFHKAGRQREAVQVLEQLTNNAVAESRFNDAAYYYWMLSMQCLDIAQDPAQKDTMLGKFYHFQRLAELYHGYHAIHRHTEDPFSVHRPETLFNISRFLLHSLPKDTPSGISKVKILFTLAKQSKALGAYRLARHAYDKLRGLYIPARFQKSIELGTLTIRAKPFHDSEELVPLCYRCSTNNPLLNNLGNVCINCRQPFIFSASSYDVLHLVEFYLEEGITDEEAISLIDLEVLRPKRDDRQLEIANNSSQILRLVETKDSIGDEDPFTAKLSFEQGGSEFVPVVVSRLVLRSMSRRDVLIKRWPPPLRWQYFRSLLPDASITMCPSCFQMFHSEDYELLVLQHGCCPYCRRCKDDPGP

SEQ ID NO: 848086 - protein, 171 aa, Homo sapiens
MRAVLTWRDKAEHCINDIAFKPDGTQLILAAGSRLLVYDTSDGTLLQPLKGHKDTVYCVAYAKDGKRFASGSADKSVIIWTSKLEGILKYTHNDAIQCVSYNPITHQLASCSSSDFGLWSPEQKSVSKHKSSSKIICCSWTNDGQPQPGCHYVPLLKGSSRWTILARGSPP

SEQ ID NO: 848087 - protein, 1130 aa, Homo sapiens
MRAVLTWRDKAEHCINDIAFKPDGTQLILAAGSRLLVYDTSDGTLLQPLKGHKDTVYCVAYAKDGLWSPEQKSVSKHKSSSKIICCSWTNDGQYLALGMFNGIISIRNKNGEEKVKIERPGGSLSPIWSICWNPSREERNDILAVADWGQKVSFYQLSGKQIGKDRALNFDPCCISYFTKGEYILLGGSDKQVSLFTKDGVRLGTVGEQNSWVWTCQAKPDSNYVVVGCQDGTISFYQLIFSTVHGLYKDRYAYRDSMTDVIVQHLITEQKVRIKCKELVKKIAIYRNRLAIQLPEKILIYELYSEDLSDMHYRVKEKIIKKFECNLLVVCANHIILCQEKRLQCLSFSGVKEREWQMESLIRYIKVIGGPPGREGLLVGLKNGQILKIFVDNLFAIVLLKQATAVRCLDMSASRKKLAVVDENDTCLVYDIDTKELLFQEPNANSVAWNTQCEDMLCFSGGGYLNIKASTFPVHRQKLQGFVVGYNGSKIFCLHVFSISAVEVPQSAPMYQYLDRKLFKEAYQIACLGVTDTDWRELAMEALEGLDFETAKKAFIRVQDLRYLELISSIEERKKRGETNNDLFLADVFSYQGKFHEAAKLYKRSGHENLALEMYTDLCMFEYAKDFLGSGDPKETKMLITKQADWARNIKEPKAAVEMYISAGEHVKAIEICGDHGWVDMLIDIARKLDKAEREPLLLCATYLKKLDSPGYAAETYLKMGDLKSLVQLHVETQRWDEAFALGEKHPEFKDDIYMPYAQWLAENDRFEEAQKAFHKAGRQREAVQVLEQLTNNAVAESRFNDAAYYYWMLSMQCLDIAQDPAQKDTMLGKFYHFQRLAELYHGYHAIHRHTEDPFSVHRPETLFNISRFLLHSLPKDTPSGISKVKILFTLAKQSKALGAYRLARHAYDKLRGLYIPARFQKSIELGTLTIRAKPFHDSEELVPLCYRCSTNNPLLNNLGNVCINCRQPFIFSASSYDVLHLVEFYLEEGITDEEAISLIDLEVLRPKRDDRQLEIANNSSQILRLVETKDSIGDEDPFTAKLSFEQGGSEFVPVVVSRLVLRSMSRRDVLIKRWPPPLRWQYFRSLLPDASITMCPSCFQMFHSEDYELLVLQHGCCPYCRRCKDDPGP

SEQ ID NO: 848088 - protein, 1038 aa, Homo sapiens
MMLYNVSPTILLLINWHLVPPVTLGCGLLNRSLSPNTNQAARSSAAAGQMMVSTDWGQKVSFYQLSGKQIGKDRALNFDPCCISYFTKGEYILLGGSDKQVSLFTKDGVRLGTVGEQNSWVWTCQAKPDSNYVVVGCQDGTISFYQLIFSTVHGLYKDRYAYRDSMTDVIVQHLITEQKVRIKCKELVKKIAIYRNRLAIQLPEKILIYELYSEDLSDMHYRVKEKIIKKFECNLLVVCANHIILCQEKRLQCLSFSGVKEREWQMESLIRYIKVIGGPPGREGLLVGLKNGQILKIFVDNLFAIVLLKQATAVRCLDMSASRKKLAVVDENDTCLVYDIDTKELLFQEPNANSVAWNTQCEDMLCFSGGGYLNIKASTFPVHRQKLQGFVVGYNGSKIFCLHVFSISAVEVPQSAPMYQYLDRKLFKEAYQIACLGVTDTDWRELAMEALEGLDFETAKKAFIRVQDLRYLELISSIEERKKRGETNNDLFLADVFSYQGKFHEAAKLYKRSGHENLALEMYTDLCMFEYAKDFLGSGDPKETKMLITKQADWARNIKEPKAAVEMYISAGEHVKAIEICGDHGWVDMLIDIARKLDKAEREPLLLCATYLKKLDSPGYAAETYLKMGDLKSLVQLHVETQRWDEAFALGEKHPEFKDDIYMPYAQWLAENDRFEEAQKAFHKAGRQREAVQVLEQLTNNAVAESRFNDAAYYYWMLSMQCLDIAQDPAQKDTMLGKFYHFQRLAELYHGYHAIHRHTEDPFSVHRPETLFNISRFLLHSLPKDTPSGISKVKILFTLAKQSKALGAYRLARHAYDKLRGLYIPARFQKSIELGTLTIRAKPFHDSEELVPLCYRCSTNNPLLNNLGNVCINCRQPFIFSASSYDVLHLVEFYLEEGITDEEAISLIDLEVLRPKRDDRQLEIANNSSQILRLVETKDSIGDEDPFTAKLSFEQGGSEFVPVVVSRLVLRSMSRRDVLIKRWPPPLRWQYFRSLLPDASITMCPSCFQMFHSEDYELLVLQHGCCPYCRRCKDDPGP

SEQ ID NO: 848089 - protein, 136 aa, Homo sapiens
KQYFKLHIWEPLAQRSWLISLPCPGSQERCRPLKHTGWPKTRARPFLVKDVMAQLKTHSQACTHICTYTRVHTCGRKGHRTWSPVTSGYCQLFAGTGHLSSLSLGLLGCSQGEIIPTAQDCGDSQKPFINLRKRSR

SEQ ID NO: 848090 - protein, 33 aa, Homo sapiens
MYRQSLISPCISSSPAVMLRDPPEAQTGLFFFG

SEQ ID NO: 848091 - protein, 1032 aa, Homo sapiens
MFNGIISIRNKNGEEKVKIERPGGSLSPIWSICWNPSREERNDILAVADWGQKVSFYQLSGKQIGKDRALNFDPCCISYFTKGEYILLGGSDKQVSLFTKDGVRLGTVGEQNSWVWTCQAKPDSNYVVVGCQDGTISFYQLIFSTVHGLYKDRYAYRDSMTDVIVQHLITEQKVRIKCKELVKKIAIYRNRLAIQLPEKILIYELYSEDLSDMHYRVKEKIIKKFECNLLVVCANHIILCQEKRLQCLSFSGVKEREWQMESLIRYIKVIGGPPGREGLLVGLKNGQILKIFVDNLFAIVLLKQATAVRCLDMSASRKKLAVVDENDTCLVYDIDTKELLFQEPNANSVAWNTQCEDMLCFSGGGYLNIKASTFPVHRQKLQGFVVGYNGSKIFCLHVFSISAVEVPQSAPMYQYLDRKLFKEAYQIACLGVTDTDWRELAMEALEGLDFETAKKAFIRVQDLRYLELISSIEERKKRGETNNDLFLADVFSYQGKFHEAAKLYKRSGHENLALEMYTDLCMFEYAKDFLGSGDPKETKMLITKQADWARNIKEPKAAVEMYISAGEHVKAIEICGDHGWVDMLIDIARKLDKAEREPLLLCATYLKKLDSPGYAAETYLKMGDLKSLVQLHVETQRWDEAFALGEKHPEFKDDIYMPYAQWLAENDRFEEAQKAFHKAGRQREAVQVLEQLTNNAVAESRFNDAAYYYWMLSMQCLDIAQDPAQKDTMLGKFYHFQRLAELYHGYHAIHRHTEDPFSVHRPETLFNISRFLLHSLPKDTPSGISKVKILFTLAKQSKALGAYRLARHAYDKLRGLYIPARFQKSIELGTLTIRAKPFHDSEELVPLCYRCSTNNPLLNNLGNVCINCRQPFIFSASSYDVLHLVEFYLEEGITDEEAISLIDLEVLRPKRDDRQLEIANNSSQILRLVETKDSIGDEDPFTAKLSFEQGGSEFVPVVVSRLVLRSMSRRDVLIKRWPPPLRWQYFRSLLPDASITMCPSCFQMFHSEDYELLVLQHGCCPYCRRCKDDPGP

SEQ ID NO: 848092 - protein, 1035 aa, Homo sapiens
FIKRLGQAVQTGTWRCKKRVSGCHIRSSLSPIWSICWNPSREERNDILAVADWGQKVSFYQLSGKQIGKDRALNFDPCCISYFTKGEYILLGGSDKQVSLFTKDGVRLGTVGEQNSWVWTCQAKPDSNYVVVGCQDGTISFYQLIFSTVHGLYKDRYAYRDSMTDVIVQHLITEQKVRIKCKELVKKIAIYRNRLAIQLPEKILIYELYSEDLSDMHYRVKEKIIKKFECNLLVVCANHIILCQEKRLQCLSFSGVKEREWQMESLIRYIKVIGGPPGREGLLVGLKNGQILKIFVDNLFAIVLLKQATAVRCLDMSASRKKLAVVDENDTCLVYDIDTKELLFQEPNANSVAWNTQCEDMLCFSGGGYLNIKASTFPVHRQKLQGFVVGYNGSKIFCLHVFSISAVEVPQSAPMYQYLDRKLFKEAYQIACLGVTDTDWRELAMEALEGLDFETAKKAFIRVQDLRYLELISSIEERKKRGETNNDLFLADVFSYQGKFHEAAKLYKRSGHENLALEMYTDLCMFEYAKDFLGSGDPKETKMLITKQADWARNIKEPKAAVEMYISAGEHVKAIEICGDHGWVDMLIDIARKLDKAEREPLLLCATYLKKLDSPGYAAETYLKMGDLKSLVQLHVETQRWDEAFALGEKHPEFKDDIYMPYAQWLAENDRFEEAQKAFHKAGRQREAVQVLEQLTNNAVAESRFNDAAYYYWMLSMQCLDIAQDPAQKDTMLGKFYHFQRLAELYHGYHAIHRHTEDPFSVHRPETLFNISRFLLHSLPKDTPSGISKVKILFTLAKQSKALGAYRLARHAYDKLRGLYIPARFQKSIELGTLTIRAKPFHDSEELVPLCYRCSTNNPLLNNLGNVCINCRQPFIFSASSYDVLHLVEFYLEEGITDEEAISLIDLEVLRPKRDDRQLEIANNSSQILRLVETKDSIGDEDPFTAKLSFEQGGSEFVPVVVSRLVLRSMSRRDVLIKRWPPPLRWQYFRSLLPDASITMCPSCFQMFHSEDYELLVLQHGCCPYCRRCKDDPGP

SEQ ID NO: 848093 - protein, 174 aa, Homo sapiens
MPGGKSFARPPAPSALSLCPPDVLHLVEFYLEEGITDEEAISLIDLEVLRPKRDDRQLEIANNSSQILRLVETKDSIGDEDPFTAKLSFEQGGSEFVPVVVSRLVLRSMSRRDVLIKRWPPPLRWQYFRSLLPDASITMCPSCFQMFHSEDYELLVLQHGCCPYCRRCKDDPGP

SEQ ID NO: 848094 - protein, 106 aa, Homo sapiens
RSRGIPRCRACAVPVLEGPPLEAYTIQGQYAIPQPDLTKLHQLAMQQSHFPMTHGNTGFSGIESSSPEVKGYWAGLDASAQTTSHELTIPNDLIGCIIGRQGAKNQ

SEQ ID NO: 848095 - protein, 112 aa, Homo sapiens
MHLTSVLCWKEVGSIIGKKGESVKKMREESGARINISEGNCPERIITLAGPTNAIFKAFAMIIDKLEEDISSSVLSMCILCLYFVLKKEEKEAFIVEHVGIVPFIFFSFWDI

SEQ ID NO: 848096 - protein, 103 aa, Homo sapiens
VLHHTYQGESVKKMREESGARINISEGNCPERIITLAGPTNAIFKAFAMIIDKLEEDISSSMTNSTAASRPPVTLRLVVPASQCGSLIGKGDDTGSSRYPSNT

SEQ ID NO: 848097 - protein, 207 aa, Homo sapiens
MAMSLNGIGLQRWSLQVRFEAHSRGGVWKARTVAACAVPVLTTCEDYQKFLTVKSRPKPSSSPVIFAGGQAYTIQGQYAIPQPDLTKLHQLAMQQSHFPMTHGNTGFSGIESSSPEVKGYWAGLDASAQTTSHELTIPNDLIGCSNRLVHETLPCTIPMRYNYNKLQSAYDKQTLNRSIAYSSISHIALVVTSVLITYYRQVTRWVP

SEQ ID NO: 848098 - protein, 178 aa, Homo sapiens
MDTGVIEGGLNVTLTIRLLMHGKEVGSIIGKKGESVKKMREESGARINISEGNCPERIITLAGPTNAIFKAFAMIIDKLEEDISSSMTNSTAASRPPVTLRLVVPASQCGSLIGKGGCKIKEIRESTGAQVQVAGDMLPNSTERAITIAGIPQSIIECVKQICVVMLETLSPSPPRRA

SEQ ID NO: 848099 - protein, 178 aa, Homo sapiens; identical to SEQ ID NO: 848098

SEQ ID NO: 848100 - protein, 178 aa, Homo sapiens; identical to SEQ ID NO: 848098

SEQ ID NO: 848101 - protein, 178 aa, Homo sapiens; identical to SEQ ID NO: 848098

SEQ ID NO: 848102 - protein, 178 aa, Homo sapiens; identical to SEQ ID NO: 848098

SEQ ID NO: 848103 - protein, 178 aa, Homo sapiens; identical to SEQ ID NO: 848098

SEQ ID NO: 848104 - protein, 178 aa, Homo sapiens; identical to SEQ ID NO: 848098

SEQ ID NO: 848105 - protein, 178 aa, Homo sapiens; identical to SEQ ID NO: 848098

SEQ ID NO: 848106 - protein, 178 aa, Homo sapiens; identical to SEQ ID NO: 848098

SEQ ID NO: 848107 - protein, 178 aa, Homo sapiens; identical to SEQ ID NO: 848098

SEQ ID NO: 848108 - protein, 178 aa, Homo sapiens; identical to SEQ ID NO: 848098

SEQ ID NO: 848109 - protein, 178 aa, Homo sapiens; identical to SEQ ID NO: 848098

SEQ ID NO: 848110 - protein, 178 aa, Homo sapiens; identical to SEQ ID NO: 848098

SEQ ID NO: 848111 - protein, 178 aa, Homo sapiens; identical to SEQ ID NO: 848098

SEQ ID NO: 848112 - protein, 178 aa, Homo sapiens; identical to SEQ ID NO: 848098

SEQ ID NO: 848113 - protein, 178 aa, Homo sapiens; identical to SEQ ID NO: 848098

SEQ ID NO: 848114 - protein, 178 aa, Homo sapiens; identical to SEQ ID NO: 848098

SEQ ID NO: 848115 - protein, 178 aa, Homo sapiens; identical to SEQ ID NO: 848098

SEQ ID NO: 848116 - protein, 119 aa, Homo sapiens
IRHRPRAIFPLSRLAPAVFGFHPQPVTKDLTTQLSGPSLLLAFHNPSLSVSNRSAWSCWRHSLPVPPEGRDHPVPAQAVQLSGHLCRWSGTGTAQAATVRAFPTPPRPCASTLTWRDHL

SEQ ID NO: 848117 - protein, 178 aa, Homo sapiens; identical to SEQ ID NO: 848098

SEQ ID NO: 848118 - protein, 178 aa, Homo sapiens; identical to SEQ ID NO: 848098

SEQ ID NO: 848119 - protein, 178 aa, Homo sapiens; identical to SEQ ID NO: 848098

SEQ ID NO: 848120 - protein, 178 aa, Homo sapiens; identical to SEQ ID NO: 848098

SEQ ID NO: 848121 - protein, 139 aa, Homo sapiens
IRHRPRAIFPLSRLAPAVFGFHPQPVTKDLTTQLSGPSLLLAFHNPSLSVSNRSAWSCWRHSLPVPPEGRDHPVPAQAVQLSGHLCRWSGLYHSRTVCHSTARFDQAAPVGNATVSFSHDAWQHRIQWYGYLSVYFCKV

SEQ ID NO: 848122 - protein, 125 aa, Homo sapiens
IRHRPRAIFPLSRLAPAVFGFHPQPVTKDLTTQLSGPSLLLAFHNPSLSVSNRSAWSCWRHSLPVPPEGRDHPVPAQAVQLSGHLCRWSVDQAAPVGNATVSFSHDAWQHRIQWYGYLSVYFCKV

SEQ ID NO: 848123 - protein, 115 aa, Homo sapiens
IRHRPRAIFPLSRLAPAVFGFHPQPVTKDLTTQLSGPSLLLAFHNPSLSVSNRSAWSCWRHSLPVPPEGRDHPVPAQAVQLSGHLCRWSVDQAAPVGNATVSFSHDAWQHRIQWH

SEQ ID NO: 848124 - protein, 125 aa, Homo sapiens
IRHRPRAIFPLSRLAPAVFGFHPQPVTKDLTTQLSGPSLLLAFHNPSLSVSNRSAWSCWRHSLPVPPEGRDHPVPAQAVQLSGHLCRWSVDQAAPVGNATVSFSHDAWQHRIQCRFGCICSDYFS

SEQ ID NO: 848125 - protein, 178 aa, Homo sapiens; identical to SEQ ID NO: 848098

SEQ ID NO: 848126 - protein, 139 aa, Homo sapiens
IRHRPRAIFPLSRLAPAVFGFHPQPVTKDLTTQLSGPSLLLAFHNPSLSVSNRSAWSCWRHSLPVPPEGRDHPVPAQAVQLSGHLCRWSGLYHSRTVCHSTARFDQAAPVGNATVSFSHDAWQHRIQCRFGCICSDYFS

SEQ ID NO: 848127 - protein, 129 aa, Homo sapiens
IRHRPRAIFPLSRLAPAVFGFHPQPVTKDLTTQLSGPSLLLAFHNPSLSVSNRSAWSCWRHSLPVPPEGRDHPVPAQAVQLSGHLCRWSGLYHSRTVCHSTARFDQAAPVGNATVSFSHDAWQHRIQWH

SEQ ID NO: 848128 - protein, 129 aa, Homo sapiens; identical to SEQ ID NO: 848127

SEQ ID NO: 848129 - protein, 76 aa, Homo sapiens
VYSKEDYSVVNRFESHGGDSHTLSQSPPKGVTIPYRPKPSSSPVIFAGGQFQIFEGGYNNTMKFQLFFWTFILLRH

SEQ ID NO: 848130 - protein, 83 aa, Homo sapiens
MCLNPDLEGPPLEAYTIQGQYAIPQPDLTKLHQLAMQQSHFPMTHGNTGFSGIESSSPEVKGYWGLDASAQTGSVERTGYPLE

SEQ ID NO: 848131 - protein, 129 aa, Homo sapiens
RSLIDVFKQICVVMLDTLSQSPPKGVTIPYRPKPSSSPVIFAGGQAYTIQGQYAIPQPDLTKLHQLAMQQSHFPMTHGNTGFSGIESSSPEVKGYWAGLDASAQTTSHELTIPNDLIGCIIGRQGAKNQ

SEQ ID NO: 848132 - protein, 178 aa, Homo sapiens; identical to SEQ ID NO: 848098

SEQ ID NO: 848133 - protein, 178 aa, Homo sapiens; identical to SEQ ID NO: 848098

SEQ ID NO: 848134 - protein, 178 aa, Homo sapiens; identical to SEQ ID NO: 848098

SEQ ID NO: 848135 - protein, 178 aa, Homo sapiens; identical to SEQ ID NO: 848098

SEQ ID NO: 848136 - protein, 178 aa, Homo sapiens; identical to SEQ ID NO: 848098

SEQ ID NO: 848137 - protein, 178 aa, Homo sapiens; identical to SEQ ID NO: 848098

SEQ ID NO: 848138 - protein, 178 aa, Homo sapiens; identical to SEQ ID NO: 848098

SEQ ID NO: 848139 - protein, 178 aa, Homo sapiens; identical to SEQ ID NO: 848098

SEQ ID NO: 848140 - protein, 178 aa, Homo sapiens; identical to SEQ ID NO: 848098

SEQ ID NO: 848141 - protein, 178 aa, Homo sapiens; identical to SEQ ID NO: 848098

SEQ ID NO: 848142 - protein, 178 aa, Homo sapiens; identical to SEQ ID NO: 848098

SEQ ID NO: 848143 - protein, 178 aa, Homo sapiens; identical to SEQ ID NO: 848098

SEQ ID NO: 848144 - protein, 178 aa, Homo sapiens; identical to SEQ ID NO: 848098

SEQ ID NO: 848145 - protein, 178 aa, Homo sapiens; identical to SEQ ID NO: 848098

SEQ ID NO: 848146 - protein, 178 aa, Homo sapiens; identical to SEQ ID NO: 848098

SEQ ID NO: 848147 - protein, 129 aa, Homo sapiens; identical to SEQ ID NO: 848127

SEQ ID NO: 848148 - protein, 129 aa, Homo sapiens; identical to SEQ ID NO: 848127

SEQ ID NO: 848149 - protein, 178 aa, Homo sapiens; identical to SEQ ID NO: 848098

SEQ ID NO: 848150 - protein, 139 aa, Homo sapiens; identical to SEQ ID NO: 848126

SEQ ID NO: 848151 - protein, 139 aa, Homo sapiens; identical to SEQ ID NO: 848126

SEQ ID NO: 848152 - protein, 115 aa, Homo sapiens; identical to SEQ ID NO: 848123

SEQ ID NO: 848153 - protein, 139 aa, Homo sapiens; identical to SEQ ID NO: 848121

SEQ ID NO: 848154 - protein, 382 aa, Homo sapiens
MNSVSPAAAQYRSSSPEDARRRPEARRPRGPRGPDPNGLGPSGASGPALGSPGAGPSEPDEVDKFKAKFLTAWNNVKYGWVVKSRTSFSKISSIHLCGRRYRFEGEGDIQRFQRDFVSRLWLTYRRDFPPLPGGCLTSDCGWGCMLRSGQMMLAQGLLLHFLPRGKPVESCSDVTRLVVYVSQDCTVYKADVARLVARPDPTAEWKSVVILVPVRLGGETLNPVYVPCVKELLRCELCLGIMGGKPRHSLYFIGYQDDFLLYLDPHYCQPTVDVSQADFPLESFHCTSPRKMAFAKMDPSCTVGFYAGDRKEFETLCSELTRVLSSSSATERYPMFTLAEGHAQDHSLDDLCSQLAQPTLRLPRTGRLLRAKRPSSEDFVFL

SEQ ID NO: 848155 - protein, 463 aa, Homo sapiens
MNSVSPAAAQYRSSSPEDARRRPEARRPRGPRGPDPNGLGPSGASGPALGSPGAGPSEPDEVDKFKAKFLTAWNNVKYGWVVKSRTSFSKISSIHLCGRRYRFEGEGDIQRFQRDFVSRLWLTYRRDFPPLPGGCLTSDCGWGCMLRSGQMMLAQGLLLHFLPRDWTWAEGMGLGPPELSGSASPSRYHGPARWMPPRWAQGAPELEQERRHRQIVSWFADHPRAPFGLHRLVELGQSSGKKAGDWKAVESCSDVTRLVVYVSQDCTVYKADVARLVARPDPTAEWKSVVILVPVRLGGETLNPVYVPCVKELLRCELCLGIMGGKPRHSLYFIGYQDDFLLYLDPHYCQPTVDVSQADFPLESFHCTSPRKMAFAKMDPSCTVGFYAGDRKEFETLCSELTRVLSSSSATERYPMFTLAEGHAQDHSLDDLCSQLAQPTLRLPRTGRLLRAKRPSSEDFVFL

SEQ ID NO: 848156 - protein, 360 aa, Homo sapiens
MNSVSPAAAQYRSSSPEDARRRPEARRPRGPRGPDPNGLGPSGASGPALGSPGAGPSEPDEVDKFKAKFLTAWNNVKYGWVVKSRTSFSKISSIHLCGRRYRFEGEGDIQRFQRDFVSRLWLTYRRDFPPLPGGCLTSDCGWGCMLRSGQMMLAQGLLLHFLPRVYKADVARLVARPDPTAEWKSVVILVPVRLGGETLNPVYVPCVKELLRCELCLGIMGGKPRHSLYFIGYQDDFLLYLDPHYCQPTVDVSQADFPLESFHCTSPRKMAFAKMDPSCTVGFYAGDRKEFETLCSELTRVLSSSSATERYPMFTLAEGHAQDHSLDDLCSQLAQPTLRLPRTGRLLRAKRPSSEDFVFL

SEQ ID NO: 848157 - protein, 446 aa, Homo sapiens
MNSVSPAAAQYRSSSPEDARRRPEARRPRGPRGPDPNGLGPSGASGPALGSPGAGPSEPDEVDKFKAKFLTAWNNVKYGWVVKSRTSFSKISSIHLCGRRYRFEGEGDIQRFQRDFVSRLWLTYRRDFPPLPGGCLTSDCGWGCMLRSGQMMLAQGLLLHFLPRDWTWAEGMGLGPPELSGSASPSRYHGPARWMPPRWAQGAPELEQERRHRQIVSWFADHPRAPFGLHRLVELGQSSGKKAGDWYGPSLVAHILRKAVESCSDVTRLVVYVSQDCTVYKADVARLVARPDPTAEWKSVVILVPVRLGGETLNPVYVPCVKELLRCELCLGIMGGKPRHSLYFIGYQDDFLLYLDPHYCQPTVDVSQADFPLESFHCSSPLSSANSGASCCLSTAFMLAPACSSTWQISTEPLSGGCMHGACVLCSACRSREYELHPAYQPQTHS

SEQ ID NO: 848158 - protein, 164 aa, Homo sapiens
MNSVSPAAAQYRSSSPEDARRRPEARRPRGPRGPDPNGLGPSGASGPALGSPTVDVSQADFPLESFHCTSPRKMAFAKMDPSCTVGFYAGDRKEFETLCSELTRVLSSSSATERYPMFTLAEGHAQDHSLDDLCSQLAQPTLRLPRTGRLLRAKRPSSEDFVFL

SEQ ID NO: 848159 - protein, 474 aa, Homo sapiens
MNSVSPAAAQYRSSSPEDARRRPEARRPRGPRGPDPNGLGPSGASGPALGSPGAGPSEPDEVDKFKAKFLTAWNNVKYGWVVKSRTSFSKISSIHLCGRRYRFEGEGDIQRFQRDFVSRLWLTYRRDFPPLPGGCLTSDCGWGCMLRSGQMMLAQGLLLHFLPRDWTWAEGMGLGPPELSGSASPSRYHGPARWMPPRWAQGAPELEQERRHRQIVSWFADHPRAPFGLHRLVELGQSSGKKAGDWYGPSLVAHILRKAVESCSDVTRLVVYVSQDCTVYKADVARLVARPDPTAEWKSVVILVPVRLGGETLNPVYVPCVKELLRCELCLGIMGGKPRHSLYFIGYQDDFLLYLDPHYCQPTVDVSQADFPLESFHCTSPRKMAFAKMDPSCTVGFYAGDRKEFETLCSELTRVLSSSSATERYPMFTLAEGHAQDHSLDDLCSQLAQPTLRLPRTGRLLRAKRPSSEDFVFL

SEQ ID NO: 848160 - protein, 499 aa, Homo sapiens
MNSVSPAAAQYRSSSPEDARRRPEARRPRGPRGPDPNGLGPSGASGPALGSPGAGPSEPDEVDKFKAKFLTAWNNVKYDGGMEALLLSCKCFISAGRCPYVSPGWVVKSRTSFSKISSIHLCGRRYRFEGEGDIQRFQRDFVSRLWLTYRRDFPPLPGGCLTSDCGWGCMLRSGQMMLAQGLLLHFLPRDWTWAEGMGLGPPELSGSASPSRYHGPARWMPPRWAQGAPELEQERRHRQIVSWFADHPRAPFGLHRLVELGQSSGKKAGDWYGPSLVAHILRKAVESCSDVTRLVVYVSQDCTVYKADVARLVARPDPTAEWKSVVILVPVRLGGETLNPVYVPCVKELLRCELCLGIMGGKPRHSLYFIGYQDDFLLYLDPHYCQPTVDVSQADFPLESFHCTSPRKMAFAKMDPSCTVGFYAGDRKEFETLCSELTRVLSSSSATERYPMFTLAEGHAQDHSLDDLCSQLAQPTLRLPRTGRLLRAKRPSSEDFVFL

SEQ ID NO: 848161 - protein, 141 aa, Homo sapiens
MGGKPRHSLYFIGYQDDFLLYLDPHYCQPTVDVSQADFPLESFHCTSPRKMAFAKMDPSCTVGFYAGDRKEFETLCSELTRVLSSSSATERYPMFTLAEGHAQDHSLDDLCSQLAQPTLRLPRTGRLLRAKRPSSEDFVFL

SEQ ID NO: 848162 - protein, 91 aa, Homo sapiens
GGPEKHLLNKPGLRNMAWHCLWLTLSPSSRQVLSSSSATERYPMFTLAEGHAQDHSLDDLCSQLAQPTLRLPRTGRLLRAKRPSSEDFVFL

SEQ ID NO: 848163 - protein, 910 aa, Homo sapiens
MRRSAAPSQLQGNSFKKPKFIPPGRSNPGLNEEITKLNPDIKLFEGVAINNTFLPSQNDLRICSLNLPSEESTREINNRDNCSGKYCFEAPTLATLDPPHTVHSAPKEVAVSKEQEEKSDSLVKYFSVVWCKPSKKKHKKWEGDAVLIVKGKSFILKNLEGKDIGRGIGYKFKELEKIEEGQTLMICGKEIEVMGVISPDDFSSGRCFQLGGGSTAISHSSQVARKCFSNPFKSVCKPSSKENRQNDFQNCKPRHDPYTPNSLVMPRPDKNHQWVFNKNCFPLVDVVIDPYLVYHLRPHQKEGIIFLYECVMGMRMNGRCGAILADEMGLGKTLQCISLIWTLQCQGPYGGKPVIKKTLIVTPGSLVNNWKKEFQKWLGSERIKIFTVDQDHKVEEFIKSIFYSVLIISYEMLLRSLDQIKNIKFDLLICDEGHRLKNSAIKTTTALISLSCEKRIILTGTPIQNDLQEFFALIDFVNPGILGSLSSYRKIYEEPIILSREPSASEEEKELGERRAAELTCLTGLFILRRTQEIINKYLPPKIENVVFCRPGALQIELYRKLLNSQVVRFCLQGLLENSPHLICIGALKKLCNHPCLLFNSIKEKECSSTCDKNEEKSLYKGLLSVFPADYNPLLFTEKESGKLQVLSKLLAVIHELRPTEKVVLVSNYTQTLNILQEVCKRHGYAYTRLDGQTPISQRQQIVDGFNSQHSSFFIFLLSSKAGGVGLNLIGGSHLILYDIDWNPATDIQAMSRVWRDGQKYPVHIYRLLTTGTIEEKIYQRQISKQGLCGAVVDLTKTSEHIQFSVEELKNLFTLHESSDCVTHDLLDCECTGEEVHTGDSLEKFIVSRDCQLGPHHQKSNSLKPLSMSQLKQWKHFSGDHLNLTDPFLERITENVSFIFQNITTQATGT

SEQ ID NO: 848164 - protein, 599 aa, Homo sapiens
MGMRMNGRCGAILADEMGLGKTLQCISLIWTLQCQGPYGGKPVIKKTLIVTPGSLVNNWKKEFQKWLGSERIKIFTVDQDHKVEEFIKSIFYSVLIISYEMLLRSLDQIKNIKFDLLICDEGHRLKNSAIKTTTALISLSCEKRIILTGTPIQNDLQEFFALIDFVNPGILGSLSSYRKIYEEPIILSREPSASEEEKELGERRAAELTCLTGLFILRRTQEIINKYLPPKIENVVFCRPGALQIELYRKLLNSQVVRFCLQGLLENSPHLICIGALKKLCNHPCLLFNSIKEKECSSTCDKNEEKSLYKGLLSVFPADYNPLLFTEKESGKLQVLSKLLAVIHELRPTEKVVLVSNYTQTLNILQEVCKRHGYAYTRLDGQTPISQRQQIVDGFNSQHSSFFIFLLSSKAGGVGLNLIGGSHLILYDIDWNPATDIQAMSRVWRDGQKYPVHIYRLLTTGTIEEKIYQRQISKQGLCGAVVDLTKTSEHIQFSVEELKNLFTLHESSDCVTHDLLDCECTGEEVHTGDSLEKFIVSRDCQLGPHHQKSNSLKPLSMSQLKQWKHFSGDHLNLTDPFLERITENVSFIFQNITTQATGT

SEQ ID NO: 848165 - protein, 925 aa, Homo sapiens
MRRSAAPSQLQGNSFKKPKFIPPGRSNPGLNEEITKLNPDIKLFEGVAINNTFLPSQNDLRICSLNLPSEESTREINNRDNCSGKYCFEAPTLATLDPPHTVQTWMRRHRLDQFTTVHSAPKEVAVSKEQEEKSDSLVKYFSVVWCKPSKKKHKKWEGDAVLIVKGKSFILKNLEGKDIGRGIGYKFKELEKIEEGQTLMICGKEIEVMGVISPDDFSSGRCFQLGGGSTAISHSSQVARKCFSNPFKSVCKPSSKENRQNDFQNCKPRHDPYTPNSLVMPRPDKNHQWVFNKNCFPLVDVVIDPYLVYHLRPHQKEGIIFLYECVMGMRMNGRCGAILADEMGLGKTLQCISLIWTLQCQGPYGGKPVIKKTLIVTPGSLVNNWKKEFQKWLGSERIKIFTVDQDHKVEEFIKSIFYSVLIISYEMLLRSLDQIKNIKFDLLICDEGHRLKNSAIKTTTALISLSCEKRIILTGTPIQNDLQEFFALIDFVNPGILGSLSSYRKIYEEPIILSREPSASEEEKELGERRAAELTCLTGLFILRRTQEIINKYLPPKIENVVFCRPGALQIELYRKLLNSQVVRFCLQGLLENSPHLICIGALKKLCNHPCLLFNSIKEKECSSTCDKNEEKSLYKGLLSVFPADYNPLLFTEKESGKLQVLSKLLAVIHELRPTEKVVLVSNYTQTLNILQEVCKRHGYAYTRLDGQTPISQRQQIVDGFNSQHSSFFIFLLSSKAGGVGLNLIGGSHLILYDIDWNPATDIQAMSRVWRDGQKYPVHIYRLLTTGTIEEKIYQRQISKQGLCGAVVDLTKTSEHIQFSVEELKNLFTLHESSDCVTHDLLDCECTGEEVHTGDSLEKFIVSRDCQLGPHHQKSNSLKPLSMSQLKQWKHFSGDHLNLTDPFLERITENVSFIFQNITTQATGT

SEQ ID NO: 848166 - protein, 205 aa, Homo sapiens
DGVVCFFLVNLFEFIVDCGVGLNLIGGSHLILYDIDWNPATDIQAMSRVWRDGQKYPVHIYRLLTTGTIEEKIYQRQISKQGLCGAVVDLTKTSEHIQFSVEELKNLFTLHESSDCVTHDLLDCECTGEEVHTGDSLEKFIVSRDCQLGPHHQKSNSLKPLSMSQLKQWKHFSGDHLNLTDPFLERITENVSFIFQNITTQATGT

SEQ ID NO: 848167 - protein, 140 aa, Homo sapiens
MPKGKKAKGKKVAPAPAVVKKQEAKKVVNPLFEKRPKNFGIGQDIQPKRDLTRFVKWPRYIRLQRQRAILYKRLKVPPAINQFTQALDRQTATQLLKLAHKYRPETKQEKKAETVGPGREEGCWQRGRPNEETTCPSSRS

SEQ ID NO: 848168 - protein, 162 aa, Homo sapiens
MDSCQPFRNFRPTGGTSAITCPPVTNVPRKDFVQSRFTESPKCPRARDPWARTLIRPQRFANRLYGRRLGILGWAGTSRVPCDSRSVPEAFMAAFRGLPPAINQFTQALDRQTATQLLKLAHKYRPETKQEKKAETVGPGREEGCWQRGRPNEETTCPSSRS

SEQ ID NO: 848169 - protein, 169 aa, Homo sapiens
TTPHHPPPPQLGSVSKPVLRGSTIRLVRAVRDAKEEAGKKVAPAPAVVKKQEAKKVVNPLFEKRPKNFGIGQDIQPKRDLTRFVKWPRYIRLQRQRAILYKRLKVPPAINQFTQALDRQTATQLLKLAHKYRPETKQEKKAETVGPGREEGCWQRGRPNEETTCPSSRS

SEQ ID NO: 848170 - protein, 115 aa, Homo sapiens
MLGTSLGVKSDEGICIGQDIQPKRDLTRFVKWPRYIRLQRQRAILYKRLKVPPAINQFTQALDRQTATQLLKLAHKYRPETKQEKKAETVGPGREEGCWQRGRPNEETTCPSSRS

SEQ ID NO: 848171 - protein, 126 aa, Homo sapiens
TNKPPNNCMMGRVYGRGPLRKCYEVWHGQDIQPKRDLTRFVKWPRYIRLQRQRAILYKRLKVPPAINQFTQALDRQTATQLLKLAHKYRPETKQEKKAETVGPGREEGCWQRGRPNEETTCPSSRS

SEQ ID NO: 848172 - protein, 107 aa, Homo sapiens
MAGSEAVVGQDIQPKRDLTRFVKWPRYIRLQRQRAILYKRLKVPPAINQFTQALDRQTATQLLKLAHKYRPETKQEKKAETVGPGREEGCWQRGRPNEETTCPSSRS

SEQ ID NO: 848173 - protein, 67 aa, Homo sapiens
AAARPAARDDRRGRLVHRRLHHVAHTGELGRQRALWLSLVERYQDQFTMTDYDEIRRHLGLANVLGS

SEQ ID NO: 848174 - protein, 140 aa, Homo sapiens; identical to SEQ ID NO: 848167

SEQ ID NO: 848175 - protein, 140 aa, Homo sapiens; identical to SEQ ID NO: 848167

SEQ ID NO: 848176 - protein, 140 aa, Homo sapiens; identical to SEQ ID NO: 848167

SEQ ID NO: 848177 - protein, 140 aa, Homo sapiens; identical to SEQ ID NO: 848167

SEQ ID NO: 848178 - protein, 140 aa, Homo sapiens; identical to SEQ ID NO: 848167

SEQ ID NO: 848179 - protein, 113 aa, Homo sapiens
MEFEPHSVSPFTSQGQDIQPKRDLTRFVKWPRYIRLQRQRAILYKRLKVPPAINQFTQALDRQTATQLLKLAHKYRPETKQEKKAETVGPGREEGCWQRGRPNEETTCPSSRS

SEQ ID NO: 848180 - protein, 140 aa, Homo sapiens; identical to SEQ ID NO: 848167

SEQ ID NO: 848181 - protein, 140 aa, Homo sapiens; identical to SEQ ID NO: 848167

SEQ ID NO: 848182 - protein, 140 aa, Homo sapiens; identical to SEQ ID NO: 848167

SEQ ID NO: 848183 - protein, 140 aa, Homo sapiens; identical to SEQ ID NO: 848167

SEQ ID NO: 848184 - protein, 140 aa, Homo sapiens; identical to SEQ ID NO: 848167

SEQ ID NO: 848185 - protein, 74 aa, Homo sapiens
FAAASTLLPPPKMPKGKKAKGKKVAPAPAVVKKQEAKKVVNPLFEKRPKNFGIGQDIQPKRDLTRFVKWPRYIR

SEQ ID NO: 848186 - protein, 140 aa, Homo sapiens; identical to SEQ ID NO: 848167

SEQ ID NO: 848187 - protein, 140 aa, Homo sapiens; identical to SEQ ID NO: 848167

SEQ ID NO: 848188 - protein, 287 aa, Homo sapiens
MPKGKKAKGKKVAPAPAVVKKQEAKKVVNPLFDEQWSYMNFLCIGIREQPDPNRDPHPSFVKLAPSIVRLQSADETIRLYSWREIVPSWRFRAMFTQGPVVTDERQRSSGWLERLGSTEVTMTQGDHKREEQAQRAALVGARGARYMKGWVGQRGTCPQTERSTYLGPFDAGRLPPVTYRCVDEAEEKAQIVVSELHTTMDSQIELVVFLPALCRKMGVPYCIIKGTGKTGTSSPQEDLHHCRLHTGELGRQRALWLSWVERYQDQFTMTDYDEIRRHLGLANVLGS

SEQ ID NO: 848189 - protein, 66 aa, Homo sapiens
MPKGKKAKGKKVAPAPAVVKKQEAKKVVNPLFEKRPKNFGIAKAYPPQKRTLLPFVGNEAPLIKSS

SEQ ID NO: 848190 - protein, 140 aa, Homo sapiens; identical to SEQ ID NO: 848167

SEQ ID NO: 848191 - protein, 202 aa, Homo sapiens
LDALEEEKGTGENVAPAPDCLDETREAISSGLISLILDDTDGPTEFWHWTGHPEATTEDLTALLWKVGPPTIFMGCHVSGRRRPPLLGWVEKCLLGFRSGQPYVPVVHPTIASYLDACCKGWTRANDTRTRGDRQSVEQRLLARAEKKAAGKGDVPTKRPPVLRAGVNTVTTLVENKKAQLDGDCTRRGSHRAGCLLACPVS

SEQ ID NO: 848192 - protein, 149 aa, Homo sapiens
VFPVTPLCFPDADVVYFPVTELWFWQLRKKQEAKKVVNPLFEKRPKNFGIGQDIQPKRDLTRFVKWPRYIRLQRQRAILYKRLKVPPAINQFTQALDRQTATQLLKLAHKYRPETKQEKKAETVGPGREEGCWQRGRPNEETTCPSSRS

SEQ ID NO: 848193 - protein, 140 aa, Homo sapiens; identical to SEQ ID NO: 848167

SEQ ID NO: 848194 - protein, 140 aa, Homo sapiens; identical to SEQ ID NO: 848167

SEQ ID NO: 848195 - protein, 140 aa, Homo sapiens; identical to SEQ ID NO: 848167

SEQ ID NO: 848196 - protein, 140 aa, Homo sapiens; identical to SEQ ID NO: 848167

SEQ ID NO: 848197 - protein, 140 aa, Homo sapiens; identical to SEQ ID NO: 848167

SEQ ID NO: 848198 - protein, 140 aa, Homo sapiens; identical to SEQ ID NO: 848167

SEQ ID NO: 848199 - protein, 140 aa, Homo sapiens; identical to SEQ ID NO: 848167

SEQ ID NO: 848200 - protein, 140 aa, Homo sapiens; identical to SEQ ID NO: 848167

SEQ ID NO: 848201 - protein, 140 aa, Homo sapiens; identical to SEQ ID NO: 848167

SEQ ID NO: 848202 - protein, 139 aa, Homo sapiens
MPKGKKAKGKKVAPAPAVVKKQEAKKVVNPLFEKRPKNFGIGQDIQPKRDLTRFVKWPRYIRLQRQRAILYKRLKVPPAINQFTQALDRQTATQLLKLAHKYRPETKQEKKAETVGPGREEGCWQRGRPNEETTCPSSR

SEQ ID NO: 848203 - protein, 190 aa, Homo sapiens
MPKGKKAKGKKVAPAPAVVKKQEAKKVVNPLFEKRPKNFGIGQDIQPKRDLTRFVKWPRYIRLQRQRAILYKRLKVPPAINQFTQALDRQTATQLLKLAHKYRPETKQEKKAETVGPGREEGCWQRGRPNEETTCPSSSWLSSCLPCVVKWGSLTALSREQARLGRLVHRKTCTTVAFTQVNSEDKGRFG

SEQ ID NO: 848204 - protein, 139 aa, Homo sapiens; identical to SEQ ID NO: 848202

SEQ ID NO: 848205 - protein, 118 aa, Homo sapiens
MPKGKKAKGKKVAPAPAVVKKQEAKKVVNPLFEKRPKNFGIGQDIQPKRDLTRFVKWPRYIRLQRQRAILYKRLKVPPAINQFTQALDRQTATQLLKLAHKYRPETKQEKKEDKGRFG

SEQ ID NO: 848206 - protein, 151 aa, Homo sapiens
RPNRVCLHCYAFLTGNVLPEAKEDKRRGILEKGSSATPDQSLMCSFLQLIGDKWGKSGPRGWCVIPRDDPLVLYVYAAPQDMRAHTSIPLLGYQVTVGPQGDPRVFQLQQSGQLYTFKAETEELKGRWVKAMERAASGWSPSWPNDGDLSD

SEQ ID NO: 848207 - protein, 106 aa, Homo sapiens
RIPRYELLLKEYIKKLPAQAPDQADAQKALDMIFSAAQHSNAAITEMERLQDLWEVYQRLGLEDDIVDPSNTLLREGPVLKISFRRNDPMERYLFLVSLSLLKIQN

SEQ ID NO: 848208 - protein, 133 aa, Homo sapiens
RIPRYELLLKEYIKKLPAQAPDQADAQKALDMIFSAAQHSNAAITEMERLQDLWEVYQRLGLEDDIVDPSNTLLREGPVLKISFRRNDPMERYLFLVSFKAETEELKGRWVKAMERAASGWSPSWPNDGDLSD

SEQ ID NO: 848209 - protein, 244 aa, Homo sapiens
MVIMSEFSADPAGQGQGQQKPLRVGFYDIERTLGKGNFAVVKLARHRVTKTQVAIKIIDKTRLDSSNLEKIYREVQLMKLLNHPHIIKLCYGKKDMLYIVTEFAKNGEMFDYLTSNGHLSENEARKKFWQILSAVEYCHDHHIVHRDLKTENLLLDGNMDIKLAVGNFYKSGEPLSTWCGSPPYAAPEVFEGKEYEGPQLDIWSLGVVLYVLVCGSLPFDGPNLPTLRQRVLEGRFRIPFFMSQ

SEQ ID NO: 848210 - protein, 469 aa, Homo sapiens
MLESIRVTEKLHWPEQELAKKSILNAEDSLIIDNKRSISHLSSGVLKDIFTTGTSSYNVLLQSKEEKKYHSQKQSSSTYSKRCRKPSKSPNTSRSKDPRRMKALVPVTSSGTWYCLERRPAVFVTSSVSSPVKFTHDISVTGNGIVLPPKPKSKVKWCHFSTLPKPKPQLSRSFEKGDDFSGKKFCILTAIKPTNLEKEKLRFFKSDYTYNPQFEYANPALPSVLAKHSHASDRFLKQIVVHLTEDLLSRASMTVVNGCPTLTINVSTAREHWLEGMLRHEIGTHYFRGINNLQQPWNSWTGRKKHELKPNNPTEEGLASIHSVLFRKDPFLWRAALLYYTVYQASQMSFCELFKDIGRFVKDPNTRWDYCVRAKRGWTDTSQPGCFSKDQVYLDGILQILRYRDTIDFHLLTALGKVSYEDVDRLKGLAVTENMRVPHFLQDHGRYMEHLEKIMEVNELTDRELKDLI

SEQ ID NO: 848211 - protein, 113 aa, Homo sapiens
MVATGWARRSGLHPAPRPLRGAQEALAKNLWREERNRPLILSSLIISKYLLWNLVEKIVILDRLLVLQRYNPKIVKSYFKTPKRKNTSGYFIIYTVYICVWMLLFLNSENVLS

SEQ ID NO: 848212 - protein, 526 aa, Homo sapiens
GLERWVMAGCTRKLTHLRKRIHRPRRRTTRRWKRWFKFRKRKGEKRPRPNHKAVARRAKLKFSTSEKLHWPEQELAKKSILNAEDSLIIDNKRSISHLSSGVLKDIFTTGTSSYNVLLQSKEEKKYHSQKQSSSTYSKRCRKPSKSPNTSRSKDPRRMKALVPVTSSGTWYCLERRPAVFVTSSVSSPVKFTHDISVTGNGIVLPPKPKSKVKWCHFSTLPKPKPQLSRSFEKGDDFSGKKFCILTAIKPTNLEKEKLRFFKSDYTYNPQFEYANPALPSVLAKHSHASDRFLKQIVVHLTEDLLSRASMTVVNGCPTLTINVSTAREHWLEGMLRHEIGTHYFRGINNLQQPWNSWTGRKKHELKPNNPTEEGLASIHSVLFRKDPFLWRAALLYYTVYQASQMSFCELFKDIGRFVKDPNTRWDYCVRAKRGWTDTSQPGCFSKDQVYLDGILQILRYRDTIDFHLLTALGKVSYEDVDRLKGLAVTENMRVPHFLQDHGRYMEHLEKIMEVNELTDRELKDLI

SEQ ID NO: 848213 - protein, 497 aa, Homo sapiens
GYVTVAGSKRCWAPYRPPCVPSSSYGLVEALLTVSVEKLHWPEQELAKKSILNAEDSLIIDNKRSISHLSSGVLKDIFTTGTSSYNVLLQSKEEKKYHSQKQSSSTYSKRCRKPSKSPNTSRSKDPRRMKALVPVTSSGTWYCLERRPAVFVTSSVSSPVKFTHDISVTGNGIVLPPKPKSKVKWCHFSTLPKPKPQLSRSFEKGDDFSGKKFCILTAIKPTNLEKEKLRFFKSDYTYNPQFEYANPALPSVLAKHSHASDRFLKQIVVHLTEDLLSRASMTVVNGCPTLTINVSTAREHWLEGMLRHEIGTHYFRGINNLQQPWNSWTGRKKHELKPNNPTEEGLASIHSVLFRKDPFLWRAALLYYTVYQASQMSFCELFKDIGRFVKDPNTRWDYCVRAKRGWTDTSQPGCFSKDQVYLDGILQILRYRDTIDFHLLTALGKVSYEDVDRLKGLAVTENMRVPHFLQDHGRYMEHLEKIMEVNELTDRELKDLI

SEQ ID NO: 848214 - protein, 507 aa, Homo sapiens
MVATGWARRSGLHPAPRPLRGAQEALAKNLWREERNRPLILSSLIIKKLHWPEQELAKKSILNAEDSLIIDNKRSISHLSSGVLKDIFTTGTSSYNVLLQSKEEKKYHSQKQSSSTYSKRCRKPSKSPNTSRSKDPRRMKALVPVTSSGTWYCLERRPAVFVTSSVSSPVKFTHDISVTGNGIVLPPKPKSKVKWCHFSTLPKPKPQLSRSFEKGDDFSGKKFCILTAIKPTNLEKEKLRFFKSDYTYNPQFEYANPALPSVLAKHSHASDRFLKQIVVHLTEDLLSRASMTVVNGCPTLTINVSTAREHWLEGMLRHEIGTHYFRGINNLQQPWNSWTGRKKHELKPNNPTEEGLASIHSVLFRKDPFLWRAALLYYTVYQASQMSFCELFKDIGRFVKDPNTRWDYCVRAKRGWTDTSQPGCFSKDQVYLDGILQILRYRDTIDFHLLTALGKVSYEDVDRLKGLAVTENMRVPHFLQDHGRYMEHLEKIMEVNELTDRELKDLI

SEQ ID NO: 848215 - protein, 507 aa, Homo sapiens; identical to SEQ ID NO: 848214

SEQ ID NO: 848216 - protein, 507 aa, Homo sapiens; identical to SEQ ID NO: 848214

SEQ ID NO: 848217 - protein, 1665 aa, Homo sapiens
KLLVGSRRLVDVMDVNTQKGTEMSMSQFVRYYETPEAQRDKLYNVISLEFSHTKLEHLVKRPTVVDLVDWVDNMWPQHLKEKQTEATNAIAEMKYPKVKKYCLMSVKGCFTDFHIDFGGTSVWYHVFRGGKIFWLIPPTLHNLALYEEWVLSGKQSDIFLGDRVERCQRIELKQGYTFFIPSGWIHAVYTPVDSLVFGGNILHSFNVPMQLRIYEIEDRTRVQPKFRYPFYYEMCWYVLERYVYCVTQRSHLTQEYQRESMLIDAPRKPSIDGFSSDSWLEMEEEACDQQPQEEEEKDEEGEGRDRAPKPPTDGSTSPTSTPSEDQEALGKKPKAPALRFLKRTLSNESEESVKSTTLAVDYPKTPTGSPATEVSAKWTHLTEFELKGLKALVEKLESLPENKKCVPEGIEDPQALLEGVKNVLKEHADDDPSLAITGVPVVTWPKKTPKNRAVGRPKGKLGPASAVKLAANRTTAGARRRRTRCRKCEACLRTECGECHFCKDMKKFGGPGRMKQSCIMRQCIAPVLPHTAVCLVCGEAGKEDTVEEEEGKFNLMLMECSICNEIIHPGCLKVSGPVGTGGADALGQVGLLEMLVRWWDAGRAVNSWRTPESGDPVCQGISPGQGGPGVPQRPSVIKGINTPPPPRMSEPERVSRASADGKHRLLVCSWARGSASRWLQASGRTRPHTTLLPPAPSESPLQSPFCMPGAELMALPGSYPPSEMGTLTFMAEGTSPQRRSVLPRVPEKQRGSASEPWPGSTAARLCQPLQLCFLLPGNGIDVTLGRGCCCFWKTWRHRALCPWAIFSARPSSESWCSPQIKESEGVVNDELPNCWECPKCNHAGKTGKQKRGPGFKYASNLPGSLLKEQKMNRDNKEGQEPAKRRSECEEAPRRRSDEHSKKVPPDGLLRRKSDDVHLRKKRKYEKPQELSGRKRASSLQTSPGSSSHLSPRPPLGSSLSPWWRSSLTYFQQQVLPRRSPPEAPGTGESWAVPHPTPLVLHPTAASPEASQVSAPDLWLVVLAWGLGSCLCLEPLLVGMEAVIQGTSEEPGGPAPPTGRAVTSHKVAPGVSPSSSHSCWAGDSHRAVLQNWLPEPRMIGMGGCTSPGLWGGRSVGWEQFNCTPTSSFFLESCRQGSPVCRSDVEMAFVGKASLQPLLWRLWTRGGVGCRGDQIPRARGASSASFLFRDSSNLAKKISFSGKRYHLPLPPVPQAERLELHRSSLGHSPVAGGREALGGRSPEPQRLTRLRSRPQRRSWKNAEDRMALANKPLRRFKQEPEDELPEAPPKTRESDHSRSSSPTAGPSTEGAEGPEEKKKVKMRRKRRLPNKELSRELSKELNHEIQRTENSLANENQQPIKSEPESEGEEPKRPPGICERPHRFSKGLNGTPRELRHQLGPSLRSPPRVISRPPPSVSPPKCIQMERHVIRPPPISPPPDSLPLDDGAAHVMHREVWMAVFSYLSHQDLCVCMRVCRTWNRWCCDKRLWTRIDLNHCKSITPLMLSGIIRRQPVSLDLSWTNISKKQLSWLINRLPGLRDLVLSGCSWIAVSALCSSSCPLLRTLDVQWVEGLKDAQMRDLLSPPTDNRPGELPGWGFLWGWGERARLLDLLLPSDPSCSPKDIGMSLCCHVLSLLQAQRGSGRRQGLLCTRETRSWGSACVSLLSC

SEQ ID NO: 848218 - protein, 776 aa, Homo sapiens
MAMSVSAEDDDYESEPDQNRAVGRPKGKLGPASAVKLAANRTTAGARRRRTRCRKCEACLRTECGECHFCKDMKKFGGPGRMKQSCIMRQCIAPVLPHTAVCLVCGEAGKEDTVEEEEGKFNLMLMECSICNEIIHPGCLKIKESEGVVNDELPNCWECPKCNHAGKTGKQKRGPGFKYASNLPGSLLKEQKMNRDNKEGQEPAKRRSECEEAPRRRSDEHSKKVPPDGLLRRKSDDVHLRKKRKYEKPQELSGRKRASSLQTSPGSSSHLSPRPPLGSSLSPWWRSSLTYFQQQLKPGKEDKLFRKKRRSWKNAEDRMALANKPLRRFKQEPEDELPEAPPKTRESDHSRSSSPTAGPSTEGAEGPEEKKKVKMRRKRRLPNKELSRELSKELNHEIQRTENSLANENQQPIKSEPESEGEEPKRPPGICERPHRFSKGLNGTPRELRHQLGPSLRSPPRVISRPPPSVSPPKCIQMERHVIRPPPISPPPDSLPLDDGAAHVMHREVWMAVFSYLSHQDLCVCMRVCRTWNRWCCDKRLWTRIDLNHCKSITPLMLSGIIRRQPVSLDLSWTNISKKQLSWLINRLPGLRDLVLSGCSWIAVSALCSSSCPLLRTLDVQWVEGLKDAQMRDLLSPPTDNRPGQMDNRSKLRNIVELRLAGLDITDASLRLIIRHMPLLSKLHLSYCNHVTDQSINLLTAVGTTTRDSLTEINLSDCNKVTDQCLSFFKRCGNICHIDLRYCKQVTKEGCEQFIAEMSVSVQFGQVEEKLLQKLS

SEQ ID NO: 848219 - protein, 1208 aa, Homo sapiens
KLLVGSRRLVDVMDVNTQKGTEMSMSQFVRYYETPEAQRDKLYNVISLEFSHTKLEHLVKRPTVVDLVDWVDNMWPQHLKEKQTEATNAIAEMKYPKVKKYCLMSVKGCFTDFHIDFGGTSVWYHVFRGGKIFWLIPPTLHNLALYEEWVLSGKQSDIFLGDRVERCQRIELKQGYTFFIPSGWIHAVYTPVDSLVFGGNILHSFNVPMQLRIYEIEDRTRVQPKFRYPFYYEMCWYVLERYVYCVTQRSHLTQEYQRESMLIDAPRKPSIDGFSSDSWLEMEEEACDQQPQEEEEKDEEGEGRDRAPKPPTDGSTSPTSTPSEDQEALGKKPKAPALRFLKRTLSNESEESVKSTTLAVDYPKTPTGSPATEVSAKWTHLTEFELKGLKALVEKLESLPENKKCVPEGIEDPQALLEGVKNVLKEHADDDPSLAITGVPVVTWPKKTPKNRAVGRPKGKLGPASAVKLAANRTTAGARRRRTRCRKCEACLRTECGECHFCKDMKKFGGPGRMKQSCIMRQCIAPVLPHTAVCLVCGEAGKEDTVEEEEGKFNLMLMECSICNEIIHPGCLKIKESEGVVNDELPNCWECPKCNHAGKTGKQKRGPGFKYASNLPGSLLKEQKMNRDNKEGQEPAKRRSECEEAPRRRSDEHSKKVPPDGLLRRKSDDVHLRKKRKYEKPQELSGRKRASSLQTSPGSSSHLSPRPPLGSSLSPWWRSSLTYFQQQLKPGKEDKLFRKKRRSWKNAEDRMALANKPLRRFKQEPEDELPEAPPKTRESDHSRSSSPTAGPSTEGAEGPEEKKKVKMRRKRRLPNKELSRELSKELNHEIQRTENSLANENQQPIKSEPESEGEEPKRPPGICERPHRFSKGLNGTPRELRHQLGPSLRSPPRVISRPPPSVSPPKCIQMERHVIRPPPISPPPDSLPLDDGAAHVMHREVWMAVFSYLSHQDLCVCMRVCRTWNRWCCDKRLWTRIDLNHCKSITPLMLSGIIRRQPVSLDLSWTNISKKQLSWLINRLPGLRDLVLSGCSWIAVSALCSSSCPLLRTLDVQWVEGLKDAQMRDLLSPPTDNRPGQMDNRSKLRNIVELRLAGLDITDASLRLIIRHMPLLSKLHLSYCNHVTDQSINLLTAVGTTTRDSLTEINLSDCNKVTDQCLSFFKRCGNICHIDLRYCKQVTKEGCEQFIAEMSVSVQFGQVEEKLLQKLS

SEQ ID NO: 848220 - protein, 403 aa, Homo sapiens
KLLVGSRRLVDVMDVNTQKGTEMSMSQFVRYYETPEAQRDKLYNVISLEFSHTKLEHLVKRPTVVDLVDWVDNMWPQHLKEKQTEATNAIAEMKYPKVKKYCLMSVKGCFTDFHIDFGGTSVWYHVFRGGKIFWLIPPTLHNLALYEEWVLSGKQSDIFLGDRVERCQRIELKQGYTFFIPSGWIHAVYTPVDSLVFGGNILHSFNVPMQLRIYEIEDRTRVQPKFRYPFYYEMCWYVLERYVYCVTQRSHLTQEYQRESMLIDAPRKPSIDGFSSDSWLEMEEEACDQQPQEEEEKDEEGEGRDRAPKPPTDGSTSPTSTPSEDQEALGKKPKAPALRFLKRTLSNESEESVKSTTLAVDYPKTPTGSPATEVSAKWTHTAIRSLISACPSSNAVETSVILT

SEQ ID NO: 848221 - protein, 767 aa, Homo sapiens
MAMSVSAEDDDYESEPDQNRAVGRPKGKLGPASAVKLAANRTTAGARRRRTRCRKCEACLRTECGECHFCKDMKKFGGPGRMKQSCIMRQCIAPVLPHTAVCLVCGEAGKEDTVEEEEGKFNLMLMECSICNEIIHPGCLKIKESEGVVNDELPNCWECPKCNHAGKTGKQKRGPGFKYASNLPGSLLKEQKMNRDNKEGQEPAKRRSECEEAPRRRSDEHSKKVPPDGLLRRKSDDVHLRKKRKYEKPQELSGRKRASSLQTSPGSSSHLSPRPPLGSSLSPWWRSSLTYFQQQLKPGKEDKLFRKKRRSWKNAEDRMALANKPLRRFKQEPEDELPEAPPKTRESDHSRSSSPTAGPSTEGAEGPEEKKKVKMRRKRRLPNKELSRELSKELNHEIQRTENSLANENQQPIKSEPESEGEEPKRPPGICERPHRFSKGLNGTPRELRHQLGPSLRSPPRVISRPPPSVSPPKCIQMERHVIRPPPISPPPDSLPLDDGAAHVMHREVWMAVFSYLSHQDLCVCMRVCRTWNRWCCDKRLWTRIDLNHCKSITPLMLSGIIRRQPVSLDLSWTNISKKQLSWLINRLPGLRDLVLSGCSWIAVSALCSSSCPLLRTLDVQWVEGLKDAQMRDLLSPPTDNRPGQMDNRSKLRNIVELRLAGLDITDASLRLIIRHMPLLSKLHLSYCNHVTDQSINLLTAVGTTTRDSLTEINLSDCNKVTDQCLSFFKRCGNICHIDLRYCKQVTKEGCEQFIAEMSVRGDQRES

SEQ ID NO: 848222 - protein, 1208 aa, Homo sapiens; identical to SEQ ID NO: 848219

SEQ ID NO: 848223 - protein, 1175 aa, Homo sapiens
KLLVGSRRLVDVMDVNTQKGTEMSMSQFVRYYETPEAQRDKLYNVISLEFSHTKLEHLVKRPTVVDLVDWVDNMWPQHLKEKQTEATNAIAEMKYPKVKKYCLMSVKGCFTDFHIDFGGTSVWYHVFRGGKIFWLIPPTLHNLALYEEWVLSGKQSDIFLGDRVERCQRIELKQGYTFFIPSGWIHAVYTPVDSLVFGGNILHSFNVPMQLRIYEIEDRTRVQPKFRYPFYYEMCWYVLERYVYCVTQRSHLTQEYQRESMLIDAPRKPSIDGFSSDSWLEMEEEACDQQPQEEEEKDEEGEGRDRAPKPPTDGSTSPTSTPSEDQEALGKKPKAPALRFLKRTLSNESEESVKSTTLAVDYPKTPTGSPATEVSAKWTHLTEFELKGLKALVEKLESLPENKKCVPEGIEDPQALLEGVKNVLKEHADDDPSLAITGVPVVTWPKKTPKNRAVGRPKGKLGPASAVKLAANRTTAGARRRRTRCRKCEACLRTECGECHFCKDMKKFGGPGRMKQSCIMRQCIAPVLPHTAVCLVCGEAGKEDTVEEEEGKFNLMLMECSICNEIIHPGCLKIKESEGVVNDELPNCWECPKCNHAGKTGKQKRGPGFKYASNLPGSLLKEQKMNRDNKEGQEPAKRRSECEEAPRRRSDEHSKKVPPDGLLRRKSDDVHLRKKRKYEKPQELSGRKRASSLQTSPGSSSHLSPRPPLGSSLSPWWRSSLTYFQQQLKPGKEDKLFRKKRRSWKNAEDRMALANKPLRRFKQEPEDELPEAPPKTRESDHSRSSSPTAGPSTEGAEGPEEKKKVKMRRKRRLPNKELSRELSKELNHEIQRTENSLANENQQPIKSEPESEGEEPKRPPGICERPHRFSKGLNGTPRELRHQLGPSLRSPPRVISRPPPSVSPPKCIQMERHVIRPPPISPPPDSLPLDDGAAHVMHREVWMAVFSYLSHQDLCVCMRVCRTWNRWCCDKRLWTRIDLNHCKSITPLMLSGIIRRQPVSLDLSWTNISKKQLSWLINRLPGLRDLVLSGCSWIAVSALCSSSCPLLRTLDVQWVEGLKDAQMRDLLSPPTDNRPGQMDNRSKLRNIVELRLAGLDITDASLRLIIRHMPLLSKLHLSYCNHVTDQSINLLTAVGTTTRDSLTEINLSASLLGRVFGLQFWGICEPQARKNAGWA

SEQ ID NO: 848224 - protein, 774 aa, Homo sapiens
MAMSVSAEDDDYESEPDQNRAVGRPKGKLGPASAVKLAANRTTAGARRRRTRCRKCEACLRTECGECHFCKDMKKFGGPGRMKQSCIMRQCIAPVLPHTAVCLVCGEAGKEDTVEEEEGKFNLMLMECSICNEIIHPGCLKIKESEGVVNDELPNCWECPKCNHAGKTGKQKRGPGFKYASNLPGSLLKEQKMNRDNKEGQEPAKRRSECEEAPRRRSDEHSKKVPPDGLLRRKSDDVHLRKKRKYEKPQELSGRKRASSLQTSPGSSSHLSPRPPLGSSLSPWWRSSLTYFQQQLKPGKEDKLFRKKRRSWKNAEDRMALANKPLRRFKQEPEDELPEAPPKTRESDHSRSSSPTAGPSTEGAEGPEEKKKVKMRRKRRLPNKELSRELSKELNHEIQRTENSLANENQQPIKSEPESEGEEPKRPPGICERPHRFSKGLNGTPRELRHQLGPSLRSPPRVISRPPPSVSPPKCIQMERHVIRPPPISPPPDSLPLDDGAAHVMHREVWMAVFSYLSHQDLCVCMRVCRTWNRWCCDKRLWTRIDLNHCKSITPLMLSGIIRRQPVSLDLSWTNISKKQLSWLINRLPGLRDLVLSGCSWIAVSALCSSSCPLLRTLDVQWVEGLKDAQMRDLLSPPTDNRPGQMDNRSKLRNIVELRLAGLDITDASLRLIIRHMPLLSKLHLSYCNHVTDQSINLLTAVGTTTRDSLTEINLSDCNKVTDQCLSFFKRCGNICHIDLRYCKQVTKEGCEQFIAEMSSFQGRSCSTTRLGDE

SEQ ID NO: 848225 - protein, 351 aa, Homo sapiens
MPGSAAKGSELSERIESFVETLKRGGGPRSSEEMARETLGLLRQIITDHRWSNAGELMELIRREGRRMTAAQPSETTVGNMVRRVLKIIREEYGRLHGRSDESDQQESLHKLLTSGGLNEDFSFHYAQLQSNIIEAINELLVELEGTMENIAAQALEHIHSNEVIMTIGFSRTVEAFLKEAARKRKFHVIVAECAPFCQGHEMAVNLSKAGIETTVMTDAAIFAVMSRVNKVIIGTKTILANGALRAVTGTHTLALAAKHHSTPLIVCAPMFKLSPQFPNEEDSFHKFVAPEEVLPFTEGDILEKVSVHCPVFDYVPPELITLFISNIGGNAPSYIYRLMSELYHPDDHVL

SEQ ID NO: 848226 - protein, 365 aa, Homo sapiens
MPGSAAKGSELSERIESFVETLKRGGGPRSSEEMARETLGLLRQIITDHRWSNAGELMELIRREGRRMTAAQPSETTVGNMVRRVLKIIREEYGRLHGRSDESDQQESLHKLLTSGGLNEDFSFHYAQLQSNIIEAINELLVELEGTMENIAAQALEHIHSNEVIMTIGFSRTVEAFLKEAARKRKFHVIVAECAPFCQGHEMAVNLSKAGIETTVMTDAAIFAVMSRVNKVIIGTKTILANGALRAVTGTHTLALAAKHHSTPLIVCAPMFKLSPQFPNEMSLLHWGTVEFPNEEDSFHKFVAPEEVLPFTEGDILEKVSVHCPVFDYVPPELITLFISNIGGNAPSYIYRLMSELYHPDDHVL

SEQ ID NO: 848227 - protein, 283 aa, Homo sapiens
MPGSAAKGSELSERIESFVETLKRGGGPRSSEEMARETLGLLRQIITDHRWSNAGELMELIRREGRRMTAAQPSETTVGNMVRRVLKIIREEYGRLHGRSDESDQQESLHKLLTSGGLNEDFSFHYAQLQSNIIEAINELLVELEGTMENIAAQALEHIHSNEVIMTIGFSRTVEAFLKEAARKRKFHVIVAECAPFCQGHEMAVNLSKAGIETTVMTDAAIFAVMSRVNKVIIGTKTILANGALRAVTGTHTLALAAKHHSTPLIVCAPMFKLSPQGLSFVT

SEQ ID NO: 848228 - protein, 241 aa, Homo sapiens
MPGSAAKGSELSERIESFVETLKRGGGPRSSEEMARETLGLLRQIITDHRWSNAGELMELIRREGRRMTAAQPSETTVGNMVRRVLKIIREEYGRLHGRSDESDQQESLHKLLTSGGLNEDFSFHYAQLQSNIIEAINELLVELEGTMENIAAQALEHIHSNEVIMTIGFSRTVEAFLKEAARKRKFHVIVAECAPFCQGHEMAVNLSKAGIETTVMTDAAIFAVMSRVNKVGISGVMLNS

SEQ ID NO: 848229 - protein, 220 aa, Homo sapiens
MPGSAAKGSELSERIESFVETLKRGGGPRSSEEMARETLGLLRQIITDHRWSNAGELMELIRREGRRMTAAQPSETTVGNMVRRVLKIIREEYGRLHGRSDESDQQESLHKLLTSGGLNEDFSFHYAQLQSNIIEAINELLVELEGTMENIAAQALEHIHSNEVIMTIGFSRTVEAFLKEAARKRKFHVIVAECAPFCQLENSPVAWIVSCLGVLFSGFF

SEQ ID NO: 848230 - protein, 299 aa, Homo sapiens
MPGSAAKGSELSERIESFVETLKRGGGPRSSEEMARETLGLLRQIITDHRWSNAGELMELIRREGRRMTAAQPSETTVGNMVRRVLKIIREEYGRLHGRSDESDQQESLHKLLTSGGLNEDFSFHYAQLQSNIIEAINELLVELEGTMENIAAQALEHIHSNEVIMTIGFSRTVEAFLKEAARKRKFHVIVAECAPFCQGHEMAVNLSKAGIETTVMTDAAIFAVMSRVNKVIIGTKTILANGALRAVTGTHTLALAAKHHSTQHVGPFQLPQAMKTSSGLKSPQGFEGSLRTEILSRG

SEQ ID NO: 848231 - protein, 318 aa, Homo sapiens
MARETLGLLRQIITDHRWSNAGELMELIRREGRRMTAAQPSETTVGNMVRRVLKIIREEYGRLHGRSDESDQQESLHKLLTSGGLNEDFSFHYAQLQSNIIEAINELLVELEGTMENIAAQALEHIHSNEVIMTIGFSRTVEAFLKEAARKRKFHVIVAECAPFCQGHEMAVNLSKAGIETTVMTDAAIFAVMSRVNKVIIGTKTILANGALRAVTGTHTLALAAKHHSTPLIVCAPMFKLSPQFPNEEDSFHKFVAPEEVLPFTEGDILEKVSVHCPVFDYVPPELITLFISNIGGNAPSYIYRLMSELYHPDDHVL

SEQ ID NO: 848232 - protein, 206 aa, Homo sapiens
MPGSAAKGSELSERIESFVETLKRGGGPRSSEEMARETLGLLRQIITDHRWSNAGELMELIRREGRRMTAAQPSETTVGNMVRRVLKIIREEYGRLHGRSDESDQQESLHKLLTSGGLNEDFSFHYAQLQSNIIEAINELLVELEGTMENIAAQALEHIHSNEVIMTIGFSRTVEAFLKEAARKRKFHVIVAECAPFCQQVLRQLS

SEQ ID NO: 848233 - protein, 199 aa, Homo sapiens
MPGSAAKGSELSERIESFVETLKRGGGPRSSEEMARETLGLLRQIITDHRWSNAGELMELIRREGRRMTAAQPSETTVGNMVRRVLKIIREEYGRLHGRSDESDQQESLHKLLTSGGLNEDFSFHYAQLQSNIIEAINELLVELEGTMENIAAQALEHIHSNEVIMTIGFSRTVEAFLKEAARKRKFHVIVAECAPFCQ

SEQ ID NO: 848234 - protein, 204 aa, Homo sapiens
MPGSAAKGSELSERIESFVETLKRGGGPRSSEEMARETLGLLRQIITDHRWSNAGEAGLPPPANLAPVCSRSQAENFPGLTSRWLLLSSLFWTVGELMELIRREGRRMTAAQPSETTVGNMVRRVLKIIREEYGRSGSRPGLLVGSSDTFCTGPSTCSETLLELNSPCYLPDHSSPPLSLGLVASIDSMDAATRVISRSPCTNC

SEQ ID NO: 848235 - protein, 94 aa, Homo sapiens
KLAAAATVMAFPPGALHPLPKRQALEKSNGTSAVFNPSVLHYQQALTSAQLQQHAAFIPTGMCPYCPTSCALLVMCFLLISLSCLVASSLLLKV

SEQ ID NO: 848236 - protein, 255 aa, Homo sapiens
MALNVAPVRDTKWLTLEVCRQFQRGTCSRSDEECKFAHPPKSCQVENGRVIACFDSLKGRCSRENCKYLHPPTHLKTQLEINGRNNLIQQKTAAAMLAQQMQFMFPGTPLHPVPTFPVGPAIGTNTAISFAPYLAPVTPGVGLVPTEILPTTPVIVPGSPPVTVPGSTATQKLLRTDKLEVCREFQRGNCARGETDCRFAHPADSTMIDTSDNTVTVCMDYIKGRCMREKCKYFHPPAHLQAKIKAAQPRPRPQS

SEQ ID NO: 848237 - protein, 355 aa, Homo sapiens
MALNVAPVRDTKWLTLEVCRQFQRGTCSRSDEECKFAHPPKSCQVENGRVIACFDSLKGRCSRENCKYLHPPTHLKTQLEINGRNNLIQQKTAAAMLAQQMQFMFPGTPLHPVPTFPVGPAIGTNTAISFAPYLAPVTPGVGLVPTEILPTTPVIVPGSPPVTVPGSTATQKLLRTDKLEVCREFQRGNCARGETDCRFAHPADSTMIDTSDNTVTVCMDYIKGRCMREKCKYFHPPAHLQAKIKAAQHQANQAAVAAQAAAAAATVMAFPPGALHPLPKRQALEKSNGTSAVFNPSVLHYQQALTSAQLQQHAAFIPTVPMMHSATSATVSAATTPATSVPFAATATANQIILK

SEQ ID NO: 848238 - protein, 373 aa, Homo sapiens
MALNVAPVRDTKWLTLEVCRQFQRGTCSRSDEECKFAHPPKSCQVENGRVIACFDSLKGRCSRENCKYLHPPTHLKTQLEINGRNNLIQQKTAAAMLAQQMQFMFPGTPLHPVPTFPVGPAIGTNTAISFAPYLAPVTPGVGLVPTEILPTTPVIVPGSPPVTVPGSTATQKLLRTDKLEVCREFQRGNCARGETDCRFAHPADSTMIDTSDNTVTVCMDYIKGRCMREKCKYFHPPAHLQAKIKAAQHQANQAAVAAQAAAAAATVMTQSTAKAMKRPLEATVDLAFPPGALHPLPKRQALEKSNGTSAVFNPSVLHYQQALTSAQLQQHAAFIPTVPMMHSATSATVSAATTPATSVPFAATATANQIILK

SEQ ID NO: 848239 - protein, 379 aa, Homo sapiens
MALNVAPVRDTKWLTLEVCRQFQRGTCSRSDEECKFAHPPKSCQVENGRVIACFDSLKGRCSRENCKYLHPPTHLKTQLEINGRNNLIQQKTAAAMLAQQMQFMFPGTPLHPVPTFPVGPAIGTNTAISFAPYLAPVTPGVGLVPTEILPTTPVIVPGSPPVTVPGSTATQKLLRTDKLEVCREFQRGNCARGETDCRFAHPADSTMIDTSDNTVTVCMDYIKGRCMREKCKYFHPPAHLQAKIKAAQHQANQAAVAAQAAAAAATVMTQSTAKAMKRPLEATVDLAFPPGALHPLPKRQALEKSNGTSAVFNPSVLHYQQALTSAQLQQHAAFIPTDNSEIISRNGMECQESALRITKHCYCTYYPVSSSIELPQTAC

SEQ ID NO: 848240 - protein, 102 aa, Homo sapiens
KLAAAATVMAFPPGALHPLPKRQALEKSNGTSAVFNPSVLHYQQALTSAQLQQHAAFIPTDNSEIISRNGMECQESALRITKHCYCTYYPVSSSIELPQTAC

SEQ ID NO: 848241 - protein, 371 aa, Homo sapiens
MALNVAPVRDTKWLTLEVCRQFQRGTCSRSDEECKFAHPPKSCQVENGRVIACFDSLKGRCSRENCKYLHPPTHLKTQLEINGRNNLIQQKTAAAMLAQQMQFMFPGTPLHPVPTFPVGPAIGTNTAISFAPYLAPVTPGVGLVPTEILPTTPVIVPGSPPVTVPGSTATQKLLRTDKLEVCREFQRGNCARGETDCRFAHPADSTMIDTSDNTVTVCMDYIKGRCMREKCKYFHPPAHLQAKIKAAQHQANQAAVAAQAAAAAATVMTQSTAKAMKRPLEATVDLAFPPGALHPLPKRQALEKSNGTSAVFNPSVLHYQQALTSAQLQQHAAFIPTGMCPYCPTSCALLVMCFLLISLSCLVASSLLLKV

SEQ ID NO: 848242 - protein, 355 aa, Homo sapiens; identical to SEQ ID NO: 848237

SEQ ID NO: 848243 - protein, 255 aa, Homo sapiens; identical to SEQ ID NO: 848236

SEQ ID NO: 848244 - protein, 379 aa, Homo sapiens; identical to SEQ ID NO: 848239

SEQ ID NO: 848245 - protein, 373 aa, Homo sapiens
MALNVAPVRDTKWLTLEVCRQFQRGTCSRSDEECKFAHPPKSCQVENGRVIACFDSLKGRCSRENCKYLHPPTHLKTQLEINGRNNLIQQKTAAAMLAQQMQFMFPGTPLHPVPTFPVGPAIGTNTAISFAPYLAPVTPGVGLVPTEILPTTPVIVPGSPPVTVPGSTATQKLLRTDKLEVCREFQRGNCARGETDCRFAHPADSTMIDTSDNTVTVCMDYIKGRCMREKCKYFHPPAHLQAKIKAAQHQANQAAVAAQAAAAAATVMAFPPGALHPLPKRQALEKSNGTSAVFNPSVLHYQQALTSAQLQQHAAFIPTGSVLCMTPATSIDNSEIISRNGMECQESALRITKHCYCTYYPVSSSIELPQTAC

SEQ ID NO: 848246 - protein, 104 aa, Homo sapiens [sequence omitted]

SEQ ID NO: 848247 - protein, 255 aa, Homo sapiens; identical to SEQ ID NO: 848236

SEQ ID NO: 848248 - protein, 478 aa, Homo sapiens [sequence omitted]

SEQ ID NO: 848249 - protein, 348 aa, Homo sapiens
MYRQRFLYSLYRHTHWVRCAKFSPDGRLIVSCSEDKTIKIWDTTNKQCVNNFSDSVGFANFVDFNPSGTCIASAGSDQTVKVWDVRVNKLLQHYQVHSGGVNCISFHPSGNYLITASSDGTLKILDLLEGRLIYTLQGHTGPVFTVSFSKGGELFASGGADTQVLLWRTNFDELHCKGLTKRNLKRLHFDSPPHLLDIYPRTPHPHEEKVETVEINPKLEVIDLQISTPPVMDILSFDSTTTTETSGRTLPDKGEEACGYFLNPSLMSPECLPTTTKKKTEDMSDLPCESQRSIPLAVTDALEHIMEQLNVLTQTVSILEQRLTLTEDKLKDCLENQQKLFSAVQQKS

SEQ ID NO: 848250 - protein, 208 aa, Homo sapiens
MEHVSPALPVFLVSTYTLGTLCQVLLWRTNFDELHCKGLTKRNLKRLHFDSPPHLLDIYPRTPHPHEEKVETVEINPKLEVIDLQISTPPVMDILSFDSTTTTETSGRTLPDKGEEACGYFLNPSLMSPECLPTTTKKKTEDMSDLPCESQRSIPLAVTDALEHIMEQLNVLTQTVSILEQRLTLTEDKLKDCLENQQKLFSAVQQKS

SEQ ID NO: 848251 - protein, 478 aa, Homo sapiens [sequence omitted]

SEQ ID NO: 848252 - protein, 244 aa, Homo sapiens
MASATEDPVLERYFKGHKAAITSLDLSPNGKQLATASWDTFLMLWNFKPHARAYRYVGHKDVVTSVQFSPHGNLLASASRDRTVRLWIPDKRGKFSEFKAHTAPVRSVDFSADGQFLATASEDKSIKVWSMYRQRFLYSLYRHTHWVRCAKFSPDGRLIVSCSEDKTIKIWDTTNKQCVNNFSDSVGFANFVDFNPSGTCIASAGSDQTVKVWDVRVNKLLQHYQGNNFPNKKFSYRMDSFWKD

SEQ ID NO: 848253 - protein, 436 aa, Homo sapiens
MLWNFKPHARAYRYVGHKDVVTSVQFSPHGNLLASASRDRTVRLWIPDKRGKFSEFKAHTAPVRSVDFSADGQFLATASEDKSIKVWSMYRQRFLYSLYRHTHWVRCAKFSPDGRLIVSCSEDKTIKIWDTTNKQCVNNFSDSVGFANFVDFNPSGTCIASAGSDQTVKVWDVRVNKLLQHYQVHSGGVNCISFHPSGNYLITASSDGTLKILDLLEGRLIYTLQGHTGPVFTVSFSKGGELFASGGADTQVLLWRTNFDELHCKGLTKRNLKRLHFDSPPHLLDIYPRTPHPHEEKVETVEINPKLEVIDLQISTPPVMDILSFDSTTTTETSGRTLPDKGEEACGYFLNPSLMSPECLPTTTKKKTEDMSDLPCESQRSIPLAVTDALEHIMEQLNVLTQTVSILEQRLTLTEDKLKDCLENQQKLFSAVQQKS

SEQ ID NO: 848254 - protein, 485 aa, Homo sapiens
MASATEDPVLERYFKGHKAAITSLDLSPNGKQLATASWDTFLMLWNFKPHARAYRYVGHKDVVTSVQFSPHGNLLASASRDRTVRLWIPDKRGKFSEFKAHTAPVRSVDFSADGQFLATASEDKSIKVWSMYRQRFLYSLYRHTHWVRCAKFSPDGRLIVSCSEDKTIKIWDTTNKQCVNNFSDSVGFANFVDFNPSGTCIASAGSDQTVKVWDVRVNKLLQHYQVHSGGVNCISFHPSGNYLITASSDGTLKILDLLEGRLIYTLQGHTGPVFTVSFSKGGELFASGGADTQVLLWRTNFDELHCKGLTKRNLKRLHFDSPPHLLDIYPRTPHPHEEKVETVEVSFFFIFINPKLEVIDLQISTPPVMDILSFDSTTTTETSGRTLPDKGEEACGYFLNPSLMSPECLPTTTKKKTEDMSDLPCESQRSIPLAVTDALEHIMEQLNVLTQTVSILEQRLTLTEDKLKDCLENQQKLFSAVQQKS

SEQ ID NO: 848255 - protein, 223 aa, Homo sapiens
MASATEDPVLERYFKGHKAAITSLDLSPNGKQLATASWDTFLMLWNFKPHARAYRYVGHKDVVTSVQFSPHGNLLASASRDRTVRLWIPDKRGKFSEFKAHTAPVRSVDFSADGQFLATASEDKSIKVWSMYRQRFLYSLYRHTHWVRCAKDLSLLFHFQKVESYLHQEVQTHRSYYGGLTLMNCIVKVLPKEISKDYILIHHHIFLISTQEHHIPMRKKLRL

SEQ ID NO: 848256 - protein, 108 aa, Homo sapiens
MTTETSGRTLPDKGEEACGYFLNPSLMSPECLPTTTKKKTEDMSDLPCESQRSIPLAVTDALEHIMEQLNVLTQTVSILEQRLTLTEDKLKDCLENQQKLFSAVQQKS

SEQ ID NO: 848257 - protein, 347 aa, Homo sapiens
MASATEDPVLERYFKGHKAAITSLDLSPNGKQLATASWDTFLMLWNFKPHARAYRYVGHKDVVTSVQFSPHGNLLASASRDRTVRLWIPDKRGKFSEFKAHTAPVRSVDFSADGQFLATASEDKSIKVWSMYRQRFLYSLYRHTHWVRCAKFSPDGRLIVSCSEDKTIKIWDTTNKQCVNNFSDSVGFANFVDFNPSGTCIASAGSDQTVKVWDVRVNKLLQHYQVHSGGVNCISFHPSGNYLITASSDGTLKILDLLEGRLIYTLQGHTGPVFTVSFSKGGELFASGGADTQVLLWRTNFDELHCKGLTKRNLKRLHFDSPPHLLDIYPRTPHPHEEKVETVEIFY

SEQ ID NO: 848258 - protein, 213 aa, Homo sapiens
AEWTEQPVGERAVKAHRAPAPSCLKMFHQIWAALLYFYGIILNSIYQCPEHSQLTTLGVDGKEFPEVHLGQWYFIAGAAPTKEELATFDPVDNIVFNMAAGSAPMQLHLRATIRMKDGLCVPRKWIYHLTEGSTDLRTEGRPDMKTELFSSSCPGGIMLNETGQGYQRFLLYNRSPHPPEKCVEEFKSLTSCLDSKAFLLTPRNQEACELSNN

SEQ ID NO: 848259 - protein, 192 aa, Homo sapiens
ATDGHFRFPDSIWGSRSDTSGSPQVPKLYFCGARRESPQPQTFPEVHLGQWYFIAGAAPTKEELATFDPVDNIVFNMAAGSAPMQLHLRATIRMKDGLCVPRKWIYHLTEGSTDLRTEGRPDMKTELFSSSCPGGIMLNETGQGYQRFLLYNRSPHPPEKCVEEFKSLTSCLDSKAFLLTPRNQEACELSNN

SEQ ID NO: 848260 - protein, 213 aa, Homo sapiens; identical to SEQ ID NO: 848258

SEQ ID NO: 848261 - protein, 192 aa, Homo sapiens; identical to SEQ ID NO: 848259

SEQ ID NO: 848262 - protein, 226 aa, Homo sapiens
AEWTEQPVGERAVKAHRAPAPSCLKMFHQIWAALLYFYGIILNSIYQCPEHSQLTTLGVDGKEFPEVHLGQWYFIAGAAPTKEELATFDPVDNIVFNMAAGSAPMQLHLRATIRMKDGLCVPRKWIYHLTEGSTDLRTEGRPDMKTELFSSSCPGGIMLNETGQGYQRFLLYNRSPHPPEKCVEEFKSLTSCLDSKAFLLTPRNQGKVLKSHKTGLGLTKSSGVTG

SEQ ID NO: 848263 - protein, 205 aa, Homo sapiens
ATDGHFRFPDSIWGSRSDTSGSPQVPKLYFCGARRESPQPQTFPEVHLGQWYFIAGAAPTKEELATFDPVDNIVFNMAAGSAPMQLHLRATIRMKDGLCVPRKWIYHLTEGSTDLRTEGRPDMKTELFSSSCPGGIMLNETGQGYQRFLLYNRSPHPPEKCVEEFKSLTSCLDSKAFLLTPRNQGKVLKSHKTGLGLTKSSGVTG

SEQ ID NO: 848264 - protein, 213 aa, Homo sapiens; identical to SEQ ID NO: 848258

SEQ ID NO: 848265 - protein, 176 aa, Homo sapiens
QLGDKKPRLLLPKNVPQIGAALFTSIFPEVHLGQWYFIAGAAPTKEELATFDPVDNIVFNMAAGSAPMQLHLRATIRMKDGLCVPRKWIYHLTEGSTDLRTEGRPDMKTELFSSSCPGGIMLNETGQGYQRFLLYNRSPHPPEKCVEEFKSLTSCLDSKAFLLTPRNQEACELSNN

SEQ ID NO: 848266 - protein, 189 aa, Homo sapiens
AEWTEQPVGERAVKAHRAPAPSCLKMFHQIWAALLYFYGIILNSIYQCPEHSQLTTLGVDGKEFPEVHLGQWYFIAGAAPTKEELATFDPVDNIVFNMAAGSAPMQLHLRATIRMKDGLCVPRKWIYHLTEGSTDLRTEGRPDMKTELFSSSCPGGIMLNETGQGYQRFLLYNRSPHPPVLLTPRNQGL

SEQ ID NO: 848267 - protein, 1268 aa, Homo sapiens
MDQKILSLAAEKTADKLQEFLQTLREGDLTNLLQNQAVKGKVAGALLRAIFKGSPCSEEAGTLRRRKIYTCCIQLVESGDLQKEIASEIIGLLMLEAHHFPGPLLVELANEFISAVREGSLVNGKSLELLPIILTALATKKENLAYGKGVLSGEECKKQLINTLCSGRWDQQYVIQLTSMFKDVPLTAEEVEFVVEKALSMFSKMNLQEIPPLVYQLLVLSSKGSRKSVLEGIIAFFSALDKQHNEEQSGDELLDVVTVPSGELRHVEGTIILHIVFAIKLDYELGRELVKHLKVGQQGDSNNNLSPFSIALLLSVTRIQRFQDQVLDLLKTSVVKSFKDLQLLQGSKFLQNLVPHRSYVSTMILEVVKNSVHSWDHVTQGLVELGFILMDSYGPKKVLDGKTIETSPSLSRMPNQHACKLGANILLETFKIHEMIRQEILEQVLNRVVTRASSPISHFLDLLSNIVMYAPLVLQSCSSKVTEAFDYLSFLPLQTVQRLLKAVQPLLKVSMSMRDCLILVLRKAMFANQLDARKSAVAGFLLLLKNFKVLGSLSSSQCSQSLSVSQVHVDVHSHYNSVANETFCLEIMDSLRRCLSQQADVRLMLYEGFYDVLRRNSQLANSVMQTLLSQLKQFYEPKPDLLPPLKLEACILTQGDKISLQEPLDYLLCCIQHCLAWYKNTVIPLQQGEEEEEEEEAFYEDLDDILESITNRMIKSELEDFELDKSADFSQSTSIGIKNNISAFLVMGVCEVLIEYNFSISSFSKNRFEDILSLFMCYKKLSDILNEKAGKAKTKMANKTSDSLLSMKFVSSLLTALFRVLLWRYTSIPTSVEESGKKEKGKSISLLCLEGLQKIFSAVQQFYQPKIQQFLRALDVTDKEGEEREDADVSVTQRTAFQIRQFQRSLLNLLSSQEEDFNSKEALLLVTVLTSLSKLLEPSSPQFVQMLSWTSKICKENSREDALFCKSLMNLLFSLHVSYKSPVILLRDLSQDIHGHLGDIDQDVEVEKTNHFAIVNLRTAAPTVCLLVLSQAEKVLEEVDWLITKLKGQVSQETLSEEASSQATLPNQPVEKAIIMQLGTLLTFFHELVQTALPSGSCVDTLLKDLCKMYTTLTALVRYYLQVCQSSGGIPKNMEKLVKLSGSHLTPLCYSFISYVQNKSKSLNYTGEKKEKPAAVATAMARVLRETKPIPNLIFAIEQYEKFLIHLSKKSKVNLMQHMKLSTSRDFKIKGNILDMVLREDGEDENEEGTASEHGGQNKEPAKKKRKK

SEQ ID NO: 848268 - protein, 1268 aa, Homo sapiens; identical to SEQ ID NO: 848267

SEQ ID NO: 848269 - protein, 559 aa, Homo sapiens [sequence omitted]

SEQ ID NO: 848270 - protein, 517 aa, Homo sapiens
MDQKILSLAAEKTADKLQEFLQTLREGDLTNLLQNQAVKGKVAGALLRAIFKGSPCSEEAGTLRRRKIYTCCIQLVESGDLQKEIASEIIGLLMLEAHHFPGPLLVELANEFISAVREGSLVNGKSLELLPIILTALATKKENLAYGKGVLSGEECKKQLINTLCSGRWDQQYVIQLTSMFKDVPLTAEEVEFVVEKALSMFSKMNLQEIPPLVYQLLVLSSKGSRKSVLEGIIAFFSALDKQHNEEQSGDEYGQQGDSNNNLSPFSIALLLSVTRIQRFQDQVLDLLKTSVVKSFKDLQLLQGSKFLQNLVPHRSYVSTMILEVVKNSVHSWDHVTQGLVELGFILMDSYGPKKVLDGKTIETSPSLSRMPNQHACKLGANILLETFKIHEMIRQEILEQVLNRVVTRASSPISHFLDLLSNIVMYAPLVLQSCSSKVTEAFDYLSFLPLQTVQRLLKAVQPLLKVSMSMRDCLILVLRKAMFAKYVASFSIIGRRCLLMLELKLSLPSPSTTCSQ

SEQ ID NO: 848271 - protein, 1268 aa, Homo sapiens; identical to SEQ ID NO: 848267

SEQ ID NO: 848272 - protein, 1314 aa, Homo sapiens
MDQKILSLAAEKTADKLQEFLQTLREGDLTNLLQNQAVKGKVAGALLRAIFKGSPCSEEAGTLRRRKIYTCCIQLVESGDLQKEIASEIIGLLMLEAHHFPGPLLVELANEFISAVREGSLVNGKSLELLPIILTALATKKENLAYGKGVLSGEECKKQLINTLCSGRWDQQYVIQLTSMFKDVPLTAEEVEFVVEKALSMFSKMNLQEIPPLVYQLLVLSSKGSRKSVLEGIIAFFSALDKQHNEEQSGDELLDVVTVPSGELRHVEGTIILHIVFAIKLDYELGRELVKHLKVGQQGDSNNNLSPFSIALLLSVTRIQRFQDQVLDLLKTSVVKSFKDLQLLQGSKFLQNLVPHRSYVSTMILEVVKNSVHSWDHVTQGLVELGFILMDSYGPKKVLDGKTIETSPSLSRMPNQHACKLGANILLETFKIHEMIRQEILEQVLNRVVTRASSPISHFLDLLSNIVMYAPLVLQSCSSKVTEAFDYLSFLPLQTVQRLLKAVQPLLKVSMSMRDCLILVLRKAMFANQLDARKSAVAGFLLLLKNFKVLGSLSSSQCSQSLSVSQVHVDVHSHYNSVANETFCLEIMDSLRRCLSQQADVRLMLYEGFYDVLRRNSQLANSVMQTLLSQLKQFYEPKPDLLPPLKLEACILTQGDKISLQEPLDYLLCCIQHCLAWYKNTVIPLQQGEEEEEEEEAFYEDLDDILESITNRMIKSELEDFELDKSADFSQSTSIGIKNNISAFLVMGVCEVLIEYNFSISSFSKNRFEDILSLFMCYKKLSDILNEKAGKAKTKMANKTSDSLLSMKFVSSLLTALFRSSNEFMRYAVNVALQKVQQLKETGHVSGPDGQNPEKIFQNLCDITRVLLWRYTSIPTSVEESGKKEKGKSISLLCLEGLQKIFSAVQQFYQPKIQQFLRALDVTDKEGEEREDADVSVTQRTAFQIRQFQRSLLNLLSSQEEDFNSKEALLLVTVLTSLSKLLEPSSPQFVQMLSWTSKICKENSREDALFCKSLMNLLFSLHVSYKSPVILLRDLSQDIHGHLGDIDQDVEVEKTNHFAIVNLRTAAPTVCLLVLSQAEKVLEEVDWLITKLKGQVSQETLSEEASSQATLPNQPVEKAIIMQLGTLLTFFHELVQTALPSGSCVDTLLKDLCKMYTTLTALVRYYLQVCQSSGGIPKNMEKLVKLSGSHLTPLCYSFISYVQNKSKSLNYTGEKKEKPAAVATAMARVLRETKPIPNLIFAIEQYEKFLIHLSKKSKVNLMQHMKLSTSRDFKIKGNILDMVLREDGEDENEEGTASEHGGQNKEPAKKKRKK

SEQ ID NO: 848273 - protein, 401 aa, Homo sapiens
RVSFPFLDVTDKEGEEREDADVSVTQRTAFQIRQFQRSLLNLLSSQEEDFNSKEALLLVTVLTSLSKLLEPSSPQFVQMLSWTSKICKENSREDALFCKSLMNLLFSLHVSYKSPVILLRDLSQDIHGHLGDIDQDVEVEKTNHFAIVNLRTAAPTVCLLVLSQAEKVLEEVDWLITKLKGQVSQETLSEEASSQATLPNQPVEKAIIMQLGTLLTFFHELVQTALPSGSCVDTLLKDLCKMYTTLTALVRYYLQVCQSSGGIPKNMEKLVKLSGSHLTPLCYSFISYVQNKSKSLNYTGEKKEKPAAVATAMARVLRETKPIPNLIFAIEQYEKFLIHLSKKSKVNLMQHMKLSTSRDFKIKGNILDMVLREDGEDENEEGTASEHGGQNKEPAKKKRKK

SEQ ID NO: 848274 - protein, 1327 aa, Homo sapiens
MDQKILSLAAEKTADKLQEFLQTLREGDLTNLLQNQAVKGKVAGALLRAIFKGSPCSEEAGTLRRRKIYTCCIQLVESGDLQKEIASEIIGLLMLEAHHFPGPLLVELANEFISAVREGSLVNGKSLELLPIILTALATKKENLAYGKGVLSGEECKKQLINTLCSGRWDQQYVIQLTSMFKDVPLTAEEVEFVVEKALSMFSKMNLQEIPPLVYQLLVLSSKGSRKSVLEGIIAFFSALDKQHNEEQSGDELLDVVTVPSGELRHVEGTIILHIVFAIKLDYELGRELVKHLKVGQQGDSNNNLSPFSIALLLSVTRIQRFQDQVLDLLKTSVVKSFKDLQLLQGSKFLQNLVPHRSYVSTMILEVVKNSVHSWDHVTQGLVELGFILMDSYGPKKVLDGKTIETSPSLSRMPNQHACKLGANILLETFKIHEMIRQEILEQVLNRVVTRASSPISHFLDLLSNIVMYAPLVLQSCSSKVTEAFDYLSFLPLQTVQRLLKAVQPLLKVSMSMRDCLILVLRKAMFANQLDARKSAVAGFLLLLKNFKVLGSLSSSQCSQSLSVSQVHVDVHSHYNSVANETFCLEIMDSLRRCLSQQADVRLMLYEGFYDVLRRNSQLANSVMQTLLSQLKQFYEPKPDLLPPLKLEACILTQGDKISLQEPLDYLLCCIQHCLAWYKNTVIPLQQGEEEEEEEEAFYEDLDDILESITNRMIKSELEDFELDKSADFSQSTSIGIKNNISAFLVMGVCEVLIEYNFSISSFSKNRFEDILSLFMCYKKLSDILNEKAGKAKTKMANKTSDSLLSMKFVSSLLTALFRDSIQSHQESLSVLRSSNEFMRYAVNVALQKVQQLKETGHVSGPDGQNPEKIFQNLCDITRVLLWRYTSIPTSVEESGKKEKGKSISLLCLEGLQKIFSAVQQFYQPKIQQFLRALDVTDKEGEEREDADVSVTQRTAFQIRQFQRSLLNLLSSQEEDFNSKEALLLVTVLTSLSKLLEPSSPQFVQMLSWTSKICKENSREDALFCKSLMNLLFSLHVSYKSPVILLRDLSQDIHGHLGDIDQDVEVEKTNHFAIVNLRTAAPTVCLLVLSQAEKVLEEVDWLITKLKGQVSQETLSEEASSQATLPNQPVEKAIIMQLGTLLTFFHELVQTALPSGSCVDTLLKDLCKMYTTLTALVRYYLQVCQSSGGIPKNMEKLVKLSGSHLTPLCYSFISYVQNKSKSLNYTGEKKEKPAAVATAMARVLRETKPIPNLIFAIEQYEKFLIHLSKKSKVNLMQHMKLSTSRDFKIKGNILDMVLREDGEDENEEGTASEHRGTEYILGYQGYT

SEQ ID NO: 848275 - protein, 423 aa, Homo sapiens
QERIGLHVEGKPYGKPQCAKRTQLVQLEVGISLVLLGCGFHVKITSPKEKGAQIRQFQRSLLNLLSSQEEDFNSKEALLLVTVLTSLSKLLEPSSPQFVQMLSWTSKICKENSREDALFCKSLMNLLFSLHVSYKSPVILLRDLSQDIHGHLGDIDQDVEVEKTNHFAIVNLRTAAPTVCLLVLSQAEKVLEEVDWLITKLKGQVSQETLSEEASSQATLPNQPVEKAIIMQLGTLLTFFHELVQTALPSGSCVDTLLKDLCKMYTTLTALVRYYLQVCQSSGGIPKNMEKLVKLSGSHLTPLCYSFISYVQNKSKSLNYTGEKKEKPAAVATAMARVLRETKPIPNLIFAIEQYEKFLIHLSKKSKVNLMQHMKLSTSRDFKIKGNILDMVLREDGEDENEEGTASEHGGQNKEPAKKKRKK

SEQ ID NO: 848276 - protein, 252 aa, Homo sapiens
MDQKILSLAAEKTADKLQEFLQTLREGDLTNLLQNQAVKGKVAGALLRAIFKGSPCSEEAGTLRRRKIYTCCIQLVESGDLQKEIASEIIGLLMLEAHHFPGPLLVELANEFISAVREGSLVNGKSLELLPIILTALATKKENLAYGKGVLSGEECKKQLINTLCSGRWDQQYVIQLTSMFKDVPLTAEEVEFVVEKALSMFSKMNLQEIPPLVYQLLVLSSKGSRKSVLEGIIAFFSALDKQHNEEQSGDE

SEQ ID NO: 848277 - protein, 299 aa, Homo sapiens [sequence omitted]

SEQ ID NO: 848278 - protein, 252 aa, Homo sapiens; identical to SEQ ID NO: 848276

SEQ ID NO: 848279 - protein, 1268 aa, Homo sapiens; identical to SEQ ID NO: 848267

SEQ ID NO: 848280 - protein, 1268 aa, Homo sapiens; identical to SEQ ID NO: 848267

SEQ ID NO: 848281 - protein, 1268 aa, Homo sapiens; identical to SEQ ID NO: 848267

SEQ ID NO: 848282 - protein, 806 aa, Homo sapiens
MDQKILSLAAEKTADKLQEFLQTLREGDLTNLLQNQAVKGKVAGALLRAIFKGSPCSEEAGTLRRRKIYTCCIQLVESGDLQKEIASEIIGLLMLEAHHFPGPLLVELANEFISAVREGSLVNGKSLELLPIILTALATKKENLAYGKGVLSGEECKKQLINTLCSGRWDQQYVIQLTSMFKDVPLTAEEVEFVVEKALSMFSKMNLQEIPPLVYQLLVLSSKGSRKSVLEGIIAFFSALDKQHNEEQSGDELLDVVTVPSGELRHVEGTIILHIVFAIKLDYELGRELVKHLKVGQQGDSNNNLSPFSIALLLSVTRIQRFQDQVLDLLKTSVVKSFKDLQLLQGSKFLQNLVPHRSYVSTMILEVVKNSVHSWDHVTQGLVELGFILMDSYGPKKVLDGKTIETSPSLSRMPNQHACKLGANILLETFKIHEMIRQEILEQVLNRVVTRASSPISHFLDLLSNIVMYAPLVLQSCSSKVTEAFDYLSFLPLQTVQRLLKAVQPLLKVSMSMRDCLILVLRKAMFANQLDARKSAVAGFLLLLKNFKVLGSLSSSQCSQSLSVSQVHVDVHSHYNSVANETFCLEIMDSLRRCLSQQADVRLMLYEGFYDVLRRNSQLANSVMQTLLSQLKQFYEPKPDLLPPLKLEACILTQGDKISLQEPLDYLLCCIQHCLAWYKNTVIPLQQGEEEEEEEEAFYEDLDDILESITNRMIKSELEDFELDKSADFSQSTSIGIKNNISAFLVMGVCEVLIEYNFSISSFSKNRFEDILSLFMCYKKLSDILNEKAGKAKTKMANKTSDSLCP

SEQ ID NO: 848283 - protein, 1268 aa, Homo sapiens; identical to SEQ ID NO: 848267

SEQ ID NO: 848284 - protein, 466 aa, Homo sapiens
MLGEPVFKNNTTFSCFRVLLWRYTSIPTSVEESGKKEKGKSISLLCLEGLQKIFSAVQQFYQPKIQQFLRALDVTDKEGEEREDADVSVTQRTAFQIRQFQRSLLNLLSSQEEDFNSKEALLLVTVLTSLSKLLEPSSPQFVQMLSWTSKICKENSREDALFCKSLMNLLFSLHVSYKSPVILLRDLSQDIHGHLGDIDQDVEVEKTNHFAIVNLRTAAPTVCLLVLSQAEKVLEEVDWLITKLKGQVSQETLSEEASSQATLPNQPVEKAIIMQLGTLLTFFHELVQTALPSGSCVDTLLKDLCKMYTTLTALVRYYLQVCQSSGGIPKNMEKLVKLSGSHLTPLCYSFISYVQNKSKSLNYTGEKKEKPAAVATAMARVLRETKPIPNLIFAIEQYEKFLIHLSKKSKVNLMQHMKLSTSRDFKIKGNILDMVLREDGEDENEEGTASEHGGQNKEPAKKKRKK

SEQ ID NO: 848285 - protein, 1329 aa, Homo sapiens
MDQKILSLAAEKTADKLQEFLQTLREGDLTNLLQNQAVKGKVAGALLRAIFKGSPCSEEAGTLRRRKIYTCCIQLVESGDLQKEIASEIIGLLMLEAHHFPGPLLVELANEFISAVREGSLVNGKSLELLPIILTALATKKENLAYGKGVLSGEECKKQLINTLCSGRWDQQYVIQLTSMFKDVPLTAEEVEFVVEKALSMFSKMNLQEIPPLVYQLLVLSSKGSRKSVLEGIIAFFSALDKQHNEEQSGDELLDVVTVPSGELRHVEGTIILHIVFAIKLDYELGRELVKHLKVGQQGDSNNNLSPFSIALLLSVTRIQRFQDQVLDLLKTSVVKSFKDLQLLQGSKFLQNLVPHRSYVSTMILEVVKNSVHSWDHVTQGLVELGFILMDSYGPKKVLDGKTIETSPSLSRMPNQHACKLGANILLETFKIHEMIRQEILEQVLNRVVTRASSPISHFLDLLSNIVMYAPLVLQSCSSKVTEAFDYLSFLPLQTVQRLLKAVQPLLKVSMSMRDCLILVLRKAMFANQLDARKSAVAGFLLLLKNFKVLGSLSSSQCSQSLSVSQVHVDVHSHYNSVANETFCLEIMDSLRRCLSQQADVRLMLYEGFYDVLRRNSQLANSVMQTLLSQLKQFYEPKPDLLPPLKLEACILTQGDKISLQEPLDYLLCCIQHCLAWYKNTVIPLQQGEEEEEEEEAFYEDLDDILESITNRMIKSELEDFELDKSADFSQSTSIGIKNNISAFLVMGVCEVLIEYNFSISSFSKNRFEDILSLFMCYKKLSDILNEKAGKAKTKMANKTSDSLLSMKFVSSLLTALFRDSIQSHQESLSVLRSSNEFMRYAVNVALQKVQQLKETGHVSGPDGQNPEKIFQNLCDITRVLLWRYTSIPTSVEESGKKEKGKSISLLCLEGLQKIFSAVQQFYQPKIQQFLRALDVTDKEGEEREDADVSVTQRTAFQIRQFQRSLLNLLSSQEEDFNSKEALLLVTVLTSLSKLLEPSSPQFVQMLSWTSKICKENSREDALFCKSLMNLLFSLHVSYKSPVILLRDLSQDIHGHLGDIDQDVEVEKTNHFAIVNLRTAAPTVCLLVLSQAEKVLEEVDWLITKLKGQVSQETLSEEASSQATLPNQPVEKAIIMQLGTLLTFFHELVQTALPSGSCVDTLLKDLCKMYTTLTALVRYYLQVCQSSGGIPKNMEKLVKLSGSHLTPLCYSFISYVQNKSKSLNYTGEKKEKPAAVATAMARVLRETKPIPNLIFAIEQYEKFLIHLSKKSKVNLMQHMKLSTSRDFKIKGNILDMVLREDGEDENEEGTASEHCVTDIYSITGILKIS

SEQ ID NO: 848286 - protein, 135 aa, Homo sapiens [sequence omitted]

SEQ ID NO: 848287 - protein, 559 aa, Homo sapiens [sequence omitted]

SEQ ID NO: 848288 - protein, 107 aa, Homo sapiens
FIGQSTKSRNLFLLVSPGVSELRRNSKKYGKAGELRMPFLGMGEALLLLVTLVSFSLVVQVKLSGSHLTPLCYSFISYVQVRDSEAVPNRSSRKDFLHAQGTIDHLN

SEQ ID NO: 848289 - protein, 273 aa, Homo sapiens
YFLVVFFRDCILKKRRNIKYVMSSLNQSQATLLSIFSQEYQKHIKRTHAKHHTSEAIESYYQRYLNGVVKNGAAPVLLDLANEVDYAPSLMARLILERFLQEHEETPPSKSIINSMLRDPSQIPDGVLANQVYQCIVNDCCYGPLVDCIKHAIGHEHEVLLRDLLLEKNLSFLDEDQLRAKGYDKTPDFILQVPVAVEGHIIHWIESKASFGDECSHHAYLHDQFWSYWNRFGPGLVIYWYGFIQELDCNRERGILLKACFPTNIVTLCHSIA

SEQ ID NO: 848290 - protein, 362 aa, Homo sapiens
CTASPRRGGAGGAWDRASLRPAFAARGVFQGGLGQAKQARTRACAALPTPHPSAPRLLEPQGVFSLFPPPPGPWPNMILTKAQYDEIAQCLVSVPPTRQSLRKLKQRFPSQSQATLLSIFSQEYQKHIKRTHAKHHTSEAIESYYQRYLNGVVKNGAAPVLLDLANEVDYAPSLMARLILERFLQEHEETPPSKSIINSMLRDPSQIPDGVLANQVYQCIVNDCCYGPLVDCIKHAIGHEHEVLLRDLLLEKNLSFLDEDQLRAKGYDKTPDFILQVPVAVEGHIIHWIESKASFGDECSHHAYLHDQFWSYWNRDGISQCSSGWCGTPGLSDSSASATQSAGITGARKHFLPGIFMKCVCK

SEQ ID NO: 848291 - protein, 183 aa, Homo sapiens
MARLILERFLQEHEETPPSKSIINSMLRDPSQIPDGVLANQVYQCIVNDCCYGPLVDCIKHAIGHEHEVLLRDLLLEKNLSFLDEDQLRAKGYDKTPDFILQVPVAVEGHIIHWIESKASFGDECSHHAYLHDQFWSYWNRFGPGLVIYWYGFIQELDCNRERGILLKACFPTNIVTLCHSIA

SEQ ID NO: 848292 - protein, 357 aa, Homo sapiens
CTASPRRGGAGGAWDRASLRPAFAARGVFQGGLGQAKQARTRACAALPTPHPSAPRLLEPQGVFSLFPPPPGPWPNMILTKAQYDEIAQCLVSVPPTRQSLRKLKQRFPSQSQATLLSIFSQEYQKHIKRTHAKHHTSEAIESYYQRYLNGVVKNGAAPVLLDLANEVDYAPSLMARLILERFLQEHEETPPSKSIINSMLRDPSQIPDGVLANQVYQCIVNDCCYGPLVDCIKHAIGHEHEVLLRDLLLEKNLSFLDEDQLRAKGYDKTPDFILQVPVAVEGHIIHWIESKASFGDECSHHAYLHDQFWSYWNRFGPGLVIYWYGFIQELDCNRERGILLKACFPTNIVTLCHSIA

SEQ ID NO: 848293 - protein, 357 aa, Homo sapiens; identical to SEQ ID NO: 848292

SEQ ID NO: 848294 - protein, 352 aa, Homo sapiens
CTASPRRGGAGGAWDRASLRPAFAARGVFQGGLGQAKQARTRACAALPTPHPSAPRLLEPQGVFSLFPPPPGPWPNMILTKAQYDEIAQCLVSVPPTRQSLRKLKQRFPSQSQATLLSIFSQEYQKHIKRTHAKHHTSEAIESYYQRYLNGVVKNGAAPVLLDLANEVDYAPSLMARLILERFLQEHEETPPSKSIINSMLRDPSQIPDGVLANQVYQCIVNDCCYGPLVDCIKHAIGHEHEVLLRDLLLEKNLSFLDEDQLRAKGYDKTPDFILQVPVAVEGHIIHWIESKASFGDECSHHAYLHDQFWSYWNRFGPGLVIYWYGFIQELDCNRERGILLKACFPTNIVTF

SEQ ID NO: 848295 - protein, 203 aa, Homo sapiens
CTASPRRGGAGGAWDRASLRPAFAARGVFQGGLGQAKQARTRACAALPTPHPSAPRLLEPQGVFSLFPPPPGPWPNMILTKAQYDEIAQCLVSVPPTRQSLRKLKQRFPSQSQATLLSIFSQEYQKHIKRTHAKHHTSEAIESYYQRYLNGVVKNGAAPVLLDLANEVDYAPSLMARLILERFLQEHEETPPRPEKYYFQMQR

SEQ ID NO: 848296 - protein, 295 aa, Homo sapiens
GRVVNRHEAGPWPNMILTKAQYDEIAQCLVSVPPTRQSLRKLKQRFPSQSQATLLSIFSQEYQKHIKRTHAKHHTSEAIESYYQRYLNGVVKNGAAPVLLDLANEVDYAPSLMARLILERFLQEHEETPPSKSIINSMLRDPSQIPDGVLANQVYQCIVNDCCYGPLVDCIKHAIGHEHEVLLRDLLLEKNLSFLDEDQLRAKGYDKTPDFILQVPVAVEGHIIHWIESKASFGDECSHHAYLHDQFWSYWNRFGPGLVIYWYGFIQELDCNRERGILLKACFPTNIVTLCHSIA

SEQ ID NO: 848297 - protein, 357 aa, Homo sapiens; identical to SEQ ID NO: 848292

SEQ ID NO: 848298 - protein, 357 aa, Homo sapiens; identical to SEQ ID NO: 848292

SEQ ID NO: 848299 - protein, 357 aa, Homo sapiens; identical to SEQ ID NO: 848292

SEQ ID NO: 848300 - protein, 133 aa, Homo sapiens
CTASPRRGGAGGAWDRASLRPAFAARGVFQGGLGQAKQARTRACAALPTPHPSAPRLLEPQGVFSLFPPPPGPWPNMILTKAQYDEIAQCLVSVPPTRQSLRKLKQRFPRNTLKEHMPNIILRKQLKVITRGT

SEQ ID NO: 848301 - protein, 131 aa, Homo sapiens
GRVVNRHEAGPWPNMILTKAQYDEIAQCLVSVPPTRQSLRKLKQRFPSQSQATLLSIFSQEYQKHIKRTHAKHHTSEAIESYYQRDRPCCYLSDGLTSVAFCWKCAGQMFLSVLRDRFHRACQDGLDLLTL

SEQ ID NO: 848302 - protein, 135 aa, Homo sapiens
SPDAKGFDSVSSFGNTGGLPCELLQHLGCSRQSVSTLPNTDVETEFADAKFPHGVPRAARAESARADIAGVLAIRPDELRFRYSMVAYWRQAGLSYIRYSQICAKAVRDALKTEFKANAEKTSGSNVKIVKVKKE

SEQ ID NO: 848303 - protein, 51 aa, Homo sapiens
MVAYWRQAGLSYIRYSQICAKAVRDALKTEFKANAEKTSGSNVKIVKVKKE

SEQ ID NO: 848304 - protein, 70 aa, Homo sapiens
RPPTTTKFAAASTARLSRHCRRLGDSARRAPLSLQHGGLLETGWTQLHPILPDLCKSSERCTEDRIQSKC

SEQ ID NO: 848305 - protein, 99 aa, Homo sapiens
  misc_feature (11)..(11): Xaa can be any naturally occurring amino acid
VRSPSAPMLGXEVYSTEIKTTEVLMENFRRAIGLRIKETKEVYEGEVTELTPCEKAGLSYIRYSQICAKAVRDALKTEFKANAEKTSGSNVKIVKVKKE

SEQ ID NO: 848306 - protein, 76 aa, Homo sapiens
QTLFKLRSSALWLLDLLREPLLSRHCRRLGDSARRAPLSLQHGGLLETGWTQLHPILPDLCKSSERCTEDRIQSKC

SEQ ID NO: 848307 - protein, 70 aa, Homo sapiens; identical to SEQ ID NO: 848304

SEQ ID NO: 848308 - protein, 119 aa, Homo sapiens
MPQTKPGRQPHEPTENKEQGTRDRHRPERRNSRQPNRPRETERESAGLRVQPERGRPPEQARTDSTRQRTRLTYGQEESSTRAGVADTTGGDDQRYTAQHKTNQEHYTTELRHNKTNNQ

SEQ ID NO: 848309 - protein, 51 aa, Homo sapiens; identical to SEQ ID NO: 848303

SEQ ID NO: 848310 - protein, 76 aa, Homo sapiens; identical to SEQ ID NO: 848306

SEQ ID NO: 848311 - protein, 134 aa, Homo sapiens
QSPNSAQSPNSAQSPNSAQSPNSAQIQTVPRVQTVLRVQTVPRVQTVPRVQTVPRVQTVPRVQRADIAGVLAIRPDELRFRYSMVAYWRQAGLSYIRYSQICAKAVRDALKTEFKANAEKTSGSNVKIVKVKKE

SEQ ID NO: 848312 - protein, 135 aa, Homo sapiens; identical to SEQ ID NO: 848302

SEQ ID NO: 848313 - protein, 51 aa, Homo sapiens; identical to SEQ ID NO: 848303

SEQ ID NO: 848314 - protein, 51 aa, Homo sapiens; identical to SEQ ID NO: 848303

SEQ ID NO: 848315 - protein, 157 aa, Homo sapiens
MAKKSAENGIYSVSGDEKKGPLIAPGPDGAPAKGDGPVGLGTPGGRLAVPPRETWTRQMDFIMSCVGFAVGLGNVWRFPYLCYKNGGGVFLIPYVLIALVGGIPIFFLEISLGQFMKAGSINVWNICPLFKGEQPLASLRDCPLLPAGSHLRNLFLS

SEQ ID NO: 848316 - protein, 594 aa, Homo sapiens
GTRVSCDYKTALGLLEAEVTRDGWETEVQSKGLCPRSGEGCWDLESGVFLIPYVLIALVGGIPIFFLEISLGQFMKAGSINVWNICPLFKGLGYASMVIVFYCNTYYIMVLAWGFYYLVKSFTTTLPWATCGHTWNTPDCVEIFRHEDCANASLANLTCDQLADRRSPVIEFWENKVLRLSGGLEVPGALNWEVTLCLLACWVLVYFCVWKGVKSTGKIVYFTATFPYVVLVVLLVRGVLLPGALDGIIYYLKPDWSKLGSPQVWIDAGTQIFFSYAIGLGALTALGSYNRFNNNCYKDAIILALINSGTSFFAGFVVFSILGFMAAEQGVHISKVAESGPGLAFIAYPRAVTLMPVAPLWAALFFFMLLLLGLDSQFVGVEGFITGLLDLLPASYYFRFQREISVALCCALCFVIDLSMVTDGGMYVFQLFDYYSASGTTLLWQAFWECVVVAWVYGADRFMDDIACMIGYRPCPWMKWCWSFFTPLVCMGIFIFNVVYYEPLVYNNTYVYPWWGEAMGWAFALSSMLCVPLHLLGCLLRAKGTMAERWQHLTQPIWGLHHLEYRAQDADVRGLTTLTPVSESSKVVVVESVM

SEQ ID NO: 848317 - protein, 635 aa, Homo sapiens
MAKKSAENGIYSVSGDEKKGPLIAPGPDGAPAKGDGPVGLGTPGGRLAVPPRETWTRQMDFIMSCVGFAVGLGNVWRFPYLCYKNGGGVFLIPYVLIALVGGIPIFFLEISLGQFMKAGSINVWNICPLFKGLGYASMVIVFYCNTYYIMVLAWGFYYLVKSFTTTLPWATCGHTWNTPDCVEIFRHEDCANASLANLTCDQLADRRSPVIEFWENKVLRLSGGLEVPGALNWEVTLCLLACWVLVYFCVWKGVKSTGKIVYFTATFPYVVLVVLLVRGVLLPGALDGIIYYLKPDWSKLGSPQVWIDAGTQIFFSYAIGLGALTALGSYNRFNNNCYKDAIILALINSGTSFFAGFVVFSILGFMAAEQGVHISKVAESGPGLAFIAYPRAVTLMPVAPLWAALFFFMLLLLGLDSQFVGVEGFITGLLDLLPASYYFRFQREISVALCCALCFVIDLSMVTDGGMYVFQLFDYYSASGTTLLWQAFWECVVVAWVYGADRFMDDIACMIGYRPCPWMKWCWSFFTPLVCMGIFIFNVVYYEPLVYNNTYVYPWWGEAMGWAFALSSMLCVPLHLLGCLLRAKGTMAERWQHLTQPIWGLHHLEYRAQDADVRGLTTLTPVSESSKVVVVESVM

SEQ ID NO: 848318 - protein, 492 aa, Homo sapiens
GTEAMIKGLAWGFYYLVKSFTTTLPWATCGHTWNTPDCVEIFRHEDCANASLANLTCDQLADRRSPVIEFWENKVLRLSGGLEVPGALNWEVTLCLLACWVLVYFCVWKGVKSTGKIVYFTATFPYVVLVVLLVRGVLLPGALDGIIYYLKPDWSKLGSPQVWIDAGTQIFFSYAIGLGALTALGSYNRFNNNCYKDAIILALINSGTSFFAGFVVFSILGFMAAEQGVHISKVAESGPGLAFIAYPRAVTLMPVAPLWAALFFFMLLLLGLDSQFVGVEGFITGLLDLLPASYYFRFQREISVALCCALCFVIDLSMVTDGGMYVFQLFDYYSASGTTLLWQAFWECVVVAWVYGADRFMDDIACMIGYRPCPWMKWCWSFFTPLVCMGIFIFNVVYYEPLVYNNTYVYPWWGEAMGWAFALSSMLCVPLHLLGCLLRAKGTMAERWQHLTQPIWGLHHLEYRAQDADVRGLTTLTPVSESSKVVVVESVM

SEQ ID NO: 848319 - protein, 660 aa, Homo sapiens
GGDQTESSPKEGGGTESQAMLPTLQIQGPAAFAPGDRGPGRHCPFPVPITPTGALLPVSDSCDSLVDLVWPSVTYLALGTQSRVWPHPLGAPGQAGESPEQRRQCLELWDMASSLGDKVPRAACGKRGQTVWQLHLACLCLAQFHSPPAQPPPLSRRGGGPDPDPISRSLPGPPTPALPTHSYSSHSPRAPRLLSPLRRAPRGSPAPHRHASLQTNEAPRELPHCTWPGLPGRSLAPSFLWREPWLGGQWGPLNIPARKGDRRRWEWGCEGGGATASAEQPGPQIVYFTATFPYVVLVVLLVRGVLLPGALDGIIYYLKPDWSKLGSPQVWIDAGTQIFFSYAIGLGALTALGSYNRFNNNCYKDAIILALINSGTSFFAGFVVFSILGFMAAEQGVHISKVAESGPGLAFIAYPRAVTLMPVAPLWAALFFFMLLLLGLDSQFVGVEGFITGLLDLLPASYYFRFQREISVALCCALCFVIDLSMVTDGGMYVFQLFDYYSASGTTLLWQAFWECVVVAWVYGADRFMDDIACMIGYRPCPWMKWCWSFFTPLVCMGIFIFNVVYYEPLVYNNTYVYPWWGEAMGWAFALSSMLCVPLHLLGCLLRAKGTMAERWQHLTQPIWGLHHLEYRAQDADVRGLTTLTPVSESSKVVVVESVM

SEQ ID NO: 848320 - protein, 635 aa, Homo sapiens; identical to SEQ ID NO: 848317

SEQ ID NO: 848321 - protein, 635 aa, Homo sapiens; identical to SEQ ID NO: 848317

SEQ ID NO: 848322 - protein, 71 aa, Homo sapiens
GDPGGFSMSSSPAALAAPDPAHLGPPPLGVPSSGRRCQGPDHPDPSVREQQGRRGGECHVTTQLTSPAHLW

SEQ ID NO: 848323 - protein, 635 aa, Homo sapiens; identical to SEQ ID NO: 848317

SEQ ID NO: 848324 - protein, 635 aa, Homo sapiens; identical to SEQ ID NO: 848317

SEQ ID NO: 848325 - protein, 635 aa, Homo sapiens; identical to SEQ ID NO: 848317

SEQ ID NO: 848326 - protein, 650 aa, Homo sapiens
VCSGRLYTVCAGQPVRHVPAAFAPGDRGPGRHCPFPVPITPTGALLPVSDSCDSLVDLVWPSVTYLALGTQSRVWPHPLGAPGQAGESPEQRRQCLELWDMASSLGDKVPRAACGKRGQTVWQLHLACLCLAQFHSPPAQPPPLSRRGGGPDPDPISRSLPGPPTPALPTHSYSSHSPRAPRLLSPLRRAPRGSPAPHRHASLQTNEAPRELPHCTWPGLPGRSLAPSFLWREPWLGGQWGPLNIPARKGDRRRWEWGCEGGGAQPPLSSLAPQIVYFTATFPYVVLVVLLVRGVLLPGALDGIIYYLKPDWSKLGSPQVWIDAGTQIFFSYAIGLGALTALGSYNRFNNNCYKDAIILALINSGTSFFAGFVVFSILGFMAAEQGVHISKVAESGPGLAFIAYPRAVTLMPVAPLWAALFFFMLLLLGLDSQFVGVEGFITGLLDLLPASYYFRFQREISVALCCALCFVIDLSMVTDGGMYVFQLFDYYSASGTTLLWQAFWECVVVAWVYGADRFMDDIACMIGYRPCPWMKWCWSFFTPLVCMGIFIFNVVYYEPLVYNNTYVYPWWGEAMGWAFALSSMLCVPLHLLGCLLRAKGTMAERWQHLTQPIWGLHHLEYRAQDADVRGLTTLTPVSESSKVVVVESVM

SEQ ID NO: 848327 - protein, 751 aa, Homo sapiens
GGDQTESSPKEGGGTESQAMLPTLQIQGPAAFAPGDRGPGRHCPFPVPITPTGALLPVSDSCDSLVDLVWPSVTYLALGTQSRVWPHPLGAPGQAGESPEQRRQCLELWDMASSLGDKVPRAACGKRGQTVWQLHLACLCLAQFHSPPAQPPPLSRRGGGPDPDPISRSLPGPPTPALPTHSYSSHSPRAPRLLSPLRRAPRGSPAPHRHASLQTNEAPRELPHCTWPGLPGRSLAPSFLWREPWLGGQWGPLNIPARKGDRRRWEWGCEGGGATASAEQPGPQIVYFTATFPYVVLVVLLVRGVLLPGALDGIIYYLKPDWSKLGSPQVWIDAGTQIFFSYAIGLGALTALGSYNRFNNNCYKDAIILALINSGTSFFAGFVVFSILGFMAAEQGVHISKVAESGPGLAFIAYPRAVTLMPVAPLWAALFFFMLLLLGLDSQVCMGLWDREPGGGRREGCRQGKGWRRCGARPELPWPQFVGVEGFITGLLDLLPASYYFRFQREISVALCCALCFVIDLSMVTDVSGVGGLPVTSGGRLPSSLTGLCPQGGMYVFQLFDYYSASGTTLLWQAFWECVVVAWVYGRSWLRAGLGDGGGEGRSPAWPSRLTSPQGADRFMDDIACMIGYRPCPWMKWCWSFFTPLVCMGIFIFNVVYYEPLVYNNTYVYPWWGEAMGWAFALSSMLCVPLHLLGCLLRAKGTMAERWQHLTQPIWGLHHLEYRAQDADVRGLTTLTPVSESSKVVVVESVM

SEQ ID NO: 848328 - protein, 614 aa, Homo sapiens
MAKKSAENGIYSVSGDEKKGPLIAPGPDGAPAKGDGPVGLGTPGGRLAVPPRETWTRQMDFIMSCVGFAVGLGNVWRFPYLCYKNGGGVFLIPYVLIALVGGIPIFFLEISLGQFMKAGSINVWNICPLFKGLGYASMVIVFYCNTYYIMVLAWGFYYLVKSFTTTLPWATCGHTWNTPDCVEIFRHEDCANASLANLTCDQLADRRSPVIEFWENKVLRLSGGLEVPGALNWEVTLCLLACWVLVYFCVWKGVKSTGKIVYFTATFPYVVLVVLLVRGVLLPGALDGIIYYLKPDWSKLGSPQVWIDAGTQIFFSYAIGLGALTALGSYNRFNNNCYKDAIILALINSGTSFFAGFVVFSILGFMAAEQGVHISKVAESGPGLAFIAYPRAVTLMPVAPLWAALFFFMLLLLGLDSQFVGVEGFITGLLDLLPASYYFRFQREISVALCCALCFVIDLSMVTDGGMYVFQLFDYYSASGTTLLWQAFWECVVVAWVYGADRFMDDIACMIGYRPCPWMKWCWSFFTPLVCMGIFIFKRLCTTEPLVLQSKQPYRLVAPAVPGGWSRPTGALCAPSRPLWFPVPVALFAAWPGSLPNPFRPGRSLPPFPLPGGP

SEQ ID NO: 848329 - protein, 144 aa, Homo sapiens
AARQIWARTGAALCRQPSAAPPPAPLWVRAGFRQQLSLTLCPANEGNCGGSAPSTPGRPERAARPSVSEELTAAERQIAELHAAACAAGQLNYVDPATGYVVLTQIAHLQRGECCGSACRHCPYGQVNVKDPSKKKQFNSYFYV

SEQ ID NO: 848330 - protein, 109 aa, Homo sapiens
STGVCWRSTPDRLPGYHQRKLQNSKDCCLSLPLEVLPQRVTHQMPARALLYEAGQLNYVDPATGYVVLTQIAHLQRGECCGSACRHCPYGQVNVKDPSKKKQFNSYFYV

SEQ ID NO: 848331 - protein, 144 aa, Homo sapiens; identical to SEQ ID NO: 848329

SEQ ID NO: 848332 - protein, 123 aa, Homo sapiens
AARQIWARTGAALCRQPSAAPPPAPLWVRAGFRQQLSLTLCPANEGNCGGSAPSTPGRPERAARPSAGQLNYVDPATGYVVLTQIAHLQRGECCGSACRHCPYGQVNVKDPSKKKQFNSYFYV

SEQ ID NO: 848333 - protein, 655 aa, Homo sapiens
MGTSPSSSTALASCSRIARRATATMIAGSLLLLGFLSTTTAQPEQKASNLIGTYRHVDRATGQVLTCDKCPAGTYVSEHCTNTSLRVCSSCPVGTFTRHENGIEKCHDCSQPCPWPMIEKLPCAALTDRECTCPPGMFQSNATCAPHTVCPVGWGVRKKGTETEDVRCKQCARGTFSDVPSSVMKCKAYTDCLSQNLVVIKPGTKETDNVCGTLPSFSSSTSPSPGTAIFPRPEHMETHEVPSSTYVPKGMNSTESNSSASVRPKVLSSIQEGTVPDNTSSARGKEDVNKTLPNLQVVNHQQGPHHRHILKLLPSMEATGGEKSSTPIKGPKRGHPRQNLHKHFDINEHLPWMIVLFLLLVLVVIVVCSIRKSSRTLKKGPRQDPSAIVEKAGLKKSMTPTQNREKWIYYCNGHGIDILKLVAAQVGSQWKDIYQFLCNASEREVAAFSNGYTADHERAYAALQHWTIRGPEASLAQLISALRQHRRNDVVEKIRGLMEDTTQLETDKLALPMSPSPLSPSPIPSPNAKLENSALLTVEPSPQDKNKGFFVDESEPLLRCDSTSSGSSALSRNGSFITKEKKDTVLRQVRLDPCDLQPIFDDMLHFLNPEELRVIEEIPQAEDKLDRLFEIIGVKSQEASQTLLDSVYSHLPDLL

SEQ ID NO: 848334 - protein, 655 aa, Homo sapiens; identical to SEQ ID NO: 848333

SEQ ID NO: 848335 - protein, 655 aa, Homo sapiens; identical to SEQ ID NO: 848333

SEQ ID NO: 848336 - protein, 340 aa, Homo sapiens
MEATGGEKSSTPIKGPKRGHPRQNLHKHFDINEHLPWMIVLFLLLVLVVIVVCSIRKSSRTLKKGPRQDPSAIVEKAGLKKSMTPTQNREKWIYYCNGHGIDILKLVAAQVGSQWKDIYQFLCNASEREVAAFSNGYTADHERAYAALQHWTIRGPEASLAQLISALRQHRRNDVVEKIRGLMEDTTQLETDKLALPMSPSPLSPSPIPSPNAKLENSALLTVEPSPQDKNKGFFVDESEPLLRCDSTSSGSSALSRNGSFITKEKKDTVLRQVRLDPCDLQPIFDDMLHFLNPEELRVIEEIPQAEDKLDRLFEIIGVKSQEASQTLLDSVYSHLPDLL

SEQ ID NO: 848337 - protein, 256 aa, Homo sapiens
MMMVVLELLALFLLCSYVTSSWFLFLSLPFCFFQLGFLSTTTAQPEQKASNLIGTYRHVDRATGQVLTCDKCPAGTYVSEHCTNTSLRVCSSCPVGTFTRHENGIEKCHDCSQPCPWPMIEKLPCAALTDRECTCPPGMFQSNATCAPHTVCPVGWGVRKKGTETEDVRCKQCARGTFSDVPSSVMKCKAYTDCLSQNLVVIKPGTKETDNVCGTLPSFSSSTSPSPGTAIFPRPEHMETHEVPSSTYVPKGNLTS

SEQ ID NO: 848338 - protein, 522 aa, Homo sapiens
MCRRRANVIPKTMGKMSPGHVRGLHGSSLMEDVRCKQCARGTFSDVPSSVMKCKAYTDCLSQNLVVIKPGTKETDNVCGTLPSFSSSTSPSPGTAIFPRPEHMETHEVPSSTYVPKGMNSTESNSSASVRPKVLSSIQEGTVPDNTSSARGKEDVNKTLPNLQVVNHQQGPHHRHILKLLPSMEATGGEKSSTPIKGPKRGHPRQNLHKHFDINEHLPWMIVLFLLLVLVVIVVCSIRKSSRTLKKGPRQDPSAIVEKAGLKKSMTPTQNREKWIYYCNGHGIDILKLVAAQVGSQWKDIYQFLCNASEREVAAFSNGYTADHERAYAALQHWTIRGPEASLAQLISALRQHRRNDVVEKIRGLMEDTTQLETDKLALPMSPSPLSPSPIPSPNAKLENSALLTVEPSPQDKNKGFFVDESEPLLRCDSTSSGSSALSRNGSFITKEKKDTVLRQVRLDPCDLQPIFDDMLHFLNPEELRVIEEIPQAEDKLDRLFEIIGVKSQEASQTLLDSVYSHLPDLL

SEQ ID NO: 848339 - protein, 625 aa, Homo sapiens
MGTSPSSSTALASCSRIARRATATMIAGSLLLLGFLSTTTAQPEQKASNLIGTYRHVDRATGQVLTCDKCPAGTYVSEHCTNTSLRVCSSCPVGTFTRHENGIEKCHDCSQPCPWPMIEKLPCAALTDRECTCPPGMFQSNATCAPHTVCPVGWGVRKKGTETEDVRCKQCARGTFSDVPSSVMKCKAYTDCLSQNLVVIKPGTKETDNVCGTLPSFSSSTSPSPGTAIFPRPEHMETHEVPSSTYVPKGMNSTESNSSASVRPKVLSSIQEGTVPDNTSSARGKEDVNKTLPNLQVVNHQQGPHHRHILKLLPSMEATGGEKSSTPIKGPKRGHPRQNLHKHFDINEHLPWMIVLFLLLVLVVIVVCSIRKSSRTLKKGPRQDPSAIVEKAGLKKSMTPTQNREKWIYYCNGHGIDILKLVAAQVGSQWKDIYQFLCNASEREVAAFSNGYTADHERAYAALQHWTIRGPEASLAQLISALRQHRRNDVVEKIRGLMEDTTQLETDKLALPMSPSPLSPSPIPSPNAKLENSALLTVEPSPQDKNKGFFVDESEPLLRCDSTSSGSSALSRNGSFITKEKKDTVLRQVRLDPCDLQPIFDDMLHFLNPEELRLLRSSSADAAHT

SEQ ID NO: 848340 - protein, 157 aa, Homo sapiens
MSGFLEGLRCSECIDWGEKRNTIASIAAGVLFFTGWWIIIDAAVIYPTMKDFNHSYHACGVIATIAFLMINAVSNGQVRGDSYSEGCLGQTGARIWLFVGFMLAFGSLIASMWILFGGYVAKEKDIVYPGIAVFFQNAFIFFGGLVFKFGRTEDLWQ

SEQ ID NO: 848341 - protein, 157 aa, Homo sapiens; identical to SEQ ID NO: 848340

SEQ ID NO: 848342 - protein, 109 aa, Homo sapiens [sequence omitted]

SEQ ID NO: 848343 - protein, 200 aa, Homo sapiens
ILGGKAQYYCFHCCWCTIFYRLVDYHRCSCYLSAPNGWTDLKKMSGFLEGLRCSECIDWGEKRNTIASIAAGVLFFTGWWIIIDAAVIYPTMKDFNHSYHACGVIATIAFLMINAVSNGQVRGDSYSEGCLGQTGARIWLFVGFMLAFGSLIASMWILFGGYVAKEKDIVYPGIAVFFQNAFIFFGGLVFKFGRTEDLWQ

SEQ ID NO: 848344 - protein, 109 aa, Homo sapiens
  misc_feature (2)..(2): Xaa can be any naturally occurring amino acid
  misc_feature (8)..(8): Xaa can be any naturally occurring amino acid
VXNSRGQXTRAGVITTIAFLMINAVSNGQVRGDSYSEGCLGQTGARIWLFVGFMLAFGSLIASMWILFGGYVAKEKDIVYPGIAVFFQNAFIFFGGLVFKFGRTEDLWQ

SEQ ID NO: 848345 - protein, 126 aa, Homo sapiens
MSGFLEGLRCSECIDWGEKRNTIASIAAGVLFFTGWWIIIDAAVIYPTMKDFNHSYHACGVIATIAFLMINAVSNGQVRGDSYSEGCLGQTEKDIVYPGIAVFFQNAFIFFGGLVFKFGRTEDLWQ

SEQ ID NO: 848346 - protein, 126 aa, Homo sapiens; identical to SEQ ID NO: 848345

SEQ ID NO: 848347 - protein, 157 aa, Homo sapiens; identical to SEQ ID NO: 848340

SEQ ID NO: 848348 - protein, 157 aa, Homo sapiens; identical to SEQ ID NO: 848340

SEQ ID NO: 848349 - protein, 212 aa, Homo sapiens
MTERGPHPPPEHPKTPGKSPDPPLQQLDKPKPREKSVTRPAPSARGAPAKGDLKKMSGFLEGLRCSECIDWGEKRNTIASIAAGVLFFTGWWIIIDAAVIYPTMKDFNHSYHACGVIATIAFLMINAVSNGQVRGDSYSEGCLGQTGARIWLFVGFMLAFGSLIASMWILFGGYVAKEKDIVYPGIAVFFQNAFIFFGGLVFKFGRTEDLWQ

SEQ ID NO: 848350 - protein, 140 aa, Homo sapiens
MSGFLEGLRCSECIDWGEKRNTIASIAAGVLFFTGWWIIIDAAVIYPTMKDFNHSYHACGVIATIAFLMINAVSNGQVRGDSYSEGCLGQTGARIWLFVGFMLAFGSLIASMWILFGGYVAKEGWFLSLAALKTYGSEHI

SEQ ID NO: 848351 - protein, 157 aa, Homo sapiens; identical to SEQ ID NO: 848340

SEQ ID NO: 848352 - protein, 167 aa, Homo sapiens
KRKKEQAMEGNRDEAEKCVEIAREALNAGNREKAQRFLQKAEKLYPLPSARALLEIIMKNGSTAGNSPHCRKPSGSGDQSKPNCTKDSTSGSGEGGKGYTKDQVDGVLSINKCKNYYEVLGVTKDAGDEDLKKAYRKLALKFHPDKNHAPGATDAFKSKVNLLKQFY

SEQ ID NO: 848353 - protein, 386 aa, Homo sapiens
KRKKEQAMEGNRDEAEKCVEIAREALNAGNREKAQRFLQKAEKLYPLPSARALLEIIMKNGSTAGNSPHCRKPSGSGDQSKPNCTKDSTSGSGEGGKGYTKDQVDGVLSINKCKNYYEVLGVTKDAGDEDLKKAYRKLALKFHPDKNHAPGATDAFKKIGNAYAVLSNPEKRKQYDLTGNEEQACNHQNNGRFNFHRGCEADITPEDLFNIFFGGGFPSGSVHSFSNGRAGYSQQHQHRHSGHEREEERGDGGFSVFIQLMPIIVLILVSLLSQLMVSNPPYSLYPRSGTGQTIKMQTENLGVVYYVNKDFKNEYKGMLLQKVEKSVEEDYVTNIRNNCWKERQQKTDMQYAAKVYRDDRLRRKADALSMDNCKELERLTSLYKGG

SEQ ID NO: 848354 - protein, 386 aa, Homo sapiens; identical to SEQ ID NO: 848353

SEQ ID NO: 848355 - protein, 386 aa, Homo sapiens; identical to SEQ ID NO: 848353

SEQ ID NO: 848356 - protein, 116 aa, Homo sapiens
KRKKEQAMEGNRDEAEKCVEIAREALNAGNREKAQRFLQKAEKLYPLPSARALLEIIMKNGSTAGNSPHCRKPSGSGDQSKPNCTKDSTSGSGEGGKGYTKDQVDGVLRALWILEH

SEQ ID NO: 848357 - protein, 386 aa, Homo sapiens; identical to SEQ ID NO: 848353

SEQ ID NO: 848358 - protein, 386 aa, Homo sapiens; identical to SEQ ID NO: 848353

SEQ ID NO: 848359 - protein, 386 aa, Homo sapiens; identical to SEQ ID NO: 848353

SEQ ID NO: 848360 - protein, 145 aa, Homo sapiens
  misc_feature (138)..(138): Xaa can be any naturally occurring amino acid
  misc_feature (145)..(145): Xaa can be any naturally occurring amino acid
MMQICDTYNQKHSLFNAMNRFIGAVNNMDQTVMVPSLLRDVPLADPGLDNDVGVEVGGSGGCLEERTPPVPDSGSANGSFFAPSRDMYSHYVLLKSIRNDIEWGVLHQPPPPAGSEEGSAEIKASVTGIEVRAQKLTXSSLALNX

SEQ ID NO: 848361 - protein, 182 aa, Homo sapiens
MQICDTYNQKHSLFNAMNRFIGAVNNMDQTVMVPSLLRDVPLADPGLDNDVGVEVGGSGGCLEERTPPVPDSGSANGSFFAPSRDMYSHYVLLKSIRNDIEWGVLHQPPPPAGSEEGSAWKSKDILVDLGHLEGADAGEEDLEQQFHYHLRGLHTVLSKLTRKANILTNRYKQEIGFGNWGH

SEQ ID NO: 848362 - protein, 182 aa, Homo sapiens; identical to SEQ ID NO: 848361

SEQ ID NO: 848363 - protein, 182 aa, Homo sapiens; identical to SEQ ID NO: 848361

SEQ ID NO: 848364 - protein, 182 aa, Homo sapiens; identical to SEQ ID NO: 848361

SEQ ID NO: 848365 - protein, 141 aa, Homo sapiens
GLLWLLTDSEVAKPPSLARTCVRSCRSGRDIPTLHLGRGTVSRLDVTVVCLYRSIRNDIEWGVLHQPPPPAGSEEGSAWKSKDILVDLGHLEGADAGEEDLEQQFHYHLRGLHTVLSKLTRKANILTNRYKQEIGFGNWGH

SEQ ID NO: 848366 - protein, 404 aa, Homo sapiens
MAAVPELLQQQEEDRSKLRSVSVDLNVDPSLQIDIPDALSERDKVKFTVHTKTTLPTFQSPEFSVTRQHEDFVWLHDTLIETTDYAGLIIPPAPTKPDFDGPREKMQKLGEGEGSMTKEEFAKMKQELEAEYLAVFKKTVSSHEVFLQRLSSHPVLSKDRNFHVFLEYDQDLSVRRKNTKEMFGGFFKSVVKSADEVLFTGVKEVDDFFEQEKNFLINYYNRIKDSCVKADKMTRSHKNVADDYIHTAACLHSLALEEPTVIKKYLLKVAELFEKLRKVEGRVSSDEDLKLTELLRYYMLNIEAAKDLLYRRTKALIDYENSNKALDKARLKSKDVKLAEAHQQECCQKFEQLSESAKEELINFKRKRVAAFRKNLIEMSELEIKHARNNVSLLQSCIDLFKNN

SEQ ID NO: 848367 - protein, 224 aa, Homo sapiens
PRQSFPRKDCIGQQQEEDRSKLRSVSVDLNVDPSLQIDIPDALSERDKVKFTVHTKTTLPTFQSPEFSVTRQHEDFVWLHDTLIETTDYAGLIIPPAPTKPDFDGPREKMQKLGEGEGSMTKEEFAKMKQELEAEYLAVFKKTVSSHEVFLQRLSSHPVLSKDRNFHVFLEYDQDLSVRRKNTKEMFGGFFKSVVKSADEVLFTGVKVSDLWLLEKIFYFIGNR

SEQ ID NO: 848368 - protein, 404 aa, Homo sapiens; identical to SEQ ID NO: 848366

SEQ ID NO: 848369 - protein, 299 aa, Homo sapiens
MQKLGEGEGSMTKEEFAKMKQELEAEYLAVFKKTVSSHEVFLQRLSSHPVLSKDRNFHVFLEYDQDLSVRRKNTKEMFGGFFKSVVKSADEVLFTGVKEVDDFFEQEKNFLINYYNRIKDSCVKADKMTRSHKNVADDYIHTAACLHSLALEEPTVIKKYLLKVAELFEKLRKVEGRVSSDEDLKLTELLRYYMLNIEAAKDLLYRRTKALIDYENSNKALDKARLKSKDVKLAEAHQQECCQKFEQLSESAKEELINFKRKRVAAFRKNLIEMSELEIKHARNNVSLLQSCIDLFKNN

SEQ ID NO: 848370 - protein, 372 aa, Homo sapiens
MAAVPELLQQQEEDRSKLRSVSVDLNVDPSLQIDIPDALSERDKVKFTVHTKTTLPTFQSPEFSVTRQHEDFVWLHDTLIETTDYAGLIIPPAPTKPDFDGPREKMQKLGEGEGSMTKEEFAKMKQELEAEYLAVFKKTVSSHEVFLQRLSSHPVLSKDRNFHVFLEYDQDLSVRRKNTKEMFGGFFKSVVKSADEVLFTGVKEVDDFFEQEKNFLINYYNRIKDSCVKADKMTRSHKNVADDYIHTAACLHSLALEEPTVIKKYLLKVAELFEKLRKVEGRVSSDEDLKLTELLRYYMLNIEAAKDLLYRRTKALIDYENSNKALDKARLKSKDVKLAEAHQQECCQKFEQLSESAKEGVQLKILPVSEIM

SEQ ID NO: 848371 - protein, 369 aa, Homo sapiens
MAAVPELLQQQEEDRSKTTLPTFQSPEFSVTRQHEDFVWLHDTLIETTDYAGLIIPPAPTKPDFDGPREKMQKLGEGEGSMTKEEFAKMKQELEAEYLAVFKKTVSSHEVFLQRLSSHPVLSKDRNFHVFLEYDQDLSVRRKNTKEMFGGFFKSVVKSADEVLFTGVKEVDDFFEQEKNFLINYYNRIKDSCVKADKMTRSHKNVADDYIHTAACLHSLALEEPTVIKKYLLKVAELFEKLRKVEGRVSSDEDLKLTELLRYYMLNIEAAKDLLYRRTKALIDYENSNKALDKARLKSKDVKLAEAHQQECCQKFEQLSESAKEELINFKRKRVAAFRKNLIEMSELEIKHARNNVSLLQSCIDLFKNN

SEQ ID NO: 848372 - protein, 404 aa, Homo sapiens; identical to SEQ ID NO: 848366

SEQ ID NO: 848373 - protein, 404 aa, Homo sapiens; identical to SEQ ID NO: 848366

SEQ ID NO: 848374 - protein, 397 aa, Homo sapiens
MAAVPELLQQQEEDRSKLRSVSVDLNVDPSLQIDIPDALSERDKVKFTVHTKTTLPTFQSPEFSVTRQHEDFVWLHDTLIETTDYAGLIIPPAPTKPDFDGPREKMQKLGEGEGSMTKEEFAKMKQELEAEYLAVFKKTVSSHEVFLQRLSSHPVLSKDRNFHVFLEYDQDLSVRRKNTKEMFGGFFKSVVKSADEVLFTGVKEVDDFFEQEKNFLINYYNRIKDSCVKADKMTRSHKNVADDYIHTAACLHSLALEEPTVIKKYLLKVAELFEKLRKVEGRVSSDEDLKLTELLRYYMLNIEAAKDLLYRRTKALIDYENSNKALDKARLKSKDVKLAEAHQQECCQKFEQLSESAKEELINFKRKRVAAFRKNLIEMSELEIKHARSCIDLFKNN

SEQ ID NO: 848375 - protein, 360 aa, Homo sapiens
MAAVPELLQQQEEDRSKLRSVSVDLNVDPSLQIDIPDALSERDKVKFTVHTKTTLPTFQSPEFSVTRQHEDFVWLHDTLIETTDYAGLIIPPAPTKPDFDGPREKMQKLGEGEGSMTKEEFAKMKQELEAEYLAVFKKTVSSHEVFLQRLSSHPVLSKDRNFHVFLEYDQDLSVRRKNTKEMFGGFFKSVVKSADEVLFTGVKEVDDFFEQEKNFLINYYNRIKDSCVKADKMTRSHKNVADDYIHTAACLHSLALEEPTVIKKYLLKVAELFEKLRKVEGRVSSDEDLKLTELLRYYMLNIEAAKDLLYRRTKALIDYENSNKALDKARLKSKDVKLAEAHQQECCQKFEQLSESAKEG

SEQ ID NO: 848376 - protein, 368 aa, Homo sapiens
MAAVPELLQQQEEDRSKLRSVSVDLNVDPSLQIDIPDALSERDKVKFTVHTKTTLPTFQSPEFSVTRQHEDFVWLHDTLIETTDYAGLIIPPAPTKPDFDGPREKMQKLGEGEGSMTKEEFAKMKQELEAEYLAVFKKTVSSHEVFLQRLSSHPVLSKDRNFHVFLEYDQDLSVRRKNTKEMFGGFFKSVVKSADEVLFTGVKEVDDFFEQEKNFLINYYNRIKDSCVKADKMTRSHKNVADDYIHTAACLHSLALEEPTVIKKYLLKVAELFEKLRKVEGRVSSDEDLKLTELLRYYMLNIEAAKDLLYRRTKALIDYENSNKALDKARLKSKDVKLAEAHQQECCQKFEHFGFERRLINSTERVED

SEQ ID NO: 848377 - protein, 436 aa, Homo sapiens
MAAVPELLQQQEEDRSKLRSVSVDLNVDPSLQIDIPDALSERDKVKFTVHTKTTLPTFQSPEFSVTRQHEDFVWLHDTLIETTDYAGLIIPPAPTKPDFDGPREKMQKLGEGEGSMTKEEFAKMKQELEAEYLAVFKKTVSSHEVFLQRLSSHPVLSKDRNFHVFLEYDQDLSVRRKNTKEMFGGFFKSVVKSADEVLFTGVKEVDDFFEQEKNFLINYYNRIKDSCVKADKMTRSHKNVADDYIHTAACLHSLALEEPTVIKKVPIGRLVAAYLKNLRTVRGSSFHHNDALQVKEGPSDTTWFNIESRARSPYIQTPTQARERIGNPTQEPGGKEPPGKEDTDDVNRVVVGSTPPEEGGLPTHVMTRLPATAAPKRTLFNQRTSERAPPNNMTASQGGATKRRAGRHPGTDDMVAHNDLFPTTEKQSGSTAIDLT

SEQ ID NO: 848378 - protein, 126 aa, Homo sapiens
MAAVPELLQQQEEDRSKVRSSQPQTPGRAALRAPGSLHSFPCASIGRGCSPPSPAREAPVRPGRPLSLVFTEGCPGESLWMSRILLGQNQRRGTLAPAQAPVPSGLGEMISGDPGMFFLKLSSASW

SEQ ID NO: 848379 - protein, 126 aa, Homo sapiens; identical to SEQ ID NO: 848378

SEQ ID NO: 848380 - protein, 73 aa, Homo sapiens
YPPPPTKNGNFLCFNLIEKNGVVNCENAEDRGRSQFGRVDEHAELESLQSSKRCRLEASGDESGSQRPLFWGA

SEQ ID NO: 848381 - protein, 299 aa, Homo sapiens; identical to SEQ ID NO: 848369

SEQ ID NO: 848382 - protein, 299 aa, Homo sapiens; identical to SEQ ID NO: 848369

SEQ ID NO: 848383 - protein, 441 aa, Homo sapiens
MAAVPELLQQQEEDRSKLRSVSVDLNVDPSLQIDIPDALSERDKVKFTVHTKTTLPTFQSPEFSVTRQHEDFVWLHDTLIETTDYAGLIPQEWSGCLLWTSKSRMRHQLENIAAGTRGSWFLPLLQIPPAPTKPDFDGPREKMQKLGEGEGSMTKEEFAKMKQELEAEYLAVFKKTVSSHEVFLQRLSSHPVLSKDRNFHVFLEYDQDLSVRRKNTKEMFGGFFKSVVKSADEVLFTGVKEVDDFFEQEKNFLINYYNRIKDSCVKADKMTRSHKNVADDYIHTAACLHSLALEEPTVIKKYLLKVAELFEKLRKVEGRVSSDEDLKLTELLRYYMLNIEAAKDLLYRRTKALIDYENSNKALDKARLKSKDVKLAEAHQQECCQKFEQLSESAKEELINFKRKRVAAFRKNLIEMSELEIKHARNNVSLLQSCIDLFKNN

SEQ ID NO: 848384 - protein, 299 aa, Homo sapiens; identical to SEQ ID NO: 848369

SEQ ID NO: 848385 - protein, 299 aa, Homo sapiens; identical to SEQ ID NO: 848369

SEQ ID NO: 848386 - protein, 397 aa, Homo sapiens; identical to SEQ ID NO: 848374

SEQ ID NO: 848387 - protein, 368 aa, Homo sapiens
MAAVPELLQQQEEDRSKLRSVSVDLNVDPSLQIDIPDALSERDKVKFTVHTKTTLPTFQSPEFSVTRQHEDFVWLHDTLIETTDYAGLIIPPAPTKPDFDGPREKMQKLGEGEGSMTKEEFAKMKQELEAEYLAVFKKTVSSHEVFLQRLSSHPVLSKDRNFHVFLEYDQDLSVRRKNTKEMFGGFFKSVVKSADEVLFTGVKEVDDFFEQEKNFLINYYNRIKDSCVKADKMTRSHKNVADDYIHTAACLHSLALEEPTVIKKYLLKVAELFEKLRKVEGRVSSDEDLKLTELLRYYMLNIEAAKDLLYRRTKALIDYENSNKALDKARLKSKDVKLAEAHQQECCQKFEQLSESAKEGVQLKILPN

SEQ ID NO: 848388 - protein, 367 aa, Homo sapiens
MAAVPELLQQQEEDRSKLRSVSVDLNVDPSLQIDIPDALSERDKVKFTVHTKIPPAPTKPDFDGPREKMQKLGEGEGSMTKEEFAKMKQELEAEYLAVFKKTVSSHEVFLQRLSSHPVLSKDRNFHVFLEYDQDLSVRRKNTKEMFGGFFKSVVKSADEVLFTGVKEVDDFFEQEKNFLINYYNRIKDSCVKADKMTRSHKNVADDYIHTAACLHSLALEEPTVIKKYLLKVAELFEKLRKVEGRVSSDEDLKLTELLRYYMLNIEAAKDLLYRRTKALIDYENSNKALDKARLKSKDVKLAEAHQQECCQKFEQLSESAKEELINFKRKRVAAFRKNLIEMSELEIKHARNNVSLLQSCIDLFKNN

SEQ ID NO: 848389 - protein, 404 aa, Homo sapiens; identical to SEQ ID NO: 848366

SEQ ID NO: 848390 - protein, 404 aa, Homo sapiens; identical to SEQ ID NO: 848366

SEQ ID NO: 848391 - protein, 372 aa, Homo sapiens; identical to SEQ ID NO: 848370

SEQ ID NO: 848392 - protein, 372 aa, Homo sapiens; identical to SEQ ID NO: 848370

SEQ ID NO: 848393 - protein, 290 aa, Homo sapiens
MAAVPELLQQQEEDRSKLRSVSVDLNVDPSLQIDIPDALSERDKVKFTVHTKTTLPTFQSPEFSVTRQHEDFVWLHDTLIETTDYAGLIIPPAPTKPDFDGPREKMQKLGEGEGSMTKEEFAKMKQELEAEYLAVFKKTVSSHEVFLQRLSSHPVLSKDRNFHVFLEYDQDLSVRRKNTKEMFGGFFKSVVKSADEVLFTGVKEVDDFFEQEKNFLINYYNRIKDSCVKADKMTRSHKNVADDYIHTAACLHSLALEEPTVIKKYLLKVAELFEKLRVRISVLVFIIYIL

SEQ ID NO: 848394 - protein, 220 aa, Homo sapiens
MAAVPELLQQQEEDRSKLRSVSVDLNVDPSLQIDIPDALSERDKVKFTVHTKTTLPTFQSPEFSVTRQHEDFVWLHDTLIETTDYAGLIIPPAPTKPDFDGPREKMQKLGEGEGSMTKEEFAKMKQELEAEYLAVFKKTVSSHEVFLQRLSSHPVLSKDRNFHVFLEYDQDLSVRRKNTKEMFGGFFKSVVKSADEVLFTGVKVSDLWLLEKIFYFIGNR

SEQ ID NO: 848395 - protein, 245 aa, Homo sapiens
RPRSRCRPPAPAVMLRAALPALLLPLLGLAAAAVADCPSSTWIQFQDSCYIFLQEAIKVESIEDVRNQCTDHGADMISIHNEEENAFILDTLKKQWKGPDDILLGMFYDTDDASFKWFDNSNMTFDKWTDQDDDEDLVDTCAFLHIKTGEWKKGNCEVSSVEGTLCKTAIPYKRKYLSDNHILISALVIASTVILTVLGAIIWFLYKKHSDSRFTTVFSTAPQSPYNEDCVLVVGEENEYPVQFD

SEQ ID NO: 848396 - protein, 245 aa, Homo sapiens; identical to SEQ ID NO: 848395

SEQ ID NO: 848397 - protein, 245 aa, Homo sapiens; identical to SEQ ID NO: 848395

SEQ ID NO: 848398 - protein, 245 aa, Homo sapiens; identical to SEQ ID NO: 848395

SEQ ID NO: 848399 - protein, 245 aa, Homo sapiens; identical to SEQ ID NO: 848395

SEQ ID NO: 848400 - protein, 257 aa, Homo sapiens
RPRSRCRPPAPAVMLRAALPALLLPLLGLAAAAVADCPSSTWIQFQDSCYIFLQEAIKVESIEDVRNQCTDHGADMISIHNEEENAFILDTLKKQWKGPDDILLGMFYDTDDASFKWFDNSNMTFDKWTDQDDDEDLVDTCAFLHIKTGVLTNGQGAVYLDEGALCPIRLPGHLRRLSAPPLLLLPTIFIIFLPFTFLFLPFLPLASLSPFPILSFPLIMYVVLIVTRALARRWRARLAVHVIRDFTFVLPVCLTNS

SEQ ID NO: 848401 - protein, 157 aa, Homo sapiens
RPRSRCRPPAPAVMLRAALPALLLPLLGLAAAAVAGKPLRSPSPGPCATAFAPFPTHALRPRAPEGGPQTQHPAGHPALPCTPVPRGSWLRVTSHPPALGEGRWPRIREGSVFLGVHILTADPTPRGGNPQIRPVGRRTEGLGVARRAPFQGNFGLK

SEQ ID NO: 848402 - protein, 245 aa, Homo sapiens; identical to SEQ ID NO: 848395

SEQ ID NO: 848403 - protein, 1218 aa, Homo sapiens
MSWSPDQELVLLATGQQTLIMMTKDFEPILEQQIHQDDFGESKFITVGWGRKETQFHGSEGRQAAFQMQMHESALPWDDHRPQVTWRGDGQFFAVSVVCPETGARKVRVWNREFALQSTSEPVAGLGPALAWKPSGSLIASTQDKPNQQDIVFFEKNGLLHGHFTLPFLKDEVKVNDLLWNADSSVLAVWLEDLQREESSIPKTCVQLWTVGNYHWYLKQSLSFSTCGKSKIVSLMWDPVTPYRLHVLCQGWHYLAYDWHWTTDRSVGDNSSDLSNVAVIDGNRVLVTVFRQTVVPPPMCTYQLLFPHPVNQVTFLAHPQKSNDLAVLDASNQISVYKCGDCPSADPTVKLGAVGGSGFKVCLRTPHLEKRYKIQFENNEDQDVNPLKLGLLTWIEEDVFLAVSHSEFSPRSVIHHLTAASSEMDEEHGQLNVSSSAAVDGVIISLCCNSKTKSVVLQLADGQIFKYLWESPSLAIKPWKNSGGFPVRFPYPCTQTELAMIGEEECVLGLTDRCRFFINDIEVASNITSFAVYDEFLLLTTHSHTCQCFCLRDASFKTLQAGLSSNHVSHGEVLRKVERGSRIVTVVPQDTKLVLQMPRGNLEVVHHRALVLAQIRKWLDKLMFKEAFECMRKLRINLNLIYDHNPKVFLGNVETFIKQIDSVNHINLFFTELKEEDVTKTMYPAPVTSSVYLSRDPDGNKIDLVCDAMRAVMESINPHKYCLSILTSHVKKTTPELEIVLQKVHELQGNAPSDPDAVSAEEALKYLLHLVDVNELYDHSLGTYDFDLVLMVAEKSQKDPKEYLPFLNTLKKMETNYQRFTIDKYLKRYEKAIGHLSKCGPEYFPECLNLIKDKNLYNEALKLYSPSSQQYQDISIAYGEHLMQEHMYEPAGLMFARCGAHEKALSAFLTCGNWKQALCVAAQLNFTKDQLVGLGRTLAGKLVEQRKHIDAAMVLEECAQDYEEAVLLLLEGAAWEEALRLVYKYNRLDIIETNVKPSILEAQKNYMAFLDSQTATFSRHKKRLLVVRELKEQAQQAGLDDEVPHGQESDLFSETSSVVSGSEMSGKYSHSNSRISARSSKNRRKAERKKHSLKEGSPLEDLALLEALSEVVQNTENLKDEVYHILKVLFLFEFDEQGRELQKAFEDTLQLMERSLPEIWTLTYQQNSATPVLGPNSTANSIMASYQQQKTSVPVLDAELFIPPKINRRTQWKLSLLD

SEQ ID NO: 848404 - protein, 615 aa, Homo sapiens
MRHHIEPWYSSDTEVVDQLMFKEAFECMRKLRINLNLIYDHNPKVFLGNVETFIKQIDSVNHINLFFTELKEEDVTKTMYPAPVTSSVYLSRDPDGNKIDLVCDAMRAVMESINPHKYCLSILTSHVKKTTPELEIVLQKVHELQGNAPSDPDAVSAEEALKYLLHLVDVNELYDHSLGTYDFDLVLMVAEKSQKDPKEYLPFLNTLKKMETNYQRFTIDKYLKRYEKAIGHLSKCGPEYFPECLNLIKDKNLYNEALKLYSPSSQQYQDISIAYGEHLMQEHMYEPAGLMFARCGAHEKALSAFLTCGNWKQALCVAAQLNFTKDQLVGLGRTLAGKLVEQRKHIDAAMVLEECAQDYEEAVLLLLEGAAWEEALRLVYKYNRLDIIETNVKPSILEAQKNYMAFLDSQTATFSRHKKRLLVVRELKEQAQQAGLDDEVPHGQESDLFSETSSVVSGSEMSGKYSHSNSRISARSSKNRRKAERKKHSLKEGSPLEDLALLEALSEVVQNTENLKDEVYHILKVLFLFEFDEQGRELQKAFEDTLQLMERSLPEIWTLTYQQNSATPVLGPNSTANSIMASYQQQKTSVPVLDAELFIPPKINRRTQWKLSLLD

SEQ ID NO: 848405 - protein, 983 aa, Homo sapiens
MRNLKLFRTLEFRDIQGPGNPQCFSLRTEQGTVLIGSEHGLIEVDPVSREVKNEVSLVAEGFLPEDGSGRIVGVQDLLDQESVCVATASGDVILCSLSTQQLECVGSVASGISVMSWSPDQELVLLATGQQTLIMMTKDFEPILEQQIHQDDFGESKFITVGWGRKETQFHGSEGRQAAFQMQMHESALPWDDHRPQVTWRGDGQFFAVSVVCPETGARKVRVWNREFALQSTSEPVAGLGPALAWKPSGSLIASTQDKPNQQDIVFFEKNGLLHGHFTLPFLKDEVKVNDLLWNADSSVLAVWLEDLQREESSIPKTCVQLWTVGNYHWYLKQSLSFSTCGKSKIVSLMWDPVTPYRLHVLCQGWHYLAYDWHWTTDRSVGDNSSDLSNVAVIDGNRVLVTVFRQTVVPPPMCTYQLLFPHPVNQVTFLAHPQKSNDLAVLDASNQISVYKCGDCPSADPTVKLGAVGGSGFKVCLRTPHLEKRYKIQFENNEDQDVNPLKLGLLTWIEEDVFLAVSHSEFSPRSVIHHLTAASSEMDEEHGQLNVSSSAAVDGVIISLCCNSKTKSVVLQLADGQIFKYLWESPSLAIKPWKNSGGFPVRFPYPCTQTELAMIGEEECVLGLTDRCRFFINDIEVASNITSFAVYDEFLLLTTHSHTCQCFCLRDASFKTLQAGLSSNHVSHGEVLRKVERGSRIVTVVPQDTKLVLQMPRGNLEVVHHRALVLAQIRKWLDKLMFKEAFECMRKLRINLNLIYDHNPKVFLGNVETFIKQIDSVNHINLFFTELKEEDVTKTMYPAPVTSSVYLSRDPDGNKIDLVCDAMRAVMESINPHKYCLSILTSHVKKTTPELEIVLQKVHELQGNAPSDPDAVSAEEALKYLLHLVDVNELYDHSLGTYDFDLVLMVAEKSQKDPKEYLPFLNTLKKMETNYQRFTIDKYLKRYEKAIGHLSKCGPEYFPECLNLIKDRYQHCLWGAPDAGAHV

SEQ ID NO: 848406 - protein, 369 aa, Homo sapiens
EYFRASLYKFLSFIKFKHSGKVLDISIAYGEHLMQEHMYEPAGLMFARCGAHEKALSAFLTCGNWKQALCVAAQLNFTKDQLVGLGRTLAGKLVEQRKHIDAAMVLEECAQDYEEAVLLLLEGAAWEEALRLVYKYNRLDIIETNVKPSILEAQKNYMAFLDSQTATFSRHKKRLLVVRELKEQAQQAGLDDEVPHGQESDLFSETSSVVSGSEMSGKYSHSNSRISARSSKNRRKAERKKHSLKEGSPLEDLALLEALSEVVQNTENLKDEVYHILKVLFLFEFDEQGRELQKAFEDTLQLMERSLPEIWTLTYQQNSATPVLGPNSTANSIMASYQQQKTSVPVLDAELFIPPKINRRTQWKLSLLD

SEQ ID NO: 848407 - protein, 212 aa, Homo sapiens [sequence omitted]

SEQ ID NO: 848408 - protein, 266 aa, Homo sapiens [sequence omitted]

SEQ ID NO: 848409 - protein, 212 aa, Homo sapiens [sequence omitted]

SEQ ID NO: 848410 - protein, 155 aa, Homo sapiens
MSGKYSHSNSRISARSSKNRRKAERKKHSLKEGSPLEDLALLEALSEVVQNTENLKDEVYHILKVLFLFEFDEQGRELQKAFEDTLQLMERSLPEIWTLTYQQNSATPVLGPNSTANSIMASYQQQKTSVPVLDAELFIPPKINRRTQWKLSLLD

SEQ ID NO: 848411 - protein, 1299 aa, Homo sapiens
MRNLKLFRTLEFRDIQGPGNPQCFSLRTEQGTVLIGSEHGLIEVDPVSREVKNEVSLVAEGFLPEDGSGRIVGVQDLLDQESVCVATASGDVILCSLSTQQLECVGSVASGISVMSWSPDQELVLLATGQQTLIMMTKDFEPILEQQIHQDDFGESKFITVGWGRKETQFHGSEGRQAAFQMQMHESALPWDDHRPQVTWRGDGQFFAVSVVCPETGARKVRVWNREFALQSTSEPVAGLGPALAWKPSGSLIASTQDKPNQQDIVFFEKNGLLHGHFTLPFLKDEVKVNDLLWNADSSVLAVWLEDLQREESSIPKTCVQLWTVGNYHWYLKQSLSFSTCGKSKIVSLMWDPVTPYRLHVLCQGWHYLAYDWHWTTDRSVGDNSSDLSNVAVIDGNRVLVTVFRQTVVPPPMCTYQLLFPHPVNQVTFLAHPQKSNDLAVLDASNQISVYKCGDCPSADPTVKLGAVGGSGFKVCLRTPHLEKRYKIQFENNEDQDVNPLKLGLLTWIEEDVFLAVSHSEFSPRSVIHHLTAASSEMDEEHGQLNVSSSAAVDGVIISLCCNSKTKSVVLQLADGQIFKYLWESPSLAIKPWKNSGGFPVRFPYPCTQTELAMIGEEECVLGLTDRCRFFINDIEVASNITSFAVYDEFLLLTTHSHTCQCFCLRDASFKTLQAGLSSNHVSHGEVLRKVERGSRIVTVVPQDTKLVLQMPRGNLEVVHHRALVLAQIRKWLDKLMFKEAFECMRKLRINLNLIYDHNPKVFLGNVETFIKQIDSVNHINLFFTELKEEDVTKTMYPAPVTSSVYLSRDPDGNKIDLVCDAMRAVMESINPHKYCLSILTSHVKKTTPELEIVLQKVHELQGNAPSDPDAVSAEEALKYLLHLVDVNELYDHSLGTYDFDLVLMVAEKSQKDPKEYLPFLNTLKKMETNYQRFTIDKYLKRYEKAIGHLSKCGPEYFPECLNLIKDKNLYNEALKLYSPSSQQYQDISIAYGEHLMQEHMYEPAGLMFARCGAHEKALSAFLTCGNWKQALCVAAQLNFTKDQLVGLGRTLAGKLVEQRKHIDAAMVLEECAQDYEEAVLLLLEGAAWEEALRLVYKYNRLDIIETNVKPSILEAQKNYMAFLDSQTATFSRHKKRLLVVRELKEQAQQAGLDDEVPHGQESDLFSETSSVVSGSEMSGKYSHSNSRISARSSKNRRKAERKKHSLKEGSPLEDLALLEALSEVVQNTENLKDEVYHILKVLFLFEFDEQGRELQKAFEDTLQLMERSLPEIWTLTYQQNSATPTWGEGVLLCCPSWS

SEQ ID NO: 848412 - protein, 1332 aa, Homo sapiens
MRNLKLFRTLEFRDIQGPGNPQCFSLRTEQGTVLIGSEHGLIEVDPVSREVKNEVSLVAEGFLPEDGSGRIVGVQDLLDQESVCVATASGDVILCSLSTQQLECVGSVASGISVMSWSPDQELVLLATGQQTLIMMTKDFEPILEQQIHQDDFGESKFITVGWGRKETQFHGSEGRQAAFQMQMHESALPWDDHRPQVTWRGDGQFFAVSVVCPETGARKVRVWNREFALQSTSEPVAGLGPALAWKPSGSLIASTQDKPNQQDIVFFEKNGLLHGHFTLPFLKDEVKVNDLLWNADSSVLAVWLEDLQREESSIPKTCVQLWTVGNYHWYLKQSLSFSTCGKSKIVSLMWDPVTPYRLHVLCQGWHYLAYDWHWTTDRSVGDNSSDLSNVAVIDGNRVLVTVFRQTVVPPPMCTYQLLFPHPVNQVTFLAHPQKSNDLAVLDASNQISVYKCGDCPSADPTVKLGAVGGSGFKVCLRTPHLEKRYKIQFENNEDQDVNPLKLGLLTWIEEDVFLAVSHSEFSPRSVIHHLTAASSEMDEEHGQLNVSSSAAVDGVIISLCCNSKTKSVVLQLADGQIFKYLWESPSLAIKPWKNSGGFPVRFPYPCTQTELAMIGEEECVLGLTDRCRFFINDIEVASNITSFAVYDEFLLLTTHSHTCQCFCLRDASFKTLQAGLSSNHVSHGEVLRKVERGSRIVTVVPQDTKLVLQMPRGNLEVVHHRALVLAQIRKWLDKLMFKEAFECMRKLRINLNLIYDHNPKVFLGNVETFIKQIDSVNHINLFFTELKEEDVTKTMYPAPVTSSVYLSRDPDGNKIDLVCDAMRAVMESINPHKYCLSILTSHVKKTTPELEIVLQKVHELQGNAPSDPDAVSAEEALKYLLHLVDVNELYDHSLGTYDFDLVLMVAEKSQKDPKEYLPFLNTLKKMETNYQRFTIDKYLKRYEKAIGHLSKCGPEYFPECLNLIKDKNLYNEALKLYSPSSQQYQDISIAYGEHLMQEHMYEPAGLMFARCGAHEKALSAFLTCGNWKQALCVAAQLNFTKDQLVGLGRTLAGKLVEQRKHIDAAMVLEECAQDYEEAVLLLLEGAAWEEALRLVYKYNRLDIIETNVKPSILEAQKNYMAFLDSQTATFSRHKKRLLVVRELKEQAQQAGLDDEVPHGQESDLFSETSSVVSGSEMSGKYSHSNSRISARSSKNRRKAERKKHSLKEGSPLEDLALLEALSEVVQNTENLKDEVYHILKVLFLFEFDEQGRELQKAFEDTLQLMERSLPEIWTLTYQQNSATPVLGPNSTANSIMASYQQQKTSVPVLDAELFIPPKINRRTQWKLSLLD

SEQ ID NO: 848413 - protein, 114 aa, Homo sapiens
MAFLDSQTATFSRHKKRLLVVRELKEQAQQAGLDDEVPHGQESDLFSETSSVVSGSEMSGKYSHSNSRISARSSKNRRKAERKKHSLKEGSPLEDLALLEALSEVVQNTENLKV

SEQ ID NO: 848414 - protein, 788 aa, Homo sapiens
MRNLKLFRTLEFRDIQGPGNPQCFSLRTEQGTVLIGSEHGLIEVDPVSREVKNEVSLVAEGFLPEDGSGRIVGVQDLLDQESVCVATASGDVILCSLSTQQLECVGSVASGISVMSWSPDQELVLLATGQQTLIMMTKDFEPILEQQIHQDDFGESKFITVGWGRKETQFHGSEGRQAAFQMQMHESALPWDDHRPQVTWRGDGQFFAVSVVCPETGARKVRVWNREFALQSTSEPVAGLGPALAWKPSGSLIASTQDKPNQQDIVFFEKNGLLHGHFTLPFLKDEVKVNDLLWNADSSVLAVWLEDLQREESSIPKTCVQLWTVGNYHWYLKQSLSFSTCGKSKIVSLMWDPVTPYRLHVLCQGWHYLAYDWHWTTDRSVGDNSSDLSNVAVIDGNRVLVTVFRQTVVPPPMCTYQLLFPHPVNQVTFLAHPQKSNDLAVLDASNQISVYKCGDCPSADPTVKLGAVGGSGFKVCLRTPHLEKRYKIQFENNEDQDVNPLKLGLLTWIEEDVFLAVSHSEFSPRSVIHHLTAASSEMDEEHGQLNVSSSAAVDGVIISLCCNSKTKSVVLQLADGQIFKYLWESPSLAIKPWKNSGGFPVRFPYPCTQTELAMIGEEECVLGLTDRCRFFINDIEVASNITSFAVYDEFLLLTTHSHTCQCFCLRDASFKTLQAGLSSNHVSHGEVLRKVERGSRIVTVVPQDTKLVLQMPRGNLEVVHHRALVLAQIRKWLDKLMFKEAFECMRKLRINLNLIYDHNPKVFLGNVETFIKQIDSVNHINLFFTELK

SEQ ID NO: 848415 - protein, 1332 aa, Homo sapiens; identical to SEQ ID NO: 848412

SEQ ID NO: 848416 - protein, 1332 aa, Homo sapiens; identical to SEQ ID NO: 848412

SEQ ID NO: 848417 - protein, 356 aa, Homo sapiens
EYFRASLYKFLSFIKFKHSGKVLDISIAYGEHLMQEHMYEPAGLMFARCGAHEKALSAFLTCGNWKQALCVAAQLNFTKDQLVGLGRTLAGKLVEQRKHIDAAMVLEECAQDYEEAVLLLLEGAAWEEALRLVYKYNRLDIIETNVKPSILEAQKNYMAFLDSQTATFSRHKKRLLVVRELKEQAQQAGLDDEVPHGQESDLFSETSSVVSGSEMSGKYSHSNSRISARSSKNRRKAERKKHSLKEGSPLEDLALLEALSEVVQNTENLKVGDEGIPIFYTGTPSLSRVRWNQGRAIHRQGLLAEILPGKFGWARVPFPETLSGALLSYPRQKFQVTPGDTRGPNSIRALCIDGES

SEQ ID NO: 848418 - protein, 1371 aa, Homo sapiens
MRNLKLFRTLEFRDIQGPGNPQCFSLRTEQGTVLIGSEHGLIEVDPVSREVKNEVSLVAEGFLPEDGSGRIVGVQDLLDQESVCVATASGDVILCSLSTQQLECVGSVASGISVMSWSPDQELVLLATGQQTLIMMTKDFEPILEQQIHQDDFGESKFITVGWGRKETQFHGSEGRQAAFQMQMHESALPWDDHRPQVTWRGDGQFFAVSVVCPETGARKVRVWNREFALQSTSEPVAGLGPALAWKPSGSLIASTQDKPNQQDIVFFEKNGLLHGHFTLPFLKDEVKVNDLLWNADSSVLAVWLEDLQREESSIPKTCVQLWTVGNYHWYLKQSLSFSTCGKSKIVSLMWDPVTPYRLHVLCQGWHYLAYDWHWTTDRSVGDNSSDLSNVAVIDGNRVLVTVFRQTVVPPPMCTYQLLFPHPVNQVTFLAHPQKSNDLAVLDASNQISVYKCGDCPSADPTVKLGAVGGSGFKVCLRTPHLEKRYKIQFENNEDQDVNPLKLGLLTWIEEDVFLAVSHSEFSPRSVIHHLTAASSEMDEEHGQLNVSSSAAVDGVIISLCCNSKTKSVVLQLADGQIFKYLWESPSLAIKPWKNSGGFPVRFPYPCTQTELAMIGEEECVLGLTDRCRFFINDIEVASNITSFAVYDEFLLLTTHSHTCQCFCLRDASFKTLQAGLSSNHVSHGEVLRKVERGSRIVTVVPQDTKLVLQMPRGNLEVVHHRALVLAQIRKWLDKLMFKEAFECMRKLRINLNLIYDHNPKVFLGNVETFIKQIDSVNHINLFFTELKEEDVTKTMYPAPVTSSVYLSRDPDGNKIDLVCDAMRAVMESINPHKYCLSILTSHVKKTTPELEIVLQKVHELQGNAPSDPDAVSAEEALKYLLHLVDVNELYDHSLGTYDFDLVLMVAEKSQKDPKEYLPFLNTLKKMETNYQRFTIDKYLKRYEKAIGHLSKCGPEYFPECLNLIKDKNLYNEALKLYSPSSQQYQDISIAYGEHLMQEHMYEPAGLMFARCGAHEKALSAFLTCGNWKQALCVAAQLNFTKDQLVGLGRTLAGKLVEQRKHIDAAMVLEECAQRWGVTSCPRWSETPGLKWSLHLCLPKCWDSMCKPLCLTKDYEEAVLLLLEGAAWEEALRLVYKYNRLDIIETNVKPSILEAQKNYMAFLDSQTATFSRHKKRLLVVRELKEQAQQAGLDDEVPHGQESDLFSETSSVVSGSEMSGKYSHSNSRISARSSKNRRKAERKKHSLKEGSPLEDLALLEALSEVVQNTENLKDEVYHILKVLFLFEFDEQGRELQKAFEDTLQLMERSLPEIWTLTYQQNSATPVLGPNSTANSIMASYQQQKTSVPVLDAELFIPPKINRRTQWKLSLLD

SEQ ID NO: 848419 - protein, 1234 aa, Homo sapiens
MRNLKLFRTLEFRDIQGPGNPQCFSLRTEQGTVLIGSEHGLIEVDPVSREVKNEVSLVAEGFLPEDGSGRIVGVQDLLDQESVCVATASGDVILCSLSTQQLECVGSVASGISVMSWSPDQELVLLATGQQTLIMMTKDFEPILEQQIHQDDFGESKFITVGWGRKETQFHGSEGRQAAFQMQMHESALPWDDHRPQVTWRGDGQFFAVSVVCPETGARKVRVWNREFALQSTSEPVAGLGPALAWKPSGSLIASTQDKPNQQDIVFFEKNGLLHGHFTLPFLKDEVKVNDLLWNADSSVLAVWLEDLQREESSIPKTCVQLWTVGNYHWYLKQSLSFSTCGKSKIVSLMWDPVTPYRLHVLCQGWHYLAYDWHWTTDRSVGDNSSDLSNVAVIDGNRVLVTVFRQTVVPPPMCTYQLLFPHPVNQVTFLAHPQKSNDLAVLDASNQISVYKCGDCPSADPTVKLGAVGGSGFKVCLRTPHLEKRYKIQFENNEDQDVNPLKLGLLTWIEEDVFLAVSHSEFSPRSVIHHLTAASSEMDEEHGQLNVSSSAAVDGVIISLCCNSKTKSVVLQLADGQIFKYLWESPSLAIKPWKNSGGFPVRFPYPCTQTELAMIGEEECVLGLTDRCRFFINDIEVASNITSFAVYDEFLLLTTHSHTCQCFCLRDASFKTLQAGLSSNHVSHGEVLRKVERGSRIVTVVPQDTKLVLQMPRGNLEVVHHRALVLAQIRKWLDKLMFKEAFECMRKLRINLNLIYDHNPKVFLGNVETFIKQIDSVNHINLFFTELKEEDVTKTMYPAPVTSSVYLSRDPDGNKIDLVCDAMRAVMESINPHKYCLSILTSHVKKTTPELEIVLQKVHELQGNAPSDPDAVSAEEALKYLLHLVDVNELYDHSLGTYDFDLVLMVAEKSQKDPKEYLPFLNTLKKMETNYQRFTIDKYLKRYEKAIGHLSKCGPEYFPECLNLIKDKNLYNEALKLYSPSSQQYQDISIAYGEHLMQEHMYEPAGLMFARCGAHEKALSAFLTCGNWKQALCVAAQLNFTKDQLVGLGRTLAGKLVEQRKHIDAAMVLEECAQDYEEAVLLLLEGAAWEEALRLVYKYNRLDIIETNVKPSILEAQKNYMAFLDSQTATFSRHKKRLLVVRELKEQAQQAGLDDEVPHGQESDLFSETSSVVSGSEMSGKYSHSNSRISARSSKNRRKAERKKHSLKEGSPLEDLALLEALSEVVQNTENLKV

SEQ ID NO: 848420 - protein, 1332 aa, Homo sapiens; identical to SEQ ID NO: 848412

SEQ ID NO: 848421 - protein, 639 aa, Homo sapiens
MEDSQDLNEQSVKKTCTESDVSQSQNSRSMEMQDLASPHTLVGGGDTPGSSKLEKSNLSSTSVTTNGTGGENMTVLNIADWLLSCNTPSSATMSLLAVKTEPLNSSETTATTGDGALDTFTGSVITSSGYSPRSAHQYSPQLYPSKPYPHILSTPAAQTMSAYAGQTQYSGMQQPAVYTAYSQTGQPYSLPTYDLGVMLPAIKTESGLSQTQSPLQSGCLSYSPGFSTPQPGQTPYSYQMPGSSFAPSSTIYANNSVSNSTNFSGSQQDYPSYTAFGQNQYAQYYSASTYGAYMTSNNTADGTPSSTSTYQLQESLPGLTNQPGEFDTMQSPSTPIKDLDERTCRSSGSKSRGRGRKNNPSPPPDSDLERVFVWDLDETIIVFHSLLTGSYAQKYGKDPPMAVTLGLRMEEMIFNLADTHLFFNDLEECDQVHIDDVSSDDNGQDLSTYSFATDGFHAAASSANLCLPTGVRGGVDWMRKLAFRYRRVKELYNTYKNNVGGLLGPAKRDAWLQLRAEIEGLTDSWLTNALKSLSIISTRSNCINVLVTTTQLIPALAKVLLYSLGGAFPIENIYSATKIGKESCFERIMQRFGRKVVYVVIGDGVEEEQAAKKHNMPFWRISSHSDLLALHQALELEYL

SEQ ID NO: 848422 - protein, 143 aa, Homo sapiens
SCPREVVAALERGKELREKPGSDDCGGWARSLIFFSSPFPPVAVRSFGSSSFPPPPRSRLLPPPRFSPACVRYLLWGGRRGCPVFTRGTARRGNFDTGRNENKYLITDALNRGWDRHFGNPRRTGRRGKCKNTGHSVKTGPSL

SEQ ID NO: 848423 - protein, 486 aa, Homo sapiens
MSAYAGQTQYSGMQQPAVYTAYSQTGQPYSLPTYDLGVMLPAIKTESGLSQTQSPLQSGCLSYSPGFSTPQPGQTPYSYQMPGSSFAPSSTIYANNSVSNSTNFSGSQQDYPSYTAFGQNQYAQYYSASTYGAYMTSNNTADGTPSSTSTYQLQESLPGLTNQPGTDLHPGEFDTMQSPSTPIKDLDERTCRSSGSKSRGRGRKNNPSPPPDSDLERVFVWDLDETIIVFHSLLTGSYAQKYGKDPPMAVTLGLRMEEMIFNLADTHLFFNDLEECDQVHIDDVSSDDNGQDLSTYSFATDGFHAAASSANLCLPTGVRGGVDWMRKLAFRYRRVKELYNTYKNNVGGLLGPAKRDAWLQLRAEIEGLTDSWLTNALKSLSIISTRSNCINVLVTTTQLIPALAKVLLYSLGGAFPIENIYSATKIGKESCFERIMQRFGRKVVYVVIGDGVEEEQAAKKHNMPFWRISSHSDLLALHQALELEYL

SEQ ID NO: 848424 - protein, 410 aa, Homo sapiens
MFFTMLGSSFAPSSTIYANNSVSNSTNFSGSQQDYPSYTAFGQNQYAQYYSASTYGAYMTSNNTADGTPSSTSTYQLQESLPGLTNQPGTDLHPGEFDTMQSPSTPIKDLDERTCRSSGSKSRGRGRKNNPSPPPDSDLERVFVWDLDETIIVFHSLLTGSYAQKYGKDPPMAVTLGLRMEEMIFNLADTHLFFNDLEECDQVHIDDVSSDDNGQDLSTYSFATDGFHAAASSANLCLPTGVRGGVDWMRKLAFRYRRVKELYNTYKNNVGGLLGPAKRDAWLQLRAEIEGLTDSWLTNALKSLSIISTRSNCINVLVTTTQLIPALAKVLLYSLGGAFPIENIYSATKIGKESCFERIMQRFGRKVVYVVIGDGVEEEQAAKKHNMPFWRISSHSDLLALHQALELEYL

SEQ ID NO: 848425 - protein, 583 aa, Homo sapiens
MEMQDLASPHTLVGGGDTPGSSKLEKSNLSSTSVTTNGTGVSLLAVKTEPLNSSETTATTGDGALDTFTGSVITSSGYSPRSAHQYSPQLYPSNSSNNVCLCRPDSVFGDAAASRLHSLLTDRTALQLAHLRFGCDVASHQDREWTFPNSVPITEWLPQLQPRVLYPTARPDTLFLPKPGSSFAPSSTIYANNSVSNSTNFSGSQQDYPSYTAFGQNQYAQYYSASTYGAYMTSNNTADGTPSSTSTYQLQESLPGLTNQPGTDLHPGEFDTMQSPSTPIKDLDERTCRSSGSKSRGRGRKNNPSPPPDSDLERVFVWDLDETIIVFHSLLTGSYAQKYGKDPPMAVTLGLRMEEMIFNLADTHLFFNDLEECDQVHIDDVSSDDNGQDLSTYSFATDGFHAAASSANLCLPTGVRGGVDWMRKLAFRYRRVKELYNTYKNNVGGLLGPAKRDAWLQLRAEIEGLTDSWLTNALKSLSIISTRSNCINVLVTTTQLIPALAKVLLYSLGGAFPIENIYSATKIGKESCFERIMQRFGRKVVYVVIGDGVEEEQAAKKHNMPFWRISSHSDLLALHQALELEYL

SEQ ID NO: 848426 - protein, 128 aa, Homo sapiens
TPLCGARKDPATKDPTVNGRGCGWVAAAGLAGPRAGHREAATPAPSANQDPPPRAAAQSPLGLKPSSAAPAPPARTRCGTRGAGGGVLARRCVRETVGANIRAFRRRGRAPFQPQSDGSGVVGPGPSV

SEQ ID NO: 848427 - protein, 198 aa, Homo sapiens
NRRANTTPSSSPRADRLAFPLVTIPPFHDPLKKAQYDKDNEKRTLLQCETGKIYSIKEFKEVEKVQLHSRFPQISNSRHFITPNEWLKLPTRYIESEFCRRRRLKVKVNFNDCSFDLKPLARAPYLLESQEEEKTVIYKNKGSSFLEREPLCYQEGNNPSAKEAISEGYFSSLSLSQEREEDQDGSPSPRLGLLKLEL

SEQ ID NO: 848428 - protein, 187 aa, Homo sapiens
MSKKDPNFLKVTIPPFHDPLKKAQYDKDNEKRTLLQCETGKIYSIKEFKEVEKVQLHSRFPQISNSRHFITPNEWLKLPTRYIESEFCRRRRLKVKVNFNDCSFDLKPLARAPYLLESQEEEKTVIYKNKGSSFLEREPLCYQEGNNPSAKEAISEGYFSSLSLSQEREEDQDGSPSPRLGLLKLEL

SEQ ID NO: 848429 - protein, 477 aa, Homo sapiens
TPLCGARKDPATKDPTVNGRGCGWVAAAGLAGPRAGHREAATPAPSANQDPPPRAAAQSPLGLKPSSAAPAPPARTRCGTRGAGGGVLARRCVRETVGANIRAFPDAGGLPSSRSRTAPGSSGRARVCSRTAAGLLALGGQRVFPGALLFVTTMKNVDSDDLVTGTLPKLKSSKEWLEPKPLCFMEVLAKEDTEAAIQSILYKENSVIKELDKYLQHHAFLNARRKEMLYKRWVDCVADPLQKKIIEKVCSHKKIKKRRQGELDGFLKHVNKKGNAFIEHYDPKEYDPFYMSKKDPNFLKVTIPPFHDPLKKAQYDKDNEKRTLLQCETGKIYSIKEFKEVEKVQLHSRFPQISNSRHFITPNEWLKLPTRYIESEFCRRRRLKVKVNFNDCSFDLKPLARAPYLLESQEEEKTVIYKNKGSSFLEREPLCYQEGNNPSAKEAISEGYFSSLSLSQEREEDQDGSPSPRLGLLKLEL

SEQ ID NO: 848430 - protein, 429 aa, Homo sapiens
  misc_feature (118)..(118): Xaa can be any naturally occurring amino acid
TPLCGARKDPATKDPTVNGRGCGWVAAAGLAGPRAGHREAATPAPSANQDPPPRAAAQSPLGLKPSSAAPAPPARTRCGTRGAGGGVLARAACRSPGKNGWGPAPQTQFSPGGFPPAXETGRGPGLPSSRSRTAPGSSGRARVCSRTAAGLLALGGQRVFPGALLFVTTMKNVDSDDLVTGTLPKLKSSKEWLEPKPLCFMEVLAKEDTEAAIQSILYKENSVIKGNAFIEHYDPKEYDPFYMSKKDPNFLKVTIPPFHDPLKKAQYDKDNEKRTLLQCETGKIYSIKEFKEVEKVQLHSRFPQISNSRHFITPNEWLKLPTRYIESEFCRRRRLKVKVNFNDCSFDLKPLARAPYLLESQEEEKTVIYKNKGSSFLEREPLCYQEGNNPSAKEAISEGYFSSLSLSQEREEDQDGSPSPRLGLLKLEL

SEQ ID NO: 848431 - protein, 187 aa, Homo sapiens; identical to SEQ ID NO: 848428

SEQ ID NO: 848432 - protein, 350 aa, Homo sapiens
TPLCGARKDPATKDPTVNGRGCGWVAAAGLAGPRAGHREAATPAPSANQDPPPRAAAQSPLGLKPSSAAPAPPARTRCGTRGAGGGVLARRCVRETVLAKEDTEAAIQSILYKENSVIKELDKYLQHHAFLNARRKEMLYKRWVDCVADPLQKKIIEKVCSHKKIKKRRQGELDGFLKHVNKKGNAFIEHYDPKEYDPFYMSKKDPNFLKVTIPPFHDPLKKAQYDKDNEKRTLLQCETGKIYSIKEFKEVEKVQLHSRFPQISNSRHFITPNEWLKLPTRYIESEFCRRRRNKGSSFLEREPLCYQEGNNPSAKEAISEGYFSSLSLSQEREEDQDGSSLCRCDHPSNS

SEQ ID NO: 848433 - protein, 130 aa, Homo sapiens
GVSELIECEQVGHNGERPPGKIYSIKEFKEVEKVQLHSRFPQISNSRHFITPNEWLKLPTRYIESEFCRRRRNKGSSFLEREPLCYQEGNNPSAKEAISEGYFSSLSLSQEREEDQDGSSLCRCDHPSNS

SEQ ID NO: 848434 - protein, 387 aa, Homo sapiens
TPLCGARKDPATKDPTVNGRGCGWVAAAGLAGPRAGHREAATPAPSANQDPPPRAAAQSPLGLKPSSAAPAPPARTRCGTRGAGGGVLARRCVRETVLAKEDTEAAIQSILYKENSVIKELDKYLQHHAFLNARRKEMLYKRWVDCVADPLQKKIIEKVCSHKKIKKRRQGELDGFLKHVNKKGNAFIEHYDPKEYDPFYMSKKDPNFLKVTIPPFHDPLKKAQYDKDNEKRTLLQCETGKIYSIKEFKEVEKVQLHSRFPQISNSRHFITPNEWLKLPTRYIESEFCRRRRLKVKVNFNDCSFDLKPLARAPYLLESQEEEKTVIYKNKGSSFLEREPLCYQEGNNPSAKEAISEGYFSSLSLSQEREEDQDGSPSPRLGLLKLEL

SEQ ID NO: 848435 - protein, 385 aa, Homo sapiens
TPLCGARKDPATKDPTVNGRGCGWVAAAGLAGPRAGHREAATPAPSANQDPPPRAAAQSPLGLKPSSAAPAPPARTRCGTRGAGGGVLARRCVRETVLAKEDTEAAIQSILYKENSVIKELDKYLQHHAFLNARRKEMLYKRWVDCVADPLQKKIIEKVCSHKKIKKRRQGELDGFLKHVNKKGNAFIEHYDPKEYDPFYMSKKDPNFLKVTIPPFHDPLKKAQYDKDNEKRTLLQCETGKIYSIKEFKEVEKVQLHSRFPQISNSRHFITPNEWLKLPTRYIESEFCRRRRLKVKVNFNDCSFDLKPLARAPYLLESQEEEKTVIYKNKGSSFLEREPLCYQEGNNPSAKEAISEGYFSSLSLSQEREEDQDGFQQPRSTHPDP

SEQ ID NO: 848436 - protein, 68 aa, Homo sapiens
PRPHRQGAAFRFRAGGRGTARVRRPPKAAGPKPELLPLRRPRGWGSRFRSGPRARGRRQVKRLLSSPS

SEQ ID NO: 848437 - protein, 86 aa, Homo sapiens
PRPHRQGAAFRFRAGGRGTARVRRPPKAAGPKPELLPLRRPRGWGSRFRSGPRARGRRQGEAVDAEARENLLLLLQRKWLGQAVEE

SEQ ID NO: 848438 - protein, 465 aa, Homo sapiens
MAHVRHFRTLVSGFYFWEAALLLSLVATKETDSARSRSAPMSPSDFLDKLMGRTSGYDARIRPNFKGPPVNVTCNIFINSFGSIAETTMDYRVNIFLRQKWNDPRLAYSEYPDDSLDLDPSMLDSIWKPDLFFANEKGANFHEVTTDNKLLRIFKNGNVLYSIRLTLTLSCPMDLKNFPMDVQTCIMQLESFGYTMNDLIFEWQDEAPVQVAEGLTLPQFLLKEEKDLRYCTKHYNTGKFTCIEVRFHLERQMGYYLIQMYIPSLLIVILSWVSFWINMDAAPARVALGITTVLTMTTQSSGSRASLPKVSYVKAIDIWMAVCLLFVFSALLEYAAVNFVSRQHKELLRFRRKRKNKTEAFALEKFYRFSDMDDEVRESRFSFTAYGMGPCLQAKDGMTPKGPNHPVQVMPKSPDEMRKVFIDRAKKIDTISRACFPLAFLIFNIFYWVIYKILRHEDIHHQQQD

SEQ ID NO: 848439 - protein, 193 aa, Homo sapiens
MAHVRHFRTLVSGFYFWEAALLLSLVATKETDSARSRSAPMSPSDFLDKLMGRTSGYDARIRPNFKGPPVNVTCNIFINSFGSIAETTMDYRVNIFLRQKWNDPRLAYSEYPDDSLDLDPSMLDSIWKPDLFFANEKGANFHEVTTDNKLLRIFKNGNVLYSISMNSNETDGLSAPRFCLLYPGLHNPKLNFF

SEQ ID NO: 848440 - protein, 240 aa, Homo sapiens
MAHVRHFRTLVSGFYFWEAALLLSLVATKETDSARSRSAPMSPSDFLDKLMGRTSGYDARIRPNFKGPPVNVTCNIFINSFGSIAETTMDYRVNIFLRQKWNDPRLAYSEYPDDSLDLDPSMLDSIWKPDLFFANEKGANFHEVTTDNKLLRIFKNGNVLYSIRLTLTLSCPMDLKNFPMDVQTCIMQLESFGYTMNDLIFEWQDEAPVQVAEGLTLPQFLLKEEKDLRYCTKHYNTGRG

SEQ ID NO: 848441 - protein, 450 aa, Homo sapiens
MAHVRHFRTLVSGFYFWEAALLLSLVATKETDSARSRSAPMSPSDFLDKLMGRTSGYDARIRPNFKGPPVNVTCNIFINSFGSIAETTMDYRVNIFLRQKWNDPRLAYSEYPDDSLDLDPSMLDSIWKPDLFFANEKGANFHEVTTDNKLLRIFKNGNVLYSIRLTLTLSCPMDLKNFPMDVQTCIMQLESFGYTMNDLIFEWQDEAPVQVAEGLTLPQFLLKEEKDLRYCTKHYNTGKFTCIEVRFHLERQMGYYLIQMYIPSLLIVILSWVSFWINMDAAPARVALGITTVLTMTTQSSGSRASLPKVSYVKAIDIWMAVCLLFVFSALLEYAAVNFVSRQHKELLRFRRKRKNKDDEVRESRFSFTAYGMGPCLQAKDGMTPKGPNHPVQVMPKSPDEMRKVFIDRAKKIDTISRACFPLAFLIFNIFYWVIYKILRHEDIHHQQQD

SEQ ID NO: 848442 - protein, 127 aa, Homo sapiens
KGQISKLYQHSLKDYRVNIFLRQKWNDPRLAYSEYPDDSLDLDPSMLDSIWKPDLFFANEKGANFHEVTTDNKLLRIFKNGNVLYSIRLTLTLSCPMDLKNFPMDVQTCIMQLESCLGNLGLKPKRE

SEQ ID NO: 848443 - protein, 192 aa, Homo sapiens
YVGTDSLNYHRYTDYRVNIFLRQKWNDPRLAYSEYPDDSLDLDPSMLDSIWKPDLFFANEKGANFHEVTTDNKLLRIFLNGRCSLFNKDYRVNIFLRQKWNDPRLAYSEYPDDSLDLDPSMLDSIWKPDLFFANEKGANFHEVTTDNKLLRIFKNGNVLYSISMNSNETDGLSAPRFCLLYPGLHNPKLNFF

SEQ ID NO: 848444 - protein, 670 aa, Homo sapiens
MNQVTDWVDPSFDDFLECSGVSTITATSLGVNNSSHRRKNGPSTLESSRFPARKRGNLSSLEQIYGLENSKEYLSENEPWVDKYKPETQHELAVHKKKIEEVETWLKAQVLERQPKQGGSILLITGPPGCGKTTTLKILSKEHGIQVQEWINPVLPDFQKDDFKGMFNTESSFHMFPYQSQIAVFKEFLLRATKYNKLQMLGDDLRTDKKIILVEDLPNQFYRDSHTLHEVLRKYVRIGRCPLIFIISDSLSGDNNQRLLFPKEIQEECSISNISFNPVAPTIMMKFLNRIVTIEANKNGGKITVPDKTSLELLCQGCSGDIRSAINSLQFSSSKGENNLRPRKKGMSLKSDAVLSKSKRRKKPDRVFENQEVQAIGGKDVSLFLFRALGKILYCKRASLTELDSPRLPSHLSEYERDTLLVEPEEVVEMSHMPGDLFNLYLHQNYIDFFMEIDDIVRASEFLSFADILSGDWNTRSLLREYSTSIATRGVMHSNKARGYAHCQGGGSSFRPLHKPQWFLINKKYRENCLAAKALFPDFCLPALCLQTQLLPYLALLTIPMRNQAQISFIQDIGRLPLKRHFGRLKMEALTDREHGMIDPDSGDEAQLNGGHSAEESLGEPTQATVPETWSLPLSQNSASELPASQPQPFSAQGDMEENIIIEDYESDGT

SEQ ID NO: 848445 - protein, 670 aa, Homo sapiens; identical to SEQ ID NO: 848444

SEQ ID NO: 848446 - protein, 670 aa, Homo sapiens; identical to SEQ ID NO: 848444

SEQ ID NO: 848447 - protein, 681 aa, Homo sapiens
MSKTFLRPKVSSTKVTDWVDPSFDDFLECSGVSTITATSLGVNNSSHRRKNGPSTLESSRFPARKRGNLSSLEQIYGLENSKEYLSENEPWVDKYKPETQHELAVHKKKIEEVETWLKAQVLERQPKQGGSILLITGPPGCGKTTTLKILSKEHGIQVQEWINPVLPDFQKDDFKGMFNTESSFHMFPYQSQIAVFKEFLLRATKYNKLQMLGDDLRTDKKIILVEDLPNQFYRDSHTLHEVLRKYVRIGRCPLIFIISDSLSGDNNQRLLFPKEIQEECSISNISFNPVAPTIMMKFLNRIVTIEANKNGGKITVPDKTSLELLCQGCSGDIRSAINSLQFSSSKGENNLRPRKKGMSLKSDAVLSKSKRRKKPDRVFENQEVQAIGGKDVSLFLFRALGKILYCKRASLTELDSPRLPSHLSEYERDTLLVEPEEVVEMSHMPGDLFNLYLHQNYIDFFMEIDDIVRASEFLSFADILSGDWNTRSLLREYSTSIATRGVMHSNKARGYAHCQGGGSSFRPLHKPQWFLINKKYRENCLAAKALFPDFCLPALCLQTQLLPYLALLTIPMRNQAQISFIQDIGRLPLKRHFGRLKMEALTDREHGMIDPDSGDEAQLNGGHSAEESLGEPTQATVPETWSLPLSQNSASELPASQPQPFSAQGDMEENIIIEDYESDGT

SEQ ID NO: 848448 - protein, 670 aa, Homo sapiens; identical to SEQ ID NO: 848444

SEQ ID NO: 848449 - protein, 542 aa, Homo sapiens
ENCLNLGGGGCSEPRLRHCTPAWATEQDSVSKQTNQTLITEESSFHMFPYQSQIAVFKEFLLRATKYNKLQMLGDDLRTDKKIILVEDLPNQFYRDSHTLHEVLRKYVRIGRCPLIFIISDSLSGDNNQRLLFPKEIQEECSISNISFNPVAPTIMMKFLNRIVTIEANKNGGKITVPDKTSLELLCQGCSGDIRSAINSLQFSSSKGENNLRPRKKGMSLKSDAVLSKSKRRKKPDRVFENQEVQAIGGKDVSLFLFRALGKILYCKRASLTELDSPRLPSHLSEYERDTLLVEPEEVVEMSHMPGDLFNLYLHQNYIDFFMEIDDIVRASEFLSFADILSGDWNTRSLLREYSTSIATRGVMHSNKARGYAHCQGGGSSFRPLHKPQWFLINKKYRENCLAAKALFPDFCLPALCLQTQLLPYLALLTIPMRNQAQISFIQDIGRLPLKRHFGRLKMEALTDREHGMIDPDSGDEAQLNGGHSAEESLGEPTQATVPETWSLPLSQNSASELPASQPQPFSAQGDMEENIIIEDYESDGT

SEQ ID NO: 848450 - protein, 102 aa, Homo sapiens
MTKDIGRLPLKRHFGRLKMEALTDREHGMIDPDSGDEAQLNGGHSAEESLGEPTQATVPETWSLPLSQNSASELPASQPQPFSAQGDMEENIIIEDYESDGT

SEQ ID NO: 848451 - protein, 670 aa, Homo sapiens; identical to SEQ ID NO: 848444

SEQ ID NO: 848452 - protein, 670 aa, Homo sapiens; identical to SEQ ID NO: 848444

SEQ ID NO: 848453 - protein, 670 aa, Homo sapiens; identical to SEQ ID NO: 848444

SEQ ID NO: 848454 - protein, 505 aa, Homo sapiens
MFNTESSFHMFPYQSQIAVFKEFLLRATKYNKLQMLGDDLRTDKKIILVEDLPNQFYRDSHTLHEVLRKYVRIGRCPLIFIISDSLSGDNNQRLLFPKEIQEECSISNISFNPVAPTIMMKFLNRIVTIEANKNGGKITVPDKTSLELLCQGCSGDIRSAINSLQFSSSKGENNLRPRKKGMSLKSDAVLSKSKRRKKPDRVFENQEVQAIGGKDVSLFLFRALGKILYCKRASLTELDSPRLPSHLSEYERDTLLVEPEEVVEMSHMPGDLFNLYLHQNYIDFFMEIDDIVRASEFLSFADILSGDWNTRSLLREYSTSIATRGVMHSNKARGYAHCQGGGSSFRPLHKPQWFLINKKYRENCLAAKALFPDFCLPALCLQTQLLPYLALLTIPMRNQAQISFIQDIGRLPLKRHFGRLKMEALTDREHGMIDPDSGDEAQLNGGHSAEESLGEPTQATVPETWSLPLSQNSASELPASQPQPFSAQGDMEENIIIEDYESDGT

SEQ ID NO: 848455 - protein, 584 aa, Homo sapiens
MNQHELAVHKKKIEEVETWLKAQVLERQPKQGGSILLITGPPGCGKTTTLKILSKEHGIQVQEWINPVLPDFQKDDFKGMFNTESSFHMFPYQSQIAVFKEFLLRATKYNKLQMLGDDLRTDKKIILVEDLPNQFYRDSHTLHEVLRKYVRIGRCPLIFIISDSLSGDNNQRLLFPKEIQEECSISNISFNPVAPTIMMKFLNRIVTIEANKNGGKITVPDKTSLELLCQGCSGDIRSAINSLQFSSSKGENNLRPRKKGMSLKSDAVLSKSKRRKKPDRVFENQEVQAIGGKDVSLFLFRALGKILYCKRASLTELDSPRLPSHLSEYERDTLLVEPEEVVEMSHMPGDLFNLYLHQNYIDFFMEIDDIVRASEFLSFADILSGDWNTRSLLREYSTSIATRGVMHSNKARGYAHCQGGGSSFRPLHKPQWFLINKKYRENCLAAKALFPDFCLPALCLQTQLLPYLALLTIPMRNQAQISFIQDIGRLPLKRHFGRLKMEALTDREHGMIDPDSGDEAQLNGGHSAEESLGEPTQATVPETWSLPLSQNSASELPASQPQPFSAQGDMEENIIIEDYESDGT

SEQ ID NO: 848456 - protein, 505 aa, Homo sapiens; identical to SEQ ID NO: 848454

SEQ ID NO: 848457 - protein, 105 aa, Homo sapiens
NTLQVLQKQKLQHRKTFKVNRLARHLPLSNGGIKTLPVWGRDKVVVTEILLVVLLDAGAAGVGWLFTGEYISSHLLLFSLQGNYFITNWWQLAAVATAAAGICFL

SEQ ID NO: 848458 - protein, 83 aa, Homo sapiens
MSPAGGPQFCARSPVFLRSPGVVAPSSGSARCNKSKRTQGAGTLFTPPFVARGTTVPAPGGPLGRKEPLSFRGGGPHYVRPPL

SEQ ID NO: 848459 - protein, 243 aa, Homo sapiens
MCSRGWDSCLALELLLLPLSLLVTSIQGHLVHMTVVSGSNVTLNISESLPENYKQLTWFYTFDQKIVEWDSRKSKYFESKFKGRVRLDPQSGALYISKVQKEDNSTYIMRVLKKTGNEQEWKIKLQVLDPVPKPVIKIEKIEDMDDNCYLKLSCVIPGESVNYTWYGDKRPFPKELQNSVLETTLMPHNYSRCYTCQVSNSVSSKNGTVCLSPPCTLARSFGVEWIASWLVVTVPTILGLLLT

SEQ ID NO: 848460 - protein, 137 aa, Homo sapiens [sequence omitted]

SEQ ID NO: 848461 - protein, 163 aa, Homo sapiens
MCSRGWDSCLALELLLLPLSLLVTSIQGHLVHMTVVSGSNVTLNISESLPENYKQLTWFYTFDQKIVEWDSRKSKYFESKFKGRVRLDPQSGALYISKVQKEDNSTYIMRVLKKTGNEQEWKIKLQVLELLSETVMCDTWRVCKLHLVWGQKALPKGAPEQCA

SEQ ID NO: 848462 - protein, 169 aa, Homo sapiens
MCSRGWDSCLALELLLLPLSLLVTSIQGHLVHMTVVSGSNVTLNISESLPENYKQLTWFYTFDQKIVEWDSRKSKYFESKFKGRVRLDPQSGALYISKVQKEDNSTYIMRVLKKTGNEQEWKIKLQVLGESGEPKSKSPLQWPQMDHCRASWEAWGTLGEEERKTSGQV

SEQ ID NO: 848463 - protein, 243 aa, Homo sapiens; identical to SEQ ID NO: 848459

SEQ ID NO: 848464 - protein, 211 aa, Homo sapiens
MTVVSGSNVTLNISESLPENYKQLTWFYTFDQKIVEWDSRKSKYFESKFKGRVRLDPQSGALYISKVQKEDNSTYIMRVLKKTGNEQEWKIKLQVLDPVPKPVIKIEKIEDMDDNCYLKLSCVIPGESVNYTWYGDKRPFPKELQNSVLETTLMPHNYSRCYTCQVSNSVSSKNGTVCLSPPCTLARSFGVEWIASWLVVTVPTILGLLLT

SEQ ID NO: 848465 - protein, 225 aa, Homo sapiens
MCSRGWDSCLALELLLLPLSLLVTSIQGHLVHMTVVSGSNVTLNISESLPENYKQLTWFYTFDQKIVEWDSRKSKYFESKFKGRVRLDPQSGALYISKVQKEDNSTYIMRVLKKTGNEQEWKIKLQVLDPVPKPVIKIEKIEDMDDNCYLKLSCVIPGESVNYTWYGDPHNYSRCYTCQVSNSVSSKNGTVCLSPPCTLARSFGVEWIASWLVVTVPTILGLLLT

SEQ ID NO: 848466 - protein, 160 aa, Homo sapiens
MKAQENEGHGVGGGTSAQVLPAASLIQMPLPSLRRLRSVHCEPRTVTSTMSCQQVTALAVAPGSCAVSGLFDPCVPLKRHDLHGQCLFSWPLSEPNAVLVRAVLVGRGWAQRNQVARAAGGGTWSRTRGAGTTSNPGDILDSVKDKQSRTLIKAVKTFYS

SEQ ID NO: 848467 - protein, 342 aa, Homo sapiens
PPISAGSRKPPRTSSPGRGRGSCAWRKPRNPQRPSMAWSLGSWLGGCLLVSALGMVPPPAAFAKGNLTFTAQYLSYRIFQDKCMNTTLTECDFSSLSKYGDHTLRVRAEFADEHSDWVNITFCPVDDTIIGPPGMQVEVLADSLHMRFLAPKIENEYETWTMKNVYNSWTYNVQYWKNGTDEKFQITPQYDFEVLRNLEPWTTYCVQVRGFLPDRNKAGEWSEPVCEQTTHDETVPSWMVAVILMASVFMVCLALLGCFALLWCVYKKTKYAFSPRNSLPQHLKEFLGHPHHNTLLFFSFPLSDENDVFDKLSVIAEDSESGKQNPGDSCSLGTPPGQGPQS

SEQ ID NO: 848468 - protein, 257 aa, Homo sapiens
PPISAGSRKPPRTSSPGRGRGSCAWRKPRNPQRPSMAWSLGSWLGGCLLVSALGMVPPPENVRMNSVNFKNILQWESPAFAKGNLTFTAQYLSYRIFQDKCMNTTLTECDFSSLSKYGDHTLRVRAEFADEHSDWVNITFCPVDDTIIGPPGMQVEVLADSLHMRFLAPKIENEYETWTMKNVYNSWTYNVQYWKNGTDEKFQITPQYDFEVLRNLEPWTTYCVQVRGFLPDRNKAGEWSEPVCEQTTHDVFGPSSS

SEQ ID NO: 848469 - protein, 360 aa, Homo sapiens
PPISAGSRKPPRTSSPGRGRGSCAWRKPRNPQRPSMAWSLGSWLGGCLLVSALGMVPPPENVRMNSVNFKNILQWESPAFAKGNLTFTAQYLSYRIFQDKCMNTTLTECDFSSLSKYGDHTLRVRAEFADEHSDWVNITFCPVDDTIIGPPGMQVEVLADSLHMRFLAPKIENEYETWTMKNVYNSWTYNVQYWKNGTDEKFQITPQYDFEVLRNLEPWTTYCVQVRGFLPDRNKAGEWSEPVCEQTTHDETVPSWMVAVILMASVFMVCLALLGCFALLWCVYKKTKYAFSPRNSLPQHLKEFLGHPHHNTLLFFSFPLSDENDVFDKLSVIAEDSESGKQNPGDSCSLGTPPGQGPQS

SEQ ID NO: 848470 - protein, 118 aa, Homo sapiens
RGQALPGAGGGRVLGGSRGTPSVRPWRGALGAGWVAACWCQVRGPRGGGALGNREAPRDAAPDPIPGRPASDLRAFGASGEKMQTPRPAAETQLGCCCRRFCNRRKPHPRPDYRPSGP

SEQ ID NO: 848471 - protein, 360 aa, Homo sapiens; identical to SEQ ID NO: 848469

SEQ ID NO: 848472 - protein, 291 aa, Homo sapiens
VVIMLTLQLPEDSSVLRIDNQDVLNISEHTIAKTPTGIRYPTMLSPKTSTVKSTKRLPLGWQPCPMSRPSFCPVDDTIIGPPGMQVEVLADSLHMRFLAPKIENEYETWTMKNVYNSWTYNVQYWKNGTDEKFQITPQYDFEVLRNLEPWTTYCVQVRGFLPDRNKAGEWSEPVCEQTTHDETVPSWMVAVILMASVFMVCLALLGCFALLWCVYKKTKYAFSPRNSLPQHLKEFLGHPHHNTLLFFSFPLSDENDVFDKLSVIAEDSESGKQNPGDSCSLGTPPGQGPQS

SEQ ID NO: 848473 - protein, 253 aa, Homo sapiens
PPISAGSRKPPRTSSPGRGRGSCAWRKPRNPQRPSMAWSLGSWLGGCLLVSALGMVPPPENVRMNSVNFKNILQWESPAFAKGNLTFTAQYLSYRIFQDKCMNTTLTECDFSSLSKYGDHTLRVRAEFADEHSDWVNITFCPVDDTIIGPPGMQVEVLADSLHMRFLAPKIENEYETWTMKNVYNSWTYNVQYWKNGTDEKFQITPQYDFEVLRNLEPWTTYCVQVRGFLPDRNKAGEWSEPVCEQTTHDGKP

SEQ ID NO: 848474 - protein, 177 aa, Homo sapiens
LGSCGSDLWFLRLLTLQTQPRGSPAAAHPGKPFLTRSSHPNIILSLLLQLLRAQVRHGLAPAWITAAAPLAGSADPSGFAASCDVSAKISSLVCKQLHSQGGSSGLSAGAAYSDVRPGFTSFPDLDMSPSPLGPLTLRCPLRSPSSPLAPGSPTLSHTHTITDAHACTRAGLEICFT

SEQ ID NO: 848475 - protein, 73 aa, Homo sapiens
TGSLTWTSPSLAPEIHHFCRLFCDATTRSHLGSADPSGFAASCDVSAKISSLVCKQLHSQGGSSGLSAGAGEE

SEQ ID NO: 848476 - protein, 120 aa, Homo sapiens
LALPWWWTCSASLMFALSDPNDVRCSSTLVTHSKGYENGTNRLRLQKQILKSEKNKPLKGTKAPAPQVMGPEQAAQGYWAGSQIPSNGEEAAIHKARHSALTTCPQNTLRVHTPARLRDE

SEQ ID NO: 848477 - protein, 533 aa, Homo sapiens
MARLPAGIRFIISFSRDQWYRAFIFILTFLLYASFHLSRKPISIVKGELHKYCTAWDEADVRFSSQNRKSGSAAPHQLPDNETDCGWAPFDKNNYQQLLGALDYSFLCAYAVGMYLSGIIGERLPIRYYLTFGMLASGAFTALFGLGYFYNIHSFGFYVVTQVINGLVQTTGWPSVVTCLGNWFGKGRRGLIMGVWNSHTSVGNILGSLIAGYWVSTCWGLSFVVPGAIVAAMGIVCFLFLIEHPNDVRCSSTLVTHSKGYENGTNRLRLQKQILKSEKNKPLDPEMQCLLLSDGKGSIHPNHVVILPGDGGSGTAAISFTGALKIPGVIEFSLCLLFAKLVSYTFLFWLPLYITNVDHLDAKKAGELSTLFDVGGIFGGILAGVISDRLEKRASTCGLMLLLAAPTLYIFSTISKMGLEATIAMLLLSGALVSGPYTLITTAVSADLGTHKSLKGNAHALSTVTAIIDGTGSVGAALGPLLAGLLSPSGWSNVFYMLMFADACALLFLIRLIHKELSCPGSATGDQVPFKEQ

SEQ ID NO: 848478 - protein, 533 aa, Homo sapiens; identical to SEQ ID NO: 848477

SEQ ID NO: 848479 - protein, 117 aa, Homo sapiens
MFRTDLKTNCREAKGEEAGSTSGWRHPGLPATERPEVTVIPAPGLPAALRGHGAAVQLRHRGTAEVWEAVSPPALGLAGPSPATGFAPQHTPHLGLFLIHSNRLGYLFKMCIVSYEV

SEQ ID NO: 848480 - protein, 383 aa, Homo sapiens
MARLPAGIRFIISFSRDQWYRAFIFILTFLLYASFHLSRKPISIVKGELHKYCTAWDEADVRFSSQNRKSGSAAPHQLPDNETDCGWAPFDKNNYQQLLGALDYSFLCAYAVGMYLSGIIGERLPIRYYLTFGMLASGAFTALFGLGYFYNIHSFGFYVVTQVINGLVQTTGWPSVVTCLGNWFGKGRRGLIMGVWNSHTSVGNILGSLIAGYWVSTCWGLSFVVPGAIVAAMGIVCFLFLIEHPNDVRCSSTLVTHSKGYENGTNRLRLQKQILKSEKNKPLDPEMQCLLLSDGKGSIHPNHVVILPGDGGSGTAAISFTGALKIPGVIEFSLCLLFAKLVSYTFLFWLPLYITNVDHLDAKKAGCTGSPDPLRHSSHRTSK

SEQ ID NO: 848481 - protein, 533 aa, Homo sapiens; identical to SEQ ID NO: 848477

SEQ ID NO: 848482 - protein, 533 aa, Homo sapiens; identical to SEQ ID NO: 848477

SEQ ID NO: 848483 - protein, 533 aa, Homo sapiens; identical to SEQ ID NO: 848477

SEQ ID NO: 848484 - protein, 395 aa, Homo sapiens
MARLPAGIRFIISFSRDQWYRAFIFILTFLLYASFHLSRKPISIVKGELHKYCTAWDEADVRFSSQNRKSGSAAPHQLPDNETDCGWAPFDKNNYQQLLGALDYSFLCAYAVGMYLSGIIGERLPIRYYLTFGMLASGAFTALFGLGYFYNIHSFGFYVVTQVINGLVQTTGWPSVVTCLGNWFGKGRRGLIMGVWNSHTSVGNILGSLIAGYWVSTCWGLSFVVPGAIVAAMGIVCFLFLIEHPNDVRCSSTLVTHSKGYENGTNRLRLQKQILKSEKNKPLDPEMQCLLLSDGKGSIHPNHVVILPGDGGSGTAAISFTGALKIPGVIEFSLCLLFAKLVSYTFLFWLPLYITNVDHLDAKKAGELSTLFDVGGIFGEFIKTCSAATIISQGA

SEQ ID NO: 848485 - protein, 69 aa, Homo sapiens
WGAVAQTSGFCASSLSKPNLEVPPPLRTLGSPFSPGALTPISFSPSSSNSSEPRSDMVSPQPGSQPQRL

SEQ ID NO: 848486 - protein, 144 aa, Homo sapiens
GKFAQVRLCREEGGPRGRPSREWRATVATVPLYFVSSLYRIERLLSLNTCCCIASENGRTYPHSHQNRVWDSLLPRLLHKLKRNLQQMGSGNKLAPEWSSATEECFTERNLFYGPLVLETTSSSLTSLATSPDAVGQTGLSHPR

SEQ ID NO: 848487 - protein, 117 aa, Homo sapiens
GKFAQVRLCREEGGPRGRPSREWRATVATVPLYFVSSLYRIERLLSLNTCCCIASENGRTYPHSHQNRVWDSLLPRLLCNLPRDAVSNCCRPLLTISLVVLLTHSLHNWNVFPGQPP

SEQ ID NO: 848488 - protein, 533 aa, Homo sapiens; identical to SEQ ID NO: 848477

SEQ ID NO: 848489 - protein, 533 aa, Homo sapiens; identical to SEQ ID NO: 848477

SEQ ID NO: 848490 - protein, 227 aa, Homo sapiens
DLRIPWYGSGRRHHHRALKIPGVIEFSLCLLFAKLVSYTFLFWLPLYITNVDHLDAKKAGELSTLFDVGGIFGGILAGVISDRLEKRASTCGLMLLLAAPTLYIFSTISKMGLEATIAMLLLSGALVSGPYTLITTAVSADLGTHKSLKGNAHALSTVTAIIDGTGSVGAALGPLLAGLLSPSGWSNVFYMLMFADACALLFLIRLIHKELSCPGSATGDQVPFKEQ

SEQ ID NO: 848491 - protein, 533 aa, Homo sapiens; identical to SEQ ID NO: 848477

SEQ ID NO: 848492 - protein, 533 aa, Homo sapiens; identical to SEQ ID NO: 848477

SEQ ID NO: 848493 - protein, 546 aa, Homo sapiens
MARLPAGIRFIISFSRDQWYRAFIFILTFLLYASFHLSRKPISIVKGELHKYCTAWDEADVRFSSQNRKSGSAAPHQLPDNETDCGWAPFDKNNYQQLLGALDYSFLCAYAVGMYLSGIIGERLPIRYYLTFGMLASGAFTALFGLGYFYNIHSFGFYVVTQVINGLVQTTGWPSVVTCLGNWFGKGRRGLIMGVWNSHTSVGNILGSLIAGYWVSTCWGLSFVVPGAIVAAMGIVCFLFLIEHPNDVRCSSTLVTHSKGYENGTNRLRLQKQILKSEKNKPLDPEMQCLLLSDGKGSIHPNHVVILPGDGGSGTAAISFTGALKIPGVIEFSLCLLFAKLVSYTFLFWLPLYITNVDHLDAKKAGELSTLFDVGGIFGGILAGVISDRLEKRASTCGLMLLLAAPTLYIFSTISKMGLEATIAMLLLSGALVSGPYTLITTAVSADLGTHKSLKGNAHALSTVTAIIDGTGSVGAALGPLLAGLLSPSGWSNVFYMLMFADACALLEILKLNFPTTYKIKYQLSTYELTRFKWLFFGSSVGSFNA

SEQ ID NO: 848494 - protein, 290 aa, Homo sapiens
MARLPAGIRFIISFSRDQWYRAFIFILTFLLYASFHLSRKPISIVKGELHKYCTAWDEADVRFSSQNRKSGSAAPHQLPDNETDCGWAPFDKNNYQQLLGALDYSFLCAYAVGMYLSGIIGERLPIRYYLTFGMLASGAFTALFGLGYFYNIHSFGFYVVTQVINGLVQTTGWPSVVTCLGNWFGKGRRGLIMGVWNSHTSVGNILGSLIAGYWVSTCWGLSFVVPGAIVAAMGIVCFLFLIEHPNDVRCSSTLVTVRTLFSCPFLEQCAVLTTSPACSCLCGVRQKHTG

SEQ ID NO: 848495 - protein, 96 aa, Homo sapiens
LGSLAPLHPDCPAGNTFPFCSQWICLQDPEMQCLLLSDGKGSIHPNHVVILPGDGGSGTAAISFTGALKIPVSKRAQEEFQKGLLCWLWEVWSVDD

SEQ ID NO: 848496 - protein, 776 aa, Homo sapiens
MAAPGDPQDELLPLAGPGSQWLRHRGEGENEAVTPKGATPAPQAGEPSPGLGARAREAASREAGSGPARQSPVAMETASTGVAGVSSAMDHTFSTTSKDGEGSCYTSLISDICYPPQEDSTYFTGILQKENGHVTISESPEELGTPGPSLPDVPGIESRGLFSSDSGIEMTPAESTEVNKILADPLDQMKAEAYKYIDITRPEEVKHQEQHHPELEDKDLDFKNKDTDISIKPEGVREPDKPAPVEGKIIKDHLLEESTFAPYIDDLSEEQRRAPQITTPVKITLTEIEPSVETTTQEKTPEKQDICLKPSPDTVPTVTVSEPEDDSPGSITPPSSGTEPSAAESQGKGSISEDELITAIKEAKGLSYETAENPRPVGQLADRPEVKARSGPPTIPSPLDHEASSAESGDSEIELVSEDPMAAEDALPSGYVSFGHVGGPPPSPASPSIQYSILREEREAELDSELIIESCDASSASEESPKREQDSPPMKPSALDAIREETGVRAEERAPSRRGLAEPGSFLDYPSTEPQPGPELPPGDGALEPETPMLPRKPEEDSSSNQSPAATKGPGPLGPGAPPPLLFLNKQKAIDLLYWRDIKQTGIVFGSFLLLLFSLTQFSVVSVVAYLALAALSATISFRIYKSVLQAVQKTDEGHPFKAYLELEITLSQEQIQKYTDCLQFYVNSTLKELRRLFLVQDLVDSLKFAVLMWLLTYVGALFNGLTLLLMAVVSMFTLPVVYVKHQAQIDQYLGLVRTHINAVVAKIQAKIPGAKRHAE

SEQ ID NO: 848497 - protein, 452 aa, Homo sapiens
CVCLRGSPSLCGTTEPSAAESQGKGSISEDELITAIKEAKGLSYETAENPRPVGQLADRPEVKARSGPPTIPSPLDHEASSAESGDSEIELVSEDPMAAEDALPSGYVSFGHVGGPPPSPASPSIQYSILREEREAELDSELIIESCDASSASEESPKREQDSPPMKPSALDAIREETGVRAEERAPSRRGLAEPGSFLDYPSTEPQPGPELPPGDGALEPETPMLPRKPEEDSSSNQSPAATKGPGPLGPGAPPPLLFLNKQKAIDLLYWRDIKQTGIVFGSFLLLLFSLTQFSVVSVVAYLALAALSATISFRIYKSVLQAVQKTDEGHPFKAYLELEITLSQEQIQKYTDCLQFYVNSTLKELRRLFLVQDLVDSLKFAVLMWLLTYVGALFNGLTLLLMAVVSMFTLPVVYVKHQAQIDQYLGLVRTHINAVVAKIQAKIPGAKRHAE

SEQ ID NO: 848498 - protein, 208 aa, Homo sapiens
MQATADSTKMDCVWSNWKSQAIDLLYWRDIKQTGIVFGSFLLLLFSLTQFSVVSVVAYLALAALSATISFRIYKSVLQAVQKTDEGHPFKAYLELEITLSQEQIQKYTDCLQFYVNSTLKELRRLFLVQDLVDSLKFAVLMWLLTYVGALFNGLTLLLMAVVSMFTLPVVYVKHQAQIDQYLGLVRTHINAVVAKIQAKIPGAKRHAE

SEQ ID NO: 848499 - protein, 208 aa, Homo sapiens; identical to SEQ ID NO: 848498

SEQ ID NO: 848500 - protein, 208 aa, Homo sapiens; identical to SEQ ID NO: 848498

SEQ ID NO: 848501 - protein, 214 aa, Homo sapiens
MQATADSTKMDCVWSNWKSQAIDLLYWRDIKQTGIVFGSFLLLLFSLTQFSVVSVVAYLALAALSATISFRIYKSVLQAVQKTDEGHPFKAYLELEITLSQEQIQKYTDCLQFYVNSTLKELRRLFLVQDLVDSLKFAVLMWLLTYVGALFNGLTLLLMAVVSMFTLPVVYVKHQAQIDQYLGLVRTHINAVVAKNQADTDRNVLSGTGLFYSY

SEQ ID NO: 848502 - protein, 233 aa, Homo sapiens
MAAPGDPQDELLPLAGPGSQWLRHRGEGENEAVTPKGATPAPQAGEPSPGLGARAREAASREAGSGPARQSPVAMETASTGVAGVSSAMDHTFSTTSKDGEGSCYTSLISDICYPPQEDSTYFTGILQKENGHVTISESPEELGTPGPSLPDVPGIESRGLFSSDSGIEMTPAESTEVNKILADPLDQMKAEAYKYIDITRPEEVKHQEQHHPELEDKEQTLKQLFLGCSLYS

SEQ ID NO: 848503 - protein, 163 aa, Homo sapiens
MQATADSTKMDCVWSNWKSQAIDLLYWRDIKQTGIVFGSFLLLLFSLTQFSVVSVVAYLALAALSATISFRIYKSVLQAVQKTDEGHPFKAYLELEITLSQEQIQKYTDCLQFYVNSTLKELRRLFLVQDLVDSLKFAVLMWLLTYVGALFNGLTLLLMGKSR

SEQ ID NO: 848504 - protein, 782 aa, Homo sapiens
MAAPGDPQDELLPLAGPGSQWLRHRGEGENEAVTPKGATPAPQAGEPSPGLGARAREAASREAGSGPARQSPVAMETASTGVAGVSSAMDHTFSTTSKDGEGSCYTSLISDICYPPQEDSTYFTGILQKENGHVTISESPEELGTPGPSLPDVPGIESRGLFSSDSGIEMTPAESTEVNKILADPLDQMKAEAYKYIDITRPEEVKHQEQHHPELEDKDLDFKNKDTDISIKPEGVREPDKPAPVEGKIIKDHLLEESTFAPYIDDLSEEQRRAPQITTPVKITLTEIEPSVETTTQEKTPEKQDICLKPSPDTVPTVTVSEPEDDSPGSITPPSSGTEPSAAESQGKGSISEDELITAIKEAKGLSYETAENPRPVGQLADRPEVKARSGPPTIPSPLDHEASSAESGDSEIELVSEDPMAAEDALPSGYVSFGHVGGPPPSPASPSIQYSILREEREAELDSELIIESCDASSASEESPKREQDSPPMKPSALDAIREETGVRAEERAPSRRGLAEPGSFLDYPSTEPQPGPELPPGDGALEPETPMLPRKPEEDSSSNQSPAATKGPGPLGPGAPPPLLFLNKQKAIDLLYWRDIKQTGIVFGSFLLLLFSLTQFSVVSVVAYLALAALSATISFRIYKSVLQAVQKTDEGHPFKAYLELEITLSQEQIQKYTDCLQFYVNSTLKELRRLFLVQDLVDSLKFAVLMWLLTYVGALFNGLTLLLMAVVSMFTLPVVYVKHQAQIDQYLGLVRTHINAVVAKNQADTDRNVLSGTGLFYSY

SEQ ID NO: 848505 - protein, 600 aa, Homo sapiens
MAAPGDPQDELLPLAGPGSQWLRHRGEGENEAVTPKGATPAPQAGEPSPGLGARAREAASREAGSGPARQSPVAMETASTGVAGVSSAMDHTFSTTSKDGEGSCYTSLISDICYPPQEDSTYFTGILQKENGHVTISESPEELGTPGPSLPDVPGIESRGLFSSDSGIEMTPAESTEVNKILADPLDQMKAEAYKYIDITRPEEVKHQEQHHPELEDKDLDFKNKDTDISIKPEGVREPDKPAPVEGKIIKDHLLEESTFAPYIDDLSEEQRRAPQITTPVKITLTEIEPSVETTTQEKTPEKQDICLKPSPDTVPTVTVSEPEDDSPGSITPPSSGTEPSAAESQGKGSISEDELITAIKEAKGLSYETAENPRPVGQLADRPEVKARSGPPTIPSPLDHEASSAESGDSEIELVSEDPMAAEDALPSGYVSFGHVGGPPPSPASPSIQYSILREEREAELDSELIIESCDASSASEESPKREQDSPPMKPSALDAIREETGVRAEERAPSRRGLAEPGSFLDYPSTEPQPGPELPPGDGALEPETPMLPRKPEEDSSSNQSPAATKGPGPLGPGAPPPLLFLNKQKAVGYQHPWKKMS

SEQ ID NO: 848506 - protein, 208 aa, Homo sapiens; identical to SEQ ID NO: 848498

SEQ ID NO: 848507 - protein, 208 aa, Homo sapiens; identical to SEQ ID NO: 848498

SEQ ID NO: 848508 - protein, 208 aa, Homo sapiens; identical to SEQ ID NO: 848498

SEQ ID NO: 848509 - protein, 118 aa, Homo sapiens
MQATADSTKMDCVWSNWKSQAIDLLYWRDIKQTGIVFGSFLLLLFSLTQFSVVSVVAYLALAALSATISFRIYKSVLQAVQKTDEGHPFKAYLELEITLSQEQIQKYTDGHKQECLEW

SEQ ID NO: 848510 - protein, 731 aa, Homo sapiens
MAAPGDPQDELLPLAGPGSQWLRHRGEGENEAVTPKGATPAPQAGEPSPGLGARAREAASREAGSGPARQSPVAMETASTGVAGVSSAMDHTFSTTSKDGEGSCYTSLISDICYPPQEDSTYFTGILQKENGHVTISESPEELGTPGPSLPDVPGIESRGLFSSDSGIEMTPAESTEVNKILADPLDQMKAEAYKYIDITRPEEVKHQEQHHPELEDKDLDFKNKDTDISIKPEGVREPDKPAPVEGKIIKDHLLEESTFAPYIDDLSEEQRRAPQITTPVKITLTEIEPSVETTTQEKTPEKQDICLKPSPDTVPTVTVSEPEDDSPGSITPPSSGTEPSAAESQGKGSISEDELITAIKEAKGLSYETAENPRPVGQLADRPEVKARSGPPTIPSPLDHEASSAESGDSEIELVSEDPMAAEDALPSGYVSFGHVGGPPPSPASPSIQYSILREEREAELDSELIIESCDASSASEESPKREQDSPPMKPSALDAIREETGVRAEERAPSRRGLAEPGSFLDYPSTEPQPGPELPPGDGALEPETPMLPRKPEEDSSSNQSPAATKGPGPLGPGAPPPLLFLNKQKAIDLLYWRDIKQTGIVFGSFLLLLFSLTQFSVVSVVAYLALAALSATISFRIYKSVLQAVQKTDEGHPFKAYLELEITLSQEQIQKYTDCLQFYVNSTLKELRRLFLVQDLVDSLKFAVLMWLLTYVGALFNGLTLLLMGKSR

SEQ ID NO: 848511 - protein, 118 aa, Homo sapiens; identical to SEQ ID NO: 848509

SEQ ID NO: 848512 - protein, 190 aa, Homo sapiens
MQATADSTKMDCVWSNWKSQAIDLLYWRDIKQTGIVFGSFLLLLFSLTQFSVVSVVAYLALAALSATISFRIYKSVLQAVQSQEQIQKYTDCLQFYVNSTLKELRRLFLVQDLVDSLKFAVLMWLLTYVGALFNGLTLLLMAVVSMFTLPVVYVKHQAQIDQYLGLVRTHINAVVAKIQAKIPGAKRHAE

SEQ ID NO: 848513 - protein, 534 aa, Homo sapiens
SSARTRTRPGEAEGLCTCPREESREIRAGQIVLKAMAQGLVTFRDVAIEFSLEEWKCLEPAQRDLYREVTLENFGHLASLGLSISKPDVVSLLEQGKEPWMIANDVTGPWCPDLESRCEKFLQKDIFEIGAFNWEIMESLKCSDLEGSDFRADWECEGQFERQVNEECYFKQVNVTYGHMPVFQHHTSHTVRQSRETGEKLMECHECGKAFSRGSHLIQHQKTHTGEKPFGCKECGKAFSRASHLVQHQRIHTGEKPYDCKDCGKAFGRTSELILHQRLHTGVKPYECKECGKTFRQHSQLILHQRTHTGEKPYVCKDCGKAFIRGSQLTVHRRIHTGARPYECKECGKAFRQHSQLTVHQRIHTGEKPYECKECGKGFIHSSEVTRHQRIHSGEKPYECKECGKAFRQHAQLTRHQRVHTGDRPYECKDCGKAFSRSSYLIQHQRIHTGDKPYECKECGKAFIRVSQLTHHQRIHTCEKPYECRECGMAFIRSSQLTEHQRIHPGIKPYECRECGQAFILGSQLIEHYRIHTG

SEQ ID NO: 848514 - protein, 393 aa, Homo sapiens
MALKVATVAGSAAKAVLGPALLCRPWEVLGAHEVPSRNIFSEQTIPPSAKYGGRHTVTMIPGDGIGPELMLHVKSVFRHACVPVDFEEVHVSSNADEEDIRNAIMAIRRNRVALKGNIETNHNLPPSHKSRNNILRTSLDLYANVIHCKSLPGVVTRHKDIDILIVRENTEGEYSSLEHESVAGVVESLKIITKAKSLRIAEYAFKLAQESGRKKVTAVHKANIMKLGDGLFLQCCREVAARYPQITFENMIVDNTTMQLVSRPQQFDVMVMPNLYGNIVNNVCAGLVGGPGLVAGANYGHVYAVFETATRNTGKSIANKNIANPTATLLASCMMLDHLKLHSYATSIRKAVLASMDNENMHTPDIGGQGTTSEAIQDVIRHIRVINGRAVEA

SEQ ID NO: 848515 - protein, 340 aa, Homo sapiens
MALKVATVAGSAAKAVLGPALLCRPWEVLGAHEVPSRNIFSEQTIPPSAKYGGRHTVTMIPGDGIGPELMLHVKSVFRHACVPVDFEEVHVSSNADEEDIRNAIMAIRRNRVALKGNIETNHNLPPSHKSRNNILRTSLDLYANVIHCKSLPGVVTRHKDIDILIVRENTEGEYSSLEHESVAGVVESLKIITKAKSLRIAEYAFKLAQESGRKKVTAVHKANIMKLGDGLFLQCCREVAARYPQITFENMIVDNTTMQLVSRPQQFDVMVMPNLYGNIVNNVCAGLVGGPGLVAGANYGHVYAVFETATRNTGKSIANKNIANPTATLLASCMMLDHLK

SEQ ID NO: 848516 - protein, 132 aa, Homo sapiens
GSPGSTDVGPVRCAVPGRSRRHEVPSRNIFSEQTIPPSAKYGGRHTVTMIPGDGIGPELMLHVKSVFRHACVPVDFEEVHVSSNADEEDIRNAIMAIRRNRVALKGNIETNHNLPPSHKSRNNILREIRVCG

SEQ ID NO: 848517 - protein, 380 aa, Homo sapiens
MALKVATVAGSAAKAVLGPALLCRPWEVLGAHEVPSRNIFSEQTIPPSAKYGGRHTVTMIPGDGIGPELMLHVKSVFRHACVPVDFEEVHVSSNADEEDIRNAIMAIRRNRVALKGNIETNHNLPPSHKSRNNILRTSLDLYANVIHCKSLPGVVTRHKDIDILIVRENTEGEYSSLEHESVAGVVESLKIITKAKSLRIAEYAFKLAQESGRKKVTAVHKANIMKLGDGLFLQCCREVAARYPQITFENMIVDNTTMQLVSRPQQFDVMVMPNLYGNIVNNVCAGLVGGPGLVAGANYGHVYAVFETATRNTGKSIANKNIANPTATLLASCMMLDHLKLHSYATSIRKAVLASMDNENVRFPSHPTLLPRPVSPCSLL

SEQ ID NO: 848518 - protein, 344 aa, Homo sapiens
MALKVATVAGSAAKAVLGPALLCRPWEVLGAHEVPSRNIFSEQTIPPSAKYGGRHTVTMIPGDGIGPELMLHVKSVFRHACVPVDFEEVHVSSNADEEDIRNAIMAIRRNRVALKGNIETNHNLPPSHKSRNNILRTSLDLYANVIHCKSLPGVVTRHKDIDILIVRENTEGEYSSLEHESVAGVVESLKIITKAKSLRIAEYAFKLAQESGRKKVTAVHKANIMKLGDGLFLQCCREVAARYPQITFENMIVDNTTMQATRNTGKSIANKNIANPTATLLASCMMLDHLKLHSYATSIRKAVLASMDNENMHTPDIGGQGTTSEAIQDVIRHIRVINGRAVEA

SEQ ID NO: 848519 - protein, 261 aa, Homo sapiens
MALKVATVAGSAAKAVLGPALLCRPWEVLGAHEVPSRNIFSEQTIPPSAKYGGRHTVTMIPGDGIGPELMLHVKSVFRHACVPVDFEEVHVSSNADEEDIRNAIMAIRRNRVALKGNIETNHNLPPSHKSRNNILRTSLDLYANVIHCKSLPGVVTRHKDIDILIVRENTEGEYSSLEHESVAGVVESLKIITKAKSLRIAEYAFKLAQESGRKKVTAVHKANIMKLGDGLFLQCCREVAARYPQITFENMIAALLCHLHP

SEQ ID NO: 848520 - protein, 261 aa, Homo sapiens; identical to SEQ ID NO: 848519

SEQ ID NO: 848521 - protein, 524 aa, Homo sapiens
MTAPPISHEYYDPAEFMEGGPQEADRLDELEYEEVELYKSSHRDKLGLMVCYRTDDEEDLGIYVGEVNPNSIAAKDGRIREGDRIIQINGVDVQNREEAVAILSQEENTNISLLVARPESQLAKRWKDSDRDDFLDDFGSENEGELRARKLKSPPAQQVLGAHEVPSRNIFSEQTIPPSAKYGGRHTVTMIPGDGIGPELMLHVKSVFRHACVPVDFEEVHVSSNADEEDIRNAIMAIRRNRVALKGNIETNHNLPPSHKSRNNILRTSLDLYANVIHCKSLPGVVTRHKDIDILIVRENTEGEYSSLEHESVAGVVESLKIITKAKSLRIAEYAFKLAQESGRKKVTAVHKANIMKLGDGLFLQCCREVAARYPQITFENMIVDNTTMQLVSRPQQFDVMVMPNLYGNIVNNVCAGLVGGPGLVAGANYGHVYAVFETATRNTGKSIANKNIANPTATLLASCMMLDHLKLHSYATSIRKAVLASMDNENMHTPDIGGQGTTSEAIQDVIRHIRVINGRAVEA

SEQ ID NO: 848522 - protein, 261 aa, Homo sapiens; identical to SEQ ID NO: 848519

SEQ ID NO: 848523 - protein, 510 aa, Homo sapiens
MFFTQEISDFNKRPILLDNNVDGEVSIHRPHLVTEAQCNTLDHVLYMTTNSPNGSQFLSVTPPFVNPEPLFFLSKKAEFYIDVIEVPPQGSSGALHDNCASLQSNVDIFWNVDSLIAENVFILARAVSACRDVRRLSLSVMALKVLGAHEVPSRNIFSEQTIPPSAKYGGRHTVTMIPGDGIGPELMLHVKSVFRHACVPVDFEEVHVSSNADEEDIRNAIMAIRRNRVALKGNIETNHNLPPSHKSRNNILRTSLDLYANVIHCKSLPGVVTRHKDIDILIVRENTEGEYSSLEHESVAGVVESLKIITKAKSLRIAEYAFKLAQESGRKKVTAVHKANIMKLGDGLFLQCCREVAARYPQITFENMIVDNTTMQLVSRPQQFDVMVMPNLYGNIVNNVCAGLVGGPGLVAGANYGHVYAVFETATRNTGKSIANKNIANPTATLLASCMMLDHLKLHSYATSIRKAVLASMDNENMHTPDIGGQGTTSEAIQDVIRHIRVINGRAVEA

SEQ ID NO: 848524 - protein, 335 aa, Homo sapiens
MIPGDGIGPELMLHVKSVFRHACVPVDFEEVHVSSNADEEDIRNAIMAIRRNRVALKGNIETNHNLPPSHKSRNNILRTSLDLYANVIHCKSLPGVVTRHKDIDILIVRENTEGEYSSLEHESVAGVVESLKIITKAKSLRIAEYAFKLAQESGRKKVTAVHKANIMKLGDGLFLQCCREVAARYPQITFENMIVDNTTMQLVSRPQQFDVMVMPNLYGNIVNNVCAGLVGGPGLVAGANYGHVYAVFETATRNTGKSIANKNIANPTATLLASCMMLDHLKLHSYATSIRKAVLASMDNENMHTPDIGGQGTTSEAIQDVIRHIRVINGRAVEA

SEQ ID NO: 848525 - protein, 866 aa, Homo sapiens
ARVWPLAPARDPRSRARVSERRLPVPALRLLSPASNMGCNMCVVQKPEEQYKVMLQVNGKELSKLSQEQTLQALRSSKEPLVIQVLRRSPRLRGDSSCHDLQLVDSGTQTDITFEHIMALGKLRPPTPPMVILEPYVLSELAEGGPSCPGRRCRKCQGGGPQLLLLHPLSSAASQASLLESSCIPCLSHSSTCSEFPPSLQLLSLARPEEGPFIQAWWLMTAPPISHEYYDPAEFMEGGPQEADRLDELEYEEVELYKSSHRDKLGLMVCYRTDDEEDLGIYVGEVNPNSIAAKDGRIREGDRIIQINGVDVQNREEAVAILSQEENTNISLLVARPESQLAKRWKDSDRDDFLDDFGSENEGELRARKLKSPPAQQVLGAHEVPSRNIFSEQTIPPSAKYGGRHTVTMIPGDGIGPELMLHVKSVFRYGAPGSPPCPQPGGPEDFVPRGALRPEALGEAMARRPVSPGLRPMACDPARLAWARGRWHQSCHSVHCGVQACPHQSVKVGPVPSQSEPGQGRKQQERGSLGRLPGGGAGGSGPASLTLPCLRHACVPVDFEEVHVSSNADEEDIRNAIMAIRRNRVALKGNIETNHNLPPSHKSRNNILRTSLDLYANVIHCKSLPGVVTRHKDIDILIVRENTEGEYSSLEHESVAGVVESLKIITKAKSLRIAEYAFKLAQESGRKKVTAVHKANIMKLGDGLFLQCCREVAARYPQITFENMIVDNTTMQLVSRPQQFDVMVMPNLYGNIVNNVCAGLVGGPGLVAGANYGHVYAVFETATRNTGKSIANKNIANPTATLLASCMMLDHLKLHSYATSIRKAVLASMDNENMHTPDIGGQGTTSEAIQDVIRHIRVINGRAVEA

SEQ ID NO: 848526 - protein, 516 aa, Homo sapiens
MALKVATVAGSAAKAVLGPALLCRPWEVLGAHEVPSRNIFSEQTIPPSAKYGGRHTVTMIPGDGIGPELMLHVKSVFRYGAPGSPPCPQPGGPEDFVPRGALRPEALGEAMARRPVSPGLRPMACDPARLAWARGRWHQSCHSVHCGVQACPHQSVKVGPVPSQSEPGQGRKQQERGSLGRLPGGGAGGSGPASLTLPCLRHACVPVDFEEVHVSSNADEEDIRNAIMAIRRNRVALKGNIETNHNLPPSHKSRNNILRTSLDLYANVIHCKSLPGVVTRHKDIDILIVRENTEGEYSSLEHESVAGVVESLKIITKAKSLRIAEYAFKLAQESGRKKVTAVHKANIMKLGDGLFLQCCREVAARYPQITFENMIVDNTTMQLVSRPQQFDVMVMPNLYGNIVNNVCAGLVGGPGLVAGANYGHVYAVFETATRNTGKSIANKNIANPTATLLASCMMLDHLKLHSYATSIRKAVLASMDNENMHTPDIGGQGTTSEAIQDVIRHIRVINGRAVEA

SEQ ID NO: 848527 - protein, 250 aa, Homo sapiens
MALKVATVAGSAAKAVLGPALLCRPWEVLGAHEVPSRNIFSEQTIPPSAKYGGRHTVTMIPGDGIGPELMLHVKSVFRHACVPVDFEEVHVSSNADEEDIRNAIMAIRRNRVALKGNIETNHNLPPSHKSRNNILRTSLDLYANVIHCKSLPGVVTRHKDIDILIVRENTEGEYSSLEHESVAGVVESLKIITKAKSLRIAEYAFKLAQESGRKKVTAVHKANIMLRGTPARVSPIRTSPTPRPPCWPAA

SEQ ID NO: 848528 - protein, 250 aa, Homo sapiens; identical to SEQ ID NO: 848527

SEQ ID NO: 848529 - protein, 278 aa, Homo sapiens
MALKVATVAGSAAKAVLGPALLCRPWEVLGAHEVPSRNIFSEQTIPPSAKYGGRHTVTMIPGDGIGPELMLHVKSVFRHACVPVDFEEVHVSSNADEEDIRNAIMAIRRNRVALKGNIETNHNLPPSHKSRNNILRTSLDLYANVIHCKSLPGVVTRHKDIDILIVRENTEGEYSSLEHESVAGVVESLKIITKAKSLRIAEYAFKLAQESGRKKVTAVHKANIINWDDGHLDSTAAGRSADRYPQRSLREPVTLMDNRHQHTMEVTRNYSSVIDIGE

SEQ ID NO: 848530 - protein, 85 aa, Homo sapiens
SGPFWAVVHTARCVLVDHHGLVASPGEPLHLKLHSYATSIRKAVLASMDNENMHTPDIGGQGTTSEAIQDVIRHIRVINGRAVEA

SEQ ID NO: 848531 - protein, 393 aa, Homo sapiens; identical to SEQ ID NO: 848514

SEQ ID NO: 848532 - protein, 583 aa, Homo sapiens
ARVWPLAPARDPRSRARVSERRLPVPALRLLSPASNMGCNMCVVQKPEEQYKVMLQVNGKELSKLSQEQTLQALRSSKEPLVIQVLRRSPRLRGDSSCHDLQLVDSGTQTDITFEHIMALGKLRPPTPPMVILEPPPISHEYYDPAEFMEGGPQEADRLDELEYEEVELYKSSHRDKLGLMVCYRTDDEEDLGIYVGEVNPNSIAAKDGRIREGDRIIQINGVDVQNREEAVAILSQEENTNISLLVARPESQLAKRWKDSDRDDFLDDFGSENEGELRARKLKSPPAQQPGNEEEKGAPDAGPGLSNSQELDSGVGRTDESTRNEESSEHDLLGDEPPSSTNTPGSLRKFGLQGDALQSRDFHFSMDSLLAEGAGLGGGDVPGLTDEEYERYRELLEIKCHLENGNQLGLLFPRASGGNSALDVNRNESLGHEMAMLEEELRHLEFKCRNILRAQKMQQLRERCMKAWLLEEESLYDLAASEPKKHELSDISELPEKSDKDSTSAYNTGESCRSTPLLVEPLPESPLRRAMAGNSNLNRTPPGPAVATPAKAAPPPGSPAKFRSLSRDPEAGRRQHAEERGR

SEQ ID NO: 848533 - protein, 405 aa, Homo sapiens
MALKVATVAGSAAKAVLGPALLCRPWEVLGAHEVPSRNIFSEQTIPPSAKYGGRHTVTMIPGDGIGPELMLHVKSVFRHACVPVDFEEVHVSSNADEEDIRNAIMAIRRNRVALKGNIETNHNLPPSHKSRNNILRTSLDLYANVIHCKSLPGVVTRHKDIDILIVRENTEGEYSSLEHESVAGVVESLKIITKAKSLRIAEYAFKLAQESGRKKVTAVHKANIMKLGDGLFLQCCREVAARYPQITFENMIVDNTTMQLVSRPQQFDVMVMPNLYGNIVNNVCAGLVGGPGLVAGANYGHVYAVFETATRNTGKSIANKNIANPTATLLASCMMLDHLKLHSYATSIRKAVLASMDNENGLVCAEPACVLQMHTPDIGGQGTTSEAIQDVIRHIRVINGRAVEA

SEQ ID NO: 848534 - protein, 743 aa, Homo sapiens
ARVWPLAPARDPRSRARVSERRLPVPALRLLSPASNMGCNMCVVQKPEEQYKVMLQVNGKELSKLSQEQTLQALRSSKEPLVIQVLRRSPRLRGDSSCHDLQLVDSGTQTDITFEHIMALGKLRPPTPPMVILEPYVLSELAEGGPSCPGRRCRKCQGGGPQLLLLHPLSSAASQASLLESSCIPCLSHSSTCSEFPPSLQLLSLARPEEGPFIQAWWLMTAPPISHEYYDPAEFMEGGPQEADRLDELEYEEVELYKSSHRDKLGLMVCYRTDDEEDLGIYVGEVNPNSIAAKDGRIREGDRIIQINGVDVQNREEAVAILSQEENTNISLLVARPESQLAKRWKDSDRDDFLDDFGSENEGELRARKLKSPPAQQVLGAHEVPSRNIFSEQTIPPSAKYGGRHTVTMIPGDGIGPELMLHVKSVFRHACVPVDFEEVHVSSNADEEDIRNAIMAIRRNRVALKGNIETNHNLPPSHKSRNNILRTSLDLYANVIHCKSLPGVVTRHKDIDILIVRENTEGEYSSLEHESVAGVVESLKIITKAKSLRIAEYAFKLAQESGRKKVTAVHKANIMKLGDGLFLQCCREVAARYPQITFENMIVDNTTMQLVSRPQQFDVMVMPNLYGNIVNNVCAGLVGGPGLVAGANYGHVYAVFETATRNTGKSIANKNIANPTATLLASCMMLDHLKLHSYATSIRKAVLASMDNENMHTPDIGGQGTTSEAIQDVIRHIRVINGRAVEA

SEQ ID NO: 848535 - protein, 656 aa, Homo sapiens
ARVWPLAPARDPRSRARVSERRLPVPALRLLSPASNMGCNMCVVQKPEEQYKVMLQVNGKELSKLSQEQTLQALRSSKEPLVIQVLRRSPRLRGDSSCHDLQLVDSGTQTDITFEHIMALGKLRPPTPPMVILEPPPISHEYYDPAEFMEGGPQEADRLDELEYEEVELYKSSHRDKLGLMVCYRTDDEEDLGIYVGEVNPNSIAAKDGRIREGDRIIQINGVDVQNREEAVAILSQEENTNISLLVARPESQLAKRWKDSDRDDFLDDFGSENEGELRARKLKSPPAQQVLGAHEVPSRNIFSEQTIPPSAKYGGRHTVTMIPGDGIGPELMLHVKSVFRHACVPVDFEEVHVSSNADEEDIRNAIMAIRRNRVALKGNIETNHNLPPSHKSRNNILRTSLDLYANVIHCKSLPGVVTRHKDIDILIVRENTEGEYSSLEHESVAGVVESLKIITKAKSLRIAEYAFKLAQESGRKKVTAVHKANIMKLGDGLFLQCCREVAARYPQITFENMIVDNTTMQLVSRPQQFDVMVMPNLYGNIVNNVCAGLVGGPGLVAGANYGHVYAVFETATRNTGKSIANKNIANPTATLLASCMMLDHLKLHSYATSIRKAVLASMDNENMHTPDIGGQGTTSEAIQDVIRHIRVINGRAVEA

SEQ ID NO: 848536 - protein, 508 aa, Homo sapiens
MEGGPQEADRLDELEYEEVELYKSSHRDKLGLMVCYRTDDEEDLGIYVGEVNPNSIAAKDGRIREGDRIIQINGVDVQNREEAVAILSQEENTNISLLVARPESQLAKRWKDSDRDDFLDDFGSENEGELRARKLKSPPAQQVLGAHEVPSRNIFSEQTIPPSAKYGGRHTVTMIPGDGIGPELMLHVKSVFRHACVPVDFEEVHVSSNADEEDIRNAIMAIRRNRVALKGNIETNHNLPPSHKSRNNILRTSLDLYANVIHCKSLPGVVTRHKDIDILIVRENTEGEYSSLEHESVAGVVESLKIITKAKSLRIAEYAFKLAQESGRKKVTAVHKANIMKLGDGLFLQCCREVAARYPQITFENMIVDNTTMQLVSRPQQFDVMVMPNLYGNIVNNVCAGLVGGPGLVAGANYGHVYAVFETATRNTGKSIANKNIANPTATLLASCMMLDHLKLHSYATSIRKAVLASMDNENMHTPDIGGQGTTSEAIQDVIRHIRVINGRAVEA

SEQ ID NO: 848537 - protein, 662 aa, Homo sapiens
ARVWPLAPARDPRSRARVSERRLPVPALRLLSPASNMGCNMCVVQKPEEQYKVMLQVNGKELSKLSQEQTLQALRSSKEPLVIQVLRRSPRLRGDSSCHDLQLVDSGTQTDITFEHIMALGKLRPPTPPMVILEPYVLSELPPISHEYYDPAEFMEGGPQEADRLDELEYEEVELYKSSHRDKLGLMVCYRTDDEEDLGIYVGEVNPNSIAAKDGRIREGDRIIQINGVDVQNREEAVAILSQEENTNISLLVARPESQLAKRWKDSDRDDFLDDFGSENEGELRARKLKSPPAQQVLGAHEVPSRNIFSEQTIPPSAKYGGRHTVTMIPGDGIGPELMLHVKSVFRHACVPVDFEEVHVSSNADEEDIRNAIMAIRRNRVALKGNIETNHNLPPSHKSRNNILRTSLDLYANVIHCKSLPGVVTRHKDIDILIVRENTEGEYSSLEHESVAGVVESLKIITKAKSLRIAEYAFKLAQESGRKKVTAVHKANIMKLGDGLFLQCCREVAARYPQITFENMIVDNTTMQLVSRPQQFDVMVMPNLYGNIVNNVCAGLVGGPGLVAGANYGHVYAVFETATRNTGKSIANKNIANPTATLLASCMMLDHLKLHSYATSIRKAVLASMDNENMHTPDIGGQGTTSEAIQDVIRHIRVINGRAVEA

SEQ ID NO: 848538 - protein, 335 aa, Homo sapiens; identical to SEQ ID NO: 848524

SEQ ID NO: 848539 - protein, 346 aa, Homo sapiens
QADRIEISTVTMIPGDGIGPELMLHVKSVFRHACVPVDFEEVHVSSNADEEDIRNAIMAIRRNRVALKGNIETNHNLPPSHKSRNNILRTSLDLYANVIHCKSLPGVVTRHKDIDILIVRENTEGEYSSLEHESVAGVVESLKIITKAKSLRIAEYAFKLAQESGRKKVTAVHKANIMKLGDGLFLQCCREVAARYPQITFENMIVDNTTMQLVSRPQQFDVMVMPNLYGNIVNNVCAGLVGGPGLVAGANYGHVYAVFETATRNTGKSIANKNIANPTATLLASCMMLDHLKLHSYATSIRKAVLASMDNENMHTPDIGGQGTTSEAIQDVIRHIRVINGRAVEA

SEQ ID NO: 848540 - protein, 895 aa, Homo sapiens
ARVWPLAPARDPRSRARVSERRLPVPALRLLSPASNMGCNMCVVQKPEEQYKVMLQVNGKELSKLSQEQTLQALRSSKEPLVIQVLRRSPRLRGDSSCHDLQLVDSGTQTDITFEHIMALGKLRPPTPPMVILEPYVLSELAEGGPSCPGRRCRKCQGGGPQLLLLHPLSSAASQASLLESSCIPCLSHSSTCSEFPPSLQLLSLARPEEGPFIQAWWLMTAPPISHEYYDPAEFMEGGPQEADRLDELEYEEVELYKSSHRDKLGLMVCYRTDDEEDLGIYVGEVNPNSIAAKDGRIREGDRIIQINGVDVQNREEAVAILSQEENTNISLLVARPESQLAKRWKDSDRDDFLDDFGSENEGELRARKLKSPPAQQVLGAHEVPSRNIFSEQTIPPSAKYGGRHTVTMIPGDGIGPELMLHVKSVFRYGAPGSPPCPQPGGPEDFVPRGALRPEALGEAMARRPVSPGLRPMACDPARLAWARGRWHQSCHSVHCGVQACPHQSVKVGPVPSQSEPGQGRKQQERGSLGRLPGGGAGGSGPASLTLPCLRHACVPVDFEEVHVSSNADEEDIRNAIMAIRRNRVALKGLVWLERTLVLGDWVDASSGLFALRCWDSSNIETNHNLPPSHKSRNNILRTSLDLYANVIHCKSLPGVVTRHKDIDILIVRENTEGEYSSLEHESVAGVVESLKIITKAKSLRIAEYAFKLAQESGRKKVTAVHKANIMKLGDGLFLQCCREVAARYPQITFENMIVDNTTMQLVSRPQQFDVMVMPNLYGNIVNNVCAGLVGGPGLVAGANYGHVYAVFETATRNTGKSIANKNIANPTATLLASCMMLDHLKLHSYATSIRKAVLASMDNENMHTPDIGGQGTTSEAIQDVIRHIRVINGRAVEA

SEQ ID NO: 848541 - protein, 228 aa, Homo sapiens
MALKVATVAGSAAKAVLGPALLCRPWEVLGAHEVPSRNIFSEQTIPPSAKYGGRHTVTMIPGDGIGPELMLHVKSVFRHACVPVDFEEVHVSSNADEEDIRNAIMAIRRNRVALKGNIETNHNLPPSHKSRNNILRTSLDLYANVIHCKSLPGVVTRHKDIDILIVRENTEGEYSSLEHESVAGVVESLKIITKAKSLRIAEYAFKLAQESGRKKVTAVHKANIMYVP

SEQ ID NO: 848542 - protein, 220 aa, Homo sapiens
MIPGDGIGPELMLHVKSVFRHACVPVDFEEVHVSSNADEEDIRNAIMAIRRNRVALKGNIETNHNLPPSHKSRNNILRTSLDLYANVIHCKSLPGVVTRHKDIDILIVRENTEGEYSSLEHESVAGVVESLKIITKAKSLRIAEYAFKLAQESGRKKVTAVHKANIINWGDGHLDSTAAGRSADRYPQRSLREPVTLMDNRHQHTMEVTRNYSSVIDIGE

SEQ ID NO: 848543 - protein, 97 aa, Homo sapiens
SGHPHATLSGRKQAPRPPELTVVPKGSKTSRPLALGRAPAGAPLYLPPGPREDPPVRDVAAGSARVEGLSSSSSILSPLPPHKHHSLNLLASLVCLI

SEQ ID NO: 848544 - protein, 190 aa, Homo sapiens
MEAETKTLPLENASILSEGSLQEGHRLWIGNLDPKITEYHLLKLLQKFGKVKQFDFLFHKSGALEGQPRGYCFVNFETKQEAEQAIQCLNGKLALSKKLVVRWAHAQVKRYDHNKNDKILPISLEPSSSTEPTQSNLSVTAKIKAIEAKLKMMAENPDAEYPAAPVYSYFKPPDKKRTTPYSRTAWKSRR

SEQ ID NO: 848545 - protein, 146 aa, Homo sapiens
MEAETKTLPLENASILSEGSLQEGHRLWIGNLDPKITEYHLLKLLQKFGKVKQFDFLFHKSGALEGQPRGYCFVNFETKQEAEQAIQCLNGKLALSKKLVVRWAHAQVKRYDHNKNDKILPISLEPSSSTEPTQSNLRGPQLTSLY

SEQ ID NO: 848546 - protein, 190 aa, Homo sapiens; identical to SEQ ID NO: 848544

SEQ ID NO: 848547 - protein, 190 aa, Homo sapiens; identical to SEQ ID NO: 848544

SEQ ID NO: 848548 - protein, 268 aa, Homo sapiens
MGSAKSVPVTPARPPPHNKHLARVADPRSPSAGILRTPIQVESSPQPGLPAGEQLEGLKHAQDSDPRSPTLGIARTPMKTSSGDPPSPLVKQLSEVFETEDSKSNLPPEPVLPPEAPLSSELDLPLGTQLSVEEQMPPWNQTEFPSKQVFSKEEARQPTETPVASQSSDKPSRDPETPRSSGSMRNRWKPNSSKVLGRSPLTILQDDNSPGTLTLRQGKRPSPLSENVSELKEGAILGTGRLLKTGGRAWEQGQDHDKENQHFPLVES

SEQ ID NO: 848549 - protein, 268 aa, Homo sapiens; identical to SEQ ID NO: 848548

SEQ ID NO: 848550 - protein, 195 aa, Homo sapiens
MGSAKSVPVTPARPPPHNKHLARVADPRSPSAGILRTPIQVESSPQPGLPAGEQLEGLKHAQDSDPRSPTLGIARTPMKTSSGDPPSPLVKQLSEVFETEDSKSNLPPEPVLPPEAPLSSELDLPLGTQLSVEEQMPPWNQTEFPSKQVFSKEEARQPTETPVASQSSDKPSRDPETPRSSGTESKARCREDKLG

SEQ ID NO: 848551 - protein, 133 aa, Homo sapiens
MPPWNQTEFPSKQVFSKEEARQPTETPVASQSSDKPSRDPETPRSSGSMRNRWKPNSSKVLGRSPLTILQDDNSPGTLTLRQGKRPSPLSENVSELKEGAILGTGRLLKTGGRAWEQGQDHDKENQHFPLVES

SEQ ID NO: 848552 - protein, 182 aa, Homo sapiens
MGSAKSVPVTPARPPPHNKHLARVADPRSPSAGILRTPIQVESSPQPGLPAGEQLEGLKHAQDSDPRSPTLGIARTPMKTSSGDPPSPLVKQLSEVFETEDSKSNLPPEPVLPPEAPLSSELDLPLGTQLSVEEQMPPWNQTEFPSKQVFSKEEARQPTETPVASQSSDKPSRDPETPRSSG

SEQ ID NO: 848553 - protein, 182 aa, Homo sapiens; identical to SEQ ID NO: 848552

SEQ ID NO: 848554 - protein, 268 aa, Homo sapiens; identical to SEQ ID NO: 848548

SEQ ID NO: 848555 - protein, 259 aa, Homo sapiens
MGSAKSVPVTPARPPPHNKHLARVADPRSPSAGILRTPIQVESSPQPGLPAGEQLEGLKHAQDSDPRSPTLGIARTPMKTSSGDPPSPLVKQLSEVFETEDSKSNLPPEPVLPPEAPLSSELDLPLGTQLSVEEQMPPWNQTEFPSKQVFSKEEARQPTETPVASQSSDKPSRDPETPRSSGSMRNRWKPNSSKVLGRSPLTILQDDNSPGTLTLRQVKEEKVQAVTRISNEEGGRPFYPDLPSSEQQLPPTHTLPFSG

SEQ ID NO: 848556 - protein, 195 aa, Homo sapiens; identical to SEQ ID NO: 848550

SEQ ID NO: 848557 - protein, 105 aa, Homo sapiens
MKTSSGDPPSPLVKQLSEVFETEDSKSNLPPEPVLPPEAPLSSELDLPLGTQLSVEEQMPPWNQTEFPSKQVFSKEEARQPTETPVASQSSDKPSRDPETPRSSG

SEQ ID NO: 848558 - protein, 201 aa, Homo sapiens
MVSWIISRLVVLIFGTLYPAYYSYKAVKSKDIKEYVKWMMYWIIFALFTTAETFTDIFLCWFPFYYELKIAFVAWLLSPYTKGSSLLYRKFVHPTLSSKEKEIDDCLVQAKDRSYDALVHFGKRGLNVAATAAVMAASKGQGALSERLRSFSMQDLTTIRGDGAPAPSGPPPPGSGRASGKHGQPKMSRSASESASSSGTA

SEQ ID NO: 848559 - protein, 266 aa, Homo sapiens
TRRPDQTRPDQTRPDDQTRPDQTRPDQRPDQTRPDQTRPETRPDQTRPDQTRDQTRPDQTRPDQRPDQTRPDQTRPETRPDQTRPDQTRDQTRPDQTRPDQRPDQTRPDQTRPETRPDQTRPDQTRDQTRPDQTRPDQRPDQTRPDQTRPETRPDQTRPDQTRDQTRPDQTRPDQRPDQTRPDQTRPETRPDQTRPDQTRDQTRPDQTRPDQRPDQTRPDQTRPETRPDQTRPDQTRDQTRPDQTRPDQRPDQTRPDHIELTVSQL

SEQ ID NO: 848560 - protein, 201 aa, Homo sapiens; identical to SEQ ID NO: 848558

SEQ ID NO: 848561 - protein, 201 aa, Homo sapiens; identical to SEQ ID NO: 848558

SEQ ID NO: 848562 - protein, 518 aa, Homo sapiens
MAASMARRLWPLLTRRGFRPRGGCISNDSPRRSFTTEKRNRNLLYEYAREGYSALPQLDIERFCACPEEAAHALELRKGELRSADLPAIISTWQELRQLQEQIRSLEEEKAAVTEAVRALLANQDSGEVQQDPKYQGLRARGREIRKELVHLYPREAQLEEQFYLQALKLPNQTHPDVPVGDESQARVLHMVGDKPVFSFQPRGHLEIGEKLDIIRQKRLSHVSGHRSYYLRGAGALLQHGLVNFTFNKLLRRGFTPMTVPDLLRGAVFEGCGMTPNANPSQIYNIDPARFKDLNLAGTAEVGLAGYFMDHTVAFRDLPVRMVCSSTCYRAETNTGQEPRGLYRVHHFTKVEMFGVTGPGLEQSSQLLEEFLSLQMEILTELGLHFRVLDMPTQELGLPAYRKFDIEAWMPGRGRFGEVTSASNCTDFQSRRLHIMFQTEAGELQFAHTVNATACAVPRLLIALLESNQQKDGSVLVPPALQSYLGTDRITAPTHVPLQYIGPNQPRKPGLPGQPAVS

SEQ ID NO: 848563 - protein, 518 aa, Homo sapiens; identical to SEQ ID NO: 848562

SEQ ID NO: 848564 - protein, 539 aa, Homo sapiens
MAASMARRLWPLLTRRGFRPRGGCISNDSPRRSFTTEKRNRNLLYEYAREGYSALPQLDIERFCACPEEAAHALELRKGELRSADLPAIISTWQELRQLQEQIRSLEEEKAAVTEAVRALLANQDSGEVQQDPKYQGLRARGREIRKELVHLYPREAQLEEQFYLQALKLPNQTHPDVPVGDESQARVLHMVGDKPVFSFQPRGHLEIGEKLDIIRQKRLSHVSGHRSYYLRGAGALLQHGLVNFTFNKLLRRGFTPMTVPDLLRGAVFEGCGMTPNANPSQIYNIDPARFKDLNLAGTAEVGLAGYFMDHTVAFRDLPVRMVCSSTCYRAETNTGQEPRGLYRVHHFTKVEMFGVTGPGLEQSSQLLEEFLSLQMEILTELGLHFRVLDMPTQELGLPAYRKFDIEAWMPGRGRFGEVTSASNCTDFQSRRLHIMFQTEAGELQFAHTVNATACAVPRLLIALLESNQQKDGSVLVPPALQSYLGTDRITAPTHVPLQYIGPNQPRKPGLPGQPALHARAPGPRGPPLLCPCCLRVSH

SEQ ID NO: 848565 - protein, 420 aa, Homo sapiens
MSTTGALPVRIKVTLDEGVLTLSRAEPTCCCPQDPKYQGLRARGREIRKELVHLYPREAQLEEQFYLQALKLPNQTHPDVPVGDESQARVLHMVGDKPVFSFQPRGHLEIGEKLDIIRQKRLSHVSGHRSYYLRGAGALLQHGLVNFTFNKLLRRGFTPMTVPDLLRGAVFEGCGMTPNANPSQIYNIDPARFKDLNLAGTAEVGLAGYFMDHTVAFRDLPVRMVCSSTCYRAETNTGQEPRGLYRVHHFTKVEMFGVTGPGLEQSSQLLEEFLSLQMEILTELGLHFRVLDMPTQELGLPAYRKFDIEAWMPGRGRFGEVTSASNCTDFQSRRLHIMFQTEAGELQFAHTVNATACAVPRLLIALLESNQQKDGSVLVPPALQSYLGTDRITAPTHVPLQYIGPNQPRKPGLPGQPAVS

SEQ ID NO: 848566 - protein, 245 aa, Homo sapiens
MTPNANPSQIYNIDPARFKDLNLAGTAEVGLAGYFMDHTVAFRDLPVRMVCSSTCYRAETNTGQEPRGLYRVHHFTKVEMFGVTGPGLEQSSQLLEEFLSLQMEILTELGLHFRVLDMPTQELGLPAYRKFDIEAWMPGRGRFGEVTSASNCTDFQSRRLHIMFQTEAGELQFAHTVNATACAVPRLLIALLESNQQKDGSVLVPPALQSYLGTDRITAPTHVPLQYIGPNQPRKPGLPGQPAVS

SEQ ID NO: 848567 - protein, 518 aa, Homo sapiens; identical to SEQ ID NO: 848562

SEQ ID NO: 848568 - protein, 518 aa, Homo sapiens; identical to SEQ ID NO: 848562

SEQ ID NO: 848569 - protein, 510 aa, Homo sapiens
MAASMARRLWPLLTRRGFRPRGGCISNDSPRRSFTTEKRNRNLLYEYAREGYSALPQLDIERFCACPEEAAHALELRKGELRSADLPAIISTWQELRQLQEQIRSLEEEKAAVTEAVRALLANQDSGEVQQDPKYQGLRARGREIRKELVHLYPREAQLEEQFYLQALKLPNQTHPDVPVGDESQARVLHMVGDKPVFSFQPRGHLEIGEKLDIIRQKRLSHVSGHRSYYLRGAGALLQHGLVNFTFNKLLRRGFTPMTVPDLLRGAVFEGCGMTPNANPSQIYNIDPARFKDLNLAGTAEVGLAGYFMDHTVAFRDLPVRMVCSSTCYRAETNTGQEPRGLYRVHHFTKVEMFGVTGPGLEQSSQLLEEFLSLQMEILTELGLHFRVLDMPTQELGLPAYRKFDIEAWMPGRGRFGEVTSASNCTDFQSRRLHIMFQTEAGELQFAHTVRPAQPPARVPSPAASAALDPPTLAPPRAQLGVGASSEHGCLTGERHRLCCPPPSHRAPGE

SEQ ID NO: 848570 - protein, 539 aa, Homo sapiens; identical to SEQ ID NO: 848564

SEQ ID NO: 848571 - protein, 495 aa, Homo sapiens
MAASMARRLWPLLTRRGFRPRGGCISNDSPRRSFTTEKRNRNLLYEYAREGYSALPQLDIERFCACPEEAAHALELRKGELRSADLPAIISTWQELRQLQEQIRSLEEEKAAVTEAVRALLIRKELVHLYPREAQLEEQFYLQALKLPNQTHPDVPVGDESQARVLHMVGDKPVFSFQPRGHLEIGEKLDIIRQKRLSHVSGHRSYYLRGAGALLQHGLVNFTFNKLLRRGFTPMTVPDLLRGAVFEGCGMTPNANPSQIYNIDPARFKDLNLAGTAEVGLAGYFMDHTVAFRDLPVRMVCSSTCYRAETNTGQEPRGLYRVHHFTKVEMFGVTGPGLEQSSQLLEEFLSLQMEILTELGLHFRVLDMPTQELGLPAYRKFDIEAWMPGRGRFGEVTSASNCTDFQSRRLHIMFQTEAGELQFAHTVNATACAVPRLLIALLESNQQKDGSVLVPPALQSYLGTDRITAPTHVPLQYIGPNQPRKPGLPGQPAVS

SEQ ID NO: 848572 - protein, 166 aa, Homo sapiens [sequence omitted]

SEQ ID NO: 848573 - protein, 890 aa, Homo sapiens
MSANNSPPSAQKSVLPTAIPAVLPAASPCSSPKTGLSARLSNGSFSAPSLTNSRGSVHTVSFLLQIGLTRESVTIEAQELSLSAVKDLVCSIVYQKFPECGFFGMYDKILLFRHDMNSENILQLITSADEIHEGDLVEVVLSALATVEDFQIRPHTLYVHSYKAPTFCDYCGEMLWGLVRQGLKCEGCGLNYHKRCAFKIPNNCSGVRKRRLSNVSLPGPGLSVPRPLQPEYVALPSEESHVHQEPSKRIPSWSGRPIWMEKMVMCRVKVPHTFAVHSYTRPTICQYCKRLLKGLFRQGMQCKDCKFNCHKRCASKVPRDCLGEVTFNGEPSSLGTDTDIPMDIDNNDINSDSSRGLDDTEEPSPPEDKMFFLDPSDLDVERDEEAVKTISPSTSNNIPLMRVVQSIKHTKRKSSTMVKEGWMVHYTSRDNLRKRHYWRLDSKCLTLFQNESGSKYYKEIPLSEILRISSPRDFTNISQGSNPHCFEIITDTMVYFVGENNGDSSHNPVLAATGVGLDVAQSWEKAIRQALMPVTPQASVCTSPGQGKDHKDLSTSISVSNCQIQENVDISTVYQIFADEVLGSGQFGIVYGGKHRKTGRDVAIKVIDKMRFPTKQESQLRNEVAILQNLHHPGIVNLECMFETPERVFVVMEKLHGDMLEMILSSEKSRLPERITKFMVTQILVALRNLHFKNIVHCDLKPENVLLASAEPFPQVKLCDFGFARIIGEKSFRRSVVGTPAYLAPEVLRSKGYNRSLDMWSVGVIIYVSLSGTFPFNEDEDINDQIQNAAFMYPPNPWREISGEAIDLINNLLQVKMRKRYSVDKSLSHPWLQDYQTWLDLREFETRIGERYITHESDDARWEIHAYTHNLVYPKHFIMAPNPDDMEEDP

SEQ ID NO: 848574 - protein, 281 aa, Homo sapiens
MRFPTKQESQLRNEVAILQNLHHPGIVNLECMFETPERVFVVMEKLHGDMLEMILSSEKSRLPERITKFMVTQILVALRNLHFKNIVHCDLKPENVLLASAEPFPQVKLCDFGFARIIGEKSFRRSVVGTPAYLAPEVLRSKGYNRSLDMWSVGVIIYVSLSGTFPFNEDEDINDQIQNAAFMYPPNPWREISGEAIDLINNLLQVKMRKRYSVDKSLSHPWLQDYQTWLDLREFETRIGERYITHESDDARWEIHAYTHNLVYPKHFIMAPNPDDMEEDP

SEQ ID NO: 848575 - protein, 890 aa, Homo sapiens; identical to SEQ ID NO: 848573

SEQ ID NO: 848576 - protein, 480 aa, Homo sapiens [sequence omitted]

SEQ ID NO: 848577 - protein, 890 aa, Homo sapiens; identical to SEQ ID NO: 848573

SEQ ID NO: 848578 - protein, 890 aa, Homo sapiens; identical to SEQ ID NO: 848573

SEQ ID NO: 848579 - protein, 611 aa, Homo sapiens
MSANNSPPSAQKSVLPTAIPAVLPAASPCSSPKTGLSARLSNGSFSAPSLTNSRGSVHTVSFLLQIGLTRESVTIEAQELSLSAVKDLVCSIVYQKFPECGFFGMYDKILLFRHDMNSENILQLITSADEIHEGDLVEVVLSALATVEDFQIRPHTLYVHSYKAPTFCDYCGEMLWGLVRQGLKCEGCGLNYHKRCAFKIPNNCSGVRKRRLSNVSLPGPGLSVPRPLQPEYVALPSEESHVHQEPSKRIPSWSGRPIWMEKMVMCRVKVPHTFAVHSYTRPTICQYCKRLLKGLFRQGMQCKDCKFNCHKRCASKVPRDCLGEVTFNGEPSSLGTDTDIPMDIDNNDINSDSSRGLDDTEEPSPPEDKMFFLDPSDLDVERDEEAVKTISPSTSNNIPLMRVVQSIKHTKRKSSTMVKEGWMVHYTSRDNLRKRHYWRLDSKCLTLFQNESGSKYYKEIPLSEILRISSPRDFTNISQGSNPHCFEIITDTMVYFVGENNGDSSHNPVLAATGVGLDVAQSWEKAIRQALMPVTPQASVCTSPGQGKDHKDLSTSISVSNCQIQENVDISTVYQIFADEVLGSGQFGIVYGGKQLQPFAYCTHYFKNWKM

SEQ ID NO: 848580 - protein, 129 aa, Homo sapiens
GVLILPSSQQGTGRQHVGPVHSRDHPKLLGRCLSHPSVDSDPSWRCRAWRSRVGRRAFPKSLESHRQGTGRRWWLFRFSESHLIPILLVLRLGISVNLLIVNLAVCSLPKESALFRFSVESFLSIRDCY

SEQ ID NO: 848581 - protein, 68 aa, Homo sapiens
AAAYYYYYYYYYYSLEFKLLTMYGDMNLEANGTVSTTANSFWSLYRRTSEILQVRFQTTSKKQLLQIE

SEQ ID NO: 848582 - protein, 459 aa, Homo sapiens
MLRWLIGGGREPQGLAEKSPLQTIGEEQTQNPYTELLVLKAHHDIVRFLVQLDDYRFASAGDDGIVVVWNAQTGEKLLELNGHTQKITAIITFPSLESCEEKNQLILTASADRTVIVWDGDTTRQVQRISCFQSTVKCLTVLQRLDVWLSGGNDLCVWNRKLDLLCKTSHLSDTGISALVEIPKNCVVAAVGKELIIFRLVAPTEGSLEWDILEVKRLLDHQDNILSLINVNDLSFVTGSHVGELIIWDALDWTMQAYERNFWDPSPQLDTQQEIKLCQKSNDISIHHFTCDEENVFAAVGRGLYVYSLQMKRVIACQKTAHDSNVLHIARLPNRQLISCSEDGSVRIWELREKQQLAAEPVPTGFFNMWGFGRVSKQASQPVKKQQENATSCSLELIGDLIGHSSSVEMFLYFEDHGLVTCSADHLIILWKNGERESGLRSLRLFQKLEENGDLYLAV

SEQ ID NO: 848583 - protein, 140 aa, Homo sapiens [sequence omitted]

SEQ ID NO: 848584 - protein, 459 aa, Homo sapiens; identical to SEQ ID NO: 848582

SEQ ID NO: 848585 - protein, 438 aa, Homo sapiens
MLRWLIGGGREPQGLAEKSPLQTIGEEQTQNPYTELLVLKAHHDIVRFLVQLDDYRFASAGDDGIVVVWNAQTGEKLLELNGHTQKITAIITFPSLESCEEKNQLILTASADRTVIVWDGDTTRQVQRISCFQSTVKCLTVLQRLDVWLSGGNDLCVWNRKLDLLCKTSHLSDTVIFRLVAPTEGSLEWDILEVKRLLDHQDNILSLINVNDLSFVTGSHVGELIIWDALDWTMQAYERNFWDPSPQLDTQQEIKLCQKSNDISIHHFTCDEENVFAAVGRGLYVYSLQMKRVIACQKTAHDSNVLHIARLPNRQLISCSEDGSVRIWELREKQQLAAEPVPTGFFNMWGFGRVSKQASQPVKKQQENATSCSLELIGDLIGHSSSVEMFLYFEDHGLVTCSADHLIILWKNGERESGLRSLRLFQKLEENGDLYLAV

SEQ ID NO: 848586 - protein, 105 aa, Homo sapiens
MLRWLIGGGREPQGLAEKSPLQTIGEEQTQNPYTELLVLKAHHDIVRFLVQLDDYRFASAGDDGIVVVWNAQTGEKLLELNGHTQKITAIITFPSLESCEESVGW

SEQ ID NO: 848587 - protein, 459 aa, Homo sapiens; identical to SEQ ID NO: 848582

SEQ ID NO: 848588 - protein, 459 aa, Homo sapiens; identical to SEQ ID NO: 848582

SEQ ID NO: 848589 - protein, 238 aa, Homo sapiens
MLRWLIGGGREPQGLAEKSPLQTIGEEQTQNPYTELLVLKAHHDIVRFLVQLDDYRFASAGDDGIVVVWNAQTGEKLLELNGHTQKITAIITFPSLESCEEKNQLILTASADRTVIVWDGDTTRQVQRISCFQSTVKCLTVLQRLDVWLSGGNDLCVWNRKLDLLCKTSHLSDTGISALVEIPKNCVVAAVGKELIIFRLVAPTEGSLEWDILEVKRLLDHQDNILSLINVNDRGQNF

SEQ ID NO: 848590 - protein, 459 aa, Homo sapiens; identical to SEQ ID NO: 848582

SEQ ID NO: 848591 - protein, 459 aa, Homo sapiens; identical to SEQ ID NO: 848582

SEQ ID NO: 848592 - protein, 459 aa, Homo sapiens; identical to SEQ ID NO: 848582

SEQ ID NO: 848593 - protein, 299 aa, Homo sapiens
MFGFLVGMTCVCGTGISALVEIPKNCVVAAVGKELIIFRLVAPTEGSLEWDILEVKRLLDHQDNILSLINVNDLSFVTGSHVGELIIWDALDWTMQAYERNFWDPSPQLDTQQEIKLCQKSNDISIHHFTCDEENVFAAVGRGLYVYSLQMKRVIACQKTAHDSNVLHIARLPNRQLISCSEDGSVRIWELREKQQLAAEPVPTGFFNMWGFGRVSKQASQPVKKQQENATSCSLELIGDLIGHSSSVEMFLYFEDHGLVTCSADHLIILWKNGERESGLRSLRLFQKLEENGDLYLAV

SEQ ID NO: 848594 - protein, 251 aa, Homo sapiens
MLRWLIGGGREPQGLAEKSPLQTIDLSFVTGSHVGELIIWDALDWTMQAYERNFWDPSPQLDTQQEIKLCQKSNDISIHHFTCDEENVFAAVGRGLYVYSLQMKRVIACQKTAHDSNVLHIARLPNRQLISCSEDGSVRIWELREKQQLAAEPVPTGFFNMWGFGRVSKQASQPVKKQQENATSCSLELIGDLIGHSSSVEMFLYFEDHGLVTCSADHLIILWKNGERESGLRSLRLFQKLEENGDLYLAV

SEQ ID NO: 848595 - protein, 459 aa, Homo sapiens; identical to SEQ ID NO: 848582

SEQ ID NO: 848596 - protein, 356 aa, Homo sapiens
MFPSSQIPSWKDWAKPGPYDQPLVNTLQRRKEKREPDPNGGGPTTASGPPAAAEEAQRPRSMTVSAATRPGEEMEACEELALALSRGLQLDTQRSSRDSLQCSSGYSTQTTTPCCSEDTIPSQVSDYDYFSVSGDQEADQQEFDKSSTIPRNSDISQSYRRMFQAKRPASTAGLPTTLGPAMVTPGVATIRRTPSTKPSVRRGTIGAGPIPIKTPVIPVKTPTVPDLPGVLPAPPDGPEERGEHSPESPSVGEGPQGVTSMPSSMWSGQASVNPPLPGPKPSIPEEHRQAIPESEAEDQEREPPSATVSPGQIPESDPADLSPRDTPQGEDMLNAIRRGVKLKKTTTNDRSAPRFS

SEQ ID NO: 848597 - protein, 755 aa, Homo sapiens
MEAVIEKECSALGGLFQTIISDMKGSYPVWEDFINKAGKLQSQLRTTVVAAAAFLDAFQKVADMATNTRGGTREIGSALTRMCMRHRSIEAKLRQFSSALIDCLINPLQEQMEEWKKVANQLDKDHAKEYKKARQEIKKKSSDTLKLQKKAKKGRGDIQPQLDSALQDVNDKYLLLEETEKQAVRKALIEERGRFCTFISMLRPVIEEEISMLGEITHLQTISEDLKSLTMDPHKLPSSSEQVILDLKGSDYSWSYQTPPSSPSTTMSRKSSVCSSLNSVNSSDSRSSGSHSHSPSSHYRYRSSNLAQQAPVRLSSVSSHDSGFISQDAFQSKSPSPMPPEAPNQLSNGFSHYSLSSESHVGPTGAGLFPHCLPASRLLPRVTSVHLPDYAHYYTIGPGMFPSSQIPSWKDWAKPGPYDQPLVNTLQRRKEKREPDPNGGGPTTASGPPAAAEEAQRPRSMTVSAATRPGEEMEACEELALALSRGLQLDTQRSSRDSLQCSSGYSTQTTTPCCSEDTIPSQVSDYDYFSVSGDQEADQQEFDKSSTIPRNSDISQSYRRMFQAKRPASTAGLPTTLGPAMVTPGVATIRRTPSTKPSVRRGTIGAGPIPIKTPVIPVKTPTVPDLPGVLPAPPDGPEERGEHSPESPSVGEGPQGVTSMPSSMWSGQASVNPPLPGPKPSIPEEHRQAIPESEAEDQEREPPSATVSPGQIPESDPADLSPRDTPQGEDMLNAIRRGVKLKKTTTNDRSAPRFS

SEQ ID NO: 848598 - protein, 755 aa, Homo sapiens; identical to SEQ ID NO: 848597

SEQ ID NO: 848599 - protein, 755 aa, Homo sapiens; identical to SEQ ID NO: 848597

SEQ ID NO: 848600 - protein, 611 aa, Homo sapiens
RGVGRALCAGRGDIQPQLDSALQDVNDKYLLLEETEKQAVRKALIEERGRFCTFISMLRPVIEEEISMLGEITHLQTISEDLKSLTMDPHKLPSSSEQVILDLKGSDYSWSYQTPPSSPSTTMSRKSSVCSSLNSVNSSDSRSSGSHSHSPSSHYRYRSSNLAQQAPVRLSSVSSHDSGFISQDAFQSKSPSPMPPEAPNQLSNGFSHYSLSSESHVGPTGAGLFPHCLPASRLLPRVTSVHLPDYAHYYTIGPGMFPSSQIPSWKDWAKPGPYDQPLVNTLQRRKEKREPDPNGGGPTTASGPPAAAEEAQRPRSMTVSAATRPGEEMEACEELALALSRGLQLDTQRSSRDSLQCSSGYSTQTTTPCCSEDTIPSQVSDYDYFSVSGDQEADQQEFDKSSTIPRNSDISQSYRRMFQAKRPASTAGLPTTLGPAMVTPGVATIRRTPSTKPSVRRGTIGAGPIPIKTPVIPVKTPTVPDLPGVLPAPPDGPEERGEHSPESPSVGEGPQGVTSMPSSMWSGQASVNPPLPGPKPSIPEEHRQAIPESEAEDQEREPPSATVSPGQIPESDPADLSPRDTPQGEDMLNAIRRGVKLKKTTTNDRSAPRFS

SEQ ID NO: 848601 - protein, 557 aa, Homo sapiens
MIGSWRRPRTRAHVYRTLAGRPHPLLPVPCLTMDPHKLPSSSEQVILDLKGSDYSWSYQTPPSSPSTTMSRKSSVCSSLNSVNSSDSRSSGSHSHSPSSHYRYRSSNLAQQAPVRLSSVSSHDSGFISQDAFQSKSPSPMPPEAPNQLSNGFSHYSLSSESHVGPTGAGLFPHCLPASRLLPRVTSVHLPDYAHYYTIGPGMFPSSQIPSWKDWAKPGPYDQPLVNTLQRRKEKREPDPNGGGPTTASGPPAAAEEAQRPRSMTVSAATRPGEEMEACEELALALSRGLQLDTQRSSRDSLQCSSGYSTQTTTPCCSEDTIPSQVSDYDYFSVSGDQEADQQEFDKSSTIPRNSDISQSYRRMFQAKRPASTAGLPTTLGPAMVTPGVATIRRTPSTKPSVRRGTIGAGPIPIKTPVIPVKTPTVPDLPGVLPAPPDGPEERGEHSPESPSVGEGPQGVTSMPSSMWSGQASVNPPLPGPKPSIPEEHRQAIPESEAEDQEREPPSATVSPGQIPESDPADLSPRDTPQGEDMLNAIRRGVKLKKTTTNDRSAPRFS

SEQ ID NO: 848602 - protein, 755 aa, Homo sapiens; identical to SEQ ID NO: 848597

SEQ ID NO: 848603 - protein, 755 aa, Homo sapiens; identical to SEQ ID NO: 848597

SEQ ID NO: 848604 - protein, 755 aa, Homo sapiens; identical to SEQ ID NO: 848597

SEQ ID NO: 848605 - protein, 155 aa, Homo sapiens [sequence omitted]

SEQ ID NO: 848606 - protein, 690 aa, Homo sapiens
MEAVIEKECSALGGLFQTIISDMKGSYPVWEDFINKAGKLQSQLRTTVVAAAAFLDAFQKVADMATNTRGGTREIGSALTRMCMRHRSIEAKLRQFSSALIDCLINPLQEQMEEWKKVANQLDKDHAKEYKKARQEIKKKSSDTLKLQKKAKKGRGDIQPQLDSALQDVNDKYLLLEETEKQAVRKALIEERGRFCTFISMLRPVIEEEISMLGEITHLQTISEDLKSLTMDPHKLPSSSEQVILDLKGSDYSWSYQTPPSSPSTTMSRKSSVCSSLNSVNSSDSRSSGSHSHSPSSHYRYRSSNLAQQAPVRLSSVSSHDSGFISQDAFQSKSPSPMPPEAPNQDWAKPGPYDQPLVNTLQRRKEKREPDPNGGGPTTASGPPAAAEEAQRPRSMTVSAATRPGEEMEACEELALALSRGLQLDTQRSSRDSLQCSSGYSTQTTTPCCSEDTIPSQVSDYDYFSVSGDQEADQQEFDKSSTIPRNSDISQSYRRMFQAKRPASTAGLPTTLGPAMVTPGVATIRRTPSTKPSVRRGTIGAGPIPIKTPVIPVKTPTVPDLPGVLPAPPDGPEERGEHSPESPSVGEGPQGVTSMPSSMWSGQASVNPPLPGPKPSIPEEHRQAIPESEAEDQEREPPSATVSPGQIPESDPADLSPRDTPQGEDMLNAIRRGVKLKKTTTNDRSAPRFS

SEQ ID NO: 848607 - protein, 529 aa, Homo sapiens
RGVGRALCAGRGDIQPQLDSALQDVNDKYLLLEETEKQAVRKALIEERGRFCTFISMLRPVIEEEISMLGEITHLQTISEDLKSLTMDPHKLPSSSEQVILDLKGSDYSWSYQTPPSSPSTTMSRKSSVCSSLNSVNSSDSRSSGSHSHSPSSHYRYRSSNLAQQAPVRLSSVSSHDSGFISQDAFQSKSPSPMPPEAPNQRRKEKREPDPNGGGPTTASGPPAAAEEAQRPRSMTVSAATRPGEEMEACEELALALSRGLQLDTQRSSRDSLQCSSGYSTQTTTPCCSEDTIPSQVSDYDYFSVSGDQEADQQEFDKSSTIPRNSDISQSYRRMFQAKRPASTAGLPTTLGPAMVTPGVATIRRTPSTKPSVRRGTIGAGPIPIKTPVIPVKTPTVPDLPGVLPAPPDGPEERGEHSPESPSVGEGPQGVTSMPSSMWSGQASVNPPLPGPKPSIPEEHRQAIPESEAEDQEREPPSATVSPGQIPESDPADLSPRDTPQGEDMLNAIRRGVKLKKTTTNDRSAPRFS

SEQ ID NO: 848608 - protein, 755 aa, Homo sapiens; identical to SEQ ID NO: 848597

SEQ ID NO: 848609 - protein, 755 aa, Homo sapiens; identical to SEQ ID NO: 848597

SEQ ID NO: 848610 - protein, 158 aa, Homo sapiens
MCSCPISSPGHIKGLGQEETPVRSADLVFKERMPACNTHGEGHFLAPPAKYLQTLGRRLHSQHRTSLNSFRISDHHHVQVSECRPTTRDGFHPPALLQIHAAQQARAWREQLLSTAPLEPSPRSRSSPVLMMPSCCWPETVSQLQQDDTGFRNMWLSP

SEQ ID NO: 848611 - protein, 96 aa, Homo sapiens
ASGRVARANQVKGEWRRSGGNSYGSGGASYNPGSHGGYGGGSGGGSSYQGKQGGYSQSNYNSPGSGQNYSGPPSSYQSSQGGYGRNADHSMNYQYR

SEQ ID NO: 848612 - protein, 562 aa, Homo sapiens
MSRMVVLQLEATGEVQAGLSLCGCPTHCVTPQRQPWGLGLAELSWRPAIVLIQSHLAILSVEEKAEPPQAMNALMRLNQLKPGLQYKLVSQTGPVHAPIFTMSVEVDGNSFEASGPSKKTAKLHVAVKVLQDMGLPTGAEGRDSSKGEDSAEETEAKPAVVAPAPVVEAVSTPSAAFPSDATAEQGPILTKHGKNPVMELNEKRRGLKYELISETGGSHDKRFVMEVEVDGQKFQGAGSNKKVAKAYAALAALEKLFPDTPLALDANKKKRAPVPVRGGPKFAAKPHNPGFGMGGPMHNEVPPPPNLRGRGRGGSIRGRGRGRGFGGANHGGYMNAGAGYGSYGYGGNSATAGYSQFYSNGGHSGNASGGGGGGGGGSSGYGSYYQGDNYNSPVPPKHAGKKQPHGGQQKPSYGSGYQSHQGQQQSYNQSPYSNYGPPQGKQKGYNHGQGSYSYSNSYNSPGGGGGSDYNYESKFNYSGSGGRSGGNSYGSGGASYNPGSHGGYGGGSGGGSSYQGKQGGYSQSNYNSPGSGQNYSGPPSSYQSSQGGYGRNADHSMNYQYR

SEQ ID NO: 848613 - protein, 118 aa, Homo sapiens
NGVGRRRRTCRPGSVNRRGLVVCTTQALQWAGFPTLFLLLGKQRGPSGWSLVLREGPVQASRHFTHAQRRLVPGPLGCVDPVSHQAPGSHHLQRGLQRPFWSWGTHHKIGFFCSPILV

SEQ ID NO: 848614 - protein, 158 aa, Homo sapiens; identical to SEQ ID NO: 848610

SEQ ID NO: 848615 - protein, 158 aa, Homo sapiens; identical to SEQ ID NO: 848610

SEQ ID NO: 848616 - protein, 150 aa, Homo sapiens
MARVRGWVFEETPVRSADLVFKERMPACNTHGEGHFLAPPAKYLQTLGRRLHSQHRTSLNSFRISDHHHVQVSECRPTTRDGFHPPALLQIHAAQQARAWREQLLSTAPLEPSPRSRSSPVLMMPSCCWPETVSQLQQDDTGFRNMWLSP

SEQ ID NO: 848617 - protein, 126 aa, Homo sapiens
MPACNTHGEGHFLAPPAKYLQTLGRRLHSQHRTSLNSFRISDHHHVQVSECRPTTRDGFHPPALLQIHAAQQARAWREQLLSTAPLEPSPRSRSSPVLMMPSCCWPETVSQLQQDDTGFRNMWLSP

SEQ ID NO: 848618 - protein, 591 aa, Homo sapiens
GHLDRQQREDITQSAQHALRLAAFGQLHKVLGMDPLPSKMPKKPKNENPVDYTVQIPPSTTYAITPMKRPMEEDGEEKSPSKKKKKIQKKEEKAEPPQAMNALMRLNQLKPGLQYKLVSQTGPVHAPIFTMSVEVDGNSFEASGPSKKTAKLHVAVKVLQDMGLPTGAEGRDSSKGEDSAEETEAKPAVVAPAPVVEAVSTPSAAFPSDATAEQGPILTKHGKNPVMELNEKRRGLKYELISETGGSHDKRFVMEVEVDGQKFQGAGSNKKVAKAYAALAALEKLFPDTPLALDANKKKRAPVPVRGGPKFAAKPHNPGFGMGGPMHNEVPPPPNLRGRGRGGSIRGRGRGRGFGGANHGGYMNAGAGYGSYGYGGNSATAGYSQFYSNGGHSGNASGGGGGGGGGSSGYGSYYQGDNYNSPVPPKHAGKKQPHGGQQKPSYGSGYQSHQGQQQSYNQSPYSNYGPPQGKQKGYNHGQGSYSYSNSYNSPGGGGGSDYNYESKFNYSGSGGRSGGNSYGSGGASYNPGSHGGYGGGSGGGSSYQGKQGGYSQSNYNSPGSGQNYSGPPSSYQSSQGGYGRNADHSMNYQYR

SEQ ID NO: 848619 - protein, 562 aa, Homo sapiens; identical to SEQ ID NO: 848612

SEQ ID NO: 848620 - protein, 158 aa, Homo sapiens; identical to SEQ ID NO: 848610

SEQ ID NO: 848621 - protein, 158 aa, Homo sapiens; identical to SEQ ID NO: 848610

SEQ ID NO: 848622 - protein, 562 aa, Homo sapiens; identical to SEQ ID NO: 848612

SEQ ID NO: 848623 - protein, 562 aa, Homo sapiens; identical to SEQ ID NO: 848612

SEQ ID NO: 848624 - protein, 562 aa, Homo sapiens; identical to SEQ ID NO: 848612

SEQ ID NO: 848625 - protein, 265 aa, Homo sapiens
MDGPAIITQVTNPKEDEGRLPGAGEKASQCNVSLKKQRSRSILSSFFCCFRDYNVEAPPPSSPSVLPPLVEENGGLQKPPAKYLLPEVTVLDYGKKCVVIDLDETLVHSSFKPISNADFIVPVEIDGTIHQVYVLKRPHVDEFLQRMGQLFECVLFTASLAKYADPVADLLDRWGVFRARLFRESCVFHRGNYVKDLSRLGRELSKVIIVDNSPASYIFHPENAVPVQSWFDDMTDTELLDLIPFFEGLSREDDVYSMLHRLCNR

SEQ ID NO: 848626 - protein, 276 aa, Homo sapiens
MDGPAIITQVTNPKEDEGRLPGAGEKASQCNVSLKKQRSRSILSSFFCCFRDYNVEAPPPSSPSVLPPLVEENGGLQKGDQRQVIPIPSPPAKYLLPEVTVLDYGKKCVVIDLDETLVHSSFKPISNADFIVPVEIDGTIHQVYVLKRPHVDEFLQRMGQLFECVLFTASLAKYADPVADLLDRWGVFRARLFRESCVFHRGNYVKDLSRLGRELSKVIIVDNSPASYIFHPENAVPVQSWFDDMTDTELLDLIPFFEGLSREDDVYSMLHRLCNR

SEQ ID NO: 848627 - protein, 276 aa, Homo sapiens; identical to SEQ ID NO: 848626

SEQ ID NO: 848628 - protein, 119 aa, Homo sapiens
MGQLFECVLFTASLAKYADPVADLLDRWGVFRARLFRESCVFHRGNYVKDLSRLGRELSKVIIVDNSPASYIFHPENAVPVQSWFDDMTDTELLDLIPFFEGLSREDDVYSMLHRLCNR

SEQ ID NO: 848629 - protein, 297 aa, Homo sapiens
MDGPAIITQVTNPKEDEGRLPGAGEKASQCNVSLKKQRSRSILSSFFCCFRDYNVEAPPPSSPSVLPPLVEENGGLQKGDQRQVIPIPSPPAKYLLPEVTVLDYGKKCVVIDLDETLVHSSFKPISNADFIVPVEIDGTIHQVYVLKRPHVDEFLQRMGQLFECVLFTASLAKYADPVADLLDRWGVFRARLFRESCVFHRGNYVKDLSRLGRELSKVIIVDNSPASYIFHPENAVPVQSWFDDMTDTELLDLIPFFEGLSREDDVYSMLHRLCNSWIHMELFGNFPCCYRAATKWN

SEQ ID NO: 848630 - protein, 334 aa, Homo sapiens
MDGPAIITQVTNPKEDEGRLPGAGEKASQCNVSLKKQRSRSILSSFFCCFRDYNVEAPPPSSPSVLPPLVEENGGLQKGDQRQVIPIPSPPAKYLLPEVTVLDYGKKCVVIDLDETLVHSSFKPISNADFIVPVEIDGTIHQVYVLKRPHVDEFLQRMGQLFECVLFTASLAKYADPVADLLDRWGVFRARLFRESCVFHRGNYVKDLSRLGRELSKVIIVDNSPASYIFHPENALDTHGAVWEFSLLLPRCHQMELTSGCYTVLCHCAYAQNMLTAKLQTRTGSETEVSHPIAASTTCNPFLALATEGYKGKRTTAPLRCSMDFKLQSVSDPV

SEQ ID NO: 848631 - protein, 276 aa, Homo sapiens; identical to SEQ ID NO: 848626

SEQ ID NO: 848632 - protein, 307 aa, Homo sapiens
MDGPAIITQVTNPKEDEGRLPGAGEKASQCNVSLKKQRSRSILSSFFCCFRDYNVEAPPPSSPSVLPPLVEENGGLQKGDQRQVIPIPSPPAKYLLPEVTVLDYGKKCVVIDLDETLVHSSFKPISNADFIVPVEIDGTIHQVYVLKRPHVDEFLQRMGQLFECVLFTASLAKYADPVADLLDRWGVFRARLFRESCVFHRGNYVKDLSRLGRELSKVIIVDNSPASYIFHPENAVPVQSWFDDMTDTELLDLIPFFEGLSREDDVYSMLHRLCNSNEASCQLHPPNSTLVCGLLCEYSEGKSFSAD

SEQ ID NO: 848633 - protein, 276 aa, Homo sapiens; identical to SEQ ID NO: 848626

SEQ ID NO: 848634 - protein, 328 aa, Homo sapiens
MDGPAIITQVTNPKEDEGRLPGAGEKDSLSEKGKKTSGRRIRKLSTHLGGRCNPRYKREGGQPGAVVHAYNPSTLGGQASQCNVSLKKQRSRSILSSFFCCFRDYNVEAPPPSSPSVLPPLVEENGGLQKGDQRQVIPIPSPPAKYLLPEVTVLDYGKKCVVIDLDETLVHSSFKPISNADFIVPVEIDGTIHQVYVLKRPHVDEFLQRMGQLFECVLFTASLAKYADPVADLLDRWGVFRARLFRESCVFHRGNYVKDLSRLGRELSKVIIVDNSPASYIFHPENAVPVQSWFDDMTDTELLDLIPFFEGLSREDDVYSMLHRLCNR

SEQ ID NO: 848635 - protein, 250 aa, Homo sapiens
MMAVCGERTRETSQCNVSLKKQRSRSILSSFFCCFRDYNVEAPPPSSPSVLPPLVEENGGLQKPPAKYLLPEVTVLDYGKKCVVIDLDETLVHSSFKPISNADFIVPVEIDGTIHQVYVLKRPHVDEFLQRMGQLFECVLFTASLAKYADPVADLLDRWGVFRARLFRESCVFHRGNYVKDLSRLGRELSKVIIVDNSPASYIFHPENAVPVQSWFDDMTDTELLDLIPFFEGLSREDDVYSMLHRLCNR

SEQ ID NO: 848636 - protein, 107 aa, Homo sapiens
MGWVYADPVADLLDRWGVFRARLFRESCVFHRGNYVKDLSRLGRELSKVIIVDNSPASYIFHPENAVPVQSWFDDMTDTELLDLIPFFEGLSREDDVYSMLHRLCNR

SEQ ID NO: 848637 - protein, 95 aa, Homo sapiens
LNLNKGTNKIMMITMMTPVVLTKESAQSPGTRLGEEQPPALDAVLLPPPCTVFQVPVQSWFDDMTDTELLDLIPFFEGLSREDDVYSMLHRLCNR

SEQ ID NO: 848638 - protein, 276 aa, Homo sapiens; identical to SEQ ID NO: 848626

SEQ ID NO: 848639 - protein, 128 aa, Homo sapiens
MQILRFSVYRSQPREHLFFTFLLKIHWGGIKFTPKKFAWAKSLQVPSENKILMIFFFFWLLGRDFQHSFTISRYVPSAHTLNFLIWFVSSSRKNGALPLLLYFKELLCLNHSSPAKKRQDERLEHVLP

SEQ ID NO: 848640 - protein, 128 aa, Homo sapiens; identical to SEQ ID NO: 848639

SEQ ID NO: 848641 - protein, 362 aa, Homo sapiens
MGNHTWEGCHVDSRVDHLFPPSLYIFVIGVGLPTNCLALWAAYRQVQQRNELGVYLMNLSIADLLYICTLPLWVDYFLHHDNWIHGPGSCKLFGFIFYTNIYISIAFLCCISVDRYLAVAHPLRFARLRRVKTAVAVSSVVWATELGANSAPLFHDELFRDRYNHTFCFEKFPMEGWVAWMNLYRVFVGFLFPWALMLLSYRGILRAVRGSVSTERQEKAKIKRLALSLIAIVLVCFAPYHVLLLSRSAIYLGRPWDCGFEERVFSAYHSSLAFTSLNCVADPILYCLVNEGARSDVAKALHNLLRFLASDKPQEMANASLTLETPLTSKRNSTAKAMTGSWAATPPSQGDQVQLKMLPPAQ

SEQ ID NO: 848642 - protein, 218 aa, Homo sapiens
PACIGDVTVNSKQLDKDSPVSAFTVNRCYAVAQEGTYFDGSGYAALVKEGYKVQSDVNITLEFRTSSQNGVLLGISTAKVDAIGLELVDGKVLFHVNNGAGRITAAYEPKTATVLCDGKWHTLQANKSKHRITLIVDGNAVGAESPHTQSTSVDTNNPIYVGGYPAGVKQKCLRSQTSFRGCLRKLALIKSPQVQSFDFSRAFELHGVFLHSCPGTES

SEQ ID NO: 848643 - protein, 93 aa, Homo sapiens
TNRFQENAVEITRQTNESLLILRAIPEGIRDKGAKTKELATSASQSAVSTLRDVAGLSQELLNTSASLSRVNTTLRAFELHGVFLHSCPGTES

SEQ ID NO: 848644 - protein, 218 aa, Homo sapiens; identical to SEQ ID NO: 848642

SEQ ID NO: 848645 - protein, 584 aa, Homo sapiens
MSVRYSSSKHYSSSRSGGGGGGGGCGGGGGVSSLRISSSKGSLGGGFSSGGFSGGSFSRGSSGGGCFGGSSGGYGGLGGFGGGSFRGSYGSSSFGGSYGGSFGGGSFGGGSFGGGSFGGGGFGGGGFGGGFGGGFGGDGGLLSGNEKVTMQNLNDRLASYLDKVRALEESNYELEGKIKEWYEKHGNSHQGEPRDYSKYYKTIDDLKNQILNLTTDNANILLQIDNARLAADDFRLKYENEVALRQSVEADINGLRRVLDELTLTKADLEMQIESLTEELAYLKKNHEEEMKDLRNVSTGDVNVEMNAAPGVDLTQLLNNMRSQYEQLAEQNRKDAEAWFNEKSKELTTEIDNNIEQISSYKSEITELRRNVQALEIELQSQLALKQSLEASLAETEGRYCVQLSQIQAQISALEEQLQQIRAETECQNTEYQQLLDIKIRLENEIQTYRSLLEGEGSSGGGGRGGGSFGGGYGGGSSGGGSSGGGYGGGHGGSSGGGYGGGSSGGGSSGGGYGGGSSSGGHGGSSSGGYGGGSSGGGGGGYGGGSSGGGSSSGGGYGGGSSSGGHKSSSSGSVGESSSKGPRY

SEQ ID NO: 848646 - protein, 420 aa, Homo sapiens
AAAAGPRRRGHGPPRGGPGHHGNSHQGEPRDYSKYYKTIDDLKNQILNLTTDNANILLQIDNARLAADDFRLKYENEVALRQSVEADINGLRRVLDELTLTKADLEMQIESLTEELAYLKKNHEEEMKDLRNVSTGDVNVEMNAAPGVDLTQLLNNMRSQYEQLAEQNRKDAEAWFNEKSKELTTEIDNNIEQISSYKSEITELRRNVQALEIELQSQLALKQSLEASLAETEGRYCVQLSQIQAQISALEEQLQQIRAETECQNTEYQQLLDIKIRLENEIQTYRSLLEGEGSSGGGGRGGGSFGGGYGGGSSGGGSSGGGYGGGHGGSSGGGYGGGSSGGGSSGGGYGGGSSSGGHGGSSSGGYGGGSSGGGGGGYGGGSSGGGSSSGGGYGGGSSSGGHKSSSSGSVGESSSKGPRY

SEQ ID NO: 848647 - protein, 384 aa, Homo sapiens
LVPVRKIGIILNLTTDNANILLQIDNARLAADDFRLKYENEVALRQSVEADINGLRRVLDELTLTKADLEMQIESLTEELAYLKKNHEEEMKDLRNVSTGDVNVEMNAAPGVDLTQLLNNMRSQYEQLAEQNRKDAEAWFNEKSKELTTEIDNNIEQISSYKSEITELRRNVQALEIELQSQLALKQSLEASLAETEGRYCVQLSQIQAQISALEEQLQQIRAETECQNTEYQQLLDIKIRLENEIQTYRSLLEGEGSSGGGGRGGGSFGGGYGGGSSGGGSSGGGYGGGHGGSSGGGYGGGSSGGGSSGGGYGGGSSSGGHGGSSSGGYGGGSSGGGGGGYGGGSSGGGSSSGGGYGGGSSSGGHKSSSSGSVGESSSKGPRY

SEQ ID NO: 848648 - protein, 584 aa, Homo sapiens; identical to SEQ ID NO: 848645

SEQ ID NO: 848649 - protein, 546 aa, Homo sapiens
MSVRYSSSKHYSSSRSGGGGGGGGCGGGGGVSSLRISSSKGSLGGGFSSGGFSGGSFSRGSSGGGCFGGSSGGYGGLGGFGGGSFRGSYGSSSFGGSYGGSFGGGSFGGGSFGGGSFGGGGFGGGGFGGGFGGGFGGDGGLLSGNEKVTMQNLNDRLASYLDKVRALEESNYELEGKIKEWYEKHGNSHQGEPRDYSKYYKTIDDLKNQILNLTTDNANILLQIDNARLAADDFRLKYENEVALRQSVEADINGLRRVLDELTLTKADLEMQIESLTEELAYLKKNHEEEMKDLRNVSTGDVNVEMNAAPGVDLTQLLNNMRSQYEQLAEQNRKDAEAWFNEKSKELTTEIDNNIEQISSYKSEITELRRNVQALEIELQSQLALKQSLEASLAETEGRYCVQLSQIQAQISALEEQLQQIRAETECQNTEYQQLLDIKIRLENEIQTYRSLLEGEGSSGGGGRGGGSFGGGYGGGSSGGGSSGGGYGGGHGGSSGGGYGGGSSGGGSSGGGSSSGGGYGGGSSSGGHKSSSSGSVGESSSKGPRY

SEQ ID NO: 848650 - protein, 518 aa, Homo sapiens
MSVRYSSSKHYSSSRSGGGGGGGGCGGGGGVSSLRISSSKGSLGGGFSSGGFSGGSFSRGSSGGGCFGGSSGGYGGLGGFGGGSFRGSYGSSSFGGSYGGSFGGGSFGGGSFGGGSFGGGGFGGGGFGGGFGGGFGGDGGLLSGNEKVTMQNLNDRLASYLDKVRALEESNYELEGKIKEWYEKHGNSHQGEPRDYSKYYKTIDDLKNQILNLTTDNANILLQIDNARLAADDFRLKYENEVALRQSVEADINGLRRVLDELTLTKADLEMQIESLTEELAYLKKNHEEEMKDLRNVSTGDVNVEMNAAPGVDLTQLLNNMRSQYEQLAEQNRKDAEAWFNEKSKELTTEIDNNIEQISSYKSEITELRRNVQALEIELQSQLALKQSLEASLAETEGRYCVQLSQIQAQISALEEQLQQIRAETECQNTEYQQLLDIKIRLENEIQTYRSLLEGEGSSGGGGRGGGSFGGGYGGGSSGGGSSGGLRRRQQLRRRIRRRQLQRRPQVLLFRVRGRVFI

SEQ ID NO: 848651 - protein, 581 aa, Homo sapiens
MSVRYSSSKHYSSSRSGGGGGGGGCGGGGGVSSLRISSSKGSLGGGFSSGGFSGGSFSRGSSGGGCFGGSSGGYGGLGGFGGGSFRGSYGSSSFGGSYGGSFGGGSFGGGSFGGGSFGGGGFGGGGFGGGFGGGFGGDGGLLSGNEKVTMQNLNDRLASYLDKVRALEESNYELEGKIKEWYEKHGNSHQGEPRDYSKYYKTIDDLKNQILNLTTDNANILLQIDNARLAADDFRLKYENEVALRQSVEADINGLRRVLDELTLTKADLEMQIESLTEELAYLKKNHEEEMKDLRNVSTGDVNVEMNAAPGVDLTQLLNNMRSQYEQLAEQNRKDAEAWFNEKSKELTTEIDNNIEQISSYKSEITELRRNVQALEIELQSQLALKQSLEASLAETEGRYCVQLSQIQAQISALEEQLQQIRAETECQNTEYQQLLDIKIRLENEIQTYRSLLEGEGSSGGGGRGGGSFGGGYGGGSSGGGSSGGGYGGGHGGSSGGGYGGGSSGGGSSGGGYGGGSSSGGHKSSSSGSVGESSSKGPRRSAETSWDTNKTRVIKTIIEEVAPDGRVLSSMVESETKKHYY

SEQ ID NO: 848652 - protein, 549 aa, Homo sapiens
MSVRYSSSKHYSSSRSGGGGGGGGCGGGGGVSSLRISSSKGSLGGGFSSGGFSGGSFSRGSSGGGCFGGSSGGYGGLGGFGGGSFRGSYGSSSFGGSYGGSFGGGSFGGGSFGGGSFGGGGFGGGGFGGGFGGGFGGDGGLLSGNEKVTMQNLNDRLASYLDKVRALEESNYELEGKIKEWYEKHGNSHQGEPRDYSKYYKTIDDLKNQILNLTTDNANILLQIDNARLAADDFRLKYENEVALRQSVEADINGLRRVLDELTLTKADLEMQIESLTEELAYLKKNHEEEMKDLRNVSTGDVNVEMNAAPGVDLTQLLNNMRSQYEQLAEQNRKDAEAWFNEKSKELTTEIDNNIEQISSYKSEITELRRNVQALEIELQSQLALKQSLEASLAETEGRYCVQLSQIQAQISALEEQLQQIRAETECQNTEYQQLLDIKIRLENEIQTYRSLLEGEGSSGGGGRGGGSFGGGATGAAAPAAAAAPAADTAAAAPAEATSPPLPGPWASLHLRDQDTNKTRVIKTIIEEVAPDGRVLSSMVESETKKHYY

SEQ ID NO: 848653 - protein, 578 aa, Homo sapiens
MSVRYSSSKHYSSSRSGGGGGGGGCGGGGGVSSLRISSSKGSLGGGFSSGGFSGGSFSRGSSGGGCFGGSSGGYGGLGGFGGGSFRGSYGSSSFGGSYGGSFGGGSFGGGSFGGGSFGGGGFGGGGFGGGFGGGFGGDGGLLSGNEKVTMQNLNDRLASYLDKVRALEESNYELEGKIKEWYEKHGNSHQGEPRDYSKYYKTIDDLKNQILNLTTDNANILLQIDNARLAADDFRLKYENEVALRQSVEADINGLRRVLDELTLTKADLEMQIESLTEELAYLKKNHEEEMKDLRNVSTGDVNVEMNAAPGVDLTQLLNNMRSQYEQLAEQNRKDAEAWFNEKSKELTTEIDNNIEQISSYKSEITELRRNVQALEIELQSQLALKQSLEASLAETEGRYCVQLSQIQAQISALEEQLQQIRAETECQNTEYQQLLDIKIRLENEIQTYRSLLEGEGSSGGGGRGGGSFGGGYGGGSSGGGSSGGWPLLLALPAPAATPQCGRHPIHHYGITSSDQIHIYVRGTQSDDRNDERGQLTNDWTGTPGEGDTDTGTEQNERNAKNERRTQVATAIKKEEQM

SEQ ID NO: 848654 - protein, 174 aa, Homo sapiens
RHHTQLNKEVTKPQKNPFQKQSLEASLAETEGRYCVQLSQIQAQISALEEQLQQIRAETECQNTEYQQLLDIKIRLENEIQTYRSLLEGEGSSGGGGRGGGSFGGGYGGGSSGGGSSGGGYGGGHGGSSGGGYGGGSSGGGSSGGGYGGGSSSGGHKSSSSGSVGESSSKGPRY

SEQ ID NO: 848655 - protein, 310 aa, Homo sapiens
MSVRYSSSKHYSSSRSGGGGGGGGCGGGGGVSSLRISSSKGSLGGGFSSGGFSGGSFSRGSSGGGCFGGSSGGYGGLGGFGGGSFRGSYGSSSFGGSYGGSFGGGSFGGGSFGGGSFGGGGFGGGGFGGGFGGGFGGDGGLLSGNEKVTMQNLNDRLASYLDKVRALEESNYELEGKIKEWYEKHGNSHQGEPRDYSKYYKTIDDLKNQILNLTTDNANILLQIDNARLAADDFRLKYENEVALRQSVEADINGLRRVLDELTLTKADLEMQIESLTEELAYLKKNHEEEMKDLRNVSTGDVNVEMNAAP

SEQ ID NO: 848656 - protein, 584 aa, Homo sapiens; identical to SEQ ID NO: 848645

SEQ ID NO: 848657 - protein, 584 aa, Homo sapiens; identical to SEQ ID NO: 848645

SEQ ID NO: 848658 - protein, 393 aa, Homo sapiens
LVPVRKIGIKPSMTLNNQILNLTTDNANILLQIDNARLAADDFRLKYENEVALRQSVEADINGLRRVLDELTLTKADLEMQIESLTEELAYLKKNHEEEMKDLRNVSTGDVNVEMNAAPGVDLTQLLNNMRSQYEQLAEQNRKDAEAWFNEKSKELTTEIDNNIEQISSYKSEITELRRNVQALEIELQSQLALKQSLEASLAETEGRYCVQLSQIQAQISALEEQLQQIRAETECQNTEYQQLLDIKIRLENEIQTYRSLLEGEGSSGGGGRGGGSFGGGYGGGSSGGGSSGGGYGGGHGGSSGGGYGGGSSGGGSSGGGYGGGSSSGGHGGSSSGGYGGGSSGGGGGGYGGGSSGGGSSSGGGYGGGSSSGGHKSSSSGSVGESSSKGPRY

SEQ ID NO: 848659 - protein, 625 aa, Homo sapiens
MSVRYSSSKHYSSSRSGGGGGGGGCGGGGGVSSLRISSSKGSLGGGFSSGGFSGGSFSRGSSGGGCFGGSSGGYGGLGGFGGGSFRGSYGSSSFGGSYGGSFGGGSFGGGSFGGGSFGGGGFGGGGFGGGFGGGFGGDGGLLSGNEKVTMQNLNDRLASYLDKVRALEESNYELEGKIKEWYEKHGNSHQGEPRDYSKYYKTIDDLKNQILNLTTDNANILLQIDNARLAADDFRLKYENEVALRQSVEADINGLRRVLDELTLTKADLEMQIESLTEELAYLKKNHEEEMKDLRNVSTGDVNVEMNAAPGVDLTQLLNNMRSQYEQLAEQNRKDAEAWFNEKSKELTTEIDNNIEQISSYKSEITELRRNVQALEIELQSQLALKQSLEASLAETEGRYCVQLSQIQAQISALEEQLQQIRAETECQNTEYQQLLDIKIRLENEIQTYRSLLEGEGSSGGGGRGGGSFGGGYGGGSSGGGSSGGGYGGGHGGSSGGGYGGGSSGGGSSGGGYGGGSSSGGHGGSSSGGYGGGSSGGGGGGYGGGSSGGGSSSGGGYGGGSSSGGHKSSSSGSVGESSSKGPRRSAETSWDTNKTRVIKTIIEEVAPDGRVLSSMVESETKKHYY

SEQ ID NO: 848660 - protein, 540 aa, Homo sapiens
MSVRYSSSKHYSSSRSGGGGGGGGCGGGGGVSSLRISSSKGSLGGGFSSGGFSGGSFSRGSSGGGCFGGSSGGYGGLGGFGGGSFRGSYGSSSFGGSYGGSFGGGSFGGGSFGGGSFGGGGFGGGGFGGGFGGGFGGDGGLLSGNEKVTMQNLNDRLASYLDKVRALEESNYELEGKIKEWYEKHGNSHQGEPRDYSKYYKTIDDLKNQILNLTTDNANILLQIDNARLAADDFRLKYENEVALRQSVEADINGLRRVLDELTLTKADLEMQIESLTEELAYLKKNHEEEMKDLRNVSTGDVNVEMNAAPGVDLTQLLNNMRSQYEQLAEQNRKDAEAWFNEKSKELTTEIDNNIEQISSYKSEITELRRNVQALEIELQSQLALKQSLEASLAETEGRYCVQLSQIQAQISALEEQLQQIRAETECQNTEYQQLLDIKIRLENEIQTYRSLLEGEGSSGGGGRGGGSFGGGYGGGSSGGGSSGGGYGGGHGGSSGGGYGGGSSGGGSSGGGYGGGSSSGGHKSSSSGSVGESSSKGPRY

SEQ ID NO: 848661 - protein, 549 aa, Homo sapiens; identical to SEQ ID NO: 848652

SEQ ID NO: 848662 - protein, 518 aa, Homo sapiens; identical to SEQ ID NO: 848650

SEQ ID NO: 848663 - protein, 528 aa, Homo sapiens
MSVRYSSSKHYSSSRSGGGGGGGGCGGGGGVSSLRISSSKGSLGGGFSSGGFSGGSFSRGSSGGGCFGGSSGGYGGLGGFGGGSFRGSYGSSSFGGSYGGSFGGGSFGGGSFGGGSFGGGGFGGGGFGGGFGGGFGGDGGLLSGNEKVTMQNLNDRLASYLDKVRALEESNYELEGKIKEWYEKHGNSHQGEPRDYSKYYKTIDDLKNQILNLTTDNANILLQIDNARLAADDFRLKYENEVALRQSVEADINGLRRVLDELTLTKADLEMQIESLTEELAYLKKNHEEEMKDLRNVSTGDVNVEMNAAPGVDLTQLLNNMRSQYEQLAEQNRKDAEAWFNEKSKELTTEIDNNIEQISSYKSEITELRRNVQALEIELQSQLALKQSLEASLAETEGRYCVQLSQIQAQISALEEQLQQIRAETECQNTEYQQLLDIKIRLENEIQTYRSLLEGEGSSGGGGRGGGSFGGGYGGGSSGGGSSGGGYPHLAIILLLLFWDIHSYEDVVIDEKKSVETMIEAEVPRKRR

SEQ ID NO: 848664 - protein, 1748 aa, Homo sapiens
PRPLLPMAVAELYTQYNRVWIPDPEEVWKSAEIAKDYRVGDKVLRLLLEDGTELDYSVNPESLPPLRNPDILVGENDLTALSYLHEPAVLHNLRIRFAESKLIYTYSGIILVAMNPYKQLPIYGDAIIHAYSGQNMGDMDPHIFAVAEEAYKQMARNNRNQSIIVSGESGAGKTVSARYAMRYFATVSKSGSNAHVEDKVLASNPITEAVGNAKTTRNDNSSRFGKYTEISFDEQNQIIGANMSTYLLEKSRVVFQSENERNYHIFYQLCASAQQSEFKHLKLGSAEEFNYTRMGGNTVIEGVNDRAEMVETQKTFTLLGFKEDFQMDVFKILAAILHLGNVQITAVGNERSSVSEDDSHLKVFCELLGLESGRVAQWLCNRKIVTSSETVVKPMTRPQAVNARDALAKKIYAHLFDFIVERINQALQFSGKQHTFIGVLDIYGFETFDVNSFEQFCINYANEKLQQQFNMHVFKLEQEEYMKEDIPWTLIDFYDNQPVIDLIEAKMGILELLDEECLLPHGTDENWLQKLYNNFVNRNPLFEKPRMSNTSFVIQHFADKVEYKCEGFLEKNRDTVYDMLVEILRASKFHLCANFFQENPTPPSPFGSMITVKSAKQVIKPNSKHFRTTVGSKFRSSLYLLMETLNATTPHYVRCIKPNDEKLPFEFDSKRIVQQLRACGVLETIRISAQSYPSRWTYIEFYSRYGILMTKQELSFSDKKEVCKVVLHRLIQDSNQYQFGKTKIFFRAGQVAYLEKLRLDKLRQSCVMVQKHMRGWLQRKKFLRERRAALIIQQYFRGQQTVRKAITAVALKEAWAAIIIQKHCRGYLVRSLYQLIRMATITMQAYSRGFLARRRYRKMLEEHKAVILQKYARAWLARRRFQSIRRFVLNIQLTYRVQRLQKKLEDQNKENHGLVEKLTSLAALRAGDVEKIQKLEAELEKAATHRRNYEEKGKRYRDAVEEKLAKLQKHNSELETQKEQIQLKLQEKTEELKEKMDNLTKQLFDDVQKEERQRMLLEKSFELKTQDYEKQIQSLKEEIKALKDEKMQLQHLVEGEHVTSDGLKAEVARLSKQVKTISEFEKEIELLQAQKIDVEKHVQSQKREMREKMSEITKQLLESYDIEDVRSRLSVEDLEHLNEDGELWFAYEGLKKATRVLESHFQSQKDCYEKEIEALNFKVVHLSQEINHLQKLFREENDINESIRHEVTRLTSENMMIPDFKQQISELEKQKQDLEIRLNEQAEKMKGKLEELSNQLHRSQEEEGTQRKALEAQNEIHTKEKEKLIDKIQEMQEASDHLKKQFETESEVKCNFRQEASRLTLENRDLEEELDMKDRVIKKLQDQVKTLSKTIGKANDVHSSSGPKEYLGMLQYKREDEAKLIQNLILDLKPRGVVVNMIPGLPAHILFMCVRYADSLNDANMLKSLMNSTINGIKQVVKEHLEDFEMLSFWLSNTCHFLNCLKQYSGEEEFMKHNSPQQNKNCLNNFDLSEYRQILSDVAIRIYHQFIIIMEKNIQPIIVPGMLEYESLQGISGLKPTGFRKRSSSIDDTDGYTMTSVLQQLSYFYTTMCQNGLDPELVRQAVKQLFFLIGAVTLNSLFLRKDMCSCRKGMQIRCNISYLEEWLKDKNLQNSLAKETLEPLSQAAWLLQVKKTTDSDAKEIYERCTSLSAVQIIKILNSYTPIDDFEKRVTPSFVRKVQALLNSREDSSQLMLDTKYLFQVTFPFTPSPHALEMIQIPSSFKLGFLNRL

SEQ ID NO: 848665 - protein, 1794 aa, Homo sapiens
PRPLLPMAVAELYTQYNRVWIPDPEEVWKSAEIAKDYRVGDKVLRLLLEDGTELDYSVNPESLPPLRNPDILVGENDLTALSYLHEPAVLHNLRIRFAESKLIYTYSGIILVAMNPYKQLPIYGDAIIHAYSGQNMGDMDPHIFAVAEEAYKQMARNNRNQSIIVSGESGAGKTVSARYAMRYFATVSKSGSNAHVEDKVLASNPITEAVGNAKTTRNDNSSRFGKYTEISFDEQNQIIGANMSTYLLEKSRVVFQSENERNYHIFYQLCASAQQSEFKHLKLGSAEEFNYTRMGGNTVIEGVNDRAEMVETQKTFTLLGFKEDFQMDVFKILAAILHLGNVQITAVGNERSSVSEDDSHLKVFCELLGLESGRVAQWLCNRKIVTSSETVVKPMTRPQAVNARDALAKKIYAHLFDFIVERINQALQFSGKQHTFIGVLDIYGFETFDVNSFEQFCINYANEKLQQQFNMHVFKLEQEEYMKEDIPWTLIDFYDNQPVIDLIEAKMGILELLDEECLLPHGTDENWLQKLYNNFVNRNPLFEKPRMSNTSFVIQHFADKVEYKCEGFLEKNRDTVYDMLVEILRASKFHLCANFFQENPTPPSPFGSMITVKSAKQVIKPNSKHFRTTVGSKFRSSLYLLMETLNATTPHYVRCIKPNDEKLPFEFDSKRIVQQLRACGVLETIRISAQSYPSRWTYIEFYSRYGILMTKQELSFSDKKEVCKVVLHRLIQDSNQYQFGKTKIFFRAGQVAYLEKLRLDKLRQSCVMVQKHMRGWLQRKKFLRERRAALIIQQYFRGQQTVRKAITAVALKEAWAAIIIQKHCRGYLVRSLYQLIRMATITMQAYSRGFLARRRYRKMLEEHKAVILQKYARAWLARRRFQSIRRFVLNIQLTYRVQRLQKKLEDQNKENHGLVEKLTSLAALRAGDVEKIQKLEAELEKAATHRRNYEEKGKRYRDAVEEKLAKLQKHNSELETQKEQIQLKLQEKTEELKEKMDNLTKQLFDDVQKEERQRMLLEKSFELKTQDYEKQIQSLKEEIKALKDEKMQLQHLVEGEHVTSDGLKAEVARLSKQVKTISEFEKEIELLQAQKIDVEKHVQSQKREMREKMSEITKQLLESYDIEDVRSRLSVEDLEHLNEDGELWFAYEGLKKATRVLESHFQSQKDCYEKEIEALNFKVVHLSQEINHLQKLFREENDINESIRHEVTRLTSENMMKSHSVAQAGVQWHDLSSLQPPPPRFKQFSCLSLPSSWDYRRPPSQMIPDFKQQISELEKQKQDLEIRLNEQAEKMKGKLEELSNQLHRSQEEEGTQRKALEAQNEIHTKEKEKLIDKIQEMQEASDHLKKQFETESEVKCNFRQEASRLTLENRDLEEELDMKDRVIKKLQDQVKTLSKTIGKANDVHSSSGPKEYLGMLQYKREDEAKLIQNLILDLKPRGVVVNMIPGLPAHILFMCVRYADSLNDANMLKSLMNSTINGIKQVVKEHLEDFEMLSFWLSNTCHFLNCLKQYSGEEEFMKHNSPQQNKNCLNNFDLSEYRQILSDVAIRIYHQFIIIMEKNIQPIIVPGMLEYESLQGISGLKPTGFRKRSSSIDDTDGYTMTSVLQQLSYFYTTMCQNGLDPELVRQAVKQLFFLIGAVTLNSLFLRKDMCSCRKGMQIRCNISYLEEWLKDKNLQNSLAKETLEPLSQAAWLLQVKKTTDSDAKEIYERCTSLSAVQIIKILNSYTPIDDFEKRVTPSFVRKVQALLNSREDSSQLMLDTKYLFQVTFPFTPSPHALEMIQIPSSFKLGFLNRL

SEQ ID NO: 848666 - protein, 1613 aa, Homo sapiens
PRPLLPMAVAELYTQYNRVWIPDPEEVWKSAEIAKDYRVGDKVLRLLLEDGTELDYSVNPESLPPLRNPDILVGENDLTALSYLHEPAVLHNLRIRFAESKLIYTYSGIILVAMNPYKQLPIYGDAIIHAYSGQNMGDMDPHIFAVAEEAYKQMARNNRNQSIIVSGESGAGKTVSARYAMRYFATVSKSGSNAHVEDKVLASNPITEAVGNAKTTRNDNSSRFGKYTEISFDEQNQIIGANMSTYLLEKSRVVFQSENERNYHIFYQLCASAQQSEFKHLKLGSAEEFNYTRMGGNTVIEGVNDRAEMVETQKTFTLLGFKEDFQMDVFKILAAILHLGNVQITAVGNERSSVSEDDSHLKVFCELLGLESGRVAQWLCNRKIVTSSETVVKPMTRPQAVNARDALAKKIYAHLFDFIVERINQALQFSGKQHTFIGVLDIYGFETFDVNSFEQFCINYANEKLQQQFNMHVFKLEQEEYMKEDIPWTLIDFYDNQPVIDLIEAKMGILELLDEECLLPHGTDENWLQKLYNNFVNRNPLFEKPRMSNTSFVIQHFADKVEYKCEGFLEKNRDTVYDMLVEILRASKFHLCANFFQENPTPPSPFGSMITVKSAKQVIKPNSKHFRTTVGSKFRSSLYLLMETLNATTPHYVRCIKPNDEKLPFEFDSKRIVQQLRACGVLETIRISAQSYPSRWTYIEFYSRYGILMTKQELSFSDKKEVCKVVLHRLIQDSNQYQFGKTKIFFRAGQVAYLEKLRLDKLRQSCVMVQKHMRGWLQRKKFLRERRAALIIQQYFRGQQTVRKAITAVALKEAWAAIIIQKHCRGYLVRSLYQLIRMATITMQAYSRGFLARRRYRKMLEEHKAVILQKYARAWLARRRFQSIRRFVLNIQLTYRVQRLQKKLEDQNKENHGLVEKLTSLAALRAGDVEKIQKLEAELEKAATHRRNYEEKGKRYRDAVEEKLAKLQKHNSELETQKEQIQLKLQEKTEELKEKMDNLTKQLFDDVQKEERQRMLLEKSFELKTQDYEKQIQSLKEEIKALKDEKMQLQHLVEGEHVTSDGLKAEVARLSKQVKTISEFEKEIELLQAQKIDVEKHVQSQKREMREKMSEITKQLLESYDIEDVRSRLSVEDLEHLNEDGELWFAYEGLKKATRVLESHFQSQKDCYEKEIEALNFKVVHLSQEINHLQKLFREENDINESIRHEVTRLTSENMMIPDFKQQISELEKQKQDLEIRLNEQAEKMKGKLEELSNQLHRSQEEEGTQRKALEAQNEIHTKEKEKLIDKIQEMQEASDHLKKQFETESEVKCNFRQEASRLTLENRDLEEELDMKDRVIKKLQDQVKTLSKTIGKANDVHSSSGPKEYLGMLQYKREDEAKLIQNLILDLKPRGVVVNMIPGLPAHILFMCVRYADSLNDANMLKSLMNSTINGIKQVVKEHLEDFEMLSFWLSNTCHFLNCLKQYSGEEEFMKHNSPQQNKNCLNNFDLSEYRQILSDVAIRIYHQFIIIMEKNIQPIIVPGMLEYESLQGISGLKPTGFRKRSSSIDDTDGYTMTSVLQQLSYFYTTMCQNGLDPELVRQAVKQLFFLIGAVTLNSLFLRKDMCSCRKGMQIR

SEQ ID NO: 848667 - protein, 864 aa, Homo sapiens
PRPLLPMAVAELYTQYNRVWIPDPEEVWKSAEIAKDYRVGDKVLRLLLEDGTELDYSVNPESLPPLRNPDILVGENDLTALSYLHEPAVLHNLRIRFAESKLIYTYSGIILVAMNPYKQLPIYGDAIIHAYSGQNMGDMDPHIFAVAEEAYKQMARNNRNQSIIVSGESGAGKTVSARYAMRYFATVSKSGSNAHVEDKVLASNPITEAVGNAKTTRNDNSSRFGKYTEISFDEQNQIIGANMSTYLLEKSRVVFQSENERNYHIFYQLCASAQQSEFKHLKLGSAEEFNYTRMGGNTVIEGVNDRAEMVETQKTFTLLGFKEDFQMDVFKILAAILHLGNVQITAVGNERSSVSEDDSHLKVFCELLGLESGRVAQWLCNRKIVTSSETVVKPMTRPQAVNARDALAKKIYAHLFDFIVERINQALQFSGKQHTFIGVLDIYGFETFDVNSFEQFCINYANEKLQQQFNMHVFKLEQEEYMKEDIPWTLIDFYDNQPVIDLIEAKMGILELLDEECLLPHGTDENWLQKLYNNFVNRNPLFEKPRMSNTSFVIQHFADKVEYKCEGFLEKNRDTVYDMLVEILRASKFHLCANFFQENPTPPSPFGSMITVKSAKQVIKPNSKHFRTTVGSKFRSSLYLLMETLNATTPHYVRCIKPNDEKLPFEFDSKRIVQQLRACGVLETIRISAQSYPSRWTYIEFYSRYGILMTKQELSFSDKKEVCKVVLHRLIQDSNQYQFGKTKIFFRAGQVAYLEKLRLDKLRQSCVMVQKHMRGWLQRKKFLRERRAALIIQQYFRGQQTVRKAITAVALKEAWAAIIIQKHCRGYLVRSLYQLIRMATITMQAYSRGFLARRRYRKVRPTSV

SEQ ID NO: 848668 - protein, 1320 aa, Homo sapiens
MSCFRLYFNLFKLYFSFETFDVNSFEQFCINYANEKLQQQFNMHVFKLEQEEYMKEDIPWTLIDFYDNQPVIDLIEAKMGILELLDEECLLPHGTDENWLQKLYNNFVNRNPLFEKPRMSNTSFVIQHFADKVEYKCEGFLEKNRDTVYDMLVEILRASKFHLCANFFQENPTPPSPFGSMITVKSAKQVIKPNSKHFRTTVGSKFRSSLYLLMETLNATTPHYVRCIKPNDEKLPFEFDSKRIVQQLRACGVLETIRISAQSYPSRWTYIEFYSRYGILMTKQELSFSDKKEVCKVVLHRLIQDSNQYQFGKTKIFFRAGQVAYLEKLRLDKLRQSCVMVQKHMRGWLQRKKFLRERRAALIIQQYFRGQQTVRKAITAVALKEAWAAIIIQKHCRGYLVRSLYQLIRMATITMQAYSRGFLARRRYRKMLEEHKAVILQKYARAWLARRRFQSIRRFVLNIQLTYRVQRLQKKLEDQNKENHGLVEKLTSLAALRAGDVEKIQKLEAELEKAATHRRNYEEKGKRYRDAVEEKLAKLQKHNSELETQKEQIQLKLQEKTEELKEKMDNLTKQLFDDVQKEERQRMLLEKSFELKTQDYEKQIQSLKEEIKALKDEKMQLQHLVEGEHVTSDGLKAEVARLSKQVKTISEFEKEIELLQAQKIDVEKHVQSQKREMREKMSEITKQLLESYDIEDVRSRLSVEDLEHLNEDGELWFAYEGLKKATRVLESHFQSQKDCYEKEIEALNFKVVHLSQEINHLQKLFREENDINESIRHEVTRLTSENMMIPDFKQQISELEKQKQDLEIRLNEQAEKMKGKLEELSNQLHRSQEEEGTQRKALEAQNEIHTKEKEKLIDKIQEMQEASDHLKKQFETESEVKCNFRQEASRLTLENRDLEEELDMKDRVIKKLQDQVKTLSKTIGKANDVHSSSGPKEYLGMLQYKREDEAKLIQNLILDLKPRGVVVNMIPGLPAHILFMCVRYADSLNDANMLKSLMNSTINGIKQVVKEHLEDFEMLSFWLSNTCHFLNCLKQYSGEEEFMKHNSPQQNKNCLNNFDLSEYRQILSDVAIRIYHQFIIIMEKNIQPIIVPGMLEYESLQGISGLKPTGFRKRSSSIDDTDGYTMTSVLQQLSYFYTTMCQNGLDPELVRQAVKQLFFLIGAVTLNSLFLRKDMCSCRKGMQIRCNISYLEEWLKDKNLQNSLAKETLEPLSQAAWLLQVKKTTDSDAKEIYERCTSLSAVQIIKILNSYTPIDDFEKRVTPSFVRKVQALLNSREDSSQLMLDTKYLFQVTFPFTPSPHALEMIQIPSSFKLGFLNRL

SEQ ID NO: 848669 - protein, 577 aa, Homo sapiens
MWLEAQYPDLGQSDVAQLQKLFREENDINESIRHEVTRLTSENMMIPDFKQQISELEKQKQDLEIRLNEQAEKMKGKLEELSNQLHRSQEEEGTQRKALEAQNEIHTKEKEKLIDKIQEMQEASDHLKKQFETESEVKCNFRQEASRLTLENRDLEEELDMKDRVIKKLQDQVKTLSKTIGKANDVHSSSGPKEYLGMLQYKREDEAKLIQNLILDLKPRGVVVNMIPGLPAHILFMCVRYADSLNDANMLKSLMNSTINGIKQVVKEHLEDFEMLSFWLSNTCHFLNCLKQYSGEEEFMKHNSPQQNKNCLNNFDLSEYRQILSDVAIRIYHQFIIIMEKNIQPIIVPGMLEYESLQGISGLKPTGFRKRSSSIDDTDGYTMTSVLQQLSYFYTTMCQNGLDPELVRQAVKQLFFLIGAVTLNSLFLRKDMCSCRKGMQIRCNISYLEEWLKDKNLQNSLAKETLEPLSQAAWLLQVKKTTDSDAKEIYERCTSLSAVQIIKILNSYTPIDDFEKRVTPSFVRKVQALLNSREDSSQLMLDTKYLFQVTFPFTPSPHALEMIQIPSSFKLGFLNRL

SEQ ID NO: 848670 - protein, 969 aa, Homo sapiens
MAEDDPYLGRPEQMFHLDPSLTHTIFNPEVFQPQMALPTADGPYLQILEQPKQRGFRFRYVCEGPSHGGLPGASSEKNKKSYPQVKICNYVGPAKVIVQLVTNGKNIHLHAHSLVGKHCEDGICTVTAGPKDMVVGFANLGILHVTKKKVFETLEARMTEACIRGYNPGLLVHPDLAYLQAEGGGDRQLGDREKELIRQAALQQTKEMDLSVVRLMFTAFLPDSTGSFTRRLEPVVSDAIYDSKAPNASNLKIVRMDRTAGCVTGGEEIYLLCDKVQKDDIQIRFYEEEENGGVWEGFGDFSPTDVHRQFAIVFKTPKYKDINITKPASVFVQLRRKSDLETSEPKPFLYYPEIKDKEEVQRKRQKLMPNFSDSFGGGSGAGAGGGGMFGSGGGGGGTGSTGPGYSFPHYGFPTYGGITFHPGTTKSNAGMKHGTMDTESKKDPEGCDKSDDKNTVNLFGKVIETTEQDQEPSEATVGNGEVTLTYATGTKEESAGVQDNLFLEKAMQLAKRHANALFDYAVTGDVKMLLAVQRHLTAVQDENGDSVLHLAIIHLHSQLVRDLLEVTSGLISDDIINMRNDLYQTPLHLAVITKQEDVVEDLLRAGADLSLLDRLGNSVLHLAAKEGHDKVLSILLKHKKAALLLDHPNGDGLNAIHLAMMSNSLPCLLLLVAAGADVNAQEQKSGRTALHLAVEHDNISLAGCLLLEGDAHVDSTTYDGTTPLHIAAGRGSTRLAALLKAAGADPLVENFEPLYDLDDSWENAGEDEGVVPGTTPLDMATSWQVFDILNGKPYEPEFTSDDLLAQGDMKQLAEDVKLQLYKLLEIPDPDKNWATLAQKLGLGILNNAFRLSPAPSKTLMDNYEVSGGTVRELVEALRQMGYTEAIEVIQAASSPVKTTSQAHSLPLSPASTRQQIDELRDSDSVCDSGVETSFRKLSFTESLTSGASLLTLNKMPHDYGQEGPLEGKI

SEQ ID NO: 848671 - protein, 969 aa, Homo sapiens; identical to SEQ ID NO: 848670

SEQ ID NO: 848672 - protein, 762 aa, Homo sapiens
MDLSVVRLMFTAFLPDSTGSFTRRLEPVVSDAIYDSKAPNASNLKIVRMDRTAGCVTGGEEIYLLCDKVQKDDIQIRFYEEEENGGVWEGFGDFSPTDVHRQFAIVFKTPKYKDINITKPASVFVQLRRKSDLETSEPKPFLYYPEIKDKEEVQRKRQKLMPNFSDSFGGGSGAGAGGGGMFGSGGGGGGTGSTGPGYSFPHYGFPTYGGITFHPGTTKSNAGMKHGTMDTESKKDPEGCDKSDDKNTVNLFGKVIETTEQDQEPSEATVGNGEVTLTYATGTKEESAGVQDNLFLEKAMQLAKRHANALFDYAVTGDVKMLLAVQRHLTAVQDENGDSVLHLAIIHLHSQLVRDLLEVTSGLISDDIINMRNDLYQTPLHLAVITKQEDVVEDLLRAGADLSLLDRLGNSVLHLAAKEGHDKVLSILLKHKKAALLLDHPNGDGLNAIHLAMMSNSLPCLLLLVAAGADVNAQEQKSGRTALHLAVEHDNISLAGCLLLEGDAHVDSTTYDGTTPLHIAAGRGSTRLAALLKAAGADPLVENFEPLYDLDDSWENAGEDEGVVPGTTPLDMATSWQVFDILNGKPYEPEFTSDDLLAQGDMKQLAEDVKLQLYKLLEIPDPDKNWATLAQKLGLGILNNAFRLSPAPSKTLMDNYEVSGGTVRELVEALRQMGYTEAIEVIQAASSPVKTTSQAHSLPLSPASTRQQIDELRDSDSVCDSGVETSFRKLSFTESLTSGASLLTLNKMPHDYGQEGPLEGKI

SEQ ID NO: 848673 - protein, 788 aa, Homo sapiens
MNGLCCMALDREKELIRQAALQQTKEMDLSVVRLMFTAFLPDSTGSFTRRLEPVVSDAIYDSKAPNASNLKIVRMDRTAGCVTGGEEIYLLCDKVQKDDIQIRFYEEEENGGVWEGFGDFSPTDVHRQFAIVFKTPKYKDINITKPASVFVQLRRKSDLETSEPKPFLYYPEIKDKEEVQRKRQKLMPNFSDSFGGGSGAGAGGGGMFGSGGGGGGTGSTGPGYSFPHYGFPTYGGITFHPGTTKSNAGMKHGTMDTESKKDPEGCDKSDDKNTVNLFGKVIETTEQDQEPSEATVGNGEVTLTYATGTKEESAGVQDNLFLEKAMQLAKRHANALFDYAVTGDVKMLLAVQRHLTAVQDENGDSVLHLAIIHLHSQLVRDLLEVTSGLISDDIINMRNDLYQTPLHLAVITKQEDVVEDLLRAGADLSLLDRLGNSVLHLAAKEGHDKVLSILLKHKKAALLLDHPNGDGLNAIHLAMMSNSLPCLLLLVAAGADVNAQEQKSGRTALHLAVEHDNISLAGCLLLEGDAHVDSTTYDGTTPLHIAAGRGSTRLAALLKAAGADPLVENFEPLYDLDDSWENAGEDEGVVPGTTPLDMATSWQVFDILNGKPYEPEFTSDDLLAQGDMKQLAEDVKLQLYKLLEIPDPDKNWATLAQKLGLGILNNAFRLSPAPSKTLMDNYEVSGGTVRELVEALRQMGYTEAIEVIQAASSPVKTTSQAHSLPLSPASTRQQIDELRDSDSVCDSGVETSFRKLSFTESLTSGASLLTLNKMPHDYGQEGPLEGKI

SEQ ID NO: 848674 - protein, 969 aa, Homo sapiens; identical to SEQ ID NO: 848670

SEQ ID NO: 848675 - protein, 332 aa, Homo sapiens
MAEDDPYLGRPEQMFHLDPSLTHTIFNPEVFQPQMALPTADGPYLQILEQPKQRGFRFRYVCEGPSHGGLPGASSEKNKKSYPQVKICNYVGPAKVIVQLVTNGKNIHLHAHSLVGKHCEDGICTVTAGPKDMVVGFANLGILHVTKKKVFETLEARMTEACIRGYNPGLLVHPDLAYLQAEGGGDRQLGDREKELIRQAALQQTKEMDLSVVRLMFTAFLPDSTGSFTRRLEPVVSDAIYDSKAPNASNLKIVRMDRTAGCVTGGEEIYLLCDKVQKDDIQIRFYEEEENGGVWEGFGDFSPTDVHRQALPLFWNFLSHLVERAQKQPWAL

SEQ ID NO: 848676 - protein, 114 aa, Homo sapiens
GHRSGPATIADSFPCPSRRSGRQPPQPSACTQPPAPLPEPSAAEAAAARPVRRRRRPATAGPAASLRPRCGHGAALTGLARPRRAPARPDPHSGPPGLRPAAASSFSSRQARAA

SEQ ID NO: 848677 - protein, 969 aa, Homo sapiens; identical to SEQ ID NO: 848670

SEQ ID NO: 848678 - protein, 969 aa, Homo sapiens; identical to SEQ ID NO: 848670

SEQ ID NO: 848679 - protein, 384 aa, Homo sapiens
FRECLFMFMSPENIIGDCGSSKQNNRLIVSLLSLPMIQFLPFPSASQGPSCELAIPSCDCPFAWTLGLNAIHLAMMSNSLPCLLLLVAAGADVNAQEQKSGRTALHLAVEHDNISLAGCLLLEGDAHVDSTTYDGTTPLHIAAGRGSTRLAALLKAAGADPLVENFEPLYDLDDSWENAGEDEGVVPGTTPLDMATSWQVFDILNGKPYEPEFTSDDLLAQGDMKQLAEDVKLQLYKLLEIPDPDKNWATLAQKLGLGILNNAFRLSPAPSKTLMDNYEVSGGTVRELVEALRQMGYTEAIEVIQAASSPVKTTSQAHSLPLSPASTRQQIDELRDSDSVCDSGVETSFRKLSFTESLTSGASLLTLNKMPHDYGQEGPLEGKI

SEQ ID NO: 848680 - protein, 969 aa, Homo sapiens
MAEDDPYLGRPEQMFHLDPSLTHTIFNPEVFQPQMALPTADGPYLQILEQPKQRGFRFRYVCEGPSHGGLPGASSEKNKKSYPQVKICNYVGPAKVIVQLVTNGKNIHLHAHSLVGKHCEDGICTVTAGPKDMVVGFANLGILHVTKKKVFETLEARMTEACIRGYNPGLLVHPDLAYLQAEGGGDRQLGDREKELIRQAALQQTKEMDLSVVRLMFTAFLPDSTGSFTRRLEPVVSDAIYDSKAPNASNLKIVRMDRTAGCVTGGEEIYLLCDKVQKDDIQIRFYEEEENGGVWEGFGDFSPTDVHRQFAIVFKTPKYKDINITKPASVFVQLRRKSDLETSEPKPFLYYPEIKDKEEVQRKRQKLMPNFSDSFGGGSGAGAGGGGMFGSGGGGGGTGSTGPGYSFPHYGFPTYGGITFHPGTTKSNAGMKHGTMDTESKKDPEGCDKSDDKNTVNLFGKVIETTEQDQEPSEATVGNGEVTLTYATGTKEESAGVQDNLFLEKAMQLAKRHANALFDYAVTGDVKMLLAVQRHLTAVQDENGDSVLHLAIIHLHSQLVRDLLEVTSGLISDDIINMRNDLYQTPLHLAVITKQEDVVEDLLRAGADLSLLDRLGNSVLHLAAKEGHDKVLSILLKHKKAALLLDHPNGDGLNAIHLAMMSNSLPCLLLLVAAGADVNAQEQKSGRTALHLAVEHDNISLAGCLLLEGDAHVDSTTYDGTTPLHIAAGRGSTRLAALLKAAGADPLVENFEPLYDLDDSWENAGEDEGVVPGTTPLDMATSWQVFDILNGKPYEPEFTSDDLLAQGDMKQLAEDVKLQLYKLLEIPDPDKNWATLAQKLGLGILNNAFRLSPAPSKTLMDNYEVSGGTVRELVEALRQMGYTEAIEVIQAASSPVKTTSQAHSLPLSPASTRQQIGKKKDKRQWRYFPAPPGWCLQLFLDMVWQFSFSFSGYTSLCVSLPPGLTLCLS

SEQ ID NO: 848681 - protein, 99 aa, Homo sapiens
FLPFPSASQGPSCELAIPSCDCPFAWTLGLNAIHLAMMSNSLPCLLLLVAAGADVNAQEQKSGRTALHLAVEHDNISLAGCLLLEVKGTLICFCIKFLR

SEQ ID NO: 848682 - protein, 137 aa, Homo sapiens
MEEETPLFLPLCLSFGPGDSPSSVRNRSLTEMMATGTPESQARFGQSVKGLLTEKVTTCGTDVIALTKQVLKGSRSSELLGQAARNMVLQEDAILHSEDSLRKMAIITTHLQYQQEAIQKNVEQSSDLQDQLNHLLK

SEQ ID NO: 848683 - protein, 137 aa, Homo sapiens; identical to SEQ ID NO: 848682

SEQ ID NO: 848684 - protein, 137 aa, Homo sapiens; identical to SEQ ID NO: 848682

SEQ ID NO: 848685 - protein, 137 aa, Homo sapiens; identical to SEQ ID NO: 848682

SEQ ID NO: 848686 - protein, 359 aa, Homo sapiens
MTLAALRDAEIQKDVQTYYGQVLKRSADLQTNGCVTTARPVPKHIREALQNVHEEVALRYYGCGLVIPEHLENCWILDLGSGSGRDCYVLSQLVGEKGHVTGIDMTKGQVEVAEKYLDYHMEKYGFQASNVTFIHGYIEKLGEAGIKNESHDIVVSNCVINLVPDKQQVLQEAYRVLKHGGELYFSDVYTSLELPEEIRTHKVLWGECLGGALYWKELAVLAQKIGFCPPRLVTANLITIQNKELERVIGDCRFVSATFRLFKHSKTGPTKRCQVIYNGGITGHEMDEETAAILKNSRFAQDFLIRPIGEKLPTSGGCSALELKDIITDPFKLAEESDSMKSRCVPDAAGGCCGTKKSC

SEQ ID NO: 848687 - protein, 90 aa, Homo sapiens
  misc_feature (1)..(1): Xaa can be any naturally occurring amino acid
  misc_feature (4)..(5): Xaa can be any naturally occurring amino acid
  misc_feature (7)..(7): Xaa can be any naturally occurring amino acid
XALXXSXLEDFEWCCRVDEETAAILKNSRFAQDFLIRPIGEKLPTSGGCSALELKDIITDPFKLAEESDSMKSRCVPDAAGGCCGTKKSC

SEQ ID NO: 848688 - protein, 382 aa, Homo sapiens
MAALRDAEIQKDVQTYYGQVLKRSADLQTNGCVTTARPVPKHIREALQNVHEEVALRYYGCGLVIPEHLENCWILDLGSGSGRDCYVLSQLVGEKGHVTGIDMTKGQVEVAEKYLDYHMEKYGFQASNVTFIHGYIEKLGEAGIKNESHDIVVSNCVINLVPDKQQVLQEAYRVLKHGGELYFSDVYTSLELPEEIRTHKVLWGECLGGALYWKELAVLAQKIGFCPPRLVTANLITIQNKELERVIGDCRFVSATFRLFKHSKTGPTKRCQVIYNGGITGHEKELMFDANFTFKEGEIVEVDEETAAILKNSRFAQDFLIRPIGEKLPTSGGCSALELKDIITDPFKLAEESDSMKSRCVPDAAGGCCGTKSACFLTCFSP

SEQ ID NO: 848689 - protein, 375 aa, Homo sapiens
MAALRDAEIQKDVQTYYGQVLKRSADLQTNGCVTTARPVPKHIREALQNVHEEVALRYYGCGLVIPEHLENCWILDLGSGSGRDCYVLSQLVGEKGHVTGIDMTKGQVEVAEKYLDYHMEKYGFQASNVTFIHGYIEKLGEAGIKNESHDIVVSNCVINLVPDKQQVLQEAYRVLKHGGELYFSDVYTSLELPEEIRTHKVLWGECLGGALYWKELAVLAQKIGFCPPRLVTANLITIQNKELERVIGDCRFVSATFRLFKHSKTGPTKRCQVIYNGGITGHEKELMFDANFTFKEGEIVEVDEETAAILKNSRFAQDFLIRPIGEKLPTSGGCSALELKDIITDPFKLAEESDSMKSRCVPDAAGGCCGTKKSC

SEQ ID NO: 848690 - protein, 137 aa, Homo sapiens; identical to SEQ ID NO: 848682

SEQ ID NO: 848691 - protein, 137 aa, Homo sapiens; identical to SEQ ID NO: 848682

SEQ ID NO: 848692 - protein, 375 aa, Homo sapiens; identical to SEQ ID NO: 848689

SEQ ID NO: 848693 - protein, 255 aa, Homo sapiens
MTKGQVEVAEKYLDYHMEKYGFQASNVTFIHGYIEKLGEAGIKNESHDIVVSNCVINLVPDKQQVLQEAYRVLKHGGELYFSDVYTSLELPEEIRTHKVLWGECLGGALYWKELAVLAQKIGFCPPRLVTANLITIQNKELERVIGDCRFVSATFRLFKHSKTGPTKRCQVIYNGGITGHEMDEETAAILKNSRFAQDFLIRPIGEKLPTSGGCSALELKDIITDPFKLAEESDSMKSRCVPDAAGGCCGTKKSC

SEQ ID NO: 848694 - protein, 110 aa, Homo sapiens
MGGRSKPASLGGASAQELAAGARRPESQAEETVSARPESQAEETVSARPESQAEETVSARPGRPAPAPSPFPGPPQGGNASASPELCLETFVLPSPLGPLPALYWPPPSC

SEQ ID NO: 848695 - protein, 296 aa, Homo sapiens
MDTPLRRSRRLGGLRPESPESLTSVSRTRRALVEFESNPEETREPGSPPSVQRAGLGSPERPPKTSPGSPRLQQGAGLESPQGQPEPGAASPQRQQDLHLESPQRQPEYSPESPRCQPKPSEEAPKCSQDQGVLASELAQNKEELTPGAPQHQLPPVPGSPEPYPGQQAPGPEPSQPLLELTPRAPGSPRGQHEPSKPPPAGETVTGGFGAKKRKGSSSQAPASKKLNKEELPVIPKGKPKSGRVWKDRSKKRFSRCFRKALAHRGREMRRRRGAGRIERLEKNEAGRNKFGGIRS

SEQ ID NO: 848696 - protein, 360 aa, Homo sapiens
MDTPLRRSRRLGGLRPESPESLTSVSRTRRALVEFESNPEETREPGSPPSVQRAGLGSPERPPKTSPGSPRLQQGAGLESPQGQPEPGAASPQRQQDLHLESPQRQPEYSPESPRCQPKPSEEAPKCSQDQGVLASELAQNKEELTPGAPQHQLPPVPGSPEPYPGQQAPGPEPSQPLLELTPRAPGSPRGQHEPSKPPPAGETVTGGFGAKKRKGSSSQAPASKKLNKEELPVIPKGKPKSGRVWKDRSKKRFSQMLQDKPLRTSWQRKMKERQERKLAKDFARHLEEEKERRRQEKKQRRAENLKRRLENERKAEVVQVIRNPAKLKRAKKKQLRSIEKRDTLALLQKQPPQQPAAKI

SEQ ID NO: 848697 - protein, 421 aa, Homo sapiens
MDTPLRRSRRLGGLRPESPESLTSVSRTRRALVEFESNPEETREPGSPPSVQRAGLGSPERPPKTSPGSPRLQQGAGLESPQGQPEPGAASPQRQQDLHLESPQRQPEYSPESPRCQPKPSEEAPKCSQDQGVLASELAQNKEELTPGAPQHQLPPVPGSPEPYPGQQAPGPEPSQPLLELTPRAPGSPRGQHEPSKPPPAGETVTGGFGAKKRKGSSSQAPASKKLNKEELPVIPKGKPKSGRVWKDRSKKRFSQMLQDKPLRTSWQRKMKERQERKLATNMSDTATQGAQVIRNPANSSGEARARGLQLTKRETLGLVVKERPEGGSQNRHGEAEGSSLANKNALVGSRTTTWVQQGATSTGPQLKGKQDIRNHRRVARSERNDEHIARQIATEELSEQTTQHIQQHTVPRGHNGEKKQ

SEQ ID NO: 848698 - protein, 360 aa, Homo sapiens; identical to SEQ ID NO: 848696

SEQ ID NO: 848699 - protein, 360 aa, Homo sapiens; identical to SEQ ID NO: 848696

SEQ ID NO: 848700 - protein, 525 aa, Homo sapiens
MEGPAEWGPEAALGPEAVLRFLAERGGRALHAELVQHFRGALGGEPEQRARARAHFKELVNAVATVRVDPADGAKYVHLKKRFCEGPSEPSGDPPRIQVTAEPEAPDGPAGPEARDRLPDAAAPESLPGQGRELGEGEPPAPAHWPPLSAGARRKNSRRDVQPLPRTPAPGPSEDLELPPHGCEEADRGSSLVGATAQRPARQNLRDLVMGSSPQLKRSVCPGGSSPGSSSGGGRGRGGGDSDSASVASSSAEEESSGGGSVTLDPLEHAWMLSASDGKWDSLEGLLTCEPGLLVKRDFIYRLHLPALGRKHGRQELVAMLVNFANKHQLPVNMDARTSGGYTALHLAAMHGHVEVVKLLVGAYDADVDIRDYSGKKASQYLSRSIAEEIKNLVGALDEGDGESAAGSGGGRWRLSKVLPSHLITYKLSHALEDGGDHHHHHHSAEGWVGGKAKDPGRKASGSSSGRIKPRLNKIRFRTQIVHTTPSFRDPEQPLEGRGEEGVGEERPVKGHSPFTLRPKSNVFG

SEQ ID NO: 848701 - protein, 525 aa, Homo sapiens; identical to SEQ ID NO: 848700

SEQ ID NO: 848702 - protein, 525 aa, Homo sapiens; identical to SEQ ID NO: 848700

SEQ ID NO: 848703 - protein, 232 aa, Homo sapiens [sequence omitted]

SEQ ID NO: 848704 - protein, 442 aa, Homo sapiens [sequence omitted]

SEQ ID NO: 848705 - protein, 339 aa, Homo sapiens
MAGEGDQQDAAHNMGNHLPLLPAESEEEDEMEVEDQDSKEAKKPNIINFDTSLPTSHTYLGADMEEFHGRTLHDDDSCQVIPVLPQVMMILIPGQTLPLQLFHPQEVSMVRNLIQKDRTFAVLAYSNVQEREAQFGTTAEIYAYREEQDFGIEIVKVKAIGRQRFKVLELRTQSDGIQQAKVQILPECVLPSTMSAVQLESLNKCQIFPSKPVSREDQCSYKWWQKYQKRKFHCANLTSWPRWLYSLYDAETLMDRIKKQLREWDENLKDDSLPSNPIDFSYRVAACLPIDDVLRIQLLKIGSAIQRLRCELDIMNKCTSLCCKQCQETEITTKNEIFR

SEQ ID NO: 848706 - protein, 305 aa, Homo sapiens
MAGEGDQQDAAHNMGNHLPLLPAESEEEDEMEVEDQDSKEAKKPNIINFDTSLPTSHTYLGADMEEFHGRTLHDDDSCQVIPVLPQVMMILIPGQTLPLQLFHPQEVSMVRNLIQKDRTFAVLAYSNVQEREAQFGTTAEIYAYREEQDFGIEIVKVKAIGRQRFKVLELRTQSDGIQQAKVQILPECVLPSTMSAVQLESLNKCQIFPSKPVSREDQCSYKWWQKYQKRKFHCANLTSWPRWLYSLYDAETLMDRIKKQLREWDENLKDDSLPSNPIDFSYRVAACLPIDDVLRIQLLMYFPLL

SEQ ID NO: 848707 - protein, 282 aa, Homo sapiens [sequence omitted]

SEQ ID NO: 848708 - protein, 411 aa, Homo sapiens
MAGEGDQQDAAHNMGNHLPLLPAESEEEDEMEVEDQDSKEAKKPNIINFDTSLPTSHTYLGADMEEFHGRTLHDDDSCQVIPVLPQVMMILIPGQTLPLQLFHPQEVSMVRNLIQKDRTFAVLAYSNVQEREAQFGTTAEIYAYREEQDFGIEIVKVKAIGRQRFKVLELRTQSDGIQQAKVQILPECVLPSTMSAVQLESLNKCQIFPSKPVSREDQCSYKWWQKYQKRKFHCANLTSWPRWLYSLYDAETLMDRIKKQLREWDENLKDDSLPSNPIDFSYRVAACLPIDDVLRIQLLKIGSAIQRLRCELDIMNKCTSLCCKQCQETEITTKNEIFSLSLCGPMAAYVNPHGYVHETLTVYKACNLNLIGRPSTEHSWFPGYAWTVAQCKICASHIGWKFTATKKDMSH

SEQ ID NO: 848709 - protein, 339 aa, Homo sapiens; identical to SEQ ID NO: 848705

SEQ ID NO: 848710 - protein, 339 aa, Homo sapiens; identical to SEQ ID NO: 848705

SEQ ID NO: 848711 - protein, 442 aa, Homo sapiens [sequence omitted]

SEQ ID NO: 848712 - protein, 379 aa, Homo sapiens
MEEFHGRTLHDDDSCQVIPVLPQVMMILIPGQTLPLQLFHPQEVSMVRNLIQKDRTFAVLAYSNVQEREAQFGTTAEIYAYREEQDFGIEIVKVKAIGRQRFKVLELRTQSDGIQQAKVQILPECVLPSTMSAVQLESLNKCQIFPSKPVSREDQCSYKWWQKYQKRKFHCANLTSWPRWLYSLYDAETLMDRIKKQLREWDENLKDDSLPSNPIDFSYRVAACLPIDDVLRIQLLKIGSAIQRLRCELDIMNKCTSLCCKQCQETEITTKNEIFSLSLCGPMAAYVNPHGYVHETLTVYKACNLNLIGRPSTEHSWFPGYAWTVAQCKICASHIGWKFTATKKDMSPQKFWGLTRSALLPTIPDTEDEISPDKVILCL

SEQ ID NO: 848713 - protein, 200 aa, Homo sapiens [sequence omitted]

SEQ ID NO: 848714 - protein, 194 aa, Homo sapiens
MAGEGDQQDAAHNMGNHLPLLPAESEEEDEMEVEDQDSKEAKKPNIINFDTSLPTSHTYLGADMEEFHGRTLHDDDSCQVIPVLPQVMMILIPGQTLPLQLFHPQEVSMVRNLIQKDRTFAVLAYSNVQEREAQFGTTAEIYAYREEQDFGIEIVKVKAIGRQRFKVLELRTQSDGYSPVVSNLAMHQNHLGSF

SEQ ID NO: 848715 - protein, 442 aa, Homo sapiens [sequence omitted]

SEQ ID NO: 848716 - protein, 442 aa, Homo sapiens [sequence omitted]

SEQ ID NO: 848717 - protein, 282 aa, Homo sapiens [sequence omitted]

SEQ ID NO: 848718 - protein, 442 aa, Homo sapiens [sequence omitted]

SEQ ID NO: 848719 - protein, 282 aa, Homo sapiens [sequence omitted]

SEQ ID NO: 848720 - protein, 339 aa, Homo sapiens; identical to SEQ ID NO: 848705

SEQ ID NO: 848721 - protein, 414 aa, Homo sapiens
ACLAGKQTWPAKEISRTLRTTWATTCRSCLYLGADMEEFHGRTLHDDDSCQVIPVLPQVMMILIPGQTLPLQLFHPQEVSMVRNLIQKDRTFAVLAYSNVQEREAQFGTTAEIYAYREEQDFGIEIVKVKAIGRQRFKVLELRTQSDGIQQAKVQILPECVLPSTMSAVQLESLNKCQIFPSKPVSREDQCSYKWWQKYQKRKFHCANLTSWPRWLYSLYDAETLMDRIKKQLREWDENLKDDSLPSNPIDFSYRVAACLPIDDVLRIQLLKIGSAIQRLRCELDIMNKCTSLCCKQCQETEITTKNEIFSLSLCGPMAAYVNPHGYVHETLTVYKACNLNLIGRPSTEHSWFPGYAWTVAQCKICASHIGWKFTATKKDMSPQKFWGLTRSALLPTIPDTEDEISPDKVILCL

SEQ ID NO: 848722 - protein, 334 aa, Homo sapiens
MVRNLIQKDRTFAVLAYSNVQEREAQFGTTAEIYAYREEQDFGIEIVKVKAIGRQRFKVLELRTQSDGIQQAKVQILPECVLPSTMSAVQLESLNKCQIFPSKPVSREDQCSYKWWQKYQKRKFHCANLTSWPRWLYSLYDAETLMDRIKKQLREWDENLKDDSLPSNPIDFSYRVAACLPIDDVLRIQLLKIGSAIQRLRCELDIMNKCTSLCCKQCQETEITTKNEIFSLSLCGPMAAYVNPHGYVHETLTVYKACNLNLIGRPSTEHSWFPGYAWTVAQCKICASHIGWKFTATKKDMSPQKFWGLTRSALLPTIPDTEDEISPDKVILCL

SEQ ID NO: 848723 - protein, 230 aa, Homo sapiens
QLDSMTTAKCQLTIEYELRSASSYMVANRTSWHSLRDSIYTANTVKGNLLKLRSAECAGFRLAISLNFSYRVAACLPIDDVLRIQLLKIGSAIQRLRCELDIMNKCTSLCCKQCQETEITTKNEIFSLSLCGPMAAYVNPHGYVHETLTVYKACNLNLIGRPSTEHSWFPGYAWTVAQCKICASHIGWKFTATKKDMSPQKFWGLTRSALLPTIPDTEDEISPDKVILCL

SEQ ID NO: 848724 - protein, 176 aa, Homo sapiens
MAGEGDQQDAAHNMGNHLPLLPAESEEEDEMEVEDQDSKEAKKPNIINFDTSLPTSHTYLGADMEEFHGRTLHDDDSCQVIPVLPQVMMILIPGQTLPLQLFHPQEVSMVRNLIQKDRTFAVLAYSNVQEREAQFGTTAEIYAYREEQDFGIEIVKVKAIGRQRFKVLELRTQSDG

SEQ ID NO: 848725 - protein, 84 aa, Homo sapiens
AGGGTDGLVGGAENCRELLETEDRNPGSRPRGLRTVGRLAGERGKDGAWPPGLPVPCLELTPTVYCRELTRSHFEKKLERIPSG

SEQ ID NO: 848726 - protein, 160 aa, Homo sapiens
AGGGTDGLVGGAENCRELLETEDRNPGSRPRGLRTVGRLAGERGKDGAWPPGLPVPCLELTPTGESPPSSGSAQPAGFLWKSGGPTVYVRPFDRSWRSSVDPRFSLLINVGQFETGSRAYVLRKKNFIETSGGVEKTILTITVYYRSEFHSPKMLKKQAS

SEQ ID NO: 848727 - protein, 385 aa, Homo sapiens
MLWKLLLRSQSCRLCSFRKMRSPPKYRPFLACFTYTTDKQSSKENTRTVEKLYKCSVDIRKIRRLKGWVLLEDETYVEEIANILQELGADETAVASILERCPEAIVCSPTAVNTQRKLWQLVCKNEEELIKLIEQFPESFFTIKDQENQKLNVQFFQELGLKNVVISRLLTAAPNVFHNPVEKNKQMVRILQESYLDVGGSEANMKVWLLKLLSQNPFILLNSPTAIKETLEFLQEQGFTSFEILQLLSKLKGFLFQLCPRSIQNSISFSKNAFKCTDHDLKQLVLKCPALLYYSVPVLEERMQGLLREGISIAQIRETPMVLELTPQIVQYRIRKLNSSGYRIKDGHLANLNGSKKEFEANFGKIQAKKVRPLFNPVAPLNVEE

SEQ ID NO: 848728 - protein, 84 aa, Homo sapiens; identical to SEQ ID NO: 848725

SEQ ID NO: 848729 - protein, 385 aa, Homo sapiens; identical to SEQ ID NO: 848727

SEQ ID NO: 848730 - protein, 475 aa, Homo sapiens
DAWVDPRVGLCPTEKNVDLSTFYQNRAAAFEQLQKWKEVAQDCTKAVELNPKYVKALFRRAKAHEKLDNKKECLEDVTAVCILEGFQNQQSMLLADKVLKLLGKEKAKEKYKNREPLMPSPQFIKSYFSSFTDDIISQPMLKGEKSDEDKDKEGEALEVKENSGYLKAKQYMEEENYDKIISECSKEIDAEGKYMAEALLLRATFYLLIGNANAAKPDLDKVISLKEANVKLRANALIKRGSMYMQQQQPLLSTQDFNMAADIDPQNADVYHHRGQLKILLDQVEEAVADFDECIRLRPESALAQAQKCFALYRQAYTGNNSSQIQAAMKGFEEVIKKFPRCAEGYALYAQALTDQQQFGKADEMYDKCIDLEPDNATTYVHKGLLQLQWKQDLDRGLELISKAIEIDNKCDFAYETMGTIEVQRGNMEKAIDMFNKAINLAKSEMEMAHLYSLCDAAHAQTEVAKKYGLKPPTL

SEQ ID NO: 848731 - protein, 521 aa, Homo sapiens
LLWSESVNVDYVFDNCFLSFQNSLDRAQAAKNKGNKYFKAGKYEQAIQCYTEAISLCPTEKNVDLSTFYQNRAAAFEQLQKWKEVAQDCTKAVELNPKYVKALFRRAKAHEKLDNKKECLEDVTAVCILEGFQNQQSMLLADKVLKLLGKEKAKEKYKNREPLMPSPQFIKSYFSSFTDDIISQPMLKGEKSDEDKDKEGEALEVKENSGYLKAKQYMEEENYDKIISECSKEIDAEGKYMAEALLLRATFYLLIGNANAAKPDLDKVISLKEANVKLRANALIKRGSMYMQQQQPLLSTQDFNMAADIDPQNADVYHHRGQLKILLDQVEEAVADFDECIRLRPESALAQAQKCFALYRQAYTGNNSSQIQAAMKGFEEVIKKFPRCAEGYALYAQALTDQQQFGKADEMYDKCIDLEPDNATTYVHKGLLQLQWKQDLDRGLELISKAIEIDNKCDFAYETMGTIEVQRGNMEKAIDMFNKAINLAKSEMEMAHLYSLCDAAHAQTEVAKKYGLKPPTL

SEQ ID NO: 848732 - protein, 264 aa, Homo sapiens
GRLLLLNSRPRRRLKEANVKLRANALIKRGSMYMQQQQPLLSTQDFNMAADIDPQNADVYHHRGQLKILLDQVEEAVADFDECIRLRPESALAQAQKCFALYRQAYTGNNSSQIQAAMKGFEEVIKKFPRCAEGYALYAQALTDQQQFGKADEMYDKCIDLEPDNATTYVHKGLLQLQWKQDLDRGLELISKAIEIDNKCDFAYETMGTIEVQRGNMEKAIDMFNKAINLAKSEMEMAHLYSLCDAAHAQTEVAKKYGLKPPTL

SEQ ID NO: 848733 - protein, 608 aa, Homo sapiens
MAASKPVEAAVVAAAVPSSGSGVGGGGTAGPGTGGLPRWQLALAVGAPLLLGAGAIYLWSRQQRRREARGRGDASGLKRNSERKTPEGRASPAPGSGHPEGPGAHLDMNSLDRAQAAKNKGNKYFKAGKYEQAIQCYTEAISLCPTEKNVDLSTFYQNRAAAFEQLQKWKEVAQDCTKAVELNPKYVKALFRRAKAHEKLDNKKECLEDVTAVCILEGFQNQQSMLLADKVLKLLGKEKAKEKYKNREPLMPSPQFIKSYFSSFTDDIISQPMLKGEKSDEDKDKEGEALEVKENSGYLKAKQYMEEENYDKIISECSKEIDAEGKYMAEALLLRATFYLLIGNANAAKPDLDKVISLKEANVKLRANALIKRGSMYMQQQQPLLSTQDFNMAADIDPQNADVYHHRGQLKILLDQVEEAVADFDECIRLRPESALAQAQKCFALYRQAYTGNNSSQIQAAMKGFEEVIKKFPRCAEGYALYAQALTDQQQFGKADEMYDKCIDLEPDNATTYVHKGLLQLQWKQDLDRGLELISKAIEIDNKCDFAYETMGTIEVQRGNMEKAIDMFNKAINLAKSEMEMAHLYSLCDAAHAQTEVAKKYGLKPPTL

SEQ ID NO: 848734 - protein, 608 aa, Homo sapiens; identical to SEQ ID NO: 848733

SEQ ID NO: 848735 - protein, 68 aa, Homo sapiens
AKATFDAISKTTGYLTPDLWKETVFTKSPYQEFTDHLVKTHTRVSVQQDSGSSCGYNIGFLYKKNKVN

SEQ ID NO: 848736 - protein, 558 aa, Homo sapiens [sequence omitted]

SEQ ID NO: 848737 - protein, 409 aa, Homo sapiens
MAASKPVEAAVVAAAVPSSGSGVGGGGTAGPGTGGLPRWQLALAVGAPLLLGAGAIYLWSRQQRRREARGRGDASGLKRNSERKTPEGRASPAPGSGHPEGPGAHLDMNSLDRAQAAKNKGNKYFKAGKYEQAIQCYTEAISLCPTEKNVDLSTFYQNRAAAFEQLQKWKEVAQDCTKAVELNPKYVKALFRRAKAHEKLDNKKECLEDVTAVCILEGFQNQQSMLLADKVLKLLGKEKAKEKYKNREPLMPSPQFIKSYFSSFTDDIISQPMLKGEKSDEDKDKEGEALEVKENSGYLKAKQYMEEENYDKIISECSKEIDAEGKYMAEALLLRATFYLLIGNANAAKPDLDKVISLKEANVKLRANALIKRGSMYMQQQQPLLSTQDFNMAADIDPQNADVYHHRGQ

SEQ ID NO: 848738 - protein, 608 aa, Homo sapiens; identical to SEQ ID NO: 848733

SEQ ID NO: 848739 - protein, 608 aa, Homo sapiens; identical to SEQ ID NO: 848733

SEQ ID NO: 848740 - protein, 652 aa, Homo sapiens
  misc_feature (42)..(42): Xaa can be any naturally occurring amino acid
FALTLRGPAVLSLALSGARRLFLMLPCELGVCAGCAVDVLCXPGAAWGVLPAECACMCSCACLCVQPPCLALCGCCVLSSSYRCCVCLCSAHCAACVMCHDVPVCAELAMLCLECCNMLNCEDPCDVACGHVLCPCVQRDIPECVPGAHLDMNSLDRAQAAKNKGNKYFKAGKYEQAIQCYTEAISLCPTEKNVDLSTFYQNRAAAFEQLQKWKEVAQDCTKAVELNPKYVKALFRRAKAHEKLDNKKECLEDVTAVCILEGFQNQQSMLLADKVLKLLGKEKAKEKYKNREPLMPSPQFIKSYFSSFTDDIISQPMLKGEKSDEDKDKEGEALEVKENSGYLKAKQYMEEENYDKIISECSKEIDAEGKYMAEALLLRATFYLLIGNANAAKPDLDKVISLKEANVKLRANALIKRGSMYMQQQQPLLSTQDFNMAADIDPQNADVYHHRGQLKILLDQVEEAVADFDECIRLRPESALAQAQKCFALYRQAYTGNNSSQIQAAMKGFEEVIKKFPRCAEGYALYAQALTDQQQFGKADEMYDKCIDLEPDNATTYVHKGLLQLQWKQDLDRGLELISKAIEIDNKCDFAYETMGTIEVQRGNMEKAIDMFNKAINLAKSEMEMAHLYSLCDAAHAQTEVAKKYGLKPPTL

SEQ ID NO: 848741 - protein, 608 aa, Homo sapiens; identical to SEQ ID NO: 848733

SEQ ID NO: 848742 - protein, 608 aa, Homo sapiens; identical to SEQ ID NO: 848733

SEQ ID NO: 848743 - protein, 608 aa, Homo sapiens; identical to SEQ ID NO: 848733

SEQ ID NO: 848744 - protein, 525 aa, Homo sapiens
MAASKPVEAAVVAAAVPSSGSGVGGGGTAGPGTGGLPRWQLALAVGAPLLLGAGAIYLWSRQQRRREARGRGDASGLKRNSERKTPEGRASPAPGSGHPEGPGAHLDMNSLDRAQAAKNKGNKYFKAGKYEQAIQCYTEAISLCPTEKNVDLSTFYQNRAAAFEQLQKWKEVAQDCTKAVELNPKYVKALFRRAKAHEKLDNKKECLEDVTAVCILEGFQNQQSMLLADKVLKLLGKEKAKEKYKNREPLMPSPQFIKSYFSSFTDDIISQPMLKGEKSDEDKDKEGEALEVKENSGYLKAKQYMEEENYDKIISECSKEIDAEGKYMAEALLLRATFYLLIGNANAAKPDLDKVISLKEANVKLRANALIKRGSMYMQQQQPLLSTQDFNMAADIDPQNADVYHHRGQLKILLDQVEEAVADFDECIRLRPESALAQAQKCFALYRQAYTGNNSSQIQAAMKGFEEVIKKFPRCAEGYALYAQVNVFSGFLKITAYICQISVWKSENSAIMVAASLEAGGFVPD

SEQ ID NO: 848745 - protein, 158 aa, Homo sapiens
GGGFRNFARVSGLLLCQAGGVLVSSFVMAAAVAMETDDAGNRLRFQLELEFVQCLANPNYLNFLAQRGYFKDKAFVNYLKYLLYWKDPEYAKYLKYPQCLHMLELLQYEHFRKELVNAQCAKFIDEQQILHWQHYSRKRMRLQQALAEQQQQNNTSGK

SEQ ID NO: 848746 - protein, 158 aa, Homo sapiens; identical to SEQ ID NO: 848745

SEQ ID NO: 848747 - protein, 158 aa, Homo sapiens; identical to SEQ ID NO: 848745

SEQ ID NO: 848748 - protein, 70 aa, Homo sapiens
GGGFRNFARVSGLLLCQAGGVLVSSFVMAAAVAMETDDAGNRLRFQLELEFVQCLANPNYLNCTLSVYTC

SEQ ID NO: 848749 - protein, 70 aa, Homo sapiens; identical to SEQ ID NO: 848748

SEQ ID NO: 848750 - protein, 158 aa, Homo sapiens; identical to SEQ ID NO: 848745

SEQ ID NO: 848751 - protein, 158 aa, Homo sapiens; identical to SEQ ID NO: 848745

SEQ ID NO: 848752 - protein, 95 aa, Homo sapiens
GGGFRNFARVSGLLLCQAGGVLVSSFVMAAAVAMETDDAGNRLRFQLELEFVQCLANPNYLNFLAQRGYFKDKAFVNYLKYLLYWKDPEYAKYLK

SEQ ID NO: 848753 - protein, 629 aa, Homo sapiens
RKERGIPTAPPLSVTGGAAASGPRTLNMSRLKRIAGQDLRAGFKAGGRDCGTSVPQGLLKAARKSGQLNLSGRNLSEVPQCVWRINVDIPEEANQNLSFGATERWWEQTDLTKLIISNNKLQSLTDDLRLLPALTVLDIHDNQLTSLPSAIRELENLQKLNVSHNKLKILPEEITNLRNLKCLYLQHNELTCISEGFEQLSNLEDLDLSNNHLTTVPASFSSLSSLVRLNLSSNELKSLPAEINRMKRLKHLDCNSNLLETIPPELAGMESLELLYLRRNKLRFLPEFPSCSLLKELHVGENQIEMLEAEHLKHLNSILVLDLRDNKLKSVPDEIILLRSLERLDLSNNDISSLPYSLGNLHLKFLALEGNPLRTIRREIISKGTQEVLKYLRSKIKDDGPSQSESATETAMTLPSESRVNIHAIITLKILDYSDKQATLIPDEVFDAVKSNIVTSINFSKNQLCEIPKRMVELKEMVSDVDLSFNKLSFISLELCVLQKLTFLDLRNNFLNSLPEEMESLVRLQTINLSFNRFKMLPEVLYRIFTLETILISNNQVGSVDPQKMKMMENLTTLDLQNNDLLQIPPELGNCVNLRTLLLDGNPFRVPRAAILMKGTAAILEYLRDRIPT

SEQ ID NO: 848754 - protein, 384 aa, Homo sapiens
MKRLKHLDCNSNLLETIPPELAGMESLELLYLRRNKLRFLPEFPSCSLLKELHVGENQIEMLEAEHLKHLNSILVLDLRDNKLKSVPDEIILLRSLERLDLSNNDISSLPYSLGNLHLKFLALEGNPLRTIRREIISKGTQEVLKYLRSKIKDDGPSQSESATETAMTLPSESRVNIHAIITLKILDYSDKQATLIPDEVFDAVKSNIVTSINFSKNQLCEIPKRMVELKEMVSDVDLSFNKLSFISLELCVLQKLTFLDLRNNFLNSLPEEMESLVRLQTINLSFNRFKMLPEVLYRIFTLETILISNNQVGSVDPQKMKMMENLTTLDLQNNDLLQIPPELGNCVNLRTLLLDGNPFRVPRAAILMKGTAAILEYLRDRIPT

SEQ ID NO: 848755 - protein, 649 aa, Homo sapiens
MCQKNLIAENCIMNDLVYFTSLEQHWYLLYYLMLVSYEETINTVDSYSLWQLCSIDTLNTQLVNTDLLLLGEIQGLGSCKSLVTTFSATSQYITLLYVCFCSKILHLILLFVINIEIMANSSYNSCLNKAYLTHVFFSKSTFVLRKTRQYFSIILGDHLTQWNHQQRYENLKSVALNEPPKGPVYSIRAETRRQSITLFSLTWEHARGVTPIFCSSVPVYEVTSEVPHIDLGVETLVSRQVCKYSTHEYMRINCNQLFFYEIKKISLYKNSQETEIFEDIIEINNMVESFDFCLHKHLTVKNNKKAFLIEDILLYNETKQALKSSVELSEHVNRFIYVYLLKGGRGQNVLMFWEAGGGAVVVITLITLQSLAWMTHADICLNLIDHLVYSHLIRLRRLDKRVVQITAPSFSSCLILDNISYPPKFVFPHLLKQNYEWYLHHRIVEKIGLLRVTEYKLLGSVPFSKVSIQLICFGLLISYNSNVEMFRYEKGQIAQAWWFTPVIPVLWEAEAGRLLEARSLRPAWPKWQNPLTTENTKISRVWWNTPVIPATREAEDENYLNLGGGGCNKLEIAPLHFRLGNRVRLCLKKRNKNKKGQIEKKYRNFIYKIANEIRLKTLLMENVYILNFSLCLEHYYWMEIHSEFLEQPY

SEQ ID NO: 848756 - protein, 649 aa, Homo sapiens; identical to SEQ ID NO: 848755

SEQ ID NO: 848757 - protein, 1411 aa, Homo sapiens
RQPGTPARATQGRLRRRPEGARVPSARRGRPRARWRAPQNNPEVDSIMAELKVEAPASVDWQKRCLTLETQLFRFRLQASKIRELLADKMQELEQRLLEAEQRAENAETQVGVMEEKVKLSNLKNVDSEGSLHRKYQELLKAIKGKDELISQLEAQLEKQKQMRAEEAKTVQEKAAKIKEWVTLKLAKLEMENQHLKSHNQRLVEQVGSLQDALEAIQIAPSRKLLVPPYGAAEQDSVPSEPGIQPMGQDSGSQAQGLKAAVLAPSPGALQSKDSVSEAASPLEDSSSSTVHSGETVEAKPLQPHLGRESPPHQPCMKLLTFRCSSASWGEGLVTAQRGMLPGTKTSAREGGPGSSLTLPKVRAPGTPRDSIQLAKRHHSQPQVGHGHFGRVVNIETEAFSALHPSGLPELESRARSREEPEKMEMEEPPPAGKNEERESPKALGAELEEVELGNKPPTPPLHQFSSWESRIYAVATSGMRLSDMSPRSNTACCASSPPALVSPGSFSGLVYKNVTVPVYTALKGRATQISNMPFMDESSGSDDDCSSQASFRISVPSSESRKTSGLGSPRAIKRGVSMSSLSSEGDYAIPPDACSLDSDYSEPEHKLQRTSSYSTDGLGLGGESLEKSGYLLKMGSQVKTWKRRWFVLRQGQIMYYKSPSDVIRKPQGQVDLNSRCQIVRGEGSQTFQLISEKKTYYLTADSPSLLEEWIRVLQSLLKVQATGPPALLRGGTKPTVKGWLTKVKHGHSKVVWCALVGKIFYYYRSHEDKRPLGCLPVRDAHIEEVDRSCDSDEDYEAGGTRRLLSSHCTLVIHPTEHSPTYLLIGTKHEKDTWLYHLTVAAGGSSAKVGTAYEQLIGKLMDGEGDPDSPLWRHPMLCYSKDGLYASLTTLPSEALQTEALKLFKSCQLFINVPVEAASVDYHVSLAQTALQVCLVHPELQSEIYCQLMKQTSCRPPQKYSLMQCWQLLALCAPLFLPQHHFLWYVKQQLQRHADPRSETGQYATYCQRAVERTLRTGEREARPSRMEVVSILLRNPFHHSLPFSIPVHFTNGTYHVVGFDGSSTVDEFLQRLNQEIGMRKPSHSGFALFTDDPSGRDLEHCLQGSVKICDAISKWEQAMKELHPGKSEGGTRVVKLMYKNRLYFRSQVKGETDRERLLLASQTSREIVAGRFPINKELALEMAALMAQVEYGDLEKPALPGPGGTSPAKAQHLLQQVLDRFHPRRYRHGAPAEQLRHLADMLTTKWATLQGCSPPECIRIYLTVARKWPFFGAKLFAAQPAQLSSKENALVWIAVNEDGVSILDHNTMQVHITYPYSSVTTFGGCRDDFMLVIRSIPDKSSGKSHIEKLIFRMAAPKIAEATFIMASYMNHCTTTVNPPTNPPGACQLWELDGRQFFSSVSCATKGPTLL

SEQ ID NO: 848758 - protein, 932 aa, Homo sapiens [sequence omitted]

SEQ ID NO: 848759 - protein, 1411 aa, Homo sapiens; identical to SEQ ID NO: 848757

SEQ ID NO: 848760 - protein, 1411 aa, Homo sapiens; identical to SEQ ID NO: 848757

SEQ ID NO: 848761 - protein, 1411 aa, Homo sapiens; identical to SEQ ID NO: 848757

SEQ ID NO: 848762 - protein, 1079 aa, Homo sapiens
RQPGTPARATQGRLRRRPEGARVPSARRGRPRARWRAPQNNPEVDSIMAELKVEAPASVDWQKRCLTLETQLFRFRLQASKIRELLADKMQELEQRLLEAEQRAENAETQVGVMEEKVKLSNLKNVDSEGSLHRKYQELLKAIKGKDELISQLEAQLEKQKQMRAEEAKTVQEKAAKIKEWVTLKLAKLEMENQHLKSHNQRLVEQVGSLQDALEAIQIAPSRKLLVPPYGAAEQDSVPSEPGIQPMGQDSGSQAQGLKAAVLAPSPGALQSKDSVSEAASPLEDSSSSTVHSGETVEAKPLQPHLGRESPPHQPCMKLLTFRCSSASWGEGLVTAQRGMLPGTKTSAREGGPGSSLTLPKVRAPGTPRDSIQLAKRHHSQPQVGHGHFGRVVNIETEAFSALHPSGLPELESRARSREEPEKMEMEEPPPAGKNEERESPKALGAELEEVELGNKPPTPPLHQFSSWESRIYAVATSGMRLSDMSPRSNTACCASSPPALVSPGSFSGLVYKNVTVPVYTALKGRATQISNMPFMDESSGSDDDCSSQASFRISVPSSESRKTSGLGSPRAIKRGVSMSSLSSEGDYAIPPDACSLDSDYSEPEHKLQRTSSYSTDGLGLGGESLEKSGYLLKMGSQVKTWKRRWFVLRQGQIMYYKSPSDVIRKPQGQVDLNSRCQIVRGEGSQTFQLISEKKTYYLTADSPSLLEEWIRVLQSLLKVQATGPPALLRGGTKPTVKGWLTKVKHGHSKVVWCALVGKIFYYYRSHEDKRPLGCLPVRDAHIEEVDRSCDSDEDYEAGGTRRLLSSHCTLVIHPTEHSPTYLLIGTKHEKDTWLYHLTVAAGGSSAKVGTAYEQLIGKLMDGEGDPDSPLWRHPMLCYSKDGLYASLTTLPSEALQTEALKLFKSCQLFINVPVEAASVDYHVSLAQTALQVCLVHPELQSEIYCQLMKQTSCRPPQKYSLMQCWQLLALCAPLFLPQHHFLWYVKQQLQRHADPRSETGQYATYCQRAVERTLRTGEREARPSRMEVVSILLRNPFHHSLPFSIPVHFTNGTYHVRSWACSLPRVFSRHHPENTPGP

SEQ ID NO: 848763 - protein, 552 aa, Homo sapiens
RQPGTPARATQGRLRRRPEGARVPSARRGRPRARWRAPQNNPEVDSIMAELKVEAPASVDWQKRCLTLETQLFRFRLQASKIRELLADKMQELEQRLLEAEQRAENAETQVGVMEEKVKLSNLKNVDSEGSLHRKYQELLKAIKGKDELISQLEAQLEKQKQMRAEEAKTVQEKAAKIKEWVTLKLAKLEMENQHLKSHNQRLVEQVGSLQDALEAIQIAPSRKLLVPPYGAAEQDSVPSEPGIQPMGQDSGSQAQGLKAAVLAPSPGALQSKDSVSEAASPLEDSSSSTVHSGETVEAKPLQPHLGRESPPHQPCMKLLTFRCSSASWGEGLVTAQRGMLPGTKTSAREGGPGSSLTLPKVRAPGTPRDSIQLAKRHHSQPQVGHGHFGRVVNIETEAFSALHPSGLPELESRARSREEPEKMEMEEPPPAGKNEERESPKALGAELEEVELGNKPPTPPLHQFSSWESRIYAVATSGMRLSDMSPRSNTACCASSPPALVSPGSFSGLVYKNVTVPVYTALKGVRNCCTKRGCLIRKGPWPHHPMTGAGL

SEQ ID NO: 848764 - protein, 238 aa, Homo sapiens
RQPGTPARATQGRLRRRPEGARVPSARRGRPRARWRAPQNNPEVDSIMAELKVEAPASVDWQKRCLTLETQLFRFRLQASKIRELLADKMQELEQRLLEAEQRAENAETQVGVMEEKVKLSNLKNVDSEGSLHRKYQELLKAIKGKDELISQLEAQLEKQKQMRAEEAKTVQEKAAKIKEWVTLKLAKLEMENQHLKSHNQRLVEQVGSLQDALEGRQARVCRCAVRVFGGYGAELRS

SEQ ID NO: 848765 - protein, 879 aa, Homo sapiens
MPFMDESSGSDDDCSSQASFRISVPSSESRKTSGLGSPRAIKRGVSMSSLSSEGDYAIPPDACSLDSDYSEPEHKLQRTSSYSTDGLGLGGESLEKSGYLLKMGSQVKTWKRRWFVLRQGQIMYYKSPSDVIRKPQGQVDLNSRCQIVRGEGSQTFQLISEKKTYYLTADSPSLLEEWIRVLQSLLKVQATGPPALLRGGTKPTVKGWLTKVKHGHSKVVWCALVGKIFYYYRSHEDKRPLGCLPVRDAHIEEVDRSCDSDEDYEAGGTRRLLSSHCTLVIHPTEHSPTYLLIGTKHEKDTWLYHLTVAAGGSSAKVGTAYEQLIGKLMDGEGDPDSPLWRHPMLCYSKDGLYASLTTLPSEALQTEALKLFKSCQLFINVPVEAASVDYHVSLAQTALQVCLVHPELQSEIYCQLMKQTSCRPPQKYSLMQCWQLLALCAPLFLPQHHFLWYVKQQLQRHADPRSETGQYATYCQRAVERTLRTGEREARPSRMEVVSILLRNPFHHSLPFSIPVHFTNGTYHVVGFDGSSTVDEFLQRLNQEIGMRKPSHSGFALFTDDPSGRDLEHCLQGSVKICDAISKWEQAMKELHPGKSEGGTRVVKLMYKNRLYFRSQVKGETDRERLLLASQTSREIVAGRFPINKELALEMAALMAQVEYGDLEKPALPGPGGTSPAKAQHLLQQVLDRFHPRRYRHGAPAEQLRHLADMLTTKWATLQGCSPPECIRIYLTVARKWPFFGAKLFAAQPAQLSSKENALVWIAVNEDGVSILDHNTMQVHITYPYSSVTTFGGCRDDFMLVIRSIPDKSSGKSHIEKLIFRMAAPKIAEATFIMASYMNHCTTTVNPPTNPPGACQLWELDGRQFFSSVSCATKGPTLL

SEQ ID NO: 848766 - protein, 143 aa, Homo sapiens [sequence omitted]

SEQ ID NO: 848767 - protein, 1411 aa, Homo sapiens; identical to SEQ ID NO: 848757

SEQ ID NO: 848768 - protein, 1378 aa, Homo sapiens
RQPGTPARATQGRLRRRPEGARVPSARRGRPRARWRAPQNNPEVDSIMAELKVEAPASVDWQKRCLTLETQLFRFRLQASKIRELLADKMQELEQRLLEAEQRAENAETQVGVMEEKVKLSNLKNVDSEGSLHRKYQELLKAIKGKDELISQLEAQLEKQKQMRAEEAKTVQEKAAKIKEWVTLKLAKLEMENQHLKSHNQRLVEQVGSLQDALEAIQIAPSRKLLVPPYGAAEQDSVPSEPGIQPMGQDSGSQAQGLKAAVLAPSPGALQSKDSVSEAASPLEDSSSSTVHSGETVEAKPLQPHLGRESPPHQPCMKLLTFRCSSASWGEGLVTAQRGMLPGTKTSAREGGPGSSLTLPKVRAPGTPRDSIQLAKRHHSQPQVGHGHFGRVVNIETEAFSALHPSGLPELESRARSREEPEKMEMEEPPPAGKNEERESPKALGAELEEVELGNKPPTPPLHQFSSWESRIYAVATSGMRLSDMSPRSNTACCASSPPALVSPGSFSGLVYKNVTVPVYTALKGRATQISNMPFMDESSGSDDDCSSQASFRISVPSSESRKTSGLGSPRAIKRGVSMSSLSSEGDYAIPPDACSLDSDYSEPEHKLQRTSSYSTDGLGLGGESLEKSGYLLKMGSQVKTWKRRWFVLRQGQIMYYKSPSDVIRKPQGQVDLNSRCQIVRGEGSQTFQLISEKKTYYLTADSPSLLEEWIRVLQSLLKVQATGPPALLRGGTKPTVKGWLTKVKHGHSKVVWCALVGKIFYYYRSHEDKRPLGCLPVRDAHIEEVDRSCDSDEDYEAGGTRRLLSSHCTLVIHPTEHSPTYLLIGTKHEKDTWLYHLTVAAGGSSAKVGTAYEQLIGKLMDGEGDPDSPLWRHPMLCYSKDGLYASLTTLPSEALQTEALKLFKSCQLFINVPVEAASVDYHVSLAQTALQVCLVHPELQSEIYCQLMKQTSCRPPQKYSLMQCWQLLALCAPLFLPQHHFLWYVKQQLQRHADPRSETGQYATYCQRAVERTLRTGEREARPSRMEVVSILLRNPFHHSLPFSIPVHFTNGTYHVVGFDGSSTVDEFLQRLNQEIGMRKPSHSGFALFTDDPSGRDLEHCLQGSVKICDAISKWEQAMKELHPGKSEGGTRVVKLMYKNRLYFRSQVKGETDRERLLLASQTSREIVAGRFPINKELALEMAALMAQVEYGDLEKPALPGPGGTSPAKAQHLLQQVLDRFHPRRYRHGAPAEQLRHLADMLTTKWATLQGCSPPECIRIYLTVARKWPFFGAKLFAAQPAQLSSKENALVWIAVNEDGVSILDHNTMQVHITYPYSSVTTFGGCRDDFMLVIRSIPDKSSGKSHIEKLIFRMAAPKKGTVHLRGSPDQQEPTPLGL

SEQ ID NO: 848769 - protein, 488 aa, Homo sapiens
RQPGTPARATQGRLRRRPEGARVPSARRGRPRARWRAPQNNPEVDSIMAELKVEAPASVDWQKRCLTLETQLFRFRLQASKIRELLADKMQELEQRLLEAEQRAENAETQVGVMEEKVKLSNLKNVDSEGSLHRKYQELLKAIKGKDELISQLEAQLEKQKQMRAEEAKTVQEKAAKIKEWVTLKLAKLEMENQHLKSHNQRLVEQVGSLQDALEAIQIAPSRKLLVPPYGAAEQDSVPSEPGIQPMGQDSGSQAQGLKAAVLAPSPGALQSKDSVSEAASPLEDSSSSTVHSGETVEAKPLQPHLGRESPPHQPCMKLLTFRCSSASWGEGLVTAQRGMLPGTKTSAREGGPGSSLTLPKVRAPGTPRDSIQLAKRHHSQPQVGHGHFGRVVNIETEAFSALHPSGLPELESRARSREEPEKMEMEEPPPAGKNEERESPKALGAELEEVELGNKPPTPPLHQFSSWVRGNLRAGQRSRANGKNTAG

SEQ ID NO: 848770 - protein, 100 aa, Homo sapiens
MGLSYGALNVTVFTRITAIQIAPSRKLLVPPYGAAEQDSVPSEPGIQPMGQDSGSQAQGLKAAVLAPSPGALQSKDSVSEAASPLEDSSSSTVHSGETVE

SEQ ID NO: 848771 - protein, 358 aa, Homo sapiens [sequence omitted]

SEQ ID NO: 848772 - protein, 79 aa, Homo sapiens
AFELPLGAFELRLGLSSCHPVFLGPLCEQPGMSCFRSSVLPSSLPFPKRTKDKGDSHTPGLKKAFQNHFSLWAQQRNEG

SEQ ID NO: 848773 - protein, 316 aa, Homo sapiens
MLSLNNLQNIIYNPVIPYVGTIPDQLDPGTLIVICGHVPSDADRFQVDLQNGSSVKPRADVAFHFNPRFKRAGCIVCNTLINEKWGREEITYDTPFKREKSFEIVIMVLKDKFQVAVNGKHTLLYGHRIGPEKIDTLGIYGKVNIHSIGFSFSSDLQSTQASSLELTEISRENVPKSGTPQLSLPFAARLNTPMGPGRTVVVKGEVNANAKSFNVDLLAGKSKDIALHLNPRLNIKAFVRNSFLQESWGEEERNITSFPFSPGMYFEMIIYCDVREFKVAVNGVHSLEYKHRFKELSSIDTLEINGDIHLLEVRSW

SEQ ID NO: 848774 - protein, 316 aa, Homo sapiens; identical to SEQ ID NO: 848773

SEQ ID NO: 848775 - protein, 316 aa, Homo sapiens; identical to SEQ ID NO: 848773

SEQ ID NO: 848776 - protein, 316 aa, Homo sapiens; identical to SEQ ID NO: 848773

SEQ ID NO: 848777 - protein, 316 aa, Homo sapiens; identical to SEQ ID NO: 848773

SEQ ID NO: 848778 - protein, 358 aa, Homo sapiens [sequence omitted]

SEQ ID NO: 848779 - protein, 299 aa, Homo sapiens
MLSLNNLQNIIYNPVIPYVGTIPDQLDPGTLIVICGHVPSDADRFQVDLQNGSSVKPRADVAFHFNPRFKRAGCIVCNTLINEKWGREEITYDTPFKREKSFEIVIMVLKDKFQVPKSGTPQLPSNRGGDISKIAPRTVYTKSKDSTVNHTLTCTKIPPMNYVSKSLPFAARLNTPMGPGRTVVVKGEVNANAKSFNVDLLAGKSKDIALHLNPRLNIKAFVRNSFLQESWGEEERNITSFPFSPGMYFEMIIYCDVREFKVAVNGVHSLEYKHRFKELSSIDTLEINGDIHLLEVRSW

SEQ ID NO: 848780 - protein, 123 aa, Homo sapiens [sequence omitted]

SEQ ID NO: 848781 - protein, 316 aa, Homo sapiens; identical to SEQ ID NO: 848773

SEQ ID NO: 848782 - protein, 177 aa, Homo sapiens
MLSLNNLQNIIYNPVIPYVGTIPDQLDPGTLIVICGHVPSDADRFQVDLQNGSSVKPRADVAFHFNPRFKRAGCIVCNTLINEKWGREEITYDTPFKREKSFEIVIMVLKDKFQVAVNGKHTLLYGHRIGPEKIDTLGIYGKVNIHSIGFSFSSDLQSTQASSLELTEISRENKCKY

SEQ ID NO: 848783 - protein, 316 aa, Homo sapiens; identical to SEQ ID NO: 848773

SEQ ID NO: 848784 - protein, 246 aa, Homo sapiens
MLSLNNLQNIIYNPVIPYVGTIPDQLDPGTLIVICGHVPSDADRFQVDLQNGSSVKPRADVAFHFNPRFKRAGCIVCNTLINEKWGREEITYDTPFKREKSFEIVIMVLKDKFQVAVNGKHTLLYGHRIGPEKIDTLGIYGKVNIHSIGFSFSSDLQSTQASSLELTEISRENVPKSGTPQLADCLSPPGIYRVMALKHSVVFFGHEFSLEIAFCRPLGPDCGFFSEPAIRCKVEHPHGPWTNCRR

SEQ ID NO: 848785 - protein, 316 aa, Homo sapiens; identical to SEQ ID NO: 848773

SEQ ID NO: 848786 - protein, 316 aa, Homo sapiens; identical to SEQ ID NO: 848773

SEQ ID NO: 848787 - protein, 316 aa, Homo sapiens; identical to SEQ ID NO: 848773

SEQ ID NO: 848788 - protein, 316 aa, Homo sapiens; identical to SEQ ID NO: 848773

SEQ ID NO: 848789 - protein, 212 aa, Homo sapiens
MLSLNNLQNIIYNPVIPYVGTIPDQLDPGTLIVICGHVPSDADRFQVDLQNGSSVKPRADVAFHFNPRFKRAGCIVCNTLINEKWGREEITYDTPFKREKSFEIVIMVLKDKFQVAVNGKHTLLYGHRIGPEKIDTLGIYGKVNIHSIGFSFSSDLQSTQASSLELTEISRENVPKSGTPQLSLPFAARLNTPMGPGRTVVVKGEVNANAKS

SEQ ID NO: 848790 - protein, 316 aa, Homo sapiens; identical to SEQ ID NO: 848773

SEQ ID NO: 848791 - protein, 316 aa, Homo sapiens; identical to SEQ ID NO: 848773

SEQ ID NO: 848792 - protein, 358 aa, Homo sapiens [sequence omitted]

SEQ ID NO: 848793 - protein, 278 aa, Homo sapiens
MLSLNNLQNIIYNPVIPYVGTIPDQLDPGTLIVICGHVPSDADRFQVDLQNGSSVKPRADVAFHFNPRFKRAGCIVCNTLINEKWGREEITYDTPFKREKSFEIVIMVLKDKFQVAVNGKHTLLYGHRIGPEKIDTLGIYGKVNIHSIGFSFSSDLQSTQASSLELTEISRENVPKSGTPQLSLPFAARLNTPMGPGRTVVVKGEVNANAKSFNVDLLAGKSKDIALHLNPRLNIKAFVRNSFLQESWGEEERNITSFPFSPGMYFEVRLQFLKMGQQ

SEQ ID NO: 848794 - protein, 216 aa, Homo sapiens
MLSLNNLQNIIYNPVIPYVGTIPDQLDPGTLIVICGHVPSDADRFQVDLQNGSSVKPRADVAFHFNPRFKRAGCIVCNTLINEKWGREEITYDTPFKREKSFEIVIMVLKDKFQVAVNGKHTLLYGHRIGPEKIDTLGIYGKVNIHSIGFSFSSDLQSTQASSLELTEISRENGHPHWPLTNCLCLREVDSKRKAFKVTFLPGNLRLLVFTWTPPL

SEQ ID NO: 848795 - protein, 138 aa, Homo sapiens
MLSLNNLQNIIYNPVIPYVGTIPDQLDPGTLIVICGHVPSDADRFQVDLQNGSSVKPRADVAFHFNPRFKRAGCIVCNTLINEKWGREEITYDTPFKREKSFEIVIMVLKDKFQVGFGEGQVESSLVSRSAQGGLSHL

SEQ ID NO: 848796 - protein, 176 aa, Homo sapiens
MERKPDCTLNPRTFSTLQNKSSAGAGSGIREASCTAGRPGPRLGSSLSAVFSAVLQVPWCSPRSVINAAEIHRLPRSRGGTCQAGVHAPPRLPADRVLGGGINHAGTQSHEGRISATSSRCASRTLRGGRRQPPGAAADARGSVAWAGGSAALSERHQREGRPENKGGRGAATASA

SEQ ID NO: 848797 - protein, 176 aa, Homo sapiens; identical to SEQ ID NO: 848796

SEQ ID NO: 848798 - protein, 138 aa, Homo sapiens
HRWRVGWWVGVVRSLAGADTQLAGSFLSLASSCPQPFPFLLLADCWSPLLPSFQLFLVTTYPWPWTDQTSIQNKSLFQVDSVVLPAQPLQVEVLPRERSCSACPGAPGDSWEQGSAVRSPAFPVRQAWLPCSGSLTSW

SEQ ID NO: 848799 - protein, 138 aa, Homo sapiens; identical to SEQ ID NO: 848798

SEQ ID NO: 848800 - protein, 138 aa, Homo sapiens; identical to SEQ ID NO: 848798

SEQ ID NO: 848801 - protein, 680 aa, Homo sapiens
MESSSSSNSYFSVGPTSPSAVVLLYSKELKKWDEFEDILEERRHVSDLKFAMKCYTPLVYKGITPCKPIDIKCSVLNSEEIHYVIKQLSKESLQSVDVLREEVSEILDEMSHKLRLGAIRFCAFTLSKVFKQIFSKVCVNEEGIQKLQRAIQEHPVVLLPSHRSYIDFLMLSFLLYNYDLPVPVIAAGMDFLGMKMVGELLRMSGAFFMRRTFGGNKLYWAVFSEYVKTMLRNGYAPVEFFLEGTRSRSAKTLTPKFGLLNIVMEPFFKREVFDTYLVPISISYDKILEETLYVYELLGVPKPKESTTGLLKARKILSENFGSIHVYFGDPVSLRSLAAGRMSRSSYNLVPRYIPQKQSEDMHAFVTEVAYKMELLQIENMVLSPWTLIVAVLLQNRPSMDFDALVEKTLWLKGLTQAFGGFLIWPDNKPAEEVVPASILLHSNIASLVKDQVILKVDSGDSEVVDGLMLQHITLLMCSAYRNQLLNIFVRPSLVAVALQMTPGFRKEDVYSCFRFLRDVFADEFIFLPGNTLKDFEEGCYLLCKSEAIQVTTKDILVTEKGNTVLEFLVGLFKPFVESYQIICKYLLSEEEDHFSEEQYLAAVRKFTSQLLDQGTSQCYDVLSSDVQKNALAACVRLGVVEKKKINNNCIFNVNEPATTKLEEMLGCKTPIGKPATAKL

SEQ ID NO: 848802 - protein, 492 aa, Homo sapiens
MDFLGMKMVGELLRMSGAFFMRRTFGGNKLYWAVFSEYVKTMLRNGYAPVEFFLEGTRSRSAKTLTPKFGLLNIVMEPFFKREVFDTYLVPISISYDKILEETLYVYELLGVPKPKESTTGLLKARKILSENFGSIHVYFGDPVSLRSLAAGRMSRSSYNLVPRYIPQKQSEDMHAFVTEVAYKMELLQIENMVLSPWTLIVAVLLQNRPSMDFDALVEKTLWLKGLTQAFGGFLIWPDNKPAEEVVPASILLHSNIASLVKDQVILKVDSGDSEVVDGLMLQHITLLMCSAYRNQLLNIFVRPSLVAVALQMTPGFRKEDVYSCFRFLRDVFADEFIFLPGNTLKDFEEGCYLLCKSEAIQVTTKDILVTEKGNTVLEFLVGLFKPFVESYQIICKYLLSEEEDHFSEEQYLAAVRKFTSQLLDQGTSQCYDVLSSDVQKNALAACVRLGVVEKKKINNNCIFNVNEPATTKLEEMLGCKTPIGKPATAKL

SEQ ID NO: 848803 - protein, 133 aa, Homo sapiens
MHAFVTEVAYKMELLQIENMVLSPWTLIVAVLLQNRPSMDFDALVEKTLWLKGLTQAFGGFLIWPDNKPAEEVVPASILLHSNIASLVKDQVILKVDSGDSEVVDGLMLQHITLLMCSAYRNQVMLYRDPLGT

SEQ ID NO: 848804 - protein, 494 aa, Homo sapiens
MESSSSSNSYFSVGPTSPSAVVLLYSKELKKWDEFEDILEERRHVSDLKFAMKCYTPLVYKGITPCKPIDIKCSVLNSEEIHYVIKQLSKESLQSVDVLREEVSEILDEMSHKLRLGAIRFCAFTLSKVFKQIFSKVCVNEEGIQKLQRAIQEHPVVLLPSHRSYIDFLMLSFLLYNYDLPVPVIAAGMDFLGMKMVGELLRMSGAFFMRRTFGGNKLYWAVFSEYVKTMLRNGYAPVEFFLEGTRSRSAKTLTPKFGLLNIVMEPFFKREVFDTYLVPISISYDKILEETLYVYELLGVPKPKESTTGLLKARKILSENFGSIHVYFGDPVSLRSLAAGRMSRSSYNLVPRYIPQKQSEDMHAFVTEVAYKMELLQIENMVLSPWTLIVAVLLQNRPSMDFDALVEKTLWLKGLTQAFGGFLIWPDNKPAEEVVPASILLHSNIASLVKDQVILKVDSGDSEVVDGLMLQHITLLMCSAYRNQVMLYRDPLGT

SEQ ID NO: 848805 - protein, 281 aa, Homo sapiens [sequence omitted]

SEQ ID NO: 848806 - protein, 110 aa, Homo sapiens
EVHIPKTTTNTSPCEGDGINYLITESRCDVSVNILDWSSENMTGFNSWPWPCGSGHAVTSWSIYRFPCGGGWRPHGYWPACEALHKSPASPLDSRPRNSCMRKGKISIIS

SEQ ID NO: 848807 - protein, 680 aa, Homo sapiens; identical to SEQ ID NO: 848801

SEQ ID NO: 848808 - protein, 680 aa, Homo sapiens; identical to SEQ ID NO: 848801

SEQ ID NO: 848809 - protein, 622 aa, Homo sapiens
MESSSSSNSYFSVGPTSPSAVVLLYSKELKKWDEFEDILEERRHVSDLKFAMKCYTPLVYKGITPCKPIDIKCSVLNSEEIHYVIKQLSKESLQSVDVLREEVSEILDEMSHKLRLGAIRFCAFTLSKVFKQIFSKVCVNEEGIQKLQRAIQEHPVVLLPSHRSYIDFLMLSFLLYNYDLPVPVIAAGMDFLGMKMVGELLRMSGAFFMRRTFGGNKLYWAVFSEYVKTMLRNGYAPVEFFLEGTRSRSAKTLTPKFGLLNIVMEPFFKREVFDTYLVPISISYDKILEETLYVYELLGVPKPKESTTGLLKARKILSENFGSIHVYFGDPVSLRSLAAGRMSRSSYNLVPRYIPQKQSEDMHAFVTEVAYKMELLQIENMVLSPWTLIVAVLLQNRPSMDFDALVEKTLWLKGLTQAFGGFLIWPDNKPAEEVVPASILLHSNIASLVKDQVILKVDSGDSEVVDGLMLQHITLLMCSAYRNQLLNIFVRPSLVAVALQMTPGFRKEDVYSCFRFLRDVFADEFIFLPGNTLKDFEEGCYLLCKSEAIQVTTKDILVTEKGNTVLEFLVGLFKPFVESYQIICKYLLSEEEDHFSEEQYLAAVRKFTSQLLDQGQSLLCGC

SEQ ID NO: 848810 - protein, 619 aa, Homo sapiens
MESSSSSNSYFSVGPTSPSAVVLLYSLSKESLQSVDVLREEVSEILDEMSHKLRLGAIRFCAFTLSKVFKQIFSKVCVNEEGIQKLQRAIQEHPVVLLPSHRSYIDFLMLSFLLYNYDLPVPVIAAGMDFLGMKMVGELLRMSGAFFMRRTFGGNKLYWAVFSEYVKTMLRNGYAPVEFFLEGTRSRSAKTLTPKFGLLNIVMEPFFKREVFDTYLVPISISYDKILEETLYVYELLGVPKPKESTTGLLKARKILSENFGSIHVYFGDPVSLRSLAAGRMSRSSYNLVPRYIPQKQSEDMHAFVTEVAYKMELLQIENMVLSPWTLIVAVLLQNRPSMDFDALVEKTLWLKGLTQAFGGFLIWPDNKPAEEVVPASILLHSNIASLVKDQVILKVDSGDSEVVDGLMLQHITLLMCSAYRNQLLNIFVRPSLVAVALQMTPGFRKEDVYSCFRFLRDVFADEFIFLPGNTLKDFEEGCYLLCKSEAIQVTTKDILVTEKGNTVLEFLVGLFKPFVESYQIICKYLLSEEEDHFSEEQYLAAVRKFTSQLLDQGTSQCYDVLSSDVQKNALAACVRLGVVEKKKINNNCIFNVNEPATTKLEEMLGCKTPIGKPATAKL

SEQ ID NO: 848811 - protein, 646 aa, Homo sapiens [sequence omitted]

SEQ ID NO: 848812 - protein, 492 aa, Homo sapiens; identical to SEQ ID NO: 848802

SEQ ID NO: 848813 - protein, 622 aa, Homo sapiens; identical to SEQ ID NO: 848809

SEQ ID NO: 848814 - protein, 319 aa, Homo sapiens [sequence omitted]

SEQ ID NO: 848815 - protein, 2871 aa, Homo sapiens
MLEGLVAWVLNTYLGKYVNNLNTDQLSVALLKGAVELENLPLKKDALKELELPFEVKAGFIGKVTLQIPFYRPHVDPWVISISSLHLIGAPEKIQDFNDEKEKLLERERKKALLQALEEKWKNDRQQKGESYWYSVTASVVTRIVENIELKIQDVHLRFEDGVTNPSHPFAFGICIKNVSMQNAVNEPVQKLMRNKQLDVAEFSIYWDVDCTLLGDLPQMELQEAMARSMESRSHHYVLEPVFASALLKRNCSKKPLRSRHSPRIDCDIQLETIPLKLSQLQYRQIMEFLKELERKERQVKFRRWKPKVAISKNCREWWYFALNANLYEIREQRKRCTWDFMLHRARDAVSYTDKYFNKLKGGLLSTDDKEEMCRIEEEQSFEELKILRELVHDRFHKQEELAESLREPQFDSPGACPGAPEPGGGSGMLQYLQSWFPGWGGWYGQQTPEGNVVEGLSAEQQEQWIPEEILGTEEFFDPTADASCMNTYTKRDHVFAKLNLQLQRGTVTLLHKEQGTPQMNESAFMQLEFSDVKLLAESLPRRNSSLLSVRLGGLFLRDLATEGTMFPLLVFPNPQKEVGRVSQSFGLQTTSADRSDHYPAADPDGPVFEMLYERNPAHSHFERRLNVSTRPLNIIYNPQAIKKVADFFYKGKVHTSGFGYQSELELRVAEAARRQYNKLKMQTKAEIRQTLDRLLVGDFIEESKRWTVRLDISAPQVIFPDDFKFKNPVLVVVDLGRMLLTNTQDNSRRKSRDGSASEETQFSDDEYKTPLATPPNTPPPESSSSNGEKTPPFSGVEFSEEQLQAHLMSTKMYERYSLSFMDLQIMVGRVKDNWKHVQDIDVGPTHVVEKFNVHLQLERRLIYTSDPKYPGAVLSGNLPDLKIHINEDKISALKNCFALLTTPEMKTSDTQIKEKIFPQEEQRGSLQDSVMNLTQSIVLLEQHTREVLVESQLLLAEFKVNCMQLGVESNGRYISVLKVFGTNAHFVKRPYDAEVSLTVHGLLLVDTMQTYGADFDLLMASHKNLSFDIPTGSLRDSRAQSPVSGPNVAHLTDGATLNDRSATSVSLDKILTKEQESLIKLEYQFVSSECPSMNLDSTLQVISLQVNNLDIILNPETIVELIGFLQKSFPKEKDDLSPQPLMTDFERSFREQGTYQSTYEQNTEVAVEIHRLNLLLLRTVGMANREKYGRKIATASIGGTKVNVSMGSTFDMNGSLGCLQLMDLTQDNVKNQYVVSIGNSVGYENIISDIGYFESVFVRMEDAALTEALSFTFVERSKQECFLNLKMASLHYNHSAKFLKELTLSMDELEENFRGMLKSAATKVTTVLATKTAEYSEMVSLFETPRKTREPFILEENEIYGFDLASSHLDTVKLILNINIESPVVSIPRKPGSPELLVGHLGQIFIQNFVAGDDESRSDRLQVEIKDIKLYSLNCTQLAGREAVGSEGSRMFCPPSGSGSANSQEEAHFTRHDFFESLHRGQAFHILNNTTIQFKLEKIPIERESELTFSLSPDDLGTSSIMKIEGKFVNPVQVVLAKHVYEQVLQTLDNLVYSEDLNKYPASATSSPCPDSPLPPLSTCGESSVERKENGLFSHSSLSNTSQKSLSVKEVKSFTQIQATFCISELQVQLSGDLTLGAQGLVSLKFQDFEVEFSKDHPQTLSIQIALHSLLMEDLLEKNPDSKYKNLMVSRGAPKPSSLAQKEYLSQSCPSVSNVEYPDMPRSLPSHMEEAPNVFQLYQRPTSASRKKQKEVQDKDYPLTPPPSPTVDEPKILVGKSKFDDSLVHINIFLVDKKHPEFSSSYNRVNRSIDVDFNCLDVLITLQTWVVILDFFGIGSTADNHAMRLPPEGILHNVKLEPHASMESGLQDPVNTKLDLKVHSLSLVLNKTTSELAKANVSKLVAHLEMIEGDLALQGSIGSLSLSDLTCHGEFYRERFTTSGEEALIFQTFKYGRPDPLLRREHDIRVSLRMASVQYVHTQRFQAEVVAFIQHFTQLQDVLGRQRAAIEGQTVRDQAQRCSRVLLDIEAGAPVLLIPESSRSNNLIVANLGKLKVKNKFLFAGFPGTFSLQDKESVPSASPTGIPKHSLRKTTSTEEPRGTHSQGQFTMPLAGMSLGSLKSEFVPSTSTKQQGPQPTLSVGQESSSPEDHVCLLDCVVVDLQDMDIFAAERHPREYSKAPEDSSGDLIFPSYFVRQTGGSLLTEPCRLKLQVERNLDKEISHTVPDISIHGNLSSVHCSLDLYKYKLIRGLLENNLGEPIEEFMRPYDLQDPRIHTVLSGEVYTCMCFLIDMVNVSLELKDPKRKEGAGSLARFDFKKCKLLYESFSNQTKSINLVSHSMMAFDTRYAGQKTSPGMTNVFSCIFQPAKNSSTTQGSIQIELHFRSTKDSSCFTVVLNNLRVFLIFDWLLLVHDFLHTPSDIKKQNHVTPSRHRNSSSESAIVPKTVKSGVVTKRSSLPVSNERHLEVKVNVTGTEFVVIEDVSCFDTNAIILKGTTVLTYKPRFVDRPFSGSLFGIEVFSCRLGNEHDTALSIVDPVQIQMELVGNSSYQNSSGLMDAFNSEDFPPVLEIQLQALDIRLSYNDVQLFLAIAKSIPEQANAAVPDSVALESDSVGTYLPGASRVGEEIREGTRHTLDPVLELQLARLQELGFSMDDCRKALLACQGQLKKAASWLFKNAEPLKSLSLASTSRDSPGAVAAPLISGVEIKAESVCICFIDDCMDCDVPLAELTFSRLNFLQRVRTSPEGYAHFTLSGDYYNRALSGWEPFIEPWPCSVSWQQQAAGRLHPPRLKLEAKAKPRLDINITSVLIDQYVSTKESWMADYCKDDKDIESAKSEDWMGSSVDPPCFGQSKSFHYMCLTKSLLTYKAMLH

SEQ ID NO: 848816 - protein, 2664 aa, Homo sapiens
QKESHSEQSRCSCDTQEAMARSMESRSHHYVLEPVFASALLKRNCSKKPLRSRHSPRIDCDIQLETIPLKLSQLQYRQIMEFLKELERKERQVKFRRWKPKVAISKNCREWWYFALNANLYEIREQRKRCTWDFMLHRARDAVSYTDKYFNKLKGGLLSTDDKEEMCRIEEEQSFEELKILRELVHDRFHKQEELAESLREPQFDSPGACPGAPEPGGGSGMLQYLQSWFPGWGGWYGQQTPEGNVVEGLSAEQQEQWIPEEILGTEEFFDPTADASCMNTYTKRDHVFAKLNLQLQRGTVTLLHKEQGTPQMNESAFMQLEFSDVKLLAESLPRRNSSLLSVRLGGLFLRDLATEGTMFPLLVFPNPQKEVGRVSQSFGLQTTSADRSDHYPAADPDGPVFEMLYERNPAHSHFERRLNVSTRPLNIIYNPQAIKKVADFFYKGKVHTSGFGYQSELELRVAEAARRQYNKLKMQTKAEIRQTLDRLLVGDFIEESKRWTVRLDISAPQVIFPDDFKFKNPVLVVVDLGRMLLTNTQDNSRRKSRDGSASEETQFSDDEYKTPLATPPNTPPPESSSSNGEKTPPFSGVEFSEEQLQAHLMSTKMYERYSLSFMDLQIMVGRVKDNWKHVQDIDVGPTHVVEKFNVHLQLERRLIYTSDPKYPGAVLSGNLPDLKIHINEDKISALKNCFALLTTPEMKTSDTQIKEKIFPQEEQRGSLQDSVMNLTQSIVLLEQHTREVLVESQLLLAEFKVNCMQLGVESNGRYISVLKVFGTNAHFVKRPYDAEVSLTVHGLLLVDTMQTYGADFDLLMASHKNLSFDIPTGSLRDSRAQSPVSGPNVAHLTDGATLNDRSATSVSLDKILTKEQESLIKLEYQFVSSECPSMNLDSTLQVISLQVNNLDIILNPETIVELIGFLQKSFPKEKDDLSPQPLMTDFERSFREQGTYQSTYEQNTEVAVEIHRLNLLLLRTVGMANREKYGRKIATASIGGTKVNVSMGSTFDMNGSLGCLQLMDLTQDNVKNQYVVSIGNSVGYENIISDIGYFESVFVRMEDAALTEALSFTFVERSKQECFLNLKMASLHYNHSAKFLKELTLSMDELEENFRGMLKSAATKVTTVLATKTAEYSEMVSLFETPRKTREPFILEENEIYGFDLASSHLDTVKLILNINIESPVVSIPRKPGSPELLVGHLGQIFIQNFVAGDDESRSDRLQVEIKDIKLYSLNCTQLAGREAVGSEGSRMFCPPSGSGSANSQEEAHFTRHDFFESLHRGQAFHILNNTTIQFKLEKIPIERESELTFSLSPDDLGTSSIMKIEGKFVNPVQVVLAKHVYEQVLQTLDNLVYSEDLNKYPASATSSPCPDSPLPPLSTCGESSVERKENGLFSHSSLSNTSQKSLSVKEVKSFTQIQATFCISELQVQLSGDLTLGAQGLVSLKFQDFEVEFSKDHPQTLSIQIALHSLLMEDLLEKNPDSKYKNLMVSRGAPKPSSLAQKEYLSQSCPSVSNVEYPDMPRSLPSHMEEAPNVFQLYQRPTSASRKKQKEVQDKDYPLTPPPSPTVDEPKILVGKSKFDDSLVHINIFLVDKKHPEFSSSYNRVNRSIDVDFNCLDVLITLQTWVVILDFFGIGSTADNHAMRLPPEGILHNVKLEPHASMESGLQDPVNTKLDLKVHSLSLVLNKTTSELAKANVSKLVAHLEMIEGDLALQGSIGSLSLSDLTCHGEFYRERFTTSGEEALIFQTFKYGRPDPLLRREHDIRVSLRMASVQYVHTQRFQAEVVAFIQHFTQLQDVLGRQRAAIEGQTVRDQAQRCSRVLLDIEAGAPVLLIPESSRSNNLIVANLGKLKVKNKFLFAGFPGTFSLQDKESVPSASPTGIPKHSLRKTTSTEEPRGTHSQGQFTMPLAGMSLGSLKSEFVPSTSTKQQGPQPTLSVGQESSSPEDHVCLLDCVVVDLQDMDIFAAERHPREYSKAPEDSSGDLIFPSYFVRQTGGSLLTEPCRLKLQVERNLDKEISHTVPDISIHGNLSSVHCSLDLYKYKLIRGLLENNLGEPIEEFMRPYDLQDPRIHTVLSGEVYTCMCFLIDMVNVSLELKDPKRKEGAGSLARFDFKKCKLLYESFSNQTKSINLVSHSMMAFDTRYAGQKTSPGMTNVFSCIFQPAKNSSTTQGSIQIELHFRSTKDSSCFTVVLNNLRVFLIFDWLLLVHDFLHTPSDIKKQNHVTPSRHRNSSSESAIVPKTVKSGVVTKRSSLPVSNERHLEVKVNVTGTEFVVIEDVSCFDTNAIILKGTTVLTYKPRFVDRPFSGSLFGIEVFSCRLGNEHDTALSIVDPVQIQMELVGNSSYQNSSGLMDAFNSEDFPPVLEIQLQALDIRLSYNDVQLFLAIAKSIPEQANAAVPDSVALESDSVGTYLPGASRVGEEIREGTRHTLDPVLELQLARLQELGFSMDDCRKALLACQGQLKKAASWLFKNAEPLKSLSLASTSRDSPGAVAAPLISGVEIKAESVCICFIDDCMDCDVPLAELTFSRLNFLQRVRTSPEGYAHFTLSGDYYNRALSGWEPFIEPWPCSVSWQQQAAGRLHPPRLKLEAKAKPRLDINITSVLIDQYVSTKESWMADYCKDDKDIESAKSEDWMGSSVDPPCFGQSKSFHYMCLTKSLLTYKAMLH

SEQ ID NO: 848817 - protein, 364 aa, Homo sapiens
MLEGLVAWVLNTYLGKYVNNLNTDQLSVALLKGAVELENLPLKKDALKELELPFEVKAGFIGKVTLQIPFYRPHVDPWVISISSLHLIGAPEKIQDFNDEKEKLLERERKKALLQALEEKWKARQSLLGHKSSCGDTCKMSKNTEIELMLTLVFENDRQQKGESYWYSVTASVVTRIVENIELKIQDVHLRFEDGVTNPSHPFAFGICIKNVSMQNAVNEPVQKLMRNKQLDVAEFSIYWDVDCTLLGDLPQMELQEAMARSMESRSHHYVLEPVFASALLKRNCSKKPLRSRHSPRIDCDIQLETIPLKLSQLQYRQIMEFLKELERKERQVKFRRWKPKVAISKNAENGAYFAVPLGTEARS

SEQ ID NO: 848818 - protein, 432 aa, Homo sapiens
PEQIQLNTFVMQGCSSAQHNGCQKPSWNWETKLMDLVSHSMVASINTNAIILKGTTVLTYKPRFVDRPFSGSLFGIEVFSCRLGNEHDTALSIVDPVQIQMELVGNSSYQNSSGLMDAFNSEDFPPVLEIQLQALDIRLSYNDVQLFLAIAKSIPEQANAAVPDSVALESDSVGTYLPGASRVGEEIREGTRHTLDPVLELQLARLQELGFSMDDCRKALLACQGQLKKAASWLFKNAEPLKSLSLASTSRDSPGAVAAPLISGVEIKAESVCICFIDDCMDCDVPLAELTFSRLNFLQRVRTSPEGYAHFTLSGDYYNRALSGWEPFIEPWPCSVSWQQQAAGRLHPPRLKLEAKAKPRLDINITSVLIDQYVSTKESWMADYCKDDKDIESAKSEDWMGSSVDPPCFGQSKSFHYMCLTKSLLTYKAMLH

SEQ ID NO: 848819 - protein, 83 aa, Homo sapiens
AALDITDNLSPKQVNSPLRSGTIEVENKTGMVAHAHYPSTLGGHGQEHGESQPSLRPGACVCICSFEEKLLQEAPAVSAQSPY

SEQ ID NO: 848820 - protein, 2646 aa, Homo sapiens
MARSMESRSHHYVLEPVFASALLKRNCSKKPLRSRHSPRIDCDIQLETIPLKLSQLQYRQIMEFLKELERKERQVKFRRWKPKVAISKNCREWWYFALNANLYEIREQRKRCTWDFMLHRARDAVSYTDKYFNKLKGGLLSTDDKEEMCRIEEEQSFEELKILRELVHDRFHKQEELAESLREPQFDSPGACPGAPEPGGGSGMLQYLQSWFPGWGGWYGQQTPEGNVVEGLSAEQQEQWIPEEILGTEEFFDPTADASCMNTYTKRDHVFAKLNLQLQRGTVTLLHKEQGTPQMNESAFMQLEFSDVKLLAESLPRRNSSLLSVRLGGLFLRDLATEGTMFPLLVFPNPQKEVGRVSQSFGLQTTSADRSDHYPAADPDGPVFEMLYERNPAHSHFERRLNVSTRPLNIIYNPQAIKKVADFFYKGKVHTSGFGYQSELELRVAEAARRQYNKLKMQTKAEIRQTLDRLLVGDFIEESKRWTVRLDISAPQVIFPDDFKFKNPVLVVVDLGRMLLTNTQDNSRRKSRDGSASEETQFSDDEYKTPLATPPNTPPPESSSSNGEKTPPFSGVEFSEEQLQAHLMSTKMYERYSLSFMDLQIMVGRVKDNWKHVQDIDVGPTHVVEKFNVHLQLERRLIYTSDPKYPGAVLSGNLPDLKIHINEDKISALKNCFALLTTPEMKTSDTQIKEKIFPQEEQRGSLQDSVMNLTQSIVLLEQHTREVLVESQLLLAEFKVNCMQLGVESNGRYISVLKVFGTNAHFVKRPYDAEVSLTVHGLLLVDTMQTYGADFDLLMASHKNLSFDIPTGSLRDSRAQSPVSGPNVAHLTDGATLNDRSATSVSLDKILTKEQESLIKLEYQFVSSECPSMNLDSTLQVISLQVNNLDIILNPETIVELIGFLQKSFPKEKDDLSPQPLMTDFERSFREQGTYQSTYEQNTEVAVEIHRLNLLLLRTVGMANREKYGRKIATASIGGTKVNVSMGSTFDMNGSLGCLQLMDLTQDNVKNQYVVSIGNSVGYENIISDIGYFESVFVRMEDAALTEALSFTFVERSKQECFLNLKMASLHYNHSAKFLKELTLSMDELEENFRGMLKSAATKVTTVLATKTAEYSEMVSLFETPRKTREPFILEENEIYGFDLASSHLDTVKLILNINIESPVVSIPRKPGSPELLVGHLGQIFIQNFVAGDDESRSDRLQVEIKDIKLYSLNCTQLAGREAVGSEGSRMFCPPSGSGSANSQEEAHFTRHDFFESLHRGQAFHILNNTTIQFKLEKIPIERESELTFSLSPDDLGTSSIMKIEGKFVNPVQVVLAKHVYEQVLQTLDNLVYSEDLNKYPASATSSPCPDSPLPPLSTCGESSVERKENGLFSHSSLSNTSQKSLSVKEVKSFTQIQATFCISELQVQLSGDLTLGAQGLVSLKFQDFEVEFSKDHPQTLSIQIALHSLLMEDLLEKNPDSKYKNLMVSRGAPKPSSLAQKEYLSQSCPSVSNVEYPDMPRSLPSHMEEAPNVFQLYQRPTSASRKKQKEVQDKDYPLTPPPSPTVDEPKILVGKSKFDDSLVHINIFLVDKKHPEFSSSYNRVNRSIDVDFNCLDVLITLQTWVVILDFFGIGSTADNHAMRLPPEGILHNVKLEPHASMESGLQDPVNTKLDLKVHSLSLVLNKTTSELAKANVSKLVAHLEMIEGDLALQGSIGSLSLSDLTCHGEFYRERFTTSGEEALIFQTFKYGRPDPLLRREHDIRVSLRMASVQYVHTQRFQAEVVAFIQHFTQLQDVLGRQRAAIEGQTVRDQAQRCSRVLLDIEAGAPVLLIPESSRSNNLIVANLGKLKVKNKFLFAGFPGTFSLQDKESVPSASPTGIPKHSLRKTTSTEEPRGTHSQGQFTMPLAGMSLGSLKSEFVPSTSTKQQGPQPTLSVGQESSSPEDHVCLLDCVVVDLQDMDIFAAERHPREYSKAPEDSSGDLIFPSYFVRQTGGSLLTEPCRLKLQVERNLDKEISHTVPDISIHGNLSSVHCSLDLYKYKLIRGLLENNLGEPIEEFMRPYDLQDPRIHTVLSGEVYTCMCFLIDMVNVSLELKDPKRKEGAGSLARFDFKKCKLLYESFSNQTKSINLVSHSMMAFDTRYAGQKTSPGMTNVFSCIFQPAKNSSTTQGSIQIELHFRSTKDSSCFTVVLNNLRVFLIFDWLLLVHDFLHTPSDIKKQNHVTPSRHRNSSSESAIVPKTVKSGVVTKRSSLPVSNERHLEVKVNVTGTEFVVIEDVSCFDTNAIILKGTTVLTYKPRFVDRPFSGSLFGIEVFSCRLGNEHDTALSIVDPVQIQMELVGNSSYQNSSGLMDAFNSEDFPPVLEIQLQALDIRLSYNDVQLFLAIAKSIPEQANAAVPDSVALESDSVGTYLPGASRVGEEIREGTRHTLDPVLELQLARLQELGFSMDDCRKALLACQGQLKKAASWLFKNAEPLKSLSLASTSRDSPGAVAAPLISGVEIKAESVCICFIDDCMDCDVPLAELTFSRLNFLQRVRTSPEGYAHFTLSGDYYNRALSGWEPFIEPWPCSVSWQQQAAGRLHPPRLKLEAKAKPRLDINITSVLIDQYVSTKESWMADYCKDDKDIESAKSEDWMGSSVDPPCFGQSKSFHYMCLTKSLLTYKAMLH

SEQ ID NO: 848821 - protein, 130 aa, Homo sapiens [sequence omitted]

SEQ ID NO: 848822 - protein, 71 aa, Homo sapiens
FDFKKCKLLYESFSNQTKSINLVSHSMMAFDTRYAGQKTSPGMTNVFSCIFQPAKNSSTTQGSIQIELHFR

SEQ ID NO: 848823 - protein, 101 aa, Homo sapiens
PCCGPGRAGCWAGSVPWHRLGGAGAGQGGHPPVGWEGQVLGRESRVLGREGTLAQAQPQVLGDPAAFFLEARTPLPRGTGAFFLLRLVGGQDMRGYVLSPV

SEQ ID NO: 848824 - protein, 1530 aa, Homo sapiens
RGPPAARSSSRTAPMAPYPCGCHILLLLFCCLAAARANLLNLNWLWFNNEDTSHAATTIPEPQGPLPVQPTADTTTHVTPRNGSTEPATAPGSPEPPSELLEDGQDTPTSAESPDAPEENIAGVGAEILNVAKGIRSFVQLWNDTVPTESLARAETLVLETPVGPLALAGPSSTPQENGTTLWPSRGIPSSPGAHTTEAGTLPAPTPSPPSLGRPWAPLTGPSVPPPSSERISEEVGLLQLLGDPPPQQVTQTDDPDVGLAYVFGPDANSGQVARYHFPSLFFRDFSLLFHIRPATEGPGVLFAITDSAQAMVLLGVKLSGVQDGHQDISLLYTEPGAGQTHTAASFRLPAFVGQWTHLALSVAGGFVALYVDCEEFQRMPLARSSRGLELEPGAGLFVAQAGGADPDKFQGVIAELKVRRDPQVSPMHCLDEEGDDSDGAFGDSGSGLGDARELLREETGAALKPRLPAPPPVTTPPLAGGSSTEDSRSEEVEEQTTVASLGAQTLPGSDSVSTWDGSVRTPGGRVKEGGLKGQKGEPGVPGPPGRAGPPGSPCLPGPPGLPCPVSPLGPAGPALQTVPGPQGPPGPPGRDGTPGRDGEPGDPGEDGKPGDTGPQGFPGTPGDVGPKGDKGDPGVGERGPPGPQGPPGPPGPSFRHDKLTFIDMEGSGFGGDLEALRGPRGFPGPPGPPGVPGLPGEPGRFGVNSSDVPGPAGLPGVPGREGPPGFPGLPGPPGPPGREGPPGRTGQKGSLGEAGAPGHKGSKGAPGPAGARGESGLAGAPGPAGPPGPPGPPGPPGPGLPAGFDDMEGSGGPFWSTARSADGPQGPPGLPGLKGDPGVPGLPGAKGEVGADGVPGFPGLPGREGIAGPQGPKGDRGSRGEKGDPGKDGVGQPGLPGPPGPPGPVVYVSEQDGSVLSVPGPEGRPGFAGFPGPAGPKGNLGSKGERGSPGPKGEKGEPGSIFSPDGGALGPAQKGAKGEPGFRGPPGPYGRPGYKGEIGFPGRPGRPGMNGLKGEKGEPGDASLGFGMRGMPGPPGPPGPPGPPGTPVYDSNVFAESSRPGPPGLPGNQGPPGPKGAKGEVGPPGPPGQFPFDFLQLEAEMKGEKGDRGDAGQKGERGEPGGGGFFGSSLPGPPGPPGPRGYPGIPGPKGESIRGQPGPPGPQGPPGIGYEGRQGPPGPPGPPGPPSFPGPHRQTISVPGPPGPPGPPGPPGTMGASSGVRLWATRQAMLGQVHEVPEGWLIFVAEQEELYVRVQNGFRKVQLEARTPLPRGTDNEVAALQPPVVQLHDSNPYPRREHPHPTARPWRADDILASPPRLPEPQPYPGAPHHSSYVHLRPARPTSPPAHSHRDFQPVLHLVALNSPLSGGMRGIRGADFQCFQQARAVGLAGTFRAFLSSRLQDLYSIVRRADRAAVPIVNLKDELLFPSWEALFSGSEGPLKPGARIFSFDGKDVLRHPTWPQKSVWHGSDPNGRRLTESYCETWRTEAPSATGQASSLLGGRLLGQSAASCHHAYIVLCIENSFMTASK

SEQ ID NO: 848825 - protein, 1530 aa, Homo sapiens; identical to SEQ ID NO: 848824

SEQ ID NO: 848826 - protein, 1530 aa, Homo sapiens; identical to SEQ ID NO: 848824

SEQ ID NO: 848827 - protein, 1530 aa, Homo sapiens; identical to SEQ ID NO: 848824

SEQ ID NO: 848828 - protein, 429 aa, Homo sapiens [sequence omitted]

SEQ ID NO: 848829 - protein, 319 aa, Homo sapiens
MKLCIWSQQVRLWATRQAMLGQVHEVPEGWLIFVAEQEELYVRVQNGFRKVQLEARTPLPRGTDNEVAALQPPVVQLHDSNPYPRREHPHPTARPWRADDILASPPRLPEPQPYPGAPHHSSYVHLRPARPTSPPAHSHRDFQPVLHLVALNSPLSGGMRGIRGADFQCFQQARAVGLAGTFRAFLSSRLQDLYSIVRRADRAAVPIVNLKDELLFPSWEALFSGSEGPLKPGARIFSFDGKDVLRHPTWPQKSVWHGSDPNGRRLTESYCETWRTEAPSATGQASSLLGGRLLGQSAASCHHAYIVLCIENSFMTASK

SEQ ID NO: 848830 - protein, 276 aa, Homo sapiens [sequence omitted]

SEQ ID NO: 848831 - protein, 1530 aa, Homo sapiens; identical to SEQ ID NO: 848824

SEQ ID NO: 848832 - protein, 1535 aa, Homo sapiens
RGPPAARSSSRTAPMAPYPCGCHILLLLFCCLAAARANLLNLNWLWFNNEDTSHAATTIPEPQGPLPVQPTADTTTHVTPRNGSTEPATAPGSPEPPSELLEDGQDTPTSAESPDAPEENIAGVGAEILNVAKGIRSFVQLWNDTVPTESLARAETLVLETPVGPLALAGPSSTPQENGTTLWPSRGIPSSPGAHTTEAGTLPAPTPSPPSLGRPWAPLTGPSVPPPSSERISEEVGLLQLLGDPPPQQVTQTDDPDVGLAYVFGPDANSGQVARYHFPSLFFRDFSLLFHIRPATEGPGVLFAITDSAQAMVLLGVKLSGVQDGHQDISLLYTEPGAGQTHTAASFRLPAFVGQWTHLALSVAGGFVALYVDCEEFQRMPLARSSRGLELEPGAGLFVAQAGGADPDKFQGVIAELKVRRDPQVSPMHCLDEEGDDSDGAFGDSGSGLGDARELLREETGAALKPRLPAPPPVTTPPLAGGSSTEDSRSEEVEEQTTVASLGAQTLPGSDSVSTWDGSVRTPGGRVKEGGLKGQKGEPGVPGPPGRAGPPGSPCLPGPPGLPCPVSPLGPAGPALQTVPGPQGPPGPPGRDGTPGRDGEPGDPGEDGKPGDTGPQGFPGTPGDVGPKGDKGDPGVGERGPPGPQGPPGPPGPSFRHDKLTFIDMEGSGFGGDLEALRGPRGFPGPPGPPGVPGLPGEPGRFGVNSSDVPGPAGLPGVPGREGPPGFPGLPGPPGPPGREGPPGRTGQKGSLGEAGAPGHKGSKGAPGPAGARGESGLAGAPGPAGPPGPPGPPGPPGPGLPAGFDDMEGSGGPFWSTARSADGPQGPPGLPGLKGDPGVPGLPGAKGEVGADGVPGFPGLPGREGIAGPQGPKGDRGSRGEKGDPGKDGVGQPGLPGPPGPPGPVVYVSEQDGSVLSVPGPEGRPGFAGFPGPAGPKGNLGSKGERGSPGPKGEKGEPGSIFSPDGGALGPAQKGAKGEPGFRGPPGPYGRPGYKGEIGFPGRPGRPGMNGLKGEKGEPGDASLGFGMRGMPGPPGPPGPPGPPGTPVYDSNVFAESSRPGPPGLPGNQGPPGPKGAKGEVGPPGPPGQFPFDFLQLEAEMKGEKGDRGDAGQKGERGEPGGGGFFGSSLPGPPGPPGPRGYPGIPGPKGESIRGQPGPPGPQGPPGIGYEGRQGPPGPPGPPGPPSFPGPHRQTISVPGPPGPPGPPGPPGTMGASSGVRLWATRQAMLGQVHEVPEGWLIFVAEQEELYVRVQNGFRKVQLEARTPLPRGTDNEVAALQPPVVQLHDSNPYPRREHPHPTARPWRADDILASPPRLPEPQPYPGAPHHSSYVHLRPARPTSPPAHSHRDFQPVLHLVALNSPLSGGMRGIRGADFQCFQQARAVGLAGTFRAFLSSRLQDLYSIVRRADRAAVPIVNLKDELLFPSWEALFSGSEGPLKPGARIFSFDGKDVLRHPTWPQKSVWHGSDPNGRRLTESYCETWRTEAPSATGQASSLLGGRLLGQSAASCHHAYIVLFIGCLLGNPYPYPPWD

SEQ ID NO: 848833 - protein, 1535 aa, Homo sapiens; identical to SEQ ID NO: 848832

SEQ ID NO: 848834 - protein, 540 aa, Homo sapiens
RGPPAARSSSRTAPMAPYPCGCHILLLLFCCLAAARANLLNLNWLWFNNEDTSHAATTIPEPQGPLPVQPTADTTTHVTPRNGSTEPATAPGSPEPPSELLEDGQDTPTSAESPDAPEENIAGVGAEILNVAKGIRSFVQLWNDTVPTESLARAETLVLETPVGPLALAGPSSTPQENGTTLWPSRGIPSSPGAHTTEAGTLPAPTPSPPSLGRPWAPLTGPSVPPPSSERISEEVGLLQLLGDPPPQQVTQTDDPDVGLAYVFGPDANSGQVARYHFPSLFFRDFSLLFHIRPATEGPGVLFAITDSAQAMVLLGVKLSGVQDGHQDISLLYTEPGAGQTHTAASFRLPAFVGQWTHLALSVAGGFVALYVDCEEFQRMPLARSSRGLELEPGAGLFVAQAGGADPDKFQGVIAELKVRRDPQVSPMHCLDEEGDDSDGAFGDSGSGLGDARELLREETGAALKPRLPAPPPVTTPPLAGGSSTEDSRSEEVEEQTTVASLGAQTLPGSDSVSTWDGSVRTPGGRVKEVRPPPCAPEPF

SEQ ID NO: 848835 - protein, 1530 aa, Homo sapiens; identical to SEQ ID NO: 848824

SEQ ID NO: 848836 - protein, 1355 aa, Homo sapiens
GCTAAEEAASRGADGPGESMAPRCPWPWPRRRRLLDVLAPLVLLLGVRAASAEPERISEEVGLLQLLGDPPPQQVTQTDDPDVGLAYVFGPDANSGQVARYHFPSLFFRDFSLLFHIRPATEGPGVLFAITDSAQAMVLLGVKLSGVQDGHQDISLLYTEPGAGQTHTAASFRLPAFVGQWTHLALSVAGGFVALYVDCEEFQRMPLARSSRGLELEPGAGLFVAQAGGADPDKFQGVIAELKVRRDPQVSPMHCLDEEGDDSDGAFGDSGSGLGDARELLREETGAALKPRLPAPPPVTTPPLAGGSSTEDSRSEEVEEQTTVASLGAQTLPGSDSVSTWDGSVRTPGGRVKEGGLKGQKGEPGVPGPPGRAGPPGSPCLPGPPGLPCPVSPLGPAGPALQTVPGPQGPPGPPGRDGTPGRDGEPGDPGEDGKPGDTGPQGFPGTPGDVGPKGDKGDPGVGERGPPGPQGPPGPPGPSFRHDKLTFIDMEGSGFGGDLEALRGPRGFPGPPGPPGVPGLPGEPGRFGVNSSDVPGPAGLPGVPGREGPPGFPGLPGPPGPPGREGPPGRTGQKGSLGEAGAPGHKGSKGAPGPAGARGESGLAGAPGPAGPPGPPGPPGPPGPGLPAGFDDMEGSGGPFWSTARSADGPQGPPGLPGLKGDPGVPGLPGAKGEVGADGVPGFPGLPGREGIAGPQGPKGDRGSRGEKGDPGKDGVGQPGLPGPPGPPGPVVYVSEQDGSVLSVPGPEGRPGFAGFPGPAGPKGNLGSKGERGSPGPKGEKGEPGSIFSPDGGALGPAQKGAKGEPGFRGPPGPYGRPGYKGEIGFPGRPGRPGMNGLKGEKGEPGDASLGFGMRGMPGPPGPPGPPGPPGTPVYDSNVFAESSRPGPPGLPGNQGPPGPKGAKGEVGPPGPPGQFPFDFLQLEAEMKGEKGDRGDAGQKGERGEPGGGGFFGSSLPGPPGPPGPRGYPGIPGPKGESIRGQPGPPGPQGPPGIGYEGRQGPPGPPGPPGPPSFPGPHRQTISVPGPPGPPGPPGPPGTMGASSGVRLWATRQAMLGQVHEVPEGWLIFVAEQEELYVRVQNGFRKVQLEARTPLPRGTDNEVAALQPPVVQLHDSNPYPRREHPHPTARPWRADDILASPPRLPEPQPYPGAPHHSSYVHLRPARPTSPPAHSHRDFQPVLHLVALNSPLSGGMRGIRGADFQCFQQARAVGLAGTFRAFLSSRLQDLYSIVRRADRAAVPIVNLKDELLFPSWEALFSGSEGPLKPGARIFSFDGKDVLRHPTWPQKSVWHGSDPNGRRLTESYCETWRTEAPSATGQASSLLGGRLLGQSAASCHHAYIVLCIENSFMTASK

SEQ ID NO: 848837 - protein, 49 aa, Homo sapiens
MCCPLFEEQHVVLWSPGAEHVAHHQPLLQKLVQDTPLPLSQRWPPSTSV

SEQ ID NO: 848838 - protein, 935 aa, Homo sapiens
LLLHTQGDPGEDGKPGDTGPQGFPGTPGDVGPKGDKGDPGVGERGPPGPQGPPGPPGPSFRHDKLTFIDMEGSGFGGDLEALRGPRGFPGPPGPPGVPGLPGEPGRFGVNSSDVPGPAGLPGVPGREGPPGFPGLPGPPGPPGREGPPGRTGQKGSLGEAGAPGHKGSKGAPGPAGARGESGLAGAPGPAGPPGPPGPPGPPGPGLPAGFDDMEGSGGPFWSTARSADGPQGPPGLPGLKGDPGVPGLPGAKGEVGADGVPGFPGLPGREGIAGPQGPKGDRGSRGEKGDPGKDGVGQPGLPGPPGPPGPVVYVSEQDGSVLSVPGPEGRPGFAGFPGPAGPKGNLGSKGERGSPGPKGEKGEPGSIFSPDGGALGPAQKGAKGEPGFRGPPGPYGRPGYKGEIGFPGRPGRPGMNGLKGEKGEPGDASLGFGMRGMPGPPGPPGPPGPPGTPVYDSNVFAESSRPGPPGLPGNQGPPGPKGAKGEVGPPGPPGQFPFDFLQLEAEMKGEKGDRGDAGQKGERGEPGGGGFFGSSLPGPPGPPGPRGYPGIPGPKGESIRGQPGPPGPQGPPGIGYEGRQGPPGPPGPPGPPSFPGPHRQTISVPGPPGPPGPPGPPGTMGASSGVRLWATRQAMLGQVHEVPEGWLIFVAEQEELYVRVQNGFRKVQLEARTPLPRGTDNEVAALQPPVVQLHDSNPYPRREHPHPTARPWRADDILASPPRLPEPQPYPGAPHHSSYVHLRPARPTSPPAHSHRDFQPVLHLVALNSPLSGGMRGIRGADFQCFQQARAVGLAGTFRAFLSSRLQDLYSIVRRADRAAVPIVNLKDELLFPSWEALFSGSEGPLKPGARIFSFDGKDVLRHPTWPQKSVWHGSDPNGRRLTESYCETWRTEAPSATGQASSLLGGRLLGQSAASCHHAYIVLCIENSFMTASK

SEQ ID NO: 848839 - protein, 698 aa, Homo sapiens
ERSWGNRTGDLRAGCGGNEKVEQMSPVSRLPGREGIAGPGPKGDRGSRGEEGDPGKDGVGQPGLPGPPGPPGPVVYVSEQDGSVLSVPGPEGRPGFAGFPGPAGPKGNLGSKGERGSPGPKGEKGEPGSIFSPDGGALGPAQKGAKGEPGFRGPPGPYGRPGYKGEIGFPGRPGRPGMNGLKGEKGEPGDASLGFGMRGMPGPPGPPGPPGPPGTPVYDSNVFAESSRPGPPGLPGNQGPPGPKGAKGEVGPPGPPGQFPFDFLQLEAEMKGEKGDRGDAGQKGERGEPGGGGFFGSSLPGPPGPPGPRGYPGIPGPKGESIRGQPGPPGPQGPPGIGYEGRQGPPGPPGPPGPPSFPGPHRQTISVPGPPGPPGPPGPPGTMGASSGVRLWATRQAMLGQVHEVPEGWLIFVAEQEELYVRVQNGFRKVQLEARTPLPRGTDNEVAALQPPVVQLHDSNPYPRREHPHPTARPWRADDILASPPRLPEPQPYPGAPHHSSYVHLRPARPTSPPAHSHRDFQPVLHLVALNSPLSGGMRGIRGADFQCFQQARAVGLAGTFRAFLSSRLQDLYSIVRRADRAAVPIVNLKDELLFPSWEALFSGSEGPLKPGARIFSFDGKDVLRHPTWPQKSVWHGSDPNGRRLTESYCETWRTEAPSATGQASSLLGGRLLGQSAASCHHAYIVLCIENSFMTASK

SEQ ID NO: 848840 - protein, 1101 aa, Homo sapiens
RGPPAARSSSRTAPMAPYPCGCHILLLLFCCLAAARANLLNLNWLWFNNEDTSHAATTIPEPQGPLPVQPTADTTTHVTPRNGSTEPATAPGSPEPPSELLEDGQDTPTSAESPDAPEENIAGVGAEILNVAKGIRSFVQLWNDTVPTESLARAETLVLETPVGPLALAGPSSTPQENGTTLWPSRGIPSSPGAHTTEAGTLPAPTPSPPSLGRPWAPLTGPSVPPPSSERISEEVGLLQLLGDPPPQQVTQTDDPDVGLAYVFGPDANSGQVARYHFPSLFFRDFSLLFHIRPATEGPGVLFAITDSAQAMVLLGVKLSGVQDGHQDISLLYTEPGAGQTHTAASFRLPAFVGQWTHLALSVAGGFVALYVDCEEFQRMPLARSSRGLELEPGAGLFVAQAGGADPDKFQGVIAELKVRRDPQVSPMHCLDEEGDDSDGAFGDSGSGLGDARELLREETGAALKPRLPAPPPVTTPPLAGGSSTEDSRSEEVEEQTTVASLGAQTLPGSDSVSTWDGSVRTPGGRVKEGGLKGQKGEPGVPGPPGRAGPPGSPCLPGPPGLPCPVSPLGPAGPALQTVPGPQGPPGPPGRDGTPGRDGEPGDPGEDGKPGDTGPQGFPGTPGDVGPKGDKGDPGVGERGPPGPQGPPGPPGPSFRHDKLTFIDMEGSGFGGDLEALRGPRGFPGPPGPPGVPGLPGEPGRFGVNSSDVPGPAGLPGVPGREGPPGFPGLPGPPGPPGREGPPGRTGQKGSLGEAGAPGHKGSKGAPGPAGARGESGLAGAPGPAGPPGPPGPPGPPGPGLPAGFDDMEGSGGPFWSTARSADGPQGPPGLPGLKGDPGVPGLPGAKGEVGADGVPGFPGLPGREGIAGPQGPKGDRGSRGEKGDPGKDGVGQPGLPGPPGPPGPVVYVSEQDGSVLSVPGPEGRPGFAGFPGPAGPKGNLGSKGERGSPGPKGEKGEPGSIFSPDGGALGPAQKGAKGEPGFRGPPGPYGRPGYKGEIGFPGRPGRPGMNGLKGEKGEPGDASLGFGMRGMPGPPGPPGPPGPPGTPVYDSNVFAESSRPGPPGLPGNQGPPGPKGAKGEVGPPGPPVCIILKRNSTKDE

SEQ ID NO: 848841 - protein, 77 aa, Homo sapiens
GCTAAEEAASRGADGPGESMAPRCPWPWPRRRRLLDVLAPLVLLLGVRAASAEPAFRVEVWETRGEAAQSHPPRAEA

SEQ ID NO: 848842 - protein, 580 aa, Homo sapiens
ERAWRLRWTTRPVVEMSGRSKRESRGSTRGKRESESRGSSGRVKRERDREREPEAASSRGSPVRVKREFEPASAREAPASVVPFVRVKREREVDEDSEPEREVRAKNGRVDSEDRRSRHCPYLDTINRSVLDFDFEKLCSISLSHINAYACLVCGKYFQGRGLKSHAYIHSVQFSHHVFLNLHTLKFYCLPDNYEIIDSSLEDITYVLKPTFTKQQIANLDKQAKLSRAYDGTTYLPGIVGLNNIKANDYANAVLQALSNVPPLRNYFLEEDNYKNIKRPPGDIMFLLVQRFGELMRKLWNPRNFKAHVSPHEMLQAVVLCSKKTFQITKQGDGVDFLSWFLNALHSALGGTKKKKKTIVTDVFQGSMRIFTKKLPHPDLPAEEKEQLLHNDEYQETMVESTFMYLTLDLPTAPLYKDEKEQLIIPQVPLFNILAKFNGITEKEYKTYKENFLKRFQLTKLPPYLIFCIKRFTKNNFFVEKNPTIVNFPITNVDLREYLSEEVQAVHKNTTYDLIANIVHDGKPSEGSYRIHVLHHGTGKWYELQDLQVTDILPQMITLSEAYIQIWKRRDNDETNQQGA

SEQ ID NO: 848843 - protein, 503 aa, Homo sapiens
ERAWRLRWTTRPVVEMSGRSKRESRGSTRGKRESESRGSSGRVKRERDREREPEAASSRGSPVRVKREFEPASAREAPASVVPFVRVKREREVDEDSEPEREVRAKNGRVDSEDRRSRHCPYLDTINRSVLDFDFEKLCSISLSHINAYACLVCGKYFQGRGLKSHAYIHSVQFSHHVFLNLHTLKFYCLPDNYEIIDSSLEDITYVLKPTFTKQQIANLDKQAKLSRAYDGTTYLPGIVGLNNIKANDYANAVLQALSNVPPLRNYFLEEDNYKNIKRPPGDIMFLLVQRFGELMRKLWNPRNFKAHVSPHEMLQAVVLCSKKTFQITKQGDGVDFLSWFLNALHSALGGTKKKKKTIVTDVFQGSMRIFTKKLPHPDLPAEEKEQLLHNDEYQETMVESTFMYLTLDLPTAPLYKDEKEQLIIPQVPLFNILAKFNGITEKEYKTYKENFLKRFQLTKLPPYLIFCIKRFTKNNFFVEKNPTIVNFPITGQANGMNYKTSR

SEQ ID NO: 848844 - protein, 580 aa, Homo sapiens; identical to SEQ ID NO: 848842

SEQ ID NO: 848845 - protein, 526 aa, Homo sapiens
GHSSSGTRVRLLSTFKPASAREAPASVVPFVRVKREREVDEDSEPEREVRAKNGRVDSEDRRSRHCPYLDTINRSVLDFDFEKLCSISLSHINAYACLVCGKYFQGRGLKSHAYIHSVQFSHHVFLNLHTLKFYCLPDNYEIIDSSLEDITYVLKPTFTKQQIANLDKQAKLSRAYDGTTYLPGIVGLNNIKANDYANAVLQALSNVPPLRNYFLEEDNYKNIKRPPGDIMFLLVQRFGELMRKLWNPRNFKAHVSPHEMLQAVVLCSKKTFQITKQGDGVDFLSWFLNALHSALGGTKKKKKTIVTDVFQGSMRIFTKKLPHPDLPAEEKEQLLHNDEYQETMVESTFMYLTLDLPTAPLYKDEKEQLIIPQVPLFNILAKFNGITEKEYKTYKENFLKRFQLTKLPPYLIFCIKRFTKNNFFVEKNPTIVNFPITNVDLREYLSEEVQAVHKNTTYDLIANIVHDGKPSEGSYRIHVLHHGTGKWYELQDLQVTDILPQMITLSEAYIQIWKRRDNDETNQQGA

SEQ ID NO: 848846 - protein, 587 aa, Homo sapiens
ERAWRLRWTTRPVVEMSGRSKRESRGSTRGKRESESRGSSGRVKRERDREREPEAASSRGSPVRVKREFEPASAREAPASVVPFVRVKREREVDEDSEPEREVRAKNGRVDSEDRRSRHCPYLDTINRSVLDFDFEKLCSISLSHINAYACLVCGKYFQAFHPSLTGRGLKSHAYIHSVQFSHHVFLNLHTLKFYCLPDNYEIIDSSLEDITYVLKPTFTKQQIANLDKQAKLSRAYDGTTYLPGIVGLNNIKANDYANAVLQALSNVPPLRNYFLEEDNYKNIKRPPGDIMFLLVQRFGELMRKLWNPRNFKAHVSPHEMLQAVVLCSKKTFQITKQGDGVDFLSWFLNALHSALGGTKKKKKTIVTDVFQGSMRIFTKKLPHPDLPAEEKEQLLHNDEYQETMVESTFMYLTLDLPTAPLYKDEKEQLIIPQVPLFNILAKFNGITEKEYKTYKENFLKRFQLTKLPPYLIFCIKRFTKNNFFVEKNPTIVNFPITNVDLREYLSEEVQAVHKNTTYDLIANIVHDGKPSEGSYRIHVLHHGTGKWYELQDLQVTDILPQMITLSEAYIQIWKRRDNDETNQQGA

SEQ ID NO: 848847 - protein, 296 aa, Homo sapiens
MFLLVQRFGELMRKLWNPRNFKAHVSPHEMLQAVVLCSKKTFQITKQGDGVDFLSWFLNALHSALGGTKKKKKTIVTDVFQGSMRIFTKKLPHPDLPAEEKEQLLHNDEYQETMVESTFMYLTLDLPTAPLYKDEKEQLIIPQVPLFNILAKFNGITEKEYKTYKENFLKRFQLTKLPPYLIFCIKRFTKNNFFVEKNPTIVNFPITNVDLREYLSEEVQAVHKNTTYDLIANIVHDGKPSEGSYRIHVLHHGTGKWYELQDLQVTDILPQMITLSEAYIQIWKRRDNDETNQQGA

SEQ ID NO: 848848 - protein, 296 aa, Homo sapiens; identical to SEQ ID NO: 848847

SEQ ID NO: 848849 - protein, 488 aa, Homo sapiens
MESPELVTNTNEKEARGYYVSGGDTINSALEHGGWRSVLDFDFEKLCSISLSHINAYACLVCGKYFQGRGLKSHAYIHSVQFSHHVFLNLHTLKFYCLPDNYEIIDSSLEDITYVLKPTFTKQQIANLDKQAKLSRAYDGTTYLPGIVGLNNIKANDYANAVLQALSNVPPLRNYFLEEDNYKNIKRPPGDIMFLLVQRFGELMRKLWNPRNFKAHVSPHEMLQAVVLCSKKTFQITKQGDGVDFLSWFLNALHSALGGTKKKKKTIVTDVFQGSMRIFTKKLPHPDLPAEEKEQLLHNDEYQETMVESTFMYLTLDLPTAPLYKDEKEQLIIPQVPLFNILAKFNGITEKEYKTYKENFLKRFQLTKLPPYLIFCIKRFTKNNFFVEKNPTIVNFPITNVDLREYLSEEVQAVHKNTTYDLIANIVHDGKPSEGSYRIHVLHHGTGKWYELQDLQVTDILPQMITLSEAYIQIWKRRDNDETNQQGA

SEQ ID NO: 848850 - protein, 580 aa, Homo sapiens; identical to SEQ ID NO: 848842

SEQ ID NO: 848851 - protein, 455 aa, Homo sapiens
MRTRSLSGRCEQRMAEWILRTGGAATARTWTPLTGRGLKSHAYIHSVQFSHHVFLNLHTLKFYCLPDNYEIIDSSLEDITYVLKPTFTKQQIANLDKQAKLSRAYDGTTYLPGIVGLNNIKANDYANAVLQALSNVPPLRNYFLEEDNYKNIKRPPGDIMFLLVQRFGELMRKLWNPRNFKAHVSPHEMLQAVVLCSKKTFQITKQGDGVDFLSWFLNALHSALGGTKKKKKTIVTDVFQGSMRIFTKKLPHPDLPAEEKEQLLHNDEYQETMVESTFMYLTLDLPTAPLYKDEKEQLIIPQVPLFNILAKFNGITEKEYKTYKENFLKRFQLTKLPPYLIFCIKRFTKNNFFVEKNPTIVNFPITNVDLREYLSEEVQAVHKNTTYDLIANIVHDGKPSEGSYRIHVLHHGTGKWYELQDLQVTDILPQMITLSEAYIQIWKRRDNDETNQQGA

SEQ ID NO: 848852 - protein, 551 aa, Homo sapiens
ERAWRLRWTTRPVVEMSGRSKRESRGSTRGKRESESRGSSGRVKRERDREREPEAASSRGSPVRVKREFEPASAREAPASVVPFVRVKREREVDEDSEPEREVRAKNGRVDSEDRRSRHCPYLDTINRSVLDFDFEKLCSISLSHINAYACLVCGKYFQGRGLKSHAYIHSVQFSHHVFLNLHTLKFYCLPDNYEIIDSSLEDITYVLKPTFTKQQIANLDKQAKLSRAYDGTTYLPGIVGLNNIKANDYANAVLQALSNVPPLRNYFLEEDNYKNIKRPPGDIMFLLVQRFGELMRKLWNPRNFKAHVSPHEMLQAVVLCSKKTFQITKQGDGVDFLSWFLNALHSALGGTKKKKKTIVTDVFQGSMRIFTKKLPHPDLPAEEKEQLLHNDEYQETMVESTFMYLTLDLPTAPLYKDEKEQLIIPQVPLFNILAKFNGITEKEYKTYKENFLKRFQLTKLPPYLIFCIKRFTKNNFFVEKNPTIVNFPITNVDLREYLSEEVQAVHKNTTYDLIANIVHDGKPSEGSYRIHVLHHIWKRRDNDETNQQGA

SEQ ID NO: 848853 - protein, 580 aa, Homo sapiens; identical to SEQ ID NO: 848842

SEQ ID NO: 848854 - protein, 571 aa, Homo sapiens
ERAWRLRWTTRPVVEMSGRSKRESRGSTRGKRESESRGSSGRVKRERDREREPEAASSRGSPVRVKREFEPASAREAPASVVPFVRVKREREVDEDSEPEREVRAKNGRVDSEDRRSRHCPYLDTINRSVLDFDFEKLCSISLSHINAYACLVCGKYFQGRGLKSHAYIHSVQFSHHVFLNLHTLKFYCLPDNYEIIDSSLEDITYVLKPTFTKQQIANLDKQAKLSRAYDGTTYLPGIVGLNNIKANDYANAVLQALSNVPPLRNYFLEEDNYKNIKRPPGDIMFLLVQRFGELMRKLWNPRNFKAHVSPHEMLQAVVLCSKKTFQITKQGDGVDFLSWFLNALHSALGGTKKKKKTIVTDVFQGSMRIFTKKLPHPDLPAEEKEQLLHNDEYQETMVESTFMYLTLDLPTAPLYKDEKEQLIIPQVPLFNILAKFNGITEKEYKTYKENFLKRFQLTKLPPYLIFCIKRFTKNNFFVEKNPTIVNFPITNVDLREYLSEEVQAVHKNTTYDLIANIVHDGKPSEGSYRIHVLHHGTGKWYELQDLQVTDILPQMITLSEAYIQNLKHPK

SEQ ID NO: 848855 - protein, 470 aa, Homo sapiens
ERAWRLRWTTRPVVEMSGRSKRESRGSTRGKRESESRGSSGRVKRERDREREPEAASSRGSPVRVKREFEPASAREAPASVVPFVRVKREREVDEDSEPEREVRAKNGRVDSEDRRSRHCPYLDTINRSVLDFDFEKLCSISLSHINAYACLVCGKYFQGRGLKSHAYIHSVQFSHHVFLNLHTLKFYCLPDNYEIIDSSLEDITYVLKPTFTKQQIANLDKQAKLSRAYDGTTYLPGIVGLNNIKANDYANAVLQALSNVPPLRNYFLEEDNYKNIKRPPGDIMFLLVQRFGELMRKLWNPRNFKAHVSPHEMLQAVVLCSKKTFQITKQGDGVDFLSWFLNALHSALGGTKKKKKTIVTDVFQGSMRIFTKKLPHPDLAAEKRASAHNDEYRDMGGSLLCTGSDFYGPEREKRAYSSAFNWEAGPEGKTRGLEGHEQAPNWEGAKTGDPRAKGDRGNPQTPGRPQKAA

SEQ ID NO: 848856 - protein, 580 aa, Homo sapiens; identical to SEQ ID NO: 848842

SEQ ID NO: 848857 - protein, 580 aa, Homo sapiens; identical to SEQ ID NO: 848842

SEQ ID NO: 848858 - protein, 540 aa, Homo sapiens
ERAWRLRWTTRPVVEMSGRSKRESRGSTRGKRESESRGSSGRVKRERDREREPEAASSRGSPVRVKREFEPASAREAPASVVPFVRVKREREVDEDSEPEREVRAKNGRVDSEDRRSRHCPYLDTINRSVLDFDFEKLCSISLSHINAYACLVCGKYFQGRGLKSHAYIHSVQFSHHVFLNLHTLKFYCLPDNYEIIDSSLEDITYVLKPTFTKQQIANLDKQAKLSRAYDGTTYLPGIVGLNNIKANDYANAVLQALSNVPPLRNYFLEEDNYKNIKRPPGDIMFLLVQRFGELMRKLWNPRNFKAHVSPHEMLQAVVLCSKKTFQITKQGDGVDFLSWFLNALHSALGGTKKKKKTIVTDVFQGSMRIFTKKLPHPDLPAEEKEQLLHNDEYQETMVESTFMYLTLDLPTAPLYKDEKEQLIIPQVPLFNILAKFNGITEKEYKTYKENFLKRFQLTKLPPYLIFCIKRFTKNNFFVEKNPTIVNFPITNVDLREYLSEEVQAVHKNTTYDLIANIVHDGKPSEGSYRIHVLHHVSGC

SEQ ID NO: 848859 - protein, 203 aa, Homo sapiens
RLKRHSGSRRDGCWQHDVETMVESTFMYLTLDLPTAPLYKDEKEQLIIPQVPLFNILAKFNGITEKEYKTYKENFLKRFQLTKLPPYLIFCIKRFTKNNFFVEKNPTIVNFPITNVDLREYLSEEVQAVHKNTTYDLIANIVHDGKPSEGSYRIHVLHHGTGKWYELQDLQVTDILPQMITLSEAYIQIWKRRDNDETNQQGA

SEQ ID NO: 848860 - protein, 1191 aa, Homo sapiens
MASHVQVFSPHTLQSSAFCSVKKLKIEPSSNWDMTGYGSHSKVYSQSKNIPLSQPATTTVSTSLPVPNPSLPYEQTIVFPGSTGHIVVTSASSTSVTGQVLGGPHNLMRRSTVSLLDTYQKCGLKRKSEEIENTSSVQIIEEHPPMIQNNASGATVATATTSTATSKNSGSNSEGDYQLVQHEVLCSMTNTYEVLEFLGRGTFGQVVKCWKRGTNEIVAIKILKNRPSYARQGQIEVSILARLSTESADDYNFVRAYECFQHKNHTCLVFEMLEQNLYDFLKQNKFSPLPLKYIRPVLQQVATALMKLKSLGLIHADLKPENIMLVDPSRQPYRVKVIDFGSASHVSKAVCSTYLQSRYYRAPEIILGLPFCEAIDMWSLGCVIAELFLGWPLYPGASEYDQIRYISQTQGLPAEYLLSAGTKTTRFFNRDTDSPYPLWRLKTPDDHEAETGIKSKEARKYIFNCLDDMAQVNMTTDLEGSDMLVEKADRREFIDLLKKMLTIDADKRITPIETLNHPFVTMTHLLDFPHSTHVKSCFQNMEICKRRVNMYDTVNQSKTPFITHVAPSTSTNLTMTFNNQLTTVHNQAPSSTSATISLANPEVSILNYPSTLYQPSAASMAAVAQRSMPLQTGTAQICARPDPFQQALIVCPPGFQGLQASPSKHAGYSVRMENAVPIVTQAPGAQPLQIQPGLLAQQAWPSGTQQILLPPAWQQLTGVATHTSVQHATVIPETMAGTQQLADWRNTHAHGSHYNPIMQQPALLTGHVTLPAAQPLNVGVAHVMRQQPTSTTSSRKSKQHQSSVRNVSTCEVSSSQAISSPQRSKRVKENTPPRCAMVHSSPACSTSVTCGWGDVASSTTRERQRQTIVIPDTPSPTVSVITISSDTDEEEEQKHAPTSTVSKQRKNVISCVTVHDSPYSDSSSNTSPYSVQQRAGHNNANAFDTKGSLENHCTGNPRTIIVPPLKTQASEVLVECDSLVPVNTSHHSSSYKSKSSSNVTSTSGHSSGSSSGAITYRQQRPGPHFQQQQPLNLSQAQQHITTDRTGSHRRQQAYITPTMAQAPYSFPHNSPSHGTVHPHLAAAAAAAHLPTQPHLYTYTAPAALGSTGTVAHLVASQGSARHTVQHTAYPASIVHQVPVSMGPRVLPSPTIHPSQYPAQFAHQTYISASPASTVYTGYPLSPAKVNQYPYI

SEQ ID NO: 848861 - protein, 1164 aa, Homo sapiens
MASHVQVFSPHTLQSSAFCSVKKLKIEPSSNWDMTGYGSHSKVYSQSKNIPLSQPATTTVSTSLPVPNPSLPYEQTIVFPGSTGHIVVTSASSTSVTGQVLGGPHNLMRRSTVSLLDTYQKCGLKRKSEEIENTSSVQIIEEHPPMIQNNASGATVATATTSTATSKNSGSNSEGDYQLVQHEVLCSMTNTYEVLEFLGRGTFGQVVKCWKRGTNEIVAIKILKNRPSYARQGQIEVSILARLSTESADDYNFVRAYECFQHKNHTCLVFEMLEQNLYDFLKQNKFSPLPLKYIRPVLQQVATALMKLKSLGLIHADLKPENIMLVDPSRQPYRVKVIDFGSASHVSKAVCSTYLQSRYYRAPEIILGLPFCEAIDMWSLGCVIAELFLGWPLYPGASEYDQIRYISQTQGLPAEYLLSAGTKTTRFFNRDTDSPYPLWRLKTPDDHEAETGIKSKEARKYIFNCLDDMAQVNMTTDLEGSDMLVEKADRREFIDLLKKMLTIDADKRITPIETLNHPFVTMTHLLDFPHSTHVKSCFQNMEICKRRVNMYDTVNQSKTPFITHVAPSTSTNLTMTFNNQLTTVHNQPSAASMAAVAQRSMPLQTGTAQICARPDPFQQALIVCPPGFQGLQASPSKHAGYSVRMENAVPIVTQAPGAQPLQIQPGLLAQQAWPSGTQQILLPPAWQQLTGVATHTSVQHATVIPETMAGTQQLADWRNTHAHGSHYNPIMQQPALLTGHVTLPAAQPLNVGVAHVMRQQPTSTTSSRKSKQHQSSVRNVSTCEVSSSQAISSPQRSKRVKENTPPRCAMVHSSPACSTSVTCGWGDVASSTTRERQRQTIVIPDTPSPTVSVITISSDTDEEEEQKHAPTSTVSKQRKNVISCVTVHDSPYSDSSSNTSPYSVQQRAGHNNANAFDTKGSLENHCTGNPRTIIVPPLKTQASEVLVECDSLVPVNTSHHSSSYKSKSSSNVTSTSGHSSGSSSGAITYRQQRPGPHFQQQQPLNLSQAQQHITTDRTGSHRRQQAYITPTMAQAPYSFPHNSPSHGTVHPHLAAAAAAAHLPTQPHLYTYTAPAALGSTGTVAHLVASQGSARHTVQHTAYPASIVHQVPVSMGPRVLPSPTIHPSQYPAQFAHQTYISASPASTVYTGYPLSPAKVNQYPYI

SEQ ID NO: 848862 - protein, 367 aa, Homo sapiens
KGRLVLLGWRFQLRCIVGACSTSVTCGWGDVASSTTRERQRQTIVIPDTPSPTVSVITISSDTDEEEEQKHAPTSTVSKQRKNVISCVTVHDSPYSDSSSNTSPYSVQQRAGHNNANAFDTKGSLENHCTGNPRTIIVPPLKTQASEVLVECDSLVPVNTSHHSSSYKSKSSSNVTSTSGHSSGSSSGAITYRQQRPGPHFQQQQPLNLSQAQQHITTDRTGSHRRQQAYITPTMAQAPYSFPHNSPSHGTVHPHLAAAAAAAHLPTQPHLYTYTAPAALGSTGTVAHLVASQGSARHTVQHTAYPASIVHQVPVSMGPRVLPSPTIHPSQYPAQFAHQTYISASPASTVYTGYPLSPAKVNQYPYI

SEQ ID NO: 848863 - protein, 313 aa, Homo sapiens
RSWDPSHVGRTGGGQKHAPTSTVSKQRKNVISCVTVHDSPYSDSSSNTSPYSVQQRAGHNNANAFDTKGSLENHCTGNPRTIIVPPLKTQASEVLVECDSLVPVNTSHHSSSYKSKSSSNVTSTSGHSSGSSSGAITYRQQRPGPHFQQQQPLNLSQAQQHITTDRTGSHRRQQAYITPTMAQAPYSFPHNSPSHGTVHPHLAAAAAAAHLPTQPHLYTYTAPAALGSTGTVAHLVASQGSARHTVQHTAYPASIVHQVPVSMGPRVLPSPTIHPSQYPAQFAHQTYISASPASTVYTGYPLSPAKVNQYPYI

SEQ ID NO: 848864 - protein, 983 aa, Homo sapiens
MAPVYEGMASHVQVFSPHTLQSSAFCSVKKLKIEPSSNWDMTGYGSHSKVYSQSKNIPLSQPATTTVSTSLPVPNPSLPYEQTIVFPGSTGHIVVTSASSTSVTGQVLGGPHNLMRRSTVSLLDTYQKCGLKRKSEEIENTSSVQIIEEHPPMIQNNASGATVATATTSTATSKNSGSNSEGDYQLVQHEVLCSMTNTYEVLEFLGRGTFGQVVKCWKRGTNEIVAIKILKNRPSYARQGQIEVSILARLSTESADDYNFVRAYECFQHKNHTCLVFEMLEQNLYDFLKQNKFSPLPLKYIRPVLQQVATALMKLKSLGLIHADLKPENIMLVDPSRQPYRVKVIDFGSASHVSKAVCSTYLQSRYYRAPEIILGLPFCEAIDMWSLGCVIAELFLGWPLYPGASEYDQIRYISQTQGLPAEYLLSAGTKTTRFFNRDTDSPYPLWRLKTPDDHEAETGIKSKEARKYIFNCLDDMAQVNMTTDLEGSDMLVEKADRREFIDLLKKMLTIDADKRITPIETLNHPFVTMTHLLDFPHSTHVKSCFQNMEICKRRVNMYDTVNQSKTPFITHVAPSTSTNLTMTFNNQLTTVHNQPSAASMAAVAQRSMPLQTGTAQICARPDPFQQALIVCPPGFQGLQASPSKHAGYSVRMENAVPIVTQAPGAQPLQIQPGLLAQQAWPSGTQQILLPPAWQQLTGVATHTSVQHATVIPETMAGTQQLADWRNTHAHGSHYNPIMQQPALLTGHVTLPAAQPLNVGVAHVMRQQPTSTTSSRKSKQHQSSVRNVSTCEVSSSQAISSPQRSKRVKENTPPRCAMVHSSPACSTSVTCGWGDVASSTTRERQRQTIVIPDTPSPTVSVITISSDTDEEEEQKHAPTSTVSKQRKNVISCVTVHDSPYSDSSSNTSPYSVQQRAGHNNANAFDTKGSLENHCTGNPRTIIVPPLKTQASEVLVECDSLVPVIWGQDRAGTSPWRVVFLLFCC

SEQ ID NO: 848865 - protein, 866 aa, Homo sapiens
MAPVYEGMASHVQVFSPHTLQSSAFCSVKKLKIEPSSNWDMTGYGSHSKVYSQSKNIPLSQPATTTVSTSLPVPNPSLPYEQTIVFPGSTGHIVVTSASSTSVTGQVLGGPHNLMRRSTVSLLDTYQKCGLKRKSEEIENTSSVQIIEEHPPMIQNNASGATVATATTSTATSKNSGSNSEGDYQLVQHEVLCSMTNTYEVLEFLGRGTFGQVVKCWKRGTNEIVAIKILKNRPSYARQGQIEVSILARLSTESADDYNFVRAYECFQHKNHTCLVFEMLEQNLYDFLKQNKFSPLPLKYIRPVLQQVATALMKLKSLGLIHADLKPENIMLVDPSRQPYRVKVIDFGSASHVSKAVCSTYLQSRYYRAPEIILGLPFCEAIDMWSLGCVIAELFLGWPLYPGASEYDQIRYISQTQGLPAEYLLSAGTKTTRFFNRDTDSPYPLWRLKTPDDHEAETGIKSKEARKYIFNCLDDMAQVNMTTDLEGSDMLVEKADRREFIDLLKKMLTIDADKRITPIETLNHPFVTMTHLLDFPHSTHVKSCFQNMEICKRRVNMYDTVNQSKTPFITHVAPSTSTNLTMTFNNQLTTVHNQPSAASMAAVAQRSMPLQTGTAQICARPDPFQQALIVCPPGFQGLQASPSKHAGYSVRMENAVPIVTQAPGAQPLQIQPGLLAQQAWPSGTQQILLPPAWQQLTGVATHTSVQHATVIPETMAGTQQLADWRNTHAHGSHYNPIMQQPALLTGHVTLPAAQPLNVGVAHVMRQQPTSTTSSRKSKQHQSSVRNVSTCEVSSSQAISSPQRSKRVKENTPPRCAMVHSSPACSTSVTCGWGDVASSTTRERQRQTIVIPDTPSPTVNLSGVGIL

SEQ ID NO: 848866 - protein, 697 aa, Homo sapiens
MAPVYEGMASHVQVFSPHTLQSSAFCSVKKLKIEPSSNWDMTGYGSHSKVYSQSKNIPLSQPATTTVSTSLPVPNPSLPYEQTIVFPGSTGHIVVTSASSTSVTGQVLGGPHNLMRRSTVSLLDTYQKCGLKRKSEEIENTSSVQIIEEHPPMIQNNASGATVATATTSTATSKNSGSNSEGDYQLVQHEVLCSMTNTYEVLEFLGRGTFGQVVKCWKRGTNEIVAIKILKNRPSYARQGQIEVSILARLSTESADDYNFVRAYECFQHKNHTCLVFEMLEQNLYDFLKQNKFSPLPLKYIRPVLQQVATALMKLKSLGLIHADLKPENIMLVDPSRQPYRVKVIDFGSASHVSKAVCSTYLQSRYYRAPEIILGLPFCEAIDMWSLGCVIAELFLGWPLYPGASEYDQIRYISQTQGLPAEYLLSAGTKTTRFFNRDTDSPYPLWRLKTPDDHEAETGIKSKEARKYIFNCLDDMAQVNMTTDLEGSDMLVEKADRREFIDLLKKMLTIDADKRITPIETLNHPFVTMTHLLDFPHSTHVKSCFQNMEICKRRVNMYDTVNQSKTPFITHVAPSTSTNLTMTFNNQLTTVHNQPSAASMAAVAQRSMPLQTGTAQICARPDPFQQALIVCPPGFQGLQASPSKHAGYSVRMENAVPIVTQAPGAQPLQIQPGLLAQQAWPKKPLRGSSKIRPQASQ

SEQ ID NO: 848867 - protein, 651 aa, Homo sapiens
MASHVQVFSPHTLQSSAFCSVKKLKIEPSSNWDMTGYGSHSKVYSQSKNIPLSQPATTTVSTSLPVPNPSLPYEQTIVFPGSTGHIVVTSASSTSVTGQVLGGPHNLMRRSTVSLLDTYQKCGLKRKSEEIENTSSVQIIEEHPPMIQNNASGATVATATTSTATSKNSGSNSEGDYQLVQHEVLCSMTNTYEVLEFLGRGTFGQVVKCWKRGTNEIVAIKILKNRPSYARQGQIEVSILARLSTESADDYNFVRAYECFQHKNHTCLVFEMLEQNLYDFLKQNKFSPLPLKYIRPVLQQVATALMKLKSLGLIHADLKPENIMLVDPSRQPYRVKVIDFGSASHVSKAVCSTYLQSRYYRAPEIILGLPFCEAIDMWSLGCVIAELFLGWPLYPGASEYDQIRYISQTQGLPAEYLLSAGTKTTRFFNRDTDSPYPLWRLKTPDDHEAETGIKSKEARKYIFNCLDDMAQVNMTTDLEGSDMLVEKADRREFIDLLKKMLTIDADKRITPIETLNHPFVTMTHLLDFPHSTHVKSCFQNMEICKRRVNMYDTVNQSKTPFITHVAPSTSTNLTMTFNNQLTTVHNQPSAASMAAVAQRSMPLQTGTAQICARPDPFQQALIVCPPGFQGLQASPSPHSTHVKSCFQNMEI

SEQ ID NO: 848868 - protein, 627 aa, Homo sapiens
MAPVYEGMASHVQVFSPHTLQSSAFCSVKKLKIEPSSNWDMTGYGSHSKVYSQSKNIPLSQPATTTVSTSLPVPNPSLPYEQTIVFPGSTGHIVVTSASSTSVTGQVLGGPHNLMRRSTVSLLDTYQKCGLKRKSEEIENTSSVQIIEEHPPMIQNNASGATVATATTSTATSKNSGSNSEGDYQLVQHEVLCSMTNTYEVLEFLGRGTFGQVVKCWKRGTNEIVAIKILKNRPSYARQGQIEVSILARLSTESADDYNFVRAYECFQHKNHTCLVFEMLEQNLYDFLKQNKFSPLPLKYIRPVLQQVATALMKLKSLGLIHADLKPENIMLVDPSRQPYRVKVIDFGSASHVSKAVCSTYLQSRYYRAPEIILGLPFCEAIDMWSLGCVIAELFLGWPLYPGASEYDQIRYISQTQGLPAEYLLSAGTKTTRFFNRDTDSPYPLWRLKTPDDHEAETGIKSKEARKYIFNCLDDMAQVNMTTDLEGSDMLVEKADRREFIDLLKKMLTIDADKRITPIETLNHPFVTMTHLLDFPHSTHVKSCFQNMEICKRRVNMYDTVNQSKTPFITHVAPSTSTNLTMTFNNQLTTVHNQVSGKQKGRRGGAAQCEPQDLYFPSYLVRRQNSC

SEQ ID NO: 848869 - protein, 562 aa, Homo sapiens
MAPVYEGMASHVQVFSPHTLQSSAFCSVKKLKIEPSSNWDMTGYGSHSKVYSQSKNIPLSQPATTTVSTSLPVPNPSLPYEQTIVFPGSTGHIVVTSASSTSVTGQVLGGPHNLMRRSTVSLLDTYQKCGLKRKSEEIENTSSVQIIEEHPPMIQNNASGATVATATTSTATSKNSGSNSEGDYQLVQHEVLCSMTNTYEVLEFLGRGTFGQVVKCWKRGTNEIVAIKILKNRPSYARQGQIEVSILARLSTESADDYNFVRAYECFQHKNHTCLVFEMLEQNLYDFLKQNKFSPLPLKYIRPVLQQVATALMKLKSLGLIHADLKPENIMLVDPSRQPYRVKVIDFGSASHVSKAVCSTYLQSRYYRAPEIILGLPFCEAIDMWSLGCVIAELFLGWPLYPGASEYDQIRYISQTQGLPAEYLLSAGTKTTRFFNRDTDSPYPLWRLKTPDDHEAETGIKSKEARKYIFNCLDDMAQVNMTTDLEGSDMLVEKADRREFIDLLKKMLTIDADKRITPIETLNHPFVTMTHLLDFPHSTHVKSCFQNMEICKRRAALLRFDL

SEQ ID NO: 848870 - protein, 909 aa, Homo sapiens
MASHVQVFSPHTLQSSAFCSVKKLKIEPSSNWDMTGYGSHSKVYSQSKNIPLSQPATTTVSTSLPVPNPSLPYEQTIVFPGSTGHIVVTSASSTSVTGQVLGGPHNLMRRSTVSLLDTYQKCGLKRKSEEIENTSSVQIIEEHPPMIQNNASGATVATATTSTATSKNSGSNSEGDYQLVQHEVLCSMTNTYEVLEFLGRGTFGQVVKCWKRGTNEIVAIKILKNRPSYARQGQIEVSILARLSTESADDYNFVRAYECFQHKNHTCLVFEMLEQNLYDFLKQNKFSPLPLKYIRPVLQQVATALMKLKSLGLIHADLKPENIMLVDPSRQPYRVKVIDFGSASHVSKAVCSTYLQSRYYRAPEIILGLPFCEAIDMWSLGCVIAELFLGWPLYPGASEYDQIRYISQTQGLPAEYLLSAGTKTTRFFNRDTDSPYPLWRLKTPDDHEAETGIKSKEARKYIFNCLDDMAQVNMTTDLEGSDMLVEKADRREFIDLLKKMLTIDADKRITPIETLNHPFVTMTHLLDFPHSTHVKSCFQNMEICKRRVNMYDTVNQSKTPFITHVAPSTSTNLTMTFNNQLTTVHNQAPSSTSATISLANPEVSILNYPSTLYQPSAASMAAVAQRSMPLQTGTAQICARPDPFQQALIVCPPGFQGLQASPSKHAGYSVRMENAVPIVTQAPGAQPLQIQPGLLAQQAWPSGTQQILLPPAWQQLTGVATHTSVQHATVIPETMAGTQQLADWRNTHAHGSHYNPIMQQPALLTGHVTLPAAQPLNVGVAHVMRQQPTSTTSSRKSKQHQSSVSTVSKQRKNVISCVTVHDSPYSDSSSNTSPYSVQQRAGHNNANAFDTKGSLENHCTGNPRTIIVPPLKTQASEVLVECDSLVPVIWGQDRAGTSPWRVVFLLFCC

SEQ ID NO: 848871 - protein, 696 aa, Homo sapiens
MAQVNMTTDLEGSDMLVEKADRREFIDLLKKMLTIDADKRITPIETLNHPFVTMTHLLDFPHSTHVKSCFQNMEICKRRVNMYDTVNQSKTPFITHVAPSTSTNLTMTFNNQLTTVHNQPSAASMAAVAQRSMPLQTGTAQICARPDPFQQALIVCPPGFQGLQASPSKHAGYSVRMENAVPIVTQAPGAQPLQIQPGLLAQQAWPSGTQQILLPPAWQQLTGVATHTSVQHATVIPETMAGTQQLADWRNTHAHGSHYNPIMQQPALLTGHVTLPAAQPLNVGVAHVMRQQPTSTTSSRKSKQHQSSVRNVSTCEVSSSQAISSPQRSKRVKENTPPRCAMVHSSPACSTSVTCGWGDVASSTTRERQRQTIVIPDTPSPTVSVITISSDTDEEEEQKHAPTSTVSKQRKNVISCVTVHDSPYSDSSSNTSPYSVQQRAGHNNANAFDTKGSLENHCTGNPRTIIVPPLKTQASEVLVECDSLVPVNTSHHSSSYKSKSSSNVTSTSGHSSGSSSGAITYRQQRPGPHFQQQQPLNLSQAQQHITTDRTGSHRRQQAYITPTMAQAPYSFPHNSPSHGTVHPHLAAAAAAAHLPTQPHLYTYTAPAALGSTGTVAHLVASQGSARHTVQHTAYPASIVHQVPVSMGPRVLPSPTIHPSQYPAQFAHQTYISASPASTVYTGYPLSPAKVNQYPYI

SEQ ID NO: 848872 - protein, 572 aa, Homo sapiens [sequence omitted]

SEQ ID NO: 848873 - protein, 254 aa, Homo sapiens
MRLICYCPASGTCFFLEDHCSLVGQHLLGSWDPATDLTSFSSRHINTSHHSSSYKSKSSSNVTSTSGHSSGSSSGAITYRQQRPGPHFQQQQPLNLSQAQQHITTDRTGSHRRQQAYITPTMAQAPYSFPHNSPSHGTVHPHLAAAAAAAHLPTQPHLYTYTAPAALGSTGTVAHLVASQGSARHTVQHTAYPASIVHQVPVSMGPRVLPSPTIHPSQYPAQFAHQTYISASPASTVYTGYPLSPAKVNQYPYI

SEQ ID NO: 848874 - protein, 237 aa, Homo sapiens
SRGPVTQLMTVFSLLGDSAGGGVIAWCLNTSHHSSSYKSKSSSNVTSTSGHSSGSSSGAITYRQQRPGPHFQQQQPLNLSQAQQHITTDRTGSHRRQQAYITPTMAQAPYSFPHNSPSHGTVHPHLAAAAAAAHLPTQPHLYTYTAPAALGSTGTVAHLVASQGSARHTVQHTAYPASIVHQVPVSMGPRVLPSPTIHPSQYPAQFAHQTYISASPASTVYTGYPLSPAKVNQYPYI

SEQ ID NO: 848875 - protein, 945 aa, Homo sapiens
MAPVYEGMASHVQVFSPHTLQSSAFCSVKKLKIEPSSNWDMTGYGSHSKVYSQSKNIPLSQPATTTVSTSLPVPNPSLPYEQTIVFPGSTGHIVVTSASSTSVTGQVLGGPHNLMRRSTVSLLDTYQKCGLKRKSEEIENTSSVQIIEEHPPMIQNNASGATVATATTSTATSKNSGSNSEGDYQLVQHEVLCSMTNTYEVLEFLGRGTFGQVVKCWKRGTNEIVAIKILKNRPSYARQGQIEVSILARLSTESADDYNFVRAYECFQHKNHTCLVFEMLEQNLYDFLKQNKFSPLPLKYIRPVLQQVATALMKLKSLGLIHADLKPENIMLVDPSRQPYRVKVIDFGSASHVSKAVCSTYLQSRYYRAPEIILGLPFCEAIDMWSLGCVIAELFLGWPLYPGASEYDQIRYISQTQGLPAEYLLSAGTKTTRFFNRDTDSPYPLWRLKTPDDHEAETGIKSKEARKYIFNCLDDMAQVNMTTDLEGSDMLVEKADRREFIDLLKKMLTIDADKRITPIETLNHPFVTMTHLLDFPHSTHVKSCFQNMEICKRRVNMYDTVNQSKTPFITHVAPSTSTNLTMTFNNQLTTVHNQPSAASMAAVAQRSMPLQTGTAQICARPDPFQQALIVCPPGFQGLQASPSKHAGYSVRMENAVPIVTQAPGAQPLQIQPGLLAQQAWPSGTQQILLPPAWQQLTGVATHTSVQHATVIPETMAGTQQLADWRNTHAHGSHYNPIMQQPALLTGHVTLPAAQPLNVGVAHVMRQQPTSTTSSRKSKQHQSSVRNVSTCEVSSSQAISSPQRSKRVKENTPPRCAMVHSSPACSTSVTCGWGDVASSTTRERQRQTIVIPDTPSPTVSVITISSDTDEEEEQKHAPTSTVSKQRKNVISCVTVHDSPYSDSSSNTSPYSVQQRAGHNNANAFDTKGSLENHCTGNPRTIIVPPL

SEQ ID NO: 848876 - protein, 476 aa, Homo sapiens
MAPVYEGMASHVQVFSPHTLQSSAFCSVKKLKIEPSSNWDMTGYGSHSKVYSQSKNIPLSQPATTTVSTSLPVPNPSLPYEQTIVFPGSTGHIVVTSASSTSVTGQVLGGPHNLMRRSTVSLLDTYQKCGLKRKSEEIENTSSVQIIEEHPPMIQNNASGATVATATTSTATSKNSGSNSEGDYQLVQHEVLCSMTNTYEVLEFLGRGTFGQVVKCWKRGTNEIVAIKILKNRPSYARQGQIEVSILARLSTESADDYNFVRAYECFQHKNHTCLVFEMLEQNLYDFLKQNKFSPLPLKYIRPVLQQVATALMKLKSLGLIHADLKPENIMLVDPSRQPYRVKVIDFGSASHVSKAVCSTYLQSRYYRAPEIILGLPFCEAIDMWSLGCVIAELFLGWPLYPGASEYDQIRYISQTQGLPAEYLLSAGTKTTRFFNRDTDSPYPLWRLKVGRASPPLLTVAQRLGKRAVDPLVGSF

SEQ ID NO: 848877 - protein, 369 aa, Homo sapiens
PHPFSRPSYPQLLALGGANCSAEISAAKLRLPPRAVPRGSPEAWANQRTSSSSGISVEDPTLVPHAPVEITSIGIDSRQSALHRAHAVTGMKSVATHIIHITGTAGLLRHIGRVGHIDPALAFTRRPPWVSPLQQGAGKTEGTESTLERPRLVSDHPLAIASPPQRPNWINAQCLNITEEATGVIAYAHTYPQPSMSGLQHTNSETQSRPNHGEPITGAANRGGYTNSQTTRVRNTEVPLPQHVTLNPVTTCSRTHKLAPKVRNRQYYMEALSWAPQGNLGLKPRRNPQTIKPITVEKTKSHTIVSSPERTDNHVTYYYHRSQTEHPVRTAAHTFGLTGPIHFAQAGNQASLYFIEYDTDLERFRKHVD

SEQ ID NO: 848878 - protein, 432 aa, Homo sapiens
MSELKDCPLQFHDFKSVDHLKVCPRYTAVLARSEDDGIGIEELDTLQLELETLLSSASRRLRVLEAETQILTDWQDKKGDRRFLKLGRDHELGAPPKHGKPKKQKLEGKAGHGPGPGPGRPKSKNLQPKIQEYEFTDDPIDVPRIPKNDAPNRFWASVEPYCADITSEEVRTLEELLKPPEDEAEHYKIPPLGKHYSQRWAQEDLLEEQKDGARAAAVADKKKGLMGPLTELDTKDVDALLKKSEAQHEQPEDGCPFGALTQRLLQALVEENIISPMEDSPIPDMSGKESGADGASTSPRNQNKPFSVPHTKSLESRIKEELIAQGLLESEDRPAEDSEDEVLAELRKRQAELKALSAHNRTKKHDLLRLAKEEVSRQELRQRVRMADNEVMDAFRKIMAARQKKRTPTKKEKDQAWKTLKERESILKLLDG

SEQ ID NO: 848879 - protein, 432 aa, Homo sapiens; identical to SEQ ID NO: 848878

SEQ ID NO: 848880 - protein, 373 aa, Homo sapiens
MSELKDCPLQFHDFKSVDHLKVCPRYTAVLARSEDDGIGIEELDTLQLELETLLSSASRRLRVLEAETQILTDWQDKKGDRRFLKLGRDHELGAPPKHGKPKKQKLEGKAGHGPGPGPGRPKSKNLQPKIQEYEFTDDPIDVPRIPKNDAPNRFWASVEPYCADITSEEVRTLEELLKPPEDEAEHYKHEQPEDGCPFGALTQRLLQALVEENIISPMEDSPIPDMSGKESGADGASTSPRNQNKPFSVPHTKSLESRIKEELIAQGLLESEDRPAEDSEDEVLAELRKRQAELKALSAHNRTKKHDLLRLAKEEVSRQELRQRVRMADNEVMDAFRKIMAARQKKRTPTKKEKDQAWKTLKERESILKLLDG

SEQ ID NO: 848881 - protein, 285 aa, Homo sapiens [sequence omitted]

SEQ ID NO: 848882 - protein, 207 aa, Homo sapiens
MGPLTELDTKDVDALLKKSEAQHEQPEDGCPFGALTQRLLQALVEENIISPMEDSPIPDMSGKESGADGASTSPRNQNKPFSVPHTKSLESRIKEELIAQGLLESEDRPAEDSEDEVLAELRKRQAELKALSAHNRTKKHDLLRLAKEEVSRQELRQRVRMADNEVMDAFRKIMAARQKKRTPTKKEKDQAWKTLKERESILKLLDG

SEQ ID NO: 848883 - protein, 291 aa, Homo sapiens
MAGQCLPTQGWVPSFPQIPPLGKHYSQRWAQEDLLEEQKDGARAAAVADKKKGLMGPLTELDTKGRPLTSLPTPGQDLNSRTSAHLPLLSCARLDVDALLKKSEAQHEQPEDGCPFGALTQRLLQALVEENIISPMEDSPIPDMSGKESGADGASTSPRNQNKPFSVPHTKSLESRIKEELIAQGLLESEDRPAEDSEDEVLAELRKRQAELKALSAHNRTKKHDLLRLAKEEVSRQELRQRVRMADNEVMDAFRKIMAARQKKRTPTKKEKDQAWKTLKERESILKLLDG

SEQ ID NO: 848884 - protein, 209 aa, Homo sapiens
MSELKDCPLQFHDFKSVDHLKVCPRYTAVLARSEDDGIGIEELDTLQLELETLLSSASRRLRVLEAETQILTDWQDKKGDRRFLKLGRDHELGAPPKHGKPKKQKLEGKAGHGPGPGPGRPKSKNLQPKIQEYEFTDDPIDVPRIPKNDAPNRFWAREHRRGPQGSGGGGTGGAGAPTQDLLLPAGSGLQWSPTVLTSPARRSAHLRSY

SEQ ID NO: 848885 - protein, 129 aa, Homo sapiens
PHPFSRPSYPQLLALGGANCSAEISAAKLRLPPRAVPRGSPEADHPHPTSSGFARGPPSSHPRQTPVGSPSLTPRPRVNCKGPAHSQFRGGCSHRPELHLNHLHAGHLRDLQSDCQTRKVDEGAGESRN

SEQ ID NO: 848886 - protein, 128 aa, Homo sapiens
IVDTYVACFKNQTRCVCPSLCIWIDTEGVPKGKGRFSLTLGSPGNLQGGPFSKLALESDGPASRCSVPHTKSLESRIKEELIAQGLLESEDRPAEDSEDEVLAELRKRQAELKALSAHNRTKKHDLLR

SEQ ID NO: 848887 - protein, 369 aa, Homo sapiens
MSELKDCPLQFHDFKSVDHLKVCPRYTAVLARSEDDGIGIEELDTLQLELETLLSSASRRLRVLEAETQILTDWQDKKGDRRFLKLGRDHELGAPPKHGKPKKQKLEGKAGHGPGPGPGRPKSKNLQPKIQEYEFTDDPIDVPRIPKNDAPNRFWASVEPYCADITSEEVRTLEELLKPPEDEAEHYKIPPLGKHYSQRWAQEDLLEEQKDGARAAAVADKKKGLMGPLTELDTKDVDALLKKSEAQHEQPEDGCPFGALTQRLLQALVEENIISPMEDSPIPDMSGKESGADGASTSPRNQNKPFSVPHTKSLESRIKEELIAQGLLESEDRPAEDSEDEVLAELRKRQAELKALSAHNRTKKHDLLR

SEQ ID NO: 848888 - protein, 432 aa, Homo sapiens; identical to SEQ ID NO: 848878

SEQ ID NO: 848889 - protein, 434 aa, Homo sapiens
MSELKDCPLQFHDFKSVDHLKVCPRYTAVLARSEDDGIGIEELDTLQLELETLLSSASRRLRVLEAETQILTDWQDKKGDRRFLKLGRDHELGAPPKHGKPKKQKLEGKAGHGPGPGPGRPKSKNLQPKIQEYEFTDDPIDVPRIPKNDAPNRFWASVEPYCADITSEEVRTLEELLKPPEDEAEHYKYKIPPLGKHYSQRWAQEDLLEEQKDGARAAAVADKKKGLMGPLTELDTKDVDALLKKSEAQHEQPEDGCPFGALTQRLLQALVEENIISPMEDSPIPDMSGKESGADGASTSPRNQNKPFSVPHTKSLESRIKEELIAQGLLESEDRPAEDSEDEVLAELRKRQAELKALSAHNRTKKHDLLRLAKEEVSRQELRQRVRMADNEVMDAFRKIMAARQKKRTPTKKEKDQAWKTLKERESILKLLDG

SEQ ID NO: 848890 - protein, 467 aa, Homo sapiens
MSELKDCPLQFHDFKSVDHLKVCPRYTAVLARSEDDGIGIEELDTLQLELETLLSSASRRLRVLEAETQILTDWQDKKGDRRFLKLGRDHELGAPPKHGKPKKQKLEGKAGHGPGPGPGRPKSKNLQPKIQEYEFTDDPIDVPRIPKNDAPNRFWAREHRRGPQGSGGGGTGGAGAPTQDLLLPCRFWASVEPYCADITSEEVRTLEELLKPPEDEAEHYKYKIPPLGKHYSQRWAQEDLLEEQKDGARAAAVADKKKGLMGPLTELDTKDVDALLKKSEAQHEQPEDGCPFGALTQRLLQALVEENIISPMEDSPIPDMSGKESGADGASTSPRNQNKPFSVPHTKSLESRIKEELIAQGLLESEDRPAEDSEDEVLAELRKRQAELKALSAHNRTKKHDLLRLAKEEVSRQELRQRVRMADNEVMDAFRKIMAARQKKRTPTKKEKDQAWKTLKERESILKLLDG

SEQ ID NO: 848891 - protein, 264 aa, Homo sapiens [sequence omitted]

SEQ ID NO: 848892 - protein, 196 aa, Homo sapiens
MSELKDCPLQFHDFKSVDHLKVCPRYTAVLARSEDDGIGIEELDTLQLELETLLSSASRRLRVLEAETQILTDWQDKKGDRRFLKLGRDHELGAPPKHGKPKKQKLEGKAGHGPGPGPGRPKSKNLQPKIQEYEFTDDPIDVPRIPKNDAPNRFWASVEPYCADITSEEVRTLEELLKPPEDEAEHYKLQGRNSGP

SEQ ID NO: 848893 - protein, 640 aa, Homo sapiens
GVLEDPVVSGDGPFAGGEVDKRLHQLKTQLATLTSSLATVTQEKSRMEASYLADKKKMKQDLEDASNKAEEERARLEGELKGLQEQIAETKARLITQQHDRAQEQSDHALMLRELQKLLQEERTQRQDLELRLEETREALAGRAYAAEQMEGFELQTKQLTREVEELKSELQAIRDEKNQPDPRLQELQEEAARLKSHFQAQLQQEMRKTALAEDQLRQQSQVEEQRVAALENQISEVSELLGTYEKAKQKDQLAIQKLKERILQLDLENKTLALAASSRSPLDSHGEESSLDVNVLKDKMEKLKRLLQVAARKSQVTLDVEKLCDLEIMPSSEAADGEKATALYYQQELKQLKEEFERYKMRAQVVLKSKNTKDGNLGKELEAAQEQLAELKEKYISLRLSCEELEHQHQQEADDWKQELARLQQLHRQELERCQLDFRDRTLKLEEELHKQRDRALAVLTEKDLELEQLRSVALASGLPGRRSPVGGGGPGDPADTSSSDSLTQALQLAAANEPTFFLYAEQLARKEVEITSLRKQKHRLEVEVHQLQDRLLEEGERHREEVAALQSHIEKNIRDQSREGANLEYLKNIIYRFLTLPDSLGRQQTLTAILTILHFSPEEKQVIMRLPTSASWWPSGKR

SEQ ID NO: 848894 - protein, 775 aa, Homo sapiens
MEKFGMNFGGGPSKKDLLETIETQKKQLLQYQARLKDVVRAYKSLLKEKEALEASIKVLSVSHEADVGLAGVQLPGLTFPDSVDDRCSTHSEDSTGTATSLDTAASLTSTKGEFGVEDDRPARGPPPPKSEEASWSESGVSSSSGDGPFAGGEVDKRLHQLKTQLATLTSSLATVTQEKSRMEASYLADKKKMKQDLEDASNKAEEERARLEGELKGLQEQIAETKARLITQQHDRAQEQSDHALMLRELQKLLQEERTQRQDLELRLEETREALAGRAYAAEQMEGFELQTKQLTREVEELKSELQAIRDEKNQPDPRLQELQEEAARLKSHFQAQLQQEMRKTALAEDQLRQQSQVEEQRVAALENQISEVSELLGTYEKAKQKDQLAIQKLKERILQLDLENKTLALAASSRSPLDSHGEESSLDVNVLKDKMEKLKRLLQVAARKSQVTLDVEKLCDLEIMPSSEAADGEKATALYYQQELKQLKEEFERYKMRAQVVLKSKNTKDGNLGKELEAAQEQLAELKEKYISLRLSCEELEHQHQQEADDWKQELARLQQLHRQELERCQLDFRDRTLKLEEELHKQRDRALAVLTEKDLELEQLRSVALASGLPGRRSPVGGGGPGDPADTSSSDSLTQALQLAAANEPTFFLYAEQLARKEVEITSLRKQKHRLEVEVHQLQDRLLEEGERHREEVAALQSHIEKNIRDQSREGANLEYLKNIIYRFLTLPDSLGRQQTLTAILTILHFSPEEKQVIMRLPTSASWWPSGKR

SEQ ID NO: 848895 - protein, 775 aa, Homo sapiens; identical to SEQ ID NO: 848894

SEQ ID NO: 848896 - protein, 464 aa, Homo sapiens
MCKEIKTCYEGYNQAAWSQNPASKEKSKLGKTKTALAEDQLRQQSQVEEQRVAALENQISEVSELLGTYEKAKQKDQLAIQKLKERILQLDLENKTLALAASSRSPLDSHGEESSLDVNVLKDKMEKLKRLLQVAARKSQVTLDVEKLCDLEIMPSSEAADGEKATALYYQQELKQLKEEFERYKMRAQVVLKSKNTKDGNLGKELEAAQEQLAELKEKYISLRLSCEELEHQHQQEADDWKQELARLQQLHRQELERCQLDFRDRTLKLEEELHKQRDRALAVLTEKDLELEQLRSVALASGLPGRRSPVGGGGPGDPADTSSSDSLTQALQLAAANEPTFFLYAEQLARKEVEITSLRKQKHRLEVEVHQLQDRLLEEGERHREEVAALQSHIEKNIRDQSREGANLEYLKNIIYRFLTLPDSLGRQQTLTAILTILHFSPEEKQVIMRLPTSASWWPSGKR

SEQ ID NO: 848897 - protein, 775 aa, Homo sapiens; identical to SEQ ID NO: 848894

SEQ ID NO: 848898 - protein, 108 aa, Homo sapiens
AGFNIIVTSLTVLVSYTFILSSILGISTTEGRSKAFSTCSSHLAAVGMFYGSTAFMYLKPSTISSLTQENVASVFYTTVIPMLNPLIYSLRNKEVKAAVQKTLRGKLF

SEQ ID NO: 848899 - protein, 184 aa, Homo sapiens
AGFNIIVTSLTVLVSYTFILSSILGISTTEGRSKAFSTCSSHLAAVGMFYGSTAFMYLKPSTISSLTQENVASVFYTTVIPMLNPLIYSLRNKEVKAAVQKTLRGCLCTAMLIRILLLVHMAADPMISEALLANKMGKFIAVGLPLLLMSLAQEFSSVLLPLPGAAGVDYTTLFLSLHGIWSKT

SEQ ID NO: 848900 - protein, 192 aa, Homo sapiens
KAHTVPTWPKSTVPLGGPLSPACNQTIPAGWKSQLHKWFDSHIPRWACTPPGYVFLCGPQKNKLPFDGSPKITYSTPPVANLYTCINNIQHTGECAVGLLGPRGIGVTIYNTTQPRQKRALGLILAGMGAAIGMIAPWGGFTYHDVTLRNLSRQIDNIAKSTRDSISKLKASIDSLANVVMNNRLALDYLLA

SEQ ID NO: 848901 - protein, 169 aa, Homo sapiens
ERGGAGFPWVRAQLSVRQFTLRVRVPGPVHLRGRSPTPALDPLAPLNPLIRGPRTPGLRRTEPRLTRSCRGAFRSPRPLPKSGQADGTSEESLHLDIQKLKEKRDMLDKEISQFVSEGYSVDELEDHITQLHEYNDIKDVGQMLMGKLAVIRGVTTKELYPEFGLDMND

SEQ ID NO: 848902 - protein, 265 aa, Homo sapiens
MATLLRPVLRRLCGLPGLQRPAAEMPLRARSDGAGPLYSHHLPTSPLQKALLAAGSAAMALYNPYRHDMVAVLGETTGHRTLKVLRDQMRRDPEGAQILQERPRISTSTLDLGKLQSLPEGSLGREYLRFLDVNRVSPDTRAPTRFVDDEELAYVIQRYREVHDMLHTLLGMPTNILGEIVVKWFEAVQTGLPMCILGAFFGPIRLGAQSLQVLVSELIPWAVQNGRRAPCVLNLYYERRWEQSLRALREELGITAPPMHVQGLA

SEQ ID NO: 848903 - protein, 169 aa, Homo sapiens; identical to SEQ ID NO: 848901

SEQ ID NO: 848904 - protein, 150 aa, Homo sapiens
ERGGAGFPWVRAQLSVRQFTLRVRVPGPVHLRGRSPTPALDPLAPLNPLIRGPRTPGLRRTEPRLTRSCRGAFRSPRPLPKSGQADGTSEESLHLDIQKLKEKRDMLDKEISQFVSEGYSVDELEDHITQLHEYNDIKDVGQMLMGKLGE

SEQ ID NO: 848905 - protein, 241 aa, Homo sapiens [sequence omitted]

SEQ ID NO: 848906 - protein, 241 aa, Homo sapiens [sequence omitted]

SEQ ID NO: 848907 - protein, 183 aa, Homo sapiens
MATLLRPVLRRLCGLPGLQRPAAEMPLRARSDGAGPLYSHHLPTSPLQKALLAAGSAAMALYNPYRHDMVAVLGETTGHRTLKVLRDQMRRDPEGAQILQERPRISTSTLDLGKLQSLPEGSLGREYLRFLDVNRVSPDTRAPTRFVDDEELAYVIQRYREVHDMLHTLLGMPTNILGECPQP

SEQ ID NO: 848908 - protein, 162 aa, Homo sapiens
MVRVVTVSETDWQIGPWEPSGRVLGEAHGCQRVSPDTRAPTRFVDDEELAYVIQRYREVHDMLHTLLGMPTNILGEIVVKWFEAVQTGLPMCILGAFFGPIRLGAQSLQVLVSELIPWAVQNGRRAPCVLNLYYERRWEQSLRALREELGITAPPMHVQGLA

SEQ ID NO: 848909 - protein, 183 aa, Homo sapiens; identical to SEQ ID NO: 848907

SEQ ID NO: 848910 - protein, 178 aa, Homo sapiens
MATLLRPVLRRLCGLPGLQRPAAEMPLRARSDGAGPLYSHHLPTSPLQKALLAAGSAAMALYNPYRHDMVAVLGETTGHRTLKVLRDQMRRDPEGAQILQERPRISTSTLDLGKLQSLPEGSLGREYLRFLDVNRVSPDTRAPTRFVDDEELAYVIQRYREVHDMLHTPASLGGRGLP

SEQ ID NO: 848911 - protein, 209 aa, Homo sapiens
ERGGAGFPWVRAQLSVRQFTLRVRVPGPVHLRGRSPTPALDPLAPLNPLIRGPRTPGLRRWIQSLALLLPNCSSSRIPTVPRPHSGLWVQSDFPLGFLSRTEPRLTRSCRGAFRSPRPLPKSGQADGTSEESLHLDIQKLKEKRDMLDKEISQFVSEGYSVDELEDHITQLHEYNDIKDVGQMLMGKLAVIRGVTTKELYPEFGLDMND

SEQ ID NO: 848912 - protein, 260 aa, Homo sapiens
ERGGAGFPWVRAQLSVRQFTLRVRVPGPVHLRGRSPTPALDPLAPLNPLIRGPRTPGLRRWIQSLALLLPNCSSSRIPTVPRPHSGLWVQSDFPLGFLSRTEPRLTRSCRGAFRSPRPLPKSGQADGTSEESLHLDIQKLKEKRDMLDKEISQFVSEGYSVDELEDHITQLHEYNDIKDVGQMLMGKLAVIRGVTTKELYPEFGPDASTAFSSIAHITRDVNYGCIIRYLHANGASIFFICLFLHIGRGLYYGSFLYSET

SEQ ID NO: 848913 - protein, 169 aa, Homo sapiens; identical to SEQ ID NO: 848901

SEQ ID NO: 848914 - protein, 144 aa, Homo sapiens
SLETRDQRTPGGPVWGGRRTEPRLTRSCRGAFRSPFLPATFEKTLYCPHVERPLPKSGQADGTSEESLHLDIQKLKEKRDMLDKEISQFVSEGYSVDELEDHITQLHEYNDIKDVGQMLMGKLAVIRGVTTKELYPEFGLDMND

SEQ ID NO: 848915 - protein, 157 aa, Homo sapiens
ERGGAGFPWVRAQLSVRQFTLRVRVPGPVHLRGRSPTPALDPLAPLNPLIRGPRTPGLRRTEPRLTRSCRGAFRSPRPLPKSGQADGTSEESLHLDIQKLKEKRDMLDKEISQFVSEGYSVDELEDHITQLHEYNDIKDVGQMLMGKLASRPHGSHL

SEQ ID NO: 848916 - protein, 265 aa, Homo sapiens; identical to SEQ ID NO: 848902

SEQ ID NO: 848917 - protein, 265 aa, Homo sapiens; identical to SEQ ID NO: 848902

SEQ ID NO: 848918 - protein, 247 aa, Homo sapiens
MRLSRRSRVRLQAAKMPRLGEGGRILAHSHLPVQKRCWRGRAMGSIPTQNMVAVLGETTGHRTLKVLRDQMRRDPEGAQILQERPRISTSTLDLGKLQSLPEGSLGREYLRFLDVNRVSPDTRAPTRFVDDEELAYVIQRYREVHDMLHTLLGMPTNILGEIVVKWFEAVQTGLPMCILGAFFGPIRLGAQSLQVLVSELIPWAVQNGRRAPCVLNLYYERRWEQSLRALREELGITAPPMHVQGLA

SEQ ID NO: 848919 - protein, 250 aa, Homo sapiens
MATLLRPVLRRLCGLPGLQRPAAEMPLRARSDGAGPLYSHHLPTSPLQKALLAAGSAAMALYNPYRHDMVAVLGETTGHRTLKVLRDQMRRDPEGAQILQERPRISTSTLDLGKLQSLPEGSLGREYLRFLDVNRVSPDTRAPTRFVDDEELAYVIQRYREVHDMLHTLLGMPTNILGEIVVKWFEAVQTGLPMCILGAFFGPIRLGAQSLQVLVSELIPWAVQNGRRAPCVLNLYYERRWEQSLRNRGP

SEQ ID NO: 848920 - protein, 115 aa, Homo sapiens
MATLLRPVLRRLCGLPGLQRPAAGKWRRVLGAGGKEPEGARLLCPRPFSCPAEMPLRARSDGAGPLYSHHLPTSPLQKALLAAGSAAMALYNPYRHGKAARASPPWGRLGAVSCG

SEQ ID NO: 848921 - protein, 46 aa, Homo sapiens
MSASFHCICSLLDSAWHIVQRLTSDAELCGETKRQADAAGDKPSMP

SEQ ID NO: 848922 - protein, 203 aa, Homo sapiens
MACGATLKRTLDFDPLLSPASPKRRRCAPLSAPTSAAASPLSAAAATAASFSAAAASPQKYLRMEPSPFGDVSSRLTTEQILYNIKQEYKRMQKRRHLETSFQQTDPCCTSDAQPHAFLLSGPASPGTSSAASSPLKKEQPLFTLRQVGMICERLLKEREEKVREEYEEILNTKLAEQYDAFVKFTHDQIMRRYGEQPASYVS

SEQ ID NO: 848923 - protein, 217 aa, Homo sapiens
MACGATLKRTLDFDPLLSPASPKRRRCAPLSAPTSAAASPLSAAAATAASFSAAAASPQKYLRMEPSPFGDVSSRLTTEQILYNIKQEYKRMQKRRHLETSFQQTDPCCTSDAQPHAFLLSGPASPGTSSAASSPLKKEQPLFTLRQVGMICERLLKEREEKVREEYEEILNTKLAEQYDAFVKFTHDQIMRRYGEQPASYNLPVEYNLPVEYNLPV

SEQ ID NO: 848924 - protein, 186 aa, Homo sapiens
MACGATLKRTLDFDPLLSPASPKRRRCAPLSAPTSAAAASPQKYLRMEPSPFGDVSSRLTTEQILYNIKQEYKRMQKRRHLETSFQQTDPCCTSDAQPHAFLLSGPASPGTSSAASSPLKKEQPLFTLRQVGMICERLLKEREEKVREEYEEILNTKLAEQYDAFVKFTHDQIMRRYGEQPASYVS

SEQ ID NO: 848925 - protein, 66 aa, Homo sapiens
MNIVEAMERFGSRNGKTSKKITIADCGQLNKFDLCFILTTRSFLLELRRAPLHPICSQYPRIFVLS

SEQ ID NO: 848926 - protein, 144 aa, Homo sapiens
  misc_feature (141)..(141): Xaa can be any naturally occurring amino acid
MACGATLKRTLDFDPLLSPASPKRRRCAPLSAPTSAAASPLSAAAATAASFSAAAASPQKYLRMEPSPFGDVSSRLTTEQILYNIKQEYKRMQKRRHLETSFQQTDPCCTSDAQPHGNIINVAGAFLSTVLCIPTINLQVXGSR

SEQ ID NO: 848927 - protein, 140 aa, Homo sapiens
MEPSPFGDVSSRLTTEQILYNIKQEYKRMQKRRHLETSFQQTDPCCTSDAQPHAFLLSGPASPGTSSAASSPLKKEQPLFTLRQVGMICERLLKEREEKVREEYEEILNTKLAEQYDAFVKFTHDQIMRRYGEQPASYVS

SEQ ID NO: 848928 - protein, 203 aa, Homo sapiens; identical to SEQ ID NO: 848922

SEQ ID NO: 848929 - protein, 163 aa, Homo sapiens
MACGATLKRTLDFDPLLSPASPKRRRCAPLSAPTSAAASPLSAAAATAASFSAAAASPQKYLRMEPSPFGDVSSRLTTEQILYNIKQEYKRMQKRRHLETSFQQTDPCCTSDAQPHAFLLSGPASPGTSSAASSPLKQYDAFVKFTHDQIMRRYGEQPASYVS

SEQ ID NO: 848930 - protein, 155 aa, Homo sapiens
MACGATLKRTLDFDPLLSPASPKRRRCAPLSAPTSAAASPLSAAAATAASFSAAAASPQKYLRMEPSPFGDVSSRLTTGTSSAASSPLKKEQPLFTLRQVGMICERLLKEREEKVREEYEEILNTKLAEQYDAFVKFTHDQIMRRYGEQPASYVS

SEQ ID NO: 848931 - protein, 203 aa, Homo sapiens; identical to SEQ ID NO: 848922

SEQ ID NO: 848932 - protein, 122 aa, Homo sapiens
MIGIVSVVAGAPAEMIREDDIIRKFRRKGHISPQSGCVLAVIDWLQLLTLGLGGLRRGYSPSFSSDTADFSIVGVGGGGWMSLGRDLGLSLITHKNATLAESRPVSLAGSTTKKMLFPSTVI

SEQ ID NO: 848933 - protein, 999 aa, Homo sapiens
MVCSPVTVRIAPPDRRFSRSAIPEQIISSTLSSPSSNAPDPCAKETVLSALKEKEKKRTVEEEDQIFLDGQENKRRRHDSSGSGHSAFEPLVANGVPASFVPKPGSLKRGLNSQSSDDHLNKRSRSSSMSSLTGAYASGIPSSSRNAITSSYSSTRGISQLWKRNGPSSSPFSSPASSRSQTPERPAKKIREEELCHHSSSSTPLAADRESQGEKAADTTPRKKQNSNSQSTPGSSGQRKRKVQLLPSRRGEQLTLPPPPQLGYSITAEDLDLEKKASLQWFNQALEDKSDAASNSVTETPPITQPSFTFTLPAAAPASPPTSLLAPSTNPLLESLKKMQTPPSLPPCPESAGAATTEALSPPKTPSLLPPLGLSQSGPPGLLPSPSFDSKPPTTLLGLIPAPSMVPATDTKAPPTLQAETATKPQATSAPSPAPKQSFLFGTQNTSPSSPAAPAASSAPPMFKPIFTAPPKSEKEGPTPPGPSVTATAPSSSSLPTTTSTTAPTFQPVFSSMGPPASVPLPAPFFKQTTTPATAPTTTAPLFTGLASATSAVAPITSASPSTDSASKPAFGFGINSVSSSSVSTTTSTATAASQPFLFGAPQASAASFTPAMGSIFQFGKPPALPTTTTVTTFSQSLHTAVPTATSSSAADFSGFGSTLATSAPATSSQPTLTFSNTSTPTFNIPFGSSAKSPLPSYPGANPQPAFGAAEGQPPGAAKPALAPSFGSSFTFGNSAAPAAAPTPAPPSMIKVVPAYVPTPIHPIFGGATHSAFGLKATASAFGAPASSQPAFGGSTAVFFGAATSSGFGATTQTASSGSSSSVFGSTTPSPFTFGGSAAPAGSGSFGINVATPGSSTTTGAFSFGAGQSGSTATSTPFAGGLGQNALGTTGQSTPFAFNVSSTTESKPVFGGTATPTFGLNTPAPGVGTSGSSLSFGASSAPAQGFVGVAPFGNTFAHQQEHSPRKGPNNLSKRKLLPAVRAQGLPRRGQASSFPTRKE

SEQ ID NO: 848934 - protein, 984 aa, Homo sapiens
MVCSPVTVRIAPPDRRFSRSAIPEQIISSTLSSPSSNAPDPCAKETVLSALKEKEKKRTVEEEDQIFLDGQENKRRRHDSSGSGHSAFEPLVANGVPASFVPKPGSLKRGLNSQSSDDHLNKRSRSSSMSSLTGAYASGIPSSSRNAITSSYSSTRGISQLWKRNGPSSSPFSSPASSRSQTPERPAKKIREEELCHHSSSSTPLAADRESQGEKAADTTPRKKQNSNSQSTPGSSGQRKRKVQLLPSRRGEQLTLPPPPQLGYSITAEDLDLEKKASLQWFNQALEDKSDAASNSVTETPPITQPSFTFTLPAAAPASPPTSLLAPSTNPLLESLKKMQTPPSLPPCPESAGAATTEALSPPKTPSLLPPLGLSQSGPPGLLPSPSFDSKPPTTLLGLIPAPSMVPATDTKAPPTLQAETATKPQATSAPSPAPKQSFLFGTQNTSPSSPAAPAASSAPPMFKPIFTAPPKSEKEGPTPPGPSVTATAPSSSSLPTTTSTTAPTFQPVFSSMGPPASVPLPAPFFKQTTTPATAPTTTAPLFTGLASATSAVAPITSASPSTDSASKPAFGFGINSVSSSSVSTTTSTATAASQPFLFGAPQASAASFTPAMGSIFQFGKPPALPTTTTVTTFSQSLHTAVPTATSSSAADFSGFGSTLATSAPATSSQPTLTFSNTSTPTFNIPFGSSAKSPLPSYPGANPQPAFGAAEGQPPGAAKPALAPSFGSSFTFGNSAAPAAAPTPAPPSMIKVVPAYVPTPIHPIFGGATHSAFGLKATASAFGAPASSQPAFGGSTAVFFGAATSSGFGATTQTASSGSSSSVFGSTTPSPFTFGGSAAPAGSGSFGINVATPGSSTTTGAFSFGAGQSGSTATSTPFAGGLGQNALGTTGQSTPFAFNVSSTTESKPVFGGTATPTFGLNTPAPGVGTSGSSLSFGASSAPAQGFVGVAPFGSAALSFSIGAGSKTPGARQRLQARRQHTRKK

SEQ ID NO: 848935 - protein, 984 aa, Homo sapiens; identical to SEQ ID NO: 848934

SEQ ID NO: 848936 - protein, 1037 aa, Homo sapiens
MVQDCGTLPNRFVITPRRRYPIHQAQYSCLGVLPTVCWNGYHKKAVLSPRNSRMVCSPVTVRIAPPDRRFSRSAIPEQIISSTLSSPSSNAPDPCAKETVLSALKEKEKKRTVEEEDQIFLDGQENKRRRHDSSGSGHSAFEPLVANGVPASFVPKPGSLKRGLNSQSSDDHLNKRSRSSSMSSLTGAYASGIPSSSRNAITSSYSSTRGISQLWKRNGPSSSPFSSPASSRSQTPERPAKKIREEELCHHSSSSTPLAADRESQGEKAADTTPRKKQNSNSQSTPGSSGQRKRKVQLLPSRRGEQLTLPPPPQLGYSITAEDLDLEKKASLQWFNQALEDKSDAASNSVTETPPITQPSFTFTLPAAAPASPPTSLLAPSTNPLLESLKKMQTPPSLPPCPESAGAATTEALSPPKTPSLLPPLGLSQSGPPGLLPSPSFDSKPPTTLLGLIPAPSMVPATDTKAPPTLQAETATKPQATSAPSPAPKQSFLFGTQNTSPSSPAAPAASSAPPMFKPIFTAPPKSEKEGPTPPGPSVTATAPSSSSLPTTTSTTAPTFQPVFSSMGPPASVPLPAPFFKQTTTPATAPTTTAPLFTGLASATSAVAPITSASPSTDSASKPAFGFGINSVSSSSVSTTTSTATAASQPFLFGAPQASAASFTPAMGSIFQFGKPPALPTTTTVTTFSQSLHTAVPTATSSSAADFSGFGSTLATSAPATSSQPTLTFSNTSTPTFNIPFGSSAKSPLPSYPGANPQPAFGAAEGQPPGAAKPALAPSFGSSFTFGNSAAPAAAPTPAPPSMIKVVPAYVPTPIHPIFGGATHSAFGLKATASAFGAPASSQPAFGGSTAVFFGAATSSGFGATTQTASSGSSSSVFGSTTPSPFTFGGSAAPAGSGSFGINVATPGSSTTTGAFSFGAGQSGSTATSTPFAGGLGQNALGTTGQSTPFAFNVSSTTESKPVFGGTATPTFGLNTPAPGVGTSGSSLSFGASSAPAQGFVGVAPFGSAALSFSIGAGSKTPGARQRLQARRQHTRKK

SEQ ID NO: 848937 - protein, 1008 aa, Homo sapiens
LGYTPSWSCEGTAQPSCDEPFQHTVGSTPVTVRIAPPDRRFSRSAIPEQIISSTLSSPSSNAPDPCAKETVLSALKEKEKKRTVEEEDQIFLDGQENKRRRHDSSGSGHSAFEPLVANGVPASFVPKPGSLKRGLNSQSSDDHLNKRSRSSSMSSLTGAYASGIPSSSRNAITSSYSSTRGISQLWKRNGPSSSPFSSPASSRSQTPERPAKKIREEELCHHSSSSTPLAADRESQGEKAADTTPRKKQNSNSQSTPGSSGQRKRKVQLLPSRRGEQLTLPPPPQLGYSITAEDLDLEKKASLQWFNQALEDKSDAASNSVTETPPITQPSFTFTLPAAAPASPPTSLLAPSTNPLLESLKKMQTPPSLPPCPESAGAATTEALSPPKTPSLLPPLGLSQSGPPGLLPSPSFDSKPPTTLLGLIPAPSMVPATDTKAPPTLQAETATKPQATSAPSPAPKQSFLFGTQNTSPSSPAAPAASSAPPMFKPIFTAPPKSEKEGPTPPGPSVTATAPSSSSLPTTTSTTAPTFQPVFSSMGPPASVPLPAPFFKQTTTPATAPTTTAPLFTGLASATSAVAPITSASPSTDSASKPAFGFGINSVSSSSVSTTTSTATAASQPFLFGAPQASAASFTPAMGSIFQFGKPPALPTTTTVTTFSQSLHTAVPTATSSSAADFSGFGSTLATSAPATSSQPTLTFSNTSTPTFNIPFGSSAKSPLPSYPGANPQPAFGAAEGQPPGAAKPALAPSFGSSFTFGNSAAPAAAPTPAPPSMIKVVPAYVPTPIHPIFGGATHSAFGLKATASAFGAPASSQPAFGGSTAVFFGAATSSGFGATTQTASSGSSSSVFGSTTPSPFTFGGSAAPAGSGSFGINVATPGSSTTTGAFSFGAGQSGSTATSTPFAGGLGQNALGTTGQSTPFAFNVSSTTESKPVFGGTATPTFGLNTPAPGVGTSGSSLSFGASSAPAQGFVGVAPFGSAALSFSIGAGSKTPGARQRLQARRQHTRKK

SEQ ID NO: 848938 - protein, 646 aa, Homo sapiens
MQTPPSLPPCPESAGAATTEALSPPKTPSLLPPLGLSQSGPPGLLPSPSFDSKPPTTLLGLIPAPSMVPATDTKAPPTLQAETATKPQATSAPSPAPKQSFLFGTQNTSPSSPAAPAASSAPPMFKPIFTAPPKSEKEGPTPPGPSVTATAPSSSSLPTTTSTTAPTFQPVFSSMGPPASVPLPAPFFKQTTTPATAPTTTAPLFTGLASATSAVAPITSASPSTDSASKPAFGFGINSVSSSSVSTTTSTATAASQPFLFGAPQASAASFTPAMGSIFQFGKPPALPTTTTVTTFSQSLHTAVPTATSSSAADFSGFGSTLATSAPATSSQPTLTFSNTSTPTFNIPFGSSAKSPLPSYPGANPQPAFGAAEGQPPGAAKPALAPSFGSSFTFGNSAAPAAAPTPAPPSMIKVVPAYVPTPIHPIFGGATHSAFGLKATASAFGAPASSQPAFGGSTAVFFGAATSSGFGATTQTASSGSSSSVFGSTTPSPFTFGGSAAPAGSGSFGINVATPGSSTTTGAFSFGAGQSGSTATSTPFAGGLGQNALGTTGQSTPFAFNVSSTTESKPVFGGTATPTFGLNTPAPGVGTSGSSLSFGASSAPAQGFVGVAPFGSAALSFSIGAGSKTPGARQRLQARRQHTRKK

SEQ ID NO: 848939 - protein, 984 aa, Homo sapiens; identical to SEQ ID NO: 848934

SEQ ID NO: 848940 - protein, 984 aa, Homo sapiens; identical to SEQ ID NO: 848934

SEQ ID NO: 848941 - protein, 984 aa, Homo sapiens; identical to SEQ ID NO: 848934

SEQ ID NO: 848942 - protein, 984 aa, Homo sapiens; identical to SEQ ID NO: 848934

SEQ ID NO: 848943 - protein, 984 aa, Homo sapiens; identical to SEQ ID NO: 848934

SEQ ID NO: 848944 - protein, 112 aa, Homo sapiens
MCKAVCKHRLQLFALFFLFGAGLGVRSGADALACEAEVGISTRSITATKKPPLSVVLGEARRQCSAPGNVLRPRWGRAGRAGASLQEKQPQCWVREQFTPSPPPRPWRTPCT

SEQ ID NO: 848945 - protein, 84 aa, Homo sapiens
KRMDRAEHKGELQTDKMMRAAAKDVHRLRGQSCKEPPEVQSFREKMAFFTRPRMNIPALSADDVYSPEKYFLCSTDQAVNLDCG

SEQ ID NO: 848946 - protein, 104 aa, Homo sapiens
MGVGWQRSERSCPGWKFASHGKPGKNGFLGLALRLSGSLHFRRLLPYSVSDAAGKALLRHPVFYYWPGLPEIWAPRVRVSGSSCPDEVLLNLSRIGGPFIFHWC

SEQ ID NO: 848947 - protein, 984 aa, Homo sapiens; identical to SEQ ID NO: 848934

SEQ ID NO: 848948 - protein, 984 aa, Homo sapiens; identical to SEQ ID NO: 848934

SEQ ID NO: 848949 - protein, 984 aa, Homo sapiens; identical to SEQ ID NO: 848934

SEQ ID NO: 848950 - protein, 646 aa, Homo sapiens; identical to SEQ ID NO: 848938

SEQ ID NO: 848951 - protein, 984 aa, Homo sapiens; identical to SEQ ID NO: 848934

SEQ ID NO: 848952 - protein, 984 aa, Homo sapiens; identical to SEQ ID NO: 848934

SEQ ID NO: 848953 - protein, 984 aa, Homo sapiens; identical to SEQ ID NO: 848934

SEQ ID NO: 848954 - protein, 984 aa, Homo sapiens; identical to SEQ ID NO: 848934

SEQ ID NO: 848955 - protein, 105 aa, Homo sapiens
MGAWRGSSSMAGRQLAWQAEHRGRVNRDPRLGPSRAYTFFPFLFLLPTLSCRMRCPARYSGCSCRSVWAGNTSSSGIKGSRRKCFPLRARKSSRLPGKNHSFIIS

SEQ ID NO: 848956 - protein, 57 aa, Homo sapiens
MGYQSQEKENDTNQTDEEVFHLLGLGYLDSPIPGDTAENKASKLPVPLGFTSWDWAI

SEQ ID NO: 848957 - protein, 67 aa, Homo sapiens
EGVRNYLILQPRSLSRLNCSFFPDREEELCHHSSSSTPLAADRESQGEKGRLLSQEEGLLLVVEVFV

SEQ ID NO: 848958 - protein, 109 aa, Homo sapiens
MEQQIRESRISLEKDIETLSELLARLGSLDTHQAPAQALNETQWALERLRLQLGSPGSLQRKLSLLEQESQQQELQIQGFESDLAEIRADKQNLEAILHSLPENCASWQ

SEQ ID NO: 848959 - protein, 1587 aa, Homo sapiens
MAAAALLLGLALLAPRAAGAGMGACYDGAGRPQRCLPVFENAAFGRLAQASHTCGSPPEDFCPHVGAAGAGAHCQRCDAADPQRHHNASYLTDFHSQDESTWWQSPSMAFGVQYPTSVNITLRLGKAYEITYVRLKFHTSRPESFAIYKRSRADGPWEPYQFYSASCQKTYGRPEGQYLRPGEDERVAFCTSEFSDISPLSGGNVAFSTLEGRPSAYNFEESPGLQEWVTSTELLISLDRLNTFGDDIFKDPKVLQSYYYAVSDFSVGGRCKCNGHASECGPDVAGQLACRCQHNTTGTDCERCLPFFQDRPWARGTAEAAHECLPCNCSGRSEECTFDRELFRSTGHGGRCHHCRDHTAGPHCERCQENFYHWDPRMPCQPCDCQSAGSLHLQCDDTGTCACKPTVTGWKCDRCLPGFHSLSEGGCRPCTCNPAGSLDTCDPRSGRCPCKENVEGNLCDRCRPGTFNLQPHNPAGCSSCFCYGHSKVCASTAQFQVHHILSDFHQGAEGWWARSVGGSEHSPQWSPNGVLLSPEDEEELTAPGKFLGDQRFSYGQPLILTFRVPPGDSPLPVQLRLEGTGLALSLRHSSLSGPQDAGHPREVELRFHLQETSEDVAPPLPPFHFQRLLANLTSLRLRVSPGPSPAGPVFLTEVRLTSARPGLSPPASWVEICSCPTGYTGQFCESCAPGYKREMPQGGPYASCVPCTCNQHGTCDPNTGICVCSHHTEGPSCERCLPGFYGNPFAGQADDCQPCPCPGQSACTTIPESREVVCTHCPPGQRGRRCEVCDDGFFGDPLGLFGHPQPCHQCQCSGNVDPNAVGNCDPLSGHCLRCLHNTTGDHCEHCQEGFYGSALAPRPADKCMPCSCHPQGSVSEQMPCDPVTGQCSCLPHVTARDCSRCYPGFFDLQPGRGCRSCKCHPLGSQEDQCHPKTGQCTCRPGVTGQACDRCQLGFFGFSIKGCRACRCSPLGAASAQCHENGTCVCRPGFEGYKCDRCHDNFFLTADGTHCQQCPSCYALVKEEAAKLKARLTLTEGWLQGSDCGSPWGPLDILLGEAPRGDVYQGHHLLPGAREAFLEQMMGLEGAVKAAREQLQRLNKGARCAQAGSQKTCTQLADLEAVLESSEEEILHAAAILASLEIPQEGPSQPTKWSHLATEARALARSHRDTATKIAATAWRALLASNTSYALLWNLLEGRVALETQRDLEDRYQEVQAAQKALRTAVAEVLPEAESVLATVQQVGADTAPYLALLASPGALPQKSRAEDLGLKAKALEKTVASWQHMATEAARTLQTAAQATLRQTEPLTKARSRLTATFASQLHQEARAALTQASSSVQAATVTVMGARTLLADLEGMKLQFPRPKDQAALQRKADSVSDRLLADTRKKTKQAERMLGNAAPLSSSAKKKGREAEVLAKDSAKLAKALLRERKQAHRRASRLTSQTQATLQQASQQVLASEARRQELEEAERVGAGLSEMEQQIRESRISLEKDIETLSELLARLGSLDTHQAPAQALNETQWALERLRLQLGSPGSLQRKLSLLEQESQQQELQIQGFESDLAEIRADKQNLEAILHSLPENCASWQ

SEQ ID NO: 848960 - protein, 1546 aa, Homo sapiens
MAAAALLLGLALLAPRAAGAGMGACYDGAGRPQRCLPVFENAAFGRLAQASHTCGSPPEDFCPHVGAAGAGAHCQRCDAADPQRHHNASYLTDFHSQDESTWWQSPSMAFGVQYPTSVNITLRLGKAYEITYVRLKFHTSRPESFAIYKRSRADGPWEPYQFYSASCQKTYGRPEGQYLRPGEDERVAFCTSEFSDISPLSGGNVAFSTLEGRPSAYNFEESPGLQEWVTSTELLISLDRLNTFGDDIFKDPKVLQSYYYAVSDFSVGGRCKCNGHASECGPDVAGQLACRCQHNTTGTDCERCLPFFQDRPWARGTAEAAHECLPCNCSGRSEECTFDRELFRSTGHGGRCHHCRDHTAGPHCERCQENFYHWDPRMPCQPCDCQSAGSLHLQCDDTGTCACKPTVTGWKCDRCLPGFHSLSEGGCRPCTCNPAGSLDTCDPRSGRCPCKENVEGNLCDRCRPGTFNLQPHNPAGCSSCFCYGHSKVCASTAQFQVHHILSDFHQGAEGWWARSVGGSEHSPQWSPNGVLLSPEDEEELTAPGKFLGDQRFSYGQPLILTFRVPPGDSPLPVQLRLEGTGLALSLRHSSLSGPQDAGHPREVELRFHLQETSEDVAPPLPPFHFQRLLANLTSLRLRVSPGPSPAGPVFLTEVRLTSARPGLSPPASWVEICSCPTGYTGQFCESCAPGYKREMPQGGPYASCVPCTCNQHGTCDPNTGICVCSHHTEGPSCERCLPGFYGNPFAGQADDCQPCPCPGQSACTTIPESREVVCTHCPPGQRGRRCEVCDDGFFGDPLGLFGHPQPCHQCQCSGNVDPNAVGNCDPLSGHCLRCLHNTTGDHCEHCQEGFYGSALAPRPADKCMPCSCHPQGSVSEQMPCDPVTGQCSCLPHVTARDCSRCYPGFFDLQPGRGCRSCKCHPLGSQEDQCHPKTGQCTCRPGVTGQACDRCQLGFFGFSIKGCRACRCSPLGAASAQCHENGTCVCRPGFEGYKCDRCHDNFFLTADGTHCQQCPSCYALVKEEAAKLKARLTLTEGWLQGSDCGSPWGPLDILLGEAPRGDVYQGHHLLPGAREAFLEQMMGLEGAVKAAREQLQRLNKGARCAQAGSQKTCTQLADLEAVLESSEEEILHAAAILASLEIPQEGPSQPTKWSHLATEARALARSHRDTATKIAATAWRALLASNTSYALLWNLLEGRVALETQRDLEDRYQEVQAAQKALRTAVAEVLPEAESVLATVQQVGADTAPYLALLASPGALPQKSRAEDLGLKAKALEKTVASWQHMATEAARTLQTAAQATLRQTEPLTKLHQEARAALTQASSSVQAATVTVMGARTLLADLEARKKTKQAERMLGNAAPLSSSAKKKGREAEVLAKDSAKLAKALLRERKQAHRRASRLTSQTQATLQQASQQVLASEARRQELEEAERVGAGLSEMEQQIRESRISLEKDIETLSELLARLGSLDTHQAPAQALNETQWALERLRLQLGSPGSLQRKLSLLEQESQQQELQIQGFESDLAEIRADKQNLEAILHSLPENCASWQ

SEQ ID NO: 848961 - protein, 1575 aa, Homo sapiens
MAAAALLLGLALLAPRAAGAGMGACYDGAGRPQRCLPVFENAAFGRLAQASHTCGSPPEDFCPHVGAAGAGAHCQRCDAADPQRHHNASYLTDFHSQDESTWWQSPSMAFGVQYPTSVNITLRLGKAYEITYVRLKFHTSRPESFAIYKRSRADGPWEPYQFYSASCQKTYGRPEGQYLRPGEDERVAFCTSEFSDISPLSGGNVAFSTLEGRPSAYNFEESPGLQEWVTSTELLISLDRLNTFGDDIFKDPKVLQSYYYAVSDFSVGGRCKCNGHASECGPDVAGQLACRCQHNTTGTDCERCLPFFQDRPWARGTAEAAHECLPCNCSGRSEECTFDRELFRSTGHGGRCHHCRDHTAGPHCERCQENFYHWDPRMPCQPCDCQSAGSLHLQCDDTGTCACKPTVTGWKCDRCLPGFHSLSEGGCRPCTCNPAGSLDTCDPRSGRCPCKENVEGNLCDRCRPGTFNLQPHNPAGCSSCFCYGHSKVCASTAQFQVHHILSDFHQGAEGWWARSVGGSEHSPQWSPNGVLLSPEDEEELTAPGKFLGDQRFSYGQPLILTFRVPPGDSPLPVQLRLEGTGLALSLRHSSLSGPQDAGHPREVELRFHLQETSEDVAPPLPPFHFQRLLANLTSLRLRVSPGPSPAGPVFLTEVRLTSARPGLSPPASWVEICSCPTGYTGQFCESCAPGYKREMPQGGPYASCVPCTCNQHGTCDPNTGICVCSHHTEGPSCERCLPGFYGNPFAGQADDCQPCPCPGQSACTTIPESREVVCTHCPPGQRGRRCEVCDDGFFGDPLGLFGHPQPCHQCQCSGNVDPNAVGNCDPLSGHCLRCLHNTTGDHCEHCQEGFYGSALAPRPADKCMPCSCHPQGSVSEQMPCDPVTGQCSCLPHVTARDCSRCYPGFFDLQPGRGCRSCKCHPLGSQEDQCHPKTGQCTCRPGVTGQACDRCQLGFFGFSIKGCRACRCSPLGAASAQCHENGTCVCRPGFEGYKCDRCHDNFFLTADGTHCQQCPSCYALVKEEAAKLKARLTLTEGWLQGSDCGSPWGPLDILLGEAPRGDVYQGHHLLPGAREAFLEQMMGLEGAVKAAREQLQRLNKGARCAQAGSQKTCTQLADLEAVLESSEEEILHAAAILASLEIPQEGPSQPTKWSHLATEARALARSHRDTATKIAATAWRALLASNTSYALLWNLLEGRVALETQRDLEDRYQEVQAAQKALRTAVAEVLPEAESVLATVQQVGADTAPYLALLASPGALPQKSRAEDLGLKAKALEKTVASWQHMATEAARTLQTAAQATLRQTEPLTKLHQEARAALTQASSSVQAATVTVMGARTLLADLEGMKLQFPRPKDQAALQRKADSVSDRLLADTRKKTKQAERMLGNAAPLSSSAKKKGREAEVLAKDSAKLAKALLRERKQAHRRASRLTSQTQATLQQASQQVLASEARRQELEEAERVGAGLSEMEQQIRESRISLEKDIETLSELLARLGSLDTHQAPAQALNETQWALERLRLQLGSPGSLQRKLSLLEQESQQQELQIQGFESDLAEIRADKQNLEAILHSLPENCASWQ

SEQ ID NO: 848962 - protein, 1575 aa, Homo sapiens; identical to SEQ ID NO: 848961

SEQ ID NO: 848963 - protein, 133 aa, Homo sapiens
MRKAEGEKRKEEELVTKGGPRSVASRASEGGGPHQNRGSLCLGRCKGLVNNLTAVIYTPQPRGLRGQSKEAEAPSALPTWGGLGKWRVLHSRCRGFCLPGILPEVWQDNADREALPAKGPEGDFALEKTWPAS

SEQ ID NO: 848964 - protein, 1587 aa, Homo sapiens; identical to SEQ ID NO: 848959

SEQ ID NO: 848965 - protein, 413 aa, Homo sapiens
MRKAEGEIPQEGPSQPTKWSHLATEARALARSHRDTATKIAATAWRALLASNTSYALLWNLLEGRVALETQRDLEDRYQEVQAAQKALRTAVAEVLPEAESVLATVQQVGADTAPYLALLASPGALPQKSRAEDLGLKAKALEKTVASWQHMATEAARTLQTAAQATLRQTEPLTKLHQEARAALTQASSSVQAATVTVMGARTLLADLEARKKTKQAERMLGNAAPLSSSAKKKGREAEVLAKDSAKLAKALLRERKQAHRRASRLTSQTQATLQQASQQVLASEARRQELEEAERVGAGLSEMEQQIRESRISLEKDIETLSELLARLGSLDTHQAPAQALNETQWALERLRLQLGSPGSLQRKLSLLEQESQQQELQIQGFESDLAEIRADKQNLEAILHSLPENCASWQ

SEQ ID NO: 848966 - protein, 1480 aa, Homo sapiens
MAAAALLLGLALLAPRAAGAGMGACYDGAGRPQRCLPVFENAAFGRLAQASHTCGSPPEDFCPHVGAAGAGAHCQRCDAADPQRHHNASYLTDFHSQDESTWWQSPSMAFGVQYPTSVNITLRLGKAYEITYVRLKFHTSRPESFAIYKRSRADGPWEPYQFYSASCQKTYGRPEGQYLRPGEDERVAFCTSEFSDISPLSGGNVAFSTLEGRPSAYNFEESPGLQEWVTSTELLISLDRLNTFGDDIFKDPKVLQSYYYAVSDFSVGGRCKCNGHASECGPDVAGQLACRCQHNTTGTDCERCLPFFQDRPWARGTAEAAHECLPCNCSGRSEECTFDRELFRSTGHGGRCHHCRDHTAGPHCERCQENFYHWDPRMPCQPCDCQSAGSLHLQCDDTGTCACKPTVTGWKCDRCLPGFHSLSEGGCRPCTCNPAGSLDTCDPRSGRCPCKENVEGNLCDRCRPGTFNLQPHNPAGCSSCFCYGHSKVCASTAQFQVHHILSDFHQGAEGWWARSVGGSEHSPQWSPNGVLLSPEDEEELTAPGKFLGDQRFSYGQPLILTFRVPPGDSPLPVQLRLEGTGLALSLRHSSLSGPQDAGHPREVELRFHLQETSEDVAPPLPPFHFQRLLANLTSLRLRVSPGPSPAGPVFLTEVRLTSARPGLSPPASWVEICSCPTGYTGQFCESCAPGYKREMPQGGPYASCVPCTCNQHGTCDPNTGICVCSHHTEGPSCERCLPGFYGNPFAGQADDCQPCPCPGQSACTTIPESREVVCTHCPPGQRGRRCEVCDDGFFGDPLGLFGHPQPCHQCQCSGNVDPNAVGNCDPLSGHCLRCLHNTTGDHCEHCQEGFYGSALAPRPADKCMPCSCHPQGSVSEQMPCDPVTGQCSCLPHVTARDCSRCYPGFFDLQPGRGCRSCKCHPLGSQEDQCHPKTGQCTCRPGVTGQACDRCQLGFFGFSIKGCRACRCSPLGAASAQCHENGTCVCRPGFEGYKCDRCHDNFFLTADGTHCQQCPSCYALVKEEAAKLKARLTLTEGWLQGSDCGSPWGPLDILLGEAPRGDVYQGHHLLPGAREAFLEQMMGLEGAVKAAREQLQRLNKGARCAQAGSQKTCTQLADLEAVLESSEEEILHAAAILASLEIPQEGPSQPTKWSHLATEARALARSHRDTATKIAATAWRALLASNTSYALLWNLLEGRVALETQRDLEDRYQEVQAAQKALRTAVAEVLPEAESVLATVQQVGADTAPYLALLASPGALPQKSRAEDLGLKAKALEKTVASWQHMATEAARTLQTAAQATLRQTEPLTKLHQEARAALTQASSSVQAATVTVMGARTLLADLEGMKLQFPRPKDQAALQRKADSVSDRLLADKLCQLAVRAAQIPGTHSPTCCLHDPGGAHYPTGVPIQTFPGAGCCELDPVWIVTLPADSVCGFFPASRTECAYPVHLDMSAHSHPCTCINGHTPVSITYTREGACLCV

SEQ ID NO: 848967 - protein, 80 aa, Homo sapiens
HTDMIDEDGYMRNLKLNYEVTHSFLHDRLYYLNGIECAASAMEMSAIAAHNAALLAYHRWNGHTDMIDQDGLYEKLKTEL

SEQ ID NO: 848968 - protein, 469 aa, Homo sapiens
SGGRTAGLLRPAAELVEAMGRVVAELVSSLLGLWLLLCSCGCPEGAELRAPPDKIAIIGAGIGGTSAAYYLRQKFGKDVKIDLFEREEVGGRLATMMVQGQEYEAGGSVIHPLNLHMKRFVKDLGLSAVQASGGLLGIYNGETLVFEESNWFIINVIKLVWRYGFQSLRMHMWVEDVLDKFMRIYRYQSHDYAFSSVEKLLHALGGDDFLGMLNRTLLETLQKAGFSEKFLNEMIAPVMRVNYGQSTDINAFVGAVSLSCSDSGLWAVEGGNKLVCSGLLQASKSNLISGSVMYIEEKTKTKYTGNPTKMYEVVYQIGTETRSDFYDIVLVATPLNRKMSNITFLNFDPPIEEFHQYYQHIVTTLVKGELNTSIFSSRPIDKFGLNTVLTTDNSDLFINSIGIVPSVREKEDPEPSTDGTYVWKIFSQETLTKAQILKLFLSYDYAVKKPWLAYPHYKPPEKCPSIISG

SEQ ID NO: 848969 - protein, 523 aa, Homo sapiens
SGGRTAGLLRPAAELVEAMGRVVAELVSSLLGLWLLLCSCGCPEGAELRAPPDKIAIIGAGIGGTSAAYYLRQKFGKDVKIDLFEREEVGGRLATMMVQGQEYEAGGSVIHPLNLHMKRFVKDLGLSAVQASGGLLGIYNGETLVFEESNWFIINVIKLVWRYGFQSLRMHMWVEDVLDKFMRIYRYQSHDYAFSSVEKLLHALGGDDFLGMLNRTLLETLQKAGFSEKFLNEMIAPVMRVNYGQSTDINAFVGAVSLSCSDSGLWAVEGGNKLVCSGLLQASKSNLISGSVMYIEEKTKTKYTGNPTKMYEVVYQIGTETRSDFYDIVLVATPLNRKMSNITFLNFDPPIEEFHQYYQHIVTTLVKGELNTSIFSSRPIDKFGLNTVLTTDNSDLFINSIGIVPSVREKEDPEPSTDGTYVWKIFSQETLTKAQILKLFLSYDYAVKKPWLAYPHYKPPEKCPSIILHDRLYYLNGIECAASAMEMSAIAAHNAALLAYHRWNGHTDMIDQDGLYEKLKTEL

SEQ ID NO: 848970 - protein, 523 aa, Homo sapiens; identical to SEQ ID NO: 848969

SEQ ID NO: 848971 - protein, 109 aa, Homo sapiens
CAISRSMRSSGADAGRCLVTARAPGSVPAPREGSAGSRGPGAPVPGTCLGTWQRAWPWAWRRRRPGSAGRGRRVGVVLDHRRRVHCSRRELSSDPAAPRASQEVHLLLP

SEQ ID NO: 848972 - protein, 167 aa, Homo sapiens
MVISGEICEICLSVPPEEILCEVCRKTFKRKDYLKQHMKTHAPERDVCRCPREGCGRTYTTVFNLQSHILSFHEESRPFVCEHAGCGKTFAMKQSLTRHAVVHDPDKKKMKLKVKKSREKRSLASHLSGYIPPKRKQGQGLSLCQNGESPNCVEDKMLSTVAVLTLG

SEQ ID NO: 848973 - protein, 251 aa, Homo sapiens
RLGSEAGCWGAVGRARRFPARVSARGSAPGPGLGGAGALDPPAVVAESVSSLTIADAFIAAGESSAPTPPRPALPRRFICSFPDCSANYSKAWKLDAHLCKHTGERPFVCDYEGCGKAFIRDYHLSRHILTHTGEKPFVCAANGCDQKFNTKSNLKKHFERKHENQQKQYICSFEDCKKTFKKHQQLKIHQCQHTNEPLFKCTQEGCGKHFASPSKLKRHAKAHEGYVCQNRMFLCGKNMDGTSETCERNP

SEQ ID NO: 848974 - protein, 109 aa, Homo sapiens; identical to SEQ ID NO: 848971

SEQ ID NO: 848975 - protein, 109 aa, Homo sapiens; identical to SEQ ID NO: 848971

SEQ ID NO: 848976 - protein, 109 aa, Homo sapiens; identical to SEQ ID NO: 848971

SEQ ID NO: 848977 - protein, 109 aa, Homo sapiens; identical to SEQ ID NO: 848971

SEQ ID NO: 848978 - protein, 109 aa, Homo sapiens; identical to SEQ ID NO: 848971

SEQ ID NO: 848979 - protein, 184 aa, Homo sapiens
MPRPTRAMYVKTGCSFVAKTWTELLKHVRETHKEEILCEVCRKTFKRKDYLKQHMKTHAPERDVCRCPREGCGRTYTTVFNLQSHILSFHEESRPFVCEHAGCGKTFAMKQSLTRHAVVHDPDKKKMKLKVKKSREKRSLASHLSGYIPPKRKQGQGLSLCQNGESPNCVEDKMLSTVAVLTLG

SEQ ID NO: 848980 - protein, 115 aa, Homo sapiens
MACCAANGCDQKFNTKSNLKKHFERKHENQQKQYICSFEDCKKTFKKHQQLKIHQCQHTNEPLFKCTQEGCGKHFASPSKLKRHAKAHEGYVCQNRMFLCGKNMDGTSETCERNP

SEQ ID NO: 848981 - protein, 109 aa, Homo sapiens; identical to SEQ ID NO: 848971

SEQ ID NO: 848982 - protein, 109 aa, Homo sapiens; identical to SEQ ID NO: 848971

SEQ ID NO: 848983 - protein, 228 aa, Homo sapiens
AARPLGGHHLGGGPFGAGAGALDPPAVVAESVSSLTIADAFIAAGESSAPTPPRPALPRRFICSFPDCSANYSKAWKLDAHLCKHTGERPFVCDYEGCGKAFIRDYHLSRHILTHTGEKPFVCAANGCDQKFNTKSNLKKHFERKHENQQKQYIQSLTRHAVVHDPDKKKMKLKVKKSREKRSLASHLSGYIPPKRKQGQGLSLCQNGESPNCVEDKMLSTVAVLTLG

SEQ ID NO: 848984 - protein, 109 aa, Homo sapiens; identical to SEQ ID NO: 848971

SEQ ID NO: 848985 - protein, 109 aa, Homo sapiens; identical to SEQ ID NO: 848971

SEQ ID NO: 848986 - protein, 109 aa, Homo sapiens; identical to SEQ ID NO: 848971

SEQ ID NO: 848987 - protein, 109 aa, Homo sapiens; identical to SEQ ID NO: 848971

SEQ ID NO: 848988 - protein, 109 aa, Homo sapiens; identical to SEQ ID NO: 848971

SEQ ID NO: 848989 - protein, 234 aa, Homo sapiens
AARPLGGHHLGGGPFGAGAGALDPPAVVAESVSSLTIADAFIAAGESSAPTPPRPALPRRFICSFPDCSANYSKAWKLDAHLCKHTGERPFVCDYEGCGKAFIRDYHLSRHILTHTGEKPFVCAANGCDQKFNTKSNLKKHFERKHENQQKQYICSFEDCKKTFKKHQQLKIHQCQHTNEPLFKCTQEGCGKHFASPSKLKRHAKAHEGYVCQNRMFLCGKNMDGTSETCERNP

SEQ ID NO: 848990 - protein, 109 aa, Homo sapiens; identical to SEQ ID NO: 848971

SEQ ID NO: 848991 - protein, 109 aa, Homo sapiens; identical to SEQ ID NO: 848971

SEQ ID NO: 848992 - protein, 109 aa, Homo sapiens; identical to SEQ ID NO: 848971

SEQ ID NO: 848993 - protein, 116 aa, Homo sapiens
LSAKCLNLLNAIIMIKVLIWKQTLCKLVYWETIPTETVLLFQMLYDSSNLFEIKQNFTVTKWVKAEILYSLQNCFILRILLRTVHFVLTFHKTNEPLQFNSAVLKTVRRPLRNISS

SEQ ID NO: 848994 - protein, 282 aa, Homo sapiens
INAECPLRAGELSNHLNEIGFIPDLYAIPWFLTMFTHVFPLHKIFHLWDTLLLGNSSFPFCIGVAILQQLRDRLLANGFNECILLFSDLPEIDIERCVRESINLFCWTPKSATYRQHAQPPKPSSDSSGGRSSAPYFSAECPDPPKTDLSRESIPLNDLKSEVSPRISAEDLIDLCELTVTGHFKTPSKKTKSSKPKLLVVDIRNSEETYSWPFRSITFINAATQRSYPGPNVVPKSRSWPRRCNHGWACGEIQLVKGKKQAHTIKKGAVARSHTIVPHSYS

SEQ ID NO: 848995 - protein, 830 aa, Homo sapiens
MFPLKDAEMGAFTFFASALPHDVCGSNGLPLTPNSIKILGRFQILKTITHPRLCQYVDISRGKHERLVVVAEHCERSLEDLLRERKPVRYPSYLAPEVIAQGIFKTTDHMPSKKPLPSGPKSDVWSLGIILFELCVGRKLFQSLDISERLKFLLTLDCVDDTLIVLAEEHGCLDIIKELPETVIDLLNKCLTFHPSKRPTPDELMKDKVFSEVSPLYTPFTKPASLFSSSLRCADLTLPEDISQLCKDINNDYLAERSIEEVYYLWCLAGGDLEKELVNKEIIRSKPPICTLPNFLFEDGESFGQGRDRSSLLDDTTVTLSLCQLRNRLKDVGGEAFYPLLEDDQSNLPHSNSNNELSAAATLPLIIREKDTEYQLNRIILFDRLLKAYPYKKNQIWKEARVDIPPLMRGLTWAALLGVEGAIHAKYDAIDKDTPIPTDRQIEVDIPRCHQYDELLSSPEGHAKFRRVLKAWVVSHPDLVYWQGLDSLCAPFLYLNFNNEALAYACMSAFIPKYLYNFFLKDNSHVIQEYLTVFSQMIAFHDPELSNHLNEIGFIPDLYAIPWFLTMFTHVFPLHKIFHLWDTLLLGNSSFPFCIGVAILQQLRDRLLANGFNECILLFSDLPEIDIERCVRESINLFCWTPKSATYRQHAQPPKPSSDSSGGRSSAPYFSAECPDPPKTDLSRESIPLNDLKSEVSPRISAEDLIDLCELTVTGHFKTPSKKTKSSKPKLLVVDIRNSEDFIRGHISGSINIPFSAAFTAEGELTQGPYTAMLQNFKGKVIVIVGHVAKHTAEFAAHLVKMKYPRICILDGGINKIKPTGLLTIPSPQI

SEQ ID NO: 848996 - protein, 423 aa, Homo sapiens [sequence omitted]

SEQ ID NO: 848997 - protein, 319 aa, Homo sapiens
LLANGFNECILLFSDLPEYLTVFSQMIAFHDPELSNHLNEIGFIPDLYAIPWFLTMFTHVFPLHKIFHLWDTLLLGNSSFPFCIGVAILQQLRDRLLANGFNECILLFSDLPEIDIERCVRESINLFCWTPKSATYRQHAQPPKPSSDSSGGRSSAPYFSAECPDPPKTDLSRESIPLNDLKSEVSPRISAEDLIDLCELTVTGHFKTPSKKTKSSKPKLLVVDIRNSEDFIRGHISGSINIPFSAAFTAEGELTQGPYTAMLQNFKGKVIVIVGHVAKHTAEFAAHLVKMKYPRICILDGGINKIKPTGLLTIPSPQI

SEQ ID NO: 848998 - protein, 761 aa, Homo sapiens
MFPLKDAEMGAFTFFASALPHDVCGSNGLPLTPNSIKILGRFQILKTITHPRLCQYVDISRGKHERLVVVAEHCERSLEDLLRERKPVRYPSYLAPEVIAQGIFKTTDHMPSKKPLPSGPKSDVWSLGIILFELCVGRKLFQSLDISERLKFLLTLDCVDDTLIVLAEEHGCLDIIKELPETVIDLLNKCLTFHPSKRPTPDELMKDKVFSEVSPLYTPFTKPASLFSSSLRCADLTLPEDISQLCKDINNDYLAERSIEEVYYLWCLAGGDLEKELVNKEIIRSKPPICTLPNFLFEDGESFGQGRDRSSLLDDTTVTLSLCQLRNRLKDVGGEAFYPLLEDDQSNLPHSNSNNELSAAATLPLIIREKDTEYQLNRIILFDRLLKAYPYKKNQIWKEARVDIPPLMRGLTWAALLGVEGAIHAKYDAIDKDTPIPTDRQIEVDIPRCHQYDELLSSPEGHAKFRRVLKAWVVSHPDLVYWQGLDSLCAPFLYLNFNNEALAYACMSAFIPKYLYNFFLKDNSHVIQEYLTVFSQMIAFHDPELSNHLNEIGFIPDLYAIPWFLTMFTHVFPLHKIFHLWDTLLLGNSSFPFCIGVAILQQLRDRLLANGFNECILLFSDLPEIDIERCVRESINLFCWTPKSATYRQHAQPPKPSSDSSGGRSSAPYFSAECPDPPKTDLSRESIPLNDLKSEVSPRISAEDLIDLCELTVTGHFKTPSKKTKSSKPKLLVVDIRNSEESYIFTTLPHKAQEIQLTRQI

SEQ ID NO: 848999 - protein, 213 aa, Homo sapiens
MFPLKDAEMGAFTFFASALPHDVCGSNGLPLTPNSIKILGRFQILKTITHPRLCQYVDISRGKHERLVVVAEHCERSLEDLLRERKPVRYPSYLAPEVIAQGIFKTTDHMPSKKPLPSGPKSDVWSLGIILFELCVGRKLFQSLDISERLKFLLTLDCVDDTLIVLAEEHGCLDIIKELPETVIDLLNKCLTFHPSKRLILFRDWDYIEILYA

SEQ ID NO: 849000 - protein, 213 aa, Homo sapiens; identical to SEQ ID NO: 848999

SEQ ID NO: 849001 - protein, 152 aa, Homo sapiens [sequence omitted]

SEQ ID NO: 849002 - protein, 830 aa, Homo sapiens; identical to SEQ ID NO: 848995

SEQ ID NO: 849003 - protein, 584 aa, Homo sapiens
MFPLKDAEMGAFTFFASALPHDVCGSNGLPLTPNSIKILGRFQILKTITHPRLCQYVDISRGKHERLVVVAEHCERSLEDLLRERKPVRYPSYLAPEVIAQGIFKTTDHMPSKKPLPSGPKSDVWSLGIILFELCVGRKLFQSLDISERLKFLLTLDCVDDTLIVLAEEHGCLDIIKELPETVIDLLNKCLTFHPSKRPTPDELMKDKVFSEVSPLYTPFTKPASLFSSSLRCADLTLPEDISQLCKDINNDYLAERSIEEVYYLWCLAGGDLEKELVNKEIIRSKPPICTLPNFLFEDGESFGQGRDRSSLLDDTTVTLSLCQLRNRLKDVGGEAFYPLLEDDQSNLPHSNSNNELSAAATLPLIIREKDTEYQLNRIILFDRLLKAYPYKKNQIWKEARVDIPPLMRGLTWAALLGVEGAIHAKYDAIDKDTPIPTDRQIEVDIPRCHQYDELLSSPEGHAKFRRVLKAWVVSHPDLVYWQGLDSLCAPFLYLNFNNEALAYACMSAFIPKYLYNFFLKDNSHVIQEYLTVFSQMIAFHDPELSNHLNEIGFIPDMYFHYTKFSTSGIPYYLGIPLSHSVLE

SEQ ID NO: 849004 - protein, 584 aa, Homo sapiens; identical to SEQ ID NO: 849003

SEQ ID NO: 849005 - protein, 489 aa, Homo sapiens
MKVDRTKLKKTPTEAPADCRALIDKLKVCNDEQLLLELQQIKTWNIGKCELYHWVDLLDRFDGILADAGQTVENMSWMLVCDRPEREQLKMLLLAVLNFTALLIEYSFSRHLYSSIEHLTTLLASSDMQVVLAVLNLLYVFSKRSNYITRLGSDKRTPLLTRLQHLAESWGGKENGFGLAECCRDLHMMKYPPSATTLHFEFYADPGAEVKIEKRTTSNTLHYIHIEQLDKISESPSEIMESLTKMYSIPKDKQMLLFTHIRLAHGFSNHRKRLQAVQARLHAISILVYSNALQESANSILYNGLIEELVDVLQITDKQLMEIKAASLRTLTSIVHLERTPKLSSIIDCTGTASYHGFLPVLVRNCIQAMIDPSMDPYPHQFATALFSFLYHLASYDAGGEALVSCGMMEALLKVIKFLGDEQRPERVKPFMTGAAEQIKHILANFKNYQFFIGENMNPDGMVALLDYREDGVTPYMIFFKDGLEMEKC

SEQ ID NO: 849006 - protein, 172 aa, Homo sapiens
MKVDRTKLKKTPTEAPADCRALIDKLKVCNDEQLLLELQQIKTWNIGKCELYHWVDLLDRFDGILADAGQTVENMSWMLVCDRPEREQLKMLLLAVLNFTALLIEYSFSRHLYSSIEHLTTLLASSDMQVVLAVLNLLYVFSKRSNYITRLGSDKRTPLLTRLQHLAEVSLG

SEQ ID NO: 849007 - protein, 68 aa, Homo sapiens
LPTSLVDPSMDPYPHQFATALFSFLYHLASYDAGGEATPLCTYPRAFARAVSGCLSMLFPVSRGSSDA

SEQ ID NO: 849008 - protein, 489 aa, Homo sapiens; identical to SEQ ID NO: 849005

SEQ ID NO: 849009 - protein, 568 aa, Homo sapiens
SGVSSLQSLRSCTGVLRVAASSPVAGLNETRRTEAAATTAPPPRPPPQLLLVPVPLPPSSGPALLRRRLPPRPAMPLYSVTVKWGKEKFEGVELNTDEPPMVFKAQLFALTGVQPARQKVMVKGGTLKDDDWGNIKIKNGMTLLMMGSADALPEEPSAKTVFVEDMTEEQLASAMELPCGLTNLGNTCYMNATVQCIRSVPELKDALKRYAGALRASGEMASAQYITAALRDLFDSMDKTSSSIPPIILLQFLHMAFPQFAEKGEQGQYLQQDANECWIQMMRVLQQKLEAIEDDSVKETDSSSASAATPSKKKSLIDQFFGVEFETTMKCTESEEEEVTKGKENQLQLSCFINQEVKYLFTGLKLRLQEEITKQSPTLQRNALYIKSSKISRLPAYLTIQMVRFFYKEKESVNAKVLKDVKFPLMLDMYELCTPELQEKMVSFRSKFKDLEDKKVNQQPNTSDKKSSPQKEVKYEPFSFADDIGSNNCGYYDLQAVLTHQGRSSSSGHYVSWVKRKQDEWIKFDDDKVSIVTPEDILRLSGGGDWHIAYVLLYGPRRVEIMEEESEQ

SEQ ID NO: 849010 - protein, 494 aa, Homo sapiens
MPLYSVTVKWGKEKFEGVELNTDEPPMVFKAQLFALTGVQPARQKVMVKGGTLKDDDWGNIKIKNGMTLLMMGSADALPEEPSAKTVFVEDMTEEQLASAMELPCGLTNLGNTCYMNATVQCIRSVPELKDALKRYAGALRASGEMASAQYITAALRDLFDSMDKTSSSIPPIILLQFLHMAFPQFAEKGEQGQYLQQDANECWIQMMRVLQQKLEAIEDDSVKETDSSSASAATPSKKKSLIDQFFGVEFETTMKCTESEEEEVTKGKENQLQLSCFINQEVKYLFTGLKLRLQEEITKQSPTLQRNALYIKSSKISRLPAYLTIQMVRFFYKEKESVNAKVLKDVKFPLMLDMYELCTPELQEKMVSFRSKFKDLEDKKVNQQPNTSDKKSSPQKEVKYEPFSFADDIGSNNCGYYDLQAVLTHQGRSSSSGHYVSWVKRKQDEWIKFDDDKVSIVTPEDILRLSGGGDWHIAYVLLYGPRRVEIMEEESEQ

SEQ ID NO: 849011 - protein, 332 aa, Homo sapiens [sequence omitted]

SEQ ID NO: 849012 - protein, 346 aa, Homo sapiens
MFALSLTLRDLFDSMDKTSSSIPPIILLQFLHMAFPQFAEKGEQGQYLQQDANECWIQMMRVLQQKLEAIEDDSVKETDSSSASAATPSKKKSLIDQFFGVEFETTMKCTESEEEEVTKGKENQLQLSCFINQEVKYLFTGLKLRLQEEITKQSPTLQRNALYIKSSKISRLPAYLTIQMVRFFYKEKESVNAKVLKDVKFPLMLDMYELCTPELQEKMVSFRSKFKDLEDKKVNQQPNTSDKKSSPQKEVKYEPFSFADDIGSNNCGYYDLQAVLTHQGRSSSSGHYVSWVKRKQDEWIKFDDDKVSIVTPEDILRLSGGGDWHIAYVLLYGPRRVEIMEEESEQ

SEQ ID NO: 849013 - protein, 568 aa, Homo sapiens; identical to SEQ ID NO: 849009

SEQ ID NO: 849014 - protein, 496 aa, Homo sapiens
SGVSSLQSLRSCTGVLRVAASSPVAGLNETRRTEAAATTAPPPRPPPQLLLVPVPLPPSSGPALLRRRLPPRPAMPLYSVTVKWGKEKFEGVELNTDEPPMVFKAQLFALTGVQPARQKVMVKGGTLKDDDWGNIKIKNGMTLLMMGSADALPEEPSAKTVFVEDMTEEQLASAMELPCGLTNLGNTCYMNATVQCIRSVPELKDALKRYAGALRASGEMASAQYITAALRDLFDSMDKTSSSIPPIILLQFLHMAFPQFAEKGEQGQYLQQDANECWIQMMRVLQQKLEAIEDDSVKETDSSSASAATPSKKKSLIDQFFGVEFETTMKCTESEEEEVTKGKENQLQLSCFINQEVKYLFTGLKLRLQEEITKQSPTLQRNALYIKSSKISRLPAYLTIQMVRFFYKEKESVNAKVLKDVKFPLMLDMYELCTPELQEKMVSFRSKFKDLEDKKVNQQPNTSDKKSSPQKEVKYEPFSFADDMGPIMVVIRLQAY

SEQ ID NO: 849015 - protein, 175 aa, Homo sapiens
MPLYSVTVKWGKEKFEGVELNTDEPPMVFKAQLFALTGVQPARQKVMVKGGTLKDDDWGNIKIKNGMTLLMMGSADALPEEPSAKTVFVEDMTEEQLASAMELPCGLTNLGNTCYMNATVQCIRSVPELKDALKRYAGALRASGEMASAQYITAALRDLFDSMDFPQFAEGERTV

SEQ ID NO: 849016 - protein, 214 aa, Homo sapiens
MPLYSVTVKWGKEKFEGVELNTDEPPMVFKAQLFALTGVQPARQKVMVKGGTLKDDDWGNIKIKNMELPCGLTNLGNTCYMNATVQCIRSVPELKDALKRYAGALRASGEMASAQYITAALRDLFDSMDKTSSSIPPIILLQFLHMAFPQFAEKGEQGQYLQQDANECWIQMMRVLQQKLEAIEDDSVKETELSSALEELLKRKLSTELGVVGL

SEQ ID NO: 849017 - protein, 111 aa, Homo sapiens
MPLYSVTVKWGKEKFEGVELNTDEPPMVFKAQLFALTGVQPARQKVMVKGGTLKDDDWGNIKIMDDSTNDGVNLLLFHNNPYSFYVDRQTWLTLCPRNVRIYVYVFGGVLY

SEQ ID NO: 849018 - protein, 494 aa, Homo sapiens; identical to SEQ ID NO: 849010

SEQ ID NO: 849019 - protein, 494 aa, Homo sapiens; identical to SEQ ID NO: 849010

SEQ ID NO: 849020 - protein, 459 aa, Homo sapiens
MPLYSVTVKWGKEKFEGVELNTDEPPMVFKAQLFALTGVQPARQKVMVKGGTLKDDDWGNIKIKNMELPCGLTNLGNTCYMNATVQCIRSVPELKDALKRYAGALRASGEMASAQYITAALRDLFDSMDKTSSSIPPIILLQFLHMAFPQFAEKGEQGQYLQQDANECWIQMMRVLQQKLEAIEDDSVKETDSSSASAATPSKKKSLIDQFFGVEFETTMKCTESEEEEVTKGKENQLQLSCFINQEVKYLFTGLKLRLQEEITKQSPTLQRNALYIKSSKISRLPAYLTIQMVRFFYKEKESVNAKVLKDVKFPLMLDMYELCTPELQEKMVSFRSKFKDLEDKKVNQQPNTSDKKSSPQKEVKYEPFSFADDIGSNNCGYYDLQAVLTHQGRSSSSGHYVSWVKRKQDEWIKFDDDKVSIVTPEDILRLSGGGDWHIAYVLLYGPRRVEIMEEESEQ

SEQ ID NO: 849021 - protein, 568 aa, Homo sapiens; identical to SEQ ID NO: 849009

SEQ ID NO: 849022 - protein, 365 aa, Homo sapiens
SGVSSLQSLRSCTGVLRVAASSPVAGLNETRRTEAAATTAPPPRPPPQLLLVPVPLPPSSGPALLRRRLPPRPAMPLYSVTVKWGKEKFEGVELNTDEPPMVFKAQLFALTGVQPARQKVMVKGGTLKDDDWGNIKIKNGMTLLMMGSADALPEEPSAKTVFVEDMTEEQLASAMELPCGLTNLGNTCYMNATVQCIRSVPELKDALKRYAGALRASGEMASAQYITAALRDLFDSMDKTSSSIPPIILLQFLHMAFPQFAEKGEQGQYLQQDANECWIQMMRVLQQKLEAIEDDSVKETDSSSASAATPSKKKSLIDQFFGVEFETTMKCTESEEEEVTKGFTGLKLRLQEESPNKAHVARNAL

SEQ ID NO: 849023 - protein, 166 aa, Homo sapiens
MPLYSVTVKWGKEKFEGVELNTDEPPMVFKAQLFALTGVQPARQKVMVKGGTLKDDDWGNIKIKNGMTLLMMGSADALPEEPSAKTVFVEDMTEEQLASAMELPCGLTNLGNTCYMNATVQCIRSVPELKDALKRYAGALRASGEMASAQYITADLPTLDFYSKWN

SEQ ID NO: 849024 - protein, 2725 aa, Homo sapiens
MEQTDCKPYQPLPKVKHEMDLAYTSSSDESEDGRKPRQSYNSRETLHEYNQELRMNYNSQSRKRKEVEKSTQEMEFCETSHTLCSGYQTDMHSVSRHGYQLEMGSDVDTETEGAASPDHALRMWIRGMKSEHSSCLSSRANSALSLTDTDHERKSDGENGFKFSPVCCDMEAQAGSTQDVQSSPHNQFTFRPLPPPPPPPHACTCARKPPPAADSLQRRSMTTRSQPSPAAPAPPTSTQDSVHLHNSWVLNSNIPLETRHSLFKHGSGSSAIFSAASQNYPLTSNTVYSPPPRPLPRSTFSRPAFTFNKPYRCCNWKCTALSATAITVTLALLLAYVIAVHLFGLTWQLQPVEGELYANGVSKGNRGTESMDTTYSPIGGKVSDKSEKKVFQKGRAIDTGEVDIGAQVMQTIPPGLFWRFQITIHHPIYLKFNISLAKDSLLGIYGRRNIPPTHTQFDFVKLMDGKQLVKQDSKGSDDTQHSPRNLILTSLQETGFIEYMDQGPWYLAFYNDGKKMEQVFVLTTAIEIMDDCSTNCNGNGECISGHCHCFPGFLGPDCARDSCPVLCGGNGEYEKGHCVCRHGWKGPECDVPEEQCIDPTCFGHGTCIMGVCICVPGYKGEICEEEDCLDPMCSNHGICVKGECHCSTGWGGVNCETPLPVCQEQCSGHGTFLLDAGVCSCDPKWTGSDCSTELCTMECGSHGVCSRGICQCEEGWVGPTCEERSCHSHCTEHGQCKDGKCECSPGWEGDHCTIAHYLDAVRDGCPGLCFGNGRCTLDQNGWHCVCQVGWSGTGCNVVMEMLCGDNLDNDGDGLTDCVDPDCCQQSNCYISPLCQGSPDPLDLIQQSQTLFSQHTSRLFYDRIKFLIGKDSTHVIPPEVSFDSRRACVIRGQVVAIDGTPLVGVNVSFLHHSDYGFTISRQDGSFDLVAIGGISVILIFDRSPFLPEKRTLWLPWNQFIVVEKVTMQRVVSDPPSCDISNFISPNPIVLPSPLTSFGGSCPERGTIVPELQVVQEEIPIPSSFVRLSYLSSRTPGYKTLLRILLTHSTIPVGMIKVHLTVAVEGRLTQKWFPAAINLVYTFAWNKTDIYGQKVWGLAEALVSVGYEYETCPDFILWEQRTVVLQGFEMDASNLGDWSLNKHHILNPQSGIIHKGNGENMFISQQPPVISTIMGNGHQRSVACTNCNGPAHNNKLFAPVALASGPDGSVYVGDFNFVRRIFPSGNSVSILELSTSPAHKYYLAMDPVSESLYLSDTNTRKVYKLKSLVETKDLSKNFEVVAGTGDQCLPFDQSHCGDGGRASEASLNSPRGITVDRHGFIYFVDGTMIRKIDENAVITTVIGSNGLTSTQPLSCDSGMDITQVRLEWPTDLAVNPMDNSLYVLDNNIVLQISENRRVRIIAGRPIHCQVPGIDHFLVSKVAIHSTLESARAISVSHSGLLFIAETDERKVNRIQQVTTNGEIYIIAGAPTDCDCKIDPNCDCFSGDGGYAKDAKMKAPSSLAVSPDGTLYVADLGNVRIRTISRNQAHLNDMNIYEIASPADQELYQFTVNGTHLHTLNLITRDYVYNFTYNSEGDLGAITSSNGNSVHIRRDAGGMPLWLVVPGGQVYWLTISSNGVLKRVSAQGYNPALMTYPGNTGLLATKSNENGWTTVYEYDPEGHLTNATFPTGEVSSFHSDLEKLTKVELDTSNRENVLMSTNLTATSTIYILKQENTQSTYRVNPDGSLRVTFASGMEIGLSSEPHILAGAVNPTLGKCNISLPGEHNANLIEWRQRKEQNKGNVSAFERRLRAHNRNLLSIDFDHITRTGKIYDDHRKFTLRILYDQTGRPILWSPVSRYNEVNITYSPSGLVTFIQRGTWNEKMEYDQSGKIISRTWADGKIWSYTYLEKSVMLLLHSQRRYIFEYDQSDCLLSVTMPSMVRHSLQTMLSVGYYRNIYTPPDSSTSFIQDYSRDGRLLQTLHLGTGRRVLYKYTKQARLSEVLYDTTQVTLTYEESSGVIKTIHLMHDGFICTIRYRQTGPLIGRQIFRFSEEGLVNARFDYSYNNFRVTSMQAVINETPLPIDLYRYVDVSGRTEQFGKFSVINYDLNQVITTTVMKHTKIFSANGQVIEVQYEILKAIAYWMTIQYDNVGRMVICDIRVGVDANITRYFYEYDADGQLQTVSVNDKTQWRYSYDLNGNINLLSHGKSARLTPLRYDLRDRITRLGEIQYKMDEDGFLRQRGNDIFEYNSNGLLQKAYNKASGWTVQYYYDGLGRRVASKSSLGQHLQFFYADLTNPIRVTHLYNHTSSEITSLYYDLQGHLIAMELSSGEEYYVACDNTGTPLAVFSSRGQVIKEILYTPYGDIYHDTYPDFQVIIGFHGGLYDFLTKLVHLGQRDYDVVAGRWTTPNHHIWKQLNLLPKPFNLYSFENNYPVGKIQDVAKYTTDIRSWLELFGFQLHNVLPGFPKPELENLELTYELLRLQTKTQEWDPGKTILGIQCELQKQLRNFISLDQLPMTPRYNDGRCLEGGKQPRFAAVPSVFGKGIKFAIKDGIVTADIIGVANEDSRRLAAILNNAHYLENLHFTIEGRDTHYFIKLGSLEEDLVLIGNTGGRRILENGVNVTVSQMTSLLNGRTRRFADIQLQHGALCFNIRYGTTVEEEKNHVLEIARQRAVAQAWTKEQRRLQEGEEGIRAWTEGEKQQLLSTGRVQGYDGYFVLSVEQYLELSDSANNIHFMRQSEIGRR

SEQ ID NO: 849025 - protein, 787 aa, Homo sapiens
MEQTDCKPYQPLPKVKHEMDLAYTSSSDESEDGRKPRQSYNSRETLHEYNQELRMNYNSQSRKRKEVEKSTQEMEFCETSHTLCSGYQTDMHSVSRHGYQLEMGSDVDTETEGAASPDHALRMWIRGMKSEHSSCLSSRANSALSLTDTDHERKSDGENGFKFSPVCCDMEAQAGSTQDVQSSPHNQFTFRPLPPPPPPPHACTCARKPPPAADSLQRRSMTTRSQPSPAAPAPPTSTQDSVHLHNSWVLNSNIPLETRHSLFKHGSGSSAIFSAASQNYPLTSNTVYSPPPRPLPRSTFSRPAFTFNKPYRCCNWKCTALSATAITVTLALLLAYVIAVHLFGLTWQLQPVEGELYANGVSKGNRGTESMDTTYSPIGGKVSDKSEKKVFQKGRAIDTGEVDIGAQVMQTIPPGLFWRFQITIHHPIYLKFNISLAKDSLLGIYGRRNIPPTHTQFDFVKLMDGKQLVKQDSKGSDDTQHSPRNLILTSLQETGFIEYMDQGPWYLAFYNDGKKMEQVFVLTTAIEIMDDCSTNCNGNGECISGHCHCFPGFLGPDCARDSCPVLCGGNGEYEKGHCVCRHGWKGPECDVPEEQCIDPTCFGHGTCIMGVCICVPGYKGEICEEEDCLDPMCSNHGICVKGECHCSTGWGGVNCETPLPVCQEQCSGHGTFLLDAGVCSCDPKWTGSDCSTELCTMECGSHGVCSRGICQCEEGWVGPTCEERSCHSHCTEHGQCKDGKCECSPGWEGDHCTIAHYLDAIGSELQAGLAQTPKSQQLTLSPRRVRP

SEQ ID NO: 849026 - protein, 2732 aa, Homo sapiens
MEQTDCKPYQPLPKVKHEMDLAYTSSSDESEDGRKPRQSYNSRETLHEYNQELRMNYNSQSRKRKEVEKSTQEMEFCETSHTLCSGYQTDMHSVSRHGYQLEMGSDVDTETEGAASPDHALRMWIRGMKSEHSSCLSSRANSALSLTDTDHERKSDGENGFKFSPVCCDMEAQAGSTQDVQSSPHNQFTFRPLPPPPPPPHACTCARKPPPAADSLQRRSMTTRSQPSPAAPAPPTSTQDSVHLHNSWVLNSNIPLETRHSLFKHGSGSSAIFSAASQNYPLTSNTVYSPPPRPLPRSTFSRPAFTFNKPYRCCNWKCTALSATAITVTLALLLAYVIAVHLFGLTWQLQPVEGELYANGVSKGNRGTESMDTTYSPIGGKVSDKSEKKVFQKGRAIDTGEVDIGAQVMQTIPPGLFWRFQITIHHPIYLKFNISLAKDSLLGIYGRRNIPPTHTQFDFVKLMDGKQLVKQDSKGSDDTQHSPRNLILTSLQETGFIEYMDQGPWYLAFYNDGKKMEQVFVLTTAIEIMDDCSTNCNGNGECISGHCHCFPGFLGPDCARDSCPVLCGGNGEYEKGHCVCRHGWKGPECDVPEEQCIDPTCFGHGTCIMGVCICVPGYKGEICEEEDCLDPMCSNHGICVKGECHCSTGWGGVNCETPLPVCQEQCSGHGTFLLDAGVCSCDPKWTGSDCSTELCTMECGSHGVCSRGICQCEEGWVGPTCEERSCHSHCTEHGQCKDGKCECSPGWEGDHCTIAHYLDAVRDGCPGLCFGNGRCTLDQNGWHCVCQVGWSGTGCNVVMEMLCGDNLDNDGDGLTDCVDPDCCQQSNCYISPLCQGSPDPLDLIQQSQTLFSQHTSRLFYDRIKFLIGKDSTHVIPPEVSFDSRRACVIRGQVVAIDGTPLVGVNVSFLHHSDYGFTISRQDGSFDLVAIGGISVILIFDRSPFLPEKRTLWLPWNQFIVVEKVTMQRVVSDPPSCDISNFISPNPIVLPSPLTSFGGSCPERGTIVPELQVVQEEIPIPSSFVRLSYLSSRTPGYKTLLRILLTHSTIPVGMIKVHLTVAVEGRLTQKWFPAAINLVYTFAWNKTDIYGQKVWGLAEALVSVGYEYETCPDFILWEQRTVVLQGFEMDASNLGDWSLNKHHILNPQSGIIHKGNGENMFISQQPPVISTIMGNGHQRSVACTNCNGPAHNNKLFAPVALASGPDGSVYVGDFNFVRRIFPSGNSVSILELRNRDTRHSTSPAHKYYLAMDPVSESLYLSDTNTRKVYKLKSLVETKDLSKNFEVVAGTGDQCLPFDQSHCGDGGRASEASLNSPRGITVDRHGFIYFVDGTMIRKIDENAVITTVIGSNGLTSTQPLSCDSGMDITQVRLEWPTDLAVNPMDNSLYVLDNNIVLQISENRRVRIIAGRPIHCQVPGIDHFLVSKVAIHSTLESARAISVSHSGLLFIAETDERKVNRIQQVTTNGEIYIIAGAPTDCDCKIDPNCDCFSGDGGYAKDAKMKAPSSLAVSPDGTLYVADLGNVRIRTISRNQAHLNDMNIYEIASPADQELYQFTVNGTHLHTLNLITRDYVYNFTYNSEGDLGAITSSNGNSVHIRRDAGGMPLWLVVPGGQVYWLTISSNGVLKRVSAQGYNPALMTYPGNTGLLATKSNENGWTTVYEYDPEGHLTNATFPTGEVSSFHSDLEKLTKVELDTSNRENVLMSTNLTATSTIYILKQENTQSTYRVNPDGSLRVTFASGMEIGLSSEPHILAGAVNPTLGKCNISLPGEHNANLIEWRQRKEQNKGNVSAFERRLRAHNRNLLSIDFDHITRTGKIYDDHRKFTLRILYDQTGRPILWSPVSRYNEVNITYSPSGLVTFIQRGTWNEKMEYDQSGKIISRTWADGKIWSYTYLEKSVMLLLHSQRRYIFEYDQSDCLLSVTMPSMVRHSLQTMLSVGYYRNIYTPPDSSTSFIQDYSRDGRLLQTLHLGTGRRVLYKYTKQARLSEVLYDTTQVTLTYEESSGVIKTIHLMHDGFICTIRYRQTGPLIGRQIFRFSEEGLVNARFDYSYNNFRVTSMQAVINETPLPIDLYRYVDVSGRTEQFGKFSVINYDLNQVITTTVMKHTKIFSANGQVIEVQYEILKAIAYWMTIQYDNVGRMVICDIRVGVDANITRYFYEYDADGQLQTVSVNDKTQWRYSYDLNGNINLLSHGKSARLTPLRYDLRDRITRLGEIQYKMDEDGFLRQRGNDIFEYNSNGLLQKAYNKASGWTVQYYYDGLGRRVASKSSLGQHLQFFYADLTNPIRVTHLYNHTSSEITSLYYDLQGHLIAMELSSGEEYYVACDNTGTPLAVFSSRGQVIKEILYTPYGDIYHDTYPDFQVIIGFHGGLYDFLTKLVHLGQRDYDVVAGRWTTPNHHIWKQLNLLPKPFNLYSFENNYPVGKIQDVAKYTTDIRSWLELFGFQLHNVLPGFPKPELENLELTYELLRLQTKTQEWDPGKTILGIQCELQKQLRNFISLDQLPMTPRYNDGRCLEGGKQPRFAAVPSVFGKGIKFAIKDGIVTADIIGVANEDSRRLAAILNNAHYLENLHFTIEGRDTHYFIKLGSLEEDLVLIGNTGGRRILENGVNVTVSQMTSLLNGRTRRFADIQLQHGALCFNIRYGTTVEEEKNHVLEIARQRAVAQAWTKEQRRLQEGEEGIRAWTEGEKQQLLSTGRVQGYDGYFVLSVEQYLELSDSANNIHFMRQSEIGRR

SEQ ID NO: 849027 - protein, 1004 aa, Homo sapiens
MWEKMETKTIVYDLDTSGGLMEQIQALLAPPKTDEAEKRSRKPEKEPRRSGRATNHDSCDSCKEGGDLLCCDHCPAAFHLQCCNPPLSEEMLPPGEWMCHRCTVRRKKREQKKELGHVNGLVDKSGKRTTSPSSDTDLLDRSASKTELKAIAHARILERRASRPGTPTSSASTETPTSEQNDVDEDIIDVDEEPVAAEPDYVQPQLRRPFELLIAAAMERNPTQFQLPNELTCTTALPGSSKRRRKEETTGKNVKKTQHELDHNGLVPLPVKVCFTCNRSCRVAPLIQCDYCPLLFHMDCLEPPLTAMPLGRWMCPNHIEHVVLNQKNMTLSNRCQVFDRFQDTVSQHVVKVDFLNRIHKKHPPNRRVLQSVKRRSLKVPDAIKSQYQFPPPLIAPAAIRDGELICNGIPEESQMHLLNSEHLATQAEQQEWLCSVVALQCSILKHLSAKQMPSHWDSEQTEKADIKPVIVTDSSVTTSLQTADKTPTPSHYPLSCPSGISTQNSLSCSPPHQSPALEDIGCSSCAEKSKKTPCGTANGPVNTEVKANGPHLYSSPTDSTDPRRLPGANTPLPGLSHRQGWPRPLTPPAAGGLQNHTVGIIVKTENATGPSSCPQRSLVPVPSLPPSIPSSCASIENTSTLQRKTVQSQIGPPLTDSRPLGSPPNATRVLTPPQAAGDGILATTANQRFSSPAPSSDGKVSPGTLSIGSALTVPSFPANSTAMVDLTNSLRAFMDVNGEIEINMLDEKLIKFLALQRIHQLFPSRVQPSPGSVGTHQLASGGHHIEVQRKEVQARAVFYPLLGLGGAVNMCYRTLYIGTGADMDVCLTNYGHCNYVSGKHACIFYDENTKHYELLNYSEHGTTVDNVLYSCDFSEKTPPTPPSSIVAKVQSVIRRRRHQKQDEEPSEEAAMMSSQAQGPQRRPCNCKASSSSLIGGSGAGWEGTALLHHGSYIKLGCLQFVFSITEFATKQPKGDASLLQDGVLAEKLSLKPHQGPVLRSNSVP

SEQ ID NO: 849028 - protein, 1019 aa, Homo sapiens
SVGLMEQIQALLAPPKTDEAEKRSRKPEKEPRRSGRATNHDSCDSCKEGGDLLCCDHCPAAFHLQCCNPPLSEEMLPPGEWMCHRCTVRRKPWNHPTLPMVTVWNPVGPKNPNMELLKWAEEKREQKKELGHVNGLVDKSGKRTTSPSSDTDLLDRSASKTELKAIAHARILERRASRPGTPTSSASTETPTSEQNDVDEDIIDVDEEPVAAEPDYVQPQLRRPFELLIAAAMERNPTQFQLPNELTCTTALPGSSKRRRKEETTGKNVKKTQHELDHNGLVPLPVKVCFTCNRSCRVAPLIQCDYCPLLFHMDCLEPPLTAMPLGRWMCPNHIEHVVLNQKNMTLSNRCQVFDRFQDTVSQHVVKVDFLNRIHKKHPPNRRVLQSVKRRSLKVPDAIKSQYQFPPPLIAPAAIRDGELICNGIPEESQMHLLNSEHLATQAEQQEWLCSVVALQCSILKHLSAKQMPSHWDSEQTEKADIKPVIVTDSSVTTSLQTADKTPTPSHYPLSCPSGISTQNSLSCSPPHQSPALEDIGCSSCAEKSKKTPCGTANGPVNTEVKANGPHLYSSPTDSTDPRRLPGANTPLPGLSHRQGWPRPLTPPAAGGLQNHTVGIIVKTENATGPSSCPQRSLVPVPSLPPSIPSSCASIENTSTLQRKTVQSQIGPPLTDSRPLGSPPNATRVLTPPQAAGDGILATTANQRFSSPAPSSDGKVSPGTLSIGSALTVPSFPANSTAMVDLTNSLRAFMDVNGEIEINMLDEKLIKFLALQRIHQLFPSRVQPSPGSVGTHQLASGGHHIEVQRKEVQARAVFYPLLGLGGAVNMCYRTLYIGTGADMDVCLTNYGHCNYVSGKHACIFYDENTKHYELLNYSEHGTTVDNVLYSCDFSEKTPPTPPSSIVAKVQSVIRRRRHQKQDEEPSEEAAMMSSQAQGPQRRPCNCKASSSSLIGGSGAGWEGTALLHHGSYIKLGCLQFVFSITEFATKQPKGDASLLQDGVLAEKLSLKPHQGPVLRSNSVP

SEQ ID NO: 849029 - protein, 707 aa, Homo sapiens
MDCLEPPLTAMPLGRWMCPNHIEHVVLNQKNMTLSNRCQVFDRFQDTVSQHVVKVDFLNRIHKKHPPNRRVLQSVKRRSLKVPDAIKSQYQFPPPLIAPAAIRDGELICNGIPEESQMHLLNSEHLATQAEQQEWLCSVVALQCSILKHLSAKQMPSHWDSEQTEKADIKPVIVTDSSVTTSLQTADKTPTPSHYPLSCPSGISTQNSLSCSPPHQSPALEDIGCSSCAEKSKKTPCGTANGPVNTEVKANGPHLYSSPTDSTDPRRLPGANTPLPGLSHRQGWPRPLTPPAAGGLQNHTVGIIVKTENATGPSSCPQRSLVPVPSLPPSIPSSCASIENTSTLQRKTVQSQIGPPLTDSRPLGSPPNATRVLTPPQAAGDGILATTANQRFSSPAPSSDGKVSPGTLSIGSALTVPSFPANSTAMVDLTNSLRAFMDVNGEIEINMLDEKLIKFLALQRIHQLFPSRVQPSPGSVGTHQLASGGHHIEVQRKEVQARAVFYPLLGLGGAVNMCYRTLYIGTGADMDVCLTNYGHCNYVSGKHACIFYDENTKHYELLNYSEHGTTVDNVLYSCDFSEKTPPTPPSSIVAKVQSVIRRRRHQKQDEEPSEEAAMMSSQAQGPQRRPCNCKASSSSLIGGSGAGWEGTALLHHGSYIKLGCLQFVFSITEFATKQPKGDASLLQDGVLAEKLSLKPHQGPVLRSNSVP

SEQ ID NO: 849030 - protein, 708 aa, Homo sapiens
REFVLVLREFVLVLREFVLVLREFVLVLNQKNMTLSNRCQVFDRFQDTVSQHVVKVDFLNRIHKKHPPNRRVLQSVKRRSLKVPDAIKSQYQFPPPLIAPAAIRDGELICNGIPEESQMHLLNSEHLATQAEQQEWLCSVVALQCSILKHLSAKQMPSHWDSEQTEKADIKPVIVTDSSVTTSLQTADKTPTPSHYPLSCPSGISTQNSLSCSPPHQSPALEDIGCSSCAEKSKKTPCGTANGPVNTEVKANGPHLYSSPTDSTDPRRLPGANTPLPGLSHRQGWPRPLTPPAAGGLQNHTVGIIVKTENATGPSSCPQRSLVPVPSLPPSIPSSCASIENTSTLQRKTVQSQIGPPLTDSRPLGSPPNATRVLTPPQAAGDGILATTANQRFSSPAPSSDGKVSPGTLSIGSALTVPSFPANSTAMVDLTNSLRAFMDVNGEIEINMLDEKLIKFLALQRIHQLFPSRVQPSPGSVGTHQLASGGHHIEVQRKEVQARAVFYPLLGLGGAVNMCYRTLYIGTGADMDVCLTNYGHCNYVSGKHACIFYDENTKHYELLNYSEHGTTVDNVLYSCDFSEKTPPTPPSSIVAKVQSVIRRRRHQKQDEEPSEEAAMMSSQAQGPQRRPCNCKASSSSLIGGSGAGWEGTALLHHGSYIKLGCLQFVFSITEFATKQPKGDASLLQDGVLAEKLSLKPHQGPVLRSNSVP

SEQ ID NO: 849031 - protein, 972 aa, Homo sapiens
MWEKMETKTIVYDLDTSGGLMEQIQALLAPPKTDEAEKRSRKPEKEPRRSGRATNHDSCDSCKEGGDLLCCDHCPAAFHLQCCNPPLSEEMLPPGEWMCHRCTVRRKKREQKKELGHVNGLVDKSGKRTTSPSSDTDLLDRSASKTELKAIAHARILERRASRPGTPTSSASTETPTSEQNDVDEDIIDVDEEPVAAEPDYVQPQLRRPFELLIAAAMERNPTQFQLPNELTCTTALPGSSKRRRKEETTGKNVKKTQHELDHNGLVPLPVKVCFTCNRSCRVAPLIQCDYCPLLFHMDCLEPPLTAMPLGRWMCPNHIEHVVLNQKNMTLSNRCQVFDRFQDTVSQHVVKVDFLNRIHKKHPPNRRVLQSVKRRSLKVPDAIKSQYQFPPPLIAPAAIRDGELICNGIPEESQMHLLNSEHLATQAEQQEWLCSVVALQCSILKHLSAKQMPSHWDSEQTEKADIKPVIVTDSSVTTSLQTADKTPTPSHYPLSCPSGISTQNSLSCSPPHQSPALEDIGCSSCAEKSKKTPCGTANGPVNTEVKANGPHLYSSPTDSTDPRRLPGANTPLPGLSHRQGWPRPLTPPAAGGLQNHTVGIIVKTENATGPSSCPQRSLVPVPSLPPSIPSSCASIENTSTLQRKTVQSQIGPPLTDSRPLGSPPNATRVLTPPQAAGDGILATTANQRFSSPAPSSANSTAMVDLTNSLRAFMDVNGEIEINMLDEKLIKFLALQRIHQLFPSRVQPSPGSVGTHQLASGGHHIEVQRKEVQARAVFYPLLGLGGAVNMCYRTLYIVDSHCNYVSGKHACIFYDENTKHYELLNYSEHGTTVDNVLYSCDFSEKTPPTPPSSIVAKVQSVIRRRRHQKQDEEPSEEAAMMSSQAQGPQRRPCNCKASSSSLIGGSGAGWEGTALLHHGSYIKLGCLQFVFSITEFATKQPKGDASLLQDGVLAEKLSLKPHQGPVLRSNSVP

SEQ ID NO: 849032 - protein, 549 aa, Homo sapiens
MLSYDREPSIYTCCVNEDLRVTTSLQTADKTPTPSHYPLSCPSGISTQNSLSCSPPHQSPALEDIGCSSCAEKSKKTPCGTANGPVNTEVKANGPHLYSSPTDSTDPRRLPGANTPLPGLSHRQGWPRPLTPPAAGGLQNHTVGIIVKTENATGPSSCPQRSLVPVPSLPPSIPSSCASIENTSTLQRKTVQSQIGPPLTDSRPLGSPPNATRVLTPPQAAGDGILATTANQRFSSPAPSSDGKVSPGTLSIGSALTVPSFPANSTAMVDLTNSLRAFMDVNGEIEINMLDEKLIKFLALQRIHQLFPSRVQPSPGSVGTHQLASGGHHIEVQRKEVQARAVFYPLLGLGGAVNMCYRTLYIGTGADMDVCLTNYGHCNYVSGKHACIFYDENTKHYELLNYSEHGTTVDNVLYSCDFSEKTPPTPPSSIVAKVQSVIRRRRHQKQDEEPSEEAAMMSSQAQGPQRRPCNCKASSSSLIGGSGAGWEGTALLHHGSYIKLGCLQFVFSITEFATKQPKGDASLLQDGVLAEKLSLKPHQGPVLRSNSVP

SEQ ID NO: 849033 - protein, 533 aa, Homo sapiens
YGISRAAVEVWAIAFTSVITGPLGVPQGISTQNSLSCSPPHQSPALEDIGCSSCAEKSKKTPCGTANGPVNTEVKANGPHLYSSPTDSTDPRRLPGANTPLPGLSHRQGWPRPLTPPAAGGLQNHTVGIIVKTENATGPSSCPQRSLVPVPSLPPSIPSSCASIENTSTLQRKTVQSQIGPPLTDSRPLGSPPNATRVLTPPQAAGDGILATTANQRFSSPAPSSDGKVSPGTLSIGSALTVPSFPANSTAMVDLTNSLRAFMDVNGEIEINMLDEKLIKFLALQRIHQLFPSRVQPSPGSVGTHQLASGGHHIEVQRKEVQARAVFYPLLGLGGAVNMCYRTLYIGTGADMDVCLTNYGHCNYVSGKHACIFYDENTKHYELLNYSEHGTTVDNVLYSCDFSEKTPPTPPSSIVAKVQSVIRRRRHQKQDEEPSEEAAMMSSQAQGPQRRPCNCKASSSSLIGGSGAGWEGTALLHHGSYIKLGCLQFVFSITEFATKQPKGDASLLQDGVLAEKLSLKPHQGPVLRSNSVP

SEQ ID NO: 849034 - protein, 169 aa, Homo sapiens
MAGHLISPPPPQNTKHYELLNYSEHGTTVDNVLYSCDFSEKTPPTPPSSIVAKVQSVIRRRRHQKQDEEPSEEAAMMSSQAQGPQRRPCNCKASSSSLIGGSGAGWEGTALLHHGSYIKLGCLQFVFSITEFATKQPKGDASLLQDGVLAEKLSLKPHQGPVLRSNSVP

SEQ ID NO: 849035 - protein, 116 aa, Homo sapiens
SVGLMEQIQALLAPPKTDEAEKRSRKPEKEPRRSGRATNHDSCDSCKEGGDLLCCDHCPAAFHLQCCNPPLSEEMLPPGEWMCHRCTVRRKPWNHPTLPMVTVWNPVGPKNPNMGC

SEQ ID NO: 849036 - protein, 704 aa, Homo sapiens
MWEKMETKTIVYDLDTSGGLMEQIQALLAPPKTDEAEKRSRKPEKEPRRSGRATNHDSCDSCKEGGDLLCCDHCPAAFHLQCCNPPLSEEMLPPGEWMCHRCTVRRKKREQKKELGHVNGLVDKSGKRTTSPSSDTDLLDRSASKTELKAIAHARILERRASRPGTPTSSASTETPTSEQNDVDEDIIDVDEEPVAAEPDYVQPQLRRPFELLIAAAMERNPTQFQLPNELTCTTALPGSSKRRRKEETTGKNVKKTQHELDHNGLVPLPVKVCFTCNRSCRVAPLIQCDYCPLLFHMDCLEPPLTAMPLGRWMCPNHIEHVVLNQKNMTLSNRCQVFDRFQDTVSQHVVKVDFLNRIHKKHPPNRRVLQSVKRRSLKVPDAIKSQYQFPPPLIAPAAIRDGELICNGIPEESQMHLLNSEHLATQAEQQEWLCSVVALQCSILKHLSAKQMPSHWDSEQTEKADIKPVIVTDSSVTTSLQTADKTPTPSHYPLSCPSGISTQNSLSCSPPHQSPALEDIGCSSCAEKSKKTPCGTANGPVNTEVKANGPHLYSSPTDSTDPRRLPGANTPLPGLSHRQGWPRPLTPPAAGGLQNHTVGIIVKTENATGPSSCPQRSLVPVPSLPPSIPSSCASIENTSTLQRKTVQSQIGPPLTDSRPLGSPPNATRVLTPPQAAGDGILATTANQRFSSPAPSSGECCSALG

SEQ ID NO: 849037 - protein, 707 aa, Homo sapiens; identical to SEQ ID NO: 849029

SEQ ID NO: 849038 - protein, 590 aa, Homo sapiens
MHLLNSEHLATQAEQQEWLCSVVALQCSILKHLSAKQMPSHWDSEQTEKADIKPVIVTDSSVTTSLQTADKTPTPSHYPLSCPSGISTQNSLSCSPPHQSPALEDIGCSSCAEKSKKTPCGTANGPVNTEVKANGPHLYSSPTDSTDPRRLPGANTPLPGLSHRQGWPRPLTPPAAGGLQNHTVGIIVKTENATGPSSCPQRSLVPVPSLPPSIPSSCASIENTSTLQRKTVQSQIGPPLTDSRPLGSPPNATRVLTPPQAAGDGILATTANQRFSSPAPSSDGKVSPGTLSIGSALTVPSFPANSTAMVDLTNSLRAFMDVNGEIEINMLDEKLIKFLALQRIHQLFPSRVQPSPGSVGTHQLASGGHHIEVQRKEVQARAVFYPLLGLGGAVNMCYRTLYIGTGADMDVCLTNYGHCNYVSGKHACIFYDENTKHYELLNYSEHGTTVDNVLYSCDFSEKTPPTPPSSIVAKVQSVIRRRRHQKQDEEPSEEAAMMSSQAQGPQRRPCNCKASSSSLIGGSGAGWEGTALLHHGSYIKLGCLQFVFSITEFATKQPKGDASLLQDGVLAEKLSLKPHQGPVLRSNSVP

SEQ ID NO: 849039 - protein, 993 aa, Homo sapiens
MWEKMETKTIVYDLDTSGGLMEQIQALLAPPKTDEAEKRSRKPEKEPRRSGRATNHDSCDSCKEGGDLLCCDHCPAAFHLQCCNPPLSEEMLPPGEWMCHRCTVRRKKREQKKELGHVNGLVDKSGKRTTSPSSDTDLLDRSASKTELKAIAHARILERRASRPGTPTSSASTETPTSEQNDVDEDIIDVDEEPVAAEPDYVQPQLRRPFELLIAAAMERNPTQFQLPNELTCTTALPGSSKRRRKEETTGKNVKKTQHELDHNGLVPLPVKVCFTCNRSCRVAPLIQCDYCPLLFHMDCLEPPLTAMPLGRWMCPNHIEHVVLNQKNMTLSNRCQVFDRFQDTVSQHVVKVDFLNRIHKKHPPNRRVLQSVKRRSLKVPDAIKSQYQFPPPLIAPAAIRDGELICNGIPEESQMHLLNSEHLATQAEQQEWLCSVVALQCSILKHLSAKQMPSHWDSEQTEKADIKPVIVTDSSVTTSLQTADKTPTPSHYPLSCPSGISTQNSLSCSPPHQSPALEDIGCSSCAEKSKKTPCGTANGPVNTEVKANGPHLYSSPTDSTDPRRLPGANTPLPGLSHRQGWPRPLTPPAAGGLQNHTVGIIVKTENATGPSSCPQRSLVPVPSLPPSIPSSCASIENTSTLQRKTVQSQIGPPLTDSRPLGSPPNATRVLTPPQAAGDGILATTANQRFSSPAPSSDGKVSPGTLSIGSALTVPSFPANSTAMVDLTNSLRAFMDVNGEIEINMLDEKLIKFLALQRIHQLFPSRVQPSPGSVGTHQLASGGHHIEVQRKEVQARAVFYPLLGLGGAVNMCYRTLYIVDSHCNYVSGKHACIFYDENTKHYELLNYSEHGTTVDNVLYSCDFSEKTPPTPPSSIVAKVQSVIRRRRHQKQDEEPSEEAAMMSSQAQGPQRRPCNCKASSSSLIGGSGAGWEGTALLHHGSYIKLGCLQFVFSITEFATKQPKGDASLLQDGVLAEKLSLKPHQGPVLRSNSVP

SEQ ID NO: 849040 - protein, 612 aa, Homo sapiens
TKAGLGRPRGTGPYGRIPEESQMHLLNSEHLATQAEQQEWLCSVVALQCSILKHLSAKQMPSHWDSEQTEKADIKPVIVTDSSVTTSLQTADKTPTPSHYPLSCPSGISTQNSLSCSPPHQSPALEDIGCSSCAEKSKKTPCGTANGPVNTEVKANGPHLYSSPTDSTDPRRLPGANTPLPGLSHRQGWPRPLTPPAAGGLQNHTVGIIVKTENATGPSSCPQRSLVPVPSLPPSIPSSCASIENTSTLQRKTVQSQIGPPLTDSRPLGSPPNATRVLTPPQAAGDGILATTANQRFSSPAPSSDGKVSPGTLSIGSALTVPSFPANSTAMVDLTNSLRAFMDVNGEIEINMLDEKLIKFLALQRIHQLFPSRVQPSPGSVGTHQLASGGHHIEVQRKEVQARAVFYPLLGLGGAVNMCYRTLYIGTGADMDVCLTNYGHCNYVSGKHACIFYDENTKHYELLNYSEHGTTVDNVLYSCDFSEKTPPTPPSSIVAKVQSVIRRRRHQKQDEEPSEEAAMMSSQAQGPQRRPCNCKASSSSLIGGSGAGWEGTALLHHGSYIKLGCLQFVFSITEFATKQPKGDASLLQDGVLAEKLSLKPHQGPVLRSNSVP

SEQ ID NO: 849041 - protein, 182 aa, Homo sapiens
MDVCLTNYGHCNYVSGKHACIFYDENTKHYELLNYSEHGTTVDNVLYSCDFSEKTPPTPPSSIVAKVQSVIRRRRHQKQDEEPSEEAAMMSSQAQGPQRRPCNCKASSSSLIGGSGAGWEGTALLHHGSYIKLGCLQFVFSITEFATKQPKGDASLLQDGVLAEKLSLKPHQGPVLRSNSVP

SEQ ID NO: 849042 - protein, 116 aa, Homo sapiens; identical to SEQ ID NO: 849035

SEQ ID NO: 849043 - protein, 159 aa, Homo sapiens
MKNHLLFWGVLAVFIKAVHVKAQEDERIVLVDNKCKCARITSRIIRSSEDPNEDIVERNIRIIVPLNNRENISDPTSPLRTRFVYHLSDLCKKCDPTEVELDNQIVTATQSNICDEDSATETCYTYDRNKCYTAVVPLVYGGETKMVETALTPDACYPD

SEQ ID NO: 849044 - protein, 159 aa, Homo sapiens; identical to SEQ ID NO: 849043

SEQ ID NO: 849045 - protein, 176 aa, Homo sapiens
FLKQTEVDDEEPMCCDSVELLVGPNKKCWSCDKAYRNDHTDCHCRQSKCNVCARITFLGILRSSEDPYLRTSWTESILNYVPLNNRENISDPTSPLRTRFVYHLSDLCKKCDPTEVELDNQIVTATQSNICDEDSATETCYTYDRNKCYTAVVPLVYGGETKMVETALTPDACYPD

SEQ ID NO: 849046 - protein, 105 aa, Homo sapiens
  misc_feature (32)..(32): Xaa can be any naturally occurring amino acid
MDVEDLCITILIHGVIDEVCYTLMIHEPVWRXMVIAYSERWSPDVITIVIAGTTIQYVVPEERAIRGYCYTYDRNKCYTAVVPLVYGGETKMVETALTPDACYPD

SEQ ID NO: 849047 - protein, 159 aa, Homo sapiens; identical to SEQ ID NO: 849043

SEQ ID NO: 849048 - protein, 159 aa, Homo sapiens; identical to SEQ ID NO: 849043

SEQ ID NO: 849049 - protein, 130 aa, Homo sapiens
MKNHLLFWGVLAVFIKAVHVKAQEDERIVLVDNKCKCARITSRIIRSSEDPNEDIVERNIRIIVPLNNRENISDPTSPLRTRFVYHLSDLAISVMKTVLQRPATLMTETSATQLWSHSYMVVRPKWWKQP

SEQ ID NO: 849050 - protein, 69 aa, Homo sapiens
MKNHLLFWGVLAVFIKAVHVKAQEDERIVLVDNKCKCARITSRIIRSSEDPNEDIVERNIRIMYVAFHI

SEQ ID NO: 849051 - protein, 477 aa, Homo sapiens
MGRTVVVLGGGISGLAASYHLSRAPCPPKVVLVESSERLGGWIRSVRGPNGAIFELGPRGIRPAGALGARTLLLVSELGLDSEVLPVRGDHPAAQNRFLYVGGALHALPTGLRGLLRPSPPFSKPLFWAGLRELTKPRGKEPDETVHSFAQRRLGPEVASLAMDSLCRGVFAGNSRELSIRSCFPSLFQAEQTHRSILLGLLLGAGRTPQPDSALIRQALAERWSQWSLRGGLEMLPQALETHLTSRGVSVLRGQPVCGLSLQAEGRWKVSLRDSSLEADHVISAIPASVLSELLPAEAAPLARALSAITAVSVAVVNLQYQGAHLPVQGFGHLVPSSEDPGVLGIVYDSVAFPEQDGSPPGLRVTVMLGGSWLQTLEASGCVLSQELFQQRAQEAAATQLGLKEMPSHCLVHLHKNCIPQYTLGHWQKLESARQFLTAHRLPLTLAGASYEGVAVNDCIESGRQAAVSVLGTEPNS

SEQ ID NO: 849052 - protein, 477 aa, Homo sapiens; identical to SEQ ID NO: 849051

SEQ ID NO: 849053 - protein, 133 aa, Homo sapiens
MTGPWSGLRSTQGEVGNRLLLFFMCLGANSSGAGTVTTWGLPPCRRIPSAHTWSFAACRHRHPNSRAGIAAAILEAGAAGAGSRVMGRGLGAEPPGLTRHPVPDTAWPGACEGAAPEPAHLERVVGDPLGSGC

SEQ ID NO: 849054 - protein, 188 aa, Homo sapiens
MGRTVVVLGGGISGLAASYHLSRAPCPPKVVLVESSERLGGWIRSVRGPNGAIFELGPRGIRPAGALGARTLLLVMLGGSWLQTLEASGCVLSQELFQQRAQEAAATQLGLKEMPSHCLVHLHKTKNQLKWRQSHDRTVEWPKEYPGRSRKQAPSILHVPGCQLLRCRDRDHLGAVSEQPRSSAESRV

SEQ ID NO: 849055 - protein, 440 aa, Homo sapiens
MSRRGCGGGFHWGIEFRGGSMFGGSDLPLVSPLLRACVSELGLDSEVLPVRGDHPAAQNRFLYVGGALHALPTGLRGLLRPSPPFSKPLFWAGLRELTKPRGKEPDETVHSFAQRRLGPEVASLAMDSLCRGVFAGNSRELSIRSCFPSLFQAEQTHRSILLGLLLGAGRTPQPDSALIRQALAERWSQWSLRGGLEMLPQALETHLTSRGVSVLRGQPVCGLSLQAEGRWKVSLRDSSLEADHVISAIPASVLSELLPAEAAPLARALSAITAVSVAVVNLQYQGAHLPVQGFGHLVPSSEDPGVLGIVYDSVAFPEQDGSPPGLRVTVMLGGSWLQTLEASGCVLSQELFQQRAQEAAATQLGLKEMPSHCLVHLHKNCIPQYTLGHWQKLESARQFLTAHRLPLTLAGASYEGVAVNDCIESGRQAAVSVLGTEPNS

SEQ ID NO: 849056 - protein, 409 aa, Homo sapiens
MDGDLAVSELGLDSEVLPVRGDHPAAQNRFLYVGGALHALPTGLRGLLRPSPPFSKPLFWAGLRELTKPRGKEPDETVHSFAQRRLGPEVASLAMDSLCRGVFAGNSRELSIRSCFPSLFQAEQTHRSILLGLLLGAGRTPQPDSALIRQALAERWSQWSLRGGLEMLPQALETHLTSRGVSVLRGQPVCGLSLQAEGRWKVSLRDSSLEADHVISAIPASVLSELLPAEAAPLARALSAITAVSVAVVNLQYQGAHLPVQGFGHLVPSSEDPGVLGIVYDSVAFPEQDGSPPGLRVTVMLGGSWLQTLEASGCVLSQELFQQRAQEAAATQLGLKEMPSHCLVHLHKNCIPQYTLGHWQKLESARQFLTAHRLPLTLAGASYEGVAVNDCIESGRQAAVSVLGTEPNS

SEQ ID NO: 849057 - protein, 315 aa, Homo sapiens
MDSLCRGVFAGNSRELSIRSCFPSLFQAEQTHRSILLGLLLGAGRTPQPDSALIRQALAERWSQWSLRGGLEMLPQALETHLTSRGVSVLRGQPVCGLSLQAEGRWKVSLRDSSLEADHVISAIPASVLSELLPAEAAPLARALSAITAVSVAVVNLQYQGAHLPVQGFGHLVPSSEDPGVLGIVYDSVAFPEQDGSPPGLRVTVMLGGSWLQTLEASGCVLSQELFQQRAQEAAATQLGLKEMPSHCLVHLHKNCIPQYTLGHWQKLESARQFLTAHRLPLTLAGASYEGVAVNDCIESGRQAAVSVLGTEPNS

SEQ ID NO: 849058 - protein, 308 aa, Homo sapiens
MGRTVVVLGGGISGLAASYHLSRAPCPPKVVLVESSERLGGWIRSVRGPNGAIFELGPRGIRPAGALGARTLLLVSELGLDSEVLPVRGDHPAAQNRFLYVGGALHALPTGLRGLLRPSPPFSKPLFWAGLRELTKPRGKEPDETVHSFAQRRLGPEVASLAMDSLCRGVFAGNSRELSIRSCFPSLFQAEQTHRSILLGLLLGAGRTPQPDSALIRQALAERWSQWSLRGGLEMLPQALETHLTSRGVSVLRGQPVCGLSLQAEGRWKVSLRDSSLEADHVISAIPASGIWTFGAIFRRSRSPGNRV

SEQ ID NO: 849059 - protein, 238 aa, Homo sapiens
MGRTVVVLGGGISGLAASYHLSRAPCPPKVVLVESSERLGGWIRSVRGPNGAIFELGPRGIRPAGALGARTLLLVSELGLDSEVLPVRGDHPAAQNRFLYVGGALHALPTGLRGLLRPSPPFSKPLFWAGLRELTKPRGKEPDETVHSFAQRRLGPEVASLAMDSLCRGVFAGNSRELSIRSCFPSLFQAEQTHRSILLGLLLGAGEGGLIQRVKILSTAKVREWGQGVLFNDSFFLF

SEQ ID NO: 849060 - protein, 140 aa, Homo sapiens
MGRTVVVLGGGISGLAASYHLSRAPCPPKVMLGGSWLQTLEASGCVLSQELFQQRAQEAAATQLGLKEMPSHCLVHLHKNCIPQYTLGHWQKLESARQFLTAHRLPLTLAGASYEGVAVNDCIESGRQAAVSVLGTEPNS

SEQ ID NO: 849061 - protein, 209 aa, Homo sapiens
MVSLRDSSLEADHVISAIPASVLSELLPAEAAPLARALSAITAVSVAVVNLQYQGAHLPVQGFGHLVPSSEDPGVLGIVYDSVAFPEQDGSPPGLRVTVMLGGSWLQTLEASGCVLSQELFQQRAQEAAATQLGLKEMPSHCLVHLHKNCIPQYTLGHWQKLESARQFLTAHRLPLTLAGASYEGVAVNDCIESGRQAAVSVLGTEPNS

SEQ ID NO: 849062 - protein, 182 aa, Homo sapiens [sequence omitted]

SEQ ID NO: 849063 - protein, 477 aa, Homo sapiens; identical to SEQ ID NO: 849051

SEQ ID NO: 849064 - protein, 592 aa, Homo sapiens
MGRTVVVLGGGISGLAASYHLSRAPCPPKVVLVESSERLGGWIRSVRGPNGAIFELGPRGIRPAGALGARTLLLVSELGLDSEVLPVRGDHPAAQNRFLYVGGALHALPTGLRGLLRPSPPFSKPLFWAGLRELTKPRGKEPDETVHSFAQRRLGPEVASLAMDSLCRGVFAGNSRELSIRSCFPSLFQAEQTHRSILLGLLLGAGRTPQPDSALIRQALAERWSQWSLRGGLEMLPQALETHLTSRGVSVLRGQPVCGLSLQAEGRWKVSLRDSSLEADHVISAIPASVLSELLPAEAAPLARALSAITAVSVAVVNLQYQGAHLPVQGFGHLVPSSEDPGVLGIVYDSVAFPEQDGSPPGLRVTVRRRKLCLVAFPEGSSVLHCRQGQTDQCYIPSLVMLGGSWLQTLEASGCVLSQELFQQRAQEAAATQLGLKEMPSHCLVHLHKTKNQLKWRQSHDRTVEWPKEYQGEVGNRLLLFFMCLGANSSGAGTVTTWGLPPCRRIPSAHTWSFAACRHRHPNSRAGIAAAILEAGAAGAGSRVMGRGLGAEPPGLTRHPVPDTAWPGACEGAAPEPAHLERVVGDPLGSGC

SEQ ID NO: 849065 - protein, 449 aa, Homo sapiens
MGRTVVVLGGGISGLAASYHLSRAPCPPKVVLVESSERLGGWIRSVRGPNGAIFELGPRGIRPAGALGARTLLLVSELGLDSEVLPVRGDHPAAQNRFLYVGGALHALPTGLRGLLRPSPPFSKPLFWAGLRELTKPRGKEPDETVHSFAQRRLGPEVASLAMDSLCRGVFAGNSRELSIRSCFPSLFQAEQTHRSILLGLLLGAGRTPQPDSALIRQALAERWSQWSLRGGLEMLPQALETHLTSRGVSVLRGQPVCGLSLQAEGRWKVSLRDSSLEADHVISAIPASVLSELLPAEAAPLARALSAITAVSVAVVNLQYQGAHLPVQGFGHLVPSSEDPGVLGIVYDSVAFPEQDGSPPGLRVTVMLGGSWLQTLEASGCVLSQELFQQRAQEAAATQLGLKEMPSHCLVHLHKNCIPQYTLGHWQKLEVSWENSWAEEGQGHQTPS

SEQ ID NO: 849066 - protein, 113 aa, Homo sapiens
MGRTVVVLGGGISGLAASYHLSRAPCPPKVVLVESSERLGGWIRSVRGPNGAIFELGPRGIRPAGALGARTLLLVSLRDSSLEADHVISAIPASGIWTFGAIFRRSRSPGNRV

SEQ ID NO: 849067 - protein, 185 aa, Homo sapiens
MGRTVVVLGGGISGLAASYHLSRAPCPPKVVLVESSERLGGWIRSVRGPNGAIFELGPRGIRPAGALGARTLLLVMLGGSWLQTLEASGCVLSQELFQQRAQEAAATQLGLKEMPSHCLVHLHKNCIPQYTLGHWQKLESARQFLTAHRLPLTLAGASYEGVAVNDCIESGRQAAVSVLGTEPNS

SEQ ID NO: 849068 - protein, 145 aa, Homo sapiens
MSRRGCGGGFHWGIEFRGGSMFGGSDLPLVSPLLRACVSELGLDSEVLPVRGDHPAAQNRFLYVGGALHALPTGLRGLLRPSPPFSKPLFWAGLRELTKPRGKEPDETVHSFAQRRLGPEVTLAQRPQTSSLLNQLQSSLFKSTT

SEQ ID NO: 849069 - protein, 32 aa, Homo sapiens
MGDRKMPLFTEGESRKTTVYGKARVRIWSHDI

SEQ ID NO: 849070 - protein, 339 aa, Homo sapiens
MDLGECLKVHDLALRADYEIASKEQDFFFELDAMDHLQSFIADCDRRTEVAKKRLAETQEEISAEVAAKAERVHELNEEIGKLLAKVEQLGAEGNVEESQKVMDEVEKARAKKREAEEVYRNSMPASSFQQQKLRVCEVCSAYLGLHDNDRRLADHFGGKLHLGFIEIREKLEELKRVVAEKQEKRNQERLKRREEREREEREKLRRSRSHSKNPKRSRSREHRRHRSRSMSRERKRRTRSKSREKRHRHRSRSSSRSRSRSHQRSRHSSRDRSRERSKRRSSKERFRDQDLASCDRDRSSRDRSPRDRDRKDKKRSYESANGRSEDRRSSEEREAGEI

SEQ ID NO: 849071 - protein, 389 aa, Homo sapiens
PTSICKGVSERPRIRQAGDTTRQRIKFSDDRVCKSHLLNCCPHDVLSGTRMDLGECLKVHDLALRADYEIASKEQDFFFELDAMDHLQSFIADCDRRTEVAKKRLAETQEEISAEVAAKAERVHELNEEIGKLLAKVEQLGAEGNVEESQKVMDEVEKARAKKREAEEVYRNSMPASSFQQQKLRVCEVCSAYLGLHDNDRRLADHFGGKLHLGFIEIREKLEELKRVVAEKQEKRNQERLKRREEREREEREKLRRSRSHSKNPKRSRSREHRRHRSRSMSRERKRRTRSKSREKRHRHRSRSSSRSRSRSHQRSRHSSRDRSRERSKRRSSKERFRDQDLASCDRDRSSRDRSPRDRDRKDKKRSYESANGRSEDRRSSEEREAGEI

SEQ ID NO: 849072 - protein, 368 aa, Homo sapiens
VAHLTSPPDRVCKSHLLNCCPHDVLSGTRMDLGECLKVHDLALRADYEIASKEQDFFFELDAMDHLQSFIADCDRRTEVAKKRLAETQEEISAEVAAKAERVHELNEEIGKLLAKVEQLGAEGNVEESQKVMDEVEKARAKKREAEEVYRNSMPASSFQQQKLRVCEVCSAYLGLHDNDRRLADHFGGKLHLGFIEIREKLEELKRVVAEKQEKRNQERLKRREEREREEREKLRRSRSHSKNPKRSRSREHRRHRSRSMSRERKRRTRSKSREKRHRHRSRSSSRSRSRSHQRSRHSSRDRSRERSKRRSSKERFRDQDLASCDRDRSSRDRSPRDRDRKDKKRSYESANGRSEDRRSSEEREAGEI

SEQ ID NO: 849073 - protein, 392 aa, Homo sapiens
MSAQAQMRAMLDQLMGTSRDGDTTRQRIKFSDDRVCKSHLLNCCPHDVLSGTRMDLGECLKVHDLALRADYEIASKEQDFFFELDAMDHLQSFIADCDRRTEVAKKRLAETQEEISAEVAAKAERVHELNEEIGKLLAKVEQLGAEGNVEESQKVMDEVEKARAKKREAEEVYRNSMPASSFQQQKLRVCEVCSAYLGLHDNDRRLADHFGGKLHLGFIEIREKLEELKRVVAEKQEKRNQERLKRREEREREEREKLRRSRSHSKNPKRSRSREHRRHRSRSMSRERKRRTRSKSREKRHRHRSRSSSRSRSRSHQRSRHSSRDRSRERSKRRSSKERFRDQDLASCDRDRSSRDRSPRDRDRKDKKRSYESANGRSEDRRSSEEREAGEI

SEQ ID NO: 849074 - protein, 335 aa, Homo sapiens
MSAQAQMRAMLDQLMGTSRDGDTTRQRIKFSDDRVCKSHLLNCCPHDVLSGTRMDLGECLKVHDLALRADYEIASKEQDFFFELDAMDHLQSFIADCDRRTEVAKKRLAETQEEISAEVAAKAERVHELNEEIGKLLAKVEQLGAEGNVEESQKVMDEVEKARAKKREAEEVYRNSMPASSFQQQKLRVCEVCSAYLGLHDNDRRLADHFGGKLHLGFIEIREKLEELKRVVAEKQEKRNQERLKRREEREREEREKLRRSRSHSKNPKRSRSREHRRHRSRSMSRERKRRTRSKSREKRHRHRSRSSSRSRSRSHQRSRHSSRDRSRERSKRRY

SEQ ID NO: 849075 - protein, 392 aa, Homo sapiens; identical to SEQ ID NO: 849073

SEQ ID NO: 849076 - protein, 335 aa, Homo sapiens; identical to SEQ ID NO: 849074

SEQ ID NO: 849077 - protein, 270 aa, Homo sapiens
MSAQAQMRAMLDQLMGTSRDGDTTRQRIKFSDDRVCKSHLLNCCPHDVLSGTRMDLGECLKVHDLALRADYEIASKEQDFFFELDAMDHLQSFIADCDRRTEVAKKRLAETQEEISAEVAAKAERVHELNEEIGKLLAKVEQLGAEGNVEESQKVMDEVEKARAKKREAEEVYRNSMPASSFQQQKLRVCEVCSAYLGLHDNDRRLADHFGGKLHLGFIEIREKLEELKRVVAEKQEKRNQERLKRREEREREEREKLRRSRSHSKNPKR

SEQ ID NO: 849078 - protein, 142 aa, Homo sapiens
MSAQAQMRAMLDQLMGTSRDGDTTRQRIKFSDDRVCKSHLLNCCPHDVLSGTRMDLGECLKVHDLALRADYEIASKEQDFFFELDAMDHLQSFIADCDRRTEVAKKRLAETQEEISAEVAAKAAPARRSQSSVPLPAQKQVH

SEQ ID NO: 849079 - protein, 392 aa, Homo sapiens; identical to SEQ ID NO: 849073

SEQ ID NO: 849080 - protein, 392 aa, Homo sapiens; identical to SEQ ID NO: 849073

SEQ ID NO: 849081 - protein, 339 aa, Homo sapiens; identical to SEQ ID NO: 849070

SEQ ID NO: 849082 - protein, 306 aa, Homo sapiens
MDHLQSFIADCDRRTEVAKKRLAETQEEISAEVAAKAERVHELNEEIGKLLAKVEQLGAEGNVEESQKVMDEVEKARAKKREAEEVYRNSMPASSFQQQKLRVCEVCSAYLGLHDNDRRLADHFGGKLHLGFIEIREKLEELKRVVAEKQEKRNQERLKRREEREREEREKLRRSRSHSKNPKRSRSREHRRHRSRSMSRERKRRTRSKSREKRHRHRSRSSSRSRSRSHQRSRHSSRDRSRERSKRRSSKERFRDQDLASCDRDRSSRDRSPRDRDRKDKKRSYESANGRSEDRRSSEEREAGEI

SEQ ID NO: 849083 - protein, 166 aa, Homo sapiens
ILAVITLPKREYPNQERLKRREEREREEREKLRRSRSHSKNPKRSRSREHRRHRSRSMSRERKRRTRSKSREKRHRHRSRSSSRSRSRSHQRSRHSSRDRSRERSKRRSSKERFRDQDLASCDRDRSSRDRSPRDRDRKDKKRSYESANGRSEDRRSSEEREAGEI

SEQ ID NO: 849084 - protein, 335 aa, Homo sapiens; identical to SEQ ID NO: 849074

SEQ ID NO: 849085 - protein, 105 aa, Homo sapiens
MGRRACFLGYCFRALSPEVDTSQPRSLKAPRSGRNAARRRRDRPAPAGKGAREPGRVHATRGGRSPRARPPQTPRRLTAVRSTMGMVSTYFPPRLTSSSILLIWV

SEQ ID NO: 849086 - protein, 186 aa, Homo sapiens
MSAQAQMRAMLDQLMGTSRDGDTTRQRIKFSDDRVCKSHLLNCCPHDVLSGTRMDLGECLKVHDLALRADYEIASKEQDFFFELDAMDHLQSFIADCDRRTEVAKKRLAETQEEISAEVAAKAERVHELNEEIGKLLAKVEQLGAEGNVEESQKVMDEVEKARAKKREAEEVIGIYASFSFNRRNL

SEQ ID NO: 849087 - protein, 633 aa, Homo sapiens
MAHLKRLVKLHIKRHYHKKFWKLGAVIFFFIIVLVLMQREVSVQYSKEESRMERNMKNKNKMLDLMLEAVNNIKDAMPKMQIGAPVRQNIDAGERPCLQGYYTAAELKPVLDRPPQDSNAPGASGKAFKTTNLSVEEQKEKERGEAKHCFNAFASDRISLHRDLGPDTRPPECIEQKFKRCPPLPTTSVIIVFHNEAWSTLLRTVHSVLYSSPAILLKEIILVDDASVDEYLHDKLDEYVKQFSIVKIVRQRERKGLITARLLGATVATAETLTFLDAHCECFYGWLEPLLARIAENYTAVVSPDIASIDLNTFEFNKPSPYGSNHNRGNFDWSLSFGWESLPDHEKQRRKDETYPIKTPTFAGGLFSISKEYFEYIGSYDEEMEIWGGENIEMSFRVWQCGGQLEIMPCSVVGHVFRSKSPHSFPKGTQVIARNQVRLAEVWMDEYKEIFYRRNTDAAKIVKQKAFGDLSKRFEIKHRLQCKNFTWYLNNIYPEVYVPDLNPVISGYIKSVGQPLCLDVGENNQGGKPLIMYTCHGLGGNQYFEYSAQHEIRHNIQKELCLHAAQGLVQLKACTYKGHKTVVTGEQIWEIQKDQLLYNPFLKMCLSANGEHPSLVSCNPSDPLQKWILSQND

SEQ ID NO: 849088 - protein, 633 aa, Homo sapiens; identical to SEQ ID NO: 849087

SEQ ID NO: 849089 - protein, 646 aa, Homo sapiens
MAHLKRLVKLHIKRHYHKKFWKLGAVIFFFIIVLVLMQREVSVQYSKEESRMERNMKNKNKMLDLMLEAVNNIKDAMPKMQIGAPVRQNIDAGERPCLQGYYTAAELKPVLDRPPQDSNAPGASGKAFKTTNLSVEEQKEKERGEAKHCFNAFASDRISLHRDLGPDTRPPECIEQKFKRCPPLPTTSVIIVFHNEAWSTLLRTVHSVLYSSPAILLKEIILVDDASVDEYLHDKLDEYVKQFSIVKIVRQRERKGLITARLLGATVATAETLTFLDAHSFSTGIIAMTAQAGECFYGWLEPLLARIAENYTAVVSPDIASIDLNTFEFNKPSPYGSNHNRGNFDWSLSFGWESLPDHEKQRRKDETYPIKTPTFAGGLFSISKEYFEYIGSYDEEMEIWGGENIEMSFRVWQCGGQLEIMPCSVVGHVFRSKSPHSFPKGTQVIARNQVRLAEVWMDEYKEIFYRRNTDAAKIVKQKAFGDLSKRFEIKHRLQCKNFTWYLNNIYPEVYVPDLNPVISGYIKSVGQPLCLDVGENNQGGKPLIMYTCHGLGGNQYFEYSAQHEIRHNIQKELCLHAAQGLVQLKACTYKGHKTVVTGEQIWEIQKDQLLYNPFLKMCLSANGEHPSLVSCNPSDPLQKWILSQND

SEQ ID NO: 849090 - protein, 615 aa, Homo sapiens
MAHLKRLVKLHIKRHYHKKFWKLGAVIFFFIIVLVLMQREVSVQYSKEESRMERNMKNKNKMLDLMLEAVNNIKDAMPCLQGYYTAAELKPVLDRPPQDSNAPGASGKAFKTTNLSVEEQKEKERGEAKHCFNAFASDRISLHRDLGPDTRPPECIEQKFKRCPPLPTTSVIIVFHNEAWSTLLRTVHSVLYSSPAILLKEIILVDDASVDEYLHDKLDEYVKQFSIVKIVRQRERKGLITARLLGATVATAETLTFLDAHCECFYGWLEPLLARIAENYTAVVSPDIASIDLNTFEFNKPSPYGSNHNRGNFDWSLSFGWESLPDHEKQRRKDETYPIKTPTFAGGLFSISKEYFEYIGSYDEEMEIWGGENIEMSFRVWQCGGQLEIMPCSVVGHVFRSKSPHSFPKGTQVIARNQVRLAEVWMDEYKEIFYRRNTDAAKIVKQKAFGDLSKRFEIKHRLQCKNFTWYLNNIYPEVYVPDLNPVISGYIKSVGQPLCLDVGENNQGGKPLIMYTCHGLGGNQYFEYSAQHEIRHNIQKELCLHAAQGLVQLKACTYKGHKTVVTGEQIWEIQKDQLLYNPFLKMCLSANGEHPSLVSCNPSDPLQKWILSQND

SEQ ID NO: 849091 - protein, 633 aa, Homo sapiens; identical to SEQ ID NO: 849087

SEQ ID NO: 849092 - protein, 633 aa, Homo sapiens; identical to SEQ ID NO: 849087

SEQ ID NO: 849093 - protein, 303 aa, Homo sapiens
MAHLKRLVKLHIKRHYHKKFWKLGAVIFFFIIVLVLMQREVSVQYSKEESRMERNMKNKNKMLDLMLEAVNNIKDAMPKMQIGAPVRQNIDAGERPCLQGYYTAAELKPVLDRPPQDSNAPGASGKAFKTTNLSVEEQKEKERGEAKHCFNAFASDRISLHRDLGPDTRPPECIEQKFKRCPPLPTTSVIIVFHNEAWSTLLRTVHSVLYSSPAILLKEIILVDDASVDEYLHDKLDEYVKQFSIVKIVRQRERKGLITARLLGATVATAETLTFLDAHSWDGSMVAVNLGGPNTETSTVAEA

SEQ ID NO: 849094 - protein, 104 aa, Homo sapiens
LRFNSFRRSSVWSKISVQRKPVLDRPPQDSNAPGASGKAFKTTNLSVEEQKEKERGEAKHCFNAFASDRISLHRDLGPDTRPPEYVEEYLLFILYHQALQGREG

SEQ ID NO: 849095 - protein, 633 aa, Homo sapiens; identical to SEQ ID NO: 849087

SEQ ID NO: 849096 - protein, 70 aa, Homo sapiens
RILPISASTLERNLMMYELREGFSQSSDLTKHQRIHTGEKPYECSECGKAFNRNSYLQSSPIRSTPKMDT

SEQ ID NO: 849097 - protein, 633 aa, Homo sapiens; identical to SEQ ID NO: 849087

SEQ ID NO: 849098 - protein, 192 aa, Homo sapiens
MAHLKRLVKLHIKRHYHKKFWKLGAVIFFFIIVLVLMQREVSVQYSKEESRMERNMKNKNKMLDLMLEAVNNIKDAMPKMQIGAPVRQNIDAGERPCLQGYYTAAELKPVLDRPPQDSNAPGASGKAFKTTNLSVEEQKEKERGEAKHCFNAFASDRISLHRDLGPDTRPPEYVEEYLLFILYHQALQGREG

SEQ ID NO: 849099 - protein, 469 aa, Homo sapiens
MEEKYGGDVLAGPGGGGGLGPVDVPSARTAFFMVLFQKPFSSGKTITKHQWIKIFKHAVAGCIISLLWFFGLTLCGPLRTLLLFEHSDIVVISLLSVLFTSSGGGPAKTRGAAFFIIAVICLLLFDNDDLMAKMAEHPEGHHDSALTHMLYTAIAFLGVADHKGGVLLLVLALCCKVGFHTASRKLSVDVGGAKRLQALSHLVSVLLLCPWVIVLSVTTESKVESWFSLIMPFATVIFFVMILDFYVDSICSVKMEVSKCARYGSFPIFISALLFGNFWTHPITDQLRAMNKAAHQESTEHVLSGGVVVSAIFFILSANILSSPSKRGQKGTLIGYSPEGTPLYNFMGDAFQHSSQSIPRFIKESLKQILEESDSRQIFYFLCLNLLFTFVELFYGVLTNSLGLISDGFHMLFDCSALVMGLFAALMSRWKATRIFSYGYGRIEILSGFINGLFLIVIAFLCLWSQWLD

SEQ ID NO: 849100 - protein, 510 aa, Homo sapiens
MEEKYGGDVLAGPGGGGGLGPVDVPSARLTKYIVLLCFTKFLKAVGLFESYDLLKAVHIVQFIFILKLGTAFFMVLFQKPFSSGKTITKHQWIKIFKHAVAGCIISLLWFFGLTLCGPLRTLLLFEHSDIVVISLLSVLFTSSGGGPAKTRGAAFFIIAVICLLLFDNDDLMAKMAEHPEGHHDSALTHMLYTAIAFLGVADHKGGVLLLVLALCCKVGFHTASRKLSVDVGGAKRLQALSHLVSVLLLCPWVIVLSVTTESKVESWFSLIMPFATVIFFVMILDFYVDSICSVKMEVSKCARYGSFPIFISALLFGNFWTHPITDQLRAMNKAAHQESTEHVLSGGVVVSAIFFILSANILSSPSKRGQKGTLIGYSPEGTPLYNFMGDAFQHSSQSIPRFIKESLKQILEESDSRQIFYFLCLNLLFTFVELFYGVLTNSLGLISDGFHMLFDCSALVMGLFAALMSRWKATRIFSYGYGRIEILSGFINGLFLIVIAFLCLWSQWLD

SEQ ID NO: 849101 - protein, 469 aa, Homo sapiens; identical to SEQ ID NO: 849099

SEQ ID NO: 849102 - protein, 469 aa, Homo sapiens; identical to SEQ ID NO: 849099

SEQ ID NO: 849103 - protein, 469 aa, Homo sapiens; identical to SEQ ID NO: 849099

SEQ ID NO: 849104 - protein, 469 aa, Homo sapiens; identical to SEQ ID NO: 849099

SEQ ID NO: 849105 - protein, 335 aa, Homo sapiens
MMISWLKWLNTVSFWNRSELFQVLRKTRSGGVLLLVLALCCKVGFHTASRKLSVDVGGAKRLQALSHLVSVLLLCPWVIVLSVTTESKVESWFSLIMPFATVIFFVMILDFYVDSICSVKMEVSKCARYGSFPIFISALLFGNFWTHPITDQLRAMNKAAHQESTEHVLSGGVVVSAIFFILSANILSSPSKRGQKGTLIGYSPEGTPLYNFMGDAFQHSSQSIPRFIKESLKQILEESDSRQIFYFLCLNLLFTFVELFYGVLTNSLGLISDGFHMLFDCSALVMGLFAALMSRWKATRIFSYGYGRIEILSGFINGLFLIVIAFLCLWSQWLD

SEQ ID NO: 849106 - protein, 469 aa, Homo sapiens; identical to SEQ ID NO: 849099

SEQ ID NO: 849107 - protein, 469 aa, Homo sapiens; identical to SEQ ID NO: 849099

SEQ ID NO: 849108 - protein, 137 aa, Homo sapiens
RYREAEITEGQALLKSRERDPLPRPVADFLCFSSFPRPSSLPLPPGSECPCAPRARAAARAAFPTPSPSPHSPPPPCRARRSRRRGRWRRPPAPAVPRGRSEEPERPTEASREDAAAAAEDEPAERAVPPAGRSPEG

SEQ ID NO: 849109 - protein, 1112 aa, Homo sapiens
MSLQSAQYLRQAEVLKADMTDSKLGPAEVWTSRQALQDLYQKMLVTDLEYALDKKVEQDLWNHAFKNQITTLQGQAKNRANPNRSEVQANLSLFLEAASGFYTQLLQELCTVFNVDLPCRVKSSQLGIISNKQTHTSAIVKPQSSSCSYICQHCLVHLGDIARYRNQTSQAESYYRHAAQLVPSNRSIAVKFPFPAASTNLQKALSKALESRDEVKTKWGVSDFIKAFIKFHGHVYLSKSLEKLSPLREKLEEQFKRLLFQKAFNSQQLVHVTVINLFQLHHLRDFSNETEQHTYSQDEQLCWTQLLALFMSFLGILCKCPLQNESQEESYNAYPLPAVKVSMDWLRLRPRVFQEAVVDERQYIWPWLISLLNSFHPHEEDLSSISATPLPEEFELQGFLALRPSFRNLDFSKGHQGITGDKEGQQRRIRQQRLISIGKWIADNQPRLIQCENEVGKLLFITEIPELILEDPSEAKENLILQETSVIESLAADGSPGLKSVLSTSRNLSNNCDTGEKPVVTFKENIKTREVNRDQGRSFPPKEVRRDYSKGITVTKNDGKKDNNKRKTETKKCTLEKLQETGKQNVAVQVKSQTELRKTPVSEARKTPVTQTPTQASNSQFIPIHHPGAFPPLPSRPGFPPPTYVIPPPVAFSMGSGYTFPAGVSVPGTFLQPTAHSPAGNQVQAGKQSHIPYSQQRPSGPGPMNQGPQQSQPPSQQPLTSLPAQPTAQSTSQLQVQALTQQQQSPTKAVPALGKSPPHHSGFQQYQQADASKQLWNPPQVQGPLGKIMPVKQPYYLQTQDPIKLFEPSLQPPVMQQQPLEKKMKPFPMEPYNHNPSEVKVPEFYWDSSYSMADNRSVMAQQANIDRRGKRSPGVFRPEQDPVPRMPFEKSLLEKPSELMSHSSSFLSLTGFSLNQERYPNNSMFNEVYGKNLTSSSKAELSPSMAPQETSLYSLFEGTPWSPSLPASSDHSTPASQSPHSSNPSSLPSSPPTHNHNSVPFSNFGPIGTPDNRDRRTADRWKTDKPAMGGFGIDYLSATSSSESSWHQASTPSGTWTGHGPSMEDSSAVLMESLKSIWSSSMMHPGPSALEQLLMQQKQKQQRGQGTMNPPH

SEQ ID NO: 849110 - protein, 1279 aa, Homo sapiens
RYREAEITEGQALLKSRERDPLPRPVADFLCFSSFPRPSSLPLPPGSECPCAPRARAAARAAFPTPSPSPHSPPPPCRARRSRRRGRWRRPPAPAVPRGRSEEPERPTEASREDAAAAAEDEPAERAVPPNVLNHSTFMRNWMFLQIVIVGENVSFKSQMRTENLKSEEHLKSSNIRQAEVLKADMTDSKLGPAEVWTSRQALQDLYQKMLVTDLEYALDKKVEQDLWNHAFKNQITTLQGQAKNRANPNRSEVQANLSLFLEAASGFYTQLLQELCTVFNVDLPCRVKSSQLGIISNKQTHTSAIVKPQSSSCSYICQHCLVHLGDIARYRNQTSQAESYYRHAAQLVPSNRSIAVKFPFPAASTNLQKALSKALESRDEVKTKWGVSDFIKAFIKFHGHVYLSKSLEKLSPLREKLEEQFKRLLFQKAFNSQQLVHVTVINLFQLHHLRDFSNETEQHTYSQDEQLCWTQLLALFMSFLGILCKCPLQNESQEESYNAYPLPAVKVSMDWLRLRPRVFQEAVVDERQYIWPWLISLLNSFHPHEEDLSSISATPLPEEFELQGFLALRPSFRNLDFSKGHQGITGDKEGQQRRIRQQRLISIGKWIADNQPRLIQCENEVGKLLFITEIPELILEDPSEAKENLILQETSVIESLAADGSPGLKSVLSTSRNLSNNCDTGEKPVVTFKENIKTREVNRDQGRSFPPKEVRRDYSKGITVTKNDGKKDNNKRKTETKKCTLEKLQETGKQNVAVQVKSQTELRKTPVSEARKTPVTQTPTQASNSQFIPIHHPGAFPPLPSRPGFPPPTYVIPPPVAFSMGSGYTFPAGVSVPGTFLQPTAHSPAGNQVQAGKQSHIPYSQQRPSGPGPMNQGPQQSQPPSQQPLTSLPAQPTAQSTSQLQVQALTQQQQSPTKAVPALGKSPPHHSGFQQYQQADASKQLWNPPQVQGPLGKIMPVKQPYYLQTQDPIKLFEPSLQPPVMQQQPLEKKMKPFPMEPYNHNPSEVKVPEFYWDSSYSMADNRSVMAQQANIDRRGKRSPGVFRPEQDPVPRMPFEKSLLEKPSELMSHSSSFLSLTGFSLNQERYPNNSMFNEVYGKNLTSSSKAELSPSMAPQETSLYSLFEGTPWSPSLPASSDHSTPASQSPHSSNPSSLPSSPPTHNHNSVPFSNFGPIGTPDNRDRRTADRWKTDKPAMGGFGIDYLSATSSSESSWHQASTPSGTWTGHGPSMEDSSAVLMESLKSIWSSSMMHPGPSALEQLLMQQKQKQQRGQGTMNPPH

SEQ ID NO: 849111 - protein, 1099 aa, Homo sapiens
MLVTDLEYALDKKVEQDLWNHAFKNQITTLQGQAKNRANPNRSEVQANLSLFLEAASGFYTQLLQELCTVFNVDLPCRVKSSQLGIISNKQTHTSAIVKPQSSSCSYICQHCLVHLGDIARYRNQTSQAESYYRHAAQLVPSNGQPYNQLAILASSKGDHLTTIFYYCRSIAVKFPFPAASTNLQKALSKALESRDEVKTKWGVSDFIKAFIKFHGHVYLSKSLEKLSPLREKLEEQFKRLLFQKAFNSQQLVHVTVINLFQLHHLRDFSNETEQHTYSQDEQLCWTQLLALFMSFLGILCKCPLQNESQEESYNAYPLPAVKVSMDWLRLRPRVFQEAVVDERQYIWPWLISLLNSFHPHEEDLSSISATPLPEEFELQGFLALRPSFRNLDFSKGHQGITGDKEGQQRRIRQQRLISIGKWIADNQPRLIQCENEVGKLLFITEIPELILEDPSEAKENLILQETSVIESLAADGSPGLKSVLSTSRNLSNNCDTGEKPVVTFKENIKTREVNRDQGRSFPPKEVKSQTELRKTPVSEARKTPVTQTPTQASNSQFIPIHHPGAFPPLPSRPGFPPPTYVIPPPVAFSMGSGYTFPAGVSVPGTFLQPTAHSPAGNQVQAGKQSHIPYSQQRPSGPGPMNQGPQQSQPPSQQPLTSLPAQPTAQSTSQLQVQALTQQQQSPTKAVPALGKSPPHHSGFQQYQQADASKQLWNPPQVQGPLGKIMPVKQPYYLQTQDPIKLFEPSLQPPVMQQQPLEKKMKPFPMEPYNHNPSEVKVPEFYWDSSYSMADNRSVMAQQANIDRRGKRSPGVFRPEQDPVPRMPFEDPKSSPLLPPDLLKSLAALEEEEELIFSNPPDLYPALLGPLASLPGRSLFKSLLEKPSELMSHSSSFLSLTGFSLNQERYPNNSMFNEVYGKNLTSSSKAELSPSMAPQETSLYSLFEGTPWSPSLPASSDHSTPASQSPHSSNPSSLPSSPPTHNHNSVPFSNFGPIGTPDNRDRRTADRWKTDKPAMGGFGIDYLSATSSSESSWHQASTPSGTWTGHGPSMEDSSAVLMESLKSIWSSSMMHPGPSALEQLLMQQKQKQQRGQGTMNPPH

SEQ ID NO: 849112 - protein, 998 aa, Homo sapiens
MLVTDLEYALDKKVEQDLWNHAFKNQITTLQGQAKNRANPNRSEVQANLSLFLEAASGFYTQLLQELCTVFNVDLPCRVKSSQLGIISNKQTHTSAIVKPQSSSCSYICQHCLVHLGDIARYRNQTSQAESYYRHAAQLVPSNGQPYNQLAILASSKGDHLTTIFYYCRSIAVKFPFPAASTNLQKALSKALESRDEVKTKWGVSDFIKAFIKFHGHVYLSKSLEKLSPLREKLEEQFKRLLFQKAFNSQQLVHVTVINLFQLHHLRDFSNETEQHTYSQDEQLCWTQLLALFMSFLGILCKCPLQNESQEESYNAYPLPAVKVSMDWLRLRPRVFQEAVVDERQYIWPWLISLLNSFHPHEEDLSSISATPLPEEFELQGFLALRPSFRNLDFSKGHQGITGDKEGQQRRIRQQRLISIGKWIADNQPRLIQCENEVGKLLFITEIPELILEDPSEAKENLILQETSVIESLAADGSPGLKSVLSTSRNLSNNCDTGEKPVVTFKENIKTREVNRDQGRSFPPKEVKSQTELRKTPVSEARKTPVTQTPTQASNSQFIPIHHPGAFPPLPSRPGFPPPTYVIPPPVAFSMGSGYTFPAGVSVPGTFLQPTAHSPAGNQVQAGKQSHIPYSQQRPSGPGPMNQGPQQSQPPSQQPLTSLPAQPTAQSTSQLQVQALTQQQQSPTKAVPALGKSPPHHSGFQQYQQADASKQLWNPPQVQGPLGKIMPVKQPYYLQTQDPIKLFEPSLQPPVMQQQPLEKKMKPFPMEPYNHNPSEVKVPEFYWDSSYSMADNRSVMAQQANIDRRGKRSPGVFRPEQDPVPRMPFEKSLLEKPSELMSHSSSFLSLTGFSLNQERYPNNSMFNEVYGKNLTSSSKAELSPSMAPQETSLYSLFEGTPWSPSLPASSDHSTPASQSPHSSNPSSLPSSPPTHNHNSVPFSNFGPIGTPDNRDRRTADRWKTDKPGHPLRAVGIRPALRVAPGQAMALPWRIPLLSSWKA

SEQ ID NO: 849113 - protein, 1049 aa, Homo sapiens
MLVTDLEYALDKKVEQDLWNHAFKNQITTLQGQAKNRANPNRSEVQANLSLFLEAASGFYTQLLQELCTVFNVDLPCRVKSSQLGIISNKQTHTSAIVKPQSSSCSYICQHCLVHLGDIARYRNQTSQAESYYRHAAQLVPSNGQPYNQLAILASSKGDHLTTIFYYCRSIAVKFPFPAASTNLQKALSKALESRDEVKTKWGVSDFIKAFIKFHGHVYLSKSLEKLSPLREKLEEQFKRLLFQKAFNSQQLVHVTVINLFQLHHLRDFSNETEQHTYSQDEQLCWTQLLALFMSFLGILCKCPLQNESQEESYNAYPLPAVKVSMDWLRLRPRVFQEAVVDERQYIWPWLISLLNSFHPHEEDLSSISATPLPEEFELQGFLALRPSFRNLDFSKGHQGITGDKEGQQRRIRQQRLISIGKWIADNQPRLIQCENEVGKLLFITEIPELILEDPSEAKENLILQETSVIESLAADGSPGLKSVLSTSRNLSNNCDTGEKPVVTFKENIKTREVNRDQGRSFPPKEVKSQTELRKTPVSEARKTPVTQTPTQASNSQFIPIHHPGAFPPLPSRPGFPPPTYVIPPPVAFSMGSGYTFPAGVSVPGTFLQPTAHSPAGNQVQAGKQSHIPYSQQRPSGPGPMNQGPQQSQPPSQQPLTSLPAQPTAQSTSQLQVQALTQQQQSPTKAVPALGKSPPHHSGFQQYQQADASKQLWNPPQVQGPLGKIMPVKQPYYLQTQDPIKLFEPSLQPPVMQQQPLEKKMKPFPMEPYNHNPSEVKVPEFYWDSSYSMADNRSVMAQQANIDRRGKRSPGVFRPEQDPVPRMPFEKSLLEKPSELMSHSSSFLSLTGFSLNQERYPNNSMFNEVYGKNLTSSSKAELSPSMAPQETSLYSLFEGTPWSPSLPASSDHSTPASQSPHSSNPSSLPSSPPTHNHNSVPFSNFGPIGTPDNRDRRTADRWKTDKPAMGGFGIDYLSATSSSESSWHQASTPSGTWTGHGPSMEDSSAVLMESLKSIWSSSMMHPGPSALEQLLMQQKQKQQRGQGTMNPPH

SEQ ID NO: 849114 - protein, 1049 aa, Homo sapiens; identical to SEQ ID NO: 849113

SEQ ID NO: 849115 - protein, 1014 aa, Homo sapiens
MLVTDLEYALDKKVEQDLWNHAFKNQITTLQGQAKNRANPNRSEVQANLSLFLEAASGFYTQLLQELCTVFNVDLPCRVKSSQLGIISNKQTHTSAIVKPQSSSCSYICQHCLVHLGDIARYRNQTSQAESYYRHAAQLVPSNGQPYNQLAILASSKGDHLTTIFYYCRSIAVKFPFPAASTNLQKALSKALESRDEVKTKWGVSDFIKAFIKFHGHVYLSKSLEKLSPLREKLEEQFKRLLFQKAFNSQQLVHVTVINLFQLHHLRDFSNETEQHTYSQDEQLCWTQLLALFMSFLGILCKCPLQNESQEESYNAYPLPAVKVSMDWLRLRPRVFQEAVVDERQYIWPWLISLLNSFHPHEEDLSSISATPLPEEFELQGFLALRPSFRNLDFSKGHQGITGDKEGQQRRIRQQRLISIGKWIADNQPRLIQCENEVGKLLFITEIPELILEDPSEAKENLILQETSVIESLAADGSPGLKSVLSTSRNLSNNCDTGEKPVVTFKENIKTREVNRDQGRSFPPKEVKSQTELRKTPVSEARKTPVTQTPTQASNSQFIPIHHPGAFPPLPSRPGFPPPTYVIPPPVAFSMGSGYTFPAGVSVPGTFLQPTAHSPAGNQVQAGKQSHIPYSQQRPSGPGPMNQGPQQSQPPSQQPLTSLPAQPTAQSTSQLQVQALTQQQQSPTKAVPALGKSPPHHSGFQQYQQADASKQLWNPPQVQGPLGKIMPVKQPYYLQTQDPIKLFEPSLQPPVMQQQPLEKKMKPFPMEPYNHNPSEVKVPEFYWDSSYSMADNRSVMAQQANIDRRGKRSPGVFRPEQDPVPRMPFEKSLLEKPSELMSHSSSFLSLTGFSLNQERYPNNSMFNEVYGKNLTSSSKAELSPSMAPQETSLYSLFEGTPWSPSLPASSDHSTPASQSPHSSNPSSLPSSPPTHNHNSVPFSNFGPIGTPDNRDRRTADRWKTDKPAMGGFGIDYLSATSSSESSWHQASTPSGTWTGHGPSMEDSSAVLMESLKCP

SEQ ID NO: 849116 - protein, 625 aa, Homo sapiens
MLVTDLEYALDKKVEQDLWNHAFKNQITTLQGQAKNRANPNRSEVQANLSLFLEAASGFYTQLLQELCTVFNVDLPCRVKSSQLGIISNKQTHTSAIVKPQSSSCSYICQHCLVHLGDIARYRNQTSQAESYYRHAAQLVPSNGQPYNQLAILASSKGDHLTTIFYYCRSIAVKFPFPAASTNLQKALSKALESRDEVKTKWGVSDFIKAFIKFHGHVYLSKSLEKLSPLREKLEEQFKRLLFQKAFNSQQLVHVTVINLFQLHHLRDFSNETEQHTYSQDEQLCWTQLLALFMSFLGILCKCPLQNESQEESYNAYPLPAVKVSMDWLRLRPRVFQEAVVDERQYIWPWLISLLNSFHPHEEDLSSISATPLPEEFELQGFLALRPSFRNLDFSKGHQGITGDKEGQQRRIRQQRLISIGKWIADNQPRLIQCENEVGKLLFITEIPELILEDPSEAKENLILQETSVIESLAADGSPGLKSVLSTSRNLSNNCDTGEKPVVTFKENIKTREVNRDQGRSFPPKEVRRDYSKGITVTKNDGKKDNNKRKTETKKCTLEKLQETGKQNVAVQVKSQTELRKTPVSEARKTPVTQTPTQASNSQFIPIHHPGAFPPLPSRPGKYVL

SEQ ID NO: 849117 - protein, 138 aa, Homo sapiens
RYREAEITEGQALLKSRERDPLPRPVADFLCFSSFPRPSSLPLPPGSECPCAPRARAAARAAFPTPSPSPHSPPPPCRARRSRRRGRWRRPPAPAVPRGRSEEPERPTEASREDAAAAAEDEPAERAVPPNVLNHSTL

SEQ ID NO: 849118 - protein, 169 aa, Homo sapiens
MSLQSAQYLRQAEVLKADMTDSKLGPAEVWTSRQALQDLYQKMLVTDLEYALDKKVEQDLWNHAFKNQITTLQGQAKNRANPNRSEVQANLSLFLEAASGFYTQLLQELCTVFNVDLPCRVKSSQLGIISNKQTHTSAIVKPQSSSCSYICQHCLVHLGDIVPYNSPLL

SEQ ID NO: 849119 - protein, 1070 aa, Homo sapiens
MLVTDLEYALDKKVEQDLWNHAFKNQITTLQGQAKNRANPNRSEVQANLSLFLEAASGFYTQLLQELCTVFNVDLPCRVKSSQLGIISNKQTHTSAIVKPQSSSCSYICQHCLVHLGDIARYRNQTSQAESYYRHAAQLVPSNGSIAVKFPFPAASTNLQKALSKALESRDEVKTKWGVSDFIKAFIKFHGHVYLSKSLEKLSPLREKLEEQFKRLLFQKAFNSQQLVHVTVINLFQLHHLRDFSNETEQHTYSQDEQLCWTQLLALFMSFLGILCKCPLQNESQEESYNAYPLPAVKVSMDWLRLRPRVFQEAVVDERQYIWPWLISLLNSFHPHEEDLSSISATPLPEEFELQGFLALRPSFRNLDFSKGHQGITGDKEGQQRRIRQQRLISIGKWIADNQPRLIQCENEVGKLLFITEIPELILEDPSEAKENLILQETSVIESLAADGSPGLKSVLSTSRNLSNNCDTGEKPVVTFKENIKTREVNRDQGRSFPPKEVRRDYSKGITVTKNDGKKDNNKRKTETKKCTLEKLQETGKQNVAVQVKSQTELRKTPVSEARKTPVTQTPTQASNSQFIPIHHPGAFPPLPSRPGFPPPTYVIPPPVAFSMGSGYTFPAGVSVPGTFLQPTAHSPAGNQVQAGKQSHIPYSQQRPSGPGPMNQGPQQSQPPSQQPLTSLPAQPTAQSTSQLQVQALTQQQQSPTKAVPALGKSPPHHSGFQQYQQADASKQLWNPPQVQGPLGKIMPVKQPYYLQTQDPIKLFEPSLQPPVMQQQPLEKKMKPFPMEPYNHNPSEVKVPEFYWDSSYSMADNRSVMAQQANIDRRGKRSPGVFRPEQDPVPRMPFEKSLLEKPSELMSHSSSFLSLTGFSLNQERYPNNSMFNEVYGKNLTSSSKAELSPSMAPQETSLYSLFEGTPWSPSLPASSDHSTPASQSPHSSNPSSLPSSPPTHNHNSVPFSNFGPIGTPDNRDRRTADRWKTDKPAMGGFGIDYLSATSSSESSWHQASTPSGTWTGHGPSMEDSSAVLMESLKSIWSSSMMHPGPSALEQLLMQQKQKQQRGQGTMNPPH

SEQ ID NO: 849120 - protein, 802 aa, Homo sapiens
MSFLGILCKCPLQNESQEESYNAYPLPAVKVSMDWLRLRPRVFQEAVVDERQYIWPWLISLLNSFHPHEEDLSSISATPLPEEFELQGFLALRPSFRNLDFSKGHQGITGDKEGQQRRIRQQRLISIGKWIADNQPRLIQCENEVGKLLFITEIPELILEDPSEAKENLILQETSVIESLAADGSPGLKSVLSTSRNLSNNCDTGEKPVVTFKENIKTREVNRDQGRSFPPKEVRRDYSKGITVTKNDGKKDNNKRKTETKKCTLEKLQETGKQNVAVQVKSQTELRKTPVSEARKTPVTQTPTQASNSQFIPIHHPGAFPPLPSRPGFPPPTYVIPPPVAFSMGSGYTFPAGVSVPGTFLQPTAHSPAGNQVQAGKQSHIPYSQQRPSGPGPMNQGPQQSQPPSQQPLTSLPAQPTAQSTSQLQVQALTQQQQSPTKAVPALGKSPPHHSGFQQYQQADASKQLWNPPQVQGPLGKIMPVKQPYYLQTQDPIKLFEPSLQPPVMQQQPLEKKMKPFPMEPYNHNPSEVKVPEFYWDSSYSMADNRSVMAQQANIDRRGKRSPGVFRPEQDPVPRMPFEKSLLEKPSELMSHSSSFLSLTGFSLNQERYPNNSMFNEVYGKNLTSSSKAELSPSMAPQETSLYSLFEGTPWSPSLPASSDHSTPASQSPHSSNPSSLPSSPPTHNHNSVPFSNFGPIGTPDNRDRRTADRWKTDKPAMGGFGIDYLSATSSSESSWHQASTPSGTWTGHGPSMEDSSAVLMESLKSIWSSSMMHPGPSALEQLLMQQKQKQQRGQGTMNPPH

SEQ ID NO: 849121 - protein, 1049 aa, Homo sapiens; identical to SEQ ID NO: 849113

SEQ ID NO: 849122 - protein, 489 aa, Homo sapiens
CCFLKTKAVFFCFEGFPPPTYVIPPPVAFSMGSGYTFPAGVSVPGTFLQPTAHSPAGNQVQAGKQSHIPYSQQRPSGPGPMNQGPQQSQPPSQQPLTSLPAQPTAQSTSQLQVQALTQQQQSPTKAVPALGKSPPHHSGFQQYQQADASKQLWNPPQVQGPLGKIMPVKQPYYLQTQDPIKLFEPSLQPPVMQQQPLEKKMKPFPMEPYNHNPSEVKVPEFYWDSSYSMADNRSVMAQQANIDRRGKRSPGVFRPEQDPVPRMPFEKSLLEKPSELMSHSSSFLSLTGFSLNQERYPNNSMFNEVYGKNLTSSSKAELSPSMAPQETSLYSLFEGTPWSPSLPASSDHSTPASQSPHSSNPSSLPSSPPTHNHNSVPFSNFGPIGTPDNRDRRTADRWKTDKPAMGGFGIDYLSATSSSESSWHQASTPSGTWTGHGPSMEDSSAVLMESLKSIWSSSMMHPGPSALEQLLMQQKQKQQRGQGTMNPPH

SEQ ID NO: 849123 - protein, 1049 aa, Homo sapiens; identical to SEQ ID NO: 849113

SEQ ID NO: 849124 - protein, 1049 aa, Homo sapiens; identical to SEQ ID NO: 849113

SEQ ID NO: 849125 - protein, 138 aa, Homo sapiens; identical to SEQ ID NO: 849117

SEQ ID NO: 849126 - protein, 423 aa, Homo sapiens
TIYWQEGLLVTFDGGYLSVESSDVNWKKKKSGGMKIVCQSEVRDFSAMAFITDHVNSLIDQWFPALTATESDGTPLMEQYVPCPVCETAWAQHTDPSEKSEDVQYFDMEDCVLTAIERDFISCPRHPDLPVPLQELVPELFMTDFPARLFLENSKLEHSEDEGSVLGQGGSGTVIYRARYQGQPVAVKRFHIKKFKNFANVPADTMLRHLRATDAMKNFSEFRQEASMLHALQHPCIVALIGISIHPLCFALELAPLSSLNTVLSENARDSSFIPLGHMLTQKIAYQIASGLAYLHKKNIIFCDLKSDNILVWSLDVKEHINIKLSDYGISRQSFHEGALGVEGTPGYQAPEIRPRIVYDEKVDMFSYGMVLYELLSGQRPALGHHQLQIAKKLSKGIRPVLGQPEEVQFRRLQALMMECWDT

SEQ ID NO: 849127 - protein, 196 aa, Homo sapiens
MFCEKAMELIRELHRAPEGQLPAFNEDGLRQVLEEMKALYEQNQSDVNEAKSGGRSDLIPTIKFRHCSLLRNRRCTVAYLYDRLLRIRALRWEYGSVLPNALRFHMAAEEMEWFNNYKRSLATYMRSLGGDEGLDITQDMKPPKSLYIEVRCLKDYGEFEVDDGTSVLLKKNSQHFLPRWKCEQLIRQGVLEHILS

SEQ ID NO: 849128 - protein, 196 aa, Homo sapiens; identical to SEQ ID NO: 849127

SEQ ID NO: 849129 - protein, 196 aa, Homo sapiens; identical to SEQ ID NO: 849127

SEQ ID NO: 849130 - protein, 196 aa, Homo sapiens; identical to SEQ ID NO: 849127

SEQ ID NO: 849131 - protein, 161 aa, Homo sapiens
MKALYEQNQSDVNEAKSGGRSDLIPTIKFRHCSLLRNRRCTVAYLYDRLLRIRALRWEYGSVLPNALRFHMAAEEMEWFNNYKRSLATYMRSLGGDEGLDITQDMKPPKSLYIEVRCLKDYGEFEVDDGTSVLLKKNSQHFLPRWKCEQLIRQGVLEHILS

SEQ ID NO: 849132 - protein, 122 aa, Homo sapiens
MKALYEQNQSDVNEAKSGGRSDLIPTIKFRHCSLLRNRRCTVAYLYDRLLRIRALRWEYGSVLPNALRFHMAAEEVRCLKDYGEFEVDDGTSVLLKKNSQHFLPRWKCEQLIRQGVLEHILS

SEQ ID NO: 849133 - protein, 619 aa, Homo sapiens
SGCWGCKARAVSCWRCREEDAGARLPSSAAAAAMIPVSLVVVVVGGWTVVYLTDLVLKSSVYFKHSYEDWLENNGLSISPFHIRWQTAVFNRAFYSWGRRKARMLYQWFNFGMVFGVIAMFSSFFLLGKTLMQTLAQMMADSPSSYSSSSSSSSSSSSSSSSSSSSSSSLHNEQVLQVVVPGINLPVNQLTYFFTAVLISGVVHEIGHGIAAIREQVRFNGFGIFLFIIYPGAFVDLFTTHLQLISPVQQLRIFCADFSITQDLEIPADIVELHDINVEPLPMEDIPTESVQYEDVDGNWIYGGHNHPPLMVLQPLFTNTGYGDHDQEMLMLQTQEEVVGYCDSDNQLGNDLEDQLALPDSIEDEHFQMTLASLSASAASTSTSTQSRSKKPSKKPSGKSATSTEANPAGSSSSLGTRKWEQKQMQVKTLEGEFSVTMWSPNDNNDQGAVGEGQAENPPDYSEYLKGKKLPPGGLPGIDLSDPKQLAEFTKVKPKRSKGEPPKTVPCSYSGCEKMFRDYAAMRKHLHIHGPRVHVCAECGKAFLESSKLRRHQLVHTGEKPFQCTFEGCGKRFSLDFNLRTHLRIHTGDKPFVCPFDVCNRKFAQSTNLKTHILTHVKT

SEQ ID NO: 849134 - protein, 552 aa, Homo sapiens
SGCWGCKARAVSCWRCREEDAGARLPSSAAAAAMIPVSLVVVVVGGWTVVYLTDLVLKSSVYFKHSYEDWLENNGLSISPFHIRWQTAVFNRAFYSWGRRKARMLYQWFNFGMVFGVIAMFSSFFLLGKTLMQTLAQMMADSPSSYSSSSSSSSSSSSSSSSSSSSSSSLHNEQVLQVVVPGINLPVNQLTYFFTAVLISGVVHEIGHGIAAIREQVRFNGFGIFLFIIYPGAFVDLFTTHLQLISPVQQLRIFCAGIWHNFVLALLGILALVLLPVILLPFYYTGVGVLITEVAEDSPAIGPRGLFVGDLVTHLQDCPVTNVQDWNECLDTIAYEPQIGYCISASTLQQLSFPVRAYKRLDGSTECCNNHSLTDVCFSYRNNFNKRLHTCLPARKAVEATQVCRTNKDCKKSSSSSFCIIPSLETHTRLIKVKHPPQIDMLYVGHPLHLHYTVSITSFIPRFNFLSIDLPVVVETFVKYLISLSGALAIVNAVPCFALDGQWILNSFLDATLTSVIGDNDVKDLIGFFILLGGSVLLAANVTLGLWMVTAR

SEQ ID NO: 849135 - protein, 183 aa, Homo sapiens
DTSSRGPRCLAASLLTTQLVPHPGNCEELAKCLSTELISSLEHRGHQEGAKTMQTPVNIPVPVLRLPRGPDGFSRGFAPDGRRAPLRPEVPEIQECPIAQESLESQEQRARAALRERYLRSLLAMVGHQVSFTLHEGVRVAAHFGATDLDVANFYVSQLQTPIGVQAEALLRCSDIISYTFKP

SEQ ID NO: 849136 - protein, 131 aa, Homo sapiens
MQTPVNIPVPVLRLPRGPDGFSRGFAPDGRRAPLRPEVPEIQECPIAQESLESQEQRARAALRERYLRSLLAMVGHQVSFTLHEGVRVAAHFGATDLDVANFYVSQLQTPIGVQAEALLRCSDIISYTFKP

SEQ ID NO: 849137 - protein, 131 aa, Homo sapiens; identical to SEQ ID NO: 849136

SEQ ID NO: 849138 - protein, 1046 aa, Homo sapiens
MQRGSRTVEEGARDAEPTRACRGKWRRSRRADAPRVGEGTEVRSPSYPARDIELRWASLRWESRSEFFQARPGCSGKGPAPVPRSLSGLAPGNPAQGDGRGLTCSHRRLRPPSHGLPEARPADENAAAAMAADVVGDVYVLVEHPFEYTGKDGRRVAIRPNERYRLLRRSTEHWWHVRREPGGRPFYLPAQYVRELPALGNPAAAAPPGPHPSPAAPEPLAYDYRFVSAAATAGPDGAPEESGGRASSLCGPAQRGAATQRSSLAPGLPACLYLRPAAPVRPAQSLNDLACAAVSPPAGLLGSSGSFKACSVAGSWVCPRPLARSDSENVYEVIQDLHVPPREESAEQVDDPPEPVYANIERQPRATSPGAAAAPLPSPVWETHTDAGTGRPYYYNPDTGVTTWESPFEAAEGAASPATSPASVDSHVSLETEWGQYWDEESRRVFFYNPLTGETAWEDEAENEPEEELEMQPGLSPGSPGDPRVRGRARVGGSPLSASDPASCSQRPRDTRPPTPETDYPESLTSYPEEDYSPVGSFGEPGPTSPLTTPPGWSCHVSQDKQMLYTNHFTQEQWVRLEDPHGKPYFYNPEDSSVRWELPQVPVPAPRSIHKSSQDGDTPAQASPPEEKVPAELDEVGSWEEVSPATAAVRTKTLDKAGVLHRTKTADKGKRLRKKHWSASWTVLEGGVLTFFKDSKTSAAGGLRQPSKFSTPEYTVELRGATLSWAPKDKSSRKNVLELRSRDGSEYLIQHDSEAIISTWHKAIAQGIQELSAELPPEESESSRVDFGSSERLGSWQEKEEDARPNAAAPALGPVGLESDLSKVRHKLRKFLQSRPTLQSLREKGYIKDQVFGCALAALCERERSRVPRFVQQCIRAVEARGLDIDGLYRISGNLATIQKLRYKVDHDERLDLDDGRWEDVHVITGALKLFFRELPEPLFPFSHFRQFIAAIKLQDQARRSRCVRDLVRSLPAPNHDTLRMLFQHLCRVIEHGEQNRMSVQSVAIVFGPTLLRPEVEETSMPMTMVFQNQVVELILQQCADIFPPH

SEQ ID NO: 849139 - protein, 961 aa, Homo sapiens
MQRGSRTVEEGARDAEPTRACRGKWRRSRRADAPRVGEGTEVRSPSYPARDIELRWASLRWESRSEFFQARPGCSGKGPAPVPRSLSGLAPGNPAQGDGRGLTCSHRRLRPPSHGLPEARPADENAAAAMAADVVGDVYVLVEHPFEYTGKDGRRVAIRPNERYRLLRRSTEHWWHVRREPGGRPFYLPAQYVRELPALGNPAAAAPPGPHPSPAAPEPLAYDYRFVSAAATAGPDGAPEESGGRASSLCGPAQRGAATQRSSLAPGLPACLYLRPAAPVRPAQSLNDLACAAVSPPAGLLGSSGSFKACSVAGSWVCPRPLARSDSENVYEVIQDLHVPPREESAEQVDDPPEPVYANIERQPRATSPGAAAAPLPSPVWETHTDAGTGRPYYYNPDTGVTTWESPFEAAEGAASPATSPASVDSHVSLETEWGQYWDEESRRVFFYNPLTGETAWEDEAENEPEEELEMQPGLSPGSPGDPRPPTPETDYPESLTSYPEEDYSPVGSFVGEAGGPPGKPYFYNPEDSSVRWELPQVPVPAPRSIHKSSQDGDTPAQASPPEEKTKTLDKAGVLHRTKTADKGKRLRKKHWSASWTVLEGGVLTFFKDSKTSAAGGLRQPSKFSTPEYTVELRGATLSWAPKDKSSRKNVLELRSRDGSEYLIQHDSEAIISTWHKAIAQGIQELSAELPPEESESSRVDFGSSERLGSWQEKEEDARPNAAAPALGPVGLESDLSKVRHKLRKFLQSRPTLQSLREKGYIKDQVFGCALAALCERERSRVPRFVQQCIRAVEARGLDIDGLYRISGNLATIQKLRYKVDHDERLDLDDGRWEDVHVITGALKLFFRELPEPLFPFSHFRQFIAAIKLQDQARRSRCVRDLVRSLPAPNHDTLRMLFQHLCRVIEHGEQNRMSVQSVAIVFGPTLLRPEVEETSMPMTMVFQNQVVELILQQCADIFPPH

SEQ ID NO: 849140 - protein, 715 aa, Homo sapiens
GPGCTGRKVYDAAREPHSRGGSAGRRAHARLPGQVEAKPASGRPEVDDPPEPVYANIERQPRATSPGAAAAPLPSPVWETHTDAGTGRPYYYNPDTGVTTWESPFEAAEGAASPATSPASVDSHVSLETEWGQYWDEESRRVFFYNPLTGETAWEDEAENEPEEELEMQPGLSPGSPGDPRPPTPETDYPESLTSYPEEDYSPVGSFGEPGPTSPLTTPPGWSCHVSQDKQMLYTNHFTQEQWVRLEDPHGKPYFYNPEDSSVRWELPQVPVPAPRSIHKSSQDGDTPAQASPPEEKVPAELDEVGSWEEVSPATAAVRTKTLDKAGVLHRTKTADKGKRLRKKHWSASWTVLEGGVLTFFKDSKTSAAGGLRQPSKFSTPEYTVELRGATLSWAPKDKSSRKNVLELRSRDGSEYLIQHDSEAIISTWHKAIAQGIQELSAELPPEESESSRVDFGSSERLGSWQEKEEDARPNAAAPALGPVGLESDLSKVRHKLRKFLQSRPTLQSLREKGYIKDQVFGCALAALCERERSRVPRFVQQCIRAVEARGLDIDGLYRISGNLATIQKLRYKVDHDERLDLDDGRWEDVHVITGALKLFFRELPEPLFPFSHFRQFIAAIKLQDQARRSRCVRDLVRSLPAPNHDTLRMLFQHLCRVIEHGEQNRMSVQSVAIVFGPTLLRPEVEETSMPMTMVFQNQVVELILQQCADIFPPH

SEQ ID NO: 849141 - protein, 715 aa, Homo sapiens
DWKEPGALIPSPPLGTEVDDPPEPVYANIERQPRATSPGAAAAPLPSPVWETHTDAGTGRPYYYNPDTGVTTWESPFEAAEGAASPATSPASVDSHVSLETEWGQYWDEESRRVFFYNPLTGETAWEDEAENEPEEELEMQPGLSPGSPGDPRVRGRARVGGSPLSASDPASCSQRPRDTRPPTPETDYPESLTSYPEEDYSPVGSFGEPGPTSPLTTPPGWSCHVSQDKQMLYTNHFTQEQWVRLEDPHGKPYFYNPEDSSVRWELPQVPVPAPRSIHKSSQDGDTPAQASPPEEKVPAELDEVGSWEEVSPATAAVRTKTLDKAGVLHRTKTADKGKRLRKKHWSASWTVLEGGVLTFFKDSKTSAAGGLRQPSKFSTPEYTVELRGATLSWAPKDKSSRKNVLELRSRDGSEYLIQHDSEAIISTWHKAIAQGIQELSAELPPEESESSRVDFGSSERLGSWQEKEEDARPNAAAPALGPVGLESDLSKVRHKLRKFLQSRPTLQSLREKGYIKDQVFGCALAALCERERSRVPRFVQQCIRAVEARGLDIDGLYRISGNLATIQKLRYKVDHDERLDLDDGRWEDVHVITGALKLFFRELPEPLFPFSHFRQFIAAIKLQDQARRSRCVRDLVRSLPAPNHDTLRMLFQHLCRVIEHGEQNRMSVQSVAIVFGPTLLRPEVEETSMPMTMVFQNQVVELILQQCADIFPPH

SEQ ID NO: 849142 - protein, 1113 aa, Homo sapiens
MQRGSRTVEEGARDAEPTRACRGKWRRSRRADAPRVGEGTEVRSPSYPARDIELRWASLRWESRSEFFQARPGCSGKGPAPVPRSLSGLAPGNPAQGDGRGLTCSHRRLRPPSHGLPEARPADENAAAAMAADVVGDVYVLVEHPFEYTGKDGRRVAIRPNERYRLLRRSTEHWWHVRREPGGRPFYLPAQYVRELPALGNPAAAAPPGPHPSPAAPEPLAYDYRFVSAAATAGPDGAPEESGGRASSLCGPAQRGAATQRSSLAPGLPACLYLRPAAPVRPAQSLNDLACAAVSPPAGLLGSSGSFKACSVAGSWVCPRPLARSDSENVYEVIQDLHVPPREESAEQVDDPPEPVYANIERQPRATSPGAAAAPLPSPVWETHTDAGTGRPYYYNPDTGVTTWESPFEAAEGAASPATSPASVDSHVSLETEWGQYWDEESRRVFFYNPLTGETAWEDEAENEPEEELEMQPGLSPGSPGDPRVRGRARVGGSPLSASDPASCSQRPRDTRPPTPETDYPESLTSYPEEDYSPVGSFGEPGPTSPLTTPPGWSCHVSQDKQMLYTNHFTQEQWVRLEDPHGKPYFYNPEDSSVRWELPQVPVPAPRSIHKSSQDGDTPAQASPPEEKVPAELDEVGSWEEVSPATAAVRTKTLDKAGVLHRTKTADKGKRLRKKHWSASWTVLEGGVLTFFKDSKTSAAGGLRQPSKFSTPEYTVELRGATLSWAPKDKSSRKNVLELRSRDGSEYLIQHDSEAIISTWHKAIAQGIQELSAELPPEESESSRVDFGSSERLGSWQEKEEDARPNAAAPALGPVGLESDLSKVRHKLRKFLQSRPTLQSLREKGYIKDQVFGCALAALCERERSRVPRFVQQCIRAVEARGTCAAGVRAAGIGVPAGLLPGPQLETPGWTQGPGGKYGRPRVGVIAGTRSPTLSPSLNPGSAPPSGPGLDIDGLYRISGNLATIQKLRYKVDHDERLDLDDGRWEDVHVITGALKLFFRELPEPLFPFSHFRQFIAAIKLQDQARRSRCVRDLVRSLPAPNHDTLRMLFQHLCRVIEHGEQNRMSVQSVAIVFGPTLLRPEVEETSMPMTMVFQNQVVELILQQCADIFPPH

SEQ ID NO: 849143 - protein, 1046 aa, Homo sapiens; identical to SEQ ID NO: 849138

SEQ ID NO: 849144 - protein, 154 aa, Homo sapiens
RGTDFPSVLLPSSATDERLDLDDGRWEDVHVITGALKLFFRELPEPLFPFSHFRQFIAAIKLQDQARRSRCVRDLVRSLPAPNHDTLRMLFQHLCRVIEHGEQNRMSVQSVAIVFGPTLLRPEVEETSMPMTMVFQNQVVELILQQCADIFPPH

SEQ ID NO: 849145 - protein, 1046 aa, Homo sapiens; identical to SEQ ID NO: 849138

SEQ ID NO: 849146 - protein, 499 aa, Homo sapiens
MQRGSRTVEEGARDAEPTRACRGKWRRSRRADAPRVGEGTEVRSPSYPARDIELRWASLRWESRSEFFQARPGCSGKGPAPVPRSLSGLAPGNPAQGDGRGLTCSHRRLRPPSHGLPEARPADENAAAAMAADVVGDVYVLVEHPFEYTGKDGRRVAIRPNERYRLLRRSTEHWWHVRREPGGRPFYLPAQYVRELPALGNPAAAAPPGPHPSPAAPEPLAYDYRFVSAAATAGPDGAPEESGGRASSLCGPAQRGAATQRSSLAPGLPACLYLRPAAPVRPAQSLNDLACAAVSPPAGLLGSSGSFKACSVAGSWVCPRPLARSDSENVYEVIQDLHVPPREESAEQVDDPPEPVYANIERQPRATSPGAAAAPLPSPVWETHTDAGTGRPYYYNPDTGVTTWESPFEAAEGAASPATSPASVDSHVSLETEWGQYWDEESRRVFFYNPLTGETAWEDEAENEPEEELEMQPGLSPGSPGDPRVRGRARVGGSTSERL

SEQ ID NO: 849147 - protein, 917 aa, Homo sapiens
MAADVVGDVYVLVEHPFEYTGKDGRRVAIRPNERYRLLRRSTEHWWHVRREPGGRPFYLPAQYVRELPALGNPAAAAPPGPHPSPAAPEPLAYDYRFVSAAATAGPDGAPEESGGRASSLCGPAQRGAATQRSSLAPGLPACLYLRPAAPVRPAQSLNDLACAAVSPPAGLLGSSGSFKACSVAGSWVCPRPLARSDSENVYEVIQDLHVPPREESAEQVDDPPEPVYANIERQPRATSPGAAAAPLPSPVWETHTDAGTGRPYYYNPDTGVTTWESPFEAAEGAASPATSPASVDSHVSLETEWGQYWDEESRRVFFYNPLTGETAWEDEAENEPEEELEMQPGLSPGSPGDPRVRGRARVGGSPLSASDPASCSQRPRDTRPPTPETDYPESLTSYPEEDYSPVGSFGEPGPTSPLTTPPGWSCHVSQDKQMLYTNHFTQEQWVRLEDPHGKPYFYNPEDSSVRWELPQVPVPAPRSIHKSSQDGDTPAQASPPEEKVPAELDEVGSWEEVSPATAAVRTKTLDKAGVLHRTKTADKGKRLRKKHWSASWTVLEGGVLTFFKDSKTSAAGGLRQPSKFSTPEYTVELRGATLSWAPKDKSSRKNVLELRSRDGSEYLIQHDSEAIISTWHKAIAQGIQELSAELPPEESESSRVDFGSSERLGSWQEKEEDARPNAAAPALGPVGLESDLSKVRHKLRKFLQSRPTLQSLREKGYIKDQVFGCALAALCERERSRVPRFVQQCIRAVEARGLDIDGLYRISGNLATIQKLRYKVDHDERLDLDDGRWEDVHVITGALKLFFRELPEPLFPFSHFRQFIAAIKLQDQARRSRCVRDLVRSLPAPNHDTLRMLFQHLCRVIEHGEQNRMSVQSVAIVFGPTLLRPEVEETSMPMTMVFQNQVVELILQQCADIFPPH

SEQ ID NO: 849148 - protein, 721 aa, Homo sapiens
FPVALCQHWGSAPGLYPQNLPRALSRQFRGARMVDIIAKVTRRQSRALPAQVDDPPEPVYANIERQPRATSPGAAAAPLPSPVWETHTDAGTGRPYYYNPDTGVTTWESPFEAAEGAASPATSPASVDSHVSLETEWGQYWDEESRRVFFYNPLTGETAWEDEAENEPEEELEMQPGLSPGSPGDPRPPTPETDYPESLTSYPEEDYSPVGSFGEPGPTSPLTTPPGWSCHVSQDKQMLYTNHFTQEQWVRLEDPHGKPYFYNPEDSSVRWELPQVPVPAPRSIHKSSQDGDTPAQASPPEEKVPAELDEVGSWEEVSPATAAVRTKTLDKAGVLHRTKTADKGKRLRKKHWSASWTVLEGGVLTFFKDSKTSAAGGLRQPSKFSTPEYTVELRGATLSWAPKDKSSRKNVLELRSRDGSEYLIQHDSEAIISTWHKAIAQGIQELSAELPPEESESSRVDFGSSERLGSWQEKEEDARPNAAAPALGPVGLESDLSKVRHKLRKFLQSRPTLQSLREKGYIKDQVFGCALAALCERERSRVPRFVQQCIRAVEARGLDIDGLYRISGNLATIQKLRYKVDHDERLDLDDGRWEDVHVITGALKLFFRELPEPLFPFSHFRQFIAAIKLQDQARRSRCVRDLVRSLPAPNHDTLRMLFQHLCRVIEHGEQNRMSVQSVAIVFGPTLLRPEVEETSMPMTMVFQNQVVELILQQCADIFPPH

SEQ ID NO: 849149 - protein, 503 aa, Homo sapiens
TIPLPTVGEAGGPPREAILLQSRGLLCSMGAAPGNNLGKGGVGERGRDHIRLCLSPQVPVPAPRSIHKSSQDGDTPAQASPPEEKVPAELDEVGSWEEVSPATAAVRTKTLDKAGVLHRTKTADKGKRLRKKHWSASWTVLEGGVLTFFKDSKTSAAGGLRQPSKFSTPEYTVELRGATLSWAPKDKSSRKNVLELRSRDGSEYLIQHDSEAIISTWHKAIAQGIQELSAELPPEESESSRVDFGSSERLGSWQEKEEDARPNAAAPALGPVGLESDLSKVRHKLRKFLQSRPTLQSLREKGYIKDQVFGCALAALCERERSRVPRFVQQCIRAVEARGLDIDGLYRISGNLATIQKLRYKVDHDERLDLDDGRWEDVHVITGALKLFFRELPEPLFPFSHFRQFIAAIKLQDQARRSRCVRDLVRSLPAPNHDTLRMLFQHLCRVIEHGEQNRMSVQSVAIVFGPTLLRPEVEETSMPMTMVFQNQVVELILQQCADIFPPH

SEQ ID NO: 849150 - protein, 1046 aa, Homo sapiens; identical to SEQ ID NO: 849138

SEQ ID NO: 849151 - protein, 1030 aa, Homo sapiens
MQRGSRTVEEGARDAEPTRACRGKWRRSRRADAPRVGEGTEVRSPSYPARDIELRWASLRWESRSEFFQARPGCSGKGPAPVPRSLSGLAPGNPAQGDGRGLTCSHRRLRPPSHGLPEARPADENAAAAMAADVVGDVYVLVEHPFEYTGKDGRRVAIRPNERYRLLRRSTEHWWHVRREPGGRPFYLPAQYVRELPALGNPAAAAPPGPHPSPAAPEPLAYDYRFVSAAATAGPDGAPEESGGRASSLCGPAQRGAATQRSSLAPGLPACLYLRPAAPVRPAQSLNDLACAAVSPPAGLLGSSGSFKACSVAGSWVCPRPLARSDSENVYEVIQDLHVPPREESAEQVDDPPEPVYANIERQPRATSPGAAAAPLPSPVWETHTDAGTGRPYYYNPDTGVTTWESPFEAAEGAASPATSPASVDSHVSLETEWGQYWDEESRRVFFYNPLTGETAWEDEAENEPEEELEMQPGLSPGSPGDPRVRGRARVGGSPLSASDPASCSQRPRDTRPPTPETDYPESLTSYPEEDYSPVGSFGEPGPTSPLTTPPGWSCHVSQDKQMLYTNHFTQEQWVRLEDPHGKPYFYNPEDSSVRWELPQVPVPAPRSIHKSSQDGDTPAQASPPEEKVPAELDEVGSWEEVSPATAAVRTKTLDKAGVLHRTKTADKGKRLRKKHWSASWTVLEGGVLTFFKDSKTSAAGGLRQPSKFSTPEYTVELRGATLSWAPKDKSSRKNVLELRSRDGSEYLIQHDSEAIISTWHKAIAQGIQELSAELPPEESESSRVDFGSSERLGSWQEKEEDARPNAAAPALGPVGLESDLSKVRHKLRKFLQSRPTLQSLREKGYIKDQVFGCALAALCERERSRVPRFVQQCIRAVEARGTCAAGVRAAGIGVPAGLLPGPQLETPGWTQGPGGKYGRPRVGVIAGTRSPTLSPSLNPGSAPPSGPGLDIDGLYRISGNLATIQKLRYKVDHDERLDLDDGRWEDVHVITGALKLFFRELPEPLFPFSHFRQFIAAISEHLGQVGRMG

SEQ ID NO: 849152 - protein, 1030 aa, Homo sapiens; identical to SEQ ID NO: 849151

SEQ ID NO: 849153 - protein, 1046 aa, Homo sapiens; identical to SEQ ID NO: 849138

SEQ ID NO: 849154 - protein, 854 aa, Homo sapiens
MEMPLPPDDQELRNVIDKLAQFVARNGPEFEKMTMEKQKDNPKFSFLFGGEFYSYYKCKLALEQQQLICKQQTPELEPAATMPPLPQPPLAPAAPIPPAQGAPSMDELIQQSQWNLQQQEQHLLALRQEQVTAAVAHAVEQQMQKLLEETQLDMNEFDNLLQPIIDTCTKDAISAGKNWMFSNAKSPPHCELMAGHLRNRITADGAHFELRLHLIYLINDVLHHCQRKQARELLAALQKVVVPIYCTSFLAVEEDKQQKIARLLQLWEKNGYFDDSIIQQLQSPALGLGQYQATLINEYSSVVQPVQLAFQQQIQTLKTQHEEFVTSLAQQQQQQQQQQQQLQMPQMEAEVKATPPPPAPPPAPAPAPAIPPTTQPDDSKPPIQMPGSSEYEAPGGVQDPAAAGPRGPGPHDQIPPNKPPWFDQPHPVAPWGQQQPPEQPPYPHHQGGPPHCPPWNNSHEGMWGEQRGDPGWNGQRDAPWNNQPDAAWNSQFEGPWNSQHEQPPWGGGQREPPFRMQRPPHFRGPFPPHQQHPQFNQPPHPHNFNRFPPRFMQDDFPPRHPFERPPYPHRFDYPQGDFPAEMGPPHHHPGHRMPHPGINEHPPWAGPQHPDFGPPPHGFNGQPPHMRRQGPPHINHDDPSLVPNVPYFDLPAGLMAPLVKLEDHEYKPLDPKDIRLPPPMPPSERLLAAVEAFYSPPSHDRPRNSEGWEQNGLYEFFRAKMRARRRKGQEKRNSGPSRSRSRSKSRGRSSSRSNSRSSKSSGSYSRSRSRSCSRSYSRSRSRSRSRSRSSRSRSRSQSRSRSKSYSPGRRRRSRSRSPTPPSGISGTSIKAWAWLWMTPMRTTAGTRATPSSPA

SEQ ID NO: 849155 - protein, 916 aa, Homo sapiens
MEMPLPPDDQELRNVIDKLAQFVARNGPEFEKMTMEKQKDNPKFSFLFGGEFYSYYKCKLALEQQQLICKQQTPELEPAATMPPLPQPPLAPAAPIPPAQGAPSMDELIQQSQWNLQQQEQHLLALRQEQVTAAVAHAVEQQMQKLLEETQLDMNEFDNLLQPIIDTCTKDAISAGKNWMFSNAKSPPHCELMAGHLRNRITADGAHFELRLHLIYLINDVLHHCQRKQARELLAALQKVVVPIYCTSFLAVEEDKQQKIARLLQLWEKNGYFDDSIIQQLQSPALGLGQYQATLINEYSSVVQPVQLAFQQQIQTLKTQHEEFVTSLAQQQQQQQQQQQQLQMPQMEAEVKATPPPPAPPPAPAPAPAIPPTTQPDDSKPPIQMPGSSEYEAPGGVQDPAAAGPRGPGPHDQIPPNKPPWFDQPHPVAPWGQQQPPEQPPYPHHQGGPPHCPPWNNSHEGMWGEQRGDPGWNGQRDAPWNNQPDAAWNSQFEGPWNSQHEQPPWGGGQREPPFRMQRPPHFRGPFPPHQQHPQFNQPPHPHNFNRFPPRFMQDDFPPRHPFERPPYPHRFDYPQGDFPAEMGPPHHHPGHRMPHPGINEHPPWAGPQHPDFGPPPHGFNGQPPHMRRQGPPHINHDDPSLVPNVPYFDLPAGLMAPLVKLEDHEYKPLDPKDIRLPPPMPPSERLLAAVEAFYSPPSHDRPRNSEGWEQNGLYEFFRAKMRARRRKGQEKRNSGPSRSRSRSKSRGRSSSRSNSRSSKSSGSYSRSRSRSCSRSYSRSRSRSRSRSRSSRSRSRSQSRSRSKSYSPGRRRRSRSRSPTPPSSAGLGSNSAPPIPDSRLGEENKGHQMLVKMGWSGSGGLGAKEQGIQDPIKGGDVRDKWDQYKGVGVALDDPYENYRRNKSYSFIARMKARDECK

SEQ ID NO: 849156 - protein, 927 aa, Homo sapiens
MEMPLPPDDQELRNVIDKLAQFVARNGPEFEKMTMEKQKDNPKFSFLFGGEFYSYYKCKLALEQQQLICKQQTPELEPAATMPPLPQPPLAPAAPIPPAQGAPSMDELIQQSQWNLQQQEQHLLALRQEQVTAAVAHAVEQQMQKLLEETQLDMNEFDNLLQPIIDTCTKDAISAGKNWMFSNAKSPPHCELMAGHLRNRITADGAHFELRLHLIYLINDVLHHWALTRGKSLPHSQRKQARELLAALQKVVVPIYCTSFLAVEEDKQQKIARLLQLWEKNGYFDDSIIQQLQSPALGLGQYQATLINEYSSVVQPVQLAFQQQIQTLKTQHEEFVTSLAQQQQQQQQQQQQLQMPQMEAEVKATPPPPAPPPAPAPAPAIPPTTQPDDSKPPIQMPGSSEYEAPGGVQDPAAAGPRGPGPHDQIPPNKPPWFDQPHPVAPWGQQQPPEQPPYPHHQGGPPHCPPWNNSHEGMWGEQRGDPGWNGQRDAPWNNQPDAAWNSQFEGPWNSQHEQPPWGGGQREPPFRMQRPPHFRGPFPPHQQHPQFNQPPHPHNFNRFPPRFMQDDFPPRHPFERPPYPHRFDYPQGDFPAEMGPPHHHPGHRMPHPGINEHPPWAGPQHPDFGPPPHGFNGQPPHMRRQGPPHINHDDPSLVPNVPYFDLPAGLMAPLVKLEDHEYKPLDPKDIRLPPPMPPSERLLAAVEAFYSPPSHDRPRNSEGWEQNGLYEFFRAKMRARRRKGQEKRNSGPSRSRSRSKSRGRSSSRSNSRSSKSSGSYSRSRSRSCSRSYSRSRSRSRSRSRSSRSRSRSQSRSRSKSYSPGRRRRSRSRSPTPPSSAGLGSNSAPPIPDSRLGEENKGHQMLVKMGWSGSGGLGAKEQGIQDPIKGGDVRDKWDQYKGVGVALDDPYENYRRNKSYSFIARMKARDECK

SEQ ID NO: 849157 - protein, 941 aa, Homo sapiens
MEMPLPPDDQELRNVIDKLAQFVARNGPEFEKMTMEKQKDNPKFSFLFGGEFYSYYKCKLALEQQQLICKQQTPELEPAATMPPLPQPPLAPAAPIPPAQGAPSMDELIQQSQWNLQQQEQHLLALRQEQVTAAVAHAVEQQMQKLLEETQLDMNEFDNLLQPIIDTCTKDAISAGKNWMFSNAKSPPHCELMAGHLRNRITADGAHFELRLHLIYLINDVLHHCQRKQARELLAALQKVVVPIYCTSFLAVEEDKQQKIARLLQLWEKNGYFDDSIIQQLQSPALGLGQYQATLINEYSSVVQPVQLAFQQQIQTLKTQHEEFVTSLAQQQQQQQQQQQQLQMPQMEAEVKATPPPPAPPPAPAPAPAIPPTTQPDDSKPPIQMPGSSEYEAPGGVQDPAAAGPRGPGPHDQIPPNKPPWFDQPHPVAPWGQQQPPEQPPYPHHQGGPPHCPPWNNSHEGMWGEQRGDPGWNGQRDAPWNNQPDAAWNSQFEGPWNSQHEQPPWGGGQREPPFRMQRPPHFRGPFPPHQQHPQFNQPPHPHNFNRFPPRFMQDDFPPRHPFERPPYPHRFDYPQGDFPAEMGPPHHHPGHRMPHPGINEHPPWAGPQHPDFGPPPHGFNGQPPHMRRQGPPHINHDDPSLVPNVPYFDLPAGLMAPLVKLEDHEYKPLDPKDIRLPPPMPPSERLLAAVEAFYSPPSHDRPRNSEGWEQNGLYEFFRAKMRARRRKGQEKRNSGPSRSRSRSKSRGRSSSRSNSRSSKSSGSYSRSRSRSCSRSYSRSRSRSRSRSRSSRSRSRSQSRSRSKSYSPGRRRRSRSRSPTPPSSAGLGSNSAPPIPDSRLGEENKGHQMLVKMGWSGSGGLGAKEQGIQDPIKGGDVRDKWDQYKGVGVALDDPYENYRRNKSYSSSPHPPALTWLPLGCVGTKPKPSAMTARGLKNRNTKL

SEQ ID NO: 849158 - protein, 774 aa, Homo sapiens
MQKLLEETQLDMNEFDNLLQPIIDTCTKDAISAGKNWMFSNAKSPPHCELMAGHLRNRITADGAHFELRLHLIYLINDVLHHCQRKQARELLAALQKVVVPIYCTSFLAVEEDKQQKIARLLQLWEKNGYFDDSIIQQLQSPALGLGQYQATLINEYSSVVQPVQLAFQQQIQTLKTQHEEFVTSLAQQQQQQQQQQQQLQMPQMEAEVKATPPPPAPPPAPAPAPAIPPTTQPDDSKPPIQMPGSSEYEAPGGVQDPAAAGPRGPGPHDQIPPNKPPWFDQPHPVAPWGQQQPPEQPPYPHHQGGPPHCPPWNNSHEGMWGEQRGDPGWNGQRDAPWNNQPDAAWNSQFEGPWNSQHEQPPWGGGQREPPFRMQRPPHFRGPFPPHQQHPQFNQPPHPHNFNRFPPRFMQDDFPPRHPFERPPYPHRFDYPQGDFPAEMGPPHHHPGHRMPHPGINEHPPWAGPQHPDFGPPPHGFNGQPPHMRRQGPPHINHDDPSLVPNVPYFDLPAGLMAPLVKLEDHEYKPLDPKDIRLPPPMPPSERLLAAVEAFYSPPSHDRPRNSEGWEQNGLYEFFRAKMRARRRKGQEKRNSGPSRSRSRSKSRGRSSSRSNSRSSKSSGSYSRSRSRSCSRSYSRSRSRSRSRSRSSRSRSRSQSRSRSKSYSPGRRRRSRSRSPTPPSSAGLGSNSAPPIPDSRLGEENKGHQMLVKMGWSGSGGLGAKEQGIQDPIKGGDVRDKWDQYKGVGVALDDPYENYRRNKSYSFIARMKARDECK

SEQ ID NO: 849159 - protein, 132 aa, Homo sapiens
LVTVSMHASCGCEVLITVIPINVSDYFLKRITCLDFSSSAGLGSNSAPPIPDSRLGEENKGHQMLVKMGWSGSGGLGAKEQGIQDPIKGGDVRDKWDQYKGVGVALDDPYENYRRNKSYSFIARMKARDECK

SEQ ID NO: 849160 - protein, 616 aa, Homo sapiens
MEMPLPPDDQELRNVIDKLAQFVARNGPEFEKMTMEKQKDNPKFSFLFGGEFYSYYKCKLALEQQQLICKQQTPELEPAATMPPLPQPPLAPAAPIPPAQGAPSMDELIQQSQWNLQQQEQHLLALRQEQVTAAVAHAVEQQMQKLLEETQLDMNEFDNLLQPIIDTCTKDAISAGKNWMFSNAKSPPHCELMAGHLRNRITADGAHFELRLHLIYLINDVLHHCQRKQARELLAALQKVVVPIYCTSFLAVEEDKQQKIARLLQLWEKNGYFDDSIIQQLQSPALGLGQYQATLINEYSSVVQPVQLAFQQQIQTLKTQHEEFVTSLAQQQQQQQQQQQQLQMPQMEAEVKATPPPPAPPPAPAPAPAIPPTTQPDDSKPPIQMPGSSEYEAPGGVQDPAAAGPRGPGPHDQIPPNKPPWFDQPHPVAPWGQQQPPEQPPYPHHQGGPPHCPPWNNSHEGMWGEQRGDPGWNGQRDAPWNNQPDAAWNSQFEGPWNSQHEQPPWGGGQREPPFRMQRPPHFRGPFPPHQQHPQFNQPPHPHNFNRFPPRFMQDDFPPRHPFERPPYPHRFDYPQGDFPAGECTGAWVGPGGGIHGSPAEQAGGAACGPAMLLSAQ

SEQ ID NO: 849161 - protein, 260 aa, Homo sapiens
DQRHQTKHTNNNTHNTQTSLGAPVRHEGEQTARLFFRAKMRARRRKGQEKRNSGPSRSRSRSKSRGRSSSRSNSRSSKSSGSYSRSRSRSCSRSYSRSRSRSRSRSRSSRSRSRSQSRSRSKSYSPGRRRRSRSRSPTPPSSAGLGSNSAPPIPDSRLGEENKGHQMLVKMGWSGSGGLGAKEQGIQDPIKGGDVRDKWDQYKGVGVALDDPYENYRRNKSYSSSPHPPALTWLPLGCVGTKPKPSAMTARGLKNRNTKL

SEQ ID NO: 849162 - protein, 589 aa, Homo sapiens
  misc_feature (554)..(554): Xaa can be any naturally occurring amino acid
MEMPLPPDDQELRNVIDKLAQFVARNGPEFEKMTMEKQKDNPKFSFLFGGEFYSYYKCKLALEQQQLICKQQTPELEPAATMPPLPQPPLAPAAPIPPAQGAPSMDELIQQSQWNLQQQEQHLLALRQEQVTAAVAHAVEQQMQKLLEETQLDMNEFDNLLQPIIDTCTKDAISAGKNWMFSNAKSPPHCELMAGHLRNRITADGAHFELRLHLIYLINDVLHHCQRKQARELLAALQKVVVPIYCTSFLAVEEDKQQKIARLLQLWEKNGYFDDSIIQQLQSPALGLGQYQATLINEYSSVVQPVQLAFQQQIQTLKTQHEEFVTSLAQQQQQQQQQQQQLQMPQMEAEVKATPPPPAPPPAPAPAPAIPPTTQPDDSKPPIQMPGSSEYEAPGGVQDPAAAGPRGPGPHDQIPPNKPPWFDQPHPVAPWGQQQPPEQPPYPHHQGGPPHCPPWNNSHEGMWGEQRGDPGWNGQRDAPWNNQPDAAWNSQFEGPWNSQHEQPPPPIPPAQGAPTMDELIQQSQLNLQQQEQHLLALRQEQVTAAVAHAVEQQXQKLLEETQLDMNEFDNLLQPIIDTCTKDAISAGKN

SEQ ID NO: 849163 - protein, 916 aa, Homo sapiens; identical to SEQ ID NO: 849155

SEQ ID NO: 849164 - protein, 916 aa, Homo sapiens; identical to SEQ ID NO: 849155

SEQ ID NO: 849165 - protein, 916 aa, Homo sapiens; identical to SEQ ID NO: 849155

SEQ ID NO: 849166 - protein, 455 aa, Homo sapiens
MWGEQRGDPGWNGQRDAPWNNQPDAAWNSQFEGPWNSQHEQPPWGGGQREPPFRMQRPPHFRGPFPPHQQHPQFNQPPHPHNFNRFPPRFMQDDFPPRHPFERPPYPHRFDYPQGDFPAEMGPPHHHPGHRMPHPGINEHPPWAGPQHPDFGPPPHGFNGQPPHMRRQGPPHINHDDPSLVPNVPYFDLPAGLMAPLVKLEDHEYKPLDPKDIRLPPPMPPSERLLAAVEAFYSPPSHDRPRNSEGWEQNGLYEFFRAKMRARRRKGQEKRNSGPSRSRSRSKSRGRSSSRSNSRSSKSSGSYSRSRSRSCSRSYSRSRSRSRSRSRSSRSRSRSQSRSRSKSYSPGRRRRSRSRSPTPPSSAGLGSNSAPPIPDSRLGEENKGHQMLVKMGWSGSGGLGAKEQGIQDPIKGGDVRDKWDQYKGVGVALDDPYENYRRNKSYSFIARMKARDECK

SEQ ID NO: 849167 - protein, 681 aa, Homo sapiens
MEMPLPPDDQELRNVIDKLAQFVARNGPEFEKMTMEKQKDNPKFSFLFGGEFYSYYKCKLALEQQQLICKQQTPELEPAATMPPLPQPPLAPAAPIPPAQGAPSMDELIQQSQWNLQQQEQHLLALRQEQVTAAVAHAVEQQMQKLLEETQLDMNEFDNLLQPIIDTCTKDAISAGKNWMFSNAKSPPHCELMAGHLRNRITADGAHFELRLHLIYLINDVLHHCQRKQARELLAALQKVVVPIYCTSFLAVEEDKQQKIARLLQLWEKNGYFDDSIIQQLQSPALGLGQYQATLINEYSSVVQPVQLAFQQQIQTLKTQHEEFVTSLAQQQQQQQQQQQQLQMPQMEAEVKATPPPPAPPPAPAPAPAIPPTTQPDDSKPPIQMPGSSEYEAPGGVQDPAAAGPRGPGPHDQIPPNKPPWFDQPHPVAPWGQQQPPEQPPYPHHQGGPPHCPPWNNSHEGMWGEQRGDPGWNGQRDAPWNNQPDAAWNSQFEGPWNSQHEQPPWGGGQREPPFRMQRPPHFRGPFPPHQQHPQFNQPPHPHNFNRFPPRFMQDDFPPRHPFERPPYPHRFDYPQGDFPAEMGPPHHHPGHRMPHPGINEHPPWAGPQHPDFGPPPHGFNGQPPHMRRQGPPHINHDDPSLVPNVPYFDLPAGLMAPLVKVMPHSGLQAEHAYHTGPRFSL

SEQ ID NO: 849168 - protein, 353 aa, Homo sapiens
MEMPLPPDDQELRNVIDKLAQFVARNGPEFEKMTMEKQKDNPKFSFLFGGEFYSYYKCKLALEQQQLICKQQTPELEPAATMPPLPQPPLAPAAPIPPAQGAPSMDELIQQSQWNLQQQEQHLLALRQEQVTAAVAHAVEQQMQKLLEETQLDMNEFDNLLQPIIDTCTKDAISAGKNWMFSNAKSPPHCELMAGHLRNRITADGAHFELRLHLIYLINDVLHHCQRKQARELLAALQKVVVPIYCTSFLAVEEDKQQKIARLLQLWEKNGYFDDSIIQQLQIPSRAWSPTPASAFHSIISFHTPEGRGGQEGSCSCQKLVGDRWESATPGVHGQPGAIPFICTETFLKNSFQ

SEQ ID NO: 849169 - protein, 111 aa, Homo sapiens
MAGKQAVSASGKWLDGIRKWYYNAAGFNKLGLMRDDTIYEDEDVKEAIRRLPENLYNDRMFRIKRALDLNLKHQILPKEQWTKYEEENFYLEPYLKEVIRERKEREEWAKK

SEQ ID NO: 849170 - protein, 96 aa, Homo sapiens
SFSSLLVLFFFFLPSLLMRDDTIYEDEDVKEAIRRLPENLYNDRMFRIKRALDLNLKHQILPKEQWTKYEEENFYLEPYLKEVIRERKEREEWAKK

SEQ ID NO: 849171 - protein, 111 aa, Homo sapiens; identical to SEQ ID NO: 849169

SEQ ID NO: 849172 - protein, 111 aa, Homo sapiens; identical to SEQ ID NO: 849169

SEQ ID NO: 849173 - protein, 112 aa, Homo sapiens
FALEYPHVDTSGKWLDGIRKWYYNAAGFNKLGLMRDDTIYEDEDVKEAIRRLPENLYNDRMFRIKRALDLNLKHQILPKEQWTKYEEENFYLEPYLKEVIRERKEREEWAKK

SEQ ID NO: 849174 - protein, 111 aa, Homo sapiens; identical to SEQ ID NO: 849169

SEQ ID NO: 849175 - protein, 137 aa, Homo sapiens
RLIDVIIDHTRLVLLAGNAAAHKSHQGTRMFMNIVSGKWLDGIRKWYYNAAGFNKLGLMRDDTIYEDEDVKEAIRRLPENLYNDRMFRIKRALDLNLKHQILPKEQWTKYEEENFYLEPYLKEVIRERKEREEWAKK

SEQ ID NO: 849176 - protein, 111 aa, Homo sapiens; identical to SEQ ID NO: 849169

SEQ ID NO: 849177 - protein, 112 aa, Homo sapiens
EPRGGENSQRGERGWKAYRKWYYNAAGFNKLGLMRDDTIYEDEDVKEAIRRLPENLYNDRMFRIKRALDLNLKHQILPKEQWTKYEEENFYLEPYLKEVIRERKEREEWAKK

SEQ ID NO: 849178 - protein, 161 aa, Homo sapiens
MAGKQAVSASGKWLDGIRKWYYNAAGFNKLGLMRDDTIYEDEDVKEAIRRLPENLYNDRMFRIKRALDLNLKHQILPKEQWTKYEEVFAVPALHSASYLDEKISPLSVPPDPKKSFCEANSHPLNCIETRQRPVDIHFFFFPKRLPPHNLSKQLITPSPQI

SEQ ID NO: 849179 - protein, 105 aa, Homo sapiens
MAGKQAVSASGKWLDGIRKWYYNAAGFNKLGLMRDDTIYEDEDVKEAIRRLPENLYNDRMFRIKRALDLNLKHQILPKEQWTKYEEENFYLEPYLKEVIRERQLL

SEQ ID NO: 849180 - protein, 105 aa, Homo sapiens; identical to SEQ ID NO: 849179

SEQ ID NO: 849181 - protein, 141 aa, Homo sapiens
MAGKQAVSASGKWLDGIRKWYYNAAGFNKLGLMRDDTIYEDEDVKEAIRRLPENLYNDRMFRIKRALDLNLKHQILPKEQWTKYEEVFAVPALHSASYLDEKISPLSVPPDPKKSFCEANSHPLNCIETRQRRKISTLNRI

SEQ ID NO: 849182 - protein, 141 aa, Homo sapiens; identical to SEQ ID NO: 849181

SEQ ID NO: 849183 - protein, 123 aa, Homo sapiens
GRLLLLNSRPRRLAGKQAVSASGKWLDGIRKWYYNAAGFNKLGLMRDDTIYEDEDVKEAIRRLPENLYNDRMFRIKRALDLNLKHQILPKEQWTKYEEENFYLEPYLKEVIRERKEREEWAKK

SEQ ID NO: 849184 - protein, 111 aa, Homo sapiens; identical to SEQ ID NO: 849169

SEQ ID NO: 849185 - protein, 123 aa, Homo sapiens; identical to SEQ ID NO: 849183

SEQ ID NO: 849186 - protein, 104 aa, Homo sapiens
LTRVPLIWWYRKWYYNAAGFNKLGLMRDDTIYEDEDVKEAIRRLPENLYNDRMFRIKRALDLNLKHQILPKEQWTKYEEENFYLEPYLKEVIRERKEREEWAKK

SEQ ID NO: 849187 - protein, 111 aa, Homo sapiens; identical to SEQ ID NO: 849169

SEQ ID NO: 849188 - protein, 111 aa, Homo sapiens; identical to SEQ ID NO: 849169

SEQ ID NO: 849189 - protein, 111 aa, Homo sapiens; identical to SEQ ID NO: 849169

SEQ ID NO: 849190 - protein, 129 aa, Homo sapiens
MRDDTIYEDEDVKEAIRRLPENLYNDRMFRIKRALDLNLKHQILPKEQWTKYEEVFAVPALHSASYLDEKISPLSVPPDPKKSFCEANSHPLNCIETRQRPVDIHFFFFPKRLPPHNLSKQLITPSPQI

SEQ ID NO: 849191 - protein, 108 aa, Homo sapiens
MAGKQAVSASGKWLDGIRKWYYNAAGFNKLGLMRDDTIYEDEDVKEAIRRLPENLYNDRMFRIKRALDLNLKHQILPKEQWTKYEEKKTTLSLTCEMILLKLLSKSLI

SEQ ID NO: 849192 - protein, 141 aa, Homo sapiens; identical to SEQ ID NO: 849181

SEQ ID NO: 849193 - protein, 167 aa, Homo sapiens
SDTPYSETPACHSLSLAACLHFGPFLSDDRKYGFVSHSQQRNSRLWEACWDPLMRAGTMAIKNLCEGVRRAGPARSTEYLRPMPFLCTPTRGLCHISDVRVQSPPQGLCHIPDVSVQSRSHYRAVPTPRPACGVDPPPQAPHLLGVCQKAGGSGMGLSPCWVPSYAV

SEQ ID NO: 849194 - protein, 142 aa, Homo sapiens
MLSCCLEPAAWDCGAEGRDGREEMVLGWKRDRGTTPRTLPASPSAGTPLWGAGHVLGDAGESPLPSHPCPNRWSCCWSRKSCGVLAGWRCGSEAAPLTQPPEVGGLRQDPGVRGNPSLPAPPQPVMRRLTFGPGPAPASDRP

SEQ ID NO: 849195 - protein, 238 aa, Homo sapiens
CGWVGGVGGRWGGGAGGGVGGAWSGGGGSASGQGVWAGWGVVAGGVVTGERYKAEPRVGEFIVRRISGVAPHVCPVGDKKRGGARETGGDRGRLGRARVGGGGKVGGRGGGVWWGGGGGVVVWGGLVCFVFEGREEGLMSPVQGPSVGSLLLLALLLLALLLLLHFGLLGLARDALVLLGASSVGLHIRVRIAGAAAGVGRAVVSLLDGGAAVRRRPLPSPLKLEAFGPGPAPASDRP

SEQ ID NO: 849196 - protein, 318 aa, Homo sapiens
APLSSRGLTATCPPVHRACARVPPPSALRAARLPCTPSRRLSLLARSFLAVVGRSSGVFPALLARVLAPLSSRLFVVPPLFSSLCCLSLFSSASREPHISAGSPGFLRLFDRLPYVWSPPAVSPRVFLVSVGPWPSVWPLAPFFAPVFPPPRKKPPDFFFFFFFCCFFFFFFEGREEGLMSPVQGPSVGSLLLLALLLLALLLLLHFGLLGLARDALVLLGASSVGLHIRVRIAGAAAGVGRAVVSLLWTRTCPCLRPALNFVGTELGISPVARPHTGLLGGGLQGCSQVELHGGKRSWVLRPRAPGPCRGAEQGEER

SEQ ID NO: 849197 - protein, 146 aa, Homo sapiens
MSPVQGPSVGSLLLLALLLLALLLLLHFGLLGLARDALVLLGASSVGLHIRVRIAGAAAGVGRAVVSLLWTRTCPCLRPALNFVGTELGISPVARPHTGLLGGGLQGCGEKLGGWCRQLLGLSPAPCTSSPHSPGAHLLPGRTPWR

SEQ ID NO: 849198 - protein, 179 aa, Homo sapiens
ADFRPARAWMEAARRPRLGLSRRRPPPAGGPSGGRPWFLLGGDERERLWAELLRTVSPELILDHEVPSLPAFPGQEPRCGPEPTEVFTVGPKTFSWTPFPPDLWGPGRSYRLLHGAGGHLESPARSLPQRPAPDPCRAPRVEQQPSVEGAAALRSCPMCQKEFAPRYFNSRPHLCPAGS

SEQ ID NO: 849199 - protein, 155 aa, Homo sapiens
WHEVARGGHPFRRTCGARAVPTGCFTGQEGTWNPPPGPCPSARHLIPAGPPGWSSSRLWRVPRPCAAAPCARRSSPPGTSTPAPTCVPLAPKLPPYVWVASEMWGRRHSRKKGIRGASTSSEHFIPQDATRSLSWRSRSVHRVLFPWKMCTLETA

SEQ ID NO: 849200 - protein, 189 aa, Homo sapiens
ADFRPARAWMEAARRPRLGLSRRRPPPAGGPSGGRPWFLLGGDERERLWAELLRTVSPELILDHEVPSLPAFPGQEPRCGPEPTEVFTVGPKTFSWTPFPPDLWGPGRSYRLLHGAGGHLESPARSLPQRPAPDPCRAPRVEQQPSVEGAAALRSCPMCQKEFAPRLTQLDVDSHLAQCLAESTEDVTW

SEQ ID NO: 849201 - protein, 204 aa, Homo sapiens
ADFRPARAWMEAARRPRLGLSRRRPPPAGGPSGGRPWFLLGGDERERLWAELLRTVSPELILDHEVPSLPAFPGQEPRCGPEPTEVFTVGPKTFSWTPFPPDLWGPGRSYRLLHGAGGHLESPARSLPQRPAPDPCRAPRVEQQPSVEGAAALRSCPMCQKEFAPRSKNSSGMRRHRSPKLAANNNNNKRKGRARWLTPVIPAL

SEQ ID NO: 849202 - protein, 110 aa, Homo sapiens
MFFVSLKKTTSTKQTRKNNKEKQQKRGGPQKKLQRGRQYKDTQIVEQEGPNKEAHYIERNRGRSYTTARGDTTAKRDHWETQPTRRGGTKCAKHHREVNAGREKQTEEHR

SEQ ID NO: 849203 - protein, 204 aa, Homo sapiens; identical to SEQ ID NO: 849201

SEQ ID NO: 849204 - protein, 116 aa, Homo sapiens
MRIKAGRAPVCLCVVMKKKKKAGDTTQGHATRATHPEQREQADRRERAPRRHGHRRGEKGRTKEGRTDAAKQNRRGEQDEGRRRERKTQEGKERGKGERRAKREKRAREEGGKERN

SEQ ID NO: 849205 - protein, 57 aa, Homo sapiens
MTGRGKNSHKHGNKTQTATRNTEHERKREKNGRTHKEKKKKRQKNEEQGEKERKKDK

SEQ ID NO: 849206 - protein, 158 aa, Homo sapiens
RTSAGAGLDGGGAEAAAGVEPPEAAPGGREPRCGPEPTEVFTVGPKTFSWTPFPPDLWGPGRSYRLLHGAGGHLESPARSLPQRPAPDPCRAPRVEQQPSVEGAAALRSCPMCQKEFAPRSKNSSGMRRHRSPKLAANNNNNKRKGRARWLTPVIPAL

SEQ ID NO: 849207 - protein, 189 aa, Homo sapiens; identical to SEQ ID NO: 849200

SEQ ID NO: 849208 - protein, 161 aa, Homo sapiens
TRPPTRPGGGAEPSGGRPWFLLGGDERERLWAELLRTVSPELILDHEVPSLPAFPGQEPRCGPEPTEVFTVGPKTFSWTPFPPDLWGPGRSYRLLHGAGGHLESPARSLPQRPAPDPCRAPRVEQQPSVEGAAALRSCPMCQKEFAPRYFNSRPHLCPAGS

SEQ ID NO: 849209 - protein, 44 aa, Homo sapiens
MTQTATRNTEHERKREKNGRTHKEKKKKRLKNEEQGEKERKKDK

SEQ ID NO: 849210 - protein, 110 aa, Homo sapiens; identical to SEQ ID NO: 849202

SEQ ID NO: 849211 - protein, 116 aa, Homo sapiens; identical to SEQ ID NO: 849204

SEQ ID NO: 849212 - protein, 204 aa, Homo sapiens; identical to SEQ ID NO: 849201

SEQ ID NO: 849213 - protein, 143 aa, Homo sapiens
RTSAGAGLDGGGAEAAAGVEPPEAAPGGREPRCGPEPTEVFTVGPKTFSWTPFPPDLWGPGRSYRLLHGAGGHLESPARSLPQRPAPDPCRAPRVEQQPSVEGAAALRSCPMCQKEFAPRLTQLDVDSHLAQCLAESTEDVTW

SEQ ID NO: 849214 - protein, 401 aa, Homo sapiens
APAAPAVPAVPAAPAAPAAAATAAAQPPADCMFQASMRSPNMEPFKQQKVEDFYDIGEELGSGQFAIVKKCREKSTGLEYAAKFIKKRQSRASRRGVSREEIEREVSILRQVLHHNVITLHDVYENRTDVVLILELVSGGELFDFLAQKESLSEEEATSFIKQILDGVNYLHTKKIAHFDLKPENIMLLDKNIPIPHIKLIDFGLAHEIEDGVEFKNIFGTPEFVAPEIVNYEPLGLEADMWSIGVITYILLSGASPFLGDTKQETLANITAVSYDFDEEFFSQTSELAKDFIRKLLVKETRKRLTIQEALRHPWITPVDNQQAMVRRESVVNLENFRKQYVRRRWKLSFSIVSLCNHLTRSLMKKVHLRPDEDLRNCESDTEEDIARRKALHPRRRSSTS

SEQ ID NO: 849215 - protein, 370 aa, Homo sapiens
MFQASMRSPNMEPFKQQKVEDFYDIGEELGSGQFAIVKKCREKSTGLEYAAKFIKKRQSRASRRGVSREEIEREVSILRQVLHHNVITLHDVYENRTDVVLILELVSGGELFDFLAQKESLSEEEATSFIKQILDGVNYLHTKKIAHFDLKPENIMLLDKNIPIPHIKLIDFGLAHEIEDGVEFKNIFGTPEFVAPEIVNYEPLGLEADMWSIGVITYILLSGASPFLGDTKQETLANITAVSYDFDEEFFSQTSELAKDFIRKLLVKETRKRLTIQEALRHPWITPVDNQQAMVRRESVVNLENFRKQYVRRRWKLSFSIVSLCNHLTRSLMKKVHLRPDEDLRNCESDTEEDIARRKALHPRRRSSTS

SEQ ID NO: 849216 - protein, 370 aa, Homo sapiens; identical to SEQ ID NO: 849215

SEQ ID NO: 849217 - protein, 160 aa, Homo sapiens [sequence omitted]

SEQ ID NO: 849218 - protein, 178 aa, Homo sapiens
STPHRCPHLTGSPTPHRCPTPHRESHTCTGSPTPAPGDTKQETLANITAVSYDFDEEFFSQTSELAKDFIRKLLVKETRKRLTIQEALRHPWITPVDNQQAMVRRESVVNLENFRKQYVRRRWKLSFSIVSLCNHLTRSLMKKVHLRPDEDLRNCESDTEEDIARRKALHPRRRSSTS

SEQ ID NO: 849219 - protein, 675 aa, Homo sapiens
MAAAKVALTKRADPAELRTIFLKYASIEKNGEFFMSPNDFVTRYLNIFGESQPNPKTVELLSGVVDQTKDGLISFQEFVAFESVLCAPDALFMVAFQLFDKAGKGEVTFEDVKQVFGQTTIHQHIPFNWDSEFVQLHFGKERKRHLTYAEFTQFLLEIQLEHAKQAFVQRDNARTGRVTAIDFRDIMVTIRPHVLTPFVEECLVAAAGGTTSHQVSFSYFNGFNSLLNNMELIRKIYSTLAGTRKDVEVTKEEFVLAAQKFGQVTPMEVDILFQLADLYEPRGRMTLADIERIAPLEEGTLPFNLAEAQRQKASGDSARPVLLQVAESAYRFGLGSVAGAVGATAVYPIDLVKTRMQNQRSTGSFVGELMYKNSFDCFKKVLRYEGFFGLYRGLLPQLLGVAPEKAIKLTVNDFVRDKFMHKDGSVPLAAEILAGGCAGGSQVIFTNPLEIVKIRLQVAGEITTGPRVSALSVVRDLGFFGIYKGAKACFLRDIPFSAIYFPCYAHVKASFANEDGQVSPGSLLLAGAIAGMPAASLVTPADVIKTRLQVAARAGQTTYSGVIDCFRKILREEGPKALWKGAGARVFRSSPQFGVTLLTYELLQRWFYIDFGGVKPMGSEPVPKSRINLPAPNPDHVGGYKLAVATFAGIENKFGLYLPLFKPSVSTSKAIGGGP

SEQ ID NO: 849220 - protein, 583 aa, Homo sapiens [sequence omitted]

SEQ ID NO: 849221 - protein, 628 aa, Homo sapiens
MAAAKVALTKRADPAELRTIFLKYASIEKNGEFFMSPNDFVTRYLNIFGESQPNPKTVELLSGVVDQTKDGLISFQEFVAFESVLCAPDALFMVAFQLFDKAGKGEVTFEDVKQVFGQTTIHQHIPFNWDSEFVQLHFGKERKRHLTYAEFTQFLLEIQLEHAKQAFVQRDNARTGRVTAIDFRDIMVTIRPHVLTPFVEECLVAAAGGTTSHQVSFSYFNGFNSLLNNMELIRKIYSTLAGTRKDVEVTKEEFVLAAQKFGQVTPMEVDILFQLADLYEPRGRMTLADIERIAPLEEGTLPFNLAEAQRQKASGDSARPVLLQVAESAYRFGLGSVAGAVGATAVYPIDLVKTRMQNQRSTGSFVGELMYKNSFDCFKKVLRYEGFFGLYRGLLPQLLGVAPEKAIKLTVNDFVRDKFMHKDGSVPLAAEILAGGCGAKACFLRDIPFSAIYFPCYAHVKASFANEDGQVSPGSLLLAGAIAGMPAASLVTPADVIKTRLQVAARAGQTTYSGVIDCFRKILREEGPKALWKGAGARVFRSSPQFGVTLLTYELLQRWFYIDFGGVKPMGSEPVPKSRINLPAPNPDHVGGYKLAVATFAGIENKFGLYLPLFKPSVSTSKAIGGGP

SEQ ID NO: 849222 - protein, 393 aa, Homo sapiens
MAAAKVALTKRADPAELRTIFLKYASIEKNGEFFMSPNDFVTRYLNIFGESQPNPKTVELLSGVVDQTKDGLISFQEFVAFESVLCAPDALFMVAFQLFDKAGKGEVTFEDVKQVFGQTTIHQHIPFNWDSEFVQLHFGKERKRHLTYAEFTQFLLEIQLEHAKQAFVQRDNARTGRVTAIDFRDIMVTIRPHVLTPFVEECLVAAAGGTTSHQVSFSYFNGFNSLLNNMELIRKIYSTLAGTRKDVEVTKEEFVLAAQKFGQVTPMEVDILFQLADLYEPRGRMTLADIERIAPLEEGTLPFNLAEAQRQKASGDSARPVLLQVAESAYRFGLGSVAGAVGATAVYPIDLVKTRMQNQRSTGSFVGELMYKNSFDCFKKVLRYEGFFGLYRG

SEQ ID NO: 849223 - protein, 400 aa, Homo sapiens
MAAAKVALTKRADPAELRTIFLKYASIEKNGEFFMSPNDFVTRYLNIFGESQPNPKTVELLSGVVDQTKDGLISFQEFVAFESVLCAPDALFMVAFQLFDKAGKGEVTFEDVKQVFGQTTIHQHIPFNWDSEFVQLHFGKERKRHLTYAEFTQFLLEIQLEHAKQAFVQRDNARTGRVTAIDFRDIMVTIRPHVLTPFVEECLVAAAGGTTSHQVSFSYFNGFNSLLNNMELIRKIYSTLAGTRKDVEVTKEEFVLAAQKFGQVTPMEVDILFQLADLYEPRGRMTLADIERIAPLEEGTLPFNLAEAQRQKASGDSARPVLLQVAESAYRFGLGSVAGAVGATAVYPIDLVKTRMQNQRSTGSFVGELMYKNSFDCFKKVLRYEGFFGLYRGLLPHVFA

SEQ ID NO: 849224 - protein, 675 aa, Homo sapiens; identical to SEQ ID NO: 849219

SEQ ID NO: 849225 - protein, 675 aa, Homo sapiens; identical to SEQ ID NO: 849219

SEQ ID NO: 849226 - protein, 694 aa, Homo sapiens
MAAAKVALTKRADPAELRTIFLKYASIEKNGEFFMSPNDFVTRYLNIFGESQPNPKTVELLSGVVDQTKDGLISFQEFVAFESVLCAPDALFMVAFQLFDKAGKGEVTFEDVKQVFGQTTIHQHIPFNWDSEFVQLHFGKERKRHLTYAEFTQFLLEIQLEHAKQAFVQRDNARTGRVTAIDFRDIMVTIRPHVLTPFVEECLVAAAGGTTSHQVSFSYFNGFNSLLNNMELIRKIYSTLAGTRKDVEVTKEEFVLAAQKFGQVTPMEVDILFQLADLYEPRGRMTLADIERIAPLEEGTLPFNLAEAQRQKASGDSARPVLLQVAESAYRFGLGSVAGAVGATAVYPIDLVKTRMQNQRSTGSFVGELMYKNSFDCFKKVLRYEGFFGLYRGLLPQLLGVAPEKAIKLTVNDFVRDKFMHKDGSVPLAAEILAGGCGCSCGSSDGDLDLQSSLHEAGGSQVIFTNPLEIVKIRLQVAGEITTGPRVSALSVVRDLGFFGIYKGAKACFLRDIPFSAIYFPCYAHVKASFANEDGQVSPGSLLLAGAIAGMPAASLVTPADVIKTRLQVAARAGQTTYSGVIDCFRKILREEGPKALWKGAGARVFRSSPQFGVTLLTYELLQRWFYIDFGGVKPMGSEPVPKSRINLPAPNPDHVGGYKLAVATFAGIENKFGLYLPLFKPSVSTSKAIGGGP

SEQ ID NO: 849227 - protein, 609 aa, Homo sapiens
MAAAKVALTKRADPAELRTIFLKYASIEKNGEFFMSPNDFVTRYLNIFGESQPNPKTVELLSGVVDQTKDGLISFQEFVAFESVLCAPDALFMVAFQLFDKAGKGEVTFEDVKQVFGQTTIHQHIPFNWDSEFVQLHFGKERKRHLTYAEFTQFLLEIQLEHAKQAFVQRDNARTGRVTAIDFRDIMVTIRPHVLTPFVEECLVAAAGGTTSHQVSFSYFNGFNSLLNNMELIRKIYSTLAGTRKDVEVTKEEFVLAAQKFGQVTPMEVDILFQLADLYEPRGRMTLADIERIAPLEEGTLPFNLAEAQRQKASGDSARPVLLQVAESAYRFGLGSVAGAVGATAVYPIDLVKTRMQNQRSTGSFVGELMYKNSFDCFKKVLRYEGFFGLYRGLLPQLLGVAPEKAIKLTVNDFVRDKFMHKDGSVPLAAEILAGGCGCSCGSSDGDLDLQSSLHEAGGSQVIFTNPLEIVKIRLQVAGEITTGPRVSALSVVRDLGFFGIYKGAKACFLRDIPFSAIYFPCYAHVKASFANEDGQVSPGSLLLAGAIAGMPAASLVTPADVIKTRLQVAARAGQTTYSGVIDCFRKILREEGPKALWKGAGGMEIMCS

SEQ ID NO: 849228 - protein, 156 aa, Homo sapiens
MERHQPRLHHSGRGPWSSCAVEQLPKRDHYQVSAGTRFRSVSVQEHKLIRKTLQIVAKTSNQGPLVVYRPITHLFVKTKLKGYLKGYSKVSAHVQTMVKLSEDKPKETKSEEETLDEGPPKYTKSVLTREDKTNFPKREMWSLWYREHYKMGLFGY

SEQ ID NO: 849229 - protein, 875 aa, Homo sapiens
MERHQPRLHHPAQGSAAGTPYPSSASLRGCRESKMPRRKGPQHPPPPSGPEEPGEKRPKFHLNIRTLTDDMLDKFASIRIPGSKKERPPLPNLKTAFASSDCSAAPLEMMENFPKPLSENELLELFEKMMEDMNLNEDKKAPLREKDFSIKKEMVMQYINTASKTGSLKRSRQISPQEFIHELKMGSADERLVTCLESLRVSLTSNPVSWVESFGHEGLGLLLDILEKLISGKIQEKVVKKNQHKVIQCLKALMNTQYGLERIMSEERSLSLLAKAVDPRHPNMMTDVVKLLSAVCIVGEESILEEVLEALTSAGEEKKIDRFFCIVEGLRHNSVQLQVACMQLINALVTSPDDLDFRLHIRNEFMRCGLKEILPNLKCIKNDGLDIQLKVFDEHKEEDLFELSHRLEDIRAELDEAYDVYNMVWSTVKETRAEGYFISILQHLLLIRNDYFIRQQYFKLIDECVSQIVLHRDGMDPDFTYRKRLDLDLTQFVDICIDQAKLEEFEEKASELYKKFEKEFTDHQETQAELQKKEAKINELQAELQAFKSQFGALPADCNIPLPPSKEGGTGHSALPPPPPLPSGGGVPPPPPPPPPPPLPGMRMPFSGPVPPPPPLGFLGGQNSPPLPILPFGLKPKKEFKPEISMRRLNWLKIRPHEMTENCFWIKVNENKYENVDLLCKLENTFCCQQKERREEEDIEEKKSIKKKIKELKFLDSKIAQNLSIFLSSFRVPYEEIRMMILEVDETRLAESMIQNLIKHLPDQEQLNSLSQFKSEYSNLCEPEQFVVVNRKCSCTEGSRSHYNINCNSTRTPVAKELNYNLDTHTSTGRIKAAEKKEACNVESNRKKETELLGSFSKNESVPEVEALLARLRAL

SEQ ID NO: 849230 - protein, 105 aa, Homo sapiens
SIFHVLYYVTQDRHAQGNQNRKCSCTEGSRSHYNINCNSTRTPVAKELNYNLDTHTSTGRIKAAEKKEACNVESNRKKETELLGSFSKNESVPEVEALLARLRAL

SEQ ID NO: 849231 - protein, 106 aa, Homo sapiens
  misc_feature (10)..(11): Xaa can be any naturally occurring amino acid
SYLFLFSTFXXPFMVRIHKTNRKCSCTEGSRSHYNINCNSTRTPVAKELNYNLDTHTSTGRIKAAEKKEACNVESNRKKETELLGSFSKNESVPEVEALLARLRAL

SEQ ID NO: 849232 - protein, 1112 aa, Homo sapiens
MERHQPRLHHPAQGSAAGTPYPSSASLRGCRESKMPRRKGPQHPPPPSGPEEPGEKRPKFHLNIRTLTDDMLDKFASIRIPGSKKERPPLPNLKTAFASSDCSAAPLEMMENFPKPLSENELLELFEKMMEDMNLNEDKKAPLREKDFSIKKEMVMQYINTASKTGSLKRSRQISPQEFIHELKMGSADERLVTCLESLRVSLTSNPVSWVESFGHEGLGLLLDILEKLISGKIQEKVVKKNQHKVIQCLKALMNTQYGLERIMSEERSLSLLAKAVDPRHPNMMTDVVKLLSAVCIVGEESILEEVLEALTSAGEEKKIDRFFCIVEGLRHNSVQLQVACMQLINALVTSPDDLDFRLHIRNEFMRCGLKEILPNLKCIKNDGLDIQLKVFDEHKEEDLFELSHRLEDIRAELDEAYDVYNMVWSTVKETRAEGYFISILQHLLLIRNDYFIRQQYFKLIDECVSQIVLHRDGMDPDFTYRKRLDLDLTQFVDICIDQAKLEEFEEKASELYKKFEKEFTDHQETQAELQKKEAKINELQAELQAFKSQFGALPADCNIPLPPSKEGGTGHSALPPPPPLPSGGGVPPPPPPPPPPPLPGMRMPFSGPVPPPPPLGFLGGQNSPPLPILPFGLKPKKEFKPEISMRRLNWLKIRPHEMTENCFWIKVNENKYENVDLLCKLENTFCCQQKERREEEDIEEKKSIKKKIKELKFLDSKIAQNLSIFLSSFRVPYEEIRMMILEVDETRLAESMIQNLIKHLPDQEQLNSLSQFKSEYSNLCEPEQFVVVMSNVKRLRPRLSAILFKLQFEEQVNNIKPDIMAVSTACEEIKKSKSFSKLLELVLLMGNYMNAGSRNAQTFGFNLSSLCKLKDTKSADQKTTLLHFLVEICEEKYPDILNFVDDLEPLDKASKVSVETLEKNLRQMGRQLQQLEKELETFPPPEDLHDKFVTKMSRFVISAKEQYETLSKLHENMEKLYQSIIGYYAIDVKKVSVEDFLTDLNNFRTTFMQAIKENIKKREAEEKEKRVRIAKELAERERLERQQKKKRLLEMKTEGDETGVMDNLLEALQSGAAFRDRRKRTPMPKDVRQSLSPMSQRPVLKVCNHGNKPYL

SEQ ID NO: 849233 - protein, 691 aa, Homo sapiens
MSEERSLSLLAKAVDPRHPNMMTDVVKLLSAVCIVGEESILEEVLEALTSAGEEKKIDRFFCIVEGLRHNSVQLQVACMQLINALVTSPDDLDFRLHIRNEFMRCGLKEILPNLKCIKNDGLDIQLKVFDEHKEEDLFELSHRLEDIRAELDEAYDVYNMVWSTVKETRAEGYFISILQHLLLIRNDYFIRQQYFKLIDECVSQIVLHRDGMDPDFTYRKRLDLDLTQFVDICIDQAKLEEFEEKASELYKKFEKEFTDHQETQAELQKKEAKINELQAELQAFKSQFGALPADCNIPLPPSKEGGTGHSALPPPPPLPSGGGVPPPPPPPPPPPLPGMRMPFSGPVPPPPPLGFLGGQNSPPLPILPFGLKPKKEFKPEISMRRLNWLKIRPHEMTENCFWIKVNENKYENVDLLCKLENTFCCQQKERREEEDIEEKKSIKKKIKELKFLDSKIAQNLSIFLSSFRVPYEEIRMMILEVDETRLAESMIQNLIKHLPDQEQLNSLSQFKSEYSNLCEPEQFVVVMSNVKRLRPRLSAILFKLQFEEQVNNIKPDIMAVSTACEEIKKSKSFSKLLELVLLMGNYMNAGSRNAQTFGFNLSSLCKLKDTKSADQKTTLLHFLVEICEEKYPDILNFVDDLEPLDKASKGLCLFKKHFMALIFSAKRLKIIPFICMYFPLSHSVFIPNISF

SEQ ID NO: 849234 - protein, 875 aa, Homo sapiens; identical to SEQ ID NO: 849229

SEQ ID NO: 849235 - protein, 103 aa, Homo sapiens
CPAGGDARLETRGRLEVHRKCSCTEGSRSHYNINCNSTRTPVAKELNYNLDTHTSTGRIKAAEKKEACNVESNRKKETELLGSFSKNESVPEVEALLARLRAL

SEQ ID NO: 849236 - protein, 875 aa, Homo sapiens; identical to SEQ ID NO: 849229

SEQ ID NO: 849237 - protein, 824 aa, Homo sapiens
MRQSLLFLTSVVPFVLAPRPPDDPGFGPHQRLEKLDSLLSDYDILSLSNIQQHSVRKRDLQTSTHVETLLTFSALKRHFKLYLTSSTERFSQNFKVVVVDGKNESEYTVKWQDFFTGHVVGEPDSRVLAHIRDDDVIIRINTDGAEYNIEPLWRFVNDTKDKRMLVYKSEDIKNVSRLQSPKVCGYLKVDNEELLPKGLVDREPPEELVHRVKRRADPDPMKNTCKLLVVADHRFYRYMGRGEESTTTNYLIELIDRVDDIYRNTSWDNAGFKGYGIQIEQIRILKSPQEVKPGEKHYNMAKSYPNEEKDAWDVKMLLEQFSFDIAEEASKVCLAHLFTYQDFDMGTLGLAYVGSPRANSHGGVCPKAYYSPVGKKNIYLNSGLTSTKNYGKTILTKEADLVTTHELGHNFGAEHDPDGLAECAPNEDQGGKYVMYPIAVSGDHENNKMFSNCSKQSIYKTIESKAQECFQERSNKVCGNSRVDEGEECDPGIMYLNNDTCCNSDCTLKEGVQCSDRNSPCCKNCQFETAQKKCQEAINATCKGVSYCTGNSSECPPPGNAEDDTVCLDLGKCKDGKCIPFCEREQQLESCACNETDNSCKVCCRDLSGRCVPYVDAEQKNLFLRKGKPCTVGFCDMNGKCEKRVQDVIERFWDFIDQLSINTFGKFLADNIVGSVLVFSLIFWIPFSILVHCVDKKLDKQYESLSLFHPSNVEMLSSMDSASVRIIKPFPAPQTPGRLQPAPVIPSAPAAPKLDHQRMDTIQEDPSTDSHMDEDGFEKDPFPNSSTAAKSFEDLTDHPVTRSEKAASFKLQRQNRVDSKETEC

SEQ ID NO: 849238 - protein, 807 aa, Homo sapiens
MRQSLLFLTSVVPFVLAPRPPDDPGFGPHQRLEKLDSLLSDYDILSLSNIQQHSVRKRDLQTSTHVETLLTFSALKRHFKLYLTSSTERFSQNFKVVVVDGKNESEYTVKWQDFFTGHVVGEPDSRVLAHIRDDDVIIRINTDGAEYNIEPLWRFVNDTKDKRMLVYKSEDIKNVSRLQSPKVCGYLKVDNEELLPKGLVDREPPEELVHRVKRRADPDPMKNTCKLLVVADHRFYRYMGRGEESTTTNYLIELIDRVDDIYRNTSWDNAGFKGYGIQIEQIRILKSPQEVKPGEKHYNMAKSYPNEEKDAWDVKMLLEQFSFDIAEEASKVCLAHLFTYQDFDMGTLGLAYVGSPRANSHGGVCPKAYYSPVGKKNIYLNSGLTSTKNYGKTILTKEADLVTTHELGHNFGAEHDPDGLAECAPNEDQGGKYVMYPIAVSGDHENNKMFSNCSKQSIYKTIESKAQECFQERSNKVCGNSRVDEGEECDPGIMYLNNDTCCNSDCTLKEGVQCSDRNSPCCKNCQFETAQKKCQEAINATCKGVSYCTGNSSECPPPGNAEDDTVCLDLGKCKDGKCIPFCEREQQLESCACNETDNSCKVCCRDLSGRCVPYVDAEQKNLFLRKGKPCTVGFCDMNGKCEKRVQDVIERFWDFIDQLSINTFGKFLADNIVGSVLVFSLIFWIPFSILVHCVNVEMLSSMDSASVRIIKPFPAPQTPGRLQPAPVIPSAPAAPKLDHQRMDTIQEDPSTDSHMDEDGFEKDPFPNSSTAAKSFEDLTDHPVTRSEKAASFKLQRQNRVDSKETEC

SEQ ID NO: 849239 - protein, 824 aa, Homo sapiens; identical to SEQ ID NO: 849237

SEQ ID NO: 849240 - protein, 383 aa, Homo sapiens
MILKEADLVTTHELGHNFGAEHDPDGLAECAPNEDQGGKYVMYPIAVSGDHENNKMFSNCSKQSIYKTIESKAQECFQERSNKVCGNSRVDEGEECDPGIMYLNNDTCCNSDCTLKEGVQCSDRNSPCCKNCQFETAQKKCQEAINATCKGVSYCTGNSSECPPPGNAEDDTVCLDLGKCKDGKCIPFCEREQQLESCACNETDNSCKVCCRDLSGRCVPYVDAEQKNLFLRKGKPCTVGFCDMNGKCEKRVQDVIERFWDFIDQLSINTFGKFLADNIVGSVLVFSLIFWIPFSILVHCVDKKLDKQYESLSLFHPSVSIPYERNIIFAWSEALLGKDLHLTQQELSLADGRSCCSRKGLGWNVYPSDNSDGELRLVAWMDI

SEQ ID NO: 849241 - protein, 631 aa, Homo sapiens
MRQSLLFLTSVVPFVLAPRPPDDPGFGPHQRLEKLDSLLSDYDILSLSNIQQHSVRKRDLQTSTHVETLLTFSALKRHFKLYLTSSTERFSQNFKVVVVDGKNESEYTVKWQDFFTGHVVGEPDSRVLAHIRDDDVIIRINTDGAEYNIEPLWRFVNDTKDKRMLVYKSEDIKNVSRLQSPKVCGYLKVDNEELLPKGLVDREPPEELVHRVKRRADPDPMKNTCKLLVVADHRFYRYMGRGEESTTTNYLIELIDRVDDIYRNTSWDNAGFKGYGIQIEQIRILKSPQEVKPGEKHYNMAKSYPNEEKDAWDVKMLLEQFSFDIAEEASKVCLAHLFTYQDFDMGTLGLAYVGSPRANSHGGVCPKAYYSPVGKKNIYLNSGLTSTKNYGKTILTKEADLVTTHELGHNFGAEHDPDGLAECAPNEDQGGKYVMYPIAVSGDHENNKMFSNCSKQSIYKTIESKAQECFQERSNKVCGNSRVDEGEECDPGIMYLNNDTCCNSDCTLKEGVQCSDRNSPCCKNCQFETAQKKCQEAINATCKGVSYCTGNSSECPPPGNAEDDTVCLDLGKCKDGKCIPFCEREQQLESCACNGEQFYSQSSSRRKHGLCLPGSLPPFGGCANDSSGEIQ

SEQ ID NO: 849242 - protein, 70 aa, Homo sapiens
NKCDFLPLWEHGQGGKRRQEERQVSEQSSCQCVFSVPETDNSCKVCCRDLSGRCVPYVDALRIDNFEFCR

SEQ ID NO: 849243 - protein, 824 aa, Homo sapiens; identical to SEQ ID NO: 849237

SEQ ID NO: 849244 - protein, 824 aa, Homo sapiens; identical to SEQ ID NO: 849237

SEQ ID NO: 849245 - protein, 776 aa, Homo sapiens
MRQSLLFLTSVVPFVLAPRPPDDPGFGPHQRLEKLDSLLSDYDILSLSNIQQHSVRKRDLQTSTHVETLLTFSALKRHFKLYLTSSTERFSQNFKVVVVDGKNESEYTVKWQDFFTGHVVGEPDSRVLAHIRDDDVIIRINTDGAEYNIEPLWRFVNDTKDKRMLVYKSEDIKNVSRLQSPKVCGYLKVDNEELLPKGLVDREPPEELVHRVKRRADPDPMKNTCKLLVVADHRFYRYMGRGEESTTTNYLIELIDRVDDIYRNTSWDNAGFKGYGIQIEQIRILKSPQEVKPGEKHYNMAKSYPNEEKDAWDVKMLLEQFSFDIAEEASKVCLAHLFTYQDFDMGTLGLAYVGSPRANSHGGVCPKAYYSPVGKKNIYLNSGLTSTKNYGKTILTKEADLVTTHELGHNFGAEHDPDGLAECAPNEDQGGKYVMYPIAVSGDHENNKMFSNCSKQSIYKTIESKAQECFQERSNKVCGNSRVDEGEECDPGIMYLNNDTCCNSDCTLKEGVQCSDRNSPCCKNCQFETAQKKCQEAINATCKGVSYCTGNSSECPPPGNAEDDTVCLDLGKCKDGKCIPFCEREQQLESCACNETDNSCKVCCRDLSGRCVPYVDAEQKNLFLRKGKPCTVGFCDMNGKCEKRVQDVIERFWDFIDQLSINTFGKFLADNIVGSVLVFSLIFWIPFSILVHCVDKKLDKQYESLSLFHPSVSIPYERNIIFAWSEALLGKDLHLTQQELSLADGRSCCSRKGLGWNVYPSDNSDGELRLVAWMDI

SEQ ID NO: 849246 - protein, 110 aa, Homo sapiens [sequence omitted]

SEQ ID NO: 849247 - protein, 314 aa, Homo sapiens
MAATASAGAGGIDGKPRTSPKSVKFLFGGLAGMGATVFVQPLDLVKNRMQLSGEGAKTREYKTSFHALTSILKAEGLRGIYTGLSAGLLRQATYTTTRLGIYTVLFERLTGADGTPPGFLLKAVIGMTAGATGAFVGTPAEVALIRMTADGRLPADQRRGYKNVFNALIRITREEGVLTLWRGCIPTMARAVVVNAAQLASYSQSKQFLLDSGYFSDNILCHFCASMISGLVTTAASMPVDIAKTRIQNMRMIDGKPEYKNGLDVLFKVVRYEGFFSLWKGFTPYYARLGPHTVLTFIFLEQMNKAYKRLFLSG

SEQ ID NO: 849248 - protein, 314 aa, Homo sapiens; identical to SEQ ID NO: 849247

SEQ ID NO: 849249 - protein, 314 aa, Homo sapiens; identical to SEQ ID NO: 849247

SEQ ID NO: 849250 - protein, 314 aa, Homo sapiens; identical to SEQ ID NO: 849247

SEQ ID NO: 849251 - protein, 282 aa, Homo sapiens [sequence omitted]

SEQ ID NO: 849252 - protein, 342 aa, Homo sapiens
MAATASAGAGGIDGKPRTSPKSVKFLFGGLAGMGATVFVQPLDLVKNRMQLSGEGAKTREYKTSFHALTSILKAEGLRGIYTGYWGLRMEGRLWVGSSRPWPDMLTPLLLRLSAGLLRQATYTTTRLGIYTVLFERLTGADGTPPGFLLKAVIGMTAGATGAFVGTPAEVALIRMTADGRLPADQRRGYKNVFNALIRITREEGVLTLWRGCIPTMARAVVVNAAQLASYSQSKQFLLDSGYFSDNILCHFCASMISGLVTTAASMPVDIAKTRIQNMRMIDGKPEYKNGLDVLFKVVRYEGFFSLWKGFTPYYARLGPHTVLTFIFLEQMNKAYKRLFLSG

SEQ ID NO: 849253 - protein, 263 aa, Homo sapiens
MAATASAGAGGIDGKPRTSPKSVKFLFGGLAGLSAGLLRQATYTTTRLGIYTVLFERLTGADGTPPGFLLKAVIGMTAGATGAFVGTPAEVALIRMTADGRLPADQRRGYKNVFNALIRITREEGVLTLWRGCIPTMARAVVVNAAQLASYSQSKQFLLDSGYFSDNILCHFCASMISGLVTTAASMPVDIAKTRIQNMRMIDGKPEYKNGLDVLFKVVRYEGFFSLWKGFTPYYARLGPHTVLTFIFLEQMNKAYKRLFLSG

SEQ ID NO: 849254 - protein, 360 aa, Homo sapiens
MAATASAGAGGIDGKPRTSPKSVKFLFGGLAGMGATVFVQPLDLVKNRMQLSGEGAKTREYKTSFHALTSILKAEGLRGIYTGLSAGLLRQATYTTTRLGIYTVLFERLTGADGTPPGFLLKAVIGMTAGATGAFVGTPAEVALIRMTADGRLPADQRRGYKNVFNALIRITREEGVLTLWRGCIPTMARAVVVNAAQLASYSQSKQFLLDSGYFSDNILCHFCASMISGLVTTAASMPVDIAKTRIQNMRMIDESRRQTGWPSVKCAYEASSPVEGFTLYAAVPQIVSTHPRGRLTSLKRLSRVSAGLLRGLAGRGWSVLPHISRVLWKWVPFSLAADRGLGTVPLCSKPARHSGPPRL

SEQ ID NO: 849255 - protein, 302 aa, Homo sapiens
MAATASAGAGGIDGKPRTSPKSVKFLFGGLAGMGATVFVQPLDLVKNRMQLSGEGAKTREYKTSFHALTSILKAEGLRGIYTGLSAGLLRQATYTTTRLGIYTVLFERLTGADGTPPGFLLKAVIGMTAGATGAFVGTPAEVALIRMTADGRLPADQRRGYKNVFNALIRITREEGVLTLWRGCIPTMARAVVVNAAQLASYSQSKQFLLDSGEIQSWALSSQPGLATSELTATPASPPPGYFSDNILCHFCASMISGLVTTAASMPVDIAKTRIQEASDGMIDGKPEYKNGLDVASVRVPS

SEQ ID NO: 849256 - protein, 314 aa, Homo sapiens; identical to SEQ ID NO: 849247

SEQ ID NO: 849257 - protein, 314 aa, Homo sapiens; identical to SEQ ID NO: 849247

SEQ ID NO: 849258 - protein, 314 aa, Homo sapiens; identical to SEQ ID NO: 849247

SEQ ID NO: 849259 - protein, 282 aa, Homo sapiens [sequence omitted]

SEQ ID NO: 849260 - protein, 267 aa, Homo sapiens
MRGWFVLSSLGPFPAFRILVRAWKLKAEGLRGIYTGLSAGLLRQATYTTTRLGIYTVLFERLTGADGTPPGFLLKAVIGMTAGATGAFVGTPAEVALIRMTADGRLPADQRRGYKNVFNALIRITREEGVLTLWRGCIPTMARAVVVNAAQLASYSQSKQFLLDSGYFSDNILCHFCASMISGLVTTAASMPVDIAKTRIQNMRMIDGKPEYKNGLDVLFKVVRYEGFFSLWKGFTPYYARLGPHTVLTFIFLEQMNKAYKRLFLSG

SEQ ID NO: 849261 - protein, 192 aa, Homo sapiens
MAATASAGAGGIDGKPRTSPKSVKFLFGGLAGMGATVFVQPLDLVKNRMQLSGEGAKTREYKTSFHALTSILKAEGLRGIYTGLSAGLLRQATYTTTRLGIYTVLFERLTGADGTPPGFLLKAVIGMTAGATGAFVGTPAEVALIRMTADGRLPADQRRGYKNVFNAPGGLGSAALDPSIYFPSTVWFLPLR

SEQ ID NO: 849262 - protein, 120 aa, Homo sapiens
LRRSGASSPPGPRGGGFPPSLLSASSRCARISLGLAQGPRWRRVFFSNHRAPLFKSSQSTFVSFLQKEKHLSCCGKGPQRPLVTDRAIAVRSGHFFQDTFCLHDRNIEKPRLVAGLLMDY

SEQ ID NO: 849263 - protein, 108 aa, Homo sapiens
MQEDDCRFSAARVREAMRWKSHPTMGRTWRQGSPCLCPREATLQERVSEFHELGEHSKPIQNMLTHREVSQVGTSSINETRMLNIYTEFSFCLDDYQNKISVYEKPYE

SEQ ID NO: 849264 - protein, 111 aa, Homo sapiens
PSEAGGTGSNRCRLRGNWDFSPGSWRTRPPTLPPPHASETGSRALSRFRAPRGESEVRVIRAAPPSQEPQLNQRFPLHQPLRPGHFFQDTFCLHDRNIEKPRLVAGLLMDY

SEQ ID NO: 849265 - protein, 113 aa, Homo sapiens
MAGKKVLIVYAHQEPKSFNGSLKNVAVDELSRQGCTVTVSDLYAMNFEPRATDKDITGTLSNPEVFNYGVETHEAYKQRSLASDITDEQKGCQASWRADGLGSCAGLLPLQST

SEQ ID NO: 849266 - protein, 231 aa, Homo sapiens
MAGKKVLIVYAHQEPKSFNGSLKNVAVDELSRQGCTVTVSDLYAMNFEPRATDKDITGTLSNPEVFNYGVETHEAYKQRSLASDITDEQKKVREADLVIFQFPLYWFSVPAILKGWMDRVLCQGFAFDIPGFYDSGLLQGKLALLSVTTGGTAEMYTKTGVNGDSRYFLWPLQHGTLHFCGFKVLAPQISFAPEIASEEERKGMVAAWSQRLQTIWKEEPIPCTAHWHFGQ

SEQ ID NO: 849267 - protein, 231 aa, Homo sapiens; identical to SEQ ID NO: 849266

SEQ ID NO: 849268 - protein, 231 aa, Homo sapiens; identical to SEQ ID NO: 849266

SEQ ID NO: 849269 - protein, 329 aa, Homo sapiens
QGFQLAGHMALWVVAPGPGTILYIGSCLALTERAHTQGPGVESSGGICPQPYGAGAGIIVILQVGISGPKLLDSLKRDYAGKPQPPIKSERRNPPSYAMAGKKVLIVYAHQEPKSFNGSLKNVAVDELSRQGCTVTVSDLYAMNFEPRATDKDITGTLSNPEVFNYGVETHEAYKQRSLASDITDEQKKVREADLVIFQFPLYWFSVPAILKGWMDRVLCQGFAFDIPGFYDSGLLQGKLALLSVTTGGTAEMYTKTGVNGDSRYFLWPLQHGTLHFCGFKVLAPQISFAPEIASEEERKGMVAAWSQRLQTIWKEEPIPCTAHWHFGQ

SEQ ID NO: 849270 - protein, 231 aa, Homo sapiens; identical to SEQ ID NO: 849266

SEQ ID NO: 849271 - protein, 231 aa, Homo sapiens; identical to SEQ ID NO: 849266

SEQ ID NO: 849272 - protein, 330 aa, Homo sapiens
SADTSLAISTARQPRKCSAYLYTWIPGINSGLLDSLKRDYAGKPQPPIKSERRNPPSYAMAEFRFLKSGALPILSLLCLQALKFSLGCSRGSSERTPGGILGKKVLIVYAHQEPKSFNGSLKNVAVDELSRQGCTVTVSDLYAMNFEPRATDKDITGTLSNPEVFNYGVETHEAYKQRSLASDITDEQKKVREADLVIFQFPLYWFSVPAILKGWMDRVLCQGFAFDIPGFYDSGLLQGKLALLSVTTGGTAEMYTKTGVNGDSRYFLWPLQHGTLHFCGFKVLAPQISFAPEIASEEERKGMVAAWSQRLQTIWKEEPIPCTAHWHFGQ

SEQ ID NO: 849273 - protein, 146 aa, Homo sapiens
MEWKPTKPTSKGLWLATSLMSRNVPAILKGWMDRVLCQGFAFDIPGFYDSGLLQGKLALLSVTTGGTAEMYTKTGVNGDSRYFLWPLQHGTLHFCGFKVLAPQISFAPEIASEEERKGMVAAWSQRLQTIWKEEPIPCTAHWHFGQ

SEQ ID NO: 849274 - protein, 193 aa, Homo sapiens [sequence omitted]

SEQ ID NO: 849275 - protein, 67 aa, Homo sapiens
VGEAGLEGDGAALPDEQRKRQGESQAQCGMSHRQQGMDSGKKGRRAGKDLHRGCELSCTQTKAARGS

SEQ ID NO: 849276 - protein, 164 aa, Homo sapiens
MAGKKVLIVYAHQEPKSFNGSLKNVAVDELSRQGCTVTVSDLYAMNFEPRATDKDITGTLSNPEVFNYGVETHEAYKQRSLASDITDEQKKVREADLVIFQVCFSLINILNQIHLMYKLFLNIEFCAASGSGINVLSTVAHLLSKYCNLVTTPSYNISPSYTTS

SEQ ID NO: 849277 - protein, 164 aa, Homo sapiens; identical to SEQ ID NO: 849276

SEQ ID NO: 849278 - protein, 163 aa, Homo sapiens
MDVTSPTFSGAVMYLKHSKGTWPGWSPLLSTHLTSCSILQTPALCLCSWTAGDKEWALEDAHSGPAQDSSPGGDKHHFCVSLCFLFCCKDTLIGSRCRLDTTCAMRVFTLSPSHTLCIVFLSHFFLLWYRTSHIKLTILTTFFVCLFFVFLDRVSLCLSYSGG

SEQ ID NO: 849279 - protein, 231 aa, Homo sapiens; identical to SEQ ID NO: 849266

SEQ ID NO: 849280 - protein, 231 aa, Homo sapiens; identical to SEQ ID NO: 849266

SEQ ID NO: 849281 - protein, 231 aa, Homo sapiens; identical to SEQ ID NO: 849266

SEQ ID NO: 849282 - protein, 231 aa, Homo sapiens; identical to SEQ ID NO: 849266

SEQ ID NO: 849283 - protein, 231 aa, Homo sapiens; identical to SEQ ID NO: 849266

SEQ ID NO: 849284 - protein, 187 aa, Homo sapiens
MNFEPRATDKDITGTLSNPEVFNYGVETHEAYKQRSLASDITDEQKKVREADLVIFQFPLYWFSVPAILKGWMDRVLCQGFAFDIPGFYDSGLLQGKLALLSVTTGGTAEMYTKTGVNGDSRYFLWPLQHGTLHFCGFKVLAPQISFAPEIASEEERKGMVAAWSQRLQTIWKEEPIPCTAHWHFGQ

SEQ ID NO: 849285 - protein, 192 aa, Homo sapiens
MAGKKVLIVYAHQEPKSFNGSLKNVAVDELSRQGCTVTVSDLYAMNFEPRATDKDITGTLSNPEVFNYGVETHEAYKQRSLASDITDEQKKVREADLVIFQFPLYWFSVPAILKGWMDRVLCQGFAFDIPGFYDSGLLQGKLALLSVTTGGTAEMYTKTGVNGDSRYFLWPLQLVSSNKVMLSEAGCGGSRL

SEQ ID NO: 849286 - protein, 124 aa, Homo sapiens
MAGKKVLIVYAHQEPKSFNGSLKNVAVDELSRQGCTVTVSDLYAMNFEPRATDKDITGTLSNPEVFNYGVETHEAYKQRSLASDITDEQKHGRHGRDVHEDRSQWRFSILPVATPAWHITLLWI

SEQ ID NO: 849287 - protein, 112 aa, Homo sapiens
VGEAGLEGDGAALPDEQRKRQDALAYIKICIYGNVTGSPGYPKKGCFLLRGEANARNRKGVCQAVQAVFNGYGIGRSEINLACESWEVSESLSWRPSVVTALVGVLFSMRTG

SEQ ID NO: 849288 - protein, 89 aa, Homo sapiens
MAGKKVLIVYAHQEPKSFNGSLKNVAVDELSRQGCTVTVSDLYAMNFEPRATDKDITGTLFLIPEGFQLYGGGETPRKALTMPQGVLPG

SEQ ID NO: 849289 - protein, 1179 aa, Homo sapiens
AAATGPARAPQPAAAAASPRPGRRARRRERGLRRRPERWAQLGAERPVRRRPRASRTLPAMMPMILTVFLSNNEQILTEVPITPETTCRDVVEFCKEPGEGSCHLAEVWRGNGFREPSHKTYCTWPGTVAHSCNLNTLGGRERPIPFDHMMYEHLQKWGPRREEVKFFLRHEDSPTENSEQGGRQTQEQRTQRNVINVPGEKRTENGVGNPRVELTLSELQDMAARQQQQIENQQQMLVAKEQRLHFLKQQERRQQQSISENEKLQKLKERVEAQENKLKKIRAMRGQVDYSKIMNGNLSAEIERFSAMFQEKKQEVQTAILRVDQLSQQLEDLKKGKLNGFQSYNGKLTGPAAVELKRLYQELQIRNQLNQEQNSKLQQQKELLNKRNMEVAMMDKRISELRERLYGKKIQLNRVNGTSSPQSPLSTSGRVAAVGPYIQVPSAGSFPVLGDPIKPQSLSIASNAAHGRSKSANDGNWPTLKQNSSSSVKPVQVAGADWKDPSVEGSVKQGTVSSQPVPFSALGPTEKPGIEIGKVPPPIPGVGKQLPPSYGTYPSPTPLGPGSTSSLERRKEGSLPRPSAGLPSRQRPTLLPATGSTPQPGSSQQIQQRISVPPSPTYPPAGPPAFPAGDSKPELPLTVAIRPFLADKGSRPQSPRKGPQTVNSSSIYSMYLQQATPPKNYQPAAHSALNKSVKAVYGKPVLPSGSTSPSPLPFLHGSLSTGTPQPQPPSESTEKEPEQDGPAAPADGSTVESLPRPLSPTKLTPIVHSPLRYQSDADLEALRRKLANAPRPLKKRSSITEPEGPGGPNIQKLLYQRFNTLAGGMEGTPFYQPSPSQDFMGTLADVDNGNTNANGNLEELPPAQPTAPLPAEPAPSSDANDNELPSPEPEELICPQTTHQTAEPAEDNNNNVATVPTTEQIPSPVAEAPSPGEEQVPPAPLPPASHPPATSTNKRTNLKKPNSERTGHGLRVRFNPLALLLDASLEGEFDLVQRIIYEVEDPSKPNDEGITPLHNAVCAGHHHIVKFLLDFGVNVNAADSDGWTPLHCAASCNSVHLCKQLVESGAAIFASTISDIETAADKCEEMEEGYIQCSQFLYGVQEKLGVMNKGVAYALWDYEAQNSDELSFHEGDALTILRRKDESETEWWWARLGDREGYVPKNLLGLYPRIKPRQRTLA

SEQ ID NO: 849290 - protein, 978 aa, Homo sapiens
MPMILTVFLSNNEQILTEVPITPETTCRDVVEFCKEPGEGSCHLAEVWRGNERPIPFDHMMYEHLQKWGPRREEVKFFLRHEDSPTENSEQGGRQTQEQRTQRNVINVPGEKRTENGVGNPRVELTLSELQDMAARQQQQIENQQQMLVAKEQRLHFLKQQERRQQQSISENEKLQKLKERVEAQENKLKKIRAMRGQVDYSKIMNGNLSAEIERFSAMFQEKKQEVQTAILRVDQLSQQLEDLKKGKLNGFQSYNGKLTGPAAVELKRLYQELQIRNQLNQEQNSKLQQQKELLNKRNMEVAMMDKRISELRERLYGKKIQLNRVNGTSSPQSPLSTSGRVAAVGPYIQVPSAGSFPVLGDPIKPQSLSIASNAAHGRSKSANDGNWPTLKQNSSSSVKPVQVAGADWKDPSVEGSVKQGTVSSQPVPFSALGPTEKPGIEIGKVPPPIPGVGKQLPPSYGTYPSPTPLGPGSTSSLERRKEGSLPRPSAGLPSRQRPTLLPATGSTPQPGSSQQIQQRISVPPSPTYPPAGPPAFPAGDSKPELPLTVAIRPFLADKGSRPQSPRKGPQTVNSSSIYSMYLQQATPPKNYQPAAHSALNKSVKAVYGKPVLPSGSTSPSPLPFLHGSLSTGTPQPQPPSESTEKEPEQDGPAAPADGSTVESLPRPLSPTKLTPIVHSPLRYQSDADLEALRRKLANAPRPLKKRSSITEPEGPGGPNIQKLLYQRFNTLAGGMEGTPFYQPSPSQDFMGTLADVDNGNTNANGNLEELPPAQPTAPLPAEPAPSSDANDNELPSPEPEELICPQTTHQTAEPAEDNNNNVATVPTTEQIPSPVAEAPSPGEEQVPPAPLPPASHPPATSTNKRTNLKKPNSERTGHGLRVRFNPLALLLDASLEGEFDLVQRIIYEVEDPSKPNDEGITPLHNAVCAGHHHIVKFLLDFGVNVNAADSDGWGAGKAGCDEQRCGVCSVGLRGPEQ

SEQ ID NO: 849291 - protein, 905 aa, Homo sapiens
ELLTSGDPPTSASQSAGITDVSHRAQPSIFKVTFFFLLLGVVLTGSSGTGPRGRGRGGPVVARRGGGGGGGGGGGGGGGGGGGAGRGGGRRQQQSISENEKLQKLKERVEAQENKLKKIRAMRGQVDYSKIMNGNLSAEIERFSAMFQEKKQEVQTAILRVDQLSQQLEDLKKGKLNGFQSYNGKLTGPAAVELKRLYQELQIRNQLNQEQNSKLQQQKELLNKRNMEVAMMDKRISELRERLYGKKIQLNRVNGTSSPQSPLSTSGRVAAVGPYIQVPSAGSFPVLGDPIKPQSLSIASNAAHGRSKSANDGNWPTLKQNSSSSVKPVQVAGADWKDPSVEGSVKQGTVSSQPVPFSALGPTEKPGIEIGKVPPPIPGVGKQLPPSYGTYPSPTPLGPGSTSSLERRKEGSLPRPSAGLPSRQRPTLLPATGSTPQPGSSQQIQQRISVPPSPTYPPAGPPAFPAGDSKPELPLTVAIRPFLADKGSRPQSPRKGPQTVNSSSIYSMYLQQATPPKNYQPAAHSALNKSVKAVYGKPVLPSGSTSPSPLPFLHGSLSTGTPQPQPPSESTEKEPEQDGPAAPADGSTVESLPRPLSPTKLTPIVHSPLRYQSDADLEALRRKLANAPRPLKKRSSITEPEGPGGPNIQKLLYQRFNTLAGGMEGTPFYQPSPSQDFMGTLADVDNGNTNANGNLEELPPAQPTAPLPAEPAPSSDANDNELPSPEPEELICPQTTHQTAEPAEDNNNNVATVPTTEQIPSPVAEAPSPGEEQVPPAPLPPASHPPATSTNKRTNLKKPNSERTGHGLRVRFNPLALLLDASLEGEFDLVQRIIYEVEDPSKPNDEGITPLHNAVCAGHHHIVKFLLDFGVNVNAADSDGWGAGKAGCDEQRCGVCSVGLRGPEQ

SEQ ID NO: 849292 - protein, 760 aa, Homo sapiens
MFQEKKQEVQTAILRVDQLSQQLEDLKKGKLNGFQSYNGKLTGPAAVELKRLYQELQIRNQLNQEQNSKLQQQKELLNKRNMEVAMMDKRISELRERLYGKKIQLNRVNGTSSPQSPLSTSGRVAAVGPYIQVPSAGSFPVLGDPIKPQSLSIASNAAHGRSKSANDGNWPTLKQNSSSSVKPVQVAGADWKDPSVEGSVKQGTVSSQPVPFSALGPTEKPGIEIGKVPPPIPGVGKQLPPSYGTYPSPTPLGPGSTSSLERRKEGSLPRPSAGLPSRQRPTLLPATGSTPQPGSSQQIQQRISVPPSPTYPPAGPPAFPAGDSKPELPLTVAIRPFLADKGSRPQSPRKGPQTVNSSSIYSMYLQQATPPKNYQPAAHSALNKSVKAVYGKPVLPSGSTSPSPLPFLHGSLSTGTPQPQPPSESTEKEPEQDGPAAPADGSTVESLPRPLSPTKLTPIVHSPLRYQSDADLEALRRKLANAPRPLKKRSSITEPEGPGGPNIQKLLYQRFNTLAGGMEGTPFYQPSPSQDFMGTLADVDNGNTNANGNLEELPPAQPTAPLPAEPAPSSDANDNELPSPEPEELICPQTTHQTAEPAEDNNNNVATVPTTEQIPSPVAEAPSPGEEQVPPAPLPPASHPPATSTNKRTNLKKPNSERTGHGLRVRFNPLALLLDASLEGEFDLVQRIIYEVEDPSKPNDEGITPLHNAVCAGHHHIVKFLLDFGVNVNAADSDGWGAGKAGCDEQRCGVCSVGLRGPEQ

SEQ ID NO: 849293 - protein, 509 aa, Homo sapiens [sequence omitted]

SEQ ID NO: 849294 - protein, 104 aa, Homo sapiens [sequence omitted]

SEQ ID NO: 849295 - protein, 438 aa, Homo sapiens
MPMILTVFLSNNEQILTEVPITPETTCRDVVEFCKEPGEGSCHLAEVWRGNERPIPFDHMMYEHLQKWGPRREEVKFFLRHEDSPTENSEQGGRQTQEQRTQRNVINVPGEKRTENGVGNPRVELTLSELQDMAARQQQQIENQQQMLVAKEQRLHFLKQQERRQQQSISENEKLQKLKERVEAQENKLKKIRAMRGQVDYSKIMNGNLSAEIERFSAMFQEKKQEVQTAILRVDQLSQQLEDLKKGKLNGFQSYNGKLTGPAAVELKRLYQELQIRNQLNQEQNSKLQQQKELLNKRNMEVAMMDKRISELRERLYGKKIQLNRVNGTSSPQSPLSTSGRVAAVGPYIQVPSAGSFPVLGDPIKPQSLSIASNAAHGRSKSGEWSWPSSWGRVCEQGMGPAVEGRGVGQAPEALPHTSSDSRLSLPVRRLESCVPLW

SEQ ID NO: 849296 - protein, 1150 aa, Homo sapiens
AAATGPARAPQPAAAAASPRPGRRARRRERGLRRRPERWAQLGAERPVRRRPRASRTLPAMMPMILTVFLSNNEQILTEVPITPETTCRDVVEFCKEPGEGSCHLAEVWRGNERPIPFDHMMYEHLQKWGPRREEVKFFLRHEDSPTENSEQGGRQTQEQRTQRNVINVPGEKRTENGVGNPRVELTLSELQDMAARQQQQIENQQQMLVAKEQRLHFLKQQERRQQQSISENEKLQKLKERVEAQENKLKKIRAMRGQVDYSKIMNGNLSAEIERFSAMFQEKKQEVQTAILRVDQLSQQLEDLKKGKLNGFQSYNGKLTGPAAVELKRLYQELQIRNQLNQEQNSKLQQQKELLNKRNMEVAMMDKRISELRERLYGKKIQLNRVNGTSSPQSPLSTSGRVAAVGPYIQVPSAGSFPVLGDPIKPQSLSIASNAAHGRSKSANDGNWPTLKQNSSSSVKPVQVAGADWKDPSVEGSVKQGTVSSQPVPFSALGPTEKPGIEIGKVPPPIPGVGKQLPPSYGTYPSPTPLGPGSTSSLERRKEGSLPRPSAGLPSRQRPTLLPATGSTPQPGSSQQIQQRISVPPSPTYPPAGPPAFPAGDSKPELPLTVAIRPFLADKGSRPQSPRKGPQTVNSSSIYSMYLQQATPPKNYQPAAHSALNKSVKAVYGKPVLPSGSTSPSPLPFLHGSLSTGTPQPQPPSESTEKEPEQDGPAAPADGSTVESLPRPLSPTKLTPIVHSPLRYQSDADLEALRRKLANAPRPLKKRSSITEPEGPGGPNIQKLLYQRFNTLAGGMEGTPFYQPSPSQDFMGTLADVDNGNTNANGNLEELPPAQPTAPLPAEPAPSSDANDNELPSPEPEELICPQTTHQTAEPAEDNNNNVATVPTTEQIPSPVAEAPSPGEEQVPPAPLPPASHPPATSTNKRTNLKKPNSERTGHGLRVRFNPLALLLDASLEGEFDLVQRIIYEVEDPSKPNDEGITPLHNAVCAGHHHIVKFLLDFGVNVNAADSDGWTPLHCAASCNSVHLCKQLVESGAAIFASTISDIETAADKCEEMEEGYIQCSQFLYGVQEKLGVMNKGVAYALWDYEAQNSDELSFHEGDALTILRRKDESETEWWWARLGDREGYVPKNLLGLYPRIKPRQRTLA

SEQ ID NO: 849297 - protein, 1105 aa, Homo sapiens
AAGRSRCIWGRSSPRSSQMILTVFLSNNEQILTEVPITPETTCRDVVEFCKEPGEGSCHLAEVWRGNERPIPFDHMMYEHLQKWGPRREEVKFFLRHEDSPTENSEQGGRQTQEQRTQRNVINVPGEKRTENGVGNPRVELTLSELQDMAARQQQQIENQQQMLVAKEQRLHFLKQQERRQQQSISENEKLQKLKERVEAQENKLKKIRAMRGQVDYSKIMNGNLSAEIERFSAMFQEKKQEVQTAILRVDQLSQQLEDLKKGKLNGFQSYNGKLTGPAAVELKRLYQELQIRNQLNQEQNSKLQQQKELLNKRNMEVAMMDKRISELRERLYGKKIQLNRVNGTSSPQSPLSTSGRVAAVGPYIQVPSAGSFPVLGDPIKPQSLSIASNAAHGRSKSANDGNWPTLKQNSSSSVKPVQVAGADWKDPSVEGSVKQGTVSSQPVPFSALGPTEKPGIEIGKVPPPIPGVGKQLPPSYGTYPSPTPLGPGSTSSLERRKEGSLPRPSAGLPSRQRPTLLPATGSTPQPGSSQQIQQRISVPPSPTYPPAGPPAFPAGDSKPELPLTVAIRPFLADKGSRPQSPRKGPQTVNSSSIYSMYLQQATPPKNYQPAAHSALNKSVKAVYGKPVLPSGSTSPSPLPFLHGSLSTGTPQPQPPSESTEKEPEQDGPAAPADGSTVESLPRPLSPTKLTPIVHSPLRYQSDADLEALRRKLANAPRPLKKRSSITEPEGPGGPNIQKLLYQRFNTLAGGMEGTPFYQPSPSQDFMGTLADVDNGNTNANGNLEELPPAQPTAPLPAEPAPSSDANDNELPSPEPEELICPQTTHQTAEPAEDNNNNVATVPTTEQIPSPVAEAPSPGEEQVPPAPLPPASHPPATSTNKRTNLKKPNSERTGHGLRVRFNPLALLLDASLEGEFDLVQRIIYEVEDPSKPNDEGITPLHNAVCAGHHHIVKFLLDFGVNVNAADSDGWTPLHCAASCNSVHLCKQLVESGAAIFASTISDIETAADKCEEMEEGYIQCSQFLYGVQEKLGVMNKGVAYALWDYEAQNSDELSFHEGDALTILRRKDESETEWWWARLGDREGYVPKNLLGLYPRIKPRQRTLA

SEQ ID NO: 849298 - protein, 398 aa, Homo sapiens
MYLQQATPPKNYQPAAHSALNKSVKAVYGKPVLPSGSTSPSPLPFLHGSLSTGTPQPQPPSESTEKEPEQDGPAAPADGSTVESLPRPLSPTKLTPIVHSPLRYQSDADLEALRRKLANAPRPLKKRSSITEPEGPGGPNIQKLLYQRFNTLAGGMEGTPFYQPSPSQDFMGTLADVDNGNTNANGNLEELPPAQPTAPLPAEPAPSSDANDNELPSPEPEELICPQTTHQTAEPAEDNNNNVATVPTTEQIPSPVAEAPSPGEEQVPPAPLPPASHPPATSTNKRTNLKKPNSERTGHGLRVRFNPLALLLDASLEGEFDLVQRIIYEVEDPSKPNDEGITPLHNAVCAGHHHIVKFLLDFGVNVNAADSDGWGAGKAGCDEQRCGVCSVGLRGPEQ

SEQ ID NO: 849299 - protein, 509 aa, Homo sapiens [sequence omitted]

SEQ ID NO: 849300 - protein, 954 aa, Homo sapiens
MPMILTVFLSNNEQILTEVPITPETTCRDVVEFCKEPGEGSCHLAEVWRGNERPIPFDHMMYEHLQKWGPRREEVKFFLRHEDSPTENSEQGGRQTQEQRTQRNVINVPGEKRTENGVGNPRVELTLSELQDMAARQQQQIENQQQMLVAKEQRLHFLKQQERRQQQSISENEKLQKLKERVEAQENKLKKIRAMRGQVDYSKIMNGNLSAEIERFSAMFQEKKQEVQTAILRVDQLSQQLEDLKKGKLNGFQSYNGKLTGPAAVELKRLYQELQIRNQLNQEQNSKLQQQKELLNKRNMEVAMMDKRISELRERLYGKKIQLNRVNGTSSPQSPLSTSGRVAAVGPYIQVPSAGSFPVLGDPIKPQSLSIASNAAHGRSKSANDGNWPTLKQNSSSSVKPVQVAGADWKDPSVEGSVKQGTVSSQPVPFSALGPTEKPGIEIGKVPPPIPGVGKQLPPSYGTYPSPTPLGPGSTSSLERRKEGSLPRPSAGLPSRQRPTLLPATGSTPQPGSSQQIQQRISVPPSPTYPPAGPPAFPAGDSKPELPLTVAIRPFLADKGSRPQSPRKGPQTVNSSSIYSMYLQQATPPKNYQPAAHSALNKSVKAVYGKPVLPSGSTSPSPLPFLHGSLSTGTPQPQPPSESTEKEPEQDGPAAPADGSTVESLPRPLSPTKLTPIVHSPLRYQSDADLEALRRKLANAPRPLKKRSSITEPEGPGGPNIQKLLYQRFNTLAGGMEGTPFYQPSPSQDFMGTLADVDNGNTNANGNLEELPPAQPTAPLPAEPAPSSDANDNELPSPEPEELICPQTTHQTAEPAEDNNNNVATVPTTEQIPSPVAEAPSPGEEQVPPAPLPPASHPPATSTNKRTNLKKPNSERTGHGLRVRFNPLALLLDASLEGEFDLVQRIIYEVEDPSKPNDEGITPLHNAVCAGHHHIVKFLLDFGVNVNAADSDGW

SEQ ID NO: 849301 - protein, 274 aa, Homo sapiens
GLGTRLGGHVVLERQRVIIDELIKKLDMNLNEDISSLSTEELRQRVDAAVAQIVNPARVKEQLVEQLKTQIRDLEMFINFIQDEVGSPLQTGGGHCECKAGGKTGNGCSRTGSSRTPPGNSKTKAEDVKKVRETGLHLMRRALAVLQIFAVSQFGCATGQIPPTLWQRVQADRDYSPLLKRLEVSVDRVKQLALRQQPHDHVITSANLQDLSLGGKDELTMAVRKELTVAVRDLLAHGLYASSPGMSLVGLMCCAASLGQSMTGSLKTHEEGGM

SEQ ID NO: 849302 - protein, 613 aa, Homo sapiens
MAAVEAAAEPVTVVAAVGPKAKDEEEEEEEPLPPCEAVRWAPVGAVAEARPGATAFLEEATAEEPGAAPGSPPDSPGRTLRRLRAERRRLDSALLALSSHFAQVQFRLRQVVRGAPAEQQRLLRELEDFAFRGCPHVLGYEGPGDPASDEGDGLPGDRPRLRGEDQSEQEKQERLETQREKQKELILQLKTQLDDLETFAYQEGSYDSLPQSVVLERQRVIIDELIKKLDMNLNEDISSLSTEELRQRVDAAVAQIVNPARVKEQLVEQLKTQIRDLEMFINFIQDEVGSPLQTGGGHCECKAGGKTGNGCSRTGSSRTPPGNSKTKAEDVKKVRETGLHLMRRALAVLQIFAVSQFGCATGQIPPTLWQRVQADRDYSPLLKRLEVSVDRVKQLALRQQPHDHVITSANLQDLSLGGKDELTMAVRKELTVAVRDLLAHGLYASSPGMSLVMAPIACLLPAFSSAPEAMHPWELFVKYYHAKNGRAYVESPARKLSQSFALPVTGGTVVTPKQSLLTAIHMVLTEHDPFKRSADSELKALVCMALNEQRLVSWVNLICKSGSLIEPHYQPWSYMAHTGFESALNLLSRLSSLKFSLPVDLAVRQLKNIKDAF

SEQ ID NO: 849303 - protein, 383 aa, Homo sapiens
MNLNEDISSLSTEELRQRVDAAVAQIVNPARVKEQLVEQLKTQIRDLEMFINFIQDEVGSPLQTGGGHCECKAGGKTGNGCSRTGSSRTPPGNSKTKAEDVKKVRETGLHLMRRALAVLQIFAVSQFGCATGQIPPTLWQRVQADRDYSPLLKRLEVSVDRVKQLALRQQPHDHVITSANLQDLSLGGKDELTMAVRKELTVAVRDLLAHGLYASSPGMSLVMAPIACLLPAFSSAPEAMHPWELFVKYYHAKNGRAYVESPARKLSQSFALPVTGGTVVTPKQSLLTAIHMVLTEHDPFKRSADSELKALVCMALNEQRLVSWVNLICKSGSLIEPHYQPWSYMAHTGFESALNLLSRLSSLKFSLPVDLAVRQLKNIKDAF

SEQ ID NO: 849304 - protein, 410 aa, Homo sapiens
GLGTRLGGHVVLERQRVIIDELIKKLDMNLNEDISSLSTEELRQRVDAAVAQIVNPARVKEQLVEQLKTQIRDLEMFINFIQDEVGSPLQTGGGHCECKAGGKTGNGCSRTGSSRTPPGNSKTKAEDVKKVRETGLHLMRRALAVLQIFAVSQFGCATGQIPPTLWQRVQADRDYSPLLKRLEVSVDRVKQLALRQQPHDHVITSANLQDLSLGGKDELTMAVRKELTVAVRDLLAHGLYASSPGMSLVMAPIACLLPAFSSAPEAMHPWELFVKYYHAKNGRAYVESPARKLSQSFALPVTGGTVVTPKQSLLTAIHMVLTEHDPFKRSADSELKALVCMALNEQRLVSWVNLICKSGSLIEPHYQPWSYMAHTGFESALNLLSRLSSLKFSLPVDLAVRQLKNIKDAF

SEQ ID NO: 849305 - protein, 613 aa, Homo sapiens; identical to SEQ ID NO: 849302

SEQ ID NO: 849306 - protein, 110 aa, Homo sapiens
MNLNEDISSLSTEELRQRVDAAVAQIVNPARVKEQLVEQLKTQIRDLEMFINFIQDEVGSPLQTGGGHCECKAGGKTGNGCSRTGSSRTPPGNSKSKCSFQNRQISRDRK

SEQ ID NO: 849307 - protein, 336 aa, Homo sapiens
NSARYEAWDEVGSPLQTGGGHCECKAGGKTGNGCSRTGSSRTPPGNSKTKAEDVKKVRETGLHLMRRALAVLQIFAVSQFGCATGQIPPTLWQRVQADRDYSPLLKRLEVSVDRVKQLALRQQPHDHVITSANLQDLSLGGKDELTMAVRKELTVAVRDLLAHGLYASSPGMSLVMAPIACLLPAFSSAPEAMHPWELFVKYYHAKNGRAYVESPARKLSQSFALPVTGGTVVTPKQSLLTAIHMVLTEHDPFKRSADSELKALVCMALNEQRLVSWVNLICKSGSLIEPHYQPWSYMAHTGFESALNLLSRLSSLKFSLPVDLAVRQLKNIKDAF

SEQ ID NO: 849308 - protein, 454 aa, Homo sapiens
MASSEVARHLLFQSHMATKTTCMSSQGSDDEQIKRENIRSLTMSGHVGFESLPDQLVNRSIQQGFCFNILCVGETGIGKSTLIDTLFNTNFEDYESSHFCPNVKLKAQTYELQESNVQLKLTIVNTVGFGDQINKEESYQPIVDYIDAQFEAYLQEELKIKRSLFTYHDSRIHVCLYFISPTGHSLKTLDLLTMKNLDSKVNIIPVIAKADTVSKTELQKFKIKLMSELVSNGVQIYQFPTDDDTIAKVNAAMNGQLPFAVVGSMDEVKVGNKMVKARQYPWGVVQVENENHCDFVKLREMLICTNMEDLREQTHTRHYELYRRCKLEEMGFTDVGPENKPVSVQETYEAKRHEFHGERQRKEEEMKQMFVQRVKEKEAILKEAERELQAKFEHLKRLHQEERMKLEEKRRLLEEEIIAFSKKKATSEIFHSQSFLATGSNLRKDKDRKNSNFL

SEQ ID NO: 849309 - protein, 431 aa, Homo sapiens
MASSEVARHLKRENIRSLTMSGHVGFESLPDQLVNRSIQQGFCFNILCVGETGIGKSTLIDTLFNTNFEDYESSHFCPNVKLKAQTYELQESNVQLKLTIVNTVGFGDQINKEESYQPIVDYIDAQFEAYLQEELKIKRSLFTYHDSRIHVCLYFISPTGHSLKTLDLLTMKNLDSKVNIIPVIAKADTVSKTELQKFKIKLMSELVSNGVQIYQFPTDDDTIAKVNAAMNGQLPFAVVGSMDEVKVGNKMVKARQYPWGVVQVENENHCDFVKLREMLICTNMEDLREQTHTRHYELYRRCKLEEMGFTDVGPENKPVSVQETYEAKRHEFHGERQRKEEEMKQMFVQRVKEKEAILKEAERELQAKFEHLKRLHQEERMKLEEKRRLLEEEIIAFSKKKATSEIFHSQSFLATGSNLRKDKDRKNSNFL

SEQ ID NO: 849310 - protein, 261 aa, Homo sapiens
MKNLDSKVNIIPVIAKADTVSKTELQKFKIKLMSELVSNGVQIYQFPTDDDTIAKVNAAMNGQLPFAVVGSMDEVKVGNKMVKARQYPWGVVQVENENHCDFVKLREMLICTNMEDLREQTHTRHYELYRRCKLEEMGFTDVGPENKPVSVQETYEAKRHEFHGERQRKEEEMKQMFVQRVKEKEAILKEAERELQAKFEHLKRLHQEERMKLEEKRRLLEEEIIAFSKKKATSEIFHSQSFLATGSNLRKDKDRKNSNFL

SEQ ID NO: 849311 - protein, 370 aa, Homo sapiens
HRRVEGRARCVQSGAGTPFSCLSLPSSWDYSSFSLTWQRKQLVCLHKDQMMNRYYQPIVDYIDAQFEAYLQEELKIKRSLFTYHDSRIHVCLYFISPTGHSLKTLDLLTMKNLDSKVNIIPVIAKADTVSKTELQKFKIKLMSELVSNGVQIYQFPTDDDTIAKVNAAMNGQLPFAVVGSMDEVKVGNKMVKARQYPWGVVQVENENHCDFVKLREMLICTNMEDLREQTHTRHYELYRRCKLEEMGFTDVGPENKPVSVQETYEAKRHEFHGERQRKEEEMKQMFVQRVKEKEAILKEAERELQAKFEHLKRLHQEERMKLEEKRRLLEEEIIAFSKKKATSEIFHSQSFLATGSNLRKDKDRKNSNFL

SEQ ID NO: 849312 - protein, 450 aa, Homo sapiens
MASSEVARHLLFQSHMATKTTCMSSQGSDDEQIKRENIRSLTMSGHVGFESLPDQLVNRSIQQGFCFNILCVGETGIGKSTLIDTLFNTNFEDYESSHFCPNVKLKAQTYELQESNVQLKLTIVNTVGFGDQINKEESYQPIVDYIDAQFEAYLQEELKIKRSLFTYHDSRIHVCLYFISPTGHSLKTLDLLTMKNLDSKVNIIPVIAKADTVSKTELQKFKIKLMSELVSNGVQIYQFPTDDDTIAKVNAAMNGQLPFAVVGSMDEVKVGNKMVKARQYPWGVVQVENENHCDFVKLREMLICTNMEDLREQTHTRHYELYRRCKLEEMGFTDVGPENKPVSVQETYEAKRHEFHGERQRKEEEMKQMFVQRVKEKEAILKEAERELQAKFEHLKRLHQEERMKLEEKRRLLEEEIIAFSKKKATSEIFHSQSFLATGSNLRKDKDRKK

SEQ ID NO: 849313 - protein, 488 aa, Homo sapiens
MASSEVARHLLFQSHMATKTTCMSSQGSDDEQIKRENIRSLTMSGHVGFESLPDQLVNRSIQQGFCFNILCVGETGIGKSTLIDTLFNTNFEDYESSHFCPNVKLKAQTYELQESNVQLKLTIVNTVGFGDQINKEESYQPIVDYIDAQFEAYLQEELKIKRSLFTYHDSRIHVCLYFISPTGHSLKTLDLLTMKNLDSKVNIIPVIAKADTVSKTELQKFKIKLMSELVSNGVQIYQFPTDDDTIAKVNAAMNGQLPFAVVGSMDEVKVGNKMVKARQYPWGVVQVENENHCDFVKLREMLICTNMEDLREQTHTRHYELYRRCKLEEMGFTDVGPENKPVSVQETYEAKRHEFHGERQRKEEEMKQMFVQRVKEKEAILKEAERELQAKFEHLKRLHQEERMKLEEKRRLLEEEIIAFSKKKATSEIFHSQSFLATGSNLRKDKDRKKEPGCRFELLCIDVRACETNGGRKDAEKGREGHSARGQP

SEQ ID NO: 849314 - protein, 359 aa, Homo sapiens
MASSEVARHLLFQSHMATKTTCMSSQGSDDEQIKRENIRSLTMSGHVGFESLPDQLVNRSIQQGFCFNILCVGETGIGKSTLIDTLFNTNFEDYESSHFCPNVKLKAQTYELQESNVQLKLTIVNTVGFGDQINKEESYQPIVDYIDAQFEAYLQEELKIKRSLFTYHDSRIHVCLYFISPTGHSLKTLDLLTMKNLDSKVNIIPVIAKADTVSKTELQKFKIKLMSELVSNGVQIYQFPTDDDTIAKVNAAMNGQLPFAVVGSMDEVKVGNKMVKARQYPWGVVQVENENHCDFVKLREMLICTNMEDLREQTHTRHYELYRRCKLEEMGFTDVGPENKPVSCLDSVEWRRHSLLTWP

SEQ ID NO: 849315 - protein, 454 aa, Homo sapiens; identical to SEQ ID NO: 849308

SEQ ID NO: 849316 - protein, 445 aa, Homo sapiens
MLFQSHMATKTTCMSSQGSDDEQIKRENIRSLTMSGHVGFESLPDQLVNRSIQQGFCFNILCVGETGIGKSTLIDTLFNTNFEDYESSHFCPNVKLKAQTYELQESNVQLKLTIVNTVGFGDQINKEESYQPIVDYIDAQFEAYLQEELKIKRSLFTYHDSRIHVCLYFISPTGHSLKTLDLLTMKNLDSKVNIIPVIAKADTVSKTELQKFKIKLMSELVSNGVQIYQFPTDDDTIAKVNAAMNGQLPFAVVGSMDEVKVGNKMVKARQYPWGVVQVENENHCDFVKLREMLICTNMEDLREQTHTRHYELYRRCKLEEMGFTDVGPENKPVSVQETYEAKRHEFHGERQRKEEEMKQMFVQRVKEKEAILKEAERELQAKFEHLKRLHQEERMKLEEKRRLLEEEIIAFSKKKATSEIFHSQSFLATGSNLRKDKDRKNSNFL

SEQ ID NO: 849317 - protein, 359 aa, Homo sapiens
MASSEVARHLLFQSHMATKTTCMSSQGSDDEQIKRENIRSLTMSGHVGFESLPDQLVNRSIQQGFCFNILCVGETGIGKSTLIDTLFNTNFEDYESSHFCPNVKLKAQTYELQESNVQLKLTIVNTVGFGDQINKEESYQPIVDYIDAQFEAYLQEELKIKRSLFTYHDSRIHVCLYFISPTGHSLKTLDLLTMKNLDSKVNIIPVIAKADTVSKTELQKFKIKLMSELVSNGVQIYQFPTDDDTIAKVNAAMNGQLPFAVVGSMDEVKVGNKMVKARQYPWGVVQVENENHCDFVKLREMLICTNMEDLREQTHTRHYELYRRCKLEEMGFTDVGPENKPVSYRPNLSTLRDFTKKRE

SEQ ID NO: 849318 - protein, 452 aa, Homo sapiens
LPASRGPQSLLRSSRLHSSRRLPGVPALLQPAPTLTLSPQASRVAPVRGSLGARKTLSAHHRASAPTPPPEASSSAPPLSLPRRGGSLASRPARCFCPPAFPPPSPGPAARGRADTAASPCPCPRPWPPPRWRGTCYQPIVDYIDAQFEAYLQEELKIKRSLFTYHDSRIHVCLYFISPTGHSLKTLDLLTMKNLDSKVNIIPVIAKADTVSKTELQKFKIKLMSELVSNGVQIYQFPTDDDTIAKVNAAMNGQLPFAVVGSMDEVKVGNKMVKARQYPWGVVQVENENHCDFVKLREMLICTNMEDLREQTHTRHYELYRRCKLEEMGFTDVGPENKPVSVQETYEAKRHEFHGERQRKEEEMKQMFVQRVKEKEAILKEAERELQAKFEHLKRLHQEERMKLEEKRRLLEEEIIAFSKKKATSEIFHSQSFLATGSNLRKDKDRKNSNFL

SEQ ID NO: 849319 - protein, 261 aa, Homo sapiens; identical to SEQ ID NO: 849310

SEQ ID NO: 849320 - protein, 360 aa, Homo sapiens
MYSFCENSTYMLCAFYRYIYCDEIDLAADTVLATLYAAKKYIVPHLARACVNFLETSLSAKNACVLLSQSCLFEEPDLTQRCWEVIDAQAELALKSEGFCDIDFQTLESILRRETLNAKEIVVFEAALNWAEVECQRQDLALSIENKRKVLGKALYLIRIPTMALDDFANGAAQSGVLTLNETNDIFLWYTAAKKPELQFVSKARKGLVPQRCHRFQSCAYRSNQWRYRGRCDSIQFAVDKRVFIAGFGLYGSSCGSAEYSAKIELKRQGVVLGQNLSKYFSDGSSNTFPVWFEYPVQIEPDTFYTASVILDGNELSYFGQEGMTEVQCGKVTVQFQCSSDSTNGTGVQGGQIPELIFYA

SEQ ID NO: 849321 - protein, 545 aa, Homo sapiens
SGRVPAEPAGRWISECPGRGLRSGHRARRRTAASPEARRSAGETVKNRSKKSSKKANTSSSSSNSSKLPPVCYEIITLKTKKKKMAADIFPRKKPANSSSTSVQQYHQQNLSNNNLIPAPNWQGLYPTIRERNAMMFNNDLMADVHFVVGPPGGTQRLPGHKYVLAVGSSVFHAMFYGELAEDKDEIRIPDVEPAAFLAMLKYIYCDEIDLAADTVLATLYAAKKYIVPHLARACVNFLETSLSAKNACVLLSQSCLFEEPDLTQRCWEVIDAQAELALKSEGFCDIDFQTLESILRRETLNAKEIVVFEAALNWAEVECQRQDLALSIENKRKVLGKALYLIRIPTMALDDFANGAAQSGVLTLNETNDIFLWYTAAKKPELQFVSKARKGLVPQRCHRFQSCAYRSNQWRYRGRCDSIQFAVDKRVFIAGFGLYGSSCGSAEYSAKIELKRQGVVLGQNLSKYFSDGSSNTFPVWFEYPVQIEPDTFYTASVILDGNELSYFGQEGMTEVQCGKVTVQFQCSSDSTNGTGVQGGQIPELIFYA

SEQ ID NO: 849322 - protein, 522 aa, Homo sapiens
MVDDKEKNMKCLTFFLMLPETVKNRSKKSSKKANTSSSSSNSSKLPPVCYEIITLKTKKKKMAADIFPRKKPANSSSTSVQQYHQQNLSNNNLIPAPNWQGLYPTIRERNAMMFNNDLMADVHFVVGPPGGTQRLPGHKYVLAVGSSVFHAMFYGELAEDKDEIRIPDVEPAAFLAMLKYIYCDEIDLAADTVLATLYAAKKYIVPHLARACVNFLETSLSAKNACVLLSQSCLFEEPDLTQRCWEVIDAQAELALKSEGFCDIDFQTLESILRRETLNAKEIVVFEAALNWAEVECQRQDLALSIENKRKVLGKALYLIRIPTMALDDFANGAAQSGVLTLNETNDIFLWYTAAKKPELQFVSKARKGLVPQRCHRFQSCAYRSNQWRYRGRCDSIQFAVDKRVFIAGFGLYGSSCGSAEYSAKIELKRQGVVLGQNLSKYFSDGSSNTFPVWFEYPVQIEPDTFYTASVILDGNELSYFGQEGMTEVQCGKVTVQFQCSSDSTNGTGVQGGQIPELIFYA

SEQ ID NO: 849323 - protein, 545 aa, Homo sapiens; identical to SEQ ID NO: 849321

SEQ ID NO: 849324 - protein, 545 aa, Homo sapiens; identical to SEQ ID NO: 849321

SEQ ID NO: 849325 - protein, 545 aa, Homo sapiens; identical to SEQ ID NO: 849321

SEQ ID NO: 849326 - protein, 545 aa, Homo sapiens; identical to SEQ ID NO: 849321

SEQ ID NO: 849327 - protein, 407 aa, Homo sapiens
MAPPLAPLPPRDPNGAGPEWREPGAVSFADVAVYFCREEWGCLRPAQRALYRDVMRETYGHLSALGIGGNKPALISWVEEEAELWGPAAQDPEVAKCQTQTDPDSRNKKKERQREGTGALEKPDPVAAGSPGLKSPQAPSAGPPYGWEQLSKAPHRGRPSLCAHPPVPRADQRHGCYVCGKSFAWRSTLVEHVYSHTGEKPFHCTDCGKGFGHASSLSKHRAIHRGERPHRCLECGRAFTQRSALTSHLRVHTGEKPYGCADCGRRFSQSSALYQHRRVHSGETPFPCPDCGRAFAYPSDLRRHVRTHTGEKPYPCPDCGRCFRQSSEMAVHRRTHSGEKPYPCPQCGRRFGQKSAVAKHQWVHRPGAGGHRGRVAGRLSVTLTPGHGDLDPPVGFQLYPEIFQECG

SEQ ID NO: 849328 - protein, 454 aa, Homo sapiens
MAPPLAPLPPRDPNGAGPEWREPGAVSFADVAVYFCREEWGCLRPAQRALYRDVMRETYGHLSALGESPTCSPEPCAPTGPAAPLGAAREVGGPGAGQVASPQRGVCVLLPKESEATSQLSSPGWRRRPNCGVRLPRIRRWRNVRHKRTQDSRNKKKERQREGTGALEKPDPVAAGSPGLKSPQAPSAGPPYGWEQLSKAPHRGRPSLCAHPPVPRADQRHGCYVCGKSFAWRSTLVEHVYSHTGEKPFHCTDCGKGFGHASSLSKHRAIHRGERPHRCLECGRAFTQRSALTSHLRVHTGEKPYGCADCGRRFSQSSALYQHRRVHSGETPFPCPDCGRAFAYPSDLRRHVRTHTGEKPYPCPDCGRCFRQSSEMAVHRRTHSGEKPYPCPQCGRRFGQKSAVAKHQWVHRPGAGGHRGRVAGRLSVTLTPGHGDLDPPVGFQLYPEIFQECG

SEQ ID NO: 849329 - protein, 454 aa, Homo sapiens; identical to SEQ ID NO: 849328

SEQ ID NO: 849330 - protein, 454 aa, Homo sapiens; identical to SEQ ID NO: 849328

SEQ ID NO: 849331 - protein, 454 aa, Homo sapiens; identical to SEQ ID NO: 849328

SEQ ID NO: 849332 - protein, 454 aa, Homo sapiens; identical to SEQ ID NO: 849328

SEQ ID NO: 849333 - protein, 379 aa, Homo sapiens
MAPPLAPLPPRDPNGAGPEWREPGAVSFADVAVYFCREEWGCLRPAQRALYRDVMRETYGHLSALGESPTCSPEPCAPTGPAAPLGAAREVGGPGAGQVASPQRGVCVLLPKESEATSQLSSPGWRRRPNCGVRLPRIRRWRNVRHKRTQDSRNKKKERQREGTGALEKPDPVAAGSPGLKSPQAPSAGPPYGWEQLSKAPHRGRPSLCAHPPVPRADQRHGCYVCGKSFAWRSTLVEHVYSHTGEKPFHCTDCGKGFGHASSLSKHRAIHRGERPHRCLECGRAFTQRSALTSPTPRTCGATCAPTPARSPTRARTAGAASARARRWQSTGAPTAARSPTPARSAAAALARSQPWPNTSGFIGPGPGATGAGSPGVCL

SEQ ID NO: 849334 - protein, 454 aa, Homo sapiens; identical to SEQ ID NO: 849328

SEQ ID NO: 849335 - protein, 369 aa, Homo sapiens
MAPPLAPLPPRDPNGAGPEWREPGAVSFADVAVYFCREEWGCLRPAQRALYRDVMRETYGHLSALDSRNKKKERQREGTGALEKPDPVAAGSPGLKSPQAPSAGPPYGWEQLSKAPHRGRPSLCAHPPVPRADQRHGCYVCGKSFAWRSTLVEHVYSHTGEKPFHCTDCGKGFGHASSLSKHRAIHRGERPHRCLECGRAFTQRSALTSHLRVHTGEKPYGCADCGRRFSQSSALYQHRRVHSGETPFPCPDCGRAFAYPSDLRRHVRTHTGEKPYPCPDCGRCFRQSSEMAVHRRTHSGEKPYPCPQCGRRFGQKSAVAKHQWVHRPGAGGHRGRVAGRLSVTLTPGHGDLDPPVGFQLYPEIFQECG

SEQ ID NO: 849336 - protein, 454 aa, Homo sapiens; identical to SEQ ID NO: 849328

SEQ ID NO: 849337 - protein, 263 aa, Homo sapiens
MEPPFTRLEGRMSRRAAPFGASQDGAGWVQLVKRNAAPQPLQTKPNSPARGWITGHPAAAFPPEEPRRLPRPEMPPVWLCLSPVPRQLGGSIPKQMHPAHDGTPGTPILRTLQSFKLELAGFCLYRHRLQSLRCCLAGKCRAGGAGPQLEAPRCSPPLHCRAQGGQEQPQQQQKPNWERNRGKNPHRLLGTYKEMPTSILLTWHLLTWHLLGCHKTDKSFHVRLDTCQGGVSKLGHRQHPRPGHWVEETVLGRSRREGPGLFP

SEQ ID NO: 849338 - protein, 153 aa, Homo sapiens
DAPVPGRAERWCLAQVPQHIRVRTLKTPQFPRLMATCPSDTAMLSHSPTIGSECAPQIHSEKLIPQSNSVERWNLMGAPPSQTNSCSCQDSLGMDSSLPSAMWTRGLPPLSPPGNAVFGRHLGSRDQASPDTKPAGTMTLDSQPPQLGKNSAP

SEQ ID NO: 849339 - protein, 139 aa, Homo sapiens
PALGARVRGKMAAPLIPLSQQIPTGNSLYESYYKQVDPAYTGRVGASEAALFLKKSGLSDIILGKIWDLADPEGKGFLDKQGFYVALRLVACAQSGHEVTLSNLNLSMPPPKFHDTSSPLMVTPPSAEAHWAVRVSERE

SEQ ID NO: 849340 - protein, 874 aa, Homo sapiens
PALGARVRGKMAAPLIPLSQQIPTGNSLYESYYKQVDPAYTGRVGASEAALFLKKSGLSDIILGKIWDLADPEGKGFLDKQGFYVALRLVACAQSGHEVTLSNLNLSMPPPKFHDTSSPLMVTPPSAEAHWAVRVEEKAKFDGIFESLLPINGLLSGDKVKPVLMNSKLPLDVLGRVWDLSDIDKDGHLDRDEFAVAMHLVYRALEKEPVPSALPPSLIPPSKRKKTVFPGAVPVLPASPPPKDSLRSTPSHGSVSSLNSTGSLSPKHSLKQTQPTVNWVVPVADKMRFDEIFLKTDLDLDGYVSGQEVKEIFMHSGLTQNLLAHIWALADTRQTGKLSKDQFALAMYFIQQKVSKGIDPPQVLSPDMVPPSERGTPGPDSSGSLGSGEFTGVKELDDISQEIAQLQREKYSLEQDIREKEEAIRQKTSEVQELQNDLDRETSSLQELEAQKQDAQDRLDEMDQQKAKLRDMLSDVRQKCQDETQMISSLKTQIQSQESDLKSQEDDLNRAKSELNRLQQEETQLEQSIQAGRVQLETIIKSLKSTQDEINQARSKLSQLHESRQEAHRSLEQYDQVLDGAHGASLTDLANLSEGVSLAERGSFGAMDDPFKNKALLFSNNTQELHPDPFQTEDPFKSDPFKGADPFKGDPFQNDPFAEQQTTSTDPFGGDPFKESDPFRGSATDDFFKKQTKNDPFTSDPFTKNPSLPSKLDPFESSDPFSSSSVSSKGSDPFGTLDPFGSGSFNSAEGFADFSQMSKPPPSGPFTSSLGGAGFSDDPFKSKQDTPALPPKKPAPPRPKPPSGKSTPVSQLGSADFPEAPDPFQPLGADSGDPFQSKKGFGDPFSGKDPFVPSSAAKPSKASASGFADFTSVS

SEQ ID NO: 849341 - protein, 764 aa, Homo sapiens
PALGARVRGKMAAPLIPLSQQIPTGNSLYESYYKQVDPAYTGRVGASEAALFLKKSGLSDIILGKIWDLADPEGKGFLDKQGFYVALRLVACAQSGHEVTLSNLNLSMPPPKFHDTSSPLMVTPPSAEAHWAVRVEEKAKFDGIFESLLPINGLLSGDKVKPVLMNSKLPLDVLGRVWDLSDIDKDGHLDRDEFAVAMHLVYRALEKEPVPSALPPSLIPPSKRKKTVFPGAVPVLPASPPPKDSLRSTPSHGSVSSLNSTGSLSPKHSLKQTQPTVNWVVPVADKMRFDEIFLKTDLDLDGYVSGQEVKEIFMHSGLTQNLLAHIWALADTRQTGKLSKDQFALAMYFIQQKVSKGIDPPQVLSPDMVPPSERGTPGPDSSGSLGSGEFTGVKELDDISQEIAQLQREKYSLEQDIREKEEAIRQKTSEVQELQNDLDRETSSLQELEAQKQDAQDRLDEMDQQKAKLRDMLSDVRQKCQDETQMISSLKTQIQSQESDLKSQEDDLNRAKSELNRLQQEETQLEQSIQAGRVQLETIIKSLKSTQDEINQARSKLSQLHESRQEAHRSLEQYDQVLDGAHGASLTDLANLSEGVSLAERGSFGAMDDPFKNKALLFSNNTQELHPDPFQTEDPFKSDPFKGADPFKGDPFQNDPFAEQQTTSTDPFGGDPFKESDPFRGSATDDFFKKQTKNDPFTSDPFTKNPSLPSKLDPFESSDPFSSSSVSSKGSDPFGTLDPFGSGSFNSAEGFADFSQMSKVKVHL

SEQ ID NO: 849342 - protein, 920 aa, Homo sapiens
PALGARVRGKMAAPLIPLSQQIPTGNSLYESYYKQVDPAYTGRVGASEAALFLKKSGLSDIILGKIWDLADPEGKGFLDKQGFYVALRLVACAQSGHEVTLSNLNLSMPPPKFHDTSSPLMVTPPSAEAHWAVRVEEKAKFDGIFESLLPINGLLSGDKVKPVLMNSKLPLDVLGRVWDLSDIDKDGHLDRDEFAVAMHLVYRALEKEPVPSALPPSLIPPSKRKKTVFPGAVPVLPASPPPKDSLRSTPSHGSVSSLNSTGSLSPKHSLKQTQPTVNWVVPVADKMRFDEIFLKTDLDLDGYVSGQEVKEIFMHSGLTQNLLAHIWALADTRQTGKLSKDQFALAMYFIQQKVSKGIDPPQVLSPDMVPPSERGTPGPDSSGSLGSGEFTGVKELDDISQEIAQLQREKYSLEQDIREKEEAIRQKTSEVQELQNDLDRETSSLQELEAQKQDAQDRLDEMDQQKAKLRDMLSDVRQKCQDETQMISSLKTQIQSQESDLKSQEDDLNRAKSELNRLQQEETQLEQSIQAGRVQLETIIKSLKSTQDEINQARSKLSQLHESRQEAHRSLEQYDQVLDGAHGASLTDLANLSEGVSLAERGSFGAMDDPFKNKALLFSNNTQELHPDPFQTEDPFKSDPFKGADPFKGDPFQNDPFAEQQTTSTDPFGGDPFKESDPFRGSATDDFFKKQTKNDPFTSDPFTKNPSLPSKLDPFESSDPFSSSSVSSKGSDPFGTLDPFGSGSFNSAEGFADFSQMSKPPPSGPFTSSLGGAGFSDDPFKSKQDTPALPPKKPAPPRPKPPSGKSTPVSQLGSADFPEAPDPFQPLGADSGDPFQSKKGFGDPFSGKDPFVPSSAAKPSKASASGFADFTSFGNEEQQLAWAKRESEKAEQERLARLRRQEQEDLELAIALSKADMPAA

SEQ ID NO: 849343 - protein, 896 aa, Homo sapiens
PALGARVRGKMAAPLIPLSQQIPTGNSLYESYYKQVDPAYTGRVGASEAALFLKKSGLSDIILGKIWDLADPEGKGFLDKQGFYVALRLVACAQSGHEVTLSNLNLSMPPPKFQNPPTYDLILCQPQRNVSLSSQHDTSSPLMVTPPSAEAHWAVRVEEKAKFDGIFESLLPINGLLSGDKVKPVLMNSKLPLDVLGRVWDLSDIDKDGHLDRDEFAVAMHLVYRALEKEPVPSALPPSLIPPSKRKKTVFPGAVPVLPASPPPKDSLRSTPSHGSVSSLNSTGSLSPKHSLKQTQPTVNWVVPVADKMRFDEIFLKTDLDLDGYVSGQEVKEIFMHSGLTQNLLAHIWALADTRQTGKLSKDQFALAMYFIQQKVSKGIDPPQVLSPDMVPPSERGTPGPDSSGSLGSGEFTGVKELDDISQEIAQLQREKYSLEQDIREKEEAIRQKTSEVQELQNDLDRETSSLQELEAQKQDAQDRLDEMDQQKAKLRDMLSDVRQKCQDETQMISSLKTQIQSQESDLKSQEDDLNRAKSELNRLQQEETQLEQSIQAGRVQLETIIKSLKSTQDEINQARSKLSQLHESRQEAHRSLEQYDQVLDGAHGASLTDLANLSEGVSLAERGSFGAMDDPFKNKALLFSNNTQELHPDPFQTEDPFKSDPFKGADPFKGDPFQNDPFAEQQTTSTDPFGGDPFKESDPFRGSATDDFFKKQTKNDPFTSDPFTKNPSLPSKLDPFESSDPFSSSSVSSKGSDPFGTLDPFGSGSFNSAEGFADFSQMSKPPPSGPFTSSLGGAGFSDDPFKSKQDTPALPPKKPAPPRPKPPSGKSTPVSQLGSADFPEAPDPFQPLGADSGDPFQSKKGFGDPFSGKDPFVPSSAAKPSKASASGFADFTSVS

SEQ ID NO: 849344 - protein, 807 aa, Homo sapiens
PALGARVRGKMAAPLIPLSQQIPTGNSLYESYYKQVDPAYTGRVGASEAALFLKKSGLSDIILGKIWDLADPEGKGFLDKQGFYVALRLVACAQSGHEVTLSNLNLSMPPPKFHDTSSPLMVTPPSAEAHWAVRVEEKAKFDGIFESLLPINGLLSGDKVKPVLMNSKLPLDVLGRVWDLSDIDKDGHLDRDEFAVAMHLVYRALEKEPVPSALPPSLIPPSKRKKTVFPGAVPVLPASPPPKDSLRSTPSHGSVSSLNSTGSLSPKHSLKQTQPTVNWVVPVADKMRFDEIFLKTDLDLDGYVSGQEVKEIFMHSGLTQNLLAHIWALADTRQTGKLSKDQFALAMYFIQQKVSKGIDPPQVLSPDMVPPSERGTPGPDSSGSLGSGEFTGVKELDDISQEIAQLQREKYSLEQDIREKEEAIRQKTSEVQELQNDLDRETSSLQELEAQKQDAQDRLDEMDQQKAKLRDMLSDVRQKCQDETQMISSLKTQIQSQESDLKSQEDDLNRAKSELNRLQQEETQLEQSIQAGRVQLETIIKSLKSTQDEINQARSKLSQLHESRQEAHRSLEQYDQVLDGAHGASLTDLANLSEGVSLAERGSFGAMDDPFKNKALLFSNNTQELHPDPFQTEDPFKSDPFKGADPFKGDPFQNDPFAEQQTTSTDPFGGDPFKESDPFRGSATDDFFKKQTKNDPFTSDPFTKNPSLPSKLDPFESSDPFSSSSVSSKGSDPFGTLDPFGSGSFNSAEGFADFSQMSKFGNEEQQLAWAKRESEKAEQERLARLRRQEQEDLELAIALSKADMPAA

SEQ ID NO: 849345 - protein, 611 aa, Homo sapiens
PALGARVRGKMAAPLIPLSQQIPTGNSLYESYYKQVDPAYTGRVGASEAALFLKKSGLSDIILGKIWDLADPEGKGFLDKQGFYVALRLVACAQSGHEVTLSNLNLSMPPPKFHDTSSPLMVTPPSAEAHWAVRVEEKAKFDGIFESLLPINGLLSGDKVKPVLMNSKLPLDVLGRVWDLSDIDKDGHLDRDEFAVAMHLVYRALEKEPVPSALPPSLIPPSKRKKTVFPGAVPVLPASPPPKDSLRSTPSHGSVSSLNSTGSLSPKHSLKQTQPTVNWVVPVADKMRFDEIFLKTDLDLDGYVSGQEVKEIFMHSGLTQNLLAHIWALADTRQTGKLSKDQFALAMYFIQQKVSKGIDPPQVLSPDMVPPSERGTPGPDSSGSLGSGEFTGVKELDDISQEIAQLQREKYSLEQDIREKEEAIRQKTSEVQELQNDLDRETSSLQELEAQKQDAQDRLDEMDQQKAKLRDMLSDVRQKCQDETQMISSLKTQIQSQESDLKSQEDDLNRAKSELNRLQQEETQLEQSIQAGRVQLETIIKSLKSTQDEINQARSKLSQLHESRQEAHRSLEQYDQVLDGAHGASLTDLANLSEGVSLAERGSFGAMVKVE

SEQ ID NO: 849346 - protein, 668 aa, Homo sapiens
PALGARVRGKMAAPLIPLSQQIPTGNSLYESYYKQVDPAYTGRVGASEAALFLKKSGLSDIILGKIWDLADPEGKGFLDKQGFYVALRLVACAQSGHEVTLSNLNLSMPPPKFHDTSSPLMVTPPSAEAHWAVRVEEKAKFDGIFESLLPINGLLSGDKVKPVLMNSKLPLDVLGRVWDLSDIDKDGHLDRDEFAVAMHLVYRALEKEPVPSALPPSLIPPSKRKKTVFPGAVPVLPASPPPKDSLRSTPSHGSVSSLNSTGSLSPKHSLKQTQPTVNWVVPVADKMRFDEIFLKTDLDLDGYVSGQEVKEIFMHSGLTQNLLAHIWALADTRQTGKLSKDQFALAMYFIQQKVSKGIDPPQVLSPDMVPPSERGTPGPDSSGSLGSGEFTGVKELDDISQEIAQLQREKYSLEQDIREKEEAIRQKTSEVQELQNDLDRETSSLQELEAQKQDAQDRLDEMDQQKAKLRDMLSDVRQKCQDETQMISSLKTQIQSQESDLKSQEDDLNRAKSELNRLQQEETQLEQSIQAGRVQLETIIKSLKSTQDEINQARSKLSQLHEGRSRLLVVVHLLLRALGPPGSYRMPTLRWKLSTCSSSVSSVRGTLGEAEPRRRQLGLSCGATCSRSFLGDRPRGGPGGSASSEMVPRSVRSVQLGRGSSRYSQAKY

SEQ ID NO: 849347 - protein, 173 aa, Homo sapiens
MVSSWTAQPDVTPPPSGPFTSSLGGAGFSDDPFKSKQDTPALPPKKPAPPRPKPPSGKSTPVSQLGSADFPEAPDPFQPLGADSGDPFQSKKGFGDPFSGKDPFVPSSAAKPSKASASGFADFTSFGNEEQQLAWAKRESEKAEQERLARLRRQEQEDLELAIALSKADMPAA

SEQ ID NO: 849348 - protein, 91 aa, Homo sapiens
AGPEHGHSGWFRRLPLDFWPRLPPVILDMLHFSHPHVNPCNSSLELQNDLDRETSSLQELEAQKQDAQDRLDEMDQQKAKLRDMLSDVRQK

SEQ ID NO: 849349 - protein, 447 aa, Homo sapiens
MNSKLPLDVLGRVWDLSDIDKDGHLDRDEFAVAMHLVYRALEKEPVPSALPPSLIPPSKRKKTVFPGAVPVLPASPPPKDSLRSTPSHGSVSSLNSTGSLSPKHSLKQTQPTVNWVVPVADKMRFDEIFLKTDLDLDGYVSGQEVKEIFMHSGLTQNLLAHIWALADTRQTGKLSKDQFALAMYFIQQKVSKGIDPPQVLSPDMVPPSERGTPGPDSSGSLGSGEFTGVKELDDISQEIAQLQREKYSLEQDIREKEEAIRQKTSEVQELQNDLDRETSSLQELEAQKQDAQDRLDEMDQQKAKLRDMLSDVRQKCQDETQMISSLKTQIQSQESDLKSQEDDLNRAKSELNRLQQEETQLEQSIQAGRVQLETIIKSLKSTQDEINQARSKLSQLHESRQEAHRSLEQYDQVLDGAHGASLTDLANLSEGVSLAERGSFGAMVKVE

SEQ ID NO: 849350 - protein, 764 aa, Homo sapiens; identical to SEQ ID NO: 849341

SEQ ID NO: 849351 - protein, 461 aa, Homo sapiens
PALGARVRGKMAAPLIPLSQQIPTGNSLYESYYKQVDPAYTGRVGASEAALFLKKSGLSDIILGKIWDLADPEGKGFLDKQGFYVALRLVACAQSGHEVTLSNLNLSMPPPKFHDTSSPLMVTPPSAEAHWAVRVEEKAKFDGIFESLLPINGLLSGDKVKPVLMNSKLPLDVLGRVWDLSDIDKDGHLDRDEFAVAMHLVYRALEKEPVPSALPPSLIPPSKRKKTVFPGAVPVLPASPPPKDSLRSTPSHGSVSSLNSTGSLSPKHSLKQTQPTVNWVVPVADKMRFDEIFLKTDLDLDGYVSGQEVKEIFMHSGLTQNLLAHIWALADTRQTGKLSKDQFALAMYFIQQKVSKGIDPPQVLSPDMVPPSERGTPGPDSSGSLGSGEFTGVKELDDISQEIAQLQREKYSLEQDIREKEEAIRQKTSEVQLQTSPPALPRISQTLPQWCMHSLYKMKFE

SEQ ID NO: 849352 - protein, 90 aa, Homo sapiens
  misc_feature (18)..(18): Xaa can be any naturally occurring amino acid
RPPNLYGPFTSSTGLNRXSGKSTPVSQLGSADFPEAPDPFQPLGADSGDPFQSKKGFGDPFSGKDPFVPSSAAKPSKASASGFADFTSVS

SEQ ID NO: 849353 - protein, 368 aa, Homo sapiens
MGRKKIQISRILDQRNRQVTFTKRKFGLMKKAYELSVLCDCEIALIIFNSANRLFQYASTDMDRVLLKYTEYSEPHESRTNTDILETLKRRGIGLDGPELEPDEGPEEPGEKFRRLAGEGGDPALPRPRLYPAAPAMPSPDVVYGALPPPGCDPSGLGEALPAQSRPSPFRPAAPKAGPPGLVHPLFSPSHLTSKTPPPLYLPTEGRRSDLPGGLAGPRGGLNTSRSLYSGLQNPCSTATPGPPLGSFPFLPGGPPEYGLGDPPPPPGLLQPPTLAPWQPSRGDGPPAVSSQPSGGRSLGEEGPPTRGASPPTPPVSIKSERLSPAPGGPGDFPKTFPYPLLLARSLAEPLRPGPALRRLPLADGWPR

SEQ ID NO: 849354 - protein, 368 aa, Homo sapiens; identical to SEQ ID NO: 849353

SEQ ID NO: 849355 - protein, 368 aa, Homo sapiens; identical to SEQ ID NO: 849353

SEQ ID NO: 849356 - protein, 368 aa, Homo sapiens; identical to SEQ ID NO: 849353

SEQ ID NO: 849357 - protein, 368 aa, Homo sapiens; identical to SEQ ID NO: 849353

SEQ ID NO: 849358 - protein, 119 aa, Homo sapiens
MEEPEMQLKGKKVTDKFTESVYVLANEPSVALYRLQEHVRRSLPELAQHKADMQRWEEQSQGAIYTVEYACSAVKNLVDSSVYFRSVEGLLKQAISIRDHMNASAQGHSPEEPPPPSSA

SEQ ID NO: 849359 - protein, 385 aa, Homo sapiens
MPVPRATDKDHSTQPGTMGRKKIQISRILDQRNRQVTFTKRKFGLMKKAYELSVLCDCEIALIIFNSANRLFQYASTDMDRVLLKYTEYSEPHESRTNTDILETLKRRGIGLDGPELEPDEGPEEPGEKFRRLAGEGGDPALPRPRLYPAAPAMPSPDVVYGALPPPGCDPSGLGEALPAQSRPSPFRPAAPKAGPPGLVHPLFSPSHLTSKTPPPLYLPTEGRRSDLPGGLAGPRGGLNTSRSLYSGLQNPCSTATPGPPLGSFPFLPGGPPEYGLGDPPPPPGLLQPPTLAPWQPSRGDGPPAVSSQPSGGRSLGEEGPPTRGASPPTPPVSIKSERLSPAPGGPGDFPKTFPYPLLLARSLAEPLRPGPALRRLPLADGWPR

SEQ ID NO: 849360 - protein, 433 aa, Homo sapiens
MPEDYPSACPFFLCHQQCMRAGSGRAYKIIIAHCNLELLGSQNPPVSGSHIARTTDKDHSTQPGTMGRKKIQISRILDQRNRQVTFTKRKFGLMKKAYELSVLCDCEIALIIFNSANRLFQYASTDMDRVLLKYTEYSEPHESRTNTDILETLKRRGIGLDGPELEPDEGPEEPGEKFRRLAGEGGDPALPRPRLYPAAPAMPSPDVVYGALPPPGCDPSGLGEALPAQSRPSPFRPAAPKAGPPGLVHPLFSPSHLTSKTPPPLYLPTEGRRSDLPGGLAGPRGGLNTSRSLYSGLQNPCSTATPGPPLGSFPFLPGGPPEYGLGDPPPPPGLLQPPTLAPWQPSRGDGPPAVSSQPSGGRSLGEEGPPTRGASPPTPPVSIKSERLSPAPGGPGDFPKTFPYPLLLARSLAEPLRPGPALRRLPLADGWPR

SEQ ID NO: 849361 - protein, 263 aa, Homo sapiens
MGQSWSRMKGLRSQERSFGGWQAKGVIRPCPDPGCILQLLLCPAQMWYTGPYRHQAVTPVGLGKHCPPRAAHLPSDQQPPKPGPQHLTSKTPPPLYLPTEGRRSDLPGGLAGPRGGLNTSRSLYSGLQNPCSTATPGPPLGSFPFLPGGPPEYGLGDPPPPPGLLQPPTLAPWQPSRGDGPPAVSSQPSGGRSLGEEGPPTRGASPPTPPVSIKSERLSPAPGGPGDFPKTFPYPLLLARSLAEPLRPGPALRRLPLADGWPR

SEQ ID NO: 849362 - protein, 445 aa, Homo sapiens
RGSVRPASQGPGRADKDHSTQPGTMGRKKIQISRILDQRNRQVTFTKRKFGLMKKAYELSVLCDCEIALIIFNSANRLFQYASTDMDRVLLKYTEYSEPHESRTNTDILETLKRRGIGLDGPELEPDEGPEEPGEKFRRLAGEGGDPALPRPRLYPAAPAMPSPDVVYGALPPPGCDPSGLGEALPAQSRPSPFRPAAPKAGPPGEHGTVGQGWVLRGCLGASWLWHCQAACITSKPQTSLVDMACLSSLSGVSSSPGLVHPLFSPSHLTSKTPPPLYLPTEGRRSDLPGGLAGPRGGLNTSRSLYSGLQNPCSTATPGPPLGSFPFLPGGPPEYGLGDPPPPPGLLQPPTLAPWQPSRGDGPPAVSSQPSGGRSLGEEGPPTRGASPPTPPVSIKSERLSPAPGGPGDFPKTFPYPLLLARSLAEPLRPGPALRRLPLADGWPR

SEQ ID NO: 849363 - protein, 349 aa, Homo sapiens
RGSVRPASQAQAEQQCMRAGSGRAYKIIIAHCNLELLGSQNPPVSGSHIARTTDKDHSTQPGTMGRKKIQISRILDQRNRQVTFTKRKFGLMKKAYELSVLCDCEIALIIFNSANRLFQYASTDMDRVLLKYTEYSEPHESRTNTDILETLKRRGIGLDGPELEPDEGPEEPGEKFRRLAGEGGDPALPRPRLYPAAPAMPSPDVVYGALPPPGCDPSGLGEALPAQSRPSPFRPAAPKAGPPEKPLQWPAEPLLHCNSRTPTGELPLPPRRPPSGGRSLGEEGPPTRGASPPTPPVSIKSERLSPAPGGPGDFPKTFPYPLLLARSLAEPLRPGPALRRLPLADGWPR

SEQ ID NO: 849364 - protein, 334 aa, Homo sapiens
MPVPRATDKDHSTQPGTMGRKKIQISRILDQRNRQVTFTKRKFGLMKKAYELSVLCDCEIALIIFNSANRLFQYASTDMDRVLLKYTEYSEPHESRTNTDILETLKRRGIGLDGPELEPDEGPEEPGEKFRRLAGEGGDPALPRPRLYPAAPAMPSPDVVYGALPPPGCDPSGLGEALPAQSRPSPFRPAAPKAGPPGLVHPLFSPSHLTSKTPPPLYLPTEGRRSDLPGGLAGPRGGLNTSSRSSTVAAEPLSCIPGPTVGSRSPGGPKMWGESTRGRSYGTQMRGSPEEMSPGGLPKGGQGEGHKAPRALIKRPTSAGQKKHCGQQTQTTRH

SEQ ID NO: 849365 - protein, 109 aa, Homo sapiens
MEEPEMQLKGKKVTDKFTESVYVLANEPSVALYRLQEHVRRSLPELAQHKADMQRWEEQSQGAIYTVEYACSAVKNLVDSSVYFRSVEGLLKQAISIRDHMNASAQGHR

SEQ ID NO: 849366 - protein, 119 aa, Homo sapiens; identical to SEQ ID NO: 849358

SEQ ID NO: 849367 - protein, 119 aa, Homo sapiens; identical to SEQ ID NO: 849358

SEQ ID NO: 849368 - protein, 119 aa, Homo sapiens; identical to SEQ ID NO: 849358

SEQ ID NO: 849369 - protein, 126 aa, Homo sapiens
AGRLELKGAAYLGRPVPQQVTDKFTESVYVLANEPSVALYRLQEHVRRSLPELAQHKADMQRWEEQSQGAIYTVEYACSAVKNLVDSSVYFRSVEGLLKQAISIRDHMNASAQGHSPEEPPPPSSA

SEQ ID NO: 849370 - protein, 109 aa, Homo sapiens; identical to SEQ ID NO: 849365

SEQ ID NO: 849371 - protein, 365 aa, Homo sapiens
MGRKKIQISRILDQRNRQVTFTKRKFGLMKKAYELSVLCDCEIALIIFNSANRLFQYASTDMDRVLLKYTEYSEPHESRTNTDILETLKRRGIGLDGPELEPDEGPEEPGEKFRRLAGEGGDPALPRPRLYPAAPAMPSPDVVYGALPPPGCDPSGLGEALPAQSRPSPFRPAAPKAGPPGLVHPLFSPSHLTSKTPPPLYLPTEGRRSDLPGGLAGPRGGLNTSRSLYSGLQNPCSTATPGPPLGSFPFLPGGPPVGAEAWARRVPQPAAPPRRPPQSASSLSASLRPPGAPATFLRPSPIPCSSPGPWQSLCGLGPPCAGCPWPTAGPGRRSPGGTSPERSPGTARARGDPTSLQASSEKTQQ

SEQ ID NO: 849372 - protein, 368 aa, Homo sapiens; identical to SEQ ID NO: 849353

SEQ ID NO: 849373 - protein, 392 aa, Homo sapiens
RGSVRPASQGPGRADKDHSTQPGTMGRKKIQISRILDQRNRQVTFTKRKFGLMKKAYELSVLCDCEIALIIFNSANRLFQYASTDMDRVLLKYTEYSEPHESRTNTDILETLKRRGIGLDGPELEPDEGPEEPGEKFRRLAGEGGDPALPRPRLYPAAPAMPSPDVVYGALPPPGCDPSGLGEALPAQSRPSPFRPAAPKAGPPGLVHPLFSPSHLTSKTPPPLYLPTEGRRSDLPGGLAGPRGGLNTSRSLYSGLQNPCSTATPGPPLGSFPFLPGGPPEYGLGDPPPPPGLLQPPTLAPWQPSRGDGPPAVSSQPSGGRSLGEEGPPTRGASPPTPPVSIKSERLSPAPGGPGDFPKTFPYPLLLARSLAEPLRPGPALRRLPLADGWPR

SEQ ID NO: 849374 - protein, 365 aa, Homo sapiens; identical to SEQ ID NO: 849371

SEQ ID NO: 849375 - protein, 286 aa, Homo sapiens
MGRKKIQISRILDQRNRQVTFTKRKFGLMKKAYELSVLCDCEIALIIFNSANRLFQYASTDMDRVLLKYTEYSEPHESRTNTDILETLKRRGIGLDGPELEPDEGPEEPGEKFRRLAGEGGDPALPRPRLYPAAPAMPSPDVVYGALPPPGCDPSGLGEALPAQSRPSPFRPAAPKAGPPEKPLQWPAEPLLHCNSRTPTGELPLPPRRPPSGGRSLGEEGPPTRGASPPTPPVSIKSERLSPAPGGPGDFPKTFPYPLLLARSLAEPLRPGPALRRLPLADGWPR

SEQ ID NO: 849376 - protein, 109 aa, Homo sapiens; identical to SEQ ID NO: 849365

SEQ ID NO: 849377 - protein, 230 aa, Homo sapiens
MGRKKIQISRILDQRNRQVTFTKRKFGLMKKAYELSVLCDCEIALIIFNSANRLFQYASTDMDRVLLKYTEYSEPHESRTNTDILETLKRRGIGLDGPELEPDEGPEEPGENDNEQAGSAEPRVNRAIAHPNTTGTDNMQNTLTTAQGPDCGKRAPNPPTTAEDHKRAQRRKALAQTQTHDPSRHQLPEPTPDTTTHAQGPQQGDRKDKHRQTNEHHKTNPNNTQQQQNS

SEQ ID NO: 849378 - protein, 109 aa, Homo sapiens; identical to SEQ ID NO: 849365

SEQ ID NO: 849379 - protein, 109 aa, Homo sapiens; identical to SEQ ID NO: 849365

SEQ ID NO: 849380 - protein, 168 aa, Homo sapiens
MPSQEPPVDDKNEDADLPSEETDGIAYISSSRKHDSIKDDSEDLKPVIDGMDGIKISQGLGLQDFDLIRVIGRGSYAKVLLVRLKKNDQIYAMKVVKKELVHDDEDIGWVPTENPVLTGSRNPLVGYLCSRDSGVWLRLTGAGSQGKRQRTGGKAHLKGKGEPGPQGG

SEQ ID NO: 849381 - protein, 279 aa, Homo sapiens
GASRGSQCGWGLGGEREAGPALARGGQNIARCQTGRTQRAGLRGSLLPPGAEHERESWRALPHRVLRCERGLVSVCCLQREKSSFQESIYRRGARRWRKLYRANGHLFQAKRFNRRAYCGQCSERIWGLARQGYRCINCKLLVHKRCHGLVPLTCRKHMDSVMPSQEPPVDDKNEDFDLIRVIGRGSYAKVLLVRLKKNDQIYAMKSGEEKSWCMMTRILTGYRQRSTCLSRHPATPSWSDYTPASRRQVGVFLVIEYVNGGDLMSENPVCAAPTSIWV

SEQ ID NO: 849382 - protein, 605 aa, Homo sapiens
PCQNLRLVYEDWVCASRTGPKMEGSGGRVRLKAHYGGDIFITSVDAATTFEELCEEVRDMCRLHQQHPLTLKWVDSEGDPCTVSSQMELEEAFRLARQCRDEGLIIHVFPSTPEQPGLPCPGEDKSIYRRGARRWRKLYRANGHLFQAKRFNRRAYCGQCSERIWGLARQGYRCINCKLLVHKRCHGLVPLTCRKHMDSVMPSQEPPVDDKNEDADLPSEETDGIAYISSSRKHDSIKDDSEDLKPVIDGMDGIKISQGLGLQDFDLIRVIGRGSYAKVLLVRLKKNDQIYAMKVVKKELVHDDEDIDWVQTEKHVFEQASSNPFLVGLHSCFQTTSRLFLVIEYVNGGDLMFHMQRQRKLPEEHARFYAAEICIALNFLHERGIIYRDLKLDNVLLDADGHIKLTDYGMCKEGLGPGDTTSTFCGTPNYIAPEILRGEEYGFSVDWWALGVLMFEMMAGRSPFDIITDNPDMNTEDYLFQVILEKPIRIPRFLSVKASHVLKGFLNKDPKERLGCRPQTGFSDIKSHAFFRSIDWDLLEKKQALPPFQPQITDDYGLDNFDTQFTSEPVQLTPDDEDAIKRIDQSEFEGFEYINPLLLSTEESV

SEQ ID NO: 849383 - protein, 405 aa, Homo sapiens
MPSQEPPVDDKNEDADLPSEETDGIAYISSSRKHDSIKDDSEDLKPVIDGMDGIKISQGLGLQDFDLIRVIGRGSYAKVLLVRLKKNDQIYAMKVVKKELVHDDEDIDWVQTEKHVFEQASSNPFLVGLHSCFQTTSRLFLVIEYVNGGDLMFHMQRQRKLPEEHARFYAAEICIALNFLHERGIIYRDLKLDNVLLDADGHIKLTDYGMCKEGLGPGDTTSTFCGTPNYIAPEILRGEEYGFSVDWWALGVLMFEMMAGRSPFDIITDNPDMNTEDYLFQVILEKPIRIPRFLSVKASHVLKGFLNKDPKERLGCRPQTGFSDIKSHAFFRSIDWDLLEKKQALPPFQPQITDDYGLDNFDTQFTSEPVQLTPDDEDAIKRIDQSEFEGFEYINPLLLSTEESV

SEQ ID NO: 849384 - protein, 405 aa, Homo sapiens; identical to SEQ ID NO: 849383

SEQ ID NO: 849385 - protein, 574 aa, Homo sapiens
KKKKKRTSLGAKTGRTQRAGLRGSLLPPGAEHERESWRALPHRVLRCERGLVSVCCLQREKSSFQESIYRRGARRWRKLYRANGHLFQAKRFNRRAYCGQCSERIWGLARQGYRCINCKLLVHKRCHGLVPLTCRKHMDSVMPSQEPPVDDKNEDADLPSEETDGIAYISSSRKHDSIKDDSEDLKPVIDGMDGIKISQGLGLQDFDLIRVIGRGSYAKVLLVRLKKNDQIYAMKVVKKELVHDDEDIDWVQTEKHVFEQASSNPFLVGLHSCFQTTSRLFLVIEYVNGGDLMFHMQRQRKLPEEHARFYAAEICIALNFLHERGIIYRDLKLDNVLLDADGHIKLTDYGMCKEGLGPGDTTSTFCGTPNYIAPEILRGEEYGFSVDWWALGVLMFEMMAGRSPFDIITDNPDMNTEDYLFQVILEKPIRIPRFLSVKASHVLKGFLNKDPKERLGCRPQTGFSDIKSHAFFRSIDWDLVFHTKNTSNMMNEGGILCPHNPAVRTPQLEKKQALPPFQPQITDDYGLDNFDTQFTSEPVQLTPDDEDAIKRIDQSEFEGFEYINPLLLSTEESV

SEQ ID NO: 849386 - protein, 378 aa, Homo sapiens
MPVRPEHDSIKDDSEDLKPVIDGMDGIKISQGLGLQDFDLIRVIGRGSYAKVLLVRLKKNDQIYAMKVVKKELVHDDEDIDWVQTEKHVFEQASSNPFLVGLHSCFQTTSRLFLVIEYVNGGDLMFHMQRQRKLPEEHARFYAAEICIALNFLHERGIIYRDLKLDNVLLDADGHIKLTDYGMCKEGLGPGDTTSTFCGTPNYIAPEILRGEEYGFSVDWWALGVLMFEMMAGRSPFDIITDNPDMNTEDYLFQVILEKPIRIPRFLSVKASHVLKGFLNKDPKERLGCRPQTGFSDIKSHAFFRSIDWDLLEKKQALPPFQPQITDDYGLDNFDTQFTSEPVQLTPDDEDAIKRIDQSEFEGFEYINPLLLSTEESV

SEQ ID NO: 849387 - protein, 348 aa, Homo sapiens
MQILLWQPNTLILLPAPTPNTDISVFGKKNDQIYAMKVVKKELVHDDEDIDWVQTEKHVFEQASSNPFLVGLHSCFQTTSRLFLVIEYVNGGDLMFHMQRQRKLPEEHARFYAAEICIALNFLHERGIIYRDLKLDNVLLDADGHIKLTDYGMCKEGLGPGDTTSTFCGTPNYIAPEILRGEEYGFSVDWWALGVLMFEMMAGRSPFDIITDNPDMNTEDYLFQVILEKPIRIPRFLSVKASHVLKGFLNKDPKERLGCRPQTGFSDIKSHAFFRSIDWDLLEKKQALPPFQPQITDDYGLDNFDTQFTSEPVQLTPDDEDAIKRIDQSEFEGFEYINPLLLSTEESV

SEQ ID NO: 849388 - protein, 241 aa, Homo sapiens
PLSVAQSGRRPHRYFLHERGIIYRDLKLDNVLLDADGHIKLTDYGMCKEGLGPGDTTSTFCGTPNYIAPEILRGEEYGFSVDWWALGVLMFEMMAGRSPFDIITDNPDMNTEDYLFQVILEKPIRIPRFLSVKASHVLKGFLNKDPKERLGCRPQTGFSDIKSHAFFRSIDWDLLEKKQALPPFQPQITDDYGLDNFDTQFTSEPVQLTPDDEDAIKRIDQSEFEGFEYINPLLLSTEESV

SEQ ID NO: 849389 - protein, 518 aa, Homo sapiens
KKKKKRTSLGAKTGRTQRAGLRGSLLPPGAEHERESWRALPHRVLRCERGLVSVCCLQREKSSFQESIYRRGARRWRKLYRANGHLFQAKRFNRRAYCGQCSERIWGLARQGYRCINCKLLVHKRCHGLVPLTCRKHMDSVMPSQEPPVDDKNEDADLPSEETDGIAYISSSRKHDSIKDDSEDLKPVIDGMDGIKISQGLGLQDFDLIRVIGRGSYAKVLLVRLKKNDQIYAMKVVKKELVHDDEDIDWVQTEKHVFEQASSNPFLVGLHSCFQTTSRLFLVIEYVNGGDLMFHMQRQRKLPEEHARFYAAEICIALNFLHERGIIYRDLKLDNVLLDADGHIKLTDYGMCKEGLGPGDTTSTFCGTPNYIAPEILRGEEYGFSVDWWALGVLMFEMMAGRSPFDIITDNPDMNTEDYLFQVILEKPIRIPRFLSVKASHVLKGFLNKDPKERLGCRPQTGFSDIKSHAFFRSIDWDLLEKKQALPPFQPQITDDYGLDNFDTQFTSEPVQLTPDDE

SEQ ID NO: 849390 - protein, 546 aa, Homo sapiens
KKKKKRTSLGAKTGRTQRAGLRGSLLPPGAEHERESWRALPHRVLRCERGLVSVCCLQREKSSFQESIYRRGARRWRKLYRANGHLFQAKRFNRRAYCGQCSERIWGLARQGYRCINCKLLVHKRCHGLVPLTCRKHMDSVMPSQEPPVDDKNEDADLPSEETDGIAYISSSRKHDSIKDDSEDLKPVIDGMDGIKISQGLGLQDFDLIRVIGRGSYAKVLLVRLKKNDQIYAMKVVKKELVHDDEDIDWVQTEKHVFEQASSNPFLVGLHSCFQTTSRLFLVIEYVNGGDLMFHMQRQRKLPEEHARFYAAEICIALNFLHERGIIYRDLKLDNVLLDADGHIKLTDYGMCKEGLGPGDTTSTFCGTPNYIAPEILRGEEYGFSVDWWALGVLMFEMMAGRSPFDIITDNPDMNTEDYLFQVILEKPIRIPRFLSVKASHVLKGFLNKDPKERLGCRPQTGFSDIKSHAFFRSIDWDLLEKKQALPPFQPQITDDYGLDNFDTQFTSEPVQLTPDDEDAIKRIDQSEFEGFEYINPLLLSTEESV

SEQ ID NO: 849391 - protein, 546 aa, Homo sapiens; identical to SEQ ID NO: 849390

SEQ ID NO: 849392 - protein, 546 aa, Homo sapiens; identical to SEQ ID NO: 849390

SEQ ID NO: 849393 - protein, 496 aa, Homo sapiens
KKKKKRTSLGAKTGRTQRAGLRGSLLPPGAEHERESWRALPHRVLRCERGLVSVCCLQREKSSFQESIYRRGARRWRKLYRANGHLFQAKRFNRRAYCGQCSERIWGLARQGYRCINCKLLVHKRCHGLVPLTCRKHMDSVMPSQEPPVDDKNEDADLPSEETDGIAYISSSRKHDSIKDDSEDLKPVIDGMDGIKISQGLGLQDFDLIRVIGRGSYAKVLLVRLKKNDQIYAMKVVKKELVHDDEDIDWVQTEKHVFEQASSNPFLVGLHSCFQTTSRLFLVIEYVNGGDLMFHMQRQRKLPEEHARFYAAEICIALNFLHERGIIYRDLKLDNVLLDADGHIKLTDYGMCKEGLGPGDTTSTFCGTPNYIAPEILRGEEYGFSVDWWALGVLMFEMMAGRSPFDIITDNPDMNTEDYLFQVILEKPIRIPRFLSVKASHVLKGFLNKDPKERLGCRPQTGFSDIKSHAFFRSIDWDLVKHHRAYLHPHPHPNPK

SEQ ID NO: 849394 - protein, 462 aa, Homo sapiens
KKKKKRTSLGAKTGRTQRAGLRGSLLPPGAEHERESWRALPHRVLRCERGLVSVCCLQREKSSFQESIYRRGARRWRKLYRANGHLFQAKRFNRRAYCGQCSERIWGLARQGYRCINCKLLVHKRCHGLVPLTCRKHMDSVMPSQEPPVDDKNEDADLPSEETDGIAYISSSRKHDSIKDDSEDLKPVIDGMDGIKISQGLGLQDFDLIRVIGRGSYAKVLLVRLKKNDQIYAMKVVKKELVHDDEDIDWVQTEKHVFEQASSNPFLVGLHSCFQTTSRLFLVIEYVNGGDLMFHMQRQRKLPEEHARFYAAEICIALNFLHERGIIYRDLKLDNVLLDADGHIKLTDYGMCKKAWALVTQRAFSARNHARGFLAEGKAGFELWSSQVDLVYVLLLCAGVHFSCNMVVNRPSTNTRDRTEAWQPSERSSGCEGAPILNFRQTMKIDFSTDPLILSRKCHHRK

SEQ ID NO: 849395 - protein, 405 aa, Homo sapiens
KKKKKRTSLGAKTGRTQRAGLRGSLLPPGAEHERESWRALPHRVLRCERGLVSVCCLQREKSSFQESIYRRGARRWRKLYRANGHLFQAKRFNRRAYCGQCSERIWGLARQGYRCINCKLLVHKRCHGLVPLTCRKHMDSVMPSQEPPVDDKNEDADLPSEETDGIAYISSSRKHDSIKDDSEDLKPVIDGMDGIKISQGLGLQDFDLIRVIGRGSYAKVLLVRLKKNDQIYAMKVVKKELVHDDEDIDWVQTEKHVFEQASSNPFLVGLHSCFQTTSRLFLVIEYVNGGDLMFHMQRQRKLPEEHARFYAAEICIALNFLHERGIIYRDLKLDNVLLDADGHIKLTDYGMCKASFVLEELAAVPASRRIRGDPAEGAVMRFPRCTFSTETELDALTCSARKVSV

SEQ ID NO: 849396 - protein, 379 aa, Homo sapiens
KKKKKRTSLGAKTGRTQRAGLRGSLLPPGAEHERESWRALPHRVLRCERGLVSVCCLQREKSSFQESIYRRGARRWRKLYRANGHLFQAKRFNRRAYCGQCSERIWGLARQGYRCINCKLLVHKRCHGLVPLTCRKHMDSVMPSQEPPVDDKNEDADLPSEETDGIAYISSSRKHDSIKDDSEDLKPVIDGMDGIKISQGLGLQDFDLIRVIGRGSYAKVLLVRLKKNDQIYAMKVVKKELVHDDEDIDWVQTEKHVFEQASSNPFLVGLHSCFQTTSRLFLVIEYVNGGDLMFHMQRQRKLPEEHARFYAAEICIALNFLHERGIIYRDLKLDNVLPAQAPWRRFWIPIPSPSDNLVLRSSRVRLFNARPFPSRGDRW

SEQ ID NO: 849397 - protein, 219 aa, Homo sapiens
MPSRTGPKMEGSGGRVRLKAHYGGDIFITSVDAATTFEELCEEVRDMCRLHQQHPLTLKWVDSEGDPCTVSSQMELEEAFRLARQCRDEGLIIHVFPSTPEQPGLPCPGEDKSIYRRGARRWRKLYRANGHLFQAKRFNRRAYCGQCSERIWGLARQGYRCINCKLLVHKRCHGLVPLTCRKHMDSVMPSQEPPVDDKNEDADLPSEETDGIAYFPLRS

SEQ ID NO: 849398 - protein, 163 aa, Homo sapiens
MPSQEPPVDDKNEDADLPSEETDGIAYISSSRKHDSIKDDSEDLKPVIDGMDGIKISQGLGLQDFDLIRVIGRGSYAKVLLVRLKKNDQIYAMKSGEEKSWCMMTRILTGYRQRSTCLSRHPATPSWSDYTPASVGSPVEESWDIEIVNGRDHEFRCKGEEVH

SEQ ID NO: 849399 - protein, 163 aa, Homo sapiens; identical to SEQ ID NO: 849398

SEQ ID NO: 849400 - protein, 167 aa, Homo sapiens
MDSVMPSQEPPVDDKNEDADLPSEETDGIAYISSSRKHDSIKDDSEDLKPVIDGMDGIKISQGLGLQDFDLIRVIGRGSYAKVLLVRLKKNDQIYAMKSGEEKSWCMMTRILTGYRQRSTCLSRHPATPSWSDYTPASVGSPVEVSWDIEIVNGRDHEFRCKGEEVH

SEQ ID NO: 849401 - protein, 144 aa, Homo sapiens
PCQYFRLVYEDWVCASRTGPKMEGSGGRVRLKAHYGGDIFITSVDAATTFEELCEEVRDMCRLHQQHPLTLKWVDSEGDPCTVSSQMELEEAFRLARQCRDEGLIIHVFPSTPEQPGLPCPGEDRRVKWEESGPTECVPGPGGV

SEQ ID NO: 849402 - protein, 592 aa, Homo sapiens
MPSRTGPKMEGSGGRVRLKAHYGGDIFITSVDAATTFEELCEEVRDMCRLHQQHPLTLKWVDSEGDPCTVSSQMELEEAFRLARQCRDEGLIIHVFPSTPEQPGLPCPGEDKSIYRRGARRWRKLYRANGHLFQAKRFNRRAYCGQCSERIWGLARQGYRCINCKLLVHKRCHGLVPLTCRKHMDSVMPSQEPPVDDKNEDADLPSEETDGIAYISSSRKHDSIKDDSEDLKPVIDGMDGIKISQGLGLQDFDLIRVIGRGSYAKVLLVRLKKNDQIYAMKVVKKELVHDDEDIDWVQTEKHVFEQASSNPFLVGLHSCFQTTSRLFLVIEYVNGGDLMFHMQRQRKLPEEHARFYAAEICIALNFLHERGIIYRDLKLDNVLLDADGHIKLTDYGMCKEGLGPGDTTSTFCGTPNYIAPEILRGEEYGFSVDWWALGVLMFEMMAGRSPFDIITDNPDMNTEDYLFQVILEKPIRIPRFLSVKASHVLKGFLNKDPKERLGCRPQTGFSDIKSHAFFRSIDWDLLEKKQALPPFQPQITDDYGLDNFDTQFTSEPVQLTPDDEDAIKRIDQSEFEGFEYINPLLLSTEESV

SEQ ID NO: 849403 - protein, 107 aa, Homo sapiens
RRDVLEPFPLCNQASLSTPKPRIGTSGSLYPLQLVELSPGPLLRGFGLVPEFGTTDDYGLDNFDTQFTSEPVQLTPDDEDAIKRIDQSEFEGFEYINPLLLSTEESV

SEQ ID NO: 849404 - protein, 256 aa, Homo sapiens
MPSRTGPKMEGSGGRVRLKAHYGGDIFITSVDAATTFEELCEEVRDMCRLHQQHPLTLKWVDSEGDPCTVSSQMELEEAFRLARQCRDEGLIIHVFPSTPEQPGLPCPGEDKSIYRRGARRWRKLYRANGHLFQAKRFNRRAYCGQCSERIWGLARQGYRCINCKLLVHKRCHGLVPLTCRKHMDSVMPSQEPPVDDKNEDADLPSEETDGIAYISSSRKHDSIKDDSEDLKPVREDGGSKLGVGGELEKMGRTTS

SEQ ID NO: 849405 - protein, 295 aa, Homo sapiens
LAGLLPAWTQDPHPPARTLDSPPARPSVLVWTAPTSWLHPCFLPFDLQPQDVQEGESIYRRGARRWRKLYRANGHLFQAKRFNRRAYCGQCSERIWGLARQGYRCINCKLLVHKRCHGLVPLTCRKHMDSVMPSQEPPVDDKNEDADLPSEETDGIAYISSSRKHDSIKDDSEDLKPVIDGMDGIKISQGLGLQDFDLIRVIGRGSYAKVLLVRLNERMTKIYAMKSGEEKSWCMMTRILTGYRQRSTCLSRHPATPSWSDYTPASVGSPVEESWDIEIVNGRDHEFRCKGEEVH

SEQ ID NO: 849406 - protein, 252 aa, Homo sapiens
GASRGSQCGWGLGGEREAGPALARGGQNIARCQTGRTQRAGLRGSLLPPGAEHERESWRALPHRVLRCERGLVSVCCLQREKSSFQESIYRRGARRWRKLYRANGHLFQAKRFNRRAYCGQCSERIWGLARQGYRCINCKLLVHKRCHGLVPLTCRKHMVSGRAGEARGARAGSGRGSQPIVQADLGDPGFFKRGRGAVLALGCSVRLRRQSWIGPIFLSPHKPPAHSAHWGMRLRQQAQVGRGTLCSVGRR

SEQ ID NO: 849407 - protein, 131 aa, Homo sapiens
MLDTANNITPEILRNEELRFSVDWWALGVLMFEMMAGRSPFDIITDNPDMNTEDYLFQVILEKPIRIPRFLSVKASHVLKGFLNKDPKERLGCRPQTGFSDIKSHAFFRSIDWDLVKHHRAYLHPHPHPNP

SEQ ID NO: 849408 - protein, 546 aa, Homo sapiens; identical to SEQ ID NO: 849390

SEQ ID NO: 849409 - protein, 554 aa, Homo sapiens
KKKKKRTSLGAKTGRTQRAGLRGSLLPPGAEHERESWRALPHRVLRCERGLVSVCCLQREKSSFQESIYRRGARRWRKLYRANGHLFQAKRFNRRAYCGQCSERIWGLARQGYRCINCKLLVHKRCHGLVPLTCRKHMDSVMPSQEPPVDDKNEDADLPSEETDGIAYISSSRKHDSIKDDSEDLKPVIDGMDGIKISQGLGLQDFDLIRVIGRGSYAKVLLVRLKKNDQIYAMKVVKKELVHDDEDIDWVQTEKHVFEQASSNPFLVGLHSCFQTTSRLRRLSPCRLFLVIEYVNGGDLMFHMQRQRKLPEEHARFYAAEICIALNFLHERGIIYRDLKLDNVLLDADGHIKLTDYGMCKEGLGPGDTTSTFCGTPNYIAPEILRGEEYGFSVDWWALGVLMFEMMAGRSPFDIITDNPDMNTEDYLFQVILEKPIRIPRFLSVKASHVLKGFLNKDPKERLGCRPQTGFSDIKSHAFFRSIDWDLLEKKQALPPFQPQITDDYGLDNFDTQFTSEPVQLTPDDEDAIKRIDQSEFEGFEYINPLLLSTEESV

SEQ ID NO: 849410 - protein, 405 aa, Homo sapiens; identical to SEQ ID NO: 849383

SEQ ID NO: 849411 - protein, 355 aa, Homo sapiens
MDGIKISQGLGLQDFDLIRVIGRGSYAKVLLVRLKKNDQIYAMKVVKKELVHDDEDIDWVQTEKHVFEQASSNPFLVGLHSCFQTTSRLFLVIEYVNGGDLMFHMQRQRKLPEEHARFYAAEICIALNFLHERGIIYRDLKLDNVLLDADGHIKLTDYGMCKEGLGPGDTTSTFCGTPNYIAPEILRGEEYGFSVDWWALGVLMFEMMAGRSPFDIITDNPDMNTEDYLFQVILEKPIRIPRFLSVKASHVLKGFLNKDPKERLGCRPQTGFSDIKSHAFFRSIDWDLLEKKQALPPFQPQITDDYGLDNFDTQFTSEPVQLTPDDEDAIKRIDQSEFEGFEYINPLLLSTEESV

SEQ ID NO: 849412 - protein, 285 aa, Homo sapiens
HASRTRGGLHSCFQTTSRLFLVIEYVNGGDLMFHMQRQRKLPEEHARFYAAEICIALNFLHERGIIYRDLKLDNVLLDADGHIKLTDYGMCKEGLGPGDTTSTFCGTPNYIAPEILRGEEYGFSVDWWALGVLMFEMMAGRSPFDIITDNPDMNTEDYLFQVILEKPIRIPRFLSVKASHVLKGFLNKDPKERLGCRPQTGFSDIKSHAFFRSIDWDLLEKKQALPPFQPQITDDYGLDNFDTQFTSEPVQLTPDDEDAIKRIDQSEFEGFEYINPLLLSTEESV

SEQ ID NO: 849413 - protein, 546 aa, Homo sapiens; identical to SEQ ID NO: 849390

SEQ ID NO: 849414 - protein, 546 aa, Homo sapiens; identical to SEQ ID NO: 849390

SEQ ID NO: 849415 - protein, 488 aa, Homo sapiens
KKKKKRTSLGAKTGRTQRAGLRGSLLPPGAEHERESWRALPHRVLRCERGLVSVCCLQREKSSFQESIYRRGARRWRKLYRANGHLFQAKRFNRRAYCGQCSERIWGLARQGYRCINCKLLVHKRCHGLVPLTCRKHMDSVMPSQEPPVDDKNEDADLPSEETDGIAYISSSRKHDSIKDDSEDLKPVIDGMDGIKISQGLGLQDFDLIRVIGRGSYAKVLLVRLKKNDQIYAMKVVKKELVHDDEDIDWVQTEKHVFEQASSNPFLVGLHSCFQTTSRLFLVIEYVNGGDLMFHMQRQRKLPEEHARFYAAEICIALNFLHERGIIYRDLKLDNVLLDADGHIKLTDYGMCKEGLGPGDTTSTFCGTPNYIAPEILRGEEYGFSVDWWALGVLMFEMMAGRSPFDIITDNPDMNTEDYLFQVILEKPIRIPRFLSVKASHVLKGFLNKDPKERLGCRPQTGFSDIKSHAFFRSIDWDLVFHTKNTSN

SEQ ID NO: 849416 - protein, 452 aa, Homo sapiens
KKKKKRTSLGAKTGRTQRAGLRGSLLPPGAEHERESWRALPHRVLRCERGLVSVCCLQREKSSFQESIYRRGARRWRKLYRANGHLFQAKRFNRRAYCGQCSERIWGLARQGYRCINCKLLVHKRCHGLVPLTCRKHMDSVMPSQEPPVDDKNEDADLPSEETDGIAYISSSRKHDSIKDDSEDLKPVIDGMDGIKISQGLGLQDFDLIRVIGRGSYAKVLLVRLKKNDQIYAMKVVKKELVHDDEDIDWVQTEKHVFEQASSNPFLVGLHSCFQTTSRLFLVIEYVNGGDLMFHMQRQRKLPEEHARFYAAEICIALNFLHERGIIYRDLKLDNVLLDADGHIKLTDYGMCKASFVLEELAAVPASRRIRGDPAEGAVMRFPRCTNLSTAGEPEDGGSCTVPTATSSKPSALTGERTAVSAARGYGASRGKATGASTANCWSISAATASSR

SEQ ID NO: 849417 - protein, 384 aa, Homo sapiens
KKKKKRTSLGAKTGRTQRAGLRGSLLPPGAEHERESWRALPHRVLRCERGLVSVCCLQREKSSFQESIYRRGARRWRKLYRANGHLFQAKRFNRRAYCGQCSERIWGLARQGYRCINCKLLVHKRCHGLVPLTCRKHMDSVMPSQEPPVDDKNEDADLPSEETDGIAYISSSRKHDSIKDDSEDLKPVIDGMDGIKISQGLGLQDFDLIRVIGRGSYAKVLLVRLKKNDQIYAMKVVKKELVHDDEDIDWVQTEKHVFEQASSNPFLVGLHSCFQTTSRLFLVIEYVNGGDLMFHMQRQRKLPEEHARFYAAEICIALNFLHERGIIYRDLKLDNVLLDADGHIKLTDYGMCKEGLGPGDTTSTFCGTHARGTNPIHVGSTLMT

SEQ ID NO: 849418 - protein, 163 aa, Homo sapiens
MPSQEPPVDDKNEDADLPSEETDGIAYISSSRKHDSIKDDSEDLKPVIDGMDGIKISQGLGLQDFDLIRVIGRGSYAKVLLVRLKKNDQIYAMKSGEEKSWCMMTRILTGYRQRSTCLSRHPATPSWSDYTPASVGSPVEVSWDIEIVNGRDHEFRCKGEEVH

SEQ ID NO: 849419 - protein, 349 aa, Homo sapiens
MAGAPWGLQLLDSAVLWVWMLLPVRQHVTCAPKDGMWMLAGLLSCLNGALRGVDIFITSVDAATTFEELCEEVRDMCRLHQQHPLTLKWVDSEVFPSTPEQPGLPCPGEDKSIYRRGARRWRKLYRANGHLFQAKRFNRRAYCGQCSERIWGLARQGYRCINCKLLVHKRCHGLVPLTCRKHMDSVMPSQEPPVDDKNEDADLPSEETDGIAYISSSRKHDSIKDDSEDLKPVIDGMDGIKISQGLGLQDFDLIRVIGRGSYAKVLLVRLKKNDQIYAMKSGEEKSWCMMTRILTGYRQRSTCLSRHPATPSWSDYTPASVGSPVEESWDIEIVNGRDHEFRCKGEEVH

SEQ ID NO: 849420 - protein, 325 aa, Homo sapiens
GASRGSQCGWGLGGEREAGPALARGGQNIARCQTGRTQRAGLRGSLLPPGAEHERESWRALPHRVLRCERGLVSVCCLQREKSSFQESIYRRGARRWRKLYRANGHLFQAKRFNRRAYCGQCSERIWGLARQGYRCINCKLLVHKRCHGLVPLTCRKHMDSVMPSQEPPVDDKNEDADLPSEETDGIAYISSSRKHDSIKDDSEDLKPVIDGMDGIKISQGLGLQDFDLIRVIGRGSYAKVLLVRLKKNDQIYAMKSGEEKSWCMMTRILTGYRQRSTCLSRHPATPSWSDYTPASVGSPVEESWDIEIVNGRDHEFRCKGEEVH

SEQ ID NO: 849421 - protein, 163 aa, Homo sapiens; identical to SEQ ID NO: 849418

SEQ ID NO: 849422 - protein, 104 aa, Homo sapiens
AGCALSSWVEPHGGSPDPLRAEGHRGRKCGRPWGSAPLVEPRPGAQVGGVWRGHRLHDPSLASGLLGVASVAGGAFGVTRPLSNPKPHPGRAGWAEPPAAVRPL

SEQ ID NO: 849423 - protein, 351 aa, Homo sapiens
MQRALPGARQHLGAILASASVVVKALCAAVLFLYLLSFAVDTGCLAVTPGYLFPPNFWIWTLATHGLMEQHVWDVAISLTTVVVAGRLLEPLWGALELLIFFSVVNVSVGLLGAFAYLLTYMASFNLVYLFTVRIHGALGFLGGVLVALKQTMGDCVVLRVPQVRVSVMPMLLLALLLLLRLATLLQSPALASYGFGLLSSWVYLRFYQRHSRGRGDMADHFAFATFFPEILQPVVGLLANLVHSLLVKVKICQKTVKRYDVGAPSSITISLPGTDPQDAERRRQLALKALNERLKRVEDQSIWPSMDDDEEESGAKVDSPLPSDKAPTPPGKGAAPESSLITFEAAPPTL

SEQ ID NO: 849424 - protein, 351 aa, Homo sapiens; identical to SEQ ID NO: 849423

SEQ ID NO: 849425 - protein, 351 aa, Homo sapiens; identical to SEQ ID NO: 849423

SEQ ID NO: 849426 - protein, 351 aa, Homo sapiens; identical to SEQ ID NO: 849423

SEQ ID NO: 849427 - protein, 42 aa, Homo sapiens
MQRALPGARQHLGAILASASVVVKALCAAVLFLYLHDNTYKK

SEQ ID NO: 849428 - protein, 351 aa, Homo sapiens; identical to SEQ ID NO: 849423

SEQ ID NO: 849429 - protein, 134 aa, Homo sapiens [sequence omitted]

SEQ ID NO: 849430 - protein, 151 aa, Homo sapiens
RFPADVVEENESGRGQDWRSCRFRRGAQNAAAASLERGPWGRNPRRARWQHTLGPPLPAASPEDGQQRNKKMDSLAAGELNASHQPWVPEFVAYWRKTHQAYATLCPLAKEAQLRPRSVPAQQSYRRPEAPSCSLLLYRRHAAKQMCRDTT

SEQ ID NO: 849431 - protein, 1173 aa, Homo sapiens
MISSLGVSKAVLNNVIFCHQEDSNWPLSEGKALKQKFDEIFSATRYIKALETLRQVRQTQGQKVKEYQMELKYLKQYKEKACEIRDQITSKEAQLTSSKEIVKSYENELDPLKNRLKEIEHNLSKIMKLDNEIKALDSRKKQMEKDNSELEEKMEKVFQGTDEQLNDLYHNHQRTVREKERKLVDCHRELEKLNKESRLLNQEKSELLVEQGRLQLQADRHQEHIRARDSLIQSLATQLELDGFERGPFSERQIKNFHKLVRERQEGEAKTANQLMNDFAEKETLKQKQIDEIRDKKTGLGRIIELKSEILSKKQNELKNVKYELQQLEGSSDRILELDQELIKAERELSKAEKNSNVETLKMEVISLQNEKADLDRTLRKLDQEMEQLNHHTTTRTQMEMLTKDKADKDEQIRKIKSRHSDELTSLLGYFPNKKQLEDWLHSKSKEINQTRDRLAKLNKELASSEQNKNHINNELKRKEEQLSSYEDKLFDVCGSQDFESDLDRLKEEIEKSSKQRAMLAGATAVYSQFITQLTDENQSCCPVCQRVFQTEAELQEVISDLQSKLRLAPDKLKSTESELKKKEKRRDEMLGLVPMRQSIIDLKEKEIPELRNKLQNVNRDIQRLKNDIEEQETLLGTIMPEEESAKVCLTDVTIMERFQMELKDVERKIAQQAAKLQGIDLDRTVQQVNQEKQEKQHKLDTVSSKIELNRKLIQDQQEQIQHLKSTTNELKSEKLQISTNLQRRQQLEEQTVELSTEVQSLYREIKDAKEQVSPLETTLEKFQQEKEELINKKNTSNKIAQDKLNDIKEKVKNIHGYMKDIENYIQDGKDDYKKQKETELNKVIAQLSECEKHKEKINEDMRLMRQDIDTQKIQERWLQDNLTLRKRNEELKEVEEERKQHLKEMGQMQVLQMKSEHQKLEENIDNIKRNHNLALGRQKGYEEEIIHFKKELREPQFRDAEEKYREMMIVMRTTELVNKDLDIYYKTLDQAIMKFHSMKMEEINKIIRDLWRSTYRGQDIEYIEIRSDADENVSASDKRRNYNYRVVMLKGDTALDMRGRCSAGQKVLASLIIRLALAETFCLNCGIIALDEPTTNLDRENIESLAHALVEIIKSRSQQRNFQLLVITHDEDFVELLGRSEYVEKFYRIKKNIDQCSEIVKCSVSSLGFNVH

SEQ ID NO: 849432 - protein, 108 aa, Homo sapiens
RFPADVVEENESGRGQDWRSCRFRRGAQNAAAASLERGPWGRNPRRARWQHTLGPPLPAASPEDGQQRNKKMDSLAAGELNASHQPWVPEFVAYWRKTHQALNSTVNG

SEQ ID NO: 849433 - protein, 115 aa, Homo sapiens
RFPADVVEENESGRGQDWRSCRFRRGAQNAAAASLERGPWGRNPRRARWQHTLGPPLPAASPEDGQQRNKKMDSLAAGELNASHQPWVPEFVAYWRKTHQGKTTIRPHLVWDCPT

SEQ ID NO: 849434 - protein, 1312 aa, Homo sapiens
MSRIEKMSILGVRSFGIEDKDKQIITFFSPLTILVGPNGAGKTTIIECLKYICTGDFPPGTKGNTFVHDPKVAQETDVRAQIRLQFRDVNGELIAVQRSMVCTQKSKKTEFKTLEGVITRTKHGEKVSLSSKCAEIDREMISSLGVSKAVLNNVIFCHQEDSNWPLSEGKALKQKFDEIFSATRYIKALETLRQVRQTQGQKVKEYQMELKYLKQYKEKACEIRDQITSKEAQLTSSKEIVKSYENELDPLKNRLKEIEHNLSKIMKLDNEIKALDSRKKQMEKDNSELEEKMEKVFQGTDEQLNDLYHNHQRTVREKERKLVDCHRELEKLNKESRLLNQEKSELLVEQGRLQLQADRHQEHIRARDSLIQSLATQLELDGFERGPFSERQIKNFHKLVRERQEGEAKTANQLMNDFAEKETLKQKQIDEIRDKKTGLGRIIELKSEILSKKQNELKNVKYELQQLEGSSDRILELDQELIKAERELSKAEKNSNVETLKMEVISLQNEKADLDRTLRKLDQEMEQLNHHTTTRTQMEMLTKDKADKDEQIRKIKSRHSDELTSLLGYFPNKKQLEDWLHSKSKEINQTRDRLAKLNKELASSEQNKNHINNELKRKEEQLSSYEDKLFDVCGSQDFESDLDRLKEEIEKSSKQRAMLAGATAVYSQFITQLTDENQSCCPVCQRVFQTEAELQEVISDLQSKLRLAPDKLKSTESELKKKEKRRDEMLGLVPMRQSIIDLKEKEIPELRNKLQNVNRDIQRLKNDIEEQETLLGTIMPEEESAKVCLTDVTIMERFQMELKDVERKIAQQAAKLQGIDLDRTVQQVNQEKQEKQHKLDTVSSKIELNRKLIQDQQEQIQHLKSTTNELKSEKLQISTNLQRRQQLEEQTVELSTEVQSLYREIKDAKEQVSPLETTLEKFQQEKEELINKKNTSNKIAQDKLNDIKEKVKNIHGYMKDIENYIQDGKDDYKKQKETELNKVIAQLSECEKHKEKINEDMRLMRQDIDTQKIQERWLQDNLTLRKRNEELKEVEEERKQHLKEMGQMQVLQMKSEHQKLEENIDNIKRNHNLALGRQKGYEEEIIHFKKELREPQFRDAEEKYREMMIVMRTTELVNKDLDIYYKTLDQAIMKFHSMKMEEINKIIRDLWRSTYRGQDIEYIEIRSDADENVSASDKRRNYNYRVVMLKGDTALDMRGRCSAGQKVLASLIIRLALAETFCLNCGIIALDEPTTNLDRENIESLAHALVEIIKSRSQQRNFQLLVITHDEDFVELLGRSEYVEKFYRIKKNIDQCSEIVKCSVSSLGFNVH

SEQ ID NO: 849435 - protein, 1105 aa, Homo sapiens [sequence omitted]

SEQ ID NO: 849436 - protein, 1312 aa, Homo sapiens; identical to SEQ ID NO: 849434

SEQ ID NO: 849437 - protein, 724 aa, Homo sapiens
MKIHICSYFSKELASSEQNKNHINNELKRKEEQLSSYEDKLFDVCGSQDFESDLDRLKEEIEKSSKQRAMLAGATAVYSQFITQLTDENQSCCPVCQRVFQTEAELQEVISDLQSKLRLAPDKLKSTESELKKKEKRRDEMLGLVPMRQSIIDLKEKEIPELRNKLQNVNRDIQRLKNDIEEQETLLGTIMPEEESAKVCLTDVTIMERFQMELKDVERKIAQQAAKLQGIDLDRTVQQVNQEKQEKQHKLDTVSSKIELNRKLIQDQQEQIQHLKSTTNELKSEKLQISTNLQRRQQLEEQTVELSTEVQSLYREIKDAKEQVSPLETTLEKFQQEKEELINKKNTSNKIAQDKLNDIKEKVKNIHGYMKDIENYIQDGKDDYKKQKETELNKVIAQLSECEKHKEKINEDMRLMRQDIDTQKIQERWLQDNLTLRKRNEELKEVEEERKQHLKEMGQMQVLQMKSEHQKLEENIDNIKRNHNLALGRQKGYEEEIIHFKKELREPQFRDAEEKYREMMIVMRTTELVNKDLDIYYKTLDQAIMKFHSMKMEEINKIIRDLWRSTYRGQDIEYIEIRSDADENVSASDKRRNYNYRVVMLKGDTALDMRGRCSAGQKVLASLIIRLALAETFCLNCGIIALDEPTTNLDRENIESLAHALVEIIKSRSQQRNFQLLVITHDEDFVELLGRSEYVEKFYRIKKNIDQCSEIVKCSVSSLGFNVH

SEQ ID NO: 849438 - protein, 312 aa, Homo sapiens [sequence omitted]

SEQ ID NO: 849439 - protein, 1295 aa, Homo sapiens
MSRIEKMSILGVRSFGIEDKDKQIITFFSPLTILVGPNGAGKTTIIECLKYICTGDFPPGTKGNTFVHDPKVAQETDVRAQIRLQFRDVNGELIAVQRSMVCTQKSKKTEFKTLEGVITRTKHGEKVSLSSKCAEIDREMISSLGVSKAVLNNVIFCHQEDSNWPLSEGKALKQKFDEIFSATRYIKALETLRQVRQTQGQKVKEYQMELKYLKQYKEKACEIRDQITSKEAQLTSSKEIVKSYENELDPLKNRLKEIEHNLSKIMKLDNEIKALDSRKKQMEKDNSELEEKMEKVFQGTDEQLNDLYHNHQRTVREKERKLVDCHRELEKLNKESRLLNQEKSELLVEQGRLQLQADRHQEHIRARDSLIQSLATQLELDGFERGPFSERQIKNFHKLVRERQEGEAKTANQLMNDFAEKETLKQKQIDEIRDKKTGLGRIIELKSEILSKKQNELKNVKYELQQLEGSSDRILELDQELIKAERELSKAEKNSNVETLKMEVISLQNEKADLDRTLRKLDQEMEQLNHHTTTRTQMEMLTKDKADKDEQIRKIKSRHSDELTSLLGYFPNKKQLEDWLHSKSKEINQTRDRLAKLNKELASSEQNKNHINNELKRKEEQLSSYEDKLFDVCGSQDFESDLDRLKEEIEKSSKQRAMLAGATAVYSQFITQLTDENQSCCPVCQRVFQTEAELQEVISDLQSKLRLAPDKLKSTESELKKKEKRRDEMLGLVPMRQSIIDLKEKEIPELRNKLQNVNRDIQRLKNDIEEQETLLGTIMPEEESAKVCLTDVTIMERFQMELKDVERKIAQQAAKLQGIDLDRTVQQVNQEKQEKQHKLDTVSSKIELNRKLIQDQQEQIQHLKSTTNELKSEKLQISTNLQRRQQLEEQTVELSTEVQSLYREIKDAKEQVSPLETTLEKFQQEKEELINKKNTSNKIAQDKLNDIKEKVKNIHGYMKDIENYIQDGKDDYKKQKETELNKVIAQLSECEKHKEKINEDMRLMRQDIDTQKIQERWLQDNLTLRKRNEELKEVEEERKQHLKEMGQMQVLQMKSEHQKLEENIDNIKRNHNLALGRQKGYEEEIIHFKKELREPQFRDAEEKYREMMIVMRTTELVNKDLDIYYKTLDQAIMKFHSMKMEEINKIIRDLWRSTYRGQDIEYIEIRSDADENVSASDKRRNYNYRVVMLKGDTALDMRGRCSAGQKVLASLIIRLALAETFCLNCGIIALDEPTTNLDRENIESLAHALVEIIKSRSQQRNFQLLVITHDEDFVELLGRSEYVEKFYRIKKNIDQ

SEQ ID NO: 849440 - protein, 1312 aa, Homo sapiens; identical to SEQ ID NO: 849434

SEQ ID NO: 849441 - protein, 1318 aa, Homo sapiens
MLIFSVRDMFAKMSILGVRSFGIEDKDKQIITFFSPLTILVGPNGAGKTTIIECLKYICTGDFPPGTKGNTFVHDPKVAQETDVRAQIRLQFRDVNGELIAVQRSMVCTQKSKKTEFKTLEGVITRTKHGEKVSLSSKCAEIDREMISSLGVSKAVLNNVIFCHQEDSNWPLSEGKALKQKFDEIFSATRYIKALETLRQVRQTQGQKVKEYQMELKYLKQYKEKACEIRDQITSKEAQLTSSKEIVKSYENELDPLKNRLKEIEHNLSKIMKLDNEIKALDSRKKQMEKDNSELEEKMEKVFQGTDEQLNDLYHNHQRTVREKERKLVDCHRELEKLNKESRLLNQEKSELLVEQGRLQLQADRHQEHIRARDSLIQSLATQLELDGFERGPFSERQIKNFHKLVRERQEGEAKTANQLMNDFAEKETLKQKQIDEIRDKKTGLGRIIELKSEILSKKQNELKNVKYELQQLEGSSDRILELDQELIKAERELSKAEKNSNVETLKMEVISLQNEKADLDRTLRKLDQEMEQLNHHTTTRTQMEMLTKDKADKDEQIRKIKSRHSDELTSLLGYFPNKKQLEDWLHSKSKEINQTRDRLAKLNKELASSEQNKNHINNELKRKEEQLSSYEDKLFDVCGSQDFESDLDRLKEEIEKSSKQRAMLAGATAVYSQFITQLTDENQSCCPVCQRVFQTEAELQEVISDLQSKLRLAPDKLKSTESELKKKEKRRDEMLGLVPMRQSIIDLKEKEIPELRNKLQNVNRDIQRLKNDIEEQETLLGTIMPEEESAKVCLTDVTIMERFQMELKDVERKIAQQAAKLQGIDLDRTVQQVNQEKQEKQHKLDTVSSKIELNRKLIQDQQEQIQHLKSTTNELKSEKLQISTNLQRRQQLEEQTVELSTEVQSLYREIKDAKEQVSPLETTLEKFQQEKEELINKKNTSNKIAQDKLNDIKEKVKNIHGYMKDIENYIQDGKDDYKKQKETELNKVIAQLSECEKHKEKINEDMRLMRQDIDTQKIQERWLQDNLTLRKRNEELKEVEEERKQHLKEMGQMQVLQMKSEHQKLEENIDNIKRNHNLALGRQKGYEEEIIHFKKELREPQFRDAEEKYREMMIVMRTTELVNKDLDIYYKTLDQAIMKFHSMKMEEINKIIRDLWRSTYRGQDIEYIEIRSDADENVSASDKRRNYNYRVVMLKGDTALDMRGRCSAGQKVLASLIIRLALAETFCLNCGIIALDEPTTNLDRENIESLAHALVEIIKSRSQQRNFQLLVITHDEDFVELLGRSEYVEKFYRIKKNIDQCSEIVKCSVSSLGFNVH

SEQ ID NO: 849442 - protein, 1312 aa, Homo sapiens; identical to SEQ ID NO: 849434

SEQ ID NO: 849443 - protein, 1213 aa, Homo sapiens
MVCTQKSKKTEFKTLEGVITRTKHGEKVSLSSKCAEIDREMISSLGVSKAVLNNVIFCHQEDSNWPLSEGKALKQKFDEIFSATRYIKALETLRQVRQTQGQKVKEYQMELKYLKQYKEKACEIRDQITSKEAQLTSSKEIVKSYENELDPLKNRLKEIEHNLSKIMKLDNEIKALDSRKKQMEKDNSELEEKMEKVFQGTDEQLNDLYHNHQRTVREKERKLVDCHRELEKLNKESRLLNQEKSELLVEQGRLQLQADRHQEHIRARDSLIQSLATQLELDGFERGPFSERQIKNFHKLVRERQEGEAKTANQLMNDFAEKETLKQKQIDEIRDKKTGLGRIIELKSEILSKKQNELKNVKYELQQLEGSSDRILELDQELIKAERELSKAEKNSNVETLKMEVISLQNEKADLDRTLRKLDQEMEQLNHHTTTRTQMEMLTKDKADKDEQIRKIKSRHSDELTSLLGYFPNKKQLEDWLHSKSKEINQTRDRLAKLNKELASSEQNKNHINNELKRKEEQLSSYEDKLFDVCGSQDFESDLDRLKEEIEKSSKQRAMLAGATAVYSQFITQLTDENQSCCPVCQRVFQTEAELQEVISDLQSKLRLAPDKLKSTESELKKKEKRRDEMLGLVPMRQSIIDLKEKEIPELRNKLQNVNRDIQRLKNDIEEQETLLGTIMPEEESAKVCLTDVTIMERFQMELKDVERKIAQQAAKLQGIDLDRTVQQVNQEKQEKQHKLDTVSSKIELNRKLIQDQQEQIQHLKSTTNELKSEKLQISTNLQRRQQLEEQTVELSTEVQSLYREIKDAKEQVSPLETTLEKFQQEKEELINKKNTSNKIAQDKLNDIKEKVKNIHGYMKDIENYIQDGKDDYKKQKETELNKVIAQLSECEKHKEKINEDMRLMRQDIDTQKIQERWLQDNLTLRKRNEELKEVEEERKQHLKEMGQMQVLQMKSEHQKLEENIDNIKRNHNLALGRQKGYEEEIIHFKKELREPQFRDAEEKYREMMIVMRTTELVNKDLDIYYKTLDQAIMKFHSMKMEEINKIIRDLWRSTYRGQDIEYIEIRSDADENVSASDKRRNYNYRVVMLKGDTALDMRGRCSAGQKVLASLIIRLALAETFCLNCGIIALDEPTTNLDRENIESLAHALVEIIKSRSQQRNFQLLVITHDEDFVELLGRSEYVEKFYRIKKNIDQCSEIVKCSVSSLGFNVH

SEQ ID NO: 849444 - protein, 1364 aa, Homo sapiens
MSRIEKMSILGVRSFGIEDKDKQIITFFSPLTILVGPNGAGKTTIIECLKYICTGDFPPGTKGNTFVHDPKVAQETDVRAQIRLQFRDVNGELIAVQRSMVCTQKSKKTEFKTLEGVITRTKHGEKVSLSSKCAEIDREMISSLGVSKAVLNNVIFCHQEDSNWPLSEGKALKQKFDEIFSATRYIKALETLRQVRQTQGQKVKEYQMELKYLKQYKEKACEIRDQITSKEAQLTSSKEIVKSYENELDPLKNRLKEIEHNLSKIMKLDNEIKALDSRKKQMEKDNSELEEKMEKVFQGTDEQLNDLYHNHQRTVREKERKLVDCHRELEKLNKESRLLNQEKSELLVEQGRLQLQADRHQEHIRARDSLIQSLATQLELDGFERGPFSERQIKNFHKLVRERQEGEAKTANQLMNDFAEKETLKQKQIDEIRDKKTGLGRIIELKSEILSKKQNELKNVKYELQQLEGSSDRILELDQELIKAERELSKAEKNSNVETLKMEVISLQNEKADLDRTLRKLDQEMEQLNHHTTTRTQMEMLTKDKADKDEQIRKIKSRHSDELTSLLGYFPNKKQLEDWLHSKSKEINQTRDRLAKLNKELASSEQNKNHINNELKRKEEQLSSYEDKLFDVCGSQDFESDLDRLKEEIEKSSKQRGKLSTLYYQDTLTPLNFHSQVTVKDGEFKNLVMEPNGLDFSPGSTTYSLCDFAMLAGATAVYSQFITQLTDENQSCCPVCQRVFQTEAELQEVISDLQSKLRLAPDKLKSTESELKKKEKRRDEMLGLVPMRQSIIDLKEKEIPELRNKLQNVNRDIQRLKNDIEEQETLLGTIMPEEESAKVCLTDVTIMERFQMELKDVERKIAQQAAKLQGIDLDRTVQQVNQEKQEKQHKLDTVSSKIELNRKLIQDQQEQIQHLKSTTNELKSEKLQISTNLQRRQQLEEQTVELSTEVQSLYREIKDAKEQVSPLETTLEKFQQEKEELINKKNTSNKIAQDKLNDIKEKVKNIHGYMKDIENYIQDGKDDYKKQKETELNKVIAQLSECEKHKEKINEDMRLMRQDIDTQKIQERWLQDNLTLRKRNEELKEVEEERKQHLKEMGQMQVLQMKSEHQKLEENIDNIKRNHNLALGRQKGYEEEIIHFKKELREPQFRDAEEKYREMMIVMRTTELVNKDLDIYYKTLDQAIMKFHSMKMEEINKIIRDLWRSTYRGQDIEYIEIRSDADENVSASDKRRNYNYRVVMLKGDTALDMRGRCSAGQKVLASLIIRLALAETFCLNCGIIALDEPTTNLDRENIESLAHALVEIIKSRSQQRNFQLLVITHDEDFVELLGRSEYVEKFYRIKKNIDQCSEIVKCSVSSLGFNVH

SEQ ID NO: 849445 - protein, 534 aa, Homo sapiens
MPEEESAKVCLTDVTIMERFQMELKDVERKIAQQAAKLQGIDLDRTVQQVNQEKQEKQHKLDTVSSKIELNRKLIQDQQEQIQHLKSTTNELKSEKLQISTNLQRRQQLEEQTVELSTEVQSLYREIKDAKEQVSPLETTLEKFQQEKEELINKKNTSNKIAQDKLNDIKEKVKNIHGYMKDIENYIQDGKDDYKKQKETELNKVIAQLSECEKHKEKINEDMRLMRQDIDTQKIQERWLQDNLTLRKRNEELKEVEEERKQHLKEMGQMQVLQMKSEHQKLEENIDNIKRNHNLALGRQKGYEEEIIHFKKELREPQFRDAEEKYREMMIVMRTTELVNKDLDIYYKTLDQAIMKFHSMKMEEINKIIRDLWRSTYRGQDIEYIEIRSDADENVSASDKRRNYNYRVVMLKGDTALDMRGRCSAGQKVLASLIIRLALAETFCLNCGIIALDEPTTNLDRENIESLAHALVEIIKSRSQQRNFQLLVITHDEDFVELLGRSEYVEKFYRIKKNIDQCSEIVKCSVSSLGFNVH

SEQ ID NO: 849446 - protein, 1312 aa, Homo sapiens; identical to SEQ ID NO: 849434

SEQ ID NO: 849447 - protein, 188 aa, Homo sapiens
RFPADVVEENESGRGQDWRSCRFRRGAQNAAAASLERGPWGRNPRRARWQHTLGPPLPAASPEDGQQRNKKMDSLAAGELNASHQPWVPEFVAYWRKTHQDHLCSLHSRAFGLLDARVTWALRRAPEPVPGKDRLLLAAFPAEASPVDTASVSVYGRAPRYMHKGVKKCVCTPVSKNSTAWLLLGGIS

SEQ ID NO: 849448 - protein, 499 aa, Homo sapiens
SRLYDRKYGIGEQGRGGAEMIRAAPPPLFLLLLLLLLLVSWASRGEAAPDQDEIQRLPGLAKQPSFRQYSGYLKGSGSKHLHYWFVESQKDPENSPVVLWLNGGPGCSSLDGLLTEHGPFLVQPDGVTLEYNPYSWNLIANVLYLESPAGVGFSYSDDKFYATNDTEVAQSNFEALQDFFRLFPEYKNNKLFLTGESYAGIYIPTLAVLVMQDPSMNLQGLAVGNGLSSYEQNDNSLVYFAYYHGLLGNRLWSSLQTHCCSQNKCNFYDNKDLECVTNLQEVARIVGNSGLNIYNLYAPCAGGVPSHFRYEKDTVVVQDLGNIFTRLPLKRMWHQALLRSGDKVRMDPPCTNTTAASTYLNNPYVRKALNIPEQLPQWDMCNFLVNLQYRRLYRSMNSQYLKLLSSQKYQILLYNGDVDMACNFMGDEWFVDSLNQKMEVQRRPWLVKYGDSGEQIAGFVKEFSHIAFLTIKGAGHMVPTDKPLAAFTMFSRFLNKQPY

SEQ ID NO: 849449 - protein, 104 aa, Homo sapiens [sequence omitted]

SEQ ID NO: 849450 - protein, 244 aa, Homo sapiens
MIRAAPPPLFLLLLLLLLLVSWASRGEAAPDQDEIQRLPGLAKQPSFRQYSGYLKGSGSKHLHYWFVESQKDPENSPVVLWLNGGPGCSSLDGLLTEHGPFLVQPDGVTLEYNPYSWNLIANVLYLESPAGVGFSYSDDKFYATNDTEVAQSNFEALQDFFRLFPEYKNNKLFLTGESYAGIYIPTLAVLVMQDPSMNLQGLAVGNGLSSYEQNDNSLVYFAYYHGLLGNRPWSSLQTMLLSKQ

SEQ ID NO: 849451 - protein, 499 aa, Homo sapiens; identical to SEQ ID NO: 849448

SEQ ID NO: 849452 - protein, 480 aa, Homo sapiens
MIRAAPPPLFLLLLLLLLLVSWASRGEAAPDQDEIQRLPGLAKQPSFRQYSGYLKGSGSKHLHYWFVESQKDPENSPVVLWLNGGPGCSSLDGLLTEHGPFLVQPDGVTLEYNPYSWNLIANVLYLESPAGVGFSYSDDKFYATNDTEVAQSNFEALQDFFRLFPEYKNNKLFLTGESYAGIYIPTLAVLVMQDPSMNLQGLAVGNGLSSYEQNDNSLVYFAYYHGLLGNRLWSSLQTHCCSQNKCNFYDNKDLECVTNLQEVARIVGNSGLNIYNLYAPCAGGVPSHFRYEKDTVVVQDLGNIFTRLPLKRMWHQALLRSGDKVRMDPPCTNTTAASTYLNNPYVRKALNIPEQLPQWDMCNFLVNLQYRRLYRSMNSQYLKLLSSQKYQILLYNGDVDMACNFMGDEWFVDSLNQKMEVQRRPWLVKYGDSGEQIAGFVKEFSHIAFLTIKGAGHMVPTDKPLAAFTMFSRFLNKQPY

SEQ ID NO: 849453 - protein, 495 aa, Homo sapiens
  misc_feature (3)..(3): Xaa can be any naturally occurring amino acid
QIXDDRRLWRRGGAEMIRAAPPPLFLLLLLLLLLVSWASRGEAAPDQDEIQRLPGLAKQPSFRQYSGYLKGSGSKHLHYWFVESQKDPENSPVVLWLNGGPGCSSLDGLLTEHGPFLVQPDGVTLEYNPYSWNLIANVLYLESPAGVGFSYSDDKFYATNDTEVAQSNFEALQDFFRLFPEYKNNKLFLTGESYAGIYIPTLAVLVMQDPSMNLQGLAVGNGLSSYEQNDNSLVYFAYYHGLLGNRLWSSLQTHCCSQNKCNFYDNKDLECVTNLQEVARIVGNSGLNIYNLYAPCAGGVPSHFRYEKDTVVVQDLGNIFTRLPLKRMWHQALLRSGDKVRMDPPCTNTTAASTYLNNPYVRKALNIPEQLPQWDMCNFLVNLQYRRLYRSMNSQYLKLLSSQKYQILLYNGDVDMACNFMGDEWFVDSLNQKMEVQRRPWLVKYGDSGEQIAGFVKEFSHIAFLTIKGAGHMVPTDKPLAAFTMFSRFLNKQPY

SEQ ID NO: 849454 - protein, 481 aa, Homo sapiens
MTSSPRAPPGEQGRGGAEMIRAAPPPLFLLLLLLLLLVSWASRGEAAPDQDEIQRLPGLAKQPSFRQYSGYLKGSGSKHLHYWFVESQKDPENSPVVLWLNGGPGCSSLDGLLTEHGPFLIANVLYLESPAGVGFSYSDDKFYATNDTEVAQSNFEALQDFFRLFPEYKNNKLFLTGESYAGIYIPTLAVLVMQDPSMNLQGLAVGNGLSSYEQNDNSLVYFAYYHGLLGNRLWSSLQTHCCSQNKCNFYDNKDLECVTNLQEVARIVGNSGLNIYNLYAPCAGGVPSHFRYEKDTVVVQDLGNIFTRLPLKRMWHQALLRSGDKVRMDPPCTNTTAASTYLNNPYVRKALNIPEQLPQWDMCNFLVNLQYRRLYRSMNSQYLKLLSSQKYQILLYNGDVDMACNFMGDEWFVDSLNQKMEVQRRPWLVKYGDSGEQIAGFVKEFSHIAFLTIKGAGHMVPTDKPLAAFTMFSRFLNKQPY

SEQ ID NO: 849455 - protein, 398 aa, Homo sapiens
PHRGNSGLNIYNLYAPCAGGVPSHFRYEKYNPYSWNLIANVLYLESPAGVGFSYSDDKFYATNDTEVAQSNFEALQDFFRLFPEYKNNKLFLTGESYAGIYIPTLAVLVMQDPSMNLQGLAVGNGLSSYEQNDNSLVYFAYYHGLLGNRLWSSLQTHCCSQNKCNFYDNKDLECVTNLQEVARIVGNSGLNIYNLYAPCAGGVPSHFRYEKDTVVVQDLGNIFTRLPLKRMWHQALLRSGDKVRMDPPCTNTTAASTYLNNPYVRKALNIPEQLPQWDMCNFLVNLQYRRLYRSMNSQYLKLLSSQKYQILLYNGDVDMACNFMGDEWFVDSLNQKMEVQRRPWLVKYGDSGEQIAGFVKEFSHIAFLTIKGAGHMVPTDKPLAAFTMFSRFLNKQPY

SEQ ID NO: 849456 - protein, 157 aa, Homo sapiens
KQAVRPEVWDWRARTRGSRDDPSRAAAAVPAAAAAAAASVLGVPRRGSPRPGRDPAPPRAGQAAVFPPVLRLPQRLRLQAPPLLVCGVPEGSREQPCGALAQWGSRLQLTRWAPHRAWPLPGPARWCHPGVQPLFLESDCQCVIPGVPSWGGLLLLR

SEQ ID NO: 849457 - protein, 368 aa, Homo sapiens
SRLYDRKYGIGEQGRGGAEMIRAAPPPLFLLLLLLLLLVSWASRGEAAPDQDEIQRLPGLAKQPSFRQYSGYLKGSGSKHLHYWFVESQKDPENSPVVLWLNGGPGCSSLDGLLTEHGPFLVQPDGVTLEYNPYSWNLIANVLYLESPAGVGFSYSDDKFYATNDTEVAQSNFEALQDFFRLFPEYKNNKLFLTGESYAGIYIPTLAVLVMQDPSMNLQGLAVGNGLSSYEQNDNSLVYFAYYHGLLGNRLWSSLQTHCCSQNKCNFYDNKDLECVTNLQEVARIVGNSGLNIYNLYAPCAGGVPSHFRYEKDTVVVQDLGNIFTRLPLKRMWHQALLRSGDKVRMDPPCTNTTSSGQPTGRWWTDCN

SEQ ID NO: 849458 - protein, 263 aa, Homo sapiens
LGQRTVWGQRTVLGQRTVLGQRTVWANAPCWANAPCWANAPCLQEVARIVGNSGLNIYNLYAPCAGGVPSHFRYEKDTVVVQDLGNIFTRLPLKRMWHQALLRSGDKVRMDPPCTNTTAASTYLNNPYVRKALNIPEQLPQWDMCNFLVNLQYRRLYRSMNSQYLKLLSSQKYQILLYNGDVDMACNFMGDEWFVDSLNQKMEVQRRPWLVKYGDSGEQIAGFVKEFSHIAFLTIKGAGHMVPTDKPLAAFTMFSRFLNKQPY

SEQ ID NO: 849459 - protein, 283 aa, Homo sapiens
SRLYDRKYGIGEQGRGGAEMIRAAPPPLFLLLLLLLLLVSWASRGEAAPDQDEIQRLPGLAKQPSFRQYSGYLKGSGSKHLHYWFVESQKDPENSPVVLWLNGGPGCSSLDGLLTEHGPFLVQPDGVTLEYNPYSWNLIANVLYLESPAGVGFSYSDDKFYATNDTEVAQSNFEALQDFFRLFPEYKNNKLFLTGESYAGIYIPTLAVLVMQDPSMNLQGLAVGNGLSSYEQNDNSLVYFAYYHGLLGNRLWSSLQTHCCSQNKCNFYDNKDLECVTNGPFSA

SEQ ID NO: 849460 - protein, 110 aa, Homo sapiens
RAYNGAGTPTIVILLSSQKYQILLYNGDVDMACNFMGDEWFVDSLNQKMEVQRRPWLVKYGDSGEQIAGFVKEFSHIAFLTIKGAGHMVPTDKPLAAFTMFSRFLNKQPY

SEQ ID NO: 849461 - protein, 186 aa, Homo sapiens
SRLYDRKYGIGEQGRGGAEMIRAAPPPLFLLLLLLLLLVSWASRGEAAPDQDEIQRLPGLAKQPSFRQYSGYLKGSGSKHLHYWFVESQKDPENSPVVLWLNGGPGCSSLDGLLTEHGPFLVQPDGVTLEYNPYSWNLIANVLYLESPAGVGFSYSDDKFYATNDTEVAQSNFEPFKISSFGNQVG

SEQ ID NO: 849462 - protein, 187 aa, Homo sapiens
SRLYDRKYGIGEQGRGGAEMIRAAPPPLFLLLLLLLLLVSWASRGEAAPDQDEIQRLPGLAKQPSFRQYSGYLKGSGSKHLHYWFVESQKDPENSPVVLWLNGGPGCSSLDGLLTEHGPFLVQPDGVTLEYNPYSWNLIANVLYLESPAGVGFSYSDDKFYATNDTEVAQSNEALYDCLIRGYRARF

SEQ ID NO: 849463 - protein, 104 aa, Homo sapiens [sequence omitted]

SEQ ID NO: 849464 - protein, 148 aa, Homo sapiens
IANVLYLESPAGVGFSYSDDKFYATNDTEVAQSNFEALQDFFRLFPEYKNNKLFLTGESYAGIYIPTLAVLVMQDPSMNLQGLAVGNGLSSYEQNDNSLVYFAYYHGLLGNRLWSSLQTHCCSQNKCNFYDNKDLECVTNVRFCHHFA

SEQ ID NO: 849465 - protein, 480 aa, Homo sapiens; identical to SEQ ID NO: 849452

SEQ ID NO: 849466 - protein, 488 aa, Homo sapiens
TAVATAWPFIPPAPAKGHQGHVSVPPPVYSLLHEPCLPAHPRTGGSTRSRGEGLSQEVRVHVLRSCPSSPRLVFVESQKDPENSPVVLWLNGGPGCSSLDGLLTEHGPFLVQPDGVTLEYNPYSWNLIANVLYLESPAGVGFSYSDDKFYATNDTEVAQSNFEALQDFFRLFPEYKNNKLFLTGESYAGIYIPTLAVLVMQDPSMNLQGLAVGNGLSSYEQNDNSLVYFAYYHGLLGNRLWSSLQTHCCSQNKCNFYDNKDLECVTNLQEVARIVGNSGLNIYNLYAPCAGGVPSHFRYEKDTVVVQDLGNIFTRLPLKRMWHQALLRSGDKVRMDPPCTNTTAASTYLNNPYVRKALNIPEQLPQWDMCNFLVNLQYRRLYRSMNSQYLKLLSSQKYQILLYNGDVDMACNFMGDEWFVDSLNQKMEVQRRPWLVKYGDSGEQIAGFVKEFSHIAFLTIKGAGHMVPTDKPLAAFTMFSRFLNKQPY

SEQ ID NO: 849467 - protein, 435 aa, Homo sapiens
SRLYDRKYGIGEQGRGGAEMIRAAPPPLFLLLLLLLLLVSWASRGEAAPDQDEIQRLPGLAKQPSFRQYSGYLKGSGSKHLHYWFVESQKDPENSPVVLWLNGGPGCSSLDGLLTEHGPFLVQPDGVTLEYNPYSWNLIANVLYLESPAGVGFSYSDDKFYATNDTEVAQSNFEALQDFFRLFPEYKNNKLFLTGESYAGIYIPTLAVLVMQDPSMNLQGLAVGNGLSSYEQNDNSLVYFAYYHGLLGNRLWSSLQTHCCSQNKCNFYDNKDLECVTNLQEVARIVGNSGLNIYNLYAPCAGGVPSHFRYEKDTVVVQDLGNIFTRLPLKRMWHQALLRSGDKVRMDPPCTNTTAASTYLNNPYVRKALNIPEQLPQWDMCNFLVNLQYRRLYRSMNSQYLKLLSSQKYQILLYNGRCRTLALQIFQWGGTQIRG

SEQ ID NO: 849468 - protein, 436 aa, Homo sapiens
SRLYDRKYGIGEQGRGGAEMIRAAPPPLFLLLLLLLLLVSWASRGEAAPDQDEIQRLPGLAKQPSFRQYSGYLKGSGSKHLHYWFVESQKDPENSPVVLWLNGGPGCSSLDGLLTEHGPFLVQPDGVTLEYNPYSWNLIANVLYLESPAGVGFSYSDDKFYATNDTEVAQSNFEALQDFFRLFPEYKNNKLFLTGESYAGIYIPTLAVLVMQDPSMNLQGLAVGNGLSSYEQNDNSLVYFAYYHGLLGNRLWSSLQTHCCSQNKCNFYDNKDLECVTNLQEVARIVGNSGLNIYNLYAPCAGGVPSHFRYEKDTVVVQDLGNIFTRLPLKRMWHQALLRSGDKVRMDPPCTNTTAASTYLNNPYVGPTLGQRTVCWGGHPGFTERTQVRTWLPVTGLLVTELPVTGPAAAASCSALWSAPKLPRAAPRRLRVEAGS

SEQ ID NO: 849469 - protein, 398 aa, Homo sapiens
SRLYDRKYGIGEQGRGGAEMIRAAPPPLFLLLLLLLLLVSWASRGEAAPDQDEIQRLPGLAKQPSFRQYSGYLKGSGSKHLHYWFVESQKDPENSPVVLWLNGGPGCSSLDGLLTEHGPFLVQPDGVTLEYNPYSWNLIANVLYLESPAGVGFSYSDDKFYATNDTEVAQSNFEALQDFFRLFPEYKNNKLFLTGESYAGIYIPTLAVLVMQDPSMNLQGLAVGNGLSSYEQNDNSLVYFAYYHGLLGNRLWSSLQTHCCSQNKCNFYDNKDLECVTNLQEVARIVGNSGLNIYNLYAPCAGGVPSHFRYEKDTVVVQDLGNIFTRLPLKRMWHQALLRSGDKVRMDPPCTNTTAASTYLNNPYVGPTLGQRTVQFVPFQFYSDCCDLVRCVPQRYEL

SEQ ID NO: 849470 - protein, 241 aa, Homo sapiens
LGQRTVWGQRTVLGQRTVLGQRTVWANAPCWANAPCWANAPCAGGVPSHFRYEKDTVVVQDLGNIFTRLPLKRMWHQALLRSGDKVRMDPPCTNTTAASTYLNNPYVRKALNIPEQLPQWDMCNFLVNLQYRRLYRSMNSQYLKLLSSQKYQILLYNGDVDMACNFMGDEWFVDSLNQKMEVQRRPWLVKYGDSGEQIAGFVKEFSHIAFLTIKGAGHMVPTDKPLAAFTMFSRFLNKQPY

SEQ ID NO: 849471 - protein, 269 aa, Homo sapiens
SRLYDRKYGIGEQGRGGAEMIRAAPPPLFLLLLLLLLLVSWASRGEAAPDQDEIQRLPGLAKQPSFRQYSGYLKGSGSKHLHYWFVESQKDPENSPVVLWLNGGPGCSSLDGLLTEHGPFLVQPDGVTLEYNPYSWNLIANVLYLESPAGVGFSYSDDKFYATNDTEVAQSNFEALQDFFRLFPEYKNNKLFLTGESYAGIYIPTLAVLVMQDPSMNLQGLAVGNGLSSYEQNDNSLVYFAYYHGLLGNRLWSSLQTHCCSQNKCNFYD

SEQ ID NO: 849472 - protein, 208 aa, Homo sapiens
MIRAAPPPLFLLLLLLLLLVSWASRGEAAPDQDEIQRLPGLAKQPSFRQYSGYLKGSGSKHLHYWFVESQKDPENSPVVLWLNGGPGCSSLDGLLTEHGPFLVQPDGVTLEYNPYSWNLIANVLYLESPAGVGFSYSDDKFYATNDTEVAQSNFEALQDFFRLFPEYKNNKLFLTGESYAGIYIPTLAVLVMQDPSMNLQVQGSCRRE

SEQ ID NO: 849473 - protein, 126 aa, Homo sapiens
SRLYDRKYGIGEQGRGGAEMIRAAPPPLFLLLLLLLLLVSWASRGEAAPDQDEIQRLPGLAKQPSFRQYSGYLKGSGSKHLHYWFVESQKDPENSPVVLWLNGGPGCSSLDGLLTEHGPFLGPFSA

SEQ ID NO: 849474 - protein, 325 aa, Homo sapiens
RHKGLKKTHFIKNMRQYDTRNSRIVLICAKRSLCAAFSVLPYGEGLRISDLRVDSQKQRHPSGGVSVSSEMVFELEGVELGADGKVVSYAKFLYPTNALVTHKSDSHGLLPTPRPSVPRTLPGPRHKPAPTKSAPASTELGSDVGDTLEYNPNLLDDPQWPCGKHKRVLIFASYMTTVIEYVKPSDLKKDMNETFREKFPHVKLTLSKIRSLKREMRSLSEECSLEPVTVAMAYVYFEKLVLQGKLSKQNRKLCAGACVLLAAKISSDLRKSGVKQLIDKLEERFRFNRRDLIGFEFTVLVALELALYLPENQVLPHYRRLTQQF

SEQ ID NO: 849475 - protein, 255 aa, Homo sapiens
MVFELEGVELGADGKVVSYAKFLYPTNALVTHKSDSHGLLPTPRPSVPRTLPGPRHKPAPTKSAPASTELGSDVGDTLEYNPNLLDDPQWPCGKHKRVLIFASYMTTVIEYVKPSDLKKDMNETFREKFPHVKLTLSKIRSLKREMRSLSEECSLEPVTVAMAYVYFEKLVLQGKLSKQNRKLCAGACVLLAAKISSDLRKSGVKQLIDKLEERFRFNRRDLIGFEFTVLVALELALYLPENQVLPHYRRLTQQF

SEQ ID NO: 849476 - protein, 325 aa, Homo sapiens; identical to SEQ ID NO: 849474

SEQ ID NO: 849477 - protein, 325 aa, Homo sapiens; identical to SEQ ID NO: 849474

SEQ ID NO: 849478 - protein, 118 aa, Homo sapiens
CAGACVLLAAKISSDLRKSGVKQLIDVSARLGRHCRQGHDIEPGPLLEMGLAGWEMWKREGSRVTLLSSPLQKLEERFRFNRRDLIGFEFTVLVALELALYLPENQVLPHYRRLTQQF

SEQ ID NO: 849479 - protein, 187 aa, Homo sapiens
MSEAGEEQPMETTGATENGHEAVPEGESPAGAGTGAAAGAGGATAAPPSGNQNGAEGDQINASKNEEDAGKMFVGGLSWDTSKKDLKDYFTKFGEVVDCTIKMDPNTGRSRGFGFILFKDAASVEKVLDQKEHRLDGRVIDPKKAMAMKKDPVKKIFVGGLNPEATEEKIREYFGEFGELRHECKGQ

SEQ ID NO: 849480 - protein, 285 aa, Homo sapiens
MSEAGEEQPMETTGATENGHEAVPEGESPAGAGTGAAAGAGGATAAPPSGNQNGAEGDQINASKNEEDAGKMFVGGLSWDTSKKDLKDYFTKFGEVVDCTIKMDPNTGRSRGFGFILFKDAASVEKVLDQKEHRLDGRVIDPKKAMAMKKDPVKKIFVGGLNPEATEEKIREYFGEFGEIEAIELPMDPKLNKRRGFVFITFKEEEPVKKVLEKKFHTVSGSKCEIKVAQPKEVYQQQQYGSGGRGNRNRGNRGSGGGGGGGGQGSTNYGKSQRRGGHQNNYKPY

SEQ ID NO: 849481 - protein, 285 aa, Homo sapiens; identical to SEQ ID NO: 849480

SEQ ID NO: 849482 - protein, 332 aa, Homo sapiens
MSEAGEEQPMETTGATENGHEAVPEGESPAGAGTGAAAGAGGATAAPPSGNQNGAEGDQINASKNEEDAGKMFVGGLSWDTSKKDLKDYFTKFGEVVDCTIKMDPNTGRSRGFGFILFKDAASVEKVLDQKEHRLDGRVIDPKKAMAMKKDPVKKIFVGGLNPEATEEKIREYFGEFGEIEAIELPMDPKLNKRRGFVFITFKEEEPVKKVLEKKFHTVSGSKCEIKVAQPKEVYQQQQYGSGGRGNRNRGNRGSGGGGGGGGQSQSWNQGYGNYWNQGYGYQQGYGPGYGGYDYSPYGYYGYGPGYDYSQGSTNYGKSQRRGGHQNNYKPY

SEQ ID NO: 849483 - protein, 332 aa, Homo sapiens; identical to SEQ ID NO: 849482

SEQ ID NO: 849484 - protein, 332 aa, Homo sapiens; identical to SEQ ID NO: 849482

SEQ ID NO: 849485 - protein, 285 aa, Homo sapiens; identical to SEQ ID NO: 849480

SEQ ID NO: 849486 - protein, 285 aa, Homo sapiens; identical to SEQ ID NO: 849480

SEQ ID NO: 849487 - protein, 312 aa, Homo sapiens
MSEAGEEQPMETTGATENGHEAVPEGESPAGAGTGAAAGAGGATAAPPSGNQNGAEGDQINASKNEEDAGKMFVGGLSWDTSKKDLKDYFTKFGEVVDCTIKMDPNTGRSRGFGFILFKDAASVEKVLDQKEHRLDGRVIDPKKAMAMKKDPVKKIFVGGLNPEATEEKIREYFGEFGEIEAIELPMDPKLNKRRGFVFITFKEEEPVKKVLEKNQQQQYGSGGRGNRNRGNRGSGGGGGGGGQSQSWNQGYGNYWNQGYGYQQGYGPGYGGYDYSPYGYYGYGPGYDYSQGSTNYGKSQRRGGHQNNYKPY

SEQ ID NO: 849488 - protein, 332 aa, Homo sapiens; identical to SEQ ID NO: 849482

SEQ ID NO: 849489 - protein, 332 aa, Homo sapiens; identical to SEQ ID NO: 849482

SEQ ID NO: 849490 - protein, 377 aa, Homo sapiens
FNWPQFCRLYRKHDAGIYSASREASGNLQSWQNVKQEPALHMAGAGEKAGEEQPMETTGATENGHEAVPEGESPAGAGTGAAAGAGGATAAPPSGNQNGAEGDQINASKNEEDAGKMFVGGLSWDTSKKDLKDYFTKFGEVVDCTIKMDPNTGRSRGFGFILFKDAASVEKVLDQKEHRLDGRVIDPKKAMAMKKDPVKKIFVGGLNPEATEEKIREYFGEFGEIEAIELPMDPKLNKRRGFVFITFKEEEPVKKVLEKKFHTVSGSKCEIKVAQPKEVYQQQQYGSGGRGNRNRGNRGSGGGGGGGGQSQSWNQGYGNYWNQGYGYQQGYGPGYGGYDYSPYGYYGYGPGYDYSQGSTNYGKSQRRGGHQNNYKPY

SEQ ID NO: 849491 - protein, 245 aa, Homo sapiens
MSEAGEEQPMETTGATENGHEAVPEGESPAGAGTGAAAGAGGATAAPPSGNQNGAEGDQINASKNEEDAGKMFVGGLSWDTSKKDLKDYFTKFGEVVDCTIKMDPNTGRSRGFGFILFKDAASVEKVLDQKEHRLDGRVIDPKKAMAMKKDPVKKIFVGGLNPEATEEKIREYFGEFGEIEAIELPMDPKLNKRRGFVFITFKEEEPVKKVLEKKFHTVSGSKVRCSQLCLASCAAGELALRGMG

SEQ ID NO: 849492 - protein, 352 aa, Homo sapiens
MSEAGEEQPMETTGATENGHEAVPEGESPAGAGTGAAAGAGGATAAPPSGNQNGAEGDQINASKNEEDAGTQNGAEGDQINASKNEEDAGKMFVGGLSWDTSKKDLKDYFTKFGEVVDCTIKMDPNTGRSRGFGFILFKDAASVEKVLDQKEHRLDGRVIDPKKAMAMKKDPVKKIFVGGLNPEATEEKIREYFGEFGEIEAIELPMDPKLNKRRGFVFITFKEEEPVKKVLEKKFHTVSGSKCEIKVAQPKEVYQQQQYGSGGRGNRNRGNRGSGGGGGGGGQSQSWNQGYGNYWNQGYGYQQGYGPGYGGYDYSPYGYYGYGPGYDYSQGSTNYGKSQRRGGHQNNYKPY

SEQ ID NO: 849493 - protein, 125 aa, Homo sapiens
MQGWAQGPYTPEQQPLGFCLSCHSNPATPKGRISSILAPAYAKWSTGPCALLPPTGQSQSWNQGYGNYWNQGYGYQQGYGPGYGGYDYSPYGYYGYGPGYDYSQGSTNYGKSQRRGGHQNNYKPY

SEQ ID NO: 849494 - protein, 177 aa, Homo sapiens
MSEAGEEQPMETTGATENGHEAVPEGESPAGAGTGAAAGAGGATAAPPSGNQNGAEGDQINASKNEEDAGKMFVGGLSWDTSKKDLKDYFTKFGEVVDCTIKMDPNTGRSRGFGFILFKDAASVEKVLDQKEHRLDGRVIDPKKAMAMKKDPVKKIFVGGLNPEATEEKIRLLGVGG

SEQ ID NO: 849495 - protein, 152 aa, Homo sapiens
MSEAGEEQPMETTGATENGHEAVPEGESPAGAGTGAAAGAGGATAAPPSGNQNGAEGDQINASKNEEDAGKMFVGGLSWDTSKKDLKDYFTKFGEVVDCTIKMDPNTGRSRGFGFILFKDAASVEKVSWVLDFSSLSGNDLNSKRTPFLKHD

SEQ ID NO: 849496 - protein, 200 aa, Homo sapiens
MSEAGEEQPMETTGATENGHEAVPEGESPAGAGTGAAAGAGGATAAPPSGNQNGAEGDQINASKNEEDAGKMFVGGLSWDTSKKDLKDYFTKFGEVVDCTIKMDPNTGRSRGFGFILFKDAASVEKVLDQKEHRLDGRVIDPKKAMAMKKDPVKKIFVGGLNPEATEEKIREYFGEFGELRHECKGKCTQRGGLLKKRKV

SEQ ID NO: 849497 - protein, 285 aa, Homo sapiens; identical to SEQ ID NO: 849480

SEQ ID NO: 849498 - protein, 332 aa, Homo sapiens; identical to SEQ ID NO: 849482

SEQ ID NO: 849499 - protein, 332 aa, Homo sapiens; identical to SEQ ID NO: 849482

SEQ ID NO: 849500 - protein, 332 aa, Homo sapiens; identical to SEQ ID NO: 849482

SEQ ID NO: 849501 - protein, 311 aa, Homo sapiens
MSEAGEEQPMETTGATENGHEAVPEGESPAGAGTGAAAGAGGATAAPPSGNQNGAEGDQINASKNEEDAGKMFVGGLSWDTSKKDLKDYFTKFGEVVDCTIKMDPNTGRSRGFGFILFKDAASVEKVLDQKEHRLDGRVIDPKKAMAMKKDPVKKIFVGGLNPEATEEKIREYFGEFGEIEAIELPMDPKLNKRRGFVFITFKEEEPVKKVLEKKFHTVSGSKCEIKVAQPKEVYQQQQYGSGGRGNRNRGNRGSGGGGGGGGQSQSWNQGYGNYWNQGYGYQQGYGPGYGGYDYSPYGYYGYGPGYDYSK

SEQ ID NO: 849502 - protein, 262 aa, Homo sapiens
MSEAGEEQPMETTGATENGHEAVPEGESPAGAGTGAAAGAGGATAAPPSGNQNGAEGDQINASKNEEDAGKMFVGGLSWDTSKKDLKDYFTKFGEVVDCTIKMDPNTGRSRGFGFILFKDAASVEKVLDQKEHRLDGRVIDPKKAMAMKKDPVKKIFVGGLNPEATEEKIREYFGEFGEIEAIELPMDPKLNKRRGFVFITFKEEEPVKKVLEKKFHTVSGSKCEIKVAQPKEVYQQQQYGSGGRGNRNRGNREPATWWPSE

SEQ ID NO: 849503 - protein, 332 aa, Homo sapiens; identical to SEQ ID NO: 849482

SEQ ID NO: 849504 - protein, 299 aa, Homo sapiens
MSEAGEEQPMETTGATENGHEAVPEGESPAGAGTGAAAGAGGATAAPPSGNQNGAEGDQINASKNEEDAGKMFVGGLSWDTSKKDLKDYFTKFGEVVDCTIKMDPNTGRSRGFGFILFKDAASVEKVLDQKEHRLDGRVIDPKKAMAMKKDPVKKIFVGGLNPEATEEKIREYFGEFGEIEAIELPMDPKLNKRRGFVFITFKEEEPVKKVLEKKFHTVSGSKCEIKVAQPKEVYQQQQYGSGGRGNRNRGNRGSGGGGGGGGEWNVDEDRSCFPAYMEPSKPVLGLPLVLCSRGGQIV

SEQ ID NO: 849505 - protein, 257 aa, Homo sapiens
MSEAGEEQPMETTGATENGHEAVPEGESPAGAGTGAAAGAGGATAAPPSGNQNGAEGDQINASKNEEDAGKMFVGGLSWDTSKKDLKDYFTKFGEVVDCTIKMDPNTGRSRGFGFILFKDAASVEKVLDQKEHRLDGRVIDPKKAMAMKKDPVKKIFVGGLNPEATEEKIREYFGEFGEIEAIELPMDPKLNKRRGFVFITFKEEEPVKKVLEKKFHTVSGSKCEIKVAQPKEVYRWEALLPAAALQPGPVDPGCKE

SEQ ID NO: 849506 - protein, 261 aa, Homo sapiens [sequence omitted]

SEQ ID NO: 849507 - protein, 139 aa, Homo sapiens
RTRGSTHASIFVGGLNPEATEEKIREYFGEFGEIEAIELPMDPKLNKRRGFVFITFKEEEPVKKVLEKKFHTVSGSKCEIKVAQPKEVYQQQQYGSGGRGNRNRGNRGSGGGGGGGGQGSTNYGKSQRRGGHQNNYKPY

SEQ ID NO: 849508 - protein, 104 aa, Homo sapiens
MQGWAQGPYTPEQQPLGFCLSCHSNPATPKGRISSILAPAYAKWSTGPCALLPPTGQSQSWNQGYGNYWNQGYGYQQGYGPGYGGYDYSPYGYYGYGPGYDYSK

SEQ ID NO: 849509 - protein, 141 aa, Homo sapiens
MKRRGFVFITFKEEEPVKKVLEKKFHTVSGSKCEIKVAQPKEVYQQQQYGSGGRGNRNRGNRGSGGGGGGGGQSQSWNQGYGNYWNQGYGYQQGYGPGYGGYDYSPYGYYGYGPGYDYSQGSTNYGKSQRRGGHQNNYKPY

SEQ ID NO: 849510 - protein, 174 aa, Homo sapiens
GRGRTGAPPLFRGRLLLAPRGGGRGGGLARVGAGAARGLSPLRSRAGPGAATRAGVCGSLLGRLWRRPGAARALPGPGPGPEPAQGRADGPEEGKRSDPGPGGVLGRAGGCVGGVGASRGPDLPPPPLPGAESRSEPWAGLVPGNIEFLETSSQELVETLALCYMVVEHMNFQL

SEQ ID NO: 849511 - protein, 298 aa, Homo sapiens
MVRMVPVLLSLLLLLGPAVPQENQDGRYSLTYIYTGLSKHVEDVPAFQALGSLNDLQFFRYNSKDRKSQPMGLWRQVEGMEDWKQDSQLQKAREDIFMETLKDIVEYYNDSNGSHVLQGRFGCEIENNRSSGAFWKYYYDGKDYIEFNKEIPAWVPFDPAAQITKQKWEAEPVYVQRAKAYLEEECPATLRKYLKYSKNILDRQDPPSVVVTSHQAPGEKKKLKCLAYDFYPGKIDVHWTRAGEVQEPELRGDVLHNGNGTYQSWVVVAVPPQDTAPYSCHVQHSSLAQPLVVPWEAS

SEQ ID NO: 849512 - protein, 115 aa, Homo sapiens
EETWAGRSPPQACSVTLYPSTDPPSVVVTSHQAPGEKKKLKCLAYDFYPGKIDVHWTRAGEVQEPELRGDVLHNGNGTYQSWVVVAVPPQDTAPYSCHVQHSSLAQPLVVPWEAS

SEQ ID NO: 849513 - protein, 298 aa, Homo sapiens; identical to SEQ ID NO: 849511

SEQ ID NO: 849514 - protein, 295 aa, Homo sapiens
MVPVLLSLLLLLGPAVPQENQDGRYSLTYIYTGLSKHVEDVPAFQALGSLNDLQFFRYNSKDRKSQPMGLWRQVEGMEDWKQDSQLQKAREDIFMETLKDIVEYYNDSNGSHVLQGRFGCEIENNRSSGAFWKYYYDGKDYIEFNKEIPAWVPFDPAAQITKQKWEAEPVYVQRAKAYLEEECPATLRKYLKYSKNILDRQDPPSVVVTSHQAPGEKKKLKCLAYDFYPGKIDVHWTRAGEVQEPELRGDVLHNGNGTYQSWVVVAVPPQDTAPYSCHVQHSSLAQPLVVPWEAS

SEQ ID NO: 849515 - protein, 295 aa, Homo sapiens; identical to SEQ ID NO: 849514

SEQ ID NO: 849516 - protein, 300 aa, Homo sapiens
MVRMVPVLLSLLLLLGPAVPQENQDGRYSLTYIYTGLSKHVEDVPAFQALGSLNDLQFFRYNSKDRKSQPMGLWRQVEGMEDWKQDSQLQKAREDIFMETLKDIVEYYNDSNGSHVLQGRFGCEIENNRSSGAFWKYYYDGKDYIEFNKEIPAWVPFDPAAQITKQKWEAEPVYVQRAKAYLEEECPATLRKYLKYSKNILDRQDPPSVVVTSHQAPGEKKKLKCLAYDFYPGGRCSSQWKWHLPVLGGGGSAPAGHSPLLLPRAAQQPGPAPRGALGGQLGSKGWRQCGISDPVAALPA

SEQ ID NO: 849517 - protein, 235 aa, Homo sapiens
MVPVLLSLLLLLGPAVPQENQDGRYSLTYIYTGLSKHVEDVPAFQALGSLNDLQFFRYNSKDRKSQPMGLWRQVEGMEDWKQDSQLQKAREDIFMETLKDIVEYYNDSNGSHVLQGRFGCEIENNRSSGAFWKYYYDGKDYIEFNKEIPAWVPFDPAAQITKQKWEAEPVYVQRAKAYLEEECPATLRGDVLHNGNGTYQSWVVVAVPPQDTAPYSCHVQHSSLAQPLVVPWEAS

SEQ ID NO: 849518 - protein, 230 aa, Homo sapiens
MVRMVPVLLSLLLLLGPAVPQENQDGRYSLTYIYTGLSKHVEDVPAFQALGSLNDLQFFRYNSKDRKSQPMGLWRQVEGMEDWKQDSQLQKAREDIFMETLKDIVEYYNDSNGSHVLQGRFGCEIENNRSSGAFWKYYYDGKDYIEFNKEIPAWVPFDPAAQITKQKWEAEPVYVQRAKAYLEEECPATLRKYLKYSKNILDRQGTHCFLLPSTEPRIKDDLRLGAQATS

SEQ ID NO: 849519 - protein, 197 aa, Homo sapiens
MVPVLLSLLLLLGPAVPQENQDGRYSLTYIYTGLSKHVEDVPAFQALGSLNDLQFFRYNSKDRKSQPMGLWRQVEGMEDWKQDSQLQKAREDIFMETLKDIVEYYNDSNGSHVLQGRFGCEIENNRSSGAFWKYYYDGKDYIEFNKEIPAWVPFDPAAQITKQKWEAEPVYVQHGALVSDVNEHRRDMAMARGLEMH

SEQ ID NO: 849520 - protein, 131 aa, Homo sapiens
MVRMVPVLLSLLLLLGPAVPQENQDGRYSLTYIYTGLSKHVEDVPAFQALGSLNDLQFFRYNSKDRKSQPMGLWRQVEGMEDWKQDSQLQKAREDIFMETLKDIVEYYNDSNVPGRSLAQEKQRPVGPRDA

SEQ ID NO: 849521 - protein, 295 aa, Homo sapiens; identical to SEQ ID NO: 849514

SEQ ID NO: 849522 - protein, 295 aa, Homo sapiens
MESKKTLLHRLCYHAIPQENQDGRYSLTYIYTGLSKHVEDVPAFQALGSLNDLQFFRYNSKDRKSQPMGLWRQVEGMEDWKQDSQLQKAREDIFMETLKDIVEYYNDSNGSHVLQGRFGCEIENNRSSGAFWKYYYDGKDYIEFNKEIPAWVPFDPAAQITKQKWEAEPVYVQRAKAYLEEECPATLRKYLKYSKNILDRQDPPSVVVTSHQAPGEKKKLKCLAYDFYPGKIDVHWTRAGEVQEPELRGDVLHNGNGTYQSWVVVAVPPQDTAPYSCHVQHSSLAQPLVVPWEAS

SEQ ID NO: 849523 - protein, 295 aa, Homo sapiens; identical to SEQ ID NO: 849514

SEQ ID NO: 849524 - protein, 295 aa, Homo sapiens; identical to SEQ ID NO: 849514

SEQ ID NO: 849525 - protein, 250 aa, Homo sapiens
  misc_feature (241)..(241): Xaa can be any naturally occurring amino acid
MVPVLLSLLLLLGPAVPQENQDGRYSLTYIYTGLSKHVEDVPAFQALGSLNDLQFFRYNSKDRKSQPMGLWRQVEGMEDWKQDSQLQKAREDIFMETLKDIVEYYNDSNGSHVLQGRFGCEIENNRSSGAFWKYYYDGKDYIEFNKEIPAWVPFDPAAQITKQKWEAEPVYVQRAKAYLEEECPATLRKYLKYSKNILDRQDPPSVVVTSHQAPGEKKKLKCLAYDFYPGMVFTMKWELPXLGCGCNPPA

SEQ ID NO: 849526 - protein, 188 aa, Homo sapiens
MVPVLLSLLLLLGPAVPQENQDGRYSLTYIYTGLSKHVEDVPAFQALGSLNDLQFFRYNSKDRKSQPMGLWRQVEGMEDWKQDSQLQKAREDIFMETLKDIVEYYNDSNGSHVLQGRFGCEIENNRSSGAFWKYYYDGKDYIEFNKEIPAWVPFDPAAQITKQKWEAEPVYVQHSSLAQPLVVPWEAS

SEQ ID NO: 849527 - protein, 155 aa, Homo sapiens
MVPVLLSLLLLLGPAVPQENQDGRYSLTYIYTGLSKHVEDVPAFQALGSLNDLQFFRYNSKDRKSQPMGLWRQVEGMEDWKQDSQLQKAREDIFMETLKDIVEYYNDSNGSHVLQGRFGCEIENNRSSGAFWKYYYSCLMWELNHRNHSQWIHKA

SEQ ID NO: 849528 - protein, 111 aa, Homo sapiens
MVPVLLSLLLLLGPAVPQENQDGRYSLTYIYTGLSKHVEDVPAFQALGSLNDLQFFRYNSKDRKSQPMGLWRQVEGMEDWKQDSQLQKAREDIFMETLKDIVEYYNDSNGQ

SEQ ID NO: 849529 - protein, 136 aa, Homo sapiens
QVAVMTGRDVLPALEGLPVCEDSRAIHGEQKGPLGLSTAGISPCSKHRLGGQAHGTDSGPDTTTSWGSPGQATLLGAVRIKQGRVSWQLGLAASVCIRNGSGCPAAITAAVVRTDILSPWVSFDPRPEPKVPSNLG

SEQ ID NO: 849530 - protein, 828 aa, Homo sapiens
EDPCPSPFVGERLPKPERGKMRVHKINNVNKALDFIASKGVKLVSIGAEEIVDGNAKMTLGMIWTIILRFAIQDISVEETSAKEGLLLWCQRKTAPYKNVNVQNFHISWKDGLAFNALIHRHRPELIEYDKLRKDDPVTNLNNAFEVAEKYLDIPKMLDAEDIVNTARPDEKAIMTYVSSFYHAFSGAQKAETAANRICKVLAVNQENEHLMEDYEKLASDLLEWIRRTIPWLEDRVPQKTIQEMQQKLEDFRDYRRVHKPPKVQEKCQLEINFNTLQTKLRLSNRPAFMPSEGKMVSDINNGWQHLEQAEKGYEEWLLNEIRRLERLDHLAEKFRQKASIHEAWTDGKEAMLKHRDYETATLSDIKALIRKHEAFESDLAAHQDRVEQIAAIAQELNELDYYDSHNVNTRCQKICDQWDALGSLTHSRREALEKTEKQLEAIDQLHLEYAKRAAPFNNWMESAMEDLQDMFIVHTIEEIEGLISAHDQFKSTLPDADREREAILAIHKEAQRIAESNHIKLSGSNPYTTVTPQIINSKWEKVQQLVPKRDHALLEEQSKQQSNEHLRRQFASQANVVGPWIQTKMEEIGRISIEMNGTLEDQLSHLKQYERSIVDYKPNLDLLEQQHQLIQEALIFDNKHTNYTMEHIRVGWEQLLTTIARTINEVENQILTRDAKGISQEQMQEFRASFNHFDKDHGGALGPEEFKACLISLGYDVENDRQGEAEFNRIMSLVDPNHSGLVTFQAFIDFMSRETTDTDTADQVIASFKVLAGDKNFITAEELRRELPPDQAEYCIARMAPYQGPDAVPGALDYKSFSTALYGESDL

SEQ ID NO: 849531 - protein, 828 aa, Homo sapiens; identical to SEQ ID NO: 849530

SEQ ID NO: 849532 - protein, 828 aa, Homo sapiens; identical to SEQ ID NO: 849530

SEQ ID NO: 849533 - protein, 828 aa, Homo sapiens
EDPCPSPFVGERLPKPERGKMRVHKINNVNKALDFIASKGVKLVSIGAEEIVDGNAKMTLGMIWTIILRFAIQDISVEETSAKEGLLLWCQRKTAPYKNVNVQNFHISWKDGLAFNALIHRHRPELIEYDKLRKDDPVTNLNNAFEVAEKYLDIPKMLDAEDIVGTLRPDEKAIMTYVSCFYHAFSGAQKAETAANRICKVLAVNQENEHLMEDYEKLASDLLEWIRRTIPWLEDRVPQKTIQEMQQKLEDFRDYRRVHKPPKVQEKCQLEINFNTLQTKLRLSNRPAFMPSEGKMVSDINNGWQHLEQAEKGYEEWLLNEIRRLERLDHLAEKFRQKASIHEAWTDGKEAMLKHRDYETATLSDIKALIRKHEAFESDLAAHQDRVEQIAAIAQELNELDYYDSHNVNTRCQKICDQWDALGSLTHSRREALEKTEKQLEAIDQLHLEYAKRAAPFNNWMESAMEDLQDMFIVHTIEEIEGLISAHDQFKSTLPDADREREAILAIHKEAQRIAESNHIKLSGSNPYTTVTPQIINSKWEKVQQLVPKRDHALLEEQSKQQSNEHLRRQFASQANVVGPWIQTKMEEIGRISIEMNGTLEDQLSHLKQYERSIVDYKPNLDLLEQQHQLIQEALIFDNKHTNYTMEHIRVGWEQLLTTIARTINEVENQILTRDAKGISQEQMQEFRASFNHFDKDHGGALGPEEFKACLISLGYDVENDRQGEAEFNRIMSLVDPNHSGLVTFQAFIDFMSRETTDTDTADQVIASFKVLAGDKNFITAEELRRELPPDQAEYCIARMAPYQGPDAVPGALDYKSFSTALYGESDL

SEQ ID NO: 849534 - protein, 650 aa, Homo sapiens
MYEARVLIGRGKAETAANRICKVLAVNQENEHLMEDYEKLASDLLEWIRRTIPWLEDRVPQKTIQEMQQKLEDFRDYRRVHKPPKVQEKCQLEINFNTLQTKLRLSNRPAFMPSEGKMVSDINNGWQHLEQAEKGYEEWLLNEIRRLERLDHLAEKFRQKASIHEAWTDGKEAMLKHRDYETATLSDIKALIRKHEAFESDLAAHQDRVEQIAAIAQELNELDYYDSHNVNTRCQKICDQWDALGSLTHSRREALEKTEKQLEAIDQLHLEYAKRAAPFNNWMESAMEDLQDMFIVHTIEEIEGLISAHDQFKSTLPDADREREAILAIHKEAQRIAESNHIKLSGSNPYTTVTPQIINSKWEKVQQLVPKRDHALLEEQSKQQSNEHLRRQFASQANVVGPWIQTKMEEIGRISIEMNGTLEDQLSHLKQYERSIVDYKPNLDLLEQQHQLIQEALIFDNKHTNYTMEHIRVGWEQLLTTIARTINEVENQILTRDAKGISQEQMQEFRASFNHFDKDHGGALGPEEFKACLISLGYDVENDRQGEAEFNRIMSLVDPNHSGLVTFQAFIDFMSRETTDTDTADQVIASFKVLAGDKNFITAEELRRELPPDQAEYCIARMAPYQGPDAVPGALDYKSFSTALYGESDL

SEQ ID NO: 849535 - protein, 828 aa, Homo sapiens; identical to SEQ ID NO: 849530

SEQ ID NO: 849536 - protein, 823 aa, Homo sapiens
EDPCPSPFVGERLPKPERGKMRVHKINNVNKALDFIASKGVKLVSIGAEEIVDGNAKMTLGMIWTIILRFAIQDISVEETSAKEGLLLWCQRKTAPYKNVNVQNFHISWKDGLAFNALIHRHRPELIEYDKLRKDDPVTNLNNAFEVAEKYLDIPKMLDAEDIVNTARPDEKAIMTYVSSFYHAFSGAQKAETAANRICKVLAVNQENEHLMEDYEKLASDLLEWIRRTIPWLEDRVPQKTIQEMQQKLEDFRDYRRVHKPPKVQEKCQLEINFNTLQTKLRLSNRPAFMPSEGKMVSDINNGWQHLEQAEKGYEEWLLNEIRRLERLDHLAEKFRQKASIHEAWTDGKEAMLKHRDYETATLSDIKALIRKHEAFESDLAAHQDRVEQIAAIAQELNELDYYDSHNVNTRCQKICDQWDALGSLTHSRREALEKTEKQLEAIDQLHLEYAKRAAPFNNWMESAMEDLQDMFIVHTIEEIEGLISAHDQFKSTLPDADREREAILAIHKEAQRIAESNHIKLSGSNPYTTVTPQIINSKWEKVQQLVPKRDHALLEEQSKQQSNEHLRRQFASQANVVGPWIQTKMEEIGRISIEMNGTLEDQLSHLKQYERSIVDYKPNLDLLEQQHQLIQEALIFDNKHTNYTMEHIRVGWEQLLTTIARTINEVENQILTRDAKGISQEQMQEFRASFNHFDKKQTGSMDSDDFRALLISTGYSLGEAEFNRIMSLVDPNHSGLVTFQAFIDFMSRETTDTDTADQVIASFKVLAGDKNFITAEELRRELPPDQAEYCIARMAPYQGPDAVPGALDYKSFSTALYGESDL

SEQ ID NO: 849537 - protein, 575 aa, Homo sapiens
EDPCPSPFVGERLPKPERGKMRVHKINNVNKALDFIASKGVKLVSIGAEEIVDGNAKMTLGMIWTIILRFAIQDISVEETSAKEGLLLWCQRKTAPYKNVNVQNFHISWKDGLAFNALIHRHRPELIEYDKLRKDDPVTNLNNAFEVAEKYLDIPKMLDAEDIVNTARPDEKAIMTYVSSFYHAFSGAQKAETAANRICKVLAVNQENEHLMEDYEKLASDLLEWIRRTIPWLEDRVPQKTIQEMQQKLEDFRDYRRVHKPPKVQEKCQLEINFNTLQTKLRLSNRPAFMPSEGKMVSDINNGWQHLEQAEKGYEEWLLNEIRRLERLDHLAEKFRQKASIHEAWTDGKEAMLKHRDYETATLSDIKALIRKHEAFESDLAAHQDRVEQIAAIAQELNELDYYDSHNVNTRCQKICDQWDALGSLTHSRREALEKTEKQLEAIDQLHLEYAKRAAPFNNWMESAMEDLQDMFIVHTIEEIEGLISAHDQFKSTLPDADREREAILAIHKEAQRIAESNHIKLSGSNPYTTVTPQIINSKWEKPTSTCAASSPARPMLWGPGSRPRWRRSGASPLR

SEQ ID NO: 849538 - protein, 772 aa, Homo sapiens
EDPCPSPFVGERLPKPERGKMRVHKINNVNKALDFIASKGVKLVSIGAEEIVDGNAKMTLGMIWTIILRFAIQDISVEETSAKEGLLLWCQRKTAPYKNVNVQNFHISWKDGLAFNALIHRHRPELIEYDKLRKDDPVTNLNNAFEVAEKYLDIPKMLDAEDIVNTARPDEKAIMTYVSSFYHAFSGAQKAETAANRICKVLAVNQENEHLMEDYEKLASDLLEWIRRTIPWLEDRVPQKTIQEMQQKLEDFRDYRRVHKPPKVQEKCQLEINFNTLQTKLRLSNRPAFMPSEGKMVSDINNGWQHLEQAEKGYEEWLLNEIRRLERLDHLAEKFRQKASIHEAWTDGKEAMLKHRDYETATLSDIKALIRKHEAFESDLAAHQDRVEQIAAIAQELNELDYYDSHNVNTRCQKICDQWDALGSLTHSRREALEKTEKQLEAIDQLHLEYAKRAAPFNNWMESAMEDLQDMFIVHTIEEIEGLISAHDQFKSTLPDADREREAILAIHKEAQRIAESNHIKLSGSNPYTTVTPQIINSKWEKVQQLVPKRDHALLEEQSKQQSNEHLRRQFASQANVVGPWIQTKMEEIGRISIEMNGTLEDQLSHLKQYERSIVDYKPNLDLLEQQHQLIQEALIFDNKHTNYTMEHIRVGWEQLLTTIARTINEVENQILTRDAKGISQEQMQEFRASFNHFDKDHGGALGPEEFKACLISLGYDVENDRQGEAEFNRIMSLVDPNHSGLVTFQAFIDFMSRETRPGRVLHRPHGAIPGP

SEQ ID NO: 849539 - protein, 243 aa, Homo sapiens [sequence omitted]

SEQ ID NO: 849540 - protein, 828 aa, Homo sapiens; identical to SEQ ID NO: 849530

SEQ ID NO: 849541 - protein, 828 aa, Homo sapiens; identical to SEQ ID NO: 849530

SEQ ID NO: 849542 - protein, 828 aa, Homo sapiens; identical to SEQ ID NO: 849530

SEQ ID NO: 849543 - protein, 875 aa, Homo sapiens
EDPCPSPFVGERLPKPERGKMRVHKINNVNKALDFIASKGVKLVSIGAEEIVDGNAKMTLGMIWTIILRFAIQDISVEETSAKEGLLLWCQRKTAPYKNVNVQNFHISWKDGLAFNALIHRHRPELIEYDKLRKDDPVTNLNNAFEVAEKYLDIPKMLDAEDIVNTARPDEKAIMTYVSSFYHAFSGAQKAETAANRICKVLAVNQENEHLMEDYEKLASDLLEWIRRTIPWLEDRVPQKTIQEMQQKLEDFRDYRRVHKPPKVQEKCQLEINFNTLQTKLRLSNRPAFMPSEGKMVSDINNGWQHLEQAEKGYEEWLLNEIRRLERLDHLAEKFRQKASIHEAWTDGKEAMLKHRDYETATLSDIKALIRKHEAFESDLAAHQDRVEQIAAIAQELNELDYYDSHNVNTRCQKICDQWDALGSLTHSRREALEKTEKQLEAIDQLHLEYAKRAAPFNNWMESAMEDLQDMFIVHTIEEIEGLISAHDQFKSTLPDADREREAILAIHKEAQRIAESNHIKLSGSNPYTTVTPQIINSKWEKVQQLVPKRDHALLEEQSKQQSNEHLRRQFASQANVVGPWIQTKMEEIGRISIEMNGTLEDQLSHLKQYERSIVDYKPNLDLLEQQHQLIQEALIFDNKHTNYTMEHIRVGWEQLLTTIARTINEVENQILTRDAKGISQEQMQEFRASFNHFDKDHGGALGPEEFKACLISLGYDVENDRQGEAEFNRIMSLVDPNHSGLVTFQAFIDFMSRETTDTDTADQVIASFKVLAGDKNFITAEELRRELPPDQAEYCIARMAPYQGPPHPTSPGLALSGLTCLRFSKNQKKKREKKHKTTKTKKKKNHKNKKTIKKKELKTFRELLFTLLTYGFII

SEQ ID NO: 849544 - protein, 837 aa, Homo sapiens
EDPCPSPFVGERLPKPERGKMRVHKINNVNKALDFIASKGVKLVSIGAEEIVDGNAKMTLGMIWTIILRFAIQDISVEETSAKEGLLLWCQRKTAPYKNVNVQNFHISWKDGLAFNALIHRHRPELIEYDKLRKDDPVTNLNNAFEVAEKYLDIPKMLDAEDIVNTARPDEKAIMTYVSSFYHAFSGAQKAETAANRICKVLAVNQENEHLMEDYEKLASDLLEWIRRTIPWLEDRVPQKTIQEMQQKLEDFRDYRRVHKPPKVQEKCQLEINFNTLQTKLRLSNRPAFMPSEGKMVSDINNGWQHLEQAEKGYEEWLLNEIRRLERLDHLAEKFRQKASIHEAWTDGKEAMLKHRDYETATLSDIKALIRKHEAFESDLAAHQDRVEQIAAIAQELNELDYYDSHNVNTRCQKICDQWDALGSLTHSRREALEKTEKQLEAIDQLHLEYAKRAAPFNNWMESAMEDLQDMFIVHTIEEIEGLISAHDQFKSTLPDADREREAILAIHKEAQRIAESNHIKLSGSNPYTTVTPQIINSKWEKVQQLVPKRDHALLEEQSKQQSNEHLRRQFASQANVVGPWIQTKMEEIGRISIEMNGTLEDQLSHLKQYERSIVDYKPNLDLLEQQHQLIQEALIFDNKHTNYTMEHIRVGWEQLLTTIARTINEVENQILTRDAKGISQEQMQEFRASFNHFDKDHGGALGPEEFKACLISLGYDVENDRQGEAEFNRIMSLVDPNHSGLVTFQAFIDFMSRETTDTDTADQVIASFKVLAGDKNFITAEELRRELPPHPIPPAPALLCLASRVSDFLRTKKKKGKKNTKQQKPKKKKITKTKKL

SEQ ID NO: 849545 - protein, 828 aa, Homo sapiens; identical to SEQ ID NO: 849530

SEQ ID NO: 849546 - protein, 799 aa, Homo sapiens
  misc_feature (779)..(779): Xaa can be any naturally occurring amino acid
EDPCPSPFVGERLPKPERGKMRVHKINNVNKALDFIASKGVKLVSIGAEEIVDGNAKMTLGMIWTIILRFAIQDISVEETSAKEGLLLWCQRKTAPYKNVNVQNFHISWKDGLAFNALIHRHRPELIEYDKLRKDDPVTNLNNAFEVAEKYLDIPKMLDAEDIVNTARPDEKAIMTYVSSFYHAFSGAQKAETAANRICKVLAVNQENEHLMEDYEKLASDLLEWIRRTIPWLEDRVPQKTIQEMQQKLEDFRDYRRVHKPPKVQEKCQLEINFNTLQTKLRLSNRPAFMPSEGKMVSDINNGWQHLEQAEKGYEEWLLNEIRRLERLDHLAEKFRQKASIHEAWTDGKEAMLKHRDYETATLSDIKALIRKHEAFESDLAAHQDRVEQIAAIAQELNELDYYDSHNVNTRCQKICDQWDALGSLTHSRREALEKTEKQLEAIDQLHLEYAKRAAPFNNWMESAMEDLQDMFIVHTIEEIEGLISAHDQFKSTLPDADREREAILAIHKEAQRIAESNHIKLSGSNPYTTVTPQIINSKWEKVQQLVPKRDHALLEEQSKQQSNEHLRRQFASQANVVGPWIQTKMEEIGRISIEMNGTLEDQLSHLKQYERSIVDYKPNLDLLEQQHQLIQEALIFDNKHTNYTMEHIRVGWEQLLTTIARTINEVENQILTRDAKGISQEQMQEFRASFNHFDKDHGGALGPEEFKACLISLGYDVENDRQGEAEFNRIMSLVDPNHSGLVTFQAFIDFMSRETTDTDTADQVIASFKVLAGDKVAXGPGKMDSRGEHRQDRRERPY

SEQ ID NO: 849547 - protein, 775 aa, Homo sapiens
EDPCPSPFVGERLPKPERGKMRVHKINNVNKALDFIASKGVKLVSIGAEEIVDGNAKMTLGMIWTIILRFAIQDISVEETSAKEGLLLWCQRKTAPYKNVNVQNFHISWKDGLAFNALIHRHRPELIEYDKLRKDDPVTNLNNAFEVAEKYLDIPKMLDAEDIVNTARPDEKAIMTYVSSFYHAFSGAQKAETAANRICKVLAVNQENEHLMEDYEKLASDLLEWIRRTIPWLEDRVPQKTIQEMQQKLEDFRDYRRVHKPPKVQEKCQLEINFNTLQTKLRLSNRPAFMPSEGKMVSDINNGWQHLEQAEKGYEEWLLNEIRRLERLDHLAEKFRQKASIHEAWTDGKEAMLKHRDYETATLSDIKALIRKHEAFESDLAAHQDRVEQIAAIAQELNELDYYDSHNVNTRCQKICDQWDALGSLTHSRREALEKTEKQLEAIDQLHLEYAKRAAPFNNWMESAMEDLQDMFIVHTIEEIEGLISAHDQFKSTLPDADREREAILAIHKEAQRIAESNHIKLSGSNPYTTVTPQIINSKWEKVQQLVPKRDHALLEEQSKQQSNEHLRRQFASQANVVGPWIQTKMEEIGRISIEMNGTLEDQLSHLKQYERSIVDYKPNLDLLEQQHQLIQEALIFDNKHTNYTMEHIRVGWEQLLTTIARTINEVENQILTRDAKGISQEQMQEFRASFNHFDKDHGGALGPEEFKACLISLGYDVENDRQGEAEFNRIMSLVDPNHSGLVTFQAFIDFMSRETRPNTPDGLQEGLMAWLPGG

SEQ ID NO: 849548 - protein, 713 aa, Homo sapiens
EDPCPSPFVGERLPKPERGKMRVHKINNVNKALDFIASKGVKLVSIGAEEIVDGNAKMTLGMIWTIILRFAIQDISVEETSAKEGLLLWCQRKTAPYKNVNVQNFHISWKDGLAFNALIHRHRPELIEYDKLRKDDPVTNLNNAFEVAEKYLDIPKMLDAEDIVNTARPDEKAIMTYVSSFYHAFSGAQKAETAANRICKVLAVNQENEHLMEDYEKLASDLLEWIRRTIPWLEDRVPQKTIQEMQQKLEDFRDYRRVHKPPKVQEKCQLEINFNTLQTKLRLSNRPAFMPSEGKMVSDINNGWQHLEQAEKGYEEWLLNEIRRLERLDHLAEKFRQKASIHEAWTDGKEAMLKHRDYETATLSDIKALIRKHEAFESDLAAHQDRVEQIAAIAQELNELDYYDSHNVNTRCQKICDQWDALGSLTHSRREALEKTEKQLEAIDQLHLEYAKRAAPFNNWMESAMEDLQDMFIVHTIEEIEGLISAHDQFKSTLPDADREREAILAIHKEAQRIAESNHIKLSGSNPYTTVTPQIINSKWEKVQQLVPKRDHALLEEQSKQQSNEHLRRQFASQANVVGPWIQTKMEEIGRISIEMNGTLEDQLSHLKQYERSIVDYKPNLDLLEQQHQLIQEALIFDNKHTNYTMEHIRVGWEQLLTTIARTINEVENQILTRDAKGISQEQMQEFRASFNHFDKVSSLPPPRPLPSRRCRT

SEQ ID NO: 849549 - protein, 707 aa, Homo sapiens
EDPCPSPFVGERLPKPERGKMRVHKINNVNKALDFIASKGVKLVSIGAEEIVDGNAKMTLGMIWTIILRFAIQDISVEETSAKEGLLLWCQRKTAPYKNVNVQNFHISWKDGLAFNALIHRHRPELIEYDKLRKDDPVTNLNNAFEVAEKYLDIPKMLDAEDIVNTARPDEKAIMTYVSSFYHAFSGAQKAETAANRICKVLAVNQENEHLMEDYEKLASDLLEWIRRTIPWLEDRVPQKTIQEMQQKLEDFRDYRRVHKPPKVQEKCQLEINFNTLQTKLRLSNRPAFMPSEGKMVSDINNGWQHLEQAEKGYEEWLLNEIRRLERLDHLAEKFRQKASIHEAWTDGKEAMLKHRDYETATLSDIKALIRKHEAFESDLAAHQDRVEQIAAIAQELNELDYYDSHNVNTRCQKICDQWDALGSLTHSRREALEKTEKQLEAIDQLHLEYAKRAAPFNNWMESAMEDLQDMFIVHTIEEIEGLISAHDQFKSTLPDADREREAILAIHKEAQRIAESNHIKLSGSNPYTTVTPQIINSKWEKVQQLVPKRDHALLEEQSKQQSNEHLRRQFASQANVVGPWIQTKMEEIGRISIEMNGTLEDQLSHLKQYERSIVDYKPNLDLLEQQHQLIQEALIFDNKHTNYTMEHIRVGWEQLLTTIARTINEVENQILTRDAKGISQEQMQEFRASFNHFDKMMGLLMALPSM

SEQ ID NO: 849550 - protein, 632 aa, Homo sapiens
EDPCPSPFVGERLPKPERGKMRVHKINNVNKALDFIASKGVKLVSIGAEEIVDGNAKMTLGMIWTIILRFAIQDISVEETSAKEGLLLWCQRKTAPYKNVNVQNFHISWKDGLAFNALIHRHRPELIEYDKLRKDDPVTNLNNAFEVAEKYLDIPKMLDAEDIVNTARPDEKAIMTYVSSFYHAFSGAQKAETAANRICKVLAVNQENEHLMEDYEKLASDLLEWIRRTIPWLEDRVPQKTIQEMQQKLEDFRDYRRVHKPPKVQEKCQLEINFNTLQTKLRLSNRPAFMPSEGKMVSDINNGWQHLEQAEKGYEEWLLNEIRRLERLDHLAEKFRQKASIHEAWTDGKEAMLKHRDYETATLSDIKALIRKHEAFESDLAAHQDRVEQIAAIAQELNELDYYDSHNVNTRCQKICDQWDALGSLTHSRREALEKTEKQLEAIDQLHLEYAKRAAPFNNWMESAMEDLQDMFIVHTIEEIEGLISAHDQFKSTLPDADREREAILAIHKEAQRIAESNHIKLSGSNPYTTVTPQIINSKWEKVQQLVPKRDHALLEEQSKQQSNEHLRRQFASQANVVGPWIQTKMEEIGRISIEMNGTLEDQLSHLKQYEQQCRYEQRCRYEQQCSMNHSA

SEQ ID NO: 849551 - protein, 606 aa, Homo sapiens
EDPCPSPFVGERLPKPERGKMRVHKINNVNKALDFIASKGVKLVSIGAEEIVDGNAKMTLGMIWTIILRFAIQDISVEETSAKEGLLLWCQRKTAPYKNVNVQNFHISWKDGLAFNALIHRHRPELIEYDKLRKDDPVTNLNNAFEVAEKYLDIPKMLDAEDIVNTARPDEKAIMTYVSSFYHAFSGAQKAETAANRICKVLAVNQENEHLMEDYEKLASDLLEWIRRTIPWLEDRVPQKTIQEMQQKLEDFRDYRRVHKPPKVQEKCQLEINFNTLQTKLRLSNRPAFMPSEGKMVSDINNGWQHLEQAEKGYEEWLLNEIRRLERLDHLAEKFRQKASIHEAWTDGKEAMLKHRDYETATLSDIKALIRKHEAFESDLAAHQDRVEQIAAIAQELNELDYYDSHNVNTRCQKICDQWDALGSLTHSRREALEKTEKQLEAIDQLHLEYAKRAAPFNNWMESAMEDLQDMFIVHTIEEIEGLISAHDQFKSTLPDADREREAILAIHKEAQRIAESNHIKLSGSNPYTTVTPQIINSKWEKVQQLVPKRDHALLEEQSKQQSNEHLRRQFASQANVVGPWIQTKMEEIAQSVRGDSSRDDHQPSP

SEQ ID NO: 849552 - protein, 570 aa, Homo sapiens
EDPCPSPFVGERLPKPERGKMRVHKINNVNKALDFIASKGVKLVSIGAEEIVDGNAKMTLGMIWTIILRFAIQDISVEETSAKEGLLLWCQRKTAPYKNVNVQNFHISWKDGLAFNALIHRHRPELIEYDKLRKDDPVTNLNNAFEVAEKYLDIPKMLDAEDIVNTARPDEKAIMTYVSSFYHAFSGAQKAETAANRICKVLAVNQENEHLMEDYEKLASDLLEWIRRTIPWLEDRVPQKTIQEMQQKLEDFRDYRRVHKPPKVQEKCQLEINFNTLQTKLRLSNRPAFMPSEGKMVSDINNGWQHLEQAEKGYEEWLLNEIRRLERLDHLAEKFRQKASIHEAWTDGKEAMLKHRDYETATLSDIKALIRKHEAFESDLAAHQDRVEQIAAIAQELNELDYYDSHNVNTRCQKICDQWDALGSLTHSRREALEKTEKQLEAIDQLHLEYAKRAAPFNNWMESAMEDLQDMFIVHTIEEIEGLISAHDQFKSTLPDADREREAILAIHKEAQRIAESNHIKLSGSNPYTTVTPQIINSKWEKVQQLVPKRDHALLEEQSKQQLMAWLPGG

SEQ ID NO: 849553 - protein, 533 aa, Homo sapiens
EDPCPSPFVGERLPKPERGKMRVHKINNVNKALDFIASKGVKLVSIGAEEIVDGNAKMTLGMIWTIILRFAIQDISVEETSAKEGLLLWCQRKTAPYKNVNVQNFHISWKDGLAFNALIHRHRPELIEYDKLRKDDPVTNLNNAFEVAEKYLDIPKMLDAEDIVNTARPDEKAIMTYVSSFYHAFSGAQKAETAANRICKVLAVNQENEHLMEDYEKLASDLLEWIRRTIPWLEDRVPQKTIQEMQQKLEDFRDYRRVHKPPKVQEKCQLEINFNTLQTKLRLSNRPAFMPSEGKMVSDINNGWQHLEQAEKGYEEWLLNEIRRLERLDHLAEKFRQKASIHEAWTDGKEAMLKHRDYETATLSDIKALIRKHEAFESDLAAHQDRVEQIAAIAQELNELDYYDSHNVNTRCQKICDQWDALGSLTHSRREALEKTEKQLEAIDQLHLEYAKRAAPFNNWMESAMEDLQDMFIVHTIEEIEGLISAHDQFKSTLPDADREREAILAIHKEAQRIAESNHIKLSGSNPFFLSLF

SEQ ID NO: 849554 - protein, 309 aa, Homo sapiens
EDPCPSPFVGERLPKPERGKMRVHKINNVNKALDFIASKGVKLVSIGAEEIVDGNAKMTLGMIWTIILRFAIQDISVEETSAKEGLLLWCQRKTAPYKNVNVQNFHISWKDGLAFNALIHRHRPELIEYDKLRKDDPVTNLNNAFEVAEKYLDIPKMLDAEDIVNTARPDEKAIMTYVSSFYHAFSGAQKAETAANRICKVLAVNQENEHLMEDYEKLASDLLEWIRRTIPWLEDRVPQKTIQEMQQKLEDFRDYRRVHKPPKVQEKCQLEINFNTLQTKLRLSNRPAFMPSEGKMVSDILLAGDTGPL

SEQ ID NO: 849555 - protein, 127 aa, Homo sapiens
EDPCPSPFVGERLPKPERGKMRVHKINNVNKALDFIASKGVKLVSIGAEEIVDGNAKMTLGMIWTIILRFAIQDISVEETSAKEGLLLWCQRKTAPYKNVNVQNFHISWKDGLAFHALDTPTPEWRP

SEQ ID NO: 849556 - protein, 166 aa, Homo sapiens
MAGASVCAAEVILLVPRAPDRYHSERPSPRMFPLVPNDRRTFDHYQILSDSPLAAPADRQLLRTLVLLSSCTEDPLTMEEIGRISIEMNGTLEDQLSHLKQYERSIVDYKPNLDLLEQQHQLIQEALIFDNKHTNYTMEVRGCPARWPFHQHGRLPHWKWFGPVRR

SEQ ID NO: 849557 - protein, 828 aa, Homo sapiens; identical to SEQ ID NO: 849530

SEQ ID NO: 849558 - protein, 854 aa, Homo sapiens
EDPCPSPFVGERLPKPERGKMRVHKINNVNKALDFIASKGVKLVSIGAEEIVDGNAKMTLGMIWTIILRFAIQDISVEETSAKEGLLLWCQRKTAPYKNVNVQNFHISWKDGLAFNALIHRHRPELIEYDKLRKDDPVTNLNNAFEVAEKYLDIPKMLDAEDIVNTARPDEKAIMTYVSSFYHAFSGAQKAETAANRICKVLAVNQENEHLMEDYEKLASDLLEWIRRTIPWLEDRVPQKTIQEMQQKLEDFRDYRRVHKPPKVQEKCQLEINFNTLQTKLRLSNRPAFMPSEGKMVSDINNGWQHLEQAEKGYEEWLLNEIRRLERLDHLAEKFRQKASIHEAWTDGKEAMLKHRDYETATLSDIKALIRKHEAFESDLAAHQDRVEQIAAIAQELNELDYYDSHNVNTRCQKICDQWDALGSLTHSRREALEKTEKQLEAIDQLHLEYAKRAAPFNNWMESAMEDLQDMFIVHTIEEIEVRTPRPPIFPRASVGLGRPLTPAPPQGLISAHDQFKSTLPDADREREAILAIHKEAQRIAESNHIKLSGSNPYTTVTPQIINSKWEKVQQLVPKRDHALLEEQSKQQSNEHLRRQFASQANVVGPWIQTKMEEIGRISIEMNGTLEDQLSHLKQYERSIVDYKPNLDLLEQQHQLIQEALIFDNKHTNYTMEHIRVGWEQLLTTIARTINEVENQILTRDAKGISQEQMQEFRASFNHFDKDHGGALGPEEFKACLISLGYDVENDRQGEAEFNRIMSLVDPNHSGLVTFQAFIDFMSRETTDTDTADQVIASFKVLAGDKNFITAEELRRELPPDQAEYCIARMAPYQGPDAVPGALDYKSFSTALYGESDL

SEQ ID NO: 849559 - protein, 428 aa, Homo sapiens
MRSAGWSGSTTCQKICDQWDALGSLTHSRREALEKTEKQLEAIDQLHLEYAKRAAPFNNWMESAMEDLQDMFIVHTIEEIEGLISAHDQFKSTLPDADREREAILAIHKEAQRIAESNHIKLSGSNPYTTVTPQIINSKWEKVQQLVPKRDHALLEEQSKQQSNEHLRRQFASQANVVGPWIQTKMEEIGRISIEMNGTLEDQLSHLKQYERSIVDYKPNLDLLEQQHQLIQEALIFDNKHTNYTMEHIRVGWEQLLTTIARTINEVENQILTRDAKGISQEQMQEFRASFNHFDKDHGGALGPEEFKACLISLGYDVENDRQGEAEFNRIMSLVDPNHSGLVTFQAFIDFMSRETTDTDTADQVIASFKVLAGDKNFITAEELRRELPPDQAEYCIARMAPYQGPDAVPGALDYKSFSTALYGESDL

SEQ ID NO: 849560 - protein, 828 aa, Homo sapiens; identical to SEQ ID NO: 849530

SEQ ID NO: 849561 - protein, 828 aa, Homo sapiens; identical to SEQ ID NO: 849530

SEQ ID NO: 849562 - protein, 828 aa, Homo sapiens; identical to SEQ ID NO: 849530

SEQ ID NO: 849563 - protein, 828 aa, Homo sapiens; identical to SEQ ID NO: 849530

SEQ ID NO: 849564 - protein, 788 aa, Homo sapiens
EDPCPSPFVGERLPKPERGKMRVHKINNVNKALDFIASKGVKLVSIGAEEIVDGNAKMTLGMIWTIILRFAIQDISVEETSAKEGLLLWCQRKTAPYKNVNVQNFHISWKDGLAFNALIHRHRPELIEYDKLRKDDPVTNLNNAFEVAEKYLDIPKMLDAEDIVNTARPDEKAIMTYVSSFYHAFSGAQKAETAANRICKVLAVNQENEHLMEDYEKLASDLLEWIRRTIPWLEDRVPQKTIQEMQQKLEDFRDYRRVHKPPKVQEKCQLEINFNTLQTKLRLSNRPAFMPSEGKMVSDINNGWQHLEQAEKGYEEWLLNEIRRLERLDHLAEKFRQKASIHEAWTDGKEAMLKHRDYETATLSDIKALIRKHEAFESDLAAHQDRVEQIAAIAQELNELDYYDSHNVNTRCQKICDQWDALGSLTHSRREALEKTEKQLEAIDQLHLEYAKRAAPFNNWMESAMEDLQDMFIVHTIEEIEGLISAHDQFKSTLPDADREREAILAIHKEAQRIAESNHIKLSGSNPYTTVTPQIINSKWEKVQQLVPKRDHALLEEQSKQQSNEHLRRQFASQANVVGPWIQTKMEEIGRISIEMNGTLEDQLSHLKQYERSIVDYKPNLDLLEQQHQLIQEALIFDNKHTNYTMEHIRVGWEQLLTTIARTINEVENQILTRDAKGISQEQMQEFRASFNHFDKDHGGALGPEEFKACLISLGYDVENDRQGEAEFNRIMSLVDPNHSGHPIPPAPALLCLASRVSDFLRTKKKKGKKNTKQQKPKKKKITKTKKL

SEQ ID NO: 849565 - protein, 844 aa, Homo sapiens
EDPCPSPFVGERLPKPERGKMRVHKINNVNKALDFIASKGVKLVSIGAEEIVDGNAKMTLGMIWTIILRFAIQDISVEETSAKEGLLLWCQRKTAPYKNVNVQNFHISWKDGLAFNALIHRHRPELIEYDKLRKDDPVTNLNNAFEVAEKYLDIPKMLDAEDIVNTARPDEKAIMTYVSSFYHAFSGAQKAETAANRICKVLAVNQENEHLMEDYEKLASDLLEWIRRTIPWLEDRVPQKTIQEMQQKLEDFRDYRRVHKPPKVQEKCQLEINFNTLQTKLRLSNRPAFMPSEGKMVSDINNGWQHLEQAEKGYEEWLLNEIRRLERLDHLAEKFRQKASIHEAWTDGKEAMLKHRDYETATLSDIKALIRKHEAFESDLAAHQDRVEQIAAIAQELNELDYYDSHNVNTRCQKICDQWDALGSLTHSRREALEKTEKQLEAIDQLHLEYAKRAAPFNNWMESAMEDLQDMFIVHTIEEIEGLISAHDQFKSTLPDADREREAILAIHKEAQRIAESNHIKLSGSNPYTTVTPQIINSKWEKVQQLVPKRDHALLEEQSKQQSNEHLRRQFASQANVVGPWIQTKMEEIGRISIEMNGTLEDQLSHLKQYERSIVDYKPNLDLLEQQHQLIQEALIFDNKHTNYTMEHIRVGWEQLLTTIARTINEVENQILTRDAKGISQEQMQEFRASFNHFDKDHGGALGPEEFKACLISLGYDVENDRQGEAEFNRIMSLVDPNHSGLVTFQAFIDFMSRETTDTDTADQVIASFKVLAGDKNFITAEELRRELPPDQAEYCIARMAPYQGPDAVPGALDYKSFSTALYGVGLWGPSRGGGGLMAWLPGG

SEQ ID NO: 849566 - protein, 799 aa, Homo sapiens
EDPCPSPFVGERLPKPERGKMRVHKINNVNKALDFIASKGVKLVSIGAEEIVDGNAKMTLGMIWTIILRFAIQDISVEETSAKEGLLLWCQRKTAPYKNVNVQNFHISWKDGLAFNALIHRHRPELIEYDKLRKDDPVTNLNNAFEVAEKYLDIPKMLDAEDIVNTARPDEKAIMTYVSSFYHAFSGAQKAETAANRICKVLAVNQENEHLMEDYEKLASDLLEWIRRTIPWLEDRVPQKTIQEMQQKLEDFRDYRRVHKPPKVQEKCQLEINFNTLQTKLRLSNRPAFMPSEGKMVSDINNGWQHLEQAEKGYEEWLLNEIRRLERLDHLAEKFRQKASIHEAWTDGKEAMLKHRDYETATLSDIKALIRKHEAFESDLAAHQDRVEQIAAIAQELNELDYYDSHNVNTRCQKICDQWDALGSLTHSRREALEKTEKQLEAIDQLHLEYAKRAAPFNNWMESAMEDLQDMFIVHTIEEIEGLISAHDQFKSTLPDADREREAILAIHKEAQRIAESNHIKLSGSNPYTTVTPQIINSKWEKVQQLVPKRDHALLEEQSKQQSNEHLRRQFASQANVVGPWIQTKMEEIGRISIEMNGTLEDQLSHLKQYERSIVDYKPNLDLLEQQHQLIQEALIFDNKHTNYTMEHIRVGWEQLLTTIARTINEVENQILTRDAKGISQEQMQEFRASFNHFDKDHGGALGPEEFKACLISLGYDVENDRQGEAEFNRIMSLVDPNHSGLVTFQAFIDFMSRETTDTDTADQVIASFKVLAGDKNFITAYGAAGEKLWTAGRTPLDV

SEQ ID NO: 849567 - protein, 546 aa, Homo sapiens
EDPCPSPFVGERLPKPERGKMRVHKINNVNKALDFIASKGVKLVSIGAEEIVDGNAKMTLGMIWTIILRFAIQDISVEETSAKEGLLLWCQRKTAPYKNVNVQNFHISWKDGLAFNALIHRHRPELIEYDKLRKDDPVTNLNNAFEVAEKYLDIPKMLDAEDIVNTARPDEKAIMTYVSSFYHAFSGAQKAETAANRICKVLAVNQENEHLMEDYEKLASDLLEWIRRTIPWLEDRVPQKTIQEMQQKLEDFRDYRRVHKPPKVQEKCQLEINFNTLQTKLRLSNRPAFMPSEGKMVSDINNGWQHLEQAEKGYEEWLLNEIRRLERLDHLAEKFRQKASIHEAWTDGKEAMLKHRDYETATLSDIKALIRKHEAFESDLAAHQDRVEQIAAIAQELNELDYYDSHNVNTRCQKICDQWDALGSLTHSRREALEKTEKQLEAIDQLHLEYAKRAAPFNNWMESAMEDLQDMFIVHTIEEIEGLISAHDQFKSTLPDADREREAILAIHKEAQRIAESNHIKLSGSNPTPSHQPRPCFVWPHVSQIF

SEQ ID NO: 849568 - protein, 439 aa, Homo sapiens
EDPCPSPFVGERLPKPERGKMRVHKINNVNKALDFIASKGVKLVSIGAEEIVDGNAKMTLGMIWTIILRFAIQDISVEETSAKEGLLLWCQRKTAPYKNVNVQNFHISWKDGLAFNALIHRHRPELIEYDKLRKDDPVTNLNNAFEVAEKYLDIPKMLDAEDIVNTARPDEKAIMTYVSSFYHAFSGAQKAETAANRICKVLAVNQENEHLMEDYEKLASDLLEWIRRTIPWLEDRVPQKTIQEMQQKLEDFRDYRRVHKPPKVQEKCQLEINFNTLQTKLRLSNRPAFMPSEGKMVSDINNGWQHLEQAEKGYEEWLLNEIRRLERLDHLAEKFRQKASIHEAWTDGKEAMLKHRDYETATLSDIKALIRKHEAFESDLAAHQDRVEQIAAMRGASRGRHQPPDGWGPTQPLSPLCSRLTCHCQEMAPTSTPLLQQRS

SEQ ID NO: 849569 - protein, 591 aa, Homo sapiens
EDPCPSPFVGERLPKPERGKMRVHKINNVNKALDFIASKGVKLVSIGAEEIVDGNAKMTLGMIWTIILRFAIQDISVEETSAKEGLLLWCQRKTAPYKNVNVQNFHISWKDGLAFNALIHRHRPELIEYDKLRKDDPVTNLNNAFEVAEKYLDIPKMLDAEDIVNTARPDEKAIMTYVSSFYHAFSGAQKAETAANRICKVLAVNQENEHLMEDYEKLASDLLEWIRRTIPWLEDRVPQKTIQEMQQKLEDFRDYRRVHKPPKVQEKCQLEINFNTLQTKLRLSNRPAFMPSEGKMVSDINNGWQHLEQAEKGYEEWLLNEIRRLERLDHLAEKFRQKASIHEAWTDGKEAMLKHRDYETATLSDIKALIRKHEAFESDLAAHQDRVEQIAAIAQELNELDYYDSHNVNTRCQKICDQWDALGSLTHSRREALEKTEKQLEAIDQLHLEYAKRAAPFNNWMESAMEDLQDMFIVHTIEEIEGLISAHDQFKSTLPDADREREAILAIHKEAQRIAESNHIKLSGSNPYTTVTPQIINSKWEKVQQLVPKRDHALLEEQSKQQSNEHLRRQFASQANVVGPWIQTKMEVRHG

SEQ ID NO: 849570 - protein, 417 aa, Homo sapiens
EDPCPSPFVGERLPKPERGKMRVHKINNVNKALDFIASKGVKLVSIGAEEIVDGNAKMTLGMIWTIILRFAIQDISVEETSAKEGLLLWCQRKTAPYKNVNVQNFHISWKDGLAFNALIHRHRPELIEYDKLRKDDPVTNLNNAFEVAEKYLDIPKMLDAEDIVNTARPDEKAIMTYVSSFYHAFSGAQKAETAANRICKVLAVNQENEHLMEDYEKLASDLLEWIRRTIPWLEDRVPQKTIQEMQQKLEDFRDYRRVHKPPKVQEKCQLEINFNTLQTKLRLSNRPAFMPSEGKMVSDINNGWQHLEQAEKGYEEWLLNEIRRLERLDHLAEKFRQKASIHEAWTDGKEAMLKHRDYETATLSDIKALIRKHEAFESDLAAHQDRVEQIAAIAQELNTPSHQPRPCFVWPHVSQIF

SEQ ID NO: 849571 - protein, 438 aa, Homo sapiens
EDPCPSPFVGERLPKPERGKMRVHKINNVNKALDFIASKGVKLVSIGAEEIVDGNAKMTLGMIWTIILRFAIQDISVEETSAKEGLLLWCQRKTAPYKNVNVQNFHISWKDGLAFNALIHRHRPELIEYDKLRKDDPVTNLNNAFEVAEKYLDIPKMLDAEDIVNTARPDEKAIMTYVSSFYHAFSGAQKAETAANRICKVLAVNQENEHLMEDYEKLASDLLEWIRRTIPWLEDRVPQKTIQEMQQKLEDFRDYRRVHKPPKVQEKCQLEINFNTLQTKLRLSNRPAFMPSEGKMVSDINNGWQHLEQAEKGYEEWLLNEIRRLERLDHLAEKFRQKASIHEAWTDGKEAMLKHRDYETATLSDIKALIRKHEAFESDLAAHQDRVEQIAAIAQELNELDYYDSHNVNTRCQKICDQWDALGSLTHSRREALEVRRG

SEQ ID NO: 849572 - protein, 117 aa, Homo sapiens
EDPCPSPFVGERLPKPERGKMRVHKINNVNKALDFIASKGVKLVSIGAEEIVDGNAKMTLGMIWTIILRFAIQDISVEETSAKEGLLLWCQRKTAPYKNVNVQNFHIRPRPGHRPCH

SEQ ID NO: 849573 - protein, 306 aa, Homo sapiens
TGTPRRLAAPSLYPAPDPGSERRPRCPGTPLAGRMADPGPDPESESESVFPREVGLFADSYSEKSQFCFCGHVLTITQNFGSRLGVAARVWDAALSLCNYFESQNVDFRGKKVIELGAGTGIVGILAALQGAYGLVRETEDDVIEQELWRGMRGACGHALSMSTMTPWESIKGSSVRGDVTITDLPLALEQIQGNVQANVPAGGQAQVRALSWGIDHHVFPANYDLVLGADIVYLEPTFPLLLGTLQHLCRPHGTIYLASKMRKEHGTESFFQHLLPQHFQLELAQRDEDENVNIYRARHREPRPA

SEQ ID NO: 849574 - protein, 256 aa, Homo sapiens
CRLKKSSRGEDCVPPASRWHHTRLVRSAGEFWPFRRAVGLLPHQCARRRVFIAAREMSLLRSLRVFLVARTGSYPAGSLLRQSPQPRHTFYAGPRLSASASSKELLMKLRRKTGYSFVNCKKALETCGGDLKQAEIWLHKEAQKEGWSKAAKLQGRKTKEGLIGLLQEGNTTVLVEVNCETDFVSRNLKFQLLVQQVALGTMMHCQTLKDQPSAYSKGFLNSSELSGLPAGPDREGSLKDQLALAIVLRTHHICMI

SEQ ID NO: 849575 - protein, 131 aa, Homo sapiens
CRLKKSSRGEDCVPPASRWHHTRLVRSAGEFWPFRRAVGLLPHQCARRRVFIAAREMSLLRSLRVFLVARTGSYPVRSPGAGTDLLSLQLSCAPVPFPSSQPRLTPSHLPRQHCLCPVQPRCTPLCTLSAP

SEQ ID NO: 849576 - protein, 153 aa, Homo sapiens
TGTPRRLAAPSLYPAPDPGSERRPRCPGTPLAGRMADPGPDPESESESVFPREVGLFADSYSEKSQFCFCGHVLTITQNFGSRLGVAARVWDAALSLCNYFESQNVDFRGKKVIELGAGTGIVGILAALQAPQSKPPRSLAWTTTTATLVFLL

SEQ ID NO: 849577 - protein, 381 aa, Homo sapiens
CRLKKSSRGEDCVPPASRWHHTRLVRSAGEFWPFRRAVGLLPHQCARRRVFIAAREMSLLRSLRVFLVARTGSYPAGSLLRQSPQPRHTFYAGPRLSASASSKELLMKLRRKTGYSFVNCKKALETCGGDLKQAEIWLHKEAQKEGWSKAAKLQGRKTKEGLIGLLQEGNTTVLVEVNCETDFVSRNLKFQLLVQQVALGTMMHCQTLKDQPSAYSKGFLNSSELSGLPAGPDREGSLKDQLALAIGKLGENMILKRAAWVKVPSGFYVGSYVHGAMQSPSLHKLVLGKYGALVICETSEQKTNLEDVGRRLGQHVVGMAPLSVGSLDDEPGGEAETKMLSQPYLLDPSITLGQYVQPQGVSVVDFVRFECGEGEEAAETE

SEQ ID NO: 849578 - protein, 381 aa, Homo sapiens; identical to SEQ ID NO: 849577

SEQ ID NO: 849579 - protein, 381 aa, Homo sapiens; identical to SEQ ID NO: 849577

SEQ ID NO: 849580 - protein, 275 aa, Homo sapiens
MKLRRKTGYSFVNCKKALETCGGDLKQAEIWLHKEAQKEGWSKAAKLQGRKTKEGLIGLLQEGNTTVLVEVNCETDFVSRNLKFQLLVQQVALGTMMHCQTLKDQPSAYSKGFLNSSELSGLPAGPDREGSLKDQLALAIGKLGENMILKRAAWVKVPSGFYVGSYVHGAMQSPSLHKLVLGKYGALVICETSEQKTNLEDVGRRLGQHVVGMAPLSVGSLDDEPGGEAETKMLSQPYLLDPSITLGQYVQPQGVSVVDFVRFECGEGEEAAETE

SEQ ID NO: 849581 - protein, 285 aa, Homo sapiens
MVYCTTTWAIWNCQLLLGYKPLQNVTGLNTVGSCNTVAEIWLHKEAQKEGWSKAAKLQGRKTKEGLIGLLQEGNTTVLVEVNCETDFVSRNLKFQLLVQQVALGTMMHCQTLKDQPSAYSKGFLNSSELSGLPAGPDREGSLKDQLALAIGKLGENMILKRAAWVKVPSGFYVGSYVHGAMQSPSLHKLVLGKYGALVICETSEQKTNLEDVGRRLGQHVVGMAPLSVGSLDDEPGGEAETKMLSQPYLLDPSITLGQYVQPQGVSVVDFVRFECGEGEEAAETE

SEQ ID NO: 849582 - protein, 260 aa, Homo sapiens
TGTPRRLAAPSLYPAPDPGSERRPRCPGTPLAGRMADPGPDPESESESVFPREVGLFADSYSEKSQFCFCGHVLTITQNFGSRLGVAARVWDAALSLCNYFESQNVDFRGKKVIELGAGTGIVGILAALQGGDVTITDLPLALEQIQGNVQANVPAGGQAQVRALSWGIDHHVFPANYDLVLGADIVYLEPTFPLLLGTLQHLCRPHGTIYLASKMRKEHGTESFFQHLLPQHFQLELAQRDEDENVNIYRARHREPRPA

SEQ ID NO: 849583 - protein, 260 aa, Homo sapiens; identical to SEQ ID NO: 849582

SEQ ID NO: 849584 - protein, 116 aa, Homo sapiens
TGTPRRLAAPSLYPAPDPGSERRPRCPGTPLAGRMADPGPDPESESESVFPREVGLFADSYSEKSQFCFCGHVLTITQNFGSRLGVAARVWDAALSLCNYFESQNVDFRGKKELMV

SEQ ID NO: 849585 - protein, 185 aa, Homo sapiens
CRLKKSSRGEDCVPPASRWHHTRLVRSAGEFWPFRRAVGLLPHQCARRRVFIAAREMSLLRSLRVFLVARTGSYPAGSLLRQSPQPRHTFYAGPRLSASASSKELLMKLRRKTGYSFVNCKKALETCGGDLKQAEIWLHKEAQKEGWSKAAKLQGRKTKEGLIGLLQEGNTTVLVEPPLCWLPGR

SEQ ID NO: 849586 - protein, 81 aa, Homo sapiens
ILWVIVALILSEWSEELWYSSDQSISSGFTGLLERRHKKHEKALSLCNYFESQNVDFRGKKVIELGAGTGIVGILAALQGA

SEQ ID NO: 849587 - protein, 381 aa, Homo sapiens; identical to SEQ ID NO: 849577

SEQ ID NO: 849588 - protein, 381 aa, Homo sapiens; identical to SEQ ID NO: 849577

SEQ ID NO: 849589 - protein, 275 aa, Homo sapiens; identical to SEQ ID NO: 849580

SEQ ID NO: 849590 - protein, 402 aa, Homo sapiens
CRLKKSSRGEDCVPPASRWHHTRLVRSAGEFWPFRRAVGLLPHQCARRRVFIAAREMSLLRSLRVFLVARTGSYPAGSLLRQSPQPRHTFYAGPRLSASASSKELLMKLRRKTGYSFVNCKKALETCGGDLKQAEIWLHKEAQKEGWSKAAKLQGRKTKEGLIGLLQEGNTTVLVEVNCETDFVSRNLKFQLLVQQVALGTMMHCQTLKDQPSAYSKVQWLTPVNLALWEAEAGGSLEGFLNSSELSGLPAGPDREGSLKDQLALAIGKLGENMILKRAAWVKVPSGFYVGSYVHGAMQSPSLHKLVLGKYGALVICETSEQKTNLEDVGRRLGQHVVGMAPLSVGSLDDEPGGEAETKMLSQPYLLDPSITLGQYVQPQGVSVVDFVRFECGEGEEAAETE

SEQ ID NO: 849591 - protein, 152 aa, Homo sapiens
HLQLPLFISKESGSHMQITKRVSLCCFLLCFLVSPPGAAQGPQELSLVPNSHEAKLVLGKYGALVICETSEQKTNLEDVGRRLGQHVVGMAPLSVGSLDDEPGGEAETKMLSQPYLLDPSITLGQYVQPQGVSVVDFVRFECGEGEEAAETE

SEQ ID NO: 849592 - protein, 95 aa, Homo sapiens
GRRKGLGGRTESFTPGGVGAATGPRRERGEKAAAPCSPSSRPNPPSGPTSCHRPRLTIRSIRNRKCWDYRREPLRLATFLKLAFKFKICAKKRCY

SEQ ID NO: 849593 - protein, 777 aa, Homo sapiens
MFSLKPPKPTFRSYLLPPPQTDDKINSEPKIKKLEPVLLPGEIVVNEVNFVRKCIATDTSQYDLWGKLICSNFKISFITDDPMPLQKFHYRNLLLGEHDVPLTCIEQIVTVNDHKRKQKVLGPNQKLKFNPTELIIYCKDFRIVRFRFDESGPESAKKVCLAIAHYSQPTDLQLLFAFEYVGKKYHNSANKINGIPSGDGGGGGGGGNGAGGGSSQKTPLFETYSDWDREIKRTGASGWRVCSINEGYMISTCLPEYIVVPSSLADQDLKIFSHSFVGRRMPLWCWSHSNGSALVRMALIKDVLQQRKIDQRICNAITKSHPQRSDVYKSDLDKTLPNIQEVQAAFVKLKQLCVNEPFEETEEKWLSSLENTRWLEYVRAFLKHSAELVYMLESKHLSVVLQEEEGRDLSCCVASLVQVMLDPYFRTITGFQSLIQKEWVMAGYQFLDRCNHLKRSEKESPLFLLFLDATWQLLEQYPAAFEFSETYLAVLYDSTRISLFGTFLFNSPHQRVKQSTEFAISKNIQLGDEKGLKFPSVWDWSLQFTAKDRTLFHNPFYIGKSTPCIQNGSVKSFKRTKKSYSSTLRGMPSALKNGIISDQELLPRRNSLILKPKPDPAQQTDSQNSDTEQYFREWFSKPANLHGVILPRVSGTHIKLWKLCYFRWVPEAQISLGGSITAFHKLSLLADEVDVLSRMLRQQRSGPLEACYGELGQSRMYFNASGPHHTDTSGTPEFLSSSFPFSPVGNLCRRSILGTPLSKFLSGAKIWLSTETLANED

SEQ ID NO: 849594 - protein, 791 aa, Homo sapiens
AAERAWAAALRALRPEASALPLARDGNGAKRRRHHVLPQAAQTHLQVLPPATAPGEIVVNEVNFVRKCIATDTSQYDLWGKLICSNFKISFITDDPMPLQKFHYRNLLLGEHDVPLTCIEQIVTVNDHKRKQKVLGPNQKLKFNPTELIIYCKDFRIVRFRFDESGPESAKKVCLAIAHYSQPTDLQLLFAFEYVGKKYHNSANKINGIPSGDGGGGGGGGNGAGGGSSQKTPLFETYSDWDREIKRTGASGWRVCSINEGYMISTCLPEYIVVPSSLADQDLKIFSHSFVGRRMPLWCWSHSNGSALVRMALIKDVLQQRKIDQRICNAITKSHPQRSDVYKSDLDKTLPNIQEVQAAFVKLKQLCVNEPFEETEEKWLSSLENTRWLEYVRAFLKHSAELVYMLESKHLSVVLQEEEGRDLSCCVASLVQVMLDPYFRTITGFQSLIQKEWVMAGYQFLDRCNHLKRSEKESPLFLLFLDATWQLLEQYPAAFEFSETYLAVLYDSTRISLFGTFLFNSPHQRVKQSTEFAISKNIQLGDEKGLKFPSVWDWSLQFTAKDRTLFHNPFYIGKSTPCIQNGSVKSFKRTKKSYSSTLRGMPSALKNGIISDQELLPRRNSLILKPKPDPAQQTDSQNSDTEQYFREWFSKPANLHGVILPRVSGTHIKLWKLCYFRWVPEAQISLGGSITAFHKLSLLADEVDVLSRMLRQQRSGPLEACYGELGQSRMYFNASGPHHTDTSGTPEFLSSSFPFSPVGNLCRRSILGTPLSKFLSGAKIWLSTETLANED

SEQ ID NO: 849595 - protein, 630 aa, Homo sapiens
VCVTSRYSRRNSRPSHPKLKQRQLQQLQLQQLNMLGKNTTIPNKINGIPSGDGGGGGGGGNGAGGGSSQKTPLFETYSDWDREIKRTGASGWRVCSINEGYMISTCLPEYIVVPSSLADQDLKIFSHSFVGRRMPLWCWSHSNGSALVRMALIKDVLQQRKIDQRICNAITKSHPQRSDVYKSDLDKTLPNIQEVQAAFVKLKQLCVNEPFEETEEKWLSSLENTRWLEYVRAFLKHSAELVYMLESKHLSVVLQEEEGRDLSCCVASLVQVMLDPYFRTITGFQSLIQKEWVMAGYQFLDRCNHLKRSEKESPLFLLFLDATWQLLEQYPAAFEFSETYLAVLYDSTRISLFGTFLFNSPHQRVKQSTEFAISKNIQLGDEKGLKFPSVWDWSLQFTAKDRTLFHNPFYIGKSTPCIQNGSVKSFKRTKKSYSSTLRGMPSALKNGIISDQELLPRRNSLILKPKPDPAQQTDSQNSDTEQYFREWFSKPANLHGVILPRVSGTHIKLWKLCYFRWVPEAQISLGGSITAFHKLSLLADEVDVLSRMLRQQRSGPLEACYGELGQSRMYFNASGPHHTDTSGTPEFLSSSFPFSPVGNLCRRSILGTPLSKFLSGAKIWLSTETLANED

SEQ ID NO: 849596 - protein, 706 aa, Homo sapiens
MFSLKPPKPTFRSYLLPPPQTDDKINSEPKIKKLEPVLLPGEIVVNEVNFVRKCIATDTSQYDLWGKLICSNFKISFITDDPMPLQKFHYRNLLLGEHDVPLTCIEQIVTVNDHKRKQKVLGPNQKLKFNPTELIIYCKDFRIVRFRFDESGPESAKKVCLAIAHYSQPTDLQLLFAFEYVGKKYHNSANKINGIPSGDGGGGGGGGNGAGGGSSQKTPLFETYSDWDREIKRTGASGWRVCSINEGYMISTCLPEYIVVPSSLADQDLKIFSHSFVGRRMPLWCWSHSNGSALVRMALIKDVLQQRKIDQRICNAITKSHPQRSDVYKSDLDKTLPNIQEVQAAFVKLKQLCVNEPFEETEEKWLSSLENTRWLEYVRAFLKHSAELVYMLESKHLSVVLQEEEGRDLSCCVASLVQVMLDPYFRTITGFQSLIQKEWVMAGYQFLDRCNHLKRSEKESPLFLLFLDATWQLLEQYPAAFEFSETYLAVLYDSTRISLFGTFLFNSPHQRVKQSTEFAISKNIQLGDEKGLKFPSVWDWSLQFTAKDRTLFHNPFYIGKSTPCIQNGSVKSFKRTKKSYSSTLRGMPSALKNGIISDQELLPRRNSLILKPKPDPALQELLFLCLYIFIFPFWKWSLTLSPRLVCSGAISAHCNLYLPGSGNSPDSASQVAGITGTCHHTRLIFVFLVETGFYHIGQAGLELLIL

SEQ ID NO: 849597 - protein, 667 aa, Homo sapiens
MFSLKPPKPTFRSYLLPPPQTDDKINSEPKIKKLEPVLLPGEIVVNEVNFVRKCIATDTSQYDLWGKLICSNFKISFITDDPMPLQKFHYRNLLLGEHDVPLTCIEQIVTVNDHKRKQKVLGPNQKLKFNPTELIIYCKDFRIVRFRFDESGPESAKKVCLAIAHYSQPTDLQLLFAFEYVGKKYHNSANKINGIPSGDGGGGGGGGNGAGGGSSQKTPLFETYSDWDREIKRTGASGWRVCSINEGYMISTCLPEYIVVPSSLADQDLKIFSHSFVGRRMPLWCWSHSNGSALVRMALIKDVLQQRKIDQRICNAITKSHPQRSDVYKSDLDKTLPNIQEVQAAFVKLKQLCVNEPFEETEEKWLSSLENTRWLEYVRAFLKHSAELVYMLESKHLSVVLQEEEGRDLSCCVASLVQVMLDPYFRTITGFQSLIQKEWVMAGYQFLDRCNHLKRSEKESPLFLLFLDATWQLLEQYPAAFEFSETYLAVLYDSTRISLFGTFLFNSPHQRVKQSTEFAISKNIQLGDEKGLKFPSVWDWSLQFTAKDRTLFHNPFYIGKSTPCIQNGSVKSFKRTKVNHYLSLLKRREAIPADKGSHSAFLLMPRGCHPGPQALLGGIMNQLQPGLKGWASACEEAVCAQVQGECLCHRESKLSYCACREPCSPED

SEQ ID NO: 849598 - protein, 451 aa, Homo sapiens
MPLQKFHYRNLLLGEHDVPLTCIEQIVTVNDHKRKQKVLGPNQKLKFNPTELIIYCKDFRIVRFRFDESGPESAKKVCLAIAHYSQPTDLQLLFAFEYVGKKYHNSANKINGIPSGDGGGGGGGGNGAGGGSSQKTPLFETYSDWDREIKRTGASGWRVCSINEGYMISTCLPEYIVVPSSLADQDLKIFSHSFVGRRMPLWCWSHSNGSALVRMALIKDVLQQRKIDQRICNAITKSHPQRSDVYKSDLDKTLPNIQEVQAAFVKLKQLCVNEPFEETEEKWLSSLENTRWLEYVRAFLKHSAELVYMLESKHLSVVLQEEEGRDLSCCVASLVQVMLDPYFRTITGFQSLIQKEWVMAGYQFLDRCNHLKRSEKESPLFLLFLDATWQLLEQYPAAFEFSETYLAVLYDSTRISLFGTFLFNSPHQRVKQSTVSRIKSCTKQDYFPSRV

SEQ ID NO: 849599 - protein, 777 aa, Homo sapiens; identical to SEQ ID NO: 849593

SEQ ID NO: 849600 - protein, 777 aa, Homo sapiens; identical to SEQ ID NO: 849593

SEQ ID NO: 849601 - protein, 736 aa, Homo sapiens
GRRKGLGGRTESFTPGGVGAATGPRRERGEKAAAPCSPSSRPNPPSGPTSCHRPRLTIRSIRNRRLKNWSQSFCQKFHYRNLLLGEHDVPLTCIEQIVTVNDHKRKQKVLGPNQKLKFNPTELIIYCKDFRIVRFRFDESGPESAKKANKINGIPSGDGGGGGGGGNGAGGGSSQKTPLFETYSDWDREIKRTGASGWRVCSINEGYMISTCLPEYIVVPSSLADQDLKIFSHSFVGRRMPLWCWSHSNGSALVRMALIKDVLQQRKIDQRICNAITKSHPQRSDVYKSDLDKTLPNIQEVQAAFVKLKQLCVNEPFEETEEKWLSSLENTRWLEYVRAFLKHSAELVYMLESKHLSVVLQEEEGRDLSCCVASLVQVMLDPYFRTITGFQSLIQKEWVMAGYQFLDRCNHLKRSEKESPLFLLFLDATWQLLEQYPAAFEFSETYLAVLYDSTRISLFGTFLFNSPHQRVKQSTEFAISKNIQLGDEKGLKFPSVWDWSLQFTAKDRTLFHNPFYIGKSTPCIQNGSVKSFKRTKKSYSSTLRGMPSALKNGIISDQELLPRRNSLILKPKPDPAQQTDSQNSDTEQYFREWFSKPANLHGVILPRVSGTHIKLWKLCYFRWVPEAQISLGGSITAFHKLSLLADEVDVLSRMLRQQRSGPLEACYGELGQSRMYFNASGPHHTDTSGTPEFLSSSFPFSPVGNLCRRSILGTPLSKFLSGAKIWLSTETLANED

SEQ ID NO: 849602 - protein, 581 aa, Homo sapiens [sequence omitted]

SEQ ID NO: 849603 - protein, 86 aa, Homo sapiens
VMKRPVDREPSPLCQHFWRPLLPRPLPFPSLHLLARSGREELTAIRRGLGTLLQQPCKMPAVITILKNEKLRFNGGIDQPKVMELD

SEQ ID NO: 849604 - protein, 1198 aa, Homo sapiens
MDEETRHSLECIQANQIFPRKQLIREDENLQVPFLELHGESTEFVGRAEDAIIALSNYRLHIKFKESLVNVPLQLIESVECRDIFQLHLTCKDCKVIRCQFSTFEQCQEWLKRLNNAIRPPAKIEDLFSFAYHAWCMEVYASEKEQHGDLCRPGEHVTSRFKNEVERMGFDMNNAWRISNINEKYKLCGSYPQELIVPAWITDKELESVSSFRSWKRIPAVIYRHQSNGAVIARCGQPEVSWWGWRNADDEHLVQSVAKACASDSRSSGSKLSTRNTSRDFPNGGDLSDVEFDSSLSNASGAESLAIQPQKLLILDARSYAAAVANRAKGGGCECPEYYPNCEVVFMGMANIHSIRRSFQSLRLLCTQMPDPGNWLSALESTKWLHHLSVLLKSALLVVHAVDQDQRPVLVHCSDGWDRTPQIVALAKLLLDPYYRTIEGFQVLVEMEWLDFGHKFADRCGHGENSDDLNERCPVFLQWLDCVHQLQRQFPCSFEFNEAFLVKLVQHTYSCLFGTFLCNNAKERGEKHTQERTCSVWSLLRAGNKAFKNLLYSSQSEAVLYPVCHVRNLMLWSAVYLPCPSPTTPVDDSCAPYPAPGTSPDDPPLSRLPKTRSYDNLTTACDNTVPLASRRCSDPSLNEKWQEHRRSLELSSLAGPGEDPLSADSLGKPTRVPGGAELSVAAGVAEGQMENILQEATKEESGVEEPAHRAGIEIQEGKEDPLLEKESRRKTPEASAIGLHQDPELGDAALRSHLDMSWPLFSQGISEQQSGLSVLLSSLQVPPRGEDSLEVPVEQFRIEEIAEGREEAVLPIPVDAKVGYGTSQSCSLLPSQVPFETRGPNVDSSTDMLVEDKVKSVSGPQGHHRSCLVNSGKDRLPQTMEPSPSETSLVERPQVGSVVHRTSLGSTLSLTRSPCALPLAECKEGLVCNGAPETENRASEQPPGLSTLQMYPTPNGHCANGEAGRSKDSLSRQLSAMSCSSAHLHSRNLHHKWLHSHSGRPSATSSPDQPSRSHLDDDGMSVYTDTIQQRLRQIESGHQQEVETLKKQVQELKSRLESQYLTSSLHFNGDFGDEVTSIPDSESNLDQNCLSRCSTEIFSEASWEQVDKQDTEMTRWLPDHLAAHCYACDSAFWLASRKHHCRNCGNVFCSSCCNQKVPVPSQQLFEPSRVCKSCYSSLHPTSSSIDLELDKPIAATSN

SEQ ID NO: 849605 - protein, 1230 aa, Homo sapiens
CGCEKAAAAAEEQPDETSQRLRRCPAPALAGSLVGWRRGRLCRGGPRHVLLPDFLVKPPSRKSSWDKLHLDEETRHSLECIQANQIFPRKQLIREDENLQVPFLELHGESTEFVGRAEDAIIALSNYRLHIKFKESLVNVPLQLIESVECRDIFQLHLTCKDCKVIRCQFSTFEQCQEWLKRLNNAIRPPAKIEDLFSFAYHAWCMEVYASEKEQHGDLCRPGEHVTSRFKNEVERMGFDMNNAWRISNINEKYKLCGSYPQELIVPAWITDKELESVSSFRSWKRIPAVIYRHQSNGAVIARCGQPEVSWWGWRNADDEHLVQSVAKACASDSRSSGSKLSTRNTSRDFPNGGDLSDVEFDSSLSNASGAESLAIQPQKLLILDARSYAAAVANRAKGGGCECPEYYPNCEVVFMGMANIHSIRRSFQSLRLLCTQMPDPGNWLSALESTKWLHHLSVLLKSALLVVHAVDQDQRPVLVHCSDGWDRTPQIVALAKLLLDPYYRTIEGFQVLVEMEWLDFGHKFADRCGHGENSDDLNERCPVFLQWLDCVHQLQRQFPCSFEFNEAFLVKLVQHTYSCLFGTFLCNNAKERGEKHTQERTCSVWSLLRAGNKAFKNLLYSSQSEAVLYPVCHVRNLMLWSAVYLPCPSPTTPVDDSCAPYPAPGTSPDDPPLSRLPKTRSYDNLTTACDNTVPLASRRCSDPSLNEKWQEHRRSLELSSLAGPGEDPLSADSLGKPTRVPGGAELSVAAGVAEGQMENILQEATKEESGVEEPAHRAGIEIQEGKEDPLLEKESRRKTPEASAIGLHQDPELGDAALRSHLDMSWPLFSQGISEQQSGLSVLLSSLQVPPRGEDSLEVPVEQFRIEEIAEGREEAVLPIPVDAKVGYGTSQSCSLLPSQVPFETRGPNVDSSTDMLVEDKVKSVSGPQGHHRSCLVNSGKDRLPQTMEPSPSETSLVERPQVGSVVHRTSLGSTLSLTRSPCALPLAECKEGLVCNGAPETENRASEQPPGLSTLQMYPTPNGHCANGEAGRSKDSLSRQLSAMSCSSAHLHSRNLHHKWLHSHSGRPSATSSPDQPSRSHLDDDGMSVYTDTIQQRLRQIESGHQQEVETLKKQVQELKSRLESQYLTSSLHFNGDFGDEVMTRWLPDHLAAHCYACDSAFWLASRKHHCRNCGNVFCSSCCNQKVPVPSQQLFEPSRVCKSCYSSLHPTSSSIDLELDKPIAATSN

SEQ ID NO: 849606 - protein, 629 aa, Homo sapiens [sequence omitted]

SEQ ID NO: 849607 - protein, 442 aa, Homo sapiens
MEVYASEKEQHGDLCRPGEHVTSRFKNEVERMGFDMNNAWRISNINEKYKLCGSYPQELIVPAWITDKELESVSSFRSWKRIPAVIYRHQSNGAVIARCGQPEVSWWGWRNADDEHLVQSVAKACASDSRSSGSKLSTRNTSRDFPNGGDLSDVEFDSSLSNASGAESLAIQPQKLLILDARSYAAAVANRAKGGGCECPEYYPNCEVVFMGMANIHSIRRSFQSLRLLCTQMPDPGNWLSALESTKWLHHLSVLLKSALLVVHAVDQDQRPVLVHCSDGWDRTPQIVALAKLLLDPYYRTIEGFQVLVEMEWLDFGHKFADRCGHGENSDDLNERCPVFLQWLDCVHQLQRQFPCSFEFNEAFLVKLVQHTYSCLFGTFLCNNAKERGEKHTQERTCSVWSLLRAGNKAFKNLLYSSQSEAVCILQPFHCGQQKEFGVGYI

SEQ ID NO: 849608 - protein, 1198 aa, Homo sapiens; identical to SEQ ID NO: 849604

SEQ ID NO: 849609 - protein, 160 aa, Homo sapiens
MEVYASEKEQHGDLCRPGEHVTSRFKNEVERMGFDMNNAWRISNINEKYKLCGSYPQELIVPAWITDKELESVSSFRSWKRIPAVIYRHQSNGAVIARCGQPEVSWWGWRNADDEHLVQSVAKACASDSRSSGSKLSTRNTSRDFPNGGDLSDVEFDSSL

SEQ ID NO: 849610 - protein, 1025 aa, Homo sapiens
MEVYASEKEQHGDLCRPGEHVTSRFKNEVERMGFDMNNAWRISNINEKYKLCGSYPQELIVPAWITDKELESVSSFRSWKRIPAVIYRHQSNGAVIARCGQPEVSWWGWRNADDEHLVQSVAKACASDSRSSGSKLSTRNTSRDFPNGGDLSDVEFDSSLSNASGAESLAIQPQKLLILDARSYAAAVANRAKGGGCECPEYYPNCEVVFMGMANIHSIRRSFQSLRLLCTQMPDPGNWLSALESTKWLHHLSVLLKSALLVVHAVDQDQRPVLVHCSDGWDRTPQIVALAKLLLDPYYRTIEGFQVLVEMEWLDFGHKFADRCGHGENSDDLNERCPVFLQWLDCVHQLQRQFPCSFEFNEAFLVKLVQHTYSCLFGTFLCNNAKERGEKHTQERTCSVWSLLRAGNKAFKNLLYSSQSEAVLYPVCHVRNLMLWSAVYLPCPSPTTPVDDSCAPYPAPGTSPDDPPLSRLPKTRSYDNLTTACDNTVPLASRRCSDPSLNEKWQEHRRSLELSSLAGPGEDPLSADSLGKPTRVPGGAELSVAAGVAEGQMENILQEATKEESGVEEPAHRAGIEIQEGKEDPLLEKESRRKTPEASAIGLHQDPELGDAALRSHLDMSWPLFSQGISEQQSGLSVLLSSLQVPPRGEDSLEVPVEQFRIEEIAEGREEAVLPIPVDAKVGYGTSQSCSLLPSQVPFETRGPNVDSSTDMLVEDKVKSVSGPQGHHRSCLVNSGKDRLPQTMEPSPSETSLVERPQVGSVVHRTSLGSTLSLTRSPCALPLAECKEGLVCNGAPETENRASEQPPGLSTLQMYPTPNGHCANGEAGRSKDSLSRQLSAMSCSSAHLHSRNLHHKWLHSHSGRPSATSSPDQPSRSHLDDDGMSVYTDTIQQRLRQIESGHQQEVETLKKQVQELKSRLESQYLTSSLHFNGDFGDEVMTRWLPDHLAAHCYACDSAFWLASRKHHCRNCGNVFCSSCCNQKVPVPSQQLFEPSRVCKSCYSSLHPTSSSIDLELDKPIAATSN

SEQ ID NO: 849611 - protein, 1034 aa, Homo sapiens
MEVYASEKEQHGDLCRPGEHVTSRFKNEVERMGFDMNNAWRISNINEKYKLCGSYPQELIVPAWITDKELESVSSFRSWKRIPAVIYRHQSNGAVIARCGQPEVSWWGWRNADDEHLVQSVAKACASDSRSSGSKLSTRNTSRDFPNGGDLSDVEFDSSLSNASGAESLAIQPQKLLILDARSYAAAVANRAKGGGCECPEYYPNCEVVFMGMANIHSIRRSFQSLRLLCTQMPDPGNWLSALESTKWLHHLSVLLKSALLVVHAVDQDQRPVLVHCSDGWDRTPQIVALAKLLLDPYYRTIEGFQVLVEMEWLDFGHKFADRCGHGENSDDLNERCPVFLQWLDCVHQLQRQFPCSFEFNEAFLVKLVQHTYSCLFGTFLCNNAKERGEKHTQERTCSVWSLLRAGNKAFKNLLYSSQSEAVLYPVCHVRNLMLWSAVYLPCPSPTTPVDDSCAPYPAPGTSPDDPPLSRLPKTRSYDNLTTACDNTVPLASRRCSDPSLNEKWQEHRRSLELSSLAGPGEDPLSADSLGKPTRVPGGAELSVAAGVAEGQMENILQEATKEESGVEEPAHRAGIEIQEGKEDPLLEKESRRKTPEASAIGLHQDPELGDAALRSHLDMSWPLFSQGISEQQSGLSVLLSSLQVPPRGEDSLEVPVEQFRIEEIAEGREEAVLPIPVDAKVGYGTSQSCSLLPSQVPFETRGPNVDSSTDMLVEDKVKSVSGPQGHHRSCLVNSGKDRLPQTMEPSPSETSLVERPQVGSVVHRTSLGSTLSLTRSPCALPLAECKEGLVCNGAPETENRASEQPPGLSTLQMYPTPNGHCANGEAGRSKDSLSRQLSAMSCSSAHLHSRNLHHKWLHSHSGRPSATSSPDQPSRSHLDDDGMSVYTDTIQQRLRQIESGHQQEVETLKKQVQELKSRLESQYLTSSLHFNGDFGDEVMTRWLPDHLAAHCYACDSAFWLASRKHHCRDTDRVDQTWNCGNVFCSSCCNQKVPVPSQQLFEPSRVCKSCYSSLHPTSSSIDLELDKPIAATSN

SEQ ID NO: 849612 - protein, 442 aa, Homo sapiens; identical to SEQ ID NO: 849607

SEQ ID NO: 849613 - protein, 629 aa, Homo sapiens [sequence omitted]

SEQ ID NO: 849614 - protein, 376 aa, Homo sapiens
MEVYASEKEQHGDLCRPGEHVTSRFKNEVERMGFDMNNAWRISNINEKYKLCGSYPQELIVPAWITDKELESVSSFRSWKRIPAVIYRHQSNGAVIARCGQPEVSWWGWRNADDEHLVQSVAKACASDSRSSGSKLSTRNTSRDFPNGGDLSDVEFDSSLSNASGAESLAIQPQKLLILDARSYAAAVANRAKGGGCECPEYYPNCEVVFMGMANIHSIRRSFQSLRLLCTQMPDPGNWLSALESTKWLHHLSVLLKSALLVVHAVDQDQRPVLVHCSDGWDRTPQIVALAKLLLDPYYRTIEGFQVLVEMEWLDFGHKFADRCGHGENSDDLNERCPVFLQWLDCVHQLQRQFPCSFEFNEAFLVSFFILGTFSI

SEQ ID NO: 849615 - protein, 132 aa, Homo sapiens
MDWTLAMAQESGVWSEAGQLALHSYLEGLHTLASCAPAPSLSAPRLKSCIQCVESQLLVVIMSVCMLVCQLRNVCVCVHAHACMYLFPVPSGSGCHFRLSALSPATSVPQPEREMRCSWTPHCIWAAGPELV

SEQ ID NO: 849616 - protein, 355 aa, Homo sapiens
PSLAAEMAATAAEAVASGSGEPREEAGALGPAWDESQLRSYSFPTRPIPRLSQSDPRAEELIENEEPVVLTDTNLVYPALKWDLEYLQENIGNGDFSVYSASTHKFLYYDEKKMANFQNFKPRSNREEMKFHEFVEKLQDIQQRGGEERLYLQQTLNDTVGRKIVMDFLGFNWNWINKQQGKRGWGQLTSNLLLIGMEGNVTPAHYDEQQNFFAQIKGYKRCILFPPDQFECLYPYPVHHPCDRQSQVDFDNPDYERFPNFQNVVGYETVVGPGDVLYIPMYWWHHIESLLNGGITITVNFWYKGAPTPKRIEYPLKAHQKVAIMRNIEKMLGEALGNPQEVGPLLNTMIKGRYN

SEQ ID NO: 849617 - protein, 355 aa, Homo sapiens; identical to SEQ ID NO: 849616

SEQ ID NO: 849618 - protein, 355 aa, Homo sapiens; identical to SEQ ID NO: 849616

SEQ ID NO: 849619 - protein, 189 aa, Homo sapiens
RLGRGLVLNRPRQQGKRGWGQLTSNLLLIGMEGNVTPAHYDEQQNFFAQIKGYKRCILFPPDQFECLYPYPVHHPCDRQSQVDFDNPDYERFPNFQNVVGYETVVGPGDVLYIPMYWWHHIESLLNGGITITVNFWYKGAPTPKRIEYPLKAHQKVAIMRNIEKMLGEALGNPQEVGPLLNTMIKGRYN

SEQ ID NO: 849620 - protein, 355 aa, Homo sapiens; identical to SEQ ID NO: 849616

SEQ ID NO: 849621 - protein, 355 aa, Homo sapiens; identical to SEQ ID NO: 849616

SEQ ID NO: 849622 - protein, 355 aa, Homo sapiens; identical to SEQ ID NO: 849616

SEQ ID NO: 849623 - protein, 313 aa, Homo sapiens
AGLLPSLLGCEHTLSVSPHAIIREPVVLTDTNLVYPALKWDLEYLQENIGNGDFSVYSASTHKFLYYDEKKMANFQNFKPRSNREEMKFHEFVEKLQDIQQRGGEERLYLQQTLNDTVGRKIVMDFLGFNWNWINKQQGKRGWGQLTSNLLLIGMEGNVTPAHYDEQQNFFAQIKGYKRCILFPPDQFECLYPYPVHHPCDRQSQVDFDNPDYERFPNFQNVVGYETVVGPGDVLYIPMYWWHHIESLLNGGITITVNFWYKGAPTPKRIEYPLKAHQKVAIMRNIEKMLGEALGNPQEVGPLLNTMIKGRYN

SEQ ID NO: 849624 - protein, 74 aa, Homo sapiens [sequence omitted]

SEQ ID NO: 849625 - protein, 92 aa, Homo sapiens
VNLSHQKPLTPVTLHFSETFATQPLAPSRPNAGSTPRTGGGKALGTGEVLVAAQIGDLLFFRAQTAAAAVRFRAAGAGSGARPEPGQPGWVG

SEQ ID NO: 849626 - protein, 346 aa, Homo sapiens
MDLDLLDLNPRIIAAIKKAKLKSVKEVLHFSGPDLKRLTNLSSPEVWHLLRTASLHLRGSSILTALQLHQQKERFPTQHQRLSLGCPVLDALLRGGLPLDGITELAGRSSAGKTQLALQLCLAVQFPRQHGGLEAGAVYICTEDAFPHKRLQQLMAQQPRLRTDVPGELLQKLRFGSQIFIEHVADVDTLLECVNKKVPVLLSRGMARLVVIDSVAAPFRCEFDSQASAPRARHLQSLGATLRELSSAFQSPVLCINQVTEAMEEQGAAHGPLGFWDERVSPALGITWANQLLVRLLADRLREEEAALGCPARTLRVLSAPHLPPSSCSYTISAEGVRGTPGTQSH

SEQ ID NO: 849627 - protein, 194 aa, Homo sapiens
MTSFRAGQGRISFGSVVSSLEVAFLFDLPSVLGNLTSSLWPALPAVWSWFSAPPPCLGLRPALQGGFSPVPVRPAWATRPGHLPVPCSENPQAVGAREPSLVRGQETHPGAPASLPCPPHGVPGGVPQPAAPVVCSPRRACLPEQAEHGHTSDQRDRVQASAAFCVVQGKTFSKSTARPFLCWVTAKGARPHWR

SEQ ID NO: 849628 - protein, 346 aa, Homo sapiens; identical to SEQ ID NO: 849626

SEQ ID NO: 849629 - protein, 346 aa, Homo sapiens; identical to SEQ ID NO: 849626

SEQ ID NO: 849630 - protein, 188 aa, Homo sapiens
MDLDLLDLNPRIIAAIKKAKLKSVKEVLHFSGPDLKRLTNLSSPEVWHLLRTASLHLRGSSILTALQLHQQKERFPTQHQRLSLGCPVLDALLRGGLPLDGITELAGRSSAGKTQLALQLCLAVQFPRQHGGLEAGAVYICTEDAFPHKRLQQLMAQQPRLRTDVPGELLQKLRFGSQIFIEHVADVM

SEQ ID NO: 849631 - protein, 158 aa, Homo sapiens
ATKERGKVKTRLGSGPGVVLSWPLGRGDSQGWSLGCPTVTPWEPPASSLHMEAQLGLRLRPAPWAGASDPLSLGTVPTRVSPPAHRAVLTPPPLRPQWGCRQAAPPHPPLGPWLPGAPPRHTLCPTKLQCGTRWRKHIPPTSSVRVQESLGVGGLPCL

SEQ ID NO: 849632 - protein, 179 aa, Homo sapiens
MDLDLLDLNPRIIAAIKKAKLKSVKEVLHFSGPDLKRLTNLSSPEVWHLLRTASLHLRGSSILTALQLHQQKERFPTQHQRLSLGCPVLDALLRGGLPLDGITELAGRSSAGKTQLALQLCLAVQFPRQHGGLEAGAVYICTEDAFPHKRLRAGRQRGRRSWAAAGVRGEAGSRGGGGR

SEQ ID NO: 849633 - protein, 346 aa, Homo sapiens; identical to SEQ ID NO: 849626

SEQ ID NO: 849634 - protein, 346 aa, Homo sapiens; identical to SEQ ID NO: 849626

SEQ ID NO: 849635 - protein, 112 aa, Homo sapiens
IHRHLAIHPHLANHRHLAINRHSPPEVIAQLGCCRKTYRSVLGQPLACCGLLPVCGLHPGVERWAGHTPAPHSGERTEACAGLSVELPGQCLGCGRCLVLKGKYSRISVKAR

SEQ ID NO: 849636 - protein, 141 aa, Homo sapiens
MARLVVIDSVAAPFRCEFDSQASAPRARHLQSLGATLRELSSAFQSPVLCINQVTEAMEEQGAAHGPLGFWDERVSPALGITWANQLLVRLLADRLREEEAALGCPARTLRVLSAPHLPPSSCSYTISAEGVRGTPGTQSH

SEQ ID NO: 849637 - protein, 217 aa, Homo sapiens
RHSCFPGAVYICTEDAFPHKRLQQLMAQQPRLRTDVPGELLQKLRFGSQIFIEHVADVDTLLECVNKKVPVLLSRGMARLVVIDSVAAPFRCEFDSQASAPRARHLQSLGATLRELSSAFQSPVLCINQVTEAMEEQGAAHGPLGFWDERVSPALGITWANQLLVRLLADRLREEEAALGCPARTLRVLSAPHLPPSSCSYTISAEGVRGTPGTQSH

SEQ ID NO: 849638 - protein, 103 aa, Homo sapiens
  misc_feature (6)..(6): Xaa can be any naturally occurring amino acid
LVGRTXGFRACAVHHQVTEAWRSRAGDGPLGFWDERVSPALGITWANQLLVRLLADRLREEEAALGCPARTLRVLSAPHLPPSSCSYTISAEGVRGTPGTQSH

SEQ ID NO: 849639 - protein, 194 aa, Homo sapiens [sequence omitted]

SEQ ID NO: 849640 - protein, 109 aa, Homo sapiens
QHLPPVPQEAVFCCWLLGATDVWIPEHPANPRLTFPLFPESPGRHLREIKLQSARDASVKSAKNTRVIPKPQRGESGRALNCCRRMVLFLALSTGGKCGGFGGFFKCIS

SEQ ID NO: 849641 - protein, 568 aa, Homo sapiens
RSVAPLPNEVPKTCMVRVPCSPPASLHPGMGEGARRSSRTLRGFPSQTSPAGVRNLGAQVCSQLLMWQNMGKSFAAAKSSSHQLEAGRGRVGTDSTPLWEARPGGCCLGPSDSAPLPGSTGLLPPAPPASCLDLSWVSLLRLSRMQGARAPRDQGQSPGRMSALGRSSVILLTYVLAATELTCLFMQFSIVPYLSRKLGLDSIAFGYLQTTFGVLQLLGGPVFGRFADQRGARAALTLSFLAALALYLLLAAASSPALPGVYLLFASRLPGALMHTLPAAQMVITDLSAPEERPAALGRLGLCFGVGVILGSLLGGTLVSAYGIQCPAILAALATLLGAVLSFTCIPASTKGAKTDAQAPLPGGPRASVFDLKAIASLLRLPDVPRIFLVKVASNCPTGLFMVMFSIISMDFFQLEAAQAGYLMSFFGLLQMVTQGLVIGQLSSHFSEEVLLRASVLVFIVVGLAMAWMSSVFHFCLLVPGLVFSLCTLNVVTDSMLIKAVSTSDTGTMLGLCASVQPLLRTLGPTVGGLLYRSFGVPVFGHVQVAINTLVLLVLWRKPMPQRKDKVR

SEQ ID NO: 849642 - protein, 499 aa, Homo sapiens
CSGQKKRSLRFPLLNQFPGYLRPCFTWRKTVARPGGCCLGPSDSAPLPGSTGLLPPAPPASCLDLSWVSLLRLSRMQGARAPRDQGQSPGRMSALGRSSVILLTYVLAATELTCLFMQFSIVPYLSRKLGLDSIAFGYLQTTFGVLQLLGGPVFGRFADQRGARAALTLSFLAALALYLLLAAASSPALPGVYLLFASRLPGALMHTLPAAQMVITDLSAPEERPAALGRLGLCFGVGVILGSLLGGTLVSAYGIQCPAILAALATLLGAVLSFTCIPASTKGAKTDAQAPLPGGPRASVFDLKAIASLLRLPDVPRIFLVKVASNCPTGLFMVMFSIISMDFFQLEAAQAGYLMSFFGLLQMVTQGLVIGQLSSHFSEEVLLRASVLVFIVVGLAMAWMSSVFHFCLLVPGLVFSLCTLNVVTDSMLIKAVSTSDTGTMLGLCASVQPLLRTLGPTVGGLLYRSFGVPVFGHVQVAINTLVLLVLWRKPMPQRKDKVR

SEQ ID NO: 849643 - protein, 246 aa, Homo sapiens
AVEVTLERSPHRHPCPSPPLQRQARPGGCCLGPSDSAPLPGSTGLLPPAPPASCLDLSWVSLLRLSRMQGARAPRDQGQSPGRMSALGRSSVILLTYVLAATELTCLFMQFSIVPYLSRKLGLDSIAFGYLQTTFGVLQLLGGPVFGRFADQRGARAALTLSFLAALALYLLLAAASSPALPGVYLLFASRLPGALMHTLPAAQMVITDLSAPEERPAALGRLGLCFGVGVILGSLLGGTLVSAYG

SEQ ID NO: 849644 - protein, 491 aa, Homo sapiens
HVEVTLERSPHRHPCPSPPLQRQARPGGCCLGPSDSAPLPGSTGLLPPAPPASCLDLSWVSLLRLSRMQGARAPRDQGQSPGRMSALGRSSVILLTYVLAATELTCLFMQFSIVPYLSRKLGLDSIAFGYLQTTFGVLQLLGGPVFGRFADQRGARAALTLSFLAALALYLLLAAASSPALPGVYLLFASRLPGALMHTLPAAQMVITDLSAPEERPAALGRLGLCFGVGVILGSLLGGTLVSAYGIQCPAILAALATLLGAVLSFTCIPASTKGAKTDAQAPLPGGPRASVFDLKAIASLLRLPDVPRIFLVKVASNCPTGLFMVMFSIISMDFFQLEAAQAGYLMSFFGLLQMVTQGLVIGQLSSHFSEEVLLRASVLVFIVVGLAMAWMSSVFHFCLLVPGLVFSLCTLNVVTDSMLIKAVSTSDTGTMLGLCASVQPLLRTLGPTVGGLLYRSFGVPVFGHVQVAINTLVLLVLWRKPMPQRKDKVR

SEQ ID NO: 849645 - protein, 167 aa, Homo sapiens
MVMFSIISMDFFQLEAAQAGYLMSFFGLLQMVTQGLVIGQLSSHFSEEVLLRASVLVFIVVGLAMAWMSSVFHFCLLVPGLVFSLCTLNVVTDSMLIKAVSTSDTGTMLGLCASVQPLLRTLGPTVGGLLYRSFGVPVFGHVQVAINTLVLLVLWRKPMPQRKDKVR

SEQ ID NO: 849646 - protein, 491 aa, Homo sapiens; identical to SEQ ID NO: 849644

SEQ ID NO: 849647 - protein, 354 aa, Homo sapiens
HVEVTLERSPHRHPCPSPPLQRQARPGGCCLGPSDSAPLPGSTGLLPPAPPASCLDLSWVSLLRLSRMQGARAPRDQGQSPGRMSALGRSSVILLTYVLAATELTCLFMQFSIVPYLSRKLGLDSIAFGYLQTTFGVLQLLGGPVFGRFADQRGARAALTLSFLAALALYLLLAAASSPALPGVYLLFASRLPGALMHTLPAAQMVITDLSAPEERPAALGRLGLCFGVGVILGSLLGGTLVSAYGIQCPAILAALATLLGAVLSFTCIPASTKGAKTDAQAPLPGGPRASVFDLKAIASLLRLPDVPRIFLVKVASNCPTGWSQTPGLNQSSLFGLPKCWDCRRDFEGSYNRE

SEQ ID NO: 849648 - protein, 232 aa, Homo sapiens
SGRQGGPERQEGPDREGVRRGGPDREGGPRASVFDLKAIASLLRLPDVPRIFLVKVASNCPTGLFMVMFSIISMDFFQLEAAQAGYLMSFFGLLQMVTQGLVIGQLSSHFSEEVLLRASVLVFIVVGLAMAWMSSVFHFCLLVPGLVFSLCTLNVVTDSMLIKAVSTSDTGTMLGLCASVQPLLRTLGPTVGGLLYRSFGVPVFGHVQVAINTLVLLVLWRKPMPQRKDKVR

SEQ ID NO: 849649 - protein, 359 aa, Homo sapiens
AVEVTLERSPHRHPCPSPPLQRQARPGGCCLGPSDSAPLPGSTGLLPPAPPASCLDLSWVSLLRLSRMQGARAPRDQGQSPGRMSALGRSSVILLTYVLAATELTCLFMQFSIVPYLSRKLGLDSIAFGYLQTTFGVLQLLGGPVFGRFADQRGARAALTLSFLAALALYLLLAAASSPALPGVYLLFASRLPGALMHTLPGRAGGLESRWGRVGGSLRRTRDTSREVCVRAGSGPKGWTGVGGDVGRGLWRGGSGGERAPPRGFRRSAPPPRPQPPRWSSRTCRHPRSGPRPWAGWASASASESSSAPCWAGPWSPRTGEWWGPGRSLWVRTPAAGSAPPRLLLASVSSFARGARVAT

SEQ ID NO: 849650 - protein, 491 aa, Homo sapiens; identical to SEQ ID NO: 849644

SEQ ID NO: 849651 - protein, 216 aa, Homo sapiens
WLGRARCDRPRLSRMQGARAPRDQGQSPGRMSALGRSSVILLTYVLAATELTCLFMQFSIVPYLSRKLGLDSIAFGYLQTTFGVLQLLGGPVFGRFADQRGARAALTLSFLAALALYLLLAAASSPALPGVYLLFASRLPGALMHTLPAAQMVITDLSAPEERPAALGRLGLCFGVGVILGSLLGGTLVSAYGTGAQVSESPSQDMHTRLALWSLS

SEQ ID NO: 849652 - protein, 491 aa, Homo sapiens; identical to SEQ ID NO: 849644

SEQ ID NO: 849653 - protein, 565 aa, Homo sapiens
AVEVTLERSPHRHPCPSPPLQRQARPGGCCLGPSDSAPLPGSTGLLPPAPPASCLDLSWVSLLRLSRMQGARAPRDQGQSPGRMSALGRSSVILLTYVLAATELTCLFMQFSIVPYLSRKLGLDSIAFGYLQTTFGVLQLLGGPVFGRFADQRGARAALTLSFLAALALYLLLAAASSPALPGVYLLFASRLPGALMHTLPGRAGGLESRWGRVGGSLRRTRDTSREVCVRAGSGPKGWTGVGGDVGRGLWRGGSGGERAPPRGFRRSAPPPLSPAAQMVITDLSAPEERPAALGRLGLCFGVGVILGSLLGGTLVSAYGIQCPAILAALATLLGAVLSFTCIPASTKGAKTDAQAPLPGGPRASVFDLKAIASLLRLPDVPRIFLVKVASNCPTGLFMVMFSIISMDFFQLEAAQAGYLMSFFGLLQMVTQGLVIGQLSSHFSEEVLLRASVLVFIVVGLAMAWMSSVFHFCLLVPGLVFSLCTLNVVTDSMLIKAVSTSDTGTMLGLCASVQPLLRTLGPTVGGLLYRSFGVPVFGHVQVAINTLVLLVLWRKPMPQRKDKVR

SEQ ID NO: 849654 - protein, 285 aa, Homo sapiens; identical to SEQ ID NO: 790890

SEQ ID NO: 849655 - protein, 269 aa, Homo sapiens
HVEVTLERSPHRHPCPSPPLQRQARPGGCCLGPSDSAPLPGSTGLLPPAPPASCLDLSWVSLLRLSRMQGARAPRDQGQSPGRMSALGRSSVILLTYVLAATELTCLFMQFSIVPYLSRKLGLDSIAFGYLQTTFGVLQLLGGPVFGRFADQRGARAALTLSFLAALALYLLLAAASSPALPGVYLLFASRLPGALMHTLPAAQMVITDLSAPEERPAALGRLGLCFGVGVILGSLLGGTLVSAYGTGAQVSESPSQDMHTRLALWSLS

SEQ ID NO: 849656 - protein, 179 aa, Homo sapiens
LLCRGALATTGQSGGPQLWGLATVQTPLPRLPHTHFYPLCLALVTQGLVIGQLSSHFSEEVLLRASVLVFIVVGLAMAWMSSVFHFCLLVPGLVFSLCTLNVVTDSMLIKAVSTSDTGTMLGLCASVQPLLRTLGPTVGGLLYRSFGVPVFGHVQVAINTLVLLVLWRKPMPQRKDKVR

SEQ ID NO: 849657 - protein, 279 aa, Homo sapiens
MEAVVNLYQEVMKHADPRIQGYPLMGSPLLMTSILLTYVYFVLSLGPRIMANRKPFQLRGFMIVYNFSLVALSLYIVYEFLMSGWLSTYTWRCDPVDYSNSPEALRMVRVAWLFLFSKFIELMDTVIFILRKKDGQVTFLHVFHHSVLPWSWWWGVKIAPGGMGSFHAMINSSVHVIMYLYYGLSAFGPVAQPYLWWKKHMTAIQLIQFVLVSLHISQYYFMSSCNYQYPVIIHLIWMYGTIFFMLFSNFWYHSYTKGKRLPRALQQNGAPGIAKVKAN

SEQ ID NO: 849658 - protein, 279 aa, Homo sapiens; identical to SEQ ID NO: 849657

SEQ ID NO: 849659 - protein, 279 aa, Homo sapiens; identical to SEQ ID NO: 849657

SEQ ID NO: 849660 - protein, 279 aa, Homo sapiens; identical to SEQ ID NO: 849657

SEQ ID NO: 849661 - protein, 279 aa, Homo sapiens; identical to SEQ ID NO: 849657

SEQ ID NO: 849662 - protein, 347 aa, Homo sapiens
  misc_feature (34)..(34): Xaa can be any naturally occurring amino acid
MHDRETAGERMARACALERDILVIGPVSSTRAGXHPACMSQSLGPPYRKLALRLGHEESVLDDDSDSHMRVIDSTHDFSTDSMDPRIQGYPLMGSPLLMTSILLTYVYFVLSLGPRIMANRKPFQLRGFMIVYNFSLVALSLYIVYEFLMSGWLSTYTWRCDPVDYSNSPEALRMVRVAWLFLFSKFIELMDTVIFILRKKDGQVTFLHVFHHSVLPWSWWWGVKIAPGGMGSFHAMINSSVHVIMYLYYGLSAFGPVAQPYLWWKKHMTAIQLIQFVLVSLHISQYYFMSSCNYQYPVIIHLIWMYGTIFFMLFSNFWYHSYTKGKRLPRALQQNGAPGIAKVKAN

SEQ ID NO: 849663 - protein, 225 aa, Homo sapiens [sequence omitted]

SEQ ID NO: 849664 - protein, 198 aa, Homo sapiens
MSGWLSTYTWRCDPVDYSNSPEALRMVRVAWLFLFSKFIELMDTVIFILRKKDGQVTFLHVFHHSVLPWSWWWGVKIAPGGMGSFHAMINSSVHVIMYLYYGLSAFGPVAQPYLWWKKHMTAIQLIQFVLVSLHISQYYFMSSCNYQYPVIIHLIWMYGTIFFMLFSNFWYHSYTKGKRLPRALQQNGAPGIAKVKAN

SEQ ID NO: 849665 - protein, 279 aa, Homo sapiens; identical to SEQ ID NO: 849657

SEQ ID NO: 849666 - protein, 252 aa, Homo sapiens
MEAVVNLYQEVMKHADPRIQGYPLMGSPLLMTSILLTYVYFVLSLGPRIMANRKPFQLRGFMIVYNFSLVALSLYIVYEMVRVAWLFLFSKFIELMDTVIFILRKKDGQVTFLHVFHHSVLPWSWWWGVKIAPGGMGSFHAMINSSVHVIMYLYYGLSAFGPVAQPYLWWKKHMTAIQLIQFVLVSLHISQYYFMSSCNYQYPVIIHLIWMYGTIFFMLFSNFWYHSYTKGKRLPRALQQNGAPGIAKVKAN

SEQ ID NO: 849667 - protein, 144 aa, Homo sapiens
MEAVVNLYQEVMKHADPRIQGYPLMGSPLLMTSILLTYVYFVLSLGPRIMANRKPFQLRGFMIVYNFSLVALSLYIVYEFLMSGWLSTYTWRCDPVDYSNSPEALRMVRVAWLFLFSKFIELMDTVIFILRKKDGQEEWALSMP

SEQ ID NO: 849668 - protein, 261 aa, Homo sapiens
MEAVVNLYQEVMKHADPRIQGYPLMGSPLLMTSILLTYVYFVLSLGPRIMANRKPFQLRGFMIVYNFSLVALSLYIVYEFLMSGWLSTYTWRCDPVDYSNSPEALRMVRVAWLFLFSKFIELMDTVIFILRKKDGQVTFLHVFHHSVLPWSWWWGVKIAPGGMGSFHAMINSSVHVIMYLYYGLSAFGPVAQPYLWWKKHMTAIQLIQFVLVSLHISQYYFMSSCNYQYPVIIHLIWMYGTIFFMLFSNFWYQEEWALSMP

SEQ ID NO: 849669 - protein, 104 aa, Homo sapiens
MEAVVNLYQEVMKHADPRIQGYPLMGSPLLMTSILLTYVYFVLSLGPRIMANRKPFQLRGFMIVYNFSLVALSLYIVYEFLMSGWLSTYTWRCDPVDYSLRTAP

SEQ ID NO: 849670 - protein, 54 aa, Homo sapiens
MSGWLSTYTWRCDPVDYSNSPEALRMVRVAWLFLFSKFIELMDTMFRYQLGSYQ

SEQ ID NO: 849671 - protein, 97 aa, Homo sapiens
PSGDRKSAQQMRKWQAGRLAPGTSLWPCSLRALRRCPPGPYGVLSQDGGCCELVPRGDEARRSPDPGLPSDGVPLANDLHSPDLRVLRSLTWASHHG

SEQ ID NO: 849672 - protein, 279 aa, Homo sapiens; identical to SEQ ID NO: 849657

SEQ ID NO: 849673 - protein, 301 aa, Homo sapiens
AGLGPDHGGPKEAGPPGESLARMEAVVNLYQEVMKHADPRIQGYPLMGSPLLMTSILLTYVYFVLSLGPRIMANRKPFQLRGFMIVYNFSLVALSLYIVYEFLMSGWLSTYTWRCDPVDYSNSPEALRMVRVAWLFLFSKFIELMDTVIFILRKKDGQVTFLHVFHHSVLPWSWWWGVKIAPGGMGSFHAMINSSVHVIMYLYYGLSAFGPVAQPYLWWKKHMTAIQLIQFVLVSLHISQYYFMSSCNYQYPVIIHLIWMYGTIFFMLFSNFWYHSYTKGKRLPRALQQNGAPGIAKVKAN

SEQ ID NO: 849674 - protein, 225 aa, Homo sapiens [sequence omitted]

SEQ ID NO: 849675 - protein, 309 aa, Homo sapiens
MEAVVNLYQEVMKHADPRIQGYPLMGSPLLMTSILLTYVYFVLSLGPRIMANRKPFQLRGFMIVYNFSLVALSLYIVYERGSDPCPQLAKGRDGWEGRTLVVYIHIPSQFLMSGWLSTYTWRCDPVDYSNSPEALRMVRVAWLFLFSKFIELMDTVIFILRKKDGQVTFLHVFHHSVLPWSWWWGVKIAPGGMGSFHAMINSSVHVIMYLYYGLSAFGPVAQPYLWWKKHMTAIQLIQFVLVSLHISQYYFMSSCNYQYPVIIHLIWMYGTIFFMLFSNFWYHSYTKGKRLPRALQQNGAPGIAKVKAN

SEQ ID NO: 849676 - protein, 279 aa, Homo sapiens; identical to SEQ ID NO: 849657

SEQ ID NO: 849677 - protein, 117 aa, Homo sapiens [sequence omitted]

SEQ ID NO: 849678 - protein, 385 aa, Homo sapiens
MEAVVNLYQEVMKHADPRIQGYPLMGSPLLMTSILLTYVYFVLSLGPRIMANRKPFQLRGFMIVYNFSLVALSLYIVYEFLMSGWLSTYTWRCDPVDYSNSPEALRMVRVAWLFLFSKFIELMDTVIFILRKKDGQVTFLHVFHHSVLPWSWWWGVKIAPGGMGSFHAMINSSVHVIMYLYYGLSAFGPVAQPYLWWKKHMTAIQLIQFVLVSLHISQYYFMSSCNYQYPVIIHLIWMYGTIFFMLFSNFWYIELMDTVIFILRKKDGQVTFLHVFHHSVLPWSWWWGVKIGPMKNELFPCHDKLFRACHNVPCTTDLSGLCYCWPSLTFGGTNAMTAIQVIQFGPGPPLPLYGSGPVRCLLSLKPGEPGLWGPDLSRELGLPLP

SEQ ID NO: 849679 - protein, 97 aa, Homo sapiens; identical to SEQ ID NO: 849671

SEQ ID NO: 849680 - protein, 97 aa, Homo sapiens; identical to SEQ ID NO: 849671

SEQ ID NO: 849681 - protein, 743 aa, Homo sapiens
MEEEGLECPNSSSEKRYFPESLDSSDGDEEEVLACEDLELNPFDGLPYSSRYYKLLKEREDLPIWKEKYSFMENLLQNQIVIVSGDAKCGKSAQVPQWCAEYCLSIHYQHGGVICTQVHKQTVVQLALRVADEMDVNIGHEVGYVIPFENCCTNETILRYCTDDMLQREMMSNPFLGSYGVIILDDIHERSIATDVLLGLLKDVLLARPELKLIINSSPHLISKLNSYYGNVPVIEVKNKHPVEVVYLSEAQKDSFESILRLIFEIHHSGEKGDIVVFLACEQDIEKVCETVYQGSNLNPDLGELVVVPLYPKEKCSLFKPLDETEKRCQVYQRRVVLTTSSGEFLIWSNSVRFVIDVGVERRKVYNPRIRANSLVMQPISQSQAEIRKQILGSSSSGKFFCLYTEEFASKDMTPLKPAEMQEANLTSMVLFMKRIDIAGLGHCDFMNRPAPESLMQALEDLDYLAALDNDGNLSEFGIIMSEFPLDPQLSKSILASCEFDCVDEVLTIAAMVTAPNCFSHVPHGAEEAALTCWKTFLHPEGDHFTLISIYKAYQDTTLNSSSEYCVEKWCRDYFLNCSALRMADVIRAELLEIIKRIELPYAEPAFGSKENTLNIKKALLSGYFMQIARDVDGSGNYLMLTHKQVAQLHPLSGYSITKKMPEWVLFHKFSISENNYIRITSEISPELFMQLVPQYYFSNLPPSESKDILQQVVDHLSPVSTMNKEQQMCETCPETEQRCTLQ

SEQ ID NO: 849682 - protein, 743 aa, Homo sapiens; identical to SEQ ID NO: 849681

SEQ ID NO: 849683 - protein, 320 aa, Homo sapiens [sequence omitted]

SEQ ID NO: 849684 - protein, 662 aa, Homo sapiens
MEEEGLECPNSSSEKRYFPESLDSSDGDEEEVLACEDLELNPFDGLPYSSRYYKLLKEREDLPIWKEKYSFMENLLQNQIVIVSGDAKCGKSAQVPQWCAEYCLSIHYQHGGVICTQVHKQTVVQLALRVADEMDVNIGHEVGYVIPFENCCTNETILRYCTDDMLQREMMSNPFLGSYGVIILDDIHERSIATDVLLGLLKDVLLARPELKLIINSSPHLISKLNSYYGNVPVIEVKNKHPVEVVYLSEAQKDSFESILRLIFEIHHSGEKGDIVVFLACEQVYNPRIRANSLVMQPISQSQAEIRKQILGSSSSGKFFCLYTEEFASKDMTPLKPAEMQEANLTSMVLFMKRIDIAGLGHCDFMNRPAPESLMQALEDLDYLAALDNDGNLSEFGIIMSEFPLDPQLSKSILASCEFDCVDEVLTIAAMVTAPNCFSHVPHGAEEAALTCWKTFLHPEGDHFTLISIYKAYQDTTLNSSSEYCVEKWCRDYFLNCSALRMADVIRAELLEIIKRIELPYAEPAFGSKENTLNIKKALLSGYFMQIARDVDGSGNYLMLTHKQVAQLHPLSGYSITKKMPEWVLFHKFSISENNYIRITSEISPELFMQLVPQYYFSNLPPSESKDILQQVVDHLSPVSTMNKEQQMCETCPETEQRCTLQ

SEQ ID NO: 849685 - protein, 367 aa, Homo sapiens
MQPISQSQAEIRKQILGSSSSGKFFCLYTEEFASKDMTPLKPAEMQEANLTSMVLFMKRIDIAGLGHCDFMNRPAPESLMQALEDLDYLAALDNDGNLSEFGIIMSEFPLDPQLSKSILASCEFDCVDEVLTIAAMVTAPNCFSHVPHGAEEAALTCWKTFLHPEGDHFTLISIYKAYQDTTLNSSSEYCVEKWCRDYFLNCSALRMADVIRAELLEIIKRIELPYAEPAFGSKENTLNIKKALLSGYFMQIARDVDGSGNYLMLTHKQVAQLHPLSGYSITKKMPEWVLFHKFSISENNYIRITSEISPELFMQLVPQYYFSNLPPSESKDILQQVVDHLSPVSTMNKEQQMCETCPETEQRCTLQ

SEQ ID NO: 849686 - protein, 499 aa, Homo sapiens
MEEEGLECPNSSSEKRYFPESLDSSDGDEEEVLACEDLELNPFDGLPYSSRYYKLLKEREDLPIWKEKYSFMENLLQNQIVIVSGDAKCGKSAQVPQWCAEYCLSIHYQHGGVICTQVHKQTVVQLALRVADEMDVNIGHEVGYVIPFENCCTNETILRYCTDDMLQREMMSNPFLGSYGVIILDDIHERSIATDVLLGLLKDVLLARPELKLIINSSPHLISKLNSYYGNVPVIEVKNKHPVEVVYLSEAQKDSFESILRLIFEIHHSGEKGDIVVFLACEQDIEKVCETVYQGSNLNPDLGELVVVPLYPKEKCSLFKPLDETEKRCQVYQRRVVLTTSSGEFLIWSNSVRFVIDVGVERRKVYNPRIRANSLVMQPISQSQAEIRKQILGSSSSGKFFCLYTEEFASKDMTPLKPAEMQEANLTSMVLFMKRIDIAGLGHCDFMNRPGSLMLPCQPGIRLRFTFSCPFSVLSSHDAQQCTQAWRGRWFGLKHFPAR

SEQ ID NO: 849687 - protein, 226 aa, Homo sapiens
MEEEGLECPNSSSEKRYFPESLDSSDGDEEEVLACEDLELNPFDGLPYSSRYYKLLKEREDLPIWKEKYSFMENLLQNQIVIVSGDAKCGKSAQVPQWCAEYCLSIHYQHGGVICTQVHKQTVVQLALRVADEMDVNIGHEVGYVIPFENCCTNETILRYCTDDMLQREMMSNPFLGSYGVIILDDIHERSIATDVLLGLLKDVLLARPELKLIINSSPHLISKRP

SEQ ID NO: 849688 - protein, 743 aa, Homo sapiens; identical to SEQ ID NO: 849681

SEQ ID NO: 849689 - protein, 743 aa, Homo sapiens; identical to SEQ ID NO: 849681

SEQ ID NO: 849690 - protein, 320 aa, Homo sapiens [sequence omitted]

SEQ ID NO: 849691 - protein, 320 aa, Homo sapiens [sequence omitted]

SEQ ID NO: 849692 - protein, 145 aa, Homo sapiens
LMQKLELGRYNETHAIAKWLLEKQELGGGFRSTQTTVVALEALTRFREAVPFKGIQDLHVQIRAPKTALNVNWYIDHSNAYQQRSAKFLAQDDLEIASGNGRGTISILTMYHKSPESREDNCNLYHLNATLHSALEGKPGVATGG

SEQ ID NO: 849693 - protein, 404 aa, Homo sapiens
LMQKLELGRYNETHAIAKWLLEKQELGGGFRSTQTTVVALEALTRFREAVPFKGIQDLHVQIRAPKTALNVNWYIDHSNAYQQRSAKFLAQDDLEIASGNGRGTISILTMYHKSPESREDNCNLYHLNATLHSALEENKKGGETFRLRMETRFQNNGEATMTIMEVSLLTGFYPNQDDPSSLSDVERYAFQYKTKTSTSDSTVVLYLVQAEFLQAALVTIYDYYEPSRRCSTFYNLPTEQSSLRKICHKDICRCAEGQCPSLQKPSGQLRQEELQTTACEAGVDFVYKTKLESVEVSASNPYVYYNTQLEDIIKSGTDPATPLAMKKFVSHATCHDSLGLQEQESYLIMGQTSDLWRIKSDYSYVLGKETFLILWPADGDASKKELRDQLEEFLEYMRTHGCQS

SEQ ID NO: 849694 - protein, 216 aa, Homo sapiens
SLQLSHEKNTVLGFRVHRMLQAEFLQAALVTIYDYYEPSRRCSTFYNLPTEQSSLRKICHKDICRCAEGQCPSLQKPSGQLRQEELQTTACEAGVDFVYKTKLESVEVSASNPYVYYNTQLEDIIKSGTDPATPLAMKKFVSHATCHDSLGLQEQESYLIMGQTSDLWRIKSDYSYVLGKETFLILWPADGDASKKELRDQLEEFLEYMRTHGCQS

SEQ ID NO: 849695 - protein, 178 aa, Homo sapiens
  misc_feature (1)..(1): Xaa can be any naturally occurring amino acid
  misc_feature (7)..(7): Xaa can be any naturally occurring amino acid
XDDGPQXTTTDGVLVPNGTRRCSTFYNLPTEQSSLRKICHKDICRCAEGQCPSLQKPSGLYKTKLESVEVSASNPYVYYNTQLEDIIKSGTDPATPLAMKKFVSHATCHDSLGLQEQESYLIMGQTSDLWRIKSDYSYVLGKETFLILWPADGDASKKELRDQLEEFLEYMRTHGCQS

SEQ ID NO: 849696 - protein, 434 aa, Homo sapiens
MSIEKIWAREILDSRGNPTVEVDLYTAKGLFRAAVPSGASTGIYEALELRDGDKQRYLGKGVLKAVDHINSTIAPALISSGLSVVEQEKLDNLMLELDGTENKSKFGANAILGVSLAVCKAGAAERELPLYRHIAQLAGNSDLILPVPAFNVINGGSHAGNKLAMQEFMILPVGAESFRDAMRLGAEVYHTLKGVIKDKYGKDATNVGDEGGFAPNILENSEALELVKEAIDKAGYTEKIVIGMDVAASEFYRDGKYDLDFKSPTDPSRYITGDQLGALYQDFVRDYPVVSIEDPFDQDDWAAWSKFTANVGIQIVGDDLTVTNPKRIERAVEEKACNCLLLKVNQIGSVTEAIQACKLAQENGWGVMVSHRSGETEDTFIADLVVGLCTGQIKTGAPCRSERLAKYNQLMRIEEELGDEARFAGHNFRNPSVL

SEQ ID NO: 849697 - protein, 398 aa, Homo sapiens
MSIEKIWAREILDSRGNPTVEVDLYTAKGLFRAAVPSGASTGIYEALELRDGDKQRYLGKGVLKAVDHINSTIAPALISSGLSVVEQEKLDNLMLELDGTENKSKFGANAILGVSLAVCKAGAAERELPLYRHIAQLAGNSDLILPVPAFNVINGGSHAGNKLAMQEFMILPVGAESFRDAMRLGAEVYHTLKGVIKDKYGKDATNVGDEGGFAPNILENSEALELVKEAIDKAGYTEKIVIGMDVAASEFYRDGKYDLDFKSPTDPSRYITGDQLGALYQDFVRDYPVVSIEDPFDQDDWAAWSKFTANVGIQIVGDDLTVTNPKRIERAVEEKACNCLLLKVNQIGSVTEAIQACKLAQENGWGVMVSHRSGETEDTFIADLVVGLCTGQVSEAAW

SEQ ID NO: 849698 - protein, 434 aa, Homo sapiens; identical to SEQ ID NO: 849696

SEQ ID NO: 849699 - protein, 434 aa, Homo sapiens; identical to SEQ ID NO: 849696

SEQ ID NO: 849700 - protein, 434 aa, Homo sapiens; identical to SEQ ID NO: 849696

SEQ ID NO: 849701 - protein, 434 aa, Homo sapiens; identical to SEQ ID NO: 849696

SEQ ID NO: 849702 - protein, 434 aa, Homo sapiens; identical to SEQ ID NO: 849696

SEQ ID NO: 849703 - protein, 221 aa, Homo sapiens
DAWVDPRVRALELVKEAIDKAGYTEKIVIGMDVAASEFYRDGKYDLDFKSPTDPSRYITGDQLGALYQDFVRDYPVVSIEDPFDQDDWAAWSKFTANVGIQIVGDDLTVTNPKRIERAVEEKACNCLLLKVNQIGSVTEAIQACKLAQENGWGVMVSHRSGETEDTFIADLVVGLCTGQIKTGAPCRSERLAKYNQLMRIEEELGDEARFAGHNFRNPSVL

SEQ ID NO: 849704 - protein, 389 aa, Homo sapiens
MSIEKIWAREILDSRGNPTVEVDLYTAKGLFRAAVPSGASTGIYEALELRDGDKQRYLGKGVLKAVDHINSTIAPALISSGLSVVEQEKLDNLMLELDGTENKSKFGANAILGVSLAVCKAGAAERELPLYRHIAQLAGNSDLILPVPAFNVINGGSHAGNKLAMQEFMILPVGAESFRDAMRLGAEVYHTLKGVIKDKYGKDATNVGDEGGFAPNILENSEALELVKEAIDKAGYTEKIVIGMDVAASEFYRDGKYDLDFKSPTDPSRYITGDQLGALYQDFVRDYPVVSIEDPFDQDDWAAWSKFTANVGIQIVGDDTGLTWGNDVSVFHVAVDPKMTGVGGLARMGRVIERALTSVPLCVLTEACVGPERRLCAWGSFPLYISPQP

SEQ ID NO: 849705 - protein, 434 aa, Homo sapiens; identical to SEQ ID NO: 849696

SEQ ID NO: 849706 - protein, 212 aa, Homo sapiens
  misc_feature (200)..(200): Xaa can be any naturally occurring amino acid
  misc_feature (209)..(210): Xaa can be any naturally occurring amino acid
MSIEKIWAREILDSRGNPTVEVDLYTAKGLFRAAVPSGASTGIYEALELRDGDKQRYLGKGVLKAVDHINSTIAPALISSGLSVVEQEKLDNLMLELDGTENKSKFGANAILGVSLAVCKAGAAERELPLYRHIAQLAGNSDLILPVPAFNVINGGSHAGNKLAMQEFMILPVGAESFRDAMRLGAEVYPPRGIPPREQXPGKGMPPNXXGE

SEQ ID NO: 849707 - protein, 434 aa, Homo sapiens; identical to SEQ ID NO: 849696

SEQ ID NO: 849708 - protein, 434 aa, Homo sapiens; identical to SEQ ID NO: 849696

SEQ ID NO: 849709 - protein, 353 aa, Homo sapiens
MVRGLVLIGRGLMLELDGTENKSKFGANAILGVSLAVCKAGAAERELPLYRHIAQLAGNSDLILPVPAFNVINGGSHAGNKLAMQEFMILPVGAESFRDAMRLGAEVYHTLKGVIKDKYGKDATNVGDEGGFAPNILENSEALELVKEAIDKAGYTEKIVIGMDVAASEFYRDGKYDLDFKSPTDPSRYITGDQLGALYQDFVRDYPVVSIEDPFDQDDWAAWSKFTANVGIQIVGDDLTVTNPKRIERAVEEKACNCLLLKVNQIGSVTEAIQACKLAQENGWGVMVSHRSGETEDTFIADLVVGLCTGQIKTGAPCRSERLAKYNQLMRIEEELGDEARFAGHNFRNPSVL

SEQ ID NO: 849710 - protein, 337 aa, Homo sapiens
MSIEKIWAREILDSRGNPTVEVDLYTAKGLFRAAVPSGASTGIYEALELRDGDKQRYLGKGVLKAVDHINSTIAPALISSGLSVVEQEKLDNLMLELDGTENKCKDATNVGDEGGFAPNILENSEALELVKEAIDKAGYTEKIVIGMDVAASEFYRDGKYDLDFKSPTDPSRYITGDQLGALYQDFVRDYPVVSIEDPFDQDDWAAWSKFTANVGIQIVGDDLTVTNPKRIERAVEEKACNCLLLKVNQIGSVTEAIQACKLAQENGWGVMVSHRSGETEDTFIADLVVGLCTGQIKTGAPCRSERLAKYNQLMRIEEELGDEARFAGHNFRNPSVL

SEQ ID NO: 849711 - protein, 233 aa, Homo sapiens
GRVGRPTRPCGFAPNILDNSEALELVKEAIDKAGYTEKIVIGMDVAASEFYRDGKYDLDFKSPTDPSRYITGDQLGALYQDFVRDYPVVSIEDPFDQDDWAAWSKFTANVGIQIVGDDLTVTNPKRIERAVEEKACNCLLLKVNQIGSVTEAIQACKLAQENGWGVMVSHRSGETEDTFIADLVVGLCTGQIKTGAPCRSERLAKYNQLMRIEEELGDEARFAGHNFRNPSVL

SEQ ID NO: 849712 - protein, 284 aa, Homo sapiens
MFDKTRLPYVALDVLCVLLAGLPFAILTSRHTPFQRGVFCNDESIKYPYKEDTIPYALLGGIIIPFSIIVIILGETLSVYCNLLHSNSFIRNNYIATIYKAIGTFLFGAAASQSLTDIAKYSIGRLRPHFLDVCDPDWSKINCSDGYIEYYICRGNAERVKEGRLSFYSGHSSFSMYCMLFVALYLQARMKGDWARLLRPTLQFGLVAVSIYVGLSRVSDYKHHWSDVLTGLIQGALVAILVAVYVSDFFKERTSFKERKEEDSHTTLHETPTTGNHYPSNHQP

SEQ ID NO: 849713 - protein, 285 aa, Homo sapiens
MFDKTRLPYVALDVLCVLLASMPMAVLKLGQIYPFQRGFFCKDNSINYPYHDSTVTSTVLILVGVGLPISSIILGETLSVYCNLLHSNSFIRNNYIATIYKAIGTFLFGAAASQSLTDIAKYSIGRLRPHFLDVCDPDWSKINCSDGYIEYYICRGNAERVKEGRLSFYSGHSSFSMYCMLFVALYLQARMKGDWARLLRPTLQFGLVAVSIYVGLSRVSDYKHHWSDVLTGLIQGALVAILVAVYVSDFFKERTSFKERKEEDSHTTLHETPTTGNHYPSNHQP

SEQ ID NO: 849714 - protein, 284 aa, Homo sapiens; identical to SEQ ID NO: 849712

SEQ ID NO: 849715 - protein, 284 aa, Homo sapiens; identical to SEQ ID NO: 849712

SEQ ID NO: 849716 - protein, 110 aa, Homo sapiens
MFDKTRLPYVALDVLCVLLASMPMAVLKLGQIYPFQRGFFCKDNSINYPYHDSTVTSTVLILVGVGLPISSLDCLLQFLLQGIPPSNEEYSVMMSPSSTLTKKTPYLMRY

SEQ ID NO: 849717 - protein, 109 aa, Homo sapiens
MYCMLFVALYLQARMKGDWARLLRPTLQFGLVAVSIYVGLSRVSDYKHHWSDVLTGLIQGALVAILVAVYVSDFFKERTSFKERKEEDSHTTLHETPTTGNHYPSNHQP

SEQ ID NO: 849718 - protein, 284 aa, Homo sapiens; identical to SEQ ID NO: 849712

SEQ ID NO: 849719 - protein, 284 aa, Homo sapiens; identical to SEQ ID NO: 849712

SEQ ID NO: 849720 - protein, 284 aa, Homo sapiens; identical to SEQ ID NO: 849712

SEQ ID NO: 849721 - protein, 284 aa, Homo sapiens; identical to SEQ ID NO: 849712

SEQ ID NO: 849722 - protein, 221 aa, Homo sapiens
MCSACCWIILGETLSVYCNLLHSNSFIRNNYIATIYKAIGTFLFGAAASQSLTDIAKYSIGRLRPHFLDVCDPDWSKINCSDGYIEYYICRGNAERVKEGRLSFYSGHSSFSMYCMLFVALYLQARMKGDWARLLRPTLQFGLVAVSIYVGLSRVSDYKHHWSDVLTGLIQGALVAILVAVYVSDFFKERTSFKERKEEDSHTTLHETPTTGNHYPSNHQP

SEQ ID NO: 849723 - protein, 260 aa, Homo sapiens [sequence omitted]

SEQ ID NO: 849724 - protein, 437 aa, Homo sapiens
GRCLLFRNVRPRGRGQPCPCDSLRDPSSTYIRQLESKVRLLEGDKLLAQQAGSGEFRTLRKGFSPYHSESQLASLPPSYQDSLQNGPACPAPELPSPPSAGYSPAGQKPEAVVHAMKVLEVHENLDRQLQDSCEEDLSEKEKAIVREMCNVVWRKLGDAASSKPSIRQHLSGNQFKGPCRATLLWTWTGPAGGPQGEFQAPDTGRTSSPAPVFFLCGELYIGRCPPWPSCHGSDALAQAAISRLIHQQPGKTRRCDCSCSRAARTPHSSLWALGSMSKRLQAASEIQPGNCPGSSVLPGMEGPLIKPSTPRLPPTLDRDHHYLGLDAGGTTSCPNAVAWPQAPQALGPRHVDKATHHICGWLEAALGPSCDPQPWRSGCPHTWGSVLSHPMPAAPCFWRSSPSPPVSAMSPCHPVQAMPFLGSSCPMPEARPFSWFT

SEQ ID NO: 849725 - protein, 405 aa, Homo sapiens
GRCLLFRNVRPRGRGQPCPCDSLRDPSSTYIRQLESKVRLLEGDKLLAQQAGSGEFRTLRKGFSPYHSESQLASLPPSYQDSLQNVLEVHENLDRQLQDSCEEDLSEKEKAIVREMCNVVWRKLGDAASSKPSIRSTCLGTSSRGLCRATLLWTWTGPAGGPQGEFQAPDTGRTSSPAPVFFLCGELYIGRCPPWPSCHGSDALAQAAISRLIHQQPGKTRRCDCSCSRAARTPHSSLWALGSMSKRLQAASEIQPGNCPGSSVLPGMEGPLIKPSTPRLPPTLDRDHHYLGLDAGGTTSCPNAVAWPQAPQALGPRHVDKATHHICGWLEAALGPSCDPQPWRSGCPHTWGSVLSHPMPAAPCFWRSSPSPPVSAMSPCHPVQAMPFLGSSCPMPEARPFSWFT

SEQ ID NO: 849726 - protein, 405 aa, Homo sapiens; identical to SEQ ID NO: 849725

SEQ ID NO: 849727 - protein, 405 aa, Homo sapiens; identical to SEQ ID NO: 849725

SEQ ID NO: 849728 - protein, 405 aa, Homo sapiens; identical to SEQ ID NO: 849725

SEQ ID NO: 849729 - protein, 918 aa, Homo sapiens
MEHGTLLAQPGLWTRDTSWALLYFLCYILPQTAPQVLRIGGIFETVENEPVNVEELAFKFAVTSINRNRTLMPNTTLTYDIQRINLFDSFEASRRACDQLALGVAALFGPSHSSSVSAVQSICNALEVPHIQTRWKHPSVDNKDLFYINLYPDYAAISRAILDLVLYYNWKTVTVVYEDSTGLIRLQELIKAPSRYNIKIKIRQLPSGNKDAKPLLKEMKKGKEFYVIFDCSHETAAEILKQILFMGMMTEYYHYFFTTLDLFALDLELYRYSGVNMTGFRLLNIDNPHVSSIIEKWSMERLQAPPRPETGLLDGMMTTEAALMYDAVYMVAIASHRASQLTVSSLQCHRHKPWRLGPRFMNLIKEARWDGLTGHITFNKTNGLRKDFDLDIISLKEEGTEKAAGEVSKHLYKVWKKIGIWNSNSGLNMTDSNKDKSSNITDSLANRTLIVTTILEEPYVMYRKSDKPLYGNDRFEGYCLDLLKELSNILGFIYDVKLVPDGKYGAQNDKGEWNGMVKELIDHRADLAVAPLTITYVREKVIDFSKPFMTLGISILYRKPNGTNPGVFSFLNPLSPDIWMYVLLACLGVSCVLFVIARFTPYEWYNPHPCNPDSDVVENNFTLLNSFWFGVGALMQQGSELMPKALSTRIVGGIWWFFTLIIISSYTANLAAFLTVERMESPIDSADDLAKQTKIEYGAVRDGSTMTFFKKSKISTYEKMWAFMSSRQQTALVRNSDEGIQRVLTTDYALLMESTSIEYVTQRNCNLTQIGGLIDSKGYGVGTPIGSPYRDKITIAILQLQEEGKLHMMKEKWWRGNGCPEEDNKEASALGVENIGGIFIVLAAGLVLSVFVAIGEFIYKSRKNNDIEQAFCFFYGLQCKQTHPTNSTSGTTLSTDLECGKLIREERGIRKQSSVHTV

SEQ ID NO: 849730 - protein, 905 aa, Homo sapiens
MEHGTLLAQPGLWTRDTSWALLYFLCYILPQTAPQVLRIGGIFETVENEPVNVEELAFKFAVTSINRNRTLMPNTTLTYDIQRINLFDSFEASRRACDQLALGVAALFGPSHSSSVSAVQSICNALEVPHIQTRWKHPSVDNKDLFYINLYPDYAAISRAILDLVLYYNWKTVTVVYEDSTGLIRLQELIKAPSRYNIKIKIRQLPSGNKDAKPLLKEMKKGKEFYVIFDCSHETAAEILKQILFMGMMTEYYHYFFTTLDLFALDLELYRYSGVNMTGFRLLNIDNPHVSSIIEKWSMERLQAPPRPETGLLDGMMTTEAALMYDAVYMVAIASHRASQLTVSSLQCHRHKPWRLGPRFMNLIKEARWDGLTGHITFNKTNGLRKDFDLDIISLKEEGTEKIGIWNSNSGLNMTDSNKDKSSNITDSLANRTLIVTTILEEPYVMYRKSDKPLYGNDRFEGYCLDLLKELSNILGFIYDVKLVPDGKYGAQNDKGEWNGMVKELIDHRADLAVAPLTITYVREKVIDFSKPFMTLGISILYRKPNGTNPGVFSFLNPLSPDIWMYVLLACLGVSCVLFVIARFTPYEWYNPHPCNPDSDVVENNFTLLNSFWFGVGALMQQGSELMPKALSTRIVGGIWWFFTLIIISSYTANLAAFLTVERMESPIDSADDLAKQTKIEYGAVRDGSTMTFFKKSKISTYEKMWAFMSSRQQTALVRNSDEGIQRVLTTDYALLMESTSIEYVTQRNCNLTQIGGLIDSKGYGVGTPIGSPYRDKITIAILQLQEEGKLHMMKEKWWRGNGCPEEDNKEASALGVENIGGIFIVLAAGLVLSVFVAIGEFIYKSRKNNDIEQCLSFNAIMEELGISLKNQKKIKKKSRTKGKSSFTSILTCHQRRTQRKETVA

SEQ ID NO: 849731 - protein, 905 aa, Homo sapiens; identical to SEQ ID NO: 849730

SEQ ID NO: 849732 - protein, 299 aa, Homo sapiens
MSRGPSSAVLPSALGSRKLGPRSLSCLSDLDGGVALEPRACRPPGSPGRAPPPTPAPSGCDPRLRPIILRRARSLPSSPERRQKAAGAPGAACRPGCSQKLRVRFADALGLELAQVKVFNAGDDPSVPLHVLSRLAINSDLCCSSQDLEFTLHCLVPDFPPPVEAADFGERLQRQLVCLERVTCSDLGISGTVRVCNVAFEKQVAVRYTFSGWRSTHEAVARWRGPAGPEGTEDVFTFGFPVPPFLLELGSRVHFAVRYQVAGAEYWDNNDHRDYSLTCRNHALHMPRGECEESWIHFI

SEQ ID NO: 849733 - protein, 299 aa, Homo sapiens; identical to SEQ ID NO: 849732

SEQ ID NO: 849734 - protein, 361 aa, Homo sapiens
MATLARLQARSSTVGNQYYFRNSVVDPFRKKENDAAVKIQSWFRGCQVRAYIRHLNRIVTIIQKWWRSFLGRKQYQLTVQVAYYTMMMNLYNAMAVRIQRRWRGYRVRKYLFNYYYLKEYLKVVSETNDAIRKALEEFAEMKEREEKKANLEREEKKRDYQARKMHYLLSTKQIPGIYNSPFRKEPDPWELQLQKAKPLTHRRPKVKQKDSTSLTDWLACTSARSFPRSEILPPINRKQCQGPFRDITEVLEQRYRPLEPTLRVAEPIDELKLAREELRREEWLQNVNDNMFLPFSSYHKNEKYIPSMHLSSKYGPISYKEQFRSENPKKWICDKDFQTVLPSFELFSKYGKLYSKAGQIV

SEQ ID NO: 849735 - protein, 361 aa, Homo sapiens; identical to SEQ ID NO: 849734

SEQ ID NO: 849736 - protein, 361 aa, Homo sapiens; identical to SEQ ID NO: 849734

SEQ ID NO: 849737 - protein, 361 aa, Homo sapiens; identical to SEQ ID NO: 849734

SEQ ID NO: 849738 - protein, 361 aa, Homo sapiens; identical to SEQ ID NO: 849734

SEQ ID NO: 849739 - protein, 361 aa, Homo sapiens; identical to SEQ ID NO: 849734

SEQ ID NO: 849740 - protein, 361 aa, Homo sapiens; identical to SEQ ID NO: 849734

SEQ ID NO: 849741 - protein, 361 aa, Homo sapiens; identical to SEQ ID NO: 849734

SEQ ID NO: 849742 - protein, 276 aa, Homo sapiens [sequence omitted]

SEQ ID NO: 849743 - protein, 361 aa, Homo sapiens; identical to SEQ ID NO: 849734

SEQ ID NO: 849744 - protein, 361 aa, Homo sapiens; identical to SEQ ID NO: 849734

SEQ ID NO: 849745 - protein, 361 aa, Homo sapiens; identical to SEQ ID NO: 849734

SEQ ID NO: 849746 - protein, 361 aa, Homo sapiens; identical to SEQ ID NO: 849734

SEQ ID NO: 849747 - protein, 200 aa, Homo sapiens
MILDRYEYQMSISIVMNSVEPSHKSTQRPPPPQGRQRILLGQNRDGIVFSTDDYFHHQDGYRYNVNQLGDAHDWNQNRAKQAIDQGRSPVIIDNTNIQAWEMKPYVEVAIGKGYRVEFHEPETWWKFDPEELEKRNKHGVSRKKIAQMLDRYEYQMSISIVMNSVEPSHKSTQRPPPPQGRQRWGGSLGSHNRVCVTNNH

SEQ ID NO: 849748 - protein, 216 aa, Homo sapiens
MILDRYEYQMSISIVMNSVEPSHKSTQRPPPPQGRQRILLGQNRDGIVFSTDDYFHHQDGYRYNVNQLGDAHDWNQNRAKQAIDQGRSPVIIDNTNIQAWEMKPYVEVAIGKGYRVEFHEPETWWKFDPEELEKRNKHGVSRKKIAQMLDRYEYQMSISIVMNSVEPSHKSTQRPPPPQGRQRILLGQNRDGIVFSTDDYFHHQDGYSKTVTGSRT

SEQ ID NO: 849749 - protein, 155 aa, Homo sapiens
MALCSALMTIFTIKMGTAKQAIDQGRSPVIIDNTNIQAWEMKPYVEVAIGKGYRVEFHEPETWWKFDPEELEKRNKHGVSRKKIAQMLDRYEYQMSISIVMNSVEPSHKSTQRPPPPQGRQRILLGQNRDGIVFSTDDYFHHQDGYSKTVTGSRT

SEQ ID NO: 849750 - protein, 93 aa, Homo sapiens
MILDRYEYQMSISIVMNSVEPSHKSTQRPPPPQGRQRILLGQNRDGIVFSTDDYFHHQDGYRYNVNQLGDAHDWNQNRAKQLTIENIGYRSIR

SEQ ID NO: 849751 - protein, 583 aa, Homo sapiens
MSYGEIEGKFLGPREEVTSEPRCKKLKSTTESYVFHNHSNADFHRIQEKTGNDWVPVTIIDVRGHSYLQENKIKTTDLHRPLHDEMPGNRPDVIESIDSQVLQEARPPLVSADDEIYSTSKAFIGPIYKPPEKKKRNEGRNEAHVLNGINDRGGQKEKQKFNSEKSEIDNELFQFYKEIEELEKEKDGFENSCKESEPSQEQFVPFYEGHNNGLLKPDEEKKDLSNKAMPSHCDYQQNLGNEPDKYPCNGQVIPTFCDTSFTSFRPEWQSVYPFIVPYGPPLPSLNYHLNIQRFSGPPNPPSNIFQAQDDSQIQNGYYVNNCHVNWNCMTFDQNNEYTDCSENRSSVHPSGNGCSMQDRYVSNGFCEVRERCWKDHCMDKHNGTDRFVNQQFQEEKLNKLQKLLILLRGLPGSGKTTLSRILLGQNRDGIVFSTDDYFHHQDGYRYNVNQLGDAHDWNQNRAKQAIDQGRSPVIIDNTNIQAWEMKPYVEVAIGKGYRVEFHEPETWWKFDPEELEKRNKHGVSRKKIAQMLDRYEYQMSISIVMNSVEPSHKSTQRPPPPQGRQRWGGSLGSHNRVCVTNNH

SEQ ID NO: 849752 - protein, 583 aa, Homo sapiens; identical to SEQ ID NO: 849751

SEQ ID NO: 849753 - protein, 583 aa, Homo sapiens; identical to SEQ ID NO: 849751

SEQ ID NO: 849754 - protein, 583 aa, Homo sapiens; identical to SEQ ID NO: 849751

SEQ ID NO: 849755 - protein, 564 aa, Homo sapiens
MSYGEIEGKFLGPREEHNHSNADFHRIQEKTGNDWVPVTIIDVRGHSYLQENKIKTTDLHRPLHDEMPGNRPDVIESIDSQVLQEARPPLVSADDEIYSTSKAFIGPIYKPPEKKKRNEGRNEAHVLNGINDRGGQKEKQKFNSEKSEIDNELFQFYKEIEELEKEKDGFENSCKESEPSQEQFVPFYEGHNNGLLKPDEEKKDLSNKAMPSHCDYQQNLGNEPDKYPCNGQVIPTFCDTSFTSFRPEWQSVYPFIVPYGPPLPSLNYHLNIQRFSGPPNPPSNIFQAQDDSQIQNGYYVNNCHVNWNCMTFDQNNEYTDCSENRSSVHPSGNGCSMQDRYVSNGFCEVRERCWKDHCMDKHNGTDRFVNQQFQEEKLNKLQKLLILLRGLPGSGKTTLSRILLGQNRDGIVFSTDDYFHHQDGYRYNVNQLGDAHDWNQNRAKQAIDQGRSPVIIDNTNIQAWEMKPYVEVAIGKGYRVEFHEPETWWKFDPEELEKRNKHGVSRKKIAQMLDRYEYQMSISIVMNSVEPSHKSTQRPPPPQGRQRWGGSLGSHNRVCVTNNH

SEQ ID NO: 849756 - protein, 471 aa, Homo sapiens
MSYGEIEGKFLGPREEVTSEPRCKKLKSTTESYVFHNHSNADFHRIQEKTGNDWVPVTIIDVRGHSYLQENKIKTTDLHRPLHDEMPGNRPDVIESIDSQVLQEARPPLVSADDEIYSTSKAFIGPIYKPPEKKKRNEGRNEAHVLNGINDRGGQKEKQKFNSEKSEIDNELFQFYKEIEELEKEKDGFENSCKESEPSQEQFVPFYEGHNNGLLKPDEEKKDLSNKAMPSHCDYQQNLGNEPDKYPCNGQVIPTFCDTSFTSFRPEWQSVYPFIVPYGPPLPSLNYHLNIQRFSGPPNPPSNIFQAQDDSQIQNGYYVNNCHVNWNCMTFDQNNEYTDCSENRSSVHPSGNGCSMQDRYVSNGFCEVRERCWKDHCMDKHNGTDRFVNQQFQEEKLNKLQKLLILLRGLPGSGKTTLSRILLGQNRDGIVFSTDDYFHHQDGYRYNVNQLGDAHDWNQNREVCFGLSVPG

SEQ ID NO: 849757 - protein, 420 aa, Homo sapiens [sequence omitted]

SEQ ID NO: 849758 - protein, 567 aa, Homo sapiens
MSYGEIEGKFLGPREEVTSEPRCKKLKSTTESYVFHNHSNADFHRIQEKTGNDWVPVTIIDVRGHSYLQENKIKTTDLHRPLHDEMPGNRPDVIESIDSQVLQEARPPLVSADDEIYSTSKAFIGPIYKPPEKKKRNEGRNEAHVLNGINDRGGQKEKQKFNSEKSEIDNELFQFYKEIEELEKEKDGFENSCKESEPSQEQFVPFYEGHNNGLLKPDEEKKDLSNKAMPSHCDYQQNLGNEPDKYPCNGQVIPTFCDTSFTSFRPEWQSVYPFIVPYGPPLPSLNYHLNIQRFSGPPNPPSNIFQAQDDSQIQNGYYVNNCHVNWNCMTFDQNNEYTDCSENRSSVHPSGNGCSMQDRYVSNGFCEVRERCWKDHCMDKHNGTDRFVNQQFQEEKLNKLQKLLILLRGLPGSGKTTLSRILLGQNRDGIVFSTDDYFHHQDGYRYNVNQLGDAHDWNQNRAKQAIDQGRSPVIIDNTNIQAWEMKPYVEVAIGKGYRVEFHEPETWWKFDPEELEKRNKHGVSRKKIAQMLDRYEYQMSISIVMNSVEPSHKSTQRPPPPQGRQSD

SEQ ID NO: 849759 - protein, 471 aa, Homo sapiens; identical to SEQ ID NO: 849756

SEQ ID NO: 849760 - protein, 326 aa, Homo sapiens
MSYGEIEGKFLGPREEVTSEPRCKKLKSTTESYVFHNHSNADFHRIQEKTGNDWVPVTIIDVRGHSYLQENKIKTTDLHRPLHDEMPGNRPDVIESIDSQVLQEARPPLVSADDEIYSTSKAFIGPIYKPPEKKKRNEGRNEAHVLNGINDRGGQKEKQKFNSEKSEIDNELFQFYKEIEELEKEKDGFENSCKESEPSQEQFVPFYEGHNNGLLKPDEEKKDLSNKAMPSHCDYQQNLGNEPDKYPCNGQVIPTFCDTSFTSFRPEWQSVYPFIVPYGPPLPSLNYHLNIQRFSGPPNPPSNIFQSEKDAGKIIVWTSIMEQTGL

SEQ ID NO: 849761 - protein, 477 aa, Homo sapiens
MSYGEIEGKFLGPREEVTSEPRCKKLKSTTESYVFHNHSNADFHRIQEKTGNDWVPVTIIDVRGHSYLQENKIKTTDLHRPLHDEMPGNRPDVIESIDSQVLQEARPPLVSADDEIYSTSKAFIGPIYKPPEKKKRNEGRNEAHVLNGINDRGGQKEKQKFNSEKSEIDNELFQFYKEIEELEKEKDGFENSCKESEPSQEQFVPFYEGHNNGLLKPDEEKKDLSNKAMPSHCDYQQNLGNEPDKYPCNGQVIPTFCDTSFTSFRPEWQSVYPFIVPYGPPLPSLNYHLNIQRFSGPPNPPSNIFQAQDDSQIQNGYYVNNCHVNWNCMTFDQNNEYTDCSENRSSVHPSGNGCSMQDRYVSNGFCEVRERCWKDHCMDKHNGTDRFVNQQFQEEKLNKLQKLLILLRGLPGSGKTTLSRILLGQNRDGIVFSTDDYFHHQDGYRYNVNQLGDAHDWNQNRAKQAYRSGKDPSSYNR

SEQ ID NO: 849762 - protein, 567 aa, Homo sapiens; identical to SEQ ID NO: 849758

SEQ ID NO: 849763 - protein, 459 aa, Homo sapiens
MSYGEIEGKFLGPREEVTSEPRCKKLKSTTESYVFHNHSNADFHRIQEKTGNDWVPVTIIDVRGHSYLQENKIKTTDLHRPLHDEMPGNRPDVIESIDSQVLQEARPPLVSADDEIYSTSKAFIGPIYKPPEKKKRNEGRNEAHVLNGINDRGGQKEKQKFNSEKSEIDNELFQFYKEIEELEKEKDGFENSCKESEPSQEQFVPFYEGHNNGLLKPDEEKKDLSNKAMPSHCDYQQNLGNEPDKYPCNGQVIPTFCDTSFTSFRPEWQSVYPFIVPYGPPLPSLNYHLNIQRFSGPPNPPSNIFQAQDDSQIQNGYYVNNCHVNWNCMTFDQNNEYTDCSENRSSVHPSGNGCSMQDRYVSNGFCEVRERCWKDHCMDKHNGTDRFVNQQFQEEKLNKLQKLLILLRGLPGSGKTTLSRILLGQNRDGIVFSTDDYFHHQDGYSKTSYRSGKISSYNR

SEQ ID NO: 849764 - protein, 599 aa, Homo sapiens
MSYGEIEGKFLGPREEVTSEPRCKKLKSTTESYVFHNHSNADFHRIQEKTGNDWVPVTIIDVRGHSYLQENKIKTTDLHRPLHDEMPGNRPDVIESIDSQVLQEARPPLVSADDEIYSTSKAFIGPIYKPPEKKKRNEGRNEAHVLNGINDRGGQKEKQKFNSEKSEIDNELFQFYKEIEELEKEKDGFENSCKESEPSQEQFVPFYEGHNNGLLKPDEEKKDLSNKAMPSHCDYQQNLGNEPDKYPCNGQVIPTFCDTSFTSFRPEWQSVYPFIVPYGPPLPSLNYHLNIQRFSGPPNPPSNIFQAQDDSQIQNGYYVNNCHVNWNCMTFDQNNEYTDCSENRSSVHPSGNGCSMQDRYVSNGFCEVRERCWKDHCMDKHNGTDRFVNQQFQEEKLNKLQKLLILLRGLPGSGKTTLSRILLGQNRDGIVFSTDDYFHHQDGYRYNVNQLGDAHDWNQNRAKQAIDQGRSPVIIDNTNIQAWEMKPYVEVAIGKGYRVEFHEPETWWKFDPEELEKRNKHGVSRKKIAQMLDRYEYQMSISIVMNSVEPSHKSTQRPPPPQGRQRILLGQNRDGIVFSTDDYFHHQDGYSKTVTGSRT

SEQ ID NO: 849765 - protein, 651 aa, Homo sapiens
MLDRYEYQMSISIVMNSVEPSHKSTQRPPPPQGRQRERVLKKTGHRLSKTKQKRNRKRNKKQNSQNRIMEENSLEFLSDLTPGDQDPSQSEEEDIEKTRRESEYPFIDGLQNEVGDFVTGYKEKRWKNKDPKDSFQNVMSIVELDNTPKNYLSKEGDNLFVSLLLRPNEISVTCPILTQNLSCVTTDDCSGMKVEKHIRNRHTIALDTQDLSAETSCLFMKKREIVDKNLSHEPILCHQHGIRMSDKVLREEQVYTTKINHWAFFTTNLSDEDLQLGSDRQPYFGSWPAGPHKFICEQRPKKDRACKLAGPDSRGQWIQMIFTSVAASEPGNNPEILTDKLLIGNEDFSPPPETMDSFIETNLFRSCLPQPDIPKNALESTKNKKRRKKRIFNLVPNFDLLGQSRIGVKEREKCDLLTKNHGLKITLGEEKDRISERNSEEENKQKLMTFDHHPLWFYLDIIKATPLNIDGQRYSHCLSFNRLRCSASLYKNYIPSFVLHNLSSIWKPSFTNKKLFLTFESQTRVGNKLNDAGFISPEILHSHPDTSCSLGVTSDFHFLNERFDRKLKRWEEPKELPAEDSQDLTSTDYRSLELPLSQGFAFQLVKLFGSPGVPMESLLPDDYVVPLDWKTLKMIYLQWKMSVEKRQKKIG

SEQ ID NO: 849766 - protein, 142 aa, Homo sapiens
MSYGEIEGKFLGPREEVTSEPRCKKLKSTTESYVFHNHSNADFHRIQEKTGNDWVPVTIIDVRGHSYLQENKIKTTDLHRPLHDEMPGNRPDVIESIDSQVLQEARPPLVSADDEIYSTSKAFIGPIYKPPESEGDQRRTPI

SEQ ID NO: 849767 - protein, 73 aa, Homo sapiens
LIHDILYLCIQASRWLLNVAVEAAGSGGACGWMPESTIRKLGCGRWKEVPDACLEQDSFFLPLDEGFLDLPGN

SEQ ID NO: 849768 - protein, 583 aa, Homo sapiens; identical to SEQ ID NO: 849751

SEQ ID NO: 849769 - protein, 583 aa, Homo sapiens; identical to SEQ ID NO: 849751

SEQ ID NO: 849770 - protein, 567 aa, Homo sapiens; identical to SEQ ID NO: 849758

SEQ ID NO: 849771 - protein, 565 aa, Homo sapiens
MSYGEIEGKFLGPREEVTSEPRCKKLKSTTESYVFHNHSNADFHRIQEKTGNDWVPVTIIDVRGHSYLQENKIKTTDLHRPLHDEMPGNRPDVIESIDSQVLQEARPPLVSADDEIYSTSKAFIGPIYKPPEKKKRNEGRNEAHVLNGINDRGGQKEKQKFNSEKSEIDNELFQFYKEIEELEKEKDGFENSCKESEPSQEQFVPFYEGHNNGLLKPDEDLGNEPDKYPCNGQVIPTFCDTSFTSFRPEWQSVYPFIVPYGPPLPSLNYHLNIQRFSGPPNPPSNIFQAQDDSQIQNGYYVNNCHVNWNCMTFDQNNEYTDCSENRSSVHPSGNGCSMQDRYVSNGFCEVRERCWKDHCMDKHNGTDRFVNQQFQEEKLNKLQKLLILLRGLPGSGKTTLSRILLGQNRDGIVFSTDDYFHHQDGYRYNVNQLGDAHDWNQNRAKQAIDQGRSPVIIDNTNIQAWEMKPYVEVAIGKGYRVEFHEPETWWKFDPEELEKRNKHGVSRKKIAQMLDRYEYQMSISIVMNSVEPSHKSTQRPPPPQGRQRWGGSLGSHNRVCVTNNH

SEQ ID NO: 849772 - protein, 477 aa, Homo sapiens; identical to SEQ ID NO: 849761

SEQ ID NO: 849773 - protein, 402 aa, Homo sapiens
MSYGEIEGKFLGPREEVTSEPRCKKLKSTTESYVFHNHSNADFHRIQEKTGNDWVPVTIIDVRGHSYLQENKIKTTDLHRPLHDEMPGNRPDVIESIDSQVLQEARPPLVSADDEIYSTSKAFIGPIYKPPEKKKRNEGRNEAHVLNGINDRGGQKEKQKFNSEKSEIDNELFQFYKEIEELEKEKDGFENSCKESEPSQEQFVPFYEGHNNGLLKPDEEKKDLSNKAMPSHCDYQQNLGNEPDKYPCNGQVIPTFCDTSFTSFRPEWQSVYPFIVPYGPPLPSLNYHLNIQRFSGPPNPPSNIFQAQDDSQIQNGYYVNNCHVNWNCMTFDQNNEYTDCSENRSSVHPSGNGCSMQDRYVSNGFCEVRERCWKDHCMDKHNGGLFWAKCPRIEYLARSQKT

SEQ ID NO: 849774 - protein, 410 aa, Homo sapiens
MRVLVDICSEKEKDGFENSCKESEPSQEQFVPFYEGHNNGLLKPDEEKKDLSNKAMPSHCDYQQNLGNEPDKYPCNGQVIPTFCDTSFTSFRPEWQSVYPFIVPYGPPLPSLNYHLNIQRFSGPPNPPSNIFQAQDDSQIQNGYYVNNCHVNWNCMTFDQNNEYTDCSENRSSVHPSGNGCSMQDRYVSNGFCEVRERCWKDHCMDKHNGTDRFVNQQFQEEKLNKLQKLLILLRGLPGSGKTTLSRILLGQNRDGIVFSTDDYFHHQDGYRYNVNQLGDAHDWNQNRAKQAIDQGRSPVIIDNTNIQAWEMKPYVEVAIGKGYRVEFHEPETWWKFDPEELEKRNKHGVSRKKIAQMLDRYEYQMSISIVMNSVEPSHKSTQRPPPPQGRQRWGGSLGSHNRVCVTNNH

SEQ ID NO: 849775 - protein, 1181 aa, Homo sapiens
MSYGEIEGKFLGPREEVTSEPRCKKLKSTTESYVFHNHSNADFHRIQEKTGNDWVPVTIIDVRGHSYLQENKIKTTDLHRPLHDEMPGNRPDVIESIDSQVLQEARPPLVSADDEIYSTSKAFIGPIYKPPEKKKRNEGRNEAHVLNGINDRGGQKEKQKFNSEKSEIDNELFQFYKEIEELEKEKDGFENSCKESEPSQEQFVPFYEGHNNGLLKPDEEKKDLSNKAMPSHCDYQQNLGNEPDKYPCNGQVIPTFCDTSFTSFRPEWQSVYPFIVPYGPPLPSLNYHLNIQRFSGPPNPPSNIFQAQDDSQIQNGYYVNNCHVNWNCMTFDQNNEYTDCSENRSSVHPSGNGCSMQDRYVSNGFCEVRERCWKDHCMDKHNGTDRFVNQQFQEEKLNKLQKLLILLRGLPGSGKTTLSRILLGQNRDGIVFSTDDYFHHQDGYRYNVNQLGDAHDWNQNRAKQAIDQGRSPVIIDNTNIQAWEMKPYVEVAIGKGYRVEFHEPETWWKFDPEELEKRNKHGVSRKKIAQMLDRYEYQMSISIVMNSVEPSHKSTQRPPPPQGRQRERVLKKTGHRLSKTKQKRNRKRNKKQNSQNRIMEENSLEFLSDLTPGDQDPSQSEEEDIEKTRRESEYPFIDGLQNEVGDFVTGYKEKRWKNKDPKDSFQNVMSIVELDNTPKNYLSKEGDNLFVSLLLRPNEISVTCPILTQNLSCVTTDDCSGMKVEKHIRNRHTIALDTQDLSAETSCLFMKKREIVDKNLSHEPILCHQHGIRMSDKVLREEQVYTTKINHWAFFTTNLSDEDLQLGSDRQPYFGSWPAGPHKFICEQRPKKDRACKLAGPDSRGQWIQMIFTSVAASEPGNNPEILTDKLLIGNEDFSPPPETMDSFIETNLFRSCLPQPDIPKNALESTKNKKRRKKRIFNLVPNFDLLGQSRIGVKEREKCDLLTKNHGLKITLGEEKDRISERNSEEENKQKLMTFDHHPLWFYLDIIKATPLNIDGQRYSHCLSFNRLRCSASLYKNYIPSFVLHNLSSIWKPSFTNKKLFLTFESQTRVGNKLNDAGFISPEILHSHPDTSCSLGVTSDFHFLNERFDRKLKRWEEPKELPAEDSQDLTSTDYRSLELPLSQGFAFQLVKLFGSPGVPMESLLPDDYVVPLDWKTLKMIYLQWKMSVEKRQKKIG

SEQ ID NO: 849776 - protein, 139 aa, Homo sapiens
MALCSALMTIFTIKMGTAKQAIDQGRSPVIIDNTNIQAWEMKPYVEVAIGKGYRVEFHEPETWWKFDPEELEKRNKHGVSRKKIAQMLDRYEYQMSISIVMNSVEPSHKSTQRPPPPQGRQRWGGSLGSHNRVCVTNNH

SEQ ID NO: 849777 - protein, 585 aa, Homo sapiens
MSYGEIEGKFLGPREEVTSEPRCKKLKSTTESYVFHNHSNADFHRIQEKTGNDWVPVTIIDVRGHSYLQENKIKTTDLHRPLHDEMPGNRPDVIESIDSQVLQEARPPLVSADDEIYSTSKAFIGPIYKPPEKKKRNEGRNEAHVLNGINDRGGQKEKQKFNSEKSEIDNELFQFYKEIEELEKEKDGFENSCKESEPSQEQFVPFYEGHNNGLLKPDEEKKDLSNKAMPSHCDYQQNLGNEPDKYPCNGQVIPTFCDTSFTSFRPEWQSVYPFIVPYGPPLPSLNYHLNIQRFSGPPNPPSNIFQAQDDSQIQNGYYVNNCHVNWNCMTFDQNNEYTDCSENRSSVHPSGNGCSMQDRYVSNGFCEVRERCWKDHCMDKHNGTDRFVNQQFQEEKLNKLQKLLILLRGLPGSGKTTLSRILLGQNRDGIVFSTDDYFHHQDGYRYNVNQLGDAHDWNQNRAKQAIDQGRSPVIIDNTNIQAWEMKPYVEVAIGKGYRVEFHEPETWWKFDPEELEKRNKHGVSRKKIAQMLDRYEYQMSISIVMNSVEPSHKSTQRPPPPQGRQSILIASVSSWKGFQDMNDVL

SEQ ID NO: 849778 - protein, 583 aa, Homo sapiens [sequence omitted]

SEQ ID NO: 849779 - protein, 635 aa, Homo sapiens
MNFITDIAPWTATRTFTGIRERVLKKTGHRLSKTKQKRNRKRNKKQNSQNRIMEENSLEFLSDLTPGDQDPSQSEEEDIEKTRRESEYPFIDGLQNEVGDFVTGYKEKRWKNKDPKDSFQNVMSIVELDNTPKNYLSKEGDNLFVSLLLRPNEISVTCPILTQNLSCVTTDDCSGMKVEKHIRNRHTIALDTQDLSAETSCLFMKKREIVDKNLSHEPILCHQHGIRMSDKVLREEQVYTTKINHWAFFTTNLSDEDLQLGSDRQPYFGSWPAGPHKFICEQRPKKDRACKLAGPDSRGQWIQMIFTSVAASEPGNNPEILTDKLLIGNEDFSPPPETMDSFIETNLFRSCLPQPDIPKNALESTKNKKRRKKRIFNLVPNFDLLGQSRIGVKEREKCDLLTKNHGLKITLGEEKDRISERNSEEENKQKLMTFDHHPLWFYLDIIKATPLNIDGQRYSHCLSFNRLRCSASLYKNYIPSFVLHNLSSIWKPSFTNKKLFLTFESQTRVGNKLNDAGFISPEILHSHPDTSCSLGVTSDFHFLNERFDRKLKRWEEPKELPAEDSQDLTSTDYRSLELPLSQGFAFQLVKLFGSPGVPMESLLPDDYVVPLDWKTLKMIYLQWKMSVEKRQKKIG

SEQ ID NO: 849780 - protein, 152 aa, Homo sapiens
MVHSPRSLVANPSQVLFFLSFLFFFFLRQSFALVAQAGVQWRNLGSLQPPPPGFKQFSCLSLLSSWDYRHAPPCPAYFVFLVDMGFPHVGQTGLELLTSGDPPASASQSAGITGGSHRAQPTSSNPYGIVFFFLPVKTFSGMSQEAGDCRET

SEQ ID NO: 849781 - protein, 134 aa, Homo sapiens
MRERSRARETGPESRAAVSARVGWRPTAPEPPPGTTQTPPPPCASLRPRRGPPDTSMDCCTENACSKPDDDILDIPLDDPGANAAAAKIQASFRGHMARKKIKSGERGRKGPGPGGPGGAGVARGGAGGGPSGD

SEQ ID NO: 849782 - protein, 81 aa, Homo sapiens
LGRDWVPGAGGGPSEDRPRTEHFQSSRGEMDAASPSQRRDFPAVFVTPSCPATCQLQEPPASQRLPHPGRLRRGVAESVPF

SEQ ID NO: 849783 - protein, 134 aa, Homo sapiens; identical to SEQ ID NO: 849781

SEQ ID NO: 849784 - protein, 134 aa, Homo sapiens; identical to SEQ ID NO: 849781

SEQ ID NO: 849785 - protein, 134 aa, Homo sapiens; identical to SEQ ID NO: 849781

SEQ ID NO: 849786 - protein, 134 aa, Homo sapiens; identical to SEQ ID NO: 849781

SEQ ID NO: 849787 - protein, 134 aa, Homo sapiens; identical to SEQ ID NO: 849781

SEQ ID NO: 849788 - protein, 68 aa, Homo sapiens
LHFSPPTLPEAAPDWLPGRGAQVTFASGAERGRPDPRAELLFRRGSAGGRRGGPGRRGRRPQRRLGQN

SEQ ID NO: 849789 - protein, 216 aa, Homo sapiens
ENPGLRLGPSELEVPSESRGTGGHSRSACCCFPCPSKPTLQSALQTPNSVLVMGLALPHPILPALLFPELRHDCPPGPEPSSPVAAHAPVSVPAIALLQARHPSLYLPPPRRHSPCPSGLYSYPTPADQDPVTPQEPPCFSPQENACSKPDDDILDIPLDDPGANAAAAKIQASFRGHMARKKIKSGERGRKGPGPGGPGGAGVARGGAGGGPSGD

SEQ ID NO: 849790 - protein, 140 aa, Homo sapiens
STSPRPPCRRLLLIGFPAAGLRLHSRAEPSAGDRTREQSCCFGAGRLAADCPRAPTRHHTDPTPALRQPSSPQRTPRHQHGLLHRERLLQAGRRHSRHPAGRSRRQRGRRQNPELSIFKVPEERWMPRPLRSDETSLPCL

SEQ ID NO: 849791 - protein, 134 aa, Homo sapiens; identical to SEQ ID NO: 849781

SEQ ID NO: 849792 - protein, 134 aa, Homo sapiens; identical to SEQ ID NO: 849781

SEQ ID NO: 849793 - protein, 134 aa, Homo sapiens; identical to SEQ ID NO: 849781

SEQ ID NO: 849794 - protein, 84 aa, Homo sapiens
SRIARQSVLQEIQHCVFLSRSLPFPQRTVEGSLSSSLVYANAERLGGSVGGVFHGPAPPLSVPPSPPPGSWGCGRKVSDLRVCM

SEQ ID NO: 849795 - protein, 869 aa, Homo sapiens
MAGCRGSLCCCCRWCCCCGERETRTPEELTILGETQEEEDEILPRKDYESLDYDRCINDPYLEVLETMDNKKGRRYEAVKWMVVFAIGVCTGLVGLFVDFFVRLFTQLKFGVVQTSVEECSQKGCLALSLLELLGFNLTFVFLASLLVLIEPVAAGSGIPEVKCYLNGVKVPGIVRLRTLLCKVLGVLFSVAGGLFVGKEGPMIHSGSVVGAGLPQFQSISLRKIQFNFPYFRSDRDKRDFVSAGAAAGVAAAFGAPIGGTLFSLEEGSSFWNQGLTWKVLFCSMSATFTLNFFRSGIQFGSWGSFQLPGLLNFGEFKCSDSDKKCHLWTAMDLGFFVVMGVIGGLLGATFNCLNKRLAKYRMRNVHPKPKLVRVLESLLVSLVTTVVVFVASMVLGECRQMSSSSQIGNDSFQLQVTEDVNSSIKTFFCPNDTYNDMATLFFNPQESAILQLFHQDGTFSPVTLALFFVLYFLLACWTYGISVPSGLFVPSLLCGAAFGRLVANVLKSYIGLGHIYSGTFALIGAAAFLGGVVRMTISLTVILIESTNEITYGLPIMVTLMVAKWTGDFFNKGIYDIHVGLRGVPLLEWETEVEMDKLRASDIMEPNLTYVYPHTRIQSLVSILRTTVHHAFPVVTENRGNEKEFMKGNQLISNNIKFKKSSILTRAGEQRKRSQSMKSYPSSELRNMCDEHIASEEPAEKEDLLQQMLERRYTPYPNLYPDQSPSEDWTMEERFRPLTFHGLILRSQLVTLLVRGVCYSESQSSASQPRLSYAEMAEDYPRYPDIHDLDLTLLNPRMIVDVTPYMNPSPFTVSPNTHVSQVFNLFRTMGLRHLPVVNAVGEIVGIITRHNLTYEFLQARLRQHYQTI

SEQ ID NO: 849796 - protein, 353 aa, Homo sapiens
MAGCRGSLCCCCRWCCCCGERETRTPEELTILGETQEEEDEILPRKDYESLDYDRCINDPYLEVLETMDNKKGRRYEAVKWMVVFAIGVCTGLVGLFVDFFVRLFTQLKFGVVQTSVEECSQKGCLALSLLELLGFNLTFVFLASLLVLIEPVAAGSGIPEVKCYLNGVKVPGIVRLRTLLCKVLGVLFSVAGGLFVGKEGPMIHSGSVVGAGLPQFQSISLRKIQFNFPYFRSDRDKRDFVSAGAAAGVAAAFGAPIGGTLFSLEEGSSFWNQGLTWKVLFCSMSATFTLNFFRSGIQFGSWGSFQLPGLLNFGEFKSLREPPCVSGNHRGGVCGLDGVRRMPTDVLFESNR

SEQ ID NO: 849797 - protein, 102 aa, Homo sapiens
RTWKADSKVLSEPQLLFHLPLPEGATAQRLSTHLMASVTMTVTLERKKYLCQGKEASLFPASSASSRRWVLCGCATLLHSSFSLLGGRDIFQRLSLRSGPMR

SEQ ID NO: 849798 - protein, 122 aa, Homo sapiens
MAGCRGSLCCCCRWCCCCGERETRTPEELTILGETQEEEDEILPRKDYESLDYDRCINDPYLEVLETMDNKKGRRYEAVKWMVVFAIGVCTGLVGLFVDFFVRLFTQLKFGVVQTYKFQMKM

SEQ ID NO: 849799 - protein, 813 aa, Homo sapiens
MAGCRGSLCCCCRWCCCCGERETRTPEELTILGETQEEEDEILPRKDYESLDYDRCINDPYLEVLETMDNKKGRRYEAVKWMVVFAIGVCTGLVGLFVDFFVRLFTQLKFGVVQTSVEECSQKGCLALSLLELLGFNLTFVFLASLLVLIEPVAAGSGIPEVKCYLNGVKVPGIVRLRTLLCKVLGVLFSVAGGLFVGKEGPMIHSGSVVGAGLPQFQSISLRKIQFNFPYFRSDRDKRDFVSAGAAAGVAAAFGAPIGGTLFSLEEGSSFWNQGLTWKVLFCSMSATFTLNFFRSGIQFGSWGSFQLPGLLNFGEFKVLESLLVSLVTTVVVFVASMVLGECRQMSSSSQIGNDSFQLQVTEDVNSSIKTFFCPNDTYNDMATLFFNPQESAILQLFHQDGTFSPVTLALFFVLYFLLACWTYGISVPSGLFVPSLLCGAAFGRLVANVLKSYIGLGHIYSGTFALIGAAAFLGGVVRMTISLTVILIESTNEITYGLPIMVTLMVAKWTGDFFNKGIYDIHVGLRGVPLLEWETEVEMDKLRASDIMEPNLTYVYPHTRIQSLVSILRTTVHHAFPVVTENRGNEKEFMKGNQLISNNIKFKKSSILTRAGEQRKRSQSMKSYPSSELRNMCDEHIASEEPAEKEDLLQQMLERRYTPYPNLYPDQSPSEDWTMEERFRPLTFHGLILRSQLVTLLVRGVCYSESQSSASQPRLSYAEMAEDYPRYPDIHDLDLTLLNPRMIVDVTPYMNPSPFTVSPNTHVSQVFNLFRTMGLRHLPVVNAVGEIVGIITRHNLTYEFLQARLRQHYQTI

SEQ ID NO: 849800 - protein, 432 aa, Homo sapiens [sequence omitted]

SEQ ID NO: 849801 - protein, 161 aa, Homo sapiens
MTRMQQRPQGTGASCSLSLGPALLVLPGCYLRYRKLLQPSPLWAPILSILPPKQLDLRRLRGAVSSALSLLFRRADRSEESQGPRPRAPPSLWAGLTSPVQGGTSGRGLRAAPASSFGSLSTCGGTTSSSKGIFSSKWSSKFLKSIRSALDTALYMGLALV

SEQ ID NO: 849802 - protein, 869 aa, Homo sapiens; identical to SEQ ID NO: 849795

SEQ ID NO: 849803 - protein, 869 aa, Homo sapiens; identical to SEQ ID NO: 849795

SEQ ID NO: 849804 - protein, 383 aa, Homo sapiens
MAGCRGSLCCCCRWCCCCGERETRTPEELTILGETQEEEDEILPRKDYESLDYDRCINDPYLEVLETMDNKKGRRYEAVKWMVVFAIGVCTGLVGLFVDFFVRLFTQLKFGVVQTSVEECSQKGCLALSLLELLGFNLTFVFLASLLVLIEPVAAGSGIPEVKCYLNGVKVPGIVRLRTLLCKVLGVLFSVAGGLFVGKEGPMIHSGSVVGAGLPQFQSISLRKIQFNFPYFRSDRDKRDFVSAGAAAGVAAAFGAPIGGTLFSLEEGSSFWNQGLTWKVLFCSMSATFTLNFFRSGIQFGSWGSFQLPGLLNFGEFKSPAHPLLVLPGEANHAHSGGHSWLGLFRGMEDSQLPTHSESRESSDTLLVRGPGGGFEPSELGLF

SEQ ID NO: 849805 - protein, 308 aa, Homo sapiens
MAGCRGSLCCCCRWCCCCGERETRTPEELTILGETQEEEDEILPRKDYESLDYDRCINDPYLEVLETMDNKKGRRYEAVKWMVVFAIGVCTGLVGLFVDFFVRLFTQLKFGVVQTSVEECSQKGCLALSLLELLGFNLTFVFLASLLVLIEPVAAGSGIPEVKCYLNGVKVPGIVRLRTLLCKVLGVLFSVAGGLFVGKEGPMIHSGSVVGAGLPQFQSISLRKIQFNFPYFRSDRSGCWSCCSFRGANRGYLVQSRGGFVLLEPRAHVESALLFHVCHLHPQLLPFWDSVWKLGFLPAPWIAELWRV

SEQ ID NO: 849806 - protein, 869 aa, Homo sapiens; identical to SEQ ID NO: 849795

SEQ ID NO: 849807 - protein, 585 aa, Homo sapiens
MSATFTLNFFRSGIQFGSWGSFQLPGLLNFGEFKCSDSDKKCHLWTAMDLGFFVVMGVIGGLLGATFNCLNKRLAKYRMRNVHPKPKLVRVLESLLVSLVTTVVVFVASMVLGECRQMSSSSQIGNDSFQLQVTEDVNSSIKTFFCPNDTYNDMATLFFNPQESAILQLFHQDGTFSPVTLALFFVLYFLLACWTYGISVPSGLFVPSLLCGAAFGRLVANVLKSYIGLGHIYSGTFALIGAAAFLGGVVRMTISLTVILIESTNEITYGLPIMVTLMVAKWTGDFFNKGIYDIHVGLRGVPLLEWETEVEMDKLRASDIMEPNLTYVYPHTRIQSLVSILRTTVHHAFPVVTENRGNEKEFMKGNQLISNNIKFKKSSILTRAGEQRKRSQSMKSYPSSELRNMCDEHIASEEPAEKEDLLQQMLERRYTPYPNLYPDQSPSEDWTMEERFRPLTFHGLILRSQLVTLLVRGVCYSESQSSASQPRLSYAEMAEDYPRYPDIHDLDLTLLNPRMIVDVTPYMNPSPFTVSPNTHVSQVFNLFRTMGLRHLPVVNAVGEIVGIITRHNLTYEFLQARLRQHYQTI

SEQ ID NO: 849808 - protein, 869 aa, Homo sapiens; identical to SEQ ID NO: 849795

SEQ ID NO: 849809 - protein, 869 aa, Homo sapiens; identical to SEQ ID NO: 849795

SEQ ID NO: 849810 - protein, 869 aa, Homo sapiens; identical to SEQ ID NO: 849795

SEQ ID NO: 849811 - protein, 91 aa, Homo sapiens
GVSKLGNYWARRSIHGTSVGGRARSRPGLPKLHPPFSSFSEAQEGLQKFKVVRAGVHAPEEVGPREAGEPPLPSAEPLPSVKDKMQIMEMI

SEQ ID NO: 849812 - protein, 180 aa, Homo sapiens
MAALDLRAELDSLVLQLLGDLEELEGKRTVLNARVEEGWLSLAKARYAMGAKSVGPLQYASHMEPQVCLHASEAQEGLQKFKVVRAGVHAPEEVGPREAGLRRRKGPTKTPEPESSEAPQDPLNWFGILVPHSLRQAQASFRDGLQLAADIASLQNRIDWGRSQLRGLQEKLKQLEPGAA

SEQ ID NO: 849813 - protein, 180 aa, Homo sapiens; identical to SEQ ID NO: 849812

SEQ ID NO: 849814 - protein, 172 aa, Homo sapiens
MAALDLRAELDSLVLQLLGDLEELEGKRTGWLSLAKARYAMGAKSVGPLQYASHMEPQVCLHASEAQEGLQKFKVVRAGVHAPEEVGPREAGLRRRKGPTKTPEPESSEAPQDPLNWFGILVPHSLRQAQASFRDGLQLAADIASLQNRIDWGRSQLRGLQEKLKQLEPGAA

SEQ ID NO: 849815 - protein, 193 aa, Homo sapiens
MAALDLRAELDSLVLQLLGDLEELEGKRTVLNARVEEGWLSLAKARYAMGAKSVGPLQYASHMEPQVCLHASEAQEGLQKFKVVRAGVHAPEEVGPREAGLRRRKGPTKTPEPESSEAPQDPLNWFGILVPHSLRQAQASFRDGVLEAKKRKCFLERVIQCVVSPAAEQEAEDESCPEDWAAAVPAETSAKAI

SEQ ID NO: 849816 - protein, 180 aa, Homo sapiens; identical to SEQ ID NO: 849812

SEQ ID NO: 849817 - protein, 126 aa, Homo sapiens
MGTPLDGGSRVPIGCPAKLRRVTRKKVAPDLEGWLSLAKARYAMGAKSVGPLQYASHMEPQVCLHASEAQEGLQKFKVVRAGVHAPEEVGPREAGLRRRKGPTKTPEPESSEAPQDPLNWFGILDI

SEQ ID NO: 849818 - protein, 180 aa, Homo sapiens; identical to SEQ ID NO: 849812

SEQ ID NO: 849819 - protein, 175 aa, Homo sapiens
MGTPLDGGSRVPIGCPAKLRRVTRKKVAPDLEGWLSLAKARYAMGAKSVGPLQYASHMEPQVCLHASEAQEGLQKFKVVRAGVHAPEEVGPREAGLRRRKGPTKTPEPESSEAPQDPLNWFGILVPHSLRQAQASFRDGLQLAADIASLQNRIDWGRSQLRGLQEKLKQLEPGAA

SEQ ID NO: 849820 - protein, 200 aa, Homo sapiens
MGTPLDGGSRVPIGCPAKLRRVTRKKVAPDLEGWLSLAKARYAMGAKSVGPLQYASHMEPQVCLHASEAQEGLQKFKVVRAGVHAPEEVGPREAGLRRRKGPTKTPEPESSEAPQDPLNWFGILVPHSLRQAQASFRDALLLNRRPKTRAARRTGQQLFQQRHQQKPSRGGSRVWTNREKKWRESRPAAGRRHSQPPEPH

SEQ ID NO: 849821 - protein, 188 aa, Homo sapiens
MGTPLDGGSRVPIGCPAKLRRVTRKKVAPDLEGWLSLAKARYAMGAKSVGPLQYASHMEPQVCLHASEAQEGLQKFKVVRAGVHAPEEVGPREAGLRRRKGPTKTPEPESSEAPQDPLNWFGILVPHSLRQAQASFRDGVLEAKKRKCFLERVIQCVVSPAAEQEAEDESCPEDWAAAVPAETSAKAI

SEQ ID NO: 849822 - protein, 131 aa, Homo sapiens
MAALDLRAELDSLVLQLLGDLEELEGKRTVLNARVEEGWLSLAKARYAMGAKSVGPLQYASHMEPQVCLHASEAQEGLQKFKVVRAGVHAPEEVGPREAGLRRRKGPTKTPEPESSEAPQDPLNWFGILDI

SEQ ID NO: 849823 - protein, 131 aa, Homo sapiens; identical to SEQ ID NO: 849822

SEQ ID NO: 849824 - protein, 153 aa, Homo sapiens
MAALDLRAELDSLVLQLLGDLEELEGKRTVLNARVEEGWLSLAKARYAMGAKSVGPLQYASHMEPQVCLHAREEASMLGWVGGRARSRPGLPKLHPPFSSFSEAQEGLQKFKVVRAGVHAPEEVGPREAGEPPLPSAEPLPSVKDKMQIMEMI

SEQ ID NO: 849825 - protein, 432 aa, Homo sapiens
RGPEAEPPPCRDFQTPTMASRWWRWRRGCSWKPAARSPGPGSPGRAGPLGPSAAAEVRAQVHRRKGLDLSQIPYINLVKHLTSACPNVCRISRFHHTTPDSKTHSGEKYTDPFKLGWRDLKGLYEDIRKELLISTSELKEMSEYYFDGKGKAFRPIIVALMARACNIHHNNSRHVQASQRAIALIAEMIHTASLVHDDVIDDASSRRGKHTVNKIWGEKKAVLAGDLILSAASIALARIGNTTVISILTQVIEDLVRGEFLQLGSKENENERFAHYLEKTFKKTASLIANSCKAVSVLGCPDPVVHEIAYQYGKNVGIAFQLIDDVLDFTSCSDQMGKPTSADLKLGLATGPVLFACQQFPEMNAMIMRRFSLPGDVDRARQYVLQSDGVQQTTYLAQQYCHEAIREISKLRPSPERDALIQLSEIVLTRDK

SEQ ID NO: 849826 - protein, 153 aa, Homo sapiens
MIFMDTPRNNCIQKQVSVLGCPDPVVHEIAYQYGKNVGIAFQLIDDVLDFTSCSDQMGKPTSADLKLGLATGPVLFACQQFPEMNAMIMRRFSLPGDVDRARQYVLQSDGVQQTTYLAQQYCHEAIREISKLRPSPERDALIQLSEIVLTRDK

SEQ ID NO: 849827 - protein, 397 aa, Homo sapiens
RGPEAEPPPCRDFQTPTMASRWWRWRRGCSWKPAARSPGPGSPGRAGPLGPSAAAEVRAQVHRRKGLDLSQIPYINLVKHLTSACPNVCRISRFHHTTPDSKTHSGEKYTDPFKLGWRDLKGLYEDIRKELLISTSELKEMSEYYFDGKGKAFRPIIVALMARACNIHHNNSRHVQASQRAIALIAEMIHTASLVHDDVIDDASSRRGKHTVNKIWGEKKAVLAGDLILSAASIALARIGNTTVISILTQVIEDLVRGEFLQLGSKENENERFAHYLEKTFKKTASLIANSCKAVSVLGCPDPVVHEIAYQYGKNVGIAFQLIDDVLDFTSCSDQMGKPTSADLKLGLATGPVLFACQQFPEMNAMIMRRFSLPGDVDRARQYVLQTTYEMFCFNWS

SEQ ID NO: 849828 - protein, 432 aa, Homo sapiens; identical to SEQ ID NO: 849825

SEQ ID NO: 849829 - protein, 460 aa, Homo sapiens
RGPEAEPPPCRDFQTPTMASRWWRWRRGCSWKPAARSPGPGSPGRAGPLGPSAAAEVRAQVHRRKGLDLSQIPYINLVKHLTSACPNVCRISRFHHTTPDSKTHSGEKYTDPFKLGWRDLKGLYEDIRKELLISTSELKEMSEYYFDGKGKAFRPIIVALMARACNIHHNNSRSDVQFSQADVLRRFQAASVKKHCFLLIRHVQASQRAIALIAEMIHTASLVHDDVIDDASSRRGKHTVNKIWGEKKAVLAGDLILSAASIALARIGNTTVISILTQVIEDLVRGEFLQLGSKENENERFAHYLEKTFKKTASLIANSCKAVSVLGCPDPVVHEIAYQYGKNVGIAFQLIDDVLDFTSCSDQMGKPTSADLKLGLATGPVLFACQQFPEMNAMIMRRFSLPGDVDRARQYVLQSDGVQQTTYLAQQYCHEAIREISKLRPSPERDALIQLSEIVLTRDK

SEQ ID NO: 849830 - protein, 397 aa, Homo sapiens; identical to SEQ ID NO: 849827

SEQ ID NO: 849831 - protein, 138 aa, Homo sapiens
  misc_feature (43)..(43): Xaa can be any naturally occurring amino acid
YEFGRTRMATMRKRREQKRKQTSGKNVCMTNSRMRPWRVCKIXSSFSFSSLHRSISPGSLPCLSGSTFLCSCLLHLFLSAFSPHLLSSVHLIFLLPSCLCPSSSFQRLKTSQWPLAFQCLLLLLELPLPSSASVLPSS

SEQ ID NO: 849832 - protein, 95 aa, Homo sapiens
RPHWSAAFPLDYEFRENCGLNDHGDFVTPPFRKCSSGQCNPDGAELCSPCGGGAVTPTPAAGGGRTPWRCREVQMGLPAGQGRAGGGGPRCREPA

SEQ ID NO: 849833 - protein, 355 aa, Homo sapiens
MGPGRCLLTALLLLALAPPPEASQYCGRLEYWNPDNKCCSSCLQRFGPPPCPDYEFRENCGLNDHGDFVTPPFRKCSSGQCNPDGAELCSPCGGGAVTPTPAAGGGRTPWRCRERPVPAKGHCPLTPGNPGAPSSQERSSPASSIAWRTPEPVPQQAWPNFLPLVVLVLLLTLAVIAILLFILLWHLCWPKEKADPYPYPGLVCGVPNTHTPSSSHLSSPGALETGDTWKEASLLPLLSRELSSLASQPLSRLLDELEVLEELIVLLDPEPGPGGGMAHGTTRHLAARYGLPAAWSTFAYSLRPSRSPLRALIEMVVAREPSASLGQLGTHLAQLGRADALRVLSKLGSSGVCWA

SEQ ID NO: 849834 - protein, 355 aa, Homo sapiens; identical to SEQ ID NO: 849833

SEQ ID NO: 849835 - protein, 355 aa, Homo sapiens; identical to SEQ ID NO: 849833

SEQ ID NO: 849836 - protein, 355 aa, Homo sapiens; identical to SEQ ID NO: 849833

SEQ ID NO: 849837 - protein, 355 aa, Homo sapiens; identical to SEQ ID NO: 849833

SEQ ID NO: 849838 - protein, 355 aa, Homo sapiens; identical to SEQ ID NO: 849833

SEQ ID NO: 849839 - protein, 143 aa, Homo sapiens [sequence omitted]

SEQ ID NO: 849840 - protein, 143 aa, Homo sapiens [sequence omitted]

SEQ ID NO: 849841 - protein, 355 aa, Homo sapiens; identical to SEQ ID NO: 849833

SEQ ID NO: 849842 - protein, 167 aa, Homo sapiens
MGPGRCLLTALLLLALAPPPEASQYCGRLEYWNPDNKCCSSCLQRFGPPPCPELSSLASQPLSRLLDELEVLEELIVLLDPEPGPGGGMAHGTTRHLAARYGLPAAWSTFAYSLRPSRSPLRALIEMVVAREPSASLGQLGTHLAQLGRADALRVLSKLGSSGVCWA

SEQ ID NO: 849843 - protein, 143 aa, Homo sapiens [sequence omitted]

SEQ ID NO: 849844 - protein, 131 aa, Homo sapiens
MGPGRCLLTALLLLALAPPPEASQYCGRLEYWNPDNKCCSSCLQRFGPPPCPDYEFRENCGLNDHGDFVTPPFRKCSSGQCNPDGAELCSPCGGGAVTPTPAAGGGRTPWRCREAPWRQGTHGRRPHYFHS

SEQ ID NO: 849845 - protein, 187 aa, Homo sapiens
MGPGRCLLTALLLLALAPPPEASQYCGRLEYWNPDNKCCSSCLQRFGPPPCPGALETGDTWKEASLLPLLSRELSSLASQPLSRLLDELEVLEELIVLLDPEPGPGGGMAHGTTRHLAARYGLPAAWSTFAYSLRPSRSPLRALIEMVVAREPSASLGQLGTHLAQLGRADALRVLSKLGSSGVCWA

SEQ ID NO: 849846 - protein, 355 aa, Homo sapiens; identical to SEQ ID NO: 849833

SEQ ID NO: 849847 - protein, 136 aa, Homo sapiens
MGPGRCLLTALLLLALAPPPEASQYCGRLEYWNPDNKCCSSCLQRFGPPPCPDYEFRENCGLNDHGDFVTPPFRKCSSGQCNPDGAELCSPCGGGAVTPTPAAGGGRTPWRCRENCPVWRHNPCLASWMSWRCWKS

SEQ ID NO: 849848 - protein, 355 aa, Homo sapiens; identical to SEQ ID NO: 849833

SEQ ID NO: 849849 - protein, 137 aa, Homo sapiens
MGPGRCLLTALLLLALAPPPEASQYCGRLEYWNPDNKCCSSCLQRFGPPPCPDYEFRENCGLNDHGDFVTPPFRKCSSGQCNPDGAELCSPCGGGAVTPTPAAGGGRTPWRCREVQMGLPAGQGRAGGGGPRCREPA

SEQ ID NO: 849850 - protein, 143 aa, Homo sapiens [sequence omitted]

SEQ ID NO: 849851 - protein, 355 aa, Homo sapiens; identical to SEQ ID NO: 849833

SEQ ID NO: 849852 - protein, 355 aa, Homo sapiens; identical to SEQ ID NO: 849833

SEQ ID NO: 849853 - protein, 355 aa, Homo sapiens; identical to SEQ ID NO: 849833

SEQ ID NO: 849854 - protein, 154 aa, Homo sapiens
MESGPWLNSVTAGSTGRLCTGMYPRWLLQLHASAAHFPEPPEAALWAGTQAQAGVQRRSLGSVQPLPPREMGFHHVGQPGLELRTSGHPRGSILATIPERGTIGVPLITGMAASEALAPLPFTPNRDRCSWQDLSSKPPSLSCPILPRLPGSIM

SEQ ID NO: 849855 - protein, 150 aa, Homo sapiens
MNVCDNLGDHLVGNVYVKFRREEDGERAVAELSNRWFNGQAVHGNVPEVASATSCICGPFPRTSRGSSMGGDPGAGWSAKAQSWLSATSASQEMGFHHVGQPGLELRTSGNPPISASQSVGITGVNHCARSFPRLLYPKSSSELHLETST

SEQ ID NO: 849856 - protein, 313 aa, Homo sapiens
RPHWSAAFPLDYEFRENCGLNDHGDFVTPPFRKCSSGQCNPDGAELCSPCGGGAVTPTPAAGGGRTPWRCRERPVPAKGHCPLTPGNPGAPSSQERSSPASSIAWRTPEPVPQQAWPNFLPLVVLVLLLTLAVIAILLFILLWHLCWPKEKADPYPYPGLVCGVPNTHTPSSSHLSSPGALETGDTWKEASLLPLLSRELSSLASQPLSRLLDELEVLEELIVLLDPEPGPGGGMAHGTTRHLAARYGLPAAWSTFAYSLRPSRSPLRALIEMVVAREPSASLGQLGTHLAQLGRADALRVLSKLGSSGVCWA

SEQ ID NO: 849857 - protein, 355 aa, Homo sapiens; identical to SEQ ID NO: 849833

SEQ ID NO: 849858 - protein, 355 aa, Homo sapiens; identical to SEQ ID NO: 849833

SEQ ID NO: 849859 - protein, 355 aa, Homo sapiens; identical to SEQ ID NO: 849833

SEQ ID NO: 849860 - protein, 355 aa, Homo sapiens; identical to SEQ ID NO: 849833

SEQ ID NO: 849861 - protein, 355 aa, Homo sapiens; identical to SEQ ID NO: 849833

SEQ ID NO: 849862 - protein, 136 aa, Homo sapiens; identical to SEQ ID NO: 849847

SEQ ID NO: 849863 - protein, 355 aa, Homo sapiens; identical to SEQ ID NO: 849833

SEQ ID NO: 849864 - protein, 187 aa, Homo sapiens; identical to SEQ ID NO: 849845

SEQ ID NO: 849865 - protein, 167 aa, Homo sapiens; identical to SEQ ID NO: 849842

SEQ ID NO: 849866 - protein, 136 aa, Homo sapiens; identical to SEQ ID NO: 849847

SEQ ID NO: 849867 - protein, 355 aa, Homo sapiens; identical to SEQ ID NO: 849833

SEQ ID NO: 849868 - protein, 355 aa, Homo sapiens; identical to SEQ ID NO: 849833

SEQ ID NO: 849869 - protein, 355 aa, Homo sapiens; identical to SEQ ID NO: 849833

SEQ ID NO: 849870 - protein, 167 aa, Homo sapiens; identical to SEQ ID NO: 849842

SEQ ID NO: 849871 - protein, 103 aa, Homo sapiens
MNVCDNLGDHLVGNVYVKFRREEDGERAVAELSNRWFNGQAVHGNVPEVASATSCICGPFPRTSRGSSMGGDPGAGWSAKAQSWLSATSASQVQAILLSQPPK

SEQ ID NO: 849872 - protein, 77 aa, Homo sapiens
KSSQTWRAWVKMAEYLASIFGTEKDKVNCSFYFKIGVCRHGDRCSRLHNKPTFSQTIVLLNLYRNPQNTAQTADGSH

SEQ ID NO: 849873 - protein, 205 aa, Homo sapiens
MAHGPGALMLKCVVVGDGAVGKTCLLMSYANDAFPEEYVPTVFDHYAVSVTVGGKQYLLGLYDTAGQEDYDRLRPLSYPMTDVFLICFSVVNPASFQNVKEEWVPELKEYAPNVPFLLIGTQIDLRDDPKTLARLNDMKEKPICVEQGQKLAKEIGACCYVECSALTQKGLKTVFDEAIIAILTPKKHTVKKRIGSRCINCCLIT

SEQ ID NO: 849874 - protein, 205 aa, Homo sapiens; identical to SEQ ID NO: 849873

SEQ ID NO: 849875 - protein, 157 aa, Homo sapiens
MPTTPSRRSTCPPSSTTTQEDYDRLRPLSYPMTDVFLICFSVVNPASFQNVKEEWVPELKEYAPNVPFLLIGTQIDLRDDPKTLARLNDMKEKPICVEQGQKLAKEIGACCYVECSALTQKGLKTVFDEAIIAILTPKKHTVKKRIGSRCINCCLIT

SEQ ID NO: 849876 - protein, 205 aa, Homo sapiens; identical to SEQ ID NO: 849873

SEQ ID NO: 849877 - protein, 205 aa, Homo sapiens; identical to SEQ ID NO: 849873

SEQ ID NO: 849878 - protein, 205 aa, Homo sapiens; identical to SEQ ID NO: 849873

SEQ ID NO: 849879 - protein, 205 aa, Homo sapiens; identical to SEQ ID NO: 849873

SEQ ID NO: 849880 - protein, 205 aa, Homo sapiens; identical to SEQ ID NO: 849873

SEQ ID NO: 849881 - protein, 205 aa, Homo sapiens; identical to SEQ ID NO: 849873

SEQ ID NO: 849882 - protein, 131 aa, Homo sapiens
MAHGPGALMLKCVVVGDGAVGKTCLLMSYANDAFPEEYVPTVFDHYAVSVTVGGKQYLLGLYDTAGQEDYDRLRPLSYPMTDVFLICFSVVNPASFQNVKEEWVPELKEYAPNVPFLLIGTQMDLRDDPKT

SEQ ID NO: 849883 - protein, 119 aa, Homo sapiens [sequence omitted]

SEQ ID NO: 849884 - protein, 126 aa, Homo sapiens
MTDVFLICFSVVNPASFQNVKEEWVPELKEYAPNVPFLLIGTQIDLRDDPKTLARLNDMKEKPICVEQGQKLAKEIGACCYVECSALTQKGLKTVFDEAIIAILTPKKHTVKKRIGSRCINCCLIT

SEQ ID NO: 849885 - protein, 118 aa, Homo sapiens
MAHGPGALMLKCVVVGDGAVGKTCLLMSYANDAFPEEYVPTVFDHYAVSVTVGGKQYLLGLYDTAGQIGACCYVECSALTQKGLKTVFDEAIIAILTPKKHTVKKRIGSRCINCCLIT

SEQ ID NO: 849886 - protein, 205 aa, Homo sapiens; identical to SEQ ID NO: 849873

SEQ ID NO: 849887 - protein, 167 aa, Homo sapiens
MPTTPSRRSTCPPSSTTTQEDYDRLRPLSYPMTDVFLICFSVVNPASFQNVKEEWVPELKEYAPNVPFLLIGTQIDLRDDPKTLARLNDMKEKPICVEQGQKLAKEIGACCYVECSALTQKGLKTVFDEAIIAILTPKKHNLQWPRKLSISLRKQMKCYSYTQTFYR

SEQ ID NO: 849888 - protein, 205 aa, Homo sapiens; identical to SEQ ID NO: 849873

SEQ ID NO: 849889 - protein, 150 aa, Homo sapiens
MPTTPSRRSTCPPSSTTTQEDYDRLRPLSYPMTDVFLICFSVVNPASFQNVKEEWVPELKEYAPNVPFLLIGTQIDLRDDPKTLARLNDMKEKPICVEQGQKLAKEVMEHSQNLSMNVKDAKITIEANFIVYLLCARWSALHALSHLILA

SEQ ID NO: 849890 - protein, 112 aa, Homo sapiens
  misc_feature (68)..(68): Xaa can be any naturally occurring amino acid
  misc_feature (70)..(70): Xaa can be any naturally occurring amino acid
GCSMRIPSVYIVLCVGLEICVSRSQYSGPPALSMAPGARPRTRGVVVEPHELGVVHVAHCDEAGLPAXCXGTMAVKKYLMEWEPAQVSVRATAPQSSRRRVRGTCNPSSPGG

SEQ ID NO: 849891 - protein, 655 aa, Homo sapiens
VISPPCAPTRNSHPGPGCTASPPAPPGWPFSQRGPGRWSTTELRKEKSRDAARSRRSQETEVLYQLAHTLPFARGVSAHLDKASIMRLTISYLRMHRLCAAGEWNQVGAGGEPLDACYLKALEGFVMVLTAEGDMAYLSENVSKHLGLSQLELIGHSIFDFIHPCDQEELQDALTPQQTLSRRKVEAPTERCFSLRMKSTLTSRGRTLNLKAATWKVLNCSGHMRAYKPPAQTSPAGSPDSEPPLQCLVLICEAIPHPGSLEPPLGRGAFLSRHSLDMKFTYCDDRIAEVAGYSPDDLIGCSAYEYIHALDSDAVSKSIHTLLSKGQAVTGQYRFLARSGGYLWTQTQATVVSGGRGPQSESIVCVHFLISQVEETGVVLSLEQTEQHSRRPIQRGAPSQKDTPNPGDSLDTPGPRILAFLHPPSLSEAALAADPRRFCSPDLRRLLGPILDGASVAATPSTPLATRHPQSPLSADLPDELPVGTENVHRLFTSGKDTEAVETDLDIAQDADALDLEMLAPYISMDDDFQLNASEQLPRAYHRPLGAVPRPRARSFHGLSPPALEPSLLPRWGSDPRLSCSSPSRGDPSASSPMAGARKRTLAQSSEDEDEGVELLGVRPPKRSPSPEHENFLLFPLSLSFLLTGGPAPGSLQAH

SEQ ID NO: 849892 - protein, 698 aa, Homo sapiens
VISPPCAPTRNSHPGPGCTASPPAPPGWPFSQRGPGRWSTTELRKEKSRDAARSRRSQETEVLYQLAHTLPFARGVSAHLDKASIMRLTISYLRMHRLCAAGEWNQVGAGGEPLDACYLKALEGFVMVLTAEGDMAYLSENVSKHLGLSQLELIGHSIFDFIHPCDQEELQDALTPQQTLSRRKVEAPTERCFSLRMKSTLTSRGRTLNLKAATWKVLNCSGHMRAYKPPAQTSPAGSPDSEPPLQCLVLICEAIPHPGSLEPPLGRGAFLSRHSLDMKFTYCDDRIAEVAGYSPDDLIGCSAYEYIHALDSDAVSKSIHTLLSKGQAVTGQYRFLARSGGYLWTQTQATVVSGGRGPQSESIVCVHFLISQVEETGVVLSLEQTEQHSRRPIQRGAPSQKDTPNPGDSLDTPGPRILAFLHPPSLSEAALAADPRRFCSPDLRRLLGPILDGASVAATPSTPLATRHPQSPLSADLPDELPVGTENVHRLFTSGKDTEAVETDLDIAQDADALDLEMLAPYISMDDDFQLNASEQLPRAYHRPLGAVPRPRARSFHGLSPPALEPSLLPRWGSDPRLSCSSPSRGDPSASSPMAGARKRTLAQSSEDEDEGVELLGVRPPKRSPSPEHENFLLFPLSLSFLLTGGPAPGSLQDPSTPLLNLNEPLGLGPSLLSPYSDEDTTQPGGPFQPRAGSAQAD

SEQ ID NO: 849893 - protein, 641 aa, Homo sapiens
GLRSGDWRAMALGLQRARSTTELRKEKSRDAARSRRSQETEVLYQLAHTLPFARGVSAHLDKASIMRLTISYLRMHRLCAAGEWNQVGAGGEPLDACYLKALEGFVMVLTAEGDMAYLSENVSKHLGLSQLELIGHSIFDFIHPCDQEELQDALTPQQTLSRRKVEAPTERCFSLRMKSTLTSRGRTLNLKAATWKVLNCSGHMRAYKPPAQTSPAGSPDSEPPLQCLVLICEAIPHPGSLEPPLGRGAFLSRHSLDMKFTYCDDRIAEVAGYSPDDLIGCSAYEYIHALDSDAVSKSIHTLLSKGQAVTGQYRFLARSGGYLWTQTQATVVSGGRGPQSESIVCVHFLISQVEETGVVLSLEQTEQHSRRPIQRGAPSQKDTPNPGDSLDTPGPRILAFLHPPSLSEAALAADPRRFCSPDLRRLLGPILDGASVAATPSTPLATRHPQSPLSADLPDELPVGTENVHRLFTSGKDTEAVETDLDIAQDADALDLEMLAPYISMDDDFQLNASEQLPRAYHRPLGAVPRPRARSFHGLSPPALEPSLLPRWGSDPRLSCSSPSRGDPSASSPMAGARKRTLAQSSEDEDEGVELLGVRPPKRSPSPEHENFLLFPLSLVCWGINGILWPSLPSWLKPTVL

SEQ ID NO: 849894 - protein, 296 aa, Homo sapiens
  misc_feature (285)..(285): Xaa can be any naturally occurring amino acid
  misc_feature (295)..(295): Xaa can be any naturally occurring amino acid
SSHRRAHPLVTRTRVLAAPHPLLHPLDGPSANGGLGDGRPRSCARKSPGMRPAAGAARRPRCCTSWLTRCPSPAASAPTWTRPLSCASPSATCACTASAPQLELIGHSIFDFIHPCDQEELQDALTPQQTLSRRKVEAPTERCFSLRMKSTLTSRGRTLNLKAATWKVLNCSGHMRAYKPPAQTSPAGSPDSEPPLQCLVLICEAIPHPGSLEPPLGRGAFLSRHSLDMKFTYCDDRIAEVAGYSPDDLIGCSAYEYIHALDSDAVSKSIHTLLEKGAKAVNKGXIIAFPWAREXG

SEQ ID NO: 849895 - protein, 232 aa, Homo sapiens
VISPPCAPTRNSHPGPGCTASPPAPPGWPFSQRGPGRWSTTELRKEKSRDAARSRRSQETEVLYQLAHTLPFARGVSAHLDKASIMRLTISYLRMHRLCAAEELQDALTPQQTLSRRKVEAPTERCFSLRMKSTLTSRGRTLNLKAATWKVLNCSGHMRAYKPPAQTSPAGSPDSEPPLQCLVLICEAIPHPGSLEGFVMVLTAEGDMAYLSENVSNHLGLSQAGAHWTQHL

SEQ ID NO: 849896 - protein, 123 aa, Homo sapiens
SAYCSLRALGSSDSPASTSQIAGTTGMCHIARLIFVFLVEMGFHHVVQSGLELLTSSAPPASAFQSAGITGVSHCTRLELTFSKSLCFEFHRLQLFLVLGLTSLSFCLFSNLTIPKNCLVLGL

SEQ ID NO: 849897 - protein, 123 aa, Homo sapiens; identical to SEQ ID NO: 849896

SEQ ID NO: 849898 - protein, 301 aa, Homo sapiens
SQGPSLTPTSLSALYPSQVEETGVVLSLEQTEQHSRRPIQRGAPSQKDTPNPGDSLDTPGPRILAFLHPPSLSEAALAADPRRFCSPDLRRLLGPILDGASVAATPSTPLATRHPQSPLSADLPDELPVGTENVHRLFTSGKDTEAVETDLDIAQDADALDLEMLAPYISMDDDFQLNASEQLPRAYHRPLGAVPRPRARSFHGLSPPALEPSLLPRWGSDPRLSCSSPSRGDPSASSPMAGARKRTLAQSSEDEDEGVELLGVRPPKRSPSPEHENFLLFPLSLSFLLTGGPAPGSLQAH

SEQ ID NO: 849899 - protein, 703 aa, Homo sapiens
VISPPCAPTRNSHPGPGCTASPPAPPGWPFSQRGPGRWSTTELRKEKSRDAARSRRSQETEVLYQLAHTLPFARGVSAHLDKASIMRLTISYLRMHRLCAAGEWNQVGAGGEPLDACYLKALEGFVMVLTAEGDMAYLSENVSKHLGLSQLELIGHSIFDFIHPCDQEELQDALTPQQTLSRRKVEAPTERCFSLRMKSTLTSRGRTLNLKAATWKVLNCSGHMRAYKPPAQTSPAGSPDSEPPLQCLVLICEAIPHPGSLEPPLGRGAFLSRHSLDMKFTYCDDRIAEVAGYSPDDLIGCSAYEYIHALDSDAVSKSIHTLLSKGQAVTGQYRFLARSGGYLWTQTQATVVSGGRGPQSESIVCVHFLISQVEETGVVLSLEQTEQHSRRPIQRGAPSQKDTPNPGDSLDTPGPRILAFLHPPSLSEAALAADPRRFCSPDLRRLLGPILDGASVAATPSTPLATRHPQSPLSADLPDELPVGTENVHRLFTSGKDTEAVETDLDIAQMRKLKLRLLTTGTELRSDGAGTSAKVHPSPRLILLPPSCPPQDADALDLEMLAPYISMDDDFQLNASEQLPRAYHRPLGAVPRPRARSFHGLSPPALEPSLLPRWGSDPRLSCSSPSRGDPSASSPMAGARKRTLAQSSEDEDEGVELLGVRPPKRSPSPEHENFLLFPLSLVCWGINGILWPSLPSWLKPTVL

SEQ ID NO: 849900 - protein, 331 aa, Homo sapiens
VISPPCAPTRNSHPGPGCTASPPAPPGWPFSQRGPGRWSTTELRKEKSRDAARSRRSQETEVLYQLAHTLPFARGVSAHLDKASIMRLTISYLRMHRLCAAGEWNQVGAGGEPLDACYLKALEGFVMVLTAEGDMAYLSENVSKHLGLSQLELIGHSIFDFIHPCDQEELQDALTPQQTLSRRKVEAPTERCFSLRMKSTLTSRGRTLNLKAATWKVLNCSGHMRAYKPPAQTSPAGSPDSEPPLQCLVLICEAIPHPGSLEPPLGRGAFLSRHSLDMKFTYCDDSSSSPLHPFSSLVLVPCCCCNILPRTQWLQTTQTHCLTVLEVRNLK

SEQ ID NO: 849901 - protein, 466 aa, Homo sapiens
SSHRRAHPLVTRTRVLAAPHPLLHPLDGPSANGGLGDGRPRSCARKSPGMRPAAGAARRPRCCTSWLTRCPSPAASAPTWTRPLSCASPSATCACTASAPQLELIGHSIFDFIHPCDQEELQDALTPQQTLSRRKVEAPTERCFSLRMKSTLTSRGRTLNLKAATWKVLNCSGHMRAYKPPAQTSPAGSPDSEPPLQCLVLICEAIPHPGSLEPPLGRGAFLSRHSLDMKFTYCDDRIAEVAGYSPDDLIGCSAYEYIHALDSDAVSKSIHTLLSKGQAVTGQYRFLARSGGYLWTQTQATVVSGGRGPQSESIVCVHFLISQVEETGVVLSLEQTEQHSRRPIQRGAPSQKDTPNPGDSLDTPGPRILAFLHPPSLSEAALAADPRRFCSPDLRRLLGPILDGASVAATPSTPLATRHPQSPLSADLPDELPVGTENVHRLFTSGKDTEAVETDLDIAQTPAPHS

SEQ ID NO: 849902 - protein, 99 aa, Homo sapiens
HCLPTSTPAPCSPSPKELSPSLPPHTQSPDISLPICPLGGPDPSRSPSSVLSKGQAVTGQYRFLARSGGYLWTQTQATVVSGGRGPQSESIVCVHFLIR

SEQ ID NO: 849903 - protein, 123 aa, Homo sapiens; identical to SEQ ID NO: 849896

SEQ ID NO: 849904 - protein, 635 aa, Homo sapiens
RHREERGARGTMDWQDHRSTTELRKEKSRDAARSRRSQETEVLYQLAHTLPFARGVSAHLDKASIMRLTISYLRMHRLCAAGEWNQVGAGGEPLDACYLKALEGFVMVLTAEGDMAYLSENVSKHLGLSQLELIGHSIFDFIHPCDQEELQDALTPQQTLSRRKVEAPTERCFSLRMKSTLTSRGRTLNLKAATWKVLNCSGHMRAYKPPAQTSPAGSPDSEPPLQCLVLICEAIPHPGSLEPPLGRGAFLSRHSLDMKFTYCDDRIAEVAGYSPDDLIGCSAYEYIHALDSDAVSKSIHTLLSKGQAVTGQYRFLARSGGYLWTQTQATVVSGGRGPQSESIVCVHFLISQVEETGVVLSLEQTEQHSRRPIQRGAPSQKDTPNPGDSLDTPGPRILAFLHPPSLSEAALAADPRRFCSPDLRRLLGPILDGASVAATPSTPLATRHPQSPLSADLPDELPVGTENVHRLFTSGKDTEAVETDLDIAQDADALDLEMLAPYISMDDDFQLNASEQLPRAYHRPLGAVPRPRARSFHGLSPPALEPSLLPRWGSDPRLSCSSPSRGDPSASSPMAGARKRTLAQSSEDEDEGVELLGVRPPKRSPSPEHENFLLFPLSLSFLLTGGPAPGSLQAH

SEQ ID NO: 849905 - protein, 346 aa, Homo sapiens
VISPPCAPTRNSHPGPGCTASPPAPPGWPFSQRGPGRWSTTELRKEKSRDAARSRRSQETEVLYQLAHTLPFARGVSAHLDKASIMRLTISYLRMHRLCAAGEWNQVGAGGEPLDACYLKALEGFVMVLTAEGDMAYLSENVSKHLGLSQLELIGHSIFDFIHPCDQEELQDALTPQQTLSRRKVEAPTERCFSLRMKSTLTSRGRTLNLKAATWKVLNCSGHMRAYKPPAQTSPAGSPDSEPPLQCLVLICEAIPHPGSLEPPLGRGAFLSRHSLDMKFTYCDDRIAEVAGYSPDDLIGCSAYEYIHALDSDAVSKSIHTCMYPISPGAKPAATWPPADTRTPQL

SEQ ID NO: 849906 - protein, 290 aa, Homo sapiens [sequence omitted]

SEQ ID NO: 849907 - protein, 154 aa, Homo sapiens
MRNKEKTSLAAMPRKEKHIEPEVPRTSRDDSLNPGVQGRQPLTEGPRVIFIKPYRNRTPMGHMKQLDVADQWIWFEGLPTRIHLPAPRVMCRSSTLRWVKRRCTRFCSASLEMPMWHPYKVDVTWTRARGASRGWRSRHQLKGRNGWRNSRVYK

SEQ ID NO: 849908 - protein, 129 aa, Homo sapiens [sequence omitted]

SEQ ID NO: 849909 - protein, 527 aa, Homo sapiens
MSLPRCWFRYPGWTGAEAGRGRAIVSRRLPSLNPWDAGERHGGLVRICASLGPHKRLPAGLPQCPHLYLAADPLDPQRRQEKSCAALGNDKRRQPDGQRQPQQQQQPHCRRGFQAPALPNPLRVLQGLGRVSMSLGWLERPPALSRAAGDGARRLSGSRRGDVWLTSSAAGLLRSVAGGSWCGGQLRARGGSGRCVARAMTGNAGEWCLMESDPGVFTELIKGFGCRGAQVEEIWSLEPENFEKLKPVHGLIFLFKWQPGEEPAGSVVQDSRLDTIFFAKQVINNACATQAIVSVLLNCTHQDVHLGETLSEFKEFSQSFDAAMKGLALSNSDVIRQVHNSFARQQMFEFDTKTSAKEEDAFHFVSYVPVNGRLYELDGLREGPIDLGACNQDDWISAVRPVIEKRIQKYSEGEIRFNLMAIVSDRKMIYEQKIAELQRQLAEEPMDTDQGNSMLSAIQSEVAKNQMLIEEEVQKLKRYKIENIRRKHNYLPFIMELLKTLAEHQQLIPLVEKAKEKQNAKKAQETK

SEQ ID NO: 849910 - protein, 527 aa, Homo sapiens; identical to SEQ ID NO: 849909

SEQ ID NO: 849911 - protein, 554 aa, Homo sapiens
MSLPRCWFRYPGWTGAEAGRGRAIVSRRLPSLNPWDAGERHGGLVRICASLGPHKRLPAGLPQCPHLYLAADPLDPQRRQEKSCAALGNDKRRQPDGQRQPQQQQQPHCRRGFQAPALPNPLRVLQGLGRVSMSLGWLERPPALSRAAGDGARRLSGSRRGDVWLTSSAAGLLRSVAGGSWCGGQLRARGGSGRCVARAMTGNAGEWCLMESDPGVFTELIKGFGCRGAQVEEIWSLEPENFEKLKPVHGLIFLFKWQPGEEPAGSVVQDSRLDTIFFAKQVINNACATQAIVSVLLNCTHQDVHLGETLSEFKEFSQSFDAAMKGLALSNSDVIRQVHNSFARQQMFEFDTKTSAKEEDAFHFVSYVPVNGRLYELDGLREGPIDLGACNQDDWISAVRPVIEKRIQKDGFSPCCPGWSQTPELKPSACLDLPKWYSEGEIRFNLMAIVSDRKMIYEQKIAELQRQLAEEPMDTDQGNSMLSAIQSEVAKNQMLIEEEVQKLKRYKIENIRRKHNYLPFIMELLKTLAEHQQLIPLVEKAKEKQNAKKAQETK

SEQ ID NO: 849912 - protein, 515 aa, Homo sapiens
MSLPRCWFRYPGWTGAEAGRGRAIVSRRLPSLNPWDAGERHGGLVRICASLGPHKRLPAGLPQCPHLYLAADPLDPQRRQEKSCAALGNDKRRQPDGQRQPQQQQQPHCRRGFQAPALPNPLRVLQGLGRVSMSLGWLERPPALSRAAGDGARRLSGSRRGDVWLTSSAAGLLRSVAGGSWCGGQLRARGGSGRCVARAMTGNAGEWCLMESDPGVFTELIKGFGCRGAQVEEIWSLEPENFEKLKPVHGLIFLFKWQPGEEPAGSVVQDSRLDTIFFAKQVINNACATQAIVSVLLNCTHQDVHLGETLSEFKEFSQSFDAAMKGLALSNSDVIRQVHNSFARQQMFEFDTKTSAKEEDAFHFVSYVPVNGRLYELDGLREGPIDLGACNQDDWISAVRPVIEKRIQKYSEGEIRFNLMAIVSDRKMIYEQKIAELQRQLAEEPMDTDQGNSMLSAIQSEVAKNQMLIEEEVQKLKRYKIENIRRKHNYLPFIMELLKTLAEHQQLIPLVEKGK

SEQ ID NO: 849913 - protein, 266 aa, Homo sapiens
MVRPGLARMSLPRCWFRYPGWTGAEAGRGRAIVSRRLPSLNPWDAGERHGGLVRICASLGPHKRLPAGLPQCPHLYLAADPLDPQRRQEKSCAALGNDKRRQPDGQRQPQQQQQPHCRRGFQAPALPNPLRVLQGLGRVSMSLGWLERPPALSRAAGDGARRLSGSRRGDVWLTSSAAGLLRSVAGGSWCGGQLRARGGSGRCVARAMTGNAGEWCLMESDPGVFTELIKGFGCRGAQVEEIWSLEPENFEKLKRTSRLCGSGLPT

SEQ ID NO: 849914 - protein, 525 aa, Homo sapiens
MSLPRCWFRYPGWTGAEAGRGRAIVSRRLPSLNPWDAGERHGGLVRICASLGPHKRLPAGLPQCPHLYLAADPLDPQRRQEKSCAALGNDKRRQPDGQRQPQQQQQPHCRRGFQAPALPNPLRVLQGLGRVSMSLGWLERPPALSRAAGDGARRLSGSRRGDVWLTSSAAGLLRSVAGGSWCGGQLRARGGSGRCVARAMTGNAGEWCLMESDPGVFTELIKGFGCRGAQVEEIWSLEPENFEKLKPVHGLIFLFKWQPGEEPAGSVVQDSRLDTIFFAKQVINNACATQAIVSVLLNCTHQDVHLGETLSEFKEFSQSFDAAMKGLALSNSDVIRQVHNSFARQQMFEFDTKTSAKEEDAFHFVSYVPVNGRLYELDGLREGPIDLGACNQDDWISAVRPVIEKRIQKYSEGEIRFNLMAIVSDRKMIYEQKIAELQRQLAEEPMDTDQGNSMLSAIQSEVAKNQMLIEEEVQKLKRYKIENIRRKHNYLPFIMELLKTLAEHQQLIPLVEKFEKHFEKTLLGK

SEQ ID NO: 849915 - protein, 134 aa, Homo sapiens
GLFLFCRFYKTKNNFGATYSEGEIRFNLMAIVSDRKMIYEQKIAELQRQLAEEPMDTDQGNSMLSAIQSEVAKNQMLIEEEVQKLKRYKIENIRRKHNYLPFIMELLKTLAEHQQLIPLVEKFEKHFEKTLLGK

SEQ ID NO: 849916 - protein, 409 aa, Homo sapiens
MSLPRCWFRYPGWTGAEAGRGRAIVSRRLPSLNPWDAGERHGGLVRICASLGPHKRLPAGLPQCPHLYLAADPLDPQRRQEKSCAALGNDKRRQPDGQRQPQQQQQPHCRRGFQAPALPNPLRVLQGLGRVSMSLGWLERPPALSRAAGDGARRLSGSRRGDVWLTSSAAGLLRSVAGGSWCGGQLRARGGSGRCVARAMTGNAGEWCLMESDPGVFTELIKGFGCRGAQVEEIWSLEPENFEKLKPVHGLIFLFKWQPGEEPAGSVVQDSRLDTIFFAKQVINNACATQAIVSVLLNCTHQDVHLGETLSEFKEFSQSFDAAMKGLALSNSDVIRQVHNSFARQQMFEFDTKTSAKEEDAFHFVSYVPVNGRLYELDGLREGPIDLGACNQDDWISAVRPVIEKRIQK

SEQ ID NO: 849917 - protein, 138 aa, Homo sapiens [sequence omitted]

SEQ ID NO: 849918 - protein, 527 aa, Homo sapiens; identical to SEQ ID NO: 849909

SEQ ID NO: 849919 - protein, 451 aa, Homo sapiens
MSLPRCWFRYPGWTGAEAGRGRAIVSRRLPSLNPWDAGERHGGLVRICASLGPHKRLPAGLPQCPHLYLAADPLDPQRRQEKSCAALGNDKRRQPDGQRQPQQQQQPHCRRGFQAPALPNPLRVLQGLGRVSMSLGWLERPPALSRAAGCRGAQVEEIWSLEPENFEKLKPVHGLIFLFKWQPGEEPAGSVVQDSRLDTIFFAKQVINNACATQAIVSVLLNCTHQDVHLGETLSEFKEFSQSFDAAMKGLALSNSDVIRQVHNSFARQQMFEFDTKTSAKEEDAFHFVSYVPVNGRLYELDGLREGPIDLGACNQDDWISAVRPVIEKRIQKYSEGEIRFNLMAIVSDRKMIYEQKIAELQRQLAEEPMDTDQGNSMLSAIQSEVAKNQMLIEEEVQKLKRYKIENIRRKHNYLPFIMELLKTLAEHQQLIPLVEKAKEKQNAKKAQETK

SEQ ID NO: 849920 - protein, 515 aa, Homo sapiens; identical to SEQ ID NO: 849912

SEQ ID NO: 849921 - protein, 525 aa, Homo sapiens; identical to SEQ ID NO: 849914

SEQ ID NO: 849922 - protein, 318 aa, Homo sapiens
MSLPRCWFRYPGWTGAEAGRGRAIVSRRLPSLNPWDAGERHGGLVRICASLGPHKRLPAGLPQCPHLYLAADPLDPQRRQEKSCAALGNDKRRQPDGQRQPQQQQQPHCRRGFQAPALPNPLRVLQGLGRVSMSLGWLERPPALSRAAGDGARRLSGSRRGDVWLTSSAAGLLRSVAGGSWCGGQLRARGGSGRCVARAMTGNAGEWCLMESDPGVFTELIKGFGCRGAQVEEIWSLEPENFEKLKPVHGLIFLFKWQPGEEPAGSVVQDSRLDTIFFAKQVWSLDTLKSLKSNPFYKQDSSLLLFATSVVVLKLLHS

SEQ ID NO: 849923 - protein, 116 aa, Homo sapiens [sequence omitted]

SEQ ID NO: 849924 - protein, 47 aa, Homo sapiens
MVHVYGRVPVAHRHLNVDRCWTEDSVTLNSAGTDAGASGGSVEGQGG

SEQ ID NO: 849925 - protein, 98 aa, Homo sapiens
SRRFFSTSGCFFPLLAEFWGLYGHRMGTGQAVGSFGKGNIQLVKRQYSEITNRERMEVLTLGCGFQAFRLEGGILPATRPCMPTVSLPPVAINFKLPT

SEQ ID NO: 849926 - protein, 244 aa, Homo sapiens
MQEIIASVDHIKFDLEIAVEQQLGAQPLPFPGMDKSGAAVCEFFLKAACGKGGMCPFRHISGEKTVVCKHWLRGLCKKGDQCEFLHEYDMTKMPECYFYSKFGECSNKECPFLHIDPESKIKDCPWYDRGFCKHGPLCRHRHTRRVICVNYLVGFCPEGPSCKFMHPRFELPMGTTEQPPLPQQTQPPAKQRTPQVIGVMQSQNSSAGNRGPRPLEQVTCYKCGEKGHYANRCTKGHLAFLSGQ

SEQ ID NO: 849927 - protein, 122 aa, Homo sapiens
MVFFGQWLLPSSPHVSLLPTVLRWAVVEALLPAVCGTSPALFFPVPIGSLRARVFHSKTVLCNSQSNNPPLQRSSSLIQLTSQNSSPNQHREPRRSSGSCRVKTAARATGDPGHWSRSPVTR

SEQ ID NO: 849928 - protein, 319 aa, Homo sapiens
MQEIIASVDHIKFDLEIAVEQQLGAQPLPFPGMDKSGAAVCEFFLKAACGKGGMCPFRHISGEKTVVCKHWLRGLCKKGDQCEFLHEYDMTKMPECYFYSKFGECSNKECPFLHIDPESKIKDCPWYDRGFCKHGPLCRHRHTRRVICVNYLVGFCPEGPSCKFMHPRFELPMGTTEQPPLPQQTQPPAKQSNNPPLQRSSSLIQLTSQNSSPNQHREPRRSSGSCRVKTAARATGDPGHWSRSPVTSVARKDTTPTDAPKGTWPFSVDSDSSWSQLRAARGPRCWECAFNCFMRLLARLWLELARRHVGFITLRGHVC

SEQ ID NO: 849929 - protein, 178 aa, Homo sapiens
MQEIIASVDHIKFDLEIAVEQQLGAQPLPFPGMDKSGAAVCEFFLKAACGKGGMCPFRHISGEKTVVCKHWLRGLCKKGDQCEFLHEYDMTKMPECYFYSKFGECSNKECPFLHIDPESKIKDCPWYDRGFCKHGPLCRHRHTRRVICVNYLVGFCPEGPSCKFMHKVTIRHYKGRPP

SEQ ID NO: 849930 - protein, 266 aa, Homo sapiens
MCPFRHISGEKTVVCKHWLRGLCKKGDQCEFLHEYDMTKMPECYFYSKFGECSNKECPFLHIDPESKIKDCPWYDRGFCKHGPLCRHRHTRRVICVNYLVGFCPEGPSCKFMHPRFELPMGTTEQPPLPQQTQPPAKQSNNPPLQRSSSLIQLTSQNSSPNQHREPRRSSGSCRVKTAARATGDPGHWSRSPVTSVARKDTTPTDAPKGTWPFSVDSDSSWSQLRAARGPRCWECAFNCFMRLLARLWLELARRHVGFITLRGHVC

SEQ ID NO: 849931 - protein, 201 aa, Homo sapiens
YFSFLCVCMVFFGQWLLPSSPHVSLLPTVLRWAVVEALLPAVCGTSPALFFPVPIGSLRARVFHSKTVLCNSQSNNPPLQRSSSLIQLTSQNSSPNQHREPRRSSGSCRVKTAARATGDPGHWSRSPVTSVARKDTTPTDAPKGTWPFSVDSDSSWSQLRAARGPRCWECAFNCFMRLLARLWLELARRHVGFITLRGHVC

SEQ ID NO: 849932 - protein, 160 aa, Homo sapiens
PRAAAAAAARRSEGGVCAAGPAAGKGEKAAGQSNNPPLQRSSSLIQLTSQNSSPNQHREPRRSSGSCRVKTAARATGDPGHWSRSPVTSVARKDTTPTDAPKGTWPFSVDSDSSWSQLRAARGPRCWECAFNCFMRLLARLWLELARRHVGFITLRGHVC

SEQ ID NO: 849933 - protein, 178 aa, Homo sapiens; identical to SEQ ID NO: 849929

SEQ ID NO: 849934 - protein, 134 aa, Homo sapiens
LGRRRRRRRGEAKEECVRRGRRRVKARRLQDREPRRSSGSCRVKTAARATGDPGHWSRSPVTSVARKDTTPTDAPKGTWPFSVDSDSSWSQLRAARGPRCWECAFNCFMRLLARLWLELARRHVGFITLRGHVC

SEQ ID NO: 849935 - protein, 244 aa, Homo sapiens; identical to SEQ ID NO: 849926

SEQ ID NO: 849936 - protein, 108 aa, Homo sapiens
KTVVCKHWLRGLCKKGDQCEFLHEYDMTKMPECYFYSKFGKAPGALEALLRTRVQRGPLAAQCPHCLCLLFPSFYSQRRTLAEPASLSQLLGDSVAIFCSSLFFFFFF

SEQ ID NO: 849937 - protein, 331 aa, Homo sapiens
SLAPPSLRLAAAMQEIIASVDHIKFDLEIAVEQQLGAQPLPFPGMDKSGAAVCEFFLKAACGKGGMCPFRHISGEKTVVCKHWLRGLCKKGDQCEFLHEYDMTKMPECYFYSKFGECSNKECPFLHIDPESKIKDCPWYDRGFCKHGPLCRHRHTRRVICVNYLVGFCPEGPSCKFMHPRFELPMGTTEQPPLPQQTQPPAKQSNNPPLQRSSSLIQLTSQNSSPNQHREPRRSSGSCRVKTAARATGDPGHWSRSPVTSVARKDTTPTDAPKGTWPFSVDSDSSWSQLRAARGPRCWECAFNCFMRLLARLWLELARRHVGFITLRGHVC

SEQ ID NO: 849938 - protein, 319 aa, Homo sapiens; identical to SEQ ID NO: 849928

SEQ ID NO: 849939 - protein, 125 aa, Homo sapiens
MCPFRHISGEKTVVCKHWLRGLCKKGDQCEFLHEYDMTKMPECYFYSKFGECSNKECPFLHIDPESKIKDCPWYDRGFCKHGPLCRHRHTRRVICVNYLVGFCPEGPSCKFMHKVTIRHYKGRPP

SEQ ID NO: 849940 - protein, 336 aa, Homo sapiens
ETSSSGSRDAPLGFRTPDSQAPISTVWGLLLPSLGLRSSLPRIFGPLRLFKESGAAVCEFFLKAACGKGGMCPFRHISGEKTVVCKHWLRGLCKKGDQCEFLHEYDMTKMPECYFYSKFGECSNKECPFLHIDPESKIKDCPWYDRGFCKHGPLCRHRHTRRVICVNYLVGFCPEGPSCKFMHPRFELPMGTTEQPPLPQQTQPPAKQSNNPPLQRSSSLIQLTSQNSSPNQHREPRRSSGSCRVKTAARATGDPGHWSRSPVTSVARKDTTPTDAPKGTWPFSVDSDSSWSQLRAARGPRCWECAFNCFMRLLARLWLELARRHVGFITLRGHVC

SEQ ID NO: 849941 - protein, 139 aa, Homo sapiens
LGRRRRRRRGEAKEECVRRGRRRVKARRLQETEGEPGRWGRRRRHAGNHRQPRATGDPGHWSRSPVTSVARKDTTPTDAPKGTWPFSVDSDSSWSQLRAARGPRCWECAFNCFMRLLARLWLELARRHVGFITLRGHVC

SEQ ID NO: 849942 - protein, 262 aa, Homo sapiens
MQEIIASVDHIKFDLEIAVEQQLGAQPLPFPGMDKSGAAVCEFFLKAACGKGGMCPFRHISGEKTVVCKHWLRGLCKKGDQCEFLHEYDMTKMPECYFYSKFGECSNKECPFLHIDPESKIKDCPWYDRGFCKHALDLNCPWEPPSSPHCRSRHSLQQSREPRRSSGSCRVKTAARATGDPGHWSRSPVTSVARKDTTPTDAPKGTWPFSVDSDSSWSQLRAARGPRCWECAFNCFMRLLARLWLELARRHVGFITLRGHVC

SEQ ID NO: 849943 - protein, 244 aa, Homo sapiens; identical to SEQ ID NO: 849926

SEQ ID NO: 849944 - protein, 68 aa, Homo sapiens
VSRTQACLRSARRSAVRVFESLGCFLGSVVLGVLSACDSLARDCGRVTEWARGRHCVCVILTVCGGSF

SEQ ID NO: 849945 - protein, 68 aa, Homo sapiens; identical to SEQ ID NO: 849944

SEQ ID NO: 849946 - protein, 109 aa, Homo sapiens
MELRCWTCLAPRTYSPAEQIMNVTHKLPAYHQTHASTYHQTPRVTEECRSAPCCLGIINQPRNHPIKSPASLCFLAVSSSSTDSACCSLITYFDTVFNKSAFLHPQLSW

SEQ ID NO: 849947 - protein, 68 aa, Homo sapiens; identical to SEQ ID NO: 849944

SEQ ID NO: 849948 - protein, 68 aa, Homo sapiens; identical to SEQ ID NO: 849944

SEQ ID NO: 849949 - protein, 68 aa, Homo sapiens; identical to SEQ ID NO: 849944

SEQ ID NO: 849950 - protein, 68 aa, Homo sapiens; identical to SEQ ID NO: 849944

SEQ ID NO: 849951 - protein, 68 aa, Homo sapiens; identical to SEQ ID NO: 849944

SEQ ID NO: 849952 - protein, 68 aa, Homo sapiens; identical to SEQ ID NO: 849944

SEQ ID NO: 849953 - protein, 3024 aa, Homo sapiens
GARAARTRVPRSVPGGRAAFSPDPPSGGGGEMRGGVLLVLLLCVAAQCRQRGLFPAILNLASNAHISTNATCGEKGPEMFCKLVEHVPGRPVRNPQCRICDGNSANPRERHPISHAIDGTNNWWQSPSIQNGREYHWVTITLDLRQVFQVAYVIIKAANAPRPGNWILERSLDGTTFSPWQYYAVSDSECLSRYNITPRRGPPTYRADDEVICTSYYSRLVPLEHGEIHTSLINGRPSADDLSPKLLEFTSARYIRLRFERIRTLNADLMTLSHREPKELDPMLPRRYYYSIKDISVGGMCICYGHASSCPWDETTKKLQCQCEHNTCGESCNRCCPGYHQQPWRPGTVSSGNTCEACNCHNKAKDCYYDESVAKQKKSLNTAGQFRGGGVCINCLQNTMGINCETCIDGYYRPHKVSPYEDEPCRPCNCDPVGSLSSVCIKDDLHSDLENGKQPGQCPCKEGYTGEKCDRCQLGYKDYPTCVSCGCNPVGSASDEPCTGPCVCKENVEGKACDRCKPGFYNLKEKNPRGCSECFCFGVSDVCSSLSWPLGQVNSMSGWLVTDLISPRKIPSQQDALGGRHQVSINNTAVMQRLAPKYYWAAPEAYLGNKLTAFGGFLKYTVSYDIPVETVDSNLMSHADVIIKGNGLTLSTQAEGLSLQPYEEYLNVVRLVPENFQDFHSKRQIDRDQLMTVLANVTHLLIRATYNSAKMALYRLESVSLDIASSNAIDLVVAADVEHCECPQGYTGTSCESCLSGYYRVDGILFGGICQPCECHGHAAECNVHGVCIACAHNTTGVHCEQCLPGFYGEPSRGTPGDCQPCACPLTIASNNFSPTCHLNDGDEVVCDWCAPGYSGAWCERCADGYYGNPTVPGESCVPCDCSGNVDPSEAGHCDSVTGECLKCLGNTDGAHCERCADGFYGDAVTAKNCRACECHVKGSHSAVCHLETGLCDCKPNVTGQQCDQCLHGYYGLDSGHGCRPCNCSVAGSVSDGCTDEGQCHCVPGVAGKRCDRCAHGFYAYQDGSCTPCDCPHTQNTCDPETGECVCPPHTQGVKCEECEDGHWGYDAEVGCQACNCSLVGSTHHRCDVVTGHCQCKSKFGGRACVQCSLGYRDFPDCVPCDCDLRGTSGDACNLEQGLCGCVEETGACPCKENVFGPQCNECREGTFALRADNPLGCSPCFCSGLSHLCSELEDYVRTPVTLGSDQPLLRVVSQSNLRGTTEGVYYQAPDFLLDAATVRQHIRAEPFYWRLPQQFQGDQLMAYGGKLKYSVAFYSLDGVGTSNFEPQVLIKGGRIRKQVIYMDAPAPENGVRQEQEVAMRENFWKYFNSVSEKPVTREDFMSVLSDIEYILIKASYGQGLQQSRISDISMEVGRKAEKLHPEEEVASLLENCVCPPGTVGFSCQDCAPGYHRGKLPAGSDRGPRPLVAPCVPCSCNNHSDTCDPNTGKCLNCGDNTAGDHCDVCTSGYYGKVTGSASDCALCACPHSPPASFSPTCVLEGDHDFRCDACLLGYEGKHCERCSSSYYGNPQTPGGSCQKCDCNPHGSVHGDCDRTSGQCVCRLGASGLRCDECEPRHILMETDCVSCDDECVGVLLNDLDEIGDAVLSLNLTGIIPVPYGILSNLENTTKYLQESLLKENMQKDLGKIKLEGVAEETDNLQKKLTRMLASTQKVNRATERIFKESQDLAVAIERLQMSITEIMEKTTLNQTLDEDFLLPNSTLQNMQQNGTSLLEIMQIRDFTQLHQNATLELKAAEDLLSQIQENYQKPLEELEVLKEAASHVLSKHNNELKAAEALVREAEAKMQESNHLLLMVNANLREFSDKKLHVQEEQNLTSELIVQGRGLIDAAAAQTDAVQDALEHLEDHQDKLLLWSAKIRHHIDDLVMHMSQRNAVDLVYRAEDHAAEFQRLADVLYSGLENIRNVSLNATSAAYVHYNIQSLIEESEELARDAHRTVTETSLLSESLVSNGKAAVQRSSRFLKEGNNLSRKLPGIALELSELRNKTNRFQENAVEITRQTNESLLILRAIPKGIRDKGAKTKELATSASQSAVSTLRDVAGLSQELLNTSASLSRVNTTLRETHQLLQDSTMATLLAGRKVKDVEIQANLLFDRLKPLKMLEENLSRNLSEIKLLISQARKQAASIKVAVSADRDCIRAYQPQISSTNYNTLTLNVKTQEPDNLLFYLGSSTASDFLAVEMRRGRVAFLWDLGSGSTRLEFPDFPIDDNRWHSIHVARFGNIGSLSVKEMSSNQKSPTKTSKSPGTANVLDVNNSTLMFVGGLGGQIKKSPAVKVTHFKGCLGEAFLNGKSIGLWNYIEREGKCRGCFGSSQNEDPSFHFDGSGYSVVEKSLPATVTQIIMLFNTFSPNGLLLYLGSYGTKDFLSIELFRGRVKVMTDLGSGPITLLTDRRYNNGTWYKIAFQRNRKQGVLAVIDAYNTSNKETKQGETPGASSDLNRLDKDPIYVGGLPRSRVVRRGVTTKSFVGCIKNLEISRSTFDLLRNSYGVRKGCLLEPIRSVSFLKGGYIELPPKSLSPESEWLVTFATTNSSGIILAALGGDVEKRGDREEAHVPFFSVMLIGGNIEVHVNPGDGTGLRKALLHAPTGTCSDGQAHSISLVRNRRIITVQLDENNPVEMKLGTLVESRTINVSNLYVGGIPEGEGTSLLTMRRSFHGCIKNLIFNLELLDFNSAVGHEQVDLDTCWLSERPKLAPDAEDSKLLPEPRAFPEQCVVDAALEYVPGAHQFGLTQNSHFILPFNQSAVRKKLSVELSIRTFASSGLIYYMAHQNQADYAVLQLHGGRLHFMFDLGKGRTKVSHPALLSDGKWHTVKTDYVKRKGFITVDGRESPMVTVVGDGTMLDVEGLFYLGGLPSQYQARKIGNITHSIPACIGDVTVNSKQLDKDSPVSAFTVNRCYAVAQEGTYFDGSGYAALVKEGYKVQSDVNITLEFRTSSQNGVLLGISTAKVDAIGLELVDGKVLFHVNNGAGRITAAYEPKTATVLCDGKWHTLPANKKQTPYHSDC

SEQ ID NO: 849954 - protein, 2637 aa, Homo sapiens
GARAARTRVPRSVPGGRAAFSPDPPSGGGGEMRGGVLLVLLLCVAAQCRQRGLFPAILNLASNAHISTNATCGEKGPEMFCKLVEHVPGRPVRNPQCRICDGNSANPRERHPISHAIDGTNNWWQSPSIQNGREYHWVTITLDLRQVFQVAYVIIKAANAPRPGNWILERSLDGTTFSPWQYYAVSDSECLSRYNITPRRGPPTYRADDEVICTSYYSRLVPLEHGEIHTSLINGRPSADDLSPKLLEFTSARYIRLRFERIRTLNADLMTLSHREPKELDPMLPRRYYYSIKDISVGGMCICYGHASSCPWDETTKKLQCQCEHNTCGESCNRCCPGYHQQPWRPGTVSSGNTCEACNCHNKAKDCYYDESVAKQKKSLNTAGQFRGGGVCINCLQNTMGINCETCIDGYYRPHKVSPYEDEPCRPCNCDPVGSLSSVCIKDDLHSDLENGKQPGQCPCKEGYTGEKCDRCQLGYKDYPTCVSCGCNPVGSASDEPCTGPCVCKENVEGKACDRCKPGFYNLKEKNPRGCSECFCFGVSDVCSSLSWPLGQVNSMSGWLVTDLISPRKIPSQQDALGGRHQVSINNTAVMQRLAPKYYWAAPEAYLGNKLTAFGGFLKYTVSYDIPVETVDSNLMSHADVIIKGNGLTLSTQAEGLSLQPYEEYLNVVRLVPENFQDFHSKRQIDRDQLMTVLANVTHLLIRATYNSAKMALYRLESVSLDIASSNAIDLVVAADVEHCECPQGYTGTSCESCLSGYYRVDGILFGGICQPCECHGHAAECNVHGVCIACAHNTTGVHCEQCLPGFYGEPSRGTPGDCQPCACPLTIASNNFSPTCHLNDGDEVVCDWCAPGYSGAWCERCADGYYGNPTVPGESCVPCDCSGNVDPSEAGHCDSVTGECLKCLGNTDGAHCERCADGFYGDAVTAKNCRACECHVKGSHSAVCHLETGLCDCKPNVTGQQCDQCLHGYYGLDSGHGCRPCNCSVAGSVSDGCTDEGQCHCVPGVAGKRCDRCAHGFYAYQDGSCTPCDCPHTQNTCDPETGECVCPPHTQGVKCEECEDGHWGYDAEVGCQACNCSLVGSTHHRCDVVTGHCQCKSKFGGRACVQCSLGYRDFPDCVPCDCDLRGTSGDACNLEQGLCGCVEETGACPCKENVFGPQCNECREGTFALRADNPLGCSPCFCSGLSHLCSELEDYVRTPVTLGSDQPLLRVVSQSNLRGTTEGVYYQAPDFLLDAATVRQHIRAEPFYWRLPQQFQGDQLMAYGGKLKYSVAFYSLDGVGTSNFEPQVLIKGGRIRKQVIYMDAPAPENGVRQEQEVAMRENFWKYFNSVSEKPVTREDFMSVLSDIEYILIKASYGQGLQQSRISDISMEVGRKAEKLHPEEEVASLLENCVCPPGTVGFSCQDCAPGYHRGKLPAGSDRGPRPLVAPCVPCSCNNHSDTCDPNTGKCLNCGDNTAGDHCDVCTSGYYGKVTGSASDCALCACPHSPPASFSPTCVLEGDHDFRCDACLLGYEGKHCERCSSSYYGNPQTPGGSCQKCDCNPHGSVHGDCDRTSGQCVCRLGASGLRCDECEPRHILMETDCVSCDDECVGVLLNDLDEIGDAVLSLNLTGIIPVPYGILSNLENTTKYLQESLLKENMQKDLGKIKLEGVAEETDNLQKKLTRMLASTQKVNRATERIFKESQDLAVAIERLQMSITEIMEKTTLNQTLDEDFLLPNSTLQNMQQNGTSLLEIMQIRDFTQLHQNATLELKAAEDLLSQIQENYQKPLEELEVLKEAASHVLSKHNNELKAAEALVREAEAKMQESNHLLLMVNANLREFSDKKLHVQEEQNLTSELIVQGRGLIDAAAAQTDAVQDALEHLEDHQDKLLLWSAKIRHHIDDLVMHMSQRNAVDLVYRAEDHAAEFQRLADVLYSGLENIRNVSLNATSAAYVHYNIQSLIEESEELARDAHRTVTETSLLSESLVSNGKAAVQRSSRFLKEGNNLSRKLPGIALELSELRNKTNRFQENAVEITRQTNESLLILRAIPKGIRDKGAKTKELATSASQSAVSTLRDVAGLSQELLNTSASLSRVNTTLRETHQLLQDSTMATLLAGRKVKDVEIQANLLFDRLKPLKMLEENLSRNLSEIKLLISQARKQAASIKVAVSADRDCIRAYQPQISSTNYNTLTLNVKTQEPDNLLFYLGSSTASDFLAVEMRRGRVAFLWDLGSGSTRLEFPDFPIDDNRWHSIHVARFGNIGSLSVKEMSSNQKSPTKTSKSPGTANVLDVNNSTLMFVGGLGGQIKKSPAVKVTHFKGCLGEAFLNGKSIGLWNYIEREGKCRGCFGSSQNEDPSFHFDGSGYSVVEKSLPATVTQIIMLFNTFSPNGLLLYLGSYGTKDFLSIELFRGRVKVMTDLGSGPITLLTDRRYNNGTWYKIAFQRNRKQGVLAVIDAYNTSNKETKQGETPGASSDLNRLDKDPIYVGGLPRSRVVRRGVTTKSFVGCIKNLEISRSTFDLLRNSYGVRKGCLLEPIRSVSFLKGGYIELPPKSLSPESEWLVTFATTNSSGIILAALGGDVEKRGDREEAHVPFFSVMLIGGNIEVHVNPGDGTGLRKALLHAPTGTCSDGQAHSISLVRNRRYLHAARQCVMKVW

SEQ ID NO: 849955 - protein, 146 aa, Homo sapiens
MALHGGTRVCQWGSGCGWRLSVPVCLLQEQCVVDAALEYVPGAHQFGLTQNSHFILPFNQSAVRKNCLSLGPFCQGKISRPGAWGSRTPCCSSLLLRSSSSPARLACSLCHALPVLLSLAVPPCHTPLDLGSCLSSAAPAITLCEF

SEQ ID NO: 849956 - protein, 2796 aa, Homo sapiens
GARAARTRVPRSVPGGRAAFSPDPPSGGGGEMRGGVLLVLLLCVAAQCRQRGLFPAILNLASNAHISTNATCGEKGPEMFCKLVEHVPGRPVRNPQCRICDGNSANPRERHPISHAIDGTNNWWQSPSIQNGREYHWVTITLDLRQVFQVAYVIIKAANAPRPGNWILERSLDGTTFSPWQYYAVSDSECLSRYNITPRRGPPTYRADDEVICTSYYSRLVPLEHGEIHTSLINGRPSADDLSPKLLEFTSARYIRLRFERIRTLNADLMTLSHREPKELDPMLPRRYYYSIKDISVGGMCICYGHASSCPWDETTKKLQCQCEHNTCGESCNRCCPGYHQQPWRPGTVSSGNTCEACNCHNKAKDCYYDESVAKQKKSLNTAGQFRGGGVCINCLQNTMGINCETCIDGYYRPHKVSPYEDEPCRPCNCDPVGSLSSVCIKDDLHSDLENGKQPGQCPCKEGYTGEKCDRCQLGYKDYPTCVSCGCNPVGSASDEPCTGPCVCKENVEGKACDRCKPGFYNLKEKNPRGCSECFCFGVSDVCSSLSWPLGQVNSMSGWLVTDLISPRKIPSQQDALGGRHQVSINNTAVMQRLAPKYYWAAPEAYLGNKLTAFGGFLKYTVSYDIPVETVDSNLMSHADVIIKGNGLTLSTQAEGLSLQPYEEYLNVVRLVPENFQDFHSKRQIDRDQLMTVLANVTHLLIRATYNSAKMALYRLESVSLDIASSNAIDLVVAADVEHCECPQGYTGTSCESCLSGYYRVDGILFGGICQPCECHGHAAECNVHGVCIACAHNTTGVHCEQCLPGFYGEPSRGTPGDCQPCACPLTIASNNFSPTCHLNDGDEVVCDWCAPGYSGAWCERCADGYYGNPTVPGESCVPCDCSGNVDPSEAGHCDSVTGECLKCLGNTDGAHCERCADGFYGDAVTAKNCRACECHVKGSHSAVCHLETGLCDCKPNVTGQQCDQCLHGYYGLDSGHGCRPCNCSVAGSVSDGCTDEGQCHCVPGVAGKRCDRCAHGFYAYQDGSCTPCDCPHTQNTCDPETGECVCPPHTQGVKCEECEDGHWGYDAEVGCQACNCSLVGSTHHRCDVVTGHCQCKSKFGGRACVQCSLGYRDFPDCVPCDCDLRGTSGDACNLEQGLCGCVEETGACPCKENVFGPQCNECREGTFALRADNPLGCSPCFCSGLSHLCSELEDYVRTPVTLGSDQPLLRVVSQSNLRGTTEGVYYQAPDFLLDAATVRQHIRAEPFYWRLPQQFQGDQLMAYGGKLKYSVAFYSLDGVGTSNFEPQVLIKGGRIRKQVIYMDAPAPENGVRQEQEVAMRENFWKYFNSVSEKPVTREDFMSVLSDIEYILIKASYGQGLQQSRISDISMEVGRKAEKLHPEEEVASLLENCVCPPGTVGFSCQDCAPGYHRGKLPAGSDRGPRPLVAPCVPCSCNNHSDTCDPNTGKCLNCGDNTAGDHCDVCTSGYYGKVTGSASDCALCACPHSPPASFSPTCVLEGDHDFRCDACLLGYEGKHCERCSSSYYGNPQTPGGSCQKCDCNPHGSVHGDCDRTSGQCVCRLGASGLRCDECEPRHILMETDCVSCDDECVGVLLNDLDEIGDAVLSLNLTGIIPVPYGILSNLENTTKYLQESLLKENMQKDLGKIKLEGVAEETDNLQKKLTRMLASTQKVNRATERIFKESQDLAVAIERLQMSITEIMEKTTLNQTLDEDFLLPNSTLQNMQQNGTSLLEIMQIRDFTQLHQNATLELKAAEDLLSQIQENYQKPLEELEVLKEAASHVLSKHNNELKAAEALVREAEAKMQESNHLLLMVNANLREFSDKKLHVQEEQNLTSELIVQGRGLIDAAAAQTDAVQDALEHLEDHQDKLLLWSAKIRHHIDDLVMHMSQRNAVDLVYRAEDHAAEFQRLADVLYSGLENIRNVSLNATSAAYVHYNIQSLIEESEELARDAHRTVTETSLLSESLVSNGKAAVQRSSRFLKEGNNLSRKLPGIALELSELRNKTNRFQENAVEITRQTNESLLILRAIPKGIRDKGAKTKELATSASQSAVSTLRDVAGLSQELLNTSASLSRVNTTLRETHQLLQDSTMATLLAGRKVKDVEIQANLLFDRLKPLKMLEENLSRNLSEIKLLISQARKQAASIKVAVSADRDCIRAYQPQISSTNYNTLTLNVKTQEPDNLLFYLGSSTASDFLAVEMRRGRVAFLWDLGSGSTRLEFPDFPIDDNRWHSIHVARFGNIGSLSVKEMSSNQKSPTKTSKSPGTANVLDVNNSTLMFVGGLGGQIKKSPAVKVTHFKGCLGEAFLNGKSIGLWNYIEREGKCRGCFGSSQNEDPSFHFDGSGYSVVEKSLPATVTQIIMLFNTFSPNGLLLYLGSYGTKDFLSIELFRGRVKVMTDLGSGPITLLTDRRYNNGTWYKIAFQRNRKQGVLAVIDAYNTSNKETKQGETPGASSDLNRLDKDPIYVGGLPRSRVVRRGVTTKSFVGCIKNLEISRSTFDLLRNSYGVRKGCLLEPIRSVSFLKGGYIELPPKSLSPESEWLVTFATTNSSGIILAALGGDVEKRGDREEAHVPFFSVMLIGGNIEVHVNPGDGTGLRKALLHAPTGTCSDGQAHSISLVRNRRIITVQLDENNPVEMKLGTLVESRTINVSNLYVGGIPEGEGTSLLTMRRSFHGCIKNLIFNLELLDFNSAVGHEQVDLDTCWLSERPKLAPDAEDSKLLPEPRAFPVGAASFTISQVQSAKEGLGQRELKWGLAVKVPAKAGAGAGAGAVLKIRAGTGRERVPQATQMTRPNP

SEQ ID NO: 849957 - protein, 448 aa, Homo sapiens
QPRGTRRPAPEGAAASGHSAGAERELPGGEAPQAPGGQGGAGQDGRLRKCHPAHPGLSLLPGTSADGALAGRGCMGLPRGSFFWLLLLLTAACSGLLFALYFSAVQRYPGPAAGARDTTSFEAFFQSKASNSWTGKGQACRHLLHLAIQRHPHFRGLFNLSIPVLLWGDLFTPALWDRLSQHKAPYGWRGLSHQVIASTLSLLNGSESAKLFAPPRDTPPKCIRCAVVGNGGILNGSRQGPNIDAHDYVFRLNGAVIKGFERDVGTKTSFYGFTVNTMKNSLVSYWNLGFTSVPQGQDLQYIFIPSDIRDYVMLRSAILGVPVPEGLDKGDRPHAYFGPEASASKFKLLHPDFISYLTERFLKSKLINTHFGDLYMPSTGALMLLTALHTCDQVSAYGFITSNYWKFSDHYFERKMKPLIFYANHDLSLEAALWRDLHKAGILQLYQR

SEQ ID NO: 849958 - protein, 227 aa, Homo sapiens
QPRGTRRPAPEGAAASGHSAGAERELPGGEAPQAPGGQGGAGQDGRLRKCHPAHPGLSLLPGTSADGALAGRGCMGLPRGSFFWLLLLLTAACSGLLFALYFSAVQRYPGPAAGASCQPRVPSTCGCWGEGRGLREAWHLLKGDTTSFEAFFQSKASNSWTGKGQACRHLLHLAIQRHPHFRGLFNLSIPVLLWGDLFTPALWDRLSQHKAPYGWRGLSHQGNPRPL

SEQ ID NO: 849959 - protein, 428 aa, Homo sapiens
PAPGDPPPSSRGCGSLWPLSRGREGAAGRGGAAGTRRAGRGRARRPPPQVPPGPPGPLPSAWDVSGRGARGPGLYGAPARVVLLAAAPAHGCLLGAPLCPVLLGGAAVPGASGRSQGQACRHLLHLAIQRHPHFRGLFNLSIPVLLWGDLFTPALWDRLSQHKAPYGWRGLSHQVIASTLSLLNGSESAKLFAPPRDTPPKCIRCAVVGNGGILNGSRQGPNIDAHDYVFRLNGAVIKGFERDVGTKTSFYGFTVNTMKNSLVSYWNLGFTSVPQGQDLQYIFIPSDIRDYVMLRSAILGVPVPEGLDKGDRPHAYFGPEASASKFKLLHPDFISYLTERFLKSKLINTHFGDLYMPSTGALMLLTALHTCDQVSAYGFITSNYWKFSDHYFERKMKPLIFYANHDLSLEAALWRDLHKAGILQLYQR

SEQ ID NO: 849960 - protein, 333 aa, Homo sapiens
MDTTSFEAFFQSKASNSWTGKGQACRHLLHLAIQRHPHFRGLFNLSIPVLLWGDLFTPALWDRLSQHKAPYGWRGLSHQVIASTLSLLNGSESAKLFAPPRDTPPKCIRCAVVGNGGILNGSRQGPNIDAHDYVFRLNGAVIKGFERDVGTKTSFYGFTVNTMKNSLVSYWNLGFTSVPQGQDLQYIFIPSDIRDYVMLRSAILGVPVPEGLDKGDRPHAYFGPEASASKFKLLHPDFISYLTERFLKSKLINTHFGDLYMPSTGALMLLTALHTCDQVSAYGFITSNYWKFSDHYFERKMKPLIFYANHDLSLEAALWRDLHKAGILQLYQR

SEQ ID NO: 849961 - protein, 420 aa, Homo sapiens
QPRGTRRPAPEGAAASGHSAGAERELPGGEAPQAPGGQGGAGQDGRLRKCHPAHPGLSLLPGTSADGALAGRGCMGLPRGSFFWLLLLLTAACSGLLFALYFSAVQRYPGPAAGARDTTSFEAFFQSKASNSWTGKGQACRHLLHLAIQRHPHFRGLFNLSIPVLLWGDLFTPALWDRLSQHKAPYGWRGLSHQVIASTLSLLNGSESAKLFAPPRDTPPKCIRCAVVGNGGILNGSRQGPNIDAHDYVFRLNGAVIKGFERDVGTKTSFYGFTVNTMKNSLVSYWNLGFTSVPQGQDLQYIFIPSDIRDYVMLRSAILGVPVPEGLDKGDRFLKSKLINTHFGDLYMPSTGALMLLTALHTCDQVSAYGFITSNYWKFSDHYFERKMKPLIFYANHDLSLEAALWRDLHKAGILQLYQR

SEQ ID NO: 849962 - protein, 448 aa, Homo sapiens; identical to SEQ ID NO: 849957

SEQ ID NO: 849963 - protein, 103 aa, Homo sapiens
PHLLSGISPRPLSSPQQTDTFLNSCHFTQVSVHTRRSTNTNPATILAQVSAYGFITSNYWKFSDHYFERKMKPLIFYANHDLSLEAALWRDLHKAGILQLYQR

SEQ ID NO: 849964 - protein, 448 aa, Homo sapiens; identical to SEQ ID NO: 849957

SEQ ID NO: 849965 - protein, 457 aa, Homo sapiens
QPRGTRRPAPEGAAASGHSAGAERELPGGEAPQAPGGQGGAGQDGRLRKCHPAHPGLSLLPGTSADGALAGRGCMGLPRGSFFWLLLLLTAACSGLLFALYFSAVQRYPGPAAGARDTTSFEAFFQSKASNSWTGKGQACRHLLHLAIQRHPHFRGLFNLSIPVLLWGDLFTPALWDRLSQHKAPYGWRGLSHQVIASTLSLLNGSESAKLFAPPRDTPPKCIRCAVVGNGGILNGSRQGPNIDAHDYVFRHCWASVPTRLNGAVIKGFERDVGTKTSFYGFTVNTMKNSLVSYWNLGFTSVPQGQDLQYIFIPSDIRDYVMLRSAILGVPVPEGLDKGDRPHAYFGPEASASKFKLLHPDFISYLTERFLKSKLINTHFGDLYMPSTGALMLLTALHTCDQVSAYGFITSNYWKFSDHYFERKMKPLIFYANHDLSLEAALWRDLHKAGILQLYQR

SEQ ID NO: 849966 - protein, 487 aa, Homo sapiens
QPRGTRRPAPEGAAASGHSAGAERELPGGEAPQAPGGQGGAGQDGRLRKCHPAHPGLSLLPGTSADGALAGRGCMGLPRGSFFWLLLLLTAACSGLLFALYFSAVQRYPGPAAGARDTTSFEAFFQSKASNSWTGKGQACRHLLHLAIQRHPHFRGLFNLSIPVLLWGDLFTPALWDRLSQHKAPYGWRGLSHQVIASTLSLLNGSESAKLFAPPRDTPPKCIRCAVVGNGGILNGSRQGPNIDAHDYVFRLNGAVIKGFERDVGTKTSFYGFTVNTMKNSLVSYWNLGFTSVPQGQDLQYIFIPSDIRDYVMLRSAILGVPVPEGLDKGDSPAPTAQGTAATPAPWPSPPSPPCNTTALGALSTSIMGPRPHAYFGPEASASKFKLLHPDFISYLTERFLKSKLINTHFGDLYMPSTGALMLLTALHTCDQVSAYGFITSNYWKFSDHYFERKMKPLIFYANHDLSLEAALWRDLHKAGILQLYQR

SEQ ID NO: 849967 - protein, 346 aa, Homo sapiens
QPRGTRRPAPEGAAASGHSAGAERELPGGEAPQAPGGQGGAGQDGRLRKCHPAHPGLSLLPGTSADGALAGRGCMGLPRGSFFWLLLLLTAACSGLLFALYFSAVQRYPGPAAGARDTTSFEAFFQSKASNSWTGKGQACRHLLHLAIQRHPHFRGLFNLSIPVLLWGDLFTPALWDRLSQHKAPYGWRGLSHQVIASTLSLLNGSESAKLFAPPRDTPPKCIRCAVVGNGGILNGSRQGPNIDAHDYVFRLNGAVIKGFERDVGTKTSFYGFTVNTMKNSLVSYWNLGFTSVPQGQDLQYIFIPSDIRDYVMLRSAILGVPVPEGLDKGDSPAPTAQGTAATPAP

SEQ ID NO: 849968 - protein, 88 aa, Homo sapiens
DFYEDPLQSVYADLYMPSTGALMLLTALHTCDQVSAYGFITSNYWKFSDHYFERKMKPLIFYANHDLSLEAALWRDLHKAGILQLYQR

SEQ ID NO: 849969 - protein, 346 aa, Homo sapiens; identical to SEQ ID NO: 849967

SEQ ID NO: 849970 - protein, 219 aa, Homo sapiens
MKDNDIKRLLYTHLLCIFSIILSVFIPSLFLENFSILETHLTWLCICSGFVTAVNLVLYLVVKPNTSSKRSSLSHKVTGFLKCCIYFLMSCFSFHVIFVLYGAPLIELALETFLFAVILSTFTTVPCLCLLGPNLKAWLRVFSRNGVTSIWENSLQITTISSFVGAWLGALPIPLDWERPWQVWPISCTLGATFGYVAGLVISPLWIYWNRKQLTYKNN

SEQ ID NO: 849971 - protein, 206 aa, Homo sapiens
MKDNDIKRLLYTHLLCIFSIILSVFIPSLFLENFSILETHLTWLCICSGFVTAVNLVLYLVVKPNTSSKRSSLSHKVTGFLKCCIYFLMSCFSFHVIFVLYGAPLIELALETFLFAVILSTFTTVPCLCLLGPNLKAWLRVFSRNGVTSIWENSLQITTISSFVGAWLGALPIPLDWERPWQMTVERKRSTYRSLHVPCRGLGTVK

SEQ ID NO: 849972 - protein, 201 aa, Homo sapiens
MKDNDIKRLLYTHLLCIFSIILSVFIPSLFLENFSILETHLTWLCICSGFVTAVNLVLYLVVKPNTSSFLMSCFSFHVIFVLYGAPLIELALETFLFAVILSTFTTVPCLCLLGPNLKAWLRVFSRNGVTSIWENSLQITTISSFVGAWLGALPIPLDWERPWQVWPISCTLGATFGYVAGLVISPLWIYWNRKQLTYKNN

SEQ ID NO: 849973 - protein, 131 aa, Homo sapiens
MSCFSFHVIFVLYGAPLIELALETFLFAVILSTFTTVPCLCLLGPNLKAWLRVFSRNGVTSIWENSLQITTISSFVGAWLGALPIPLDWERPWQVWPISCTLGATFGYVAGLVISPLWIYWNRKQLTYKNN

SEQ ID NO: 849974 - protein, 227 aa, Homo sapiens
MKDNDIKRLLYTHLLCIFSIILSVFIPSLFLENFSILETHLTWLCICSGFVTAVNLVLYLVVKPNTSSKRSSLSHKVTGFLKCCIYFLMSCFSFHVIFVLYGAPLIELALETFLFAVILSTFTTVPCLCLLGPNLKAWLRVFSRNGVTSIWENSLQITTISSFVGAWLGALPIPLDWERPWQGAWYCEMSNLILTTVVQGMAHLLYAWSDLWLRGWPCYFTTLDILE

SEQ ID NO: 849975 - protein, 244 aa, Homo sapiens
MPAKAPLGAARKSLLSAALAIQENTMKDNDIKRLLYTHLLCIFSIILSVFIPSLFLENFSILETHLTWLCICSGFVTAVNLVLYLVVKPNTSSKRSSLSHKVTGFLKCCIYFLMSCFSFHVIFVLYGAPLIELALETFLFAVILSTFTTVPCLCLLGPNLKAWLRVFSRNGVTSIWENSLQITTISSFVGAWLGALPIPLDWERPWQVWPISCTLGATFGYVAGLVISPLWIYWNRKQLTYKNN

SEQ ID NO: 849976 - protein, 187 aa, Homo sapiens
MKDNDIKRLLYTHLLCIFSIILSVFIPSLFLENFSILETHLTWLCICSGFVTAVNLVLYLVVKPNTSSKRSSLSHKVTGFLKCCIYFLMSCFSFHVIFVLYGAPLIELALETFLFAVILSTFTTVPCLCLLGPNLKAWLRVFSRNGVTSIWENSLQITTISSFVGAWLGALPIPLDWERPWQKQIAR

SEQ ID NO: 849977 - protein, 366 aa, Homo sapiens
QRAGAAAMLSAASRVVSRAAVHCALRSPPPEARALAMSRPPPPRVASVLGTMEMGRRMDAPASAAAVRAFLERGHTELDTAFMYSDGQSETILGGLGLGLGGGDCRVKIATKANPWDGKSLKPDSVRSQLETSLKRLQCPQVDLFYLHAPDHGTPVEETLHACQRLHQEGKFVELGLSNYASWEVAEICTLCKSNGWILPTVYQGMYNATTRQVETELFPCLRHFGLRFYAYNPLAGGLLTGKYKYEDKDGKQPVGRFFGNSWAETYRNRFWKEHHFEAIALVEKALQAAYGASAPSVTSAALRWMYHHSQLQGAHGDAVILGMSSLEQLEQNLAATEEGPLEPAVVDAFNQAWHLVAHECPNYFR

SEQ ID NO: 849978 - protein, 207 aa, Homo sapiens
QRAGAAAMLSAASRVVSRAAVHCALRSPPPEARALAMSRPPPPRVASVLGTMEMGRRMDAPASAAAVRAFLERGHTELDTAFMYSDGQSETILGGLGLGLGGGDCRVKIATKANPWDGKSLKPDSVRSQLETSLKRLQCPQVDLFYLHAPDHGTPVEETLHACQRLHQEGKFVELGLSNYASWEVAEICTLCKSNGWILPTVYQGAC

SEQ ID NO: 849979 - protein, 299 aa, Homo sapiens
QRAGAAAMLSAASRVVSRAAVHCALRSPPPEARALAMSRPPPPRVASVLGTMEMGRRMDAPASAAAVRAFLERGHTELDTAFMYSDGQSETILGGLGLGLGGGDCRVKIATKANPWDGKSLKPDSVRSQLETSLKRLQCPQVDLFYLHAPDHGTPVEETLHACQRLHQEVTEAAAVSRVDLFYLHAPDHSAPVEETLRACHQLHQEGKFVELGLSNYAAWEVAEICTLCKSNGWILPTVYQGMYSATTRQVETELFPCLRHFGLRFYAYNPLAGGLLTGKYKYEDKDGKQPVGRFFGTQ

SEQ ID NO: 849980 - protein, 366 aa, Homo sapiens; identical to SEQ ID NO: 849977

SEQ ID NO: 849981 - protein, 345 aa, Homo sapiens
RAAPGLSQSPVAAVMSRQLSRARPASVLGTMEMGRRMDAPASAAAVRAFLERGHTELDTAFMYSDGQSETILGGLGLGLGGGDCRVKIATKANPWDGKSLKPDSVRSQLETSLKRLQCPQVDLFYLHAPDHGTPVEETLHACQRLHQEGKFVELGLSNYASWEVAEICTLCKSNGWILPTVYQGMYNATTRQVETELFPCLRHFGLRFYAYNPLAGGLLTGKYKYEDKDGKQPVGRFFGNSWAETYRNRFWKEHHFEAIALVEKALQAAYGASAPSVTSAALRWMYHHSQLQGAHGDAVILGMSSLEQLEQNLAATEEGPLEPAVVDAFNQAWHLVAHECPNYFR

SEQ ID NO: 849982 - protein, 150 aa, Homo sapiens
MAASQCLCCSKFLFQRQNLACFLTNPHCGSLVNADGHGEVWTDWNNMSKFFQYGWRCTTNENTYSNRTLMGNWNQERYDLRNIVQPKPLPSQFGHYFETTYDTSYNNKMPLSTHRFKREPHWFPGHQPELDPPRYKCTEKSTYMNSYSKP

SEQ ID NO: 849983 - protein, 170 aa, Homo sapiens
FRRGAGSLPRSRRHCRFSQASGSRANSAGRWRQVARQNLACFLTNPHCGSLVNADGHGEVWTDWNNMSKFFQYGWRCTTNENTYSNRTLMGNWNQERYDLRNIVQPKPLPSQFGHYFETTYDTSYNNKMPLSTHRFKREPHWFPGHQPELDPPRYKCTEKSTYMNSYSKP

SEQ ID NO: 849984 - protein, 121 aa, Homo sapiens
MAASQCLCCSKFLFQRQNLACFLTNPHCGSLVNADGHGEVWTDWNNMSKFFQYGWRCTTNENTYSNRTLMGNWNQERYDLRNIVQPKPLPSQDLSESLTGSQDINLNWILPDTNAQKSQLT

SEQ ID NO: 849985 - protein, 170 aa, Homo sapiens; identical to SEQ ID NO: 849983

SEQ ID NO: 849986 - protein, 150 aa, Homo sapiens; identical to SEQ ID NO: 849982

SEQ ID NO: 849987 - protein, 121 aa, Homo sapiens; identical to SEQ ID NO: 849984

SEQ ID NO: 849988 - protein, 161 aa, Homo sapiens [sequence omitted]

SEQ ID NO: 849989 - protein, 161 aa, Homo sapiens [sequence omitted]

SEQ ID NO: 849990 - protein, 161 aa, Homo sapiens [sequence omitted]

SEQ ID NO: 849991 - protein, 161 aa, Homo sapiens [sequence omitted]

SEQ ID NO: 849992 - protein, 161 aa, Homo sapiens [sequence omitted]

SEQ ID NO: 849993 - protein, 161 aa, Homo sapiens [sequence omitted]

SEQ ID NO: 849994 - protein, 112 aa, Homo sapiens
MSGSQSEVAPSPQSPRSPEMGRDLRPGSRVLLLLLLLLLVYLTQPGNGNEGSVTGSCYCGKRISSDSPPSVQFMNRLRKHLRAYHRCLYYTRFQLLSWSVCVEATRTHGFRN

SEQ ID NO: 849995 - protein, 54 aa, Homo sapiens
MACVNLHWEVMPSKKILIWGSGQNVDYFLMLCSKAYQLKREYQHLPSLGFEKWN

SEQ ID NO: 849996 - protein, 54 aa, Homo sapiens; identical to SEQ ID NO: 849995

SEQ ID NO: 849997 - protein, 54 aa, Homo sapiens; identical to SEQ ID NO: 849995

SEQ ID NO: 849998 - protein, 54 aa, Homo sapiens; identical to SEQ ID NO: 849995

SEQ ID NO: 849999 - protein, 1124 aa, Homo sapiens [sequence omitted]

SEQ ID NO: 850000 - protein, 1087 aa, Homo sapiens [sequence omitted]

SEQ ID NO: 850001 - protein, 1106 aa, Homo sapiens
MDPFTEKLLERTRARRENLQRKMAERPTAAPRSMTHAKRARQPLSEASNQQPLSGGEEKSCTKPSPSKKRCSDNTEVEVSNLENKQPVESTSAKSCSPSPVSPQVQPQAADTISDSVAVPASLLGMRRGLNSRLEATAASSVKTRMQKLAEQRRRWDNDDMTDDIPESSLFSPMPSEEKAASPPKPLLSNASATPVGRRGRLANLAATICSWEDDVNHSFAKQNSVQEQPGTACLSKFSSASGASARINSSSVKQEATFCSQRDGDASLNKALSSSADDASLVNASISSSVKATSPVKSTTSITDAKSCEGQNPELLPKTPISPLKTGVSKPIVKSTLSQTVPSKGELSREICLQSQSKDKSTTPGGTGIKPFLERFGERCQEHSKESPARSTPHRTPIITPNTKAIQERLFKQDTSSSTTHLAQQLKQERQKELACLRGRFDKGNIWSAEKGGNSKSKQLETKQETHCQSTPLKKHQGVSKTQSLPVTEKVTENQIPAKNSSTEPKGFTECEMTKSSPLKITLFLEEDKSLKVHQTHDDINSSKVINDLFSDVLEEGELDMEKSQEEMDQALAESSEEQEDALNISSMSLLAPLAQTVGVVSPESLVSTPRLELKDTSRSDESPKPGKFQRTRVPRAESGDSLGSEDRDLLYSIDAYRSQRFKETERPSIKQVIVRKEDVTSKLDEKNNAFPCQVNIKQKMQELNNEINMQQTVIYQASQALNCCVDEEHGKGSLEEAEAERLLLIATGKRTLLIDELNKLKNEGPQRKNKASPQSEFMPSKGSVTLSEIRLPLKADFVCSTVQKPDAANYYYLIILKAGAENMVATPLASTSNSLNGDALTFTTTFTLQDVSNDFEINIEVYSLVQKKDPSGLDKKKKTSKSKAITPKRLLTSITTKSNIHSSVMASPGGLSAVRTSNFALVGSYTLSLSSVGNTKFVLDKVPFLSSLEGHIYLKIKCQVNSSVEERGFLTIFEDVSGFGAWHRRWCVLSGNCISYWTYPDDEKRKNPIGRINLANCTSRQIEPANREFCARRNTFELITVRPQREDDRETLVSQCRDTLCVTKNWLSADTKEERDLWMQKLNQVLVDIRLWQPDACYKPIGKP

SEQ ID NO: 850002 - protein, 611 aa, Homo sapiens
MTKSSPLKITLFLEEDKSLKVTSDPKVEQKIEVIREIEMSVDDDDINSSKVINDLFSDVLEEGELDMEKSQEEMDQALAESSEEQEDALNISSMSLLAPLAQTVGVVSPESLVSTPRLELKDTSRSDESPKPGKFQRTRVPRAESGDSLGSEDRDLLYSIDAYRSQRFKETERPSIKQVIVRKEDVTSKLDEKNNAFPCQVNIKQKMQELNNEINMQQTVIYQASQALNCCVDEEHGKGSLEEAEAERLLLIATGKRTLLIDELNKLKNEGPQRKNKASPQSEFMPSKGSVTLSEIRLPLKADFVCSTVQKPDAANYYYLIILKAGAENMVATPLASTSNSLNGDALTFTTTFTLQDVSNDFEINIEVYSLVQKKDPSGLDKKKKTSKSKAITPKRLLTSITTKSNIHSSVMASPGGLSAVRTSNFALVGSYTLSLSSVGNTKFVLDKVPFLSSLEGHIYLKIKCQVNSSVEERGFLTIFEDVSGFGAWHRRWCVLSGNCISYWTYPDDEKRKNPIGRINLANCTSRQIEPANREFCARRNTFELITVRPQREDDRETLVSQCRDTLCVTKNWLSADTKEERDLWMQKLNQVLVDIRLWQPDACYKPIGKP

SEQ ID NO: 850003 - protein, 1092 aa, Homo sapiens
MDPFTEKLLERTRARRENLQRKMAERPTAAPRSMTHAKRARQPLSEASNQQPLSGGEEKSCTKPSPSKKRCSDNTEVEVSNLENKQPVESTSAKSCSPSPVSPQVQPQAADTISDSVAVPASLLGMRRGLNSRLEATAASSVKTRMQKLAEQRRRWDNDDMTDDIPESSLFSPMPSEEKAASPPKPLLSNASATPVGRRGRLANLAATICSWEDDVNHSFAKQNSVQEQPGTACLSKFSSASGASARINSSSVKQEATFCSQRDGDASLNKALSSSADDASLVNASISSSVKATSPVKSTTSITDAKSCEGQNPELLPKTPISPLKTGVSKPIVKSTLSQTVPSKGELSREICLQSQSKDKSTTPGGTGIKPFLERFGERCQEHSKESPARSTPHRTPIITPNTKAIQERLFKQDTSSSTTHLAQQLKQERQKELACLRGRFDKGNIWSAEKGGNSKSKQLETKQETHCQSTPLKKHQGVSKTQSLPVTEKVTENQIPAKNSSTEPKGFTECEMTKSSPLKITLFLEEDKSLKVTSDPKVEQKIEVIREIEMSVDDDDINSSKVINDLFSDVLEEGELDMEKSQEEMDQALAESSEEQEDALNISSMSLLAPLAQTVGVVSPESLVSTPRLELKDTSRSDESPKPGKFQRTRVPRAESGDSLGSEDRDLLYSIDAYRSQRFKETERPSIKQVIVRKEDVTSKLDEKNNAFPCQVNIKQKMQELNNEINMQQTVIYQASQALNCCVDEEHGKGSLEEAEAERLLLIATGKRTLLIDELNKLKNEGPQRKNKASPQSEFMPSKGSVTLSEIRLPLKADFVCSTVQKPDAANYYYLIILKAGAENMVATPLASTSNSLNGDALTFTTTFTLQDVSNDFEINIEVYSLVQKKDPSGLDKKKKTSKSKAITPKRLLTSITTKSNIHSSVMASPGGLSAVRTSNFALVGSYTLSLSSVGNTKFVLDKVPFLSSLEGHIYLKIKCQVNSSVEERGFLTIFEDVSGFGAWHRRWCVLSGNCISYWTYPDDEKRKNPIGRINLANCTSRQIEPANREFCARRNTFELITVRPQREDDRETLVSQCRDTLCVTKNWLACRYL

SEQ ID NO: 850004 - protein, 638 aa, Homo sapiens
MDPFTEKLLERTRARRENLQRKMAERPTAAPRSMTHAKRARQPLSEASNQQPLSGGEEKSCTKPSPSKKRCSDNTEVEVSNLENKQPVESTSAKSCSPSPVSPQVQPQAADTISDSVAVPASLLGMRRGLNSRLEATAASSVKTRMQKLAEQRRRWDNDDMTDDIPESSLFSPMPSEEKAASPPKPLLSNASATPVGRRGRLANLAATICSWEDDVNHSFAKQNSVQEQPGTACLSKFSSASGASARINSSSVKQEATFCSQRDGDASLNKALSSSADDASLVNASISSSVKATSPVKSTTSITDAKSCEGQNPELLPKTPISPLKTGVSKPIVKSTLSQTVPSKGELSREICLQSQSKDKSTTPGGTGIKPFLERFGERCQEHSKESPARSTPHRTPIITPNTKAIQERLFKQQDVSNDFEINIEVYSLVQKKDPSGLDKKKKTSKSKAITPKRLLTSITTKSNIHSSVMASPGGLSAVRTSNFALVGSYTLSLSSVGNTKFVLDKVPFLSSLEGHIYLKIKCQVNSSVEERGFLTIFEDVSGFGAWHRRWCVLSGNCISYWTYPDDEKRKNPIGRINLANCTSRQIEPANREFCARRNTFELITVRPQREDDRETLVSQCRDTLCVTKNWLACRYL

SEQ ID NO: 850005 - protein, 1124 aa, Homo sapiens [sequence omitted]

SEQ ID NO: 850006 - protein, 1106 aa, Homo sapiens
MDPFTEKLLERTRARRENLQRKMAERPTAAPRSMTHAKRARQPLSEASNQQPLSGGEEKSCTKPSPSKKRCSDNTEVEVSNLENKQPVESTSAKSCSPSPVSPQVQPQAADTISDSVAVPASLLGMRRGLNSRLEATAASSVKTRMQKLAEQRRRWDNDDMTDDIPESSLFSPMPSEEKAASPPKPLLSNASATPVGRRGRLANLAATICSWEDDVNHSFAKQNSVQEQPGTACLSKFSSASGASARINSSSVKQEATFCSQRDGDASLNKALSSSADDASLVNASISSSVKATSPVKSTTSITDAKSCEGQNPELLPKTPISLPSKGELSREICLQSQSKDKSTTPGGTGIKPFLERFGERCQEHSKESPARSTPHRTPIITPNTKAIQERLFKQDTSSSTTHLAQQLKQERQKELACLRGRFDKGNIWSAEKGGNSKSKQLETKQETHCQSTPLKKHQGVSKTQSLPVTEKVTENQIPAKNSSTEPKGFTECEMTKSSPLKITLFLEEDKSLKVTSDPKVEQKIEVIREIEMSVDDDDINSSKVINDLFSDVLEEGELDMEKSQEEMDQALAESSEEQEDALNISSMSLLAPLAQTVGVVSPESLVSTPRLELKDTSRSDESPKPGKFQRTRVPRAESGDSLGSEDRDLLYSIDAYRSQRFKETERPSIKQVIVRKEDVTSKLDEKNNAFPCQVNIKQKMQELNNEINMQQTVIYQASQALNCCVDEEHGKGSLEEAEAERLLLIATGKRTLLIDELNKLKNEGPQRKNKASPQSEFMPSKGSVTLSEIRLPLKADFVCSTVQKPDAANYYYLIILKAGAENMVATPLASTSNSLNGDALTFTTTFTLQDVSNDFEINIEVYSLVQKKDPSGLDKKKKTSKSKAITPKRLLTSITTKSNIHSSVMASPGGLSAVRTSNFALVGSYTLSLSSVGNTKFVLDKVPFLSSLEGHIYLKIKCQVNSSVEERGFLTIFEDVSGFGAWHRRWCVLSGNCISYWTYPDDEKRKNPIGRINLANCTSRQIEPANREFCARRNTFELITVRPQREDDRETLVSQCRDTLCVTKNWLSADTKEERDLWMQKLNQVLVDIRLWQPDACYKPIGKP

SEQ ID NO: 850007 - protein, 233 aa, Homo sapiens
VLDKKKNNIQVQGYYSKAILTSITTKSNIHSSVMASPGGLSAVRTSNFALVGSYTLSLSSVGNTKFVLDKVPFLSSLEGHIYLKIKCQVNSSVEERGFLTIFEDVSGFGAWHRRWCVLSGNCISYWTYPDDEKRKNPIGRINLANCTSRQIEPANREFCARRNTFELITVRPQREDDRETLVSQCRDTLCVTKNWLSADTKEERDLWMQKLNQVLVDIRLWQPDACYKPIGKP

SEQ ID NO: 850008 - protein, 438 aa, Homo sapiens
MDPFTEKLLERTRARRENLQRKMAERPTAAPRSMTHAKRARQPLSEASNQQPLSGGEEKSCTKPSPSKKRCSDNTEVEVSNLENKQPVESTSAKSCSPSPVSPQVQPQAADTISDSVAVPASLLGMRRGLNSRLEATAASSVKTRMQKLAEQRRRWDNDDMTDDIPESSLFSPMPSEEKAASPPKPLLSNASATPVGRRGRLANLAATICSWEDDVNHSFAKQNSVQEQPGTACLSKFSSASGASARINSSSVKQEATFCSQRDGDASLNKALSSSADDASLVNASISSSVKATSPVKSTTSITDAKSCEGQNPELLPKTPISPLKTGVSKPIVKSTLSQTVPSKGELSREICLQSQSKDKSTTPGGTGIKPFLERFGERCQEHSKESPARSTPHRTPIITPNTKAIQERLFKQDTSSSTTHLAQQLKQNVNNKAETH

SEQ ID NO: 850009 - protein, 186 aa, Homo sapiens
MLALISRLLDWFRSLFWKEEMELTLVGLQYSGKTTFVNVIASGQFSEDMIPTVGFNMRKVTKGNVTIKIWDIGGQPRFRSMWERYCRGVNAIVYMIDAADREKIEASRNELHNLLDKPQLQGIPVLVLGNKRDLPNALDEKQLIEKMNLSAIQDREICCYSISCKEKDNIDITLQWLIQHSKSRRS

SEQ ID NO: 850010 - protein, 186 aa, Homo sapiens; identical to SEQ ID NO: 850009

SEQ ID NO: 850011 - protein, 136 aa, Homo sapiens
MPAAGGPGRIGRAALAVGADGGAGTGVGGRASHMIRSASWVWLLPPAGVRPCRAGAPRSRWRVRAEARSCGSRRRRRSSVLPSVLAPGRHHAGAHLPPAGLVPFALLEGRDGADARGAAVLGQDHLRQCHRVRSIQ

SEQ ID NO: 850012 - protein, 186 aa, Homo sapiens; identical to SEQ ID NO: 850009

SEQ ID NO: 850013 - protein, 318 aa, Homo sapiens
MPAAGGPGRIGRAALAVGADGGAGTGVGGRASHMIRSASWVWLLPPAGVRPCRAGAPRSRWRVRAEARSCGSRRRRRSSVLPSVLAPGRHHAGAHLPPAGLVPFALLEGRDGADARGAAVLGQDHLRQCHRDQESGKPNVLIKKLLECNNAFKMPVLEDISQVNGFFKFFKDISGQFSEDMIPTVGFNMRKVTKGNVTIKIWDIGGQPRFRSMWERYCRGVNAIVYMIDAADREKIEASRNELHNLLDKPQLQGIPVLVLGNKRDLPNALDEKQLIEKMNLSAIQDREICCYSISCKEKDNIDITLQWLIQHSKSRRS

SEQ ID NO: 850014 - protein, 186 aa, Homo sapiens; identical to SEQ ID NO: 850009

SEQ ID NO: 850015 - protein, 145 aa, Homo sapiens
YQPAPQLFVDPPAPWGRRLPSCPLCLLQALSTSALPRQPKSSGSQGPQGESLDKEAWALRSSTVSAGARRWSWDECVDRGDGWPPRAAPGWSSGSSRWLPLRQRSLGDPPAEGGWQELAREPPALSRWEAESQCWGTVAWADLEP

SEQ ID NO: 850016 - protein, 680 aa, Homo sapiens
MTSQGLSLQLRQGPAGLGPKKRAEPQLVETQNVRLIEVERSVSVGPQWALGRCPVQCECGSTVDPGLGGIPCSVSVDSQWARGWGCPMQCECGPVVGTRGCPRHLAIANPHFWENAMLVAEKAALQGQLQHLEGQLGSLQGRAQELLLQSQRAQEHSSRLQAEKSVLEIQGQELHRKLEVLEEEVRAARQSQEETRGQQQALLRDHKALAQLQRRQEAELEGLLVRHRDLKANMRALELAHRELQGRHEQLQAQRASVEAQEVALLAERERLMQDGHRQRGLEEELRRLQSEHDRAQMLLAELSRERGELQGERGELRGRLARLELERAQLEMQSQQLRESNQQLDLSACRLTTQCELLTQLRSAQEEENRQLLAEVQALSRENRELLERSLESRDHLHREQREYLDQLNALRREKQKLVEKIMDQYRVLEPVPLPRTKVPFPGTHAPGPELPSACGMRPWQAGSGGNSAQGSRWGEALSHSALGTPLGNDSDSAIQAPWGRPSPTAKDLVWDGRTPLRPCRNTKQMPTERALRYRNRRNVPSPHPSASDTVGTAGLGVQPSRHWSVSGGPRQPKSSGSQGPQGESLDKEAWALRSSTVSAGARRWSWDECVDRGDGWPPRAAPGWSSGSSRWLPLRQRSLGDPPAEGGWQELAREPPALSRWEAESQCWGTVAWADLEP

SEQ ID NO: 850017 - protein, 696 aa, Homo sapiens
LEEAERERREKEALQAELEKAVVRGKELGARLEHLQRELEQAALERQEFLREKESQHQRYQGLEQRLEAELQAAATSKEEALMELKTRALQLEEELFQLRQGPAGLGPKKRAEPQLVETQNVRLIEVERSNAMLVAEKAALQGQLQHLEGQLGSLQGRAQELLLQSQRAQEHSSRLQAEKSVLEIQGQELHRKLEVLEEEVRAARQSQEETRGQQQALLRDHKALAQLQRRQEAELEGLLVRHRDLKANMRALELAHRELQGRHEQLQAQRASVEAQEVALLAERERLMQDGHRQRGLEEELRRLQSEHDRAQMLLAELSRERGELQGERGELRGRLARLELERAQLEMQSQQLRESNQQLDLSACRLTTQCELLTQLRSAQEEENRQLLAEVQALSRENRELLERSLESRDHLHREQREYLDQLNALRREKQKLVEKIMDQYRVLEPVPLPRTKVPFPGTHAPGPELPSACGMRPWQAGSGGNSAQGSRWGEALSHSALGTPLGNDSDSAIQAPWGRPSPTAKDLVWDGRTPLRPCRNTKQMPTERALRYRNRRNVPSPHPSASDTVGTAGLGVQPSRHWSVSGGPRQPKSSGSQGPQGESLDKEAWALRSSTVSAGARRWSWDECVDRGDGWPPRAAPGWSSGSSRWLPLRQRSLGDPPAEGGWQELAREPPALSRWEAESQCWGTVAWADLEP

SEQ ID NO: 850018 - protein, 468 aa, Homo sapiens
GRLVLVGGLVQKARDGGPQALDLAPPALDSVLEASAECPQAPDSDPQEAESPLQAAAMDPQASDWSPQESGSPVETQESPEKAGRRSSLQSPASVAPPQGPGTKIQAPQLLGGETEGREAPQGELVPEAWGLRQEGPEHKPGPSEPSSVQLEEQEGPNQGLDLATGQAEAREHDQRLEGTVRDPAWQKPQQKSEGALEVQVWEGPIPGESLASGVAEQEALQGGGGTGPLPRHPCAGPRAPSACGMRPWQAGSGGNSAQGSRWGEALSHSALGTPLGNDSDSAIQAPWGRPSPTAKDLVWDGRTPLRPCRNTKQMPTERALRYRNRRNVPSPHPSASDTVGTAGLGVQPSRHWSVSGGPRQPKSSGSQGPQGESLDKEAWALRSSTVSAGARRWSWDECVDRGDGWPPRAAPGWSSGSSRWLPLRQRSLGDPPAEGGWQELAREPPALSRWEAESQCWGTVAWADLEP

SEQ ID NO: 850019 - protein, 659 aa, Homo sapiens
MTSQGLSLQLRQGPAGLGPKKRAEPQLVETQNVRLIEVERSVSVGPQWALGRCPVQCECGSTVDPGLGGIPCSVSVDSQWARGWGCPMQCECGPVVGTRGCPRHLAIANPHFWENAMLVAEKAALQGQLQHLEGQLGSLQGRAQELLLQSQRAQEHSSRLQAEKSVLEIQGQELHRKLEVLEEEVRAARQSQEETRGQQQALLRDHKALAQLQRRQEAELEGLLVRHRDLKANMRALELAHRELQGRHEQLQAQRASVEAQEVALLAERERLMQDGHRQRGLEEELRRLQSEHDRAQMLLAELSRERGELQGERGELRGRLARLELERAQLEMQSQQLRESNQQLDLSACRLTTQCELLTQLRSAQEEENRQLLAEVQALSRENRELLERSLESRDHLHREQREYLDQLNALRREKQKLVEKIMDQYRVLEPVPLPRTKVPFPGTHAPGPELPSACGMRPWQAGSGGNSAQGSRWGEALSHSALGTPLGNDSDSAIQAPWGRPSPTAKDLVWDGRTPLRPCRNTKQMPTERALRYRNRRNVPSPHPSASDTVGTAGLGVQPSRHWSVSGGPRQPKSSGSQGPQGESLDKEAWALRSSTVSAGARRWSWDECVDRGDGWPPRAAPGWSSGSSRWLPLRQRSLGDPAIGPDFEPGTVPAFV

SEQ ID NO: 850020 - protein, 71 aa, Homo sapiens
VASEFLREKEAAQRYQGLEQRLEAELQAAATSKEEALMELKTRALQLEEELFQVMPARLGAGGHATLPSIP

SEQ ID NO: 850021 - protein, 704 aa, Homo sapiens
MAGVAAHRAHPPFTAHMKNRGLREELEKAVVRGKELGARLEHLQRELEQAALERQEFLREKESQHQRYQGLEQRLEAELQAAATSKEEALMELKTRALQLEEELFQLRQGPAGLGPKKRAEPQLVETQNVRLIEVERSNAMLVAEKAALQGQLQHLEGQLGSLQGRAQELLLQSQRAQEHSSRLQAEKSVLEIQGQELHRKLEVLEEEVRAARQSQEETRGQQQALLRDHKALAQLQRRQEAELEGLLVRHRDLKANMRALELAHRELQGRHEQLQAQRASVEAQEVALLAERERLMQDGHRQRGLEEELRRLQSEHDRAQMLLAELSRERGELQGERGELRGRLARLELERAQLEMQSQQLRESNQQLDLSACRLTTQCELLTQLRSAQEEENRQLLAEVQALSRENRELLERSLESRDHLHREQREYLDQLNALRREKQKLVEKIMDQYRVLEPVPLPRTKVPFPGTHAPGPELPSACGMRPWQAGSGGNSAQGSRWGEALSHSALGTPLGNDSDSAIQAPWGRPSPTAKDLVWDGRTPLRPCRNTKQMPTERALRYRNRRNVPSPHPSASDTVGTAGLGVQPSRHWSVSGGPRQPKSSGSQGPQGESLDKEAWALRSSTVSAGARRWSWDECVDRGDGWPPRAAPGWSSGSSRWLPLRQRSLGDPPAEGGWQELAREPPALSRWEAESQCWGTVAWADLEP

SEQ ID NO: 850022 - protein, 314 aa, Homo sapiens
GTVRRSFGLEPVPLPRDKKGSWLADKVKRLMRPRREGGPPGGLRLGADGAGSTESLGGPPETELPEGREADGTGPLPRHPCAGPRAPSACGMRPWQAGSGGNSAQGSRWGEALSHSALGTPLGNDSDSAIQAPWGRPSPTAKDLVWDGRTPLRPCRNTKQMPTERALRYRNRRNVPSPHPSASDTVGTAGLGVQPSRHWSVSGGPRQPKSSGSQGPQGESLDKEAWALRSSTVSAGARRWSWDECVDRGDGWPPRAAPGWSSGSSRWLPLRQRSLGDPPAEGGWQELAREPPALSRWEAESQCWGTVAWADLEP

SEQ ID NO: 850023 - protein, 446 aa, Homo sapiens
MTSQGLSLQLRQGPAGLGPKKRAEPQLVETQNVRLIEVERSVSVGPQWALGRCPVQCECGSTVDPGLGGIPCSVSVDSQWARGWGCPMQCECGPVVGTRGCPRHLAIANPHFWENAMLVAEKAALQGQLQHLEGQLGSLQGRAQELLLQSQRAQEHSSRLQAEKSVLEIQGQELHRKLEVLEEEVRAARQSQEETRGQQQALLRDHKALAQLQRRQEAELEGLLVRHRDLKANMRALELAHRELQGRHEQLQAQRASVEAQEVALLAERERLMQDGHRQRGLEEELRRLQSEHDRAQMLLAELSRERGELQGERGELRGRLARLELERAQLEMQSQQLRESNQQLDLSACRLTTQCELLTQLRSAQEEENRQLLAEVQALSRENRELLERSLESRDHLHREQREYLDQLNALRREKQKLVEKIMDQYRVLEPVPLPRTKKGSLAVT

SEQ ID NO: 850024 - protein, 2715 aa, Homo sapiens
MAAAAGGGSCPGPGSARGRFPGRPRGAGGGGGRGGRGNGAERVRVALRRGGGATGPGGAEPGEDTALLRLLGLRRGLRRLRRLWAGPRVQRGRGRGRGRGWGPSRGCVPEEESSDGESDEEEFQGFHSDEDVAPSSLRSALRSQRGRAPRGRGRKHKTTPLPPPRLADVAPTPPKTPARKRGEEGTERMVQALTELLRRAQAPQAPRSRACEPSTPRRSRGRPPGRPAGPCRRKQQAVVVAEAAVTIPKPEPPPPVVPVKHQTGSWKCKEGPGPGPGTPRRGGQSSRGGRGGRGRGRGGGLPFVIKFVSRAKKVKMGQLSLGLESGQGQGQHEESWQDVPQRRVGSGQGGSPCWKKQEQKLDDEEEEKKEEEEKDKEGEEKEERAVAEEMMPAAEKEEAKLPPPPLTPPAPSPPPPLPPPSTSPPPPLCPPPPPPVSPPPLPSPPPPPAQEEQEESPPPVVPATCSRKRGRPPLTPSQRAEREAARAGPEGTSPPTPTPSTATGGPPEDSPTVAPKSTTFLKNIRQFIMPVVSARSSRVIKTPRRFMDEDPPKPPKVEVSPVLRPPITTSPPVPQEPAPVPSPPRAPTPPSTPVPLPEKRRSILREPTFRWTSLTRELPPPPPAPPPPPAPSPPPAPATSSRRPLLLRAPQFTPSEAHLKIYESVLTPPPLGAPEAPEPEPPPADDSPAEPEPRAVGRTNHLSLPRFAPVVTTPVKAEVSPHGAPALSNGPQTQAQLLQPLQALQTQLLPQALPPPQPQLQPPPSPQQMPPLEKARIAGVGSLPLSGVEEKMFSLLKRAKVQLFKIDQQQQQKVAASMPLSPGGQMEEVAGAVKQISDRGPVRSEDESVEAKRERPSGPESPVQGPRIKHVCRHAAVALGQARAMVPEDVPRLSALPLRDRQDLATEDTSSASETESVPSRSRRGKVEAAGPGGESEPTGSGGTLAHTPRRSLPSHHGKKMRMARCGHCRGCLRVQDCGSCVNCLDKPKFGGPNTKKQCCVYRKCDKIEARKMERLAKKGRTIVKTLLPWDSDESPEASPGPPGPRRGAGAGGPREEVVAHPGPEEQDSLLQRKSARRCVKQRPSYDIFEDSDDSEPGGPPAPRRRTPRENELPLPEPEEQSRPRKPTLQPVLQLKARRRLDKDALAPGPFASFPNGWTGKQKSPDGVHRVRVDFKEDCDLENVWLMGGLSVLTSVPGGPPMVCLLCASKGLHELVFCQVCCDPFHPFCLEEAERPLPQHHDTWCCRRCKFCHVCGRKGRGSKHLLECERCRHAYHPACLGPSYPTRATRKRRHWICSACVRCKSCGATPGKNWDVEWSGDYSLCPRCTQLYEKGNYCPICTRCYEDNDYESKMMQCAQCDHWVHAKCEGLSDEDYEILSGLPDSVLYTCGPCAGAAQPRWREALSGALQGGLRQVLQGLLSSKVVGPLLLCTQCGPDGKQLHPGPCGLQAVSQRFEDGHYKSVHSFMEDMVGILMRHSEEGETPDRRAGGQMKGLLLKLLESAFGWFDAHDPKYWRRSTRLPNGVLPNAVLPPSLDHVYAQWRQQEPETPESGQPPGDPSAAFQGKDPAAFSHLEDPRQCALCLKYGDADSKEAGRLLYIGQNEWTHVNCAIWSAEVFEENDGSLKNVHAAVARGRQMRCELCLKPGATVGCCLSSCLSNFHFMCARASYCIFQDDKKVFCQKHTDLLDGKEIVNPDGFDVLRRVYVDFEGINFKRKFLTGLEPDAINVLIGSIRIDSLGTLSDLSDCEGRLFPIGYQCSRLYWSTVDARRRCWYRCRILEYRPWGPREEPAHLEAAEENQTIVHSPAPSSEPPGGEDPPLDTDVLVPGAPERHSPIQNLDPPLRPDSGSAPPPAPRSFSGARIKVPNYSPSRRPLGGVSFGPLPSPGSPSSLTHHIPTVGDPDFPAPPRRSRRPSPLAPRPPPSRWASPPLKTSPQLRVPPPTSVVTALTPTSGELAPPGPAPSPPPPEDLGPDFEDMEVVSGLSAADLDFAASLLGTEPFQEEIVAAGAMGSSHGGPGDSSEEESSPTSRYIHFPVTVVSAPGLAPSATPGAPRIEQLDGVDDGTDSEAEAVQQPRGQGTPPSGPGVVRAGVLGAAGDRARPPEDLPSEIVDFVLKNLGGPGDGGAGPREESLPPAPPLANGSQPSQGLTASPADPTRTFAWLPGAPGVRVLSLGPAPEPPKPATSKIILVNKLGQVFVKMAGEGEPVPPPVKQPPLPPTISPTAPTSWTLPPGPLLGVLPVVGVVRPAPPPPPPPLTLVLSSGPASPPRQAIRVKRVSTFSGRSPPAPPPYKAPRLDEDGEASEDTPQVPGLGSGGFSRVRMKTPTVRGVLDLDRPGEPAGEESPGPLQERSPLLPLPEDGPPQVPDGPPDLLLESQWHHYSGEASSSEEEPPSPDDKENQAPKRTGPHLRFEISSEDGFSVEAESLEGAWRTLIEKVQEARGHARLRHLSFSGMSGARLLGIHHDAVIFLAEQLPGAQRCQHYKFRYHQQGEGQEEPPLNPHGAARAEVYLRKCTFDMFNFLASQHRVLPEGATCDEEEDEVQLRSTRRATSLELPMAMRFRHLKKTSKEAVGVYRSAIHGRGLFCKRNIDAGEMVIEYSGIVIRSVLTDKREKFYDGKGIGCYMFRMDDFDVVDATMHGNAARFINHSCEPNCFSRVIHVEGQKHIVIFALRRILRGEELTYDYKFPIEDASNKLPCNCGAKRCRRFLN

SEQ ID NO: 850025 - protein, 257 aa, Homo sapiens
MSGARLLGIHHDAVIFLAEQLPGAQRCQHYKFRYHQQGEGQEEPPLNPHGAARAEVYLRKCTFDMFNFLASQHRVLPEGATCDEEEDEVQLRSTRRATSLELPMAMRFRHLKKTSKEAVGVYRSAIHGRGLFCKRNIDAGEMVIEYSGIVIRSVLTDKREKFYDGKGIGCYMFRMDDFDVVDATMHGNAARFINHSCEPNCFSRVIHVEGQKHIVIFALRRILRGEELTYDYKFPIEDASNKLPCNCGAKRCRRFLN

SEQ ID NO: 850026 - protein, 2571 aa, Homo sapiens
MAAAAGGGSCPGPGSARGRFPGRPRGAGGGGGRGGRGNGAERVRVALRRGGGATGPGGAEPGEDTALLRLLGLRRGLRRLRRLWAGPRVQRGRGRGRGRGWGPSRGCVPEEESSDGESDEEEFQGFHSDEDVAPSSLRSALRSQRGRAPRGRGRKHKTTPLPPPRLADVAPTPPKTPARKRGEEGTERMVQALTELLRRAQAPQAPRSRACEPSTPRRSRGRPPGRPAGPCRRKQQAVVVAEAAVTIPKPEPPPPVVPVKHQTGSWKCKEGPGPGPGTPRRGGQSSRGGRGGRGRGRGGGLPFVIKFVSRAKKVKMGQLSLGLESGQGQGQHEESWQDVPQRRVGSGQGGSPCWKKQEQKLDDEEEEKKEEEEKDKEGEEKEERAVAEEMMPAAEKEEAKLPPPPLTPPAPSPPPPLPPPSTSPPPPLCPPPPPPVSPPPLPSPPPPPAQEEQEESPPPVVPATCSRKRGRPPLTPSQRAEREAARAGPEGTSPPTPTPSTATGGPPEDSPTVAPKKHHLPEEYPAVYYACAPEPEPPPADDSPAEPEPRAVGRTNHLSLPRFAPVVTTPVKAEVSPHGAPALSNGPQTQAQLLQPLQALQTQLLPQALPPPQPQLQPPPSPQQMPPLEKARIAGVGSLPLSGVEEKMFSLLKRAKVQLFKIDQQQQQKVAASMPLSPGGQMEEVAGAVKQISDRGPVRSEDESVEAKRERPSGPESPVQGPRIKHVCRHAAVALGQARAMVPEDVPRLSALPLRDRQDLATEDTSSASETESVPSRSRRGKVEAAGPGGESEPTGSGGTLAHTPRRSLPSHHGKKMRMARCGHCRGCLRVQDCGSCVNCLDKPKFGGPNTKKQCCVYRKCDKIEARKMERLAKKGRTIVKTLLPWDSDESPEASPGPPGPRRGAGAGGPREEVVAHPGPEEQDSLLQRKSARRCVKQRPSYDIFEDSDDSEPGGPPAPRRRTPRENELPLPEPEEQSRPRKPTLQPVLQLKARRRLDKDALAPGPFASFPNGWTGKQKSPDGVHRVRVDFKEDCDLENVWLMGGLSVLTSVPGGPPMVCLLCASKGLHELVFCQVCCDPFHPFCLEEAERPLPQHHDTWCCRRCKFCHVCGRKGRGSKHLLECERCRHAYHPACLGPSYPTRATRKRRHWICSACVRCKSCGATPGKNWDVEWSGDYSLCPRCTQLYEKGNYCPICTRCYEDNDYESKMMQCAQCDHWVHAKCEGLSDEDYEILSGLPDSVLYTCGPCAGAAQPRWREALSGALQGGLRQVLQGLLSSKVVGPLLLCTQCGPDGKQLHPGPCGLQAVSQRFEDGHYKSVHSFMEDMVGILMRHSEEGETPDRRAGGQMKGLLLKLLESAFGWFDAHDPKYWRRSTRLPNGVLPNAVLPPSLDHVYAQWRQQEPETPESGQPPGDPSAAFQGKDPAAFSHLEDPRQCALCLKYGDADSKEAGRLLYIGQNEWTHVNCAIWSAEVFEENDGSLKNVHAAVARGRQMRCELCLKPGATVGCCLSSCLSNFHFMCARASYCIFQDDKKVFCQKHTDLLDGKEIVNPDGFDVLRRVYVDFEGINFKRKFLTGLEPDAINVLIGSIRIDSLGTLSDLSDCEGRLFPIGYQCSRLYWSTVDARRRCWYRCRILEYRPWGPREEPAHLEAAEENQTIVHSPAPSSEPPGGEDPPLDTDVLVPGAPERHSPIQNLDPPLRPDSGSAPPPAPRSFSGARIKVPNYSPSRRPLGGVSFGPLPSPGSPSSLTHHIPTVGDPDFPAPPRRSRRPSPLAPRPPPSRWASPPLKTSPQLRVPPPTSVVTALTPTSGELAPPGPAPSPPPPEDLGPDFEDMEVVSGLSAADLDFAASLLGTEPFQEEIVAAGAMGSSHGGPGDSSEEESSPTSRYIHFPVTVVSAPGLAPSATPGAPRIEQLDGVDDGTDSEAEAVQQPRGQGTPPSGPGVVRAGVLGAAGDRARPPEDLPSEIVDFVLKNLGGPGDGGAGPREESLPPAPPLANGSQPSQGLTASPADPTRTFAWLPGAPGVRVLSLGPAPEPPKPATSKIILVNKLGQVFVKMAGEGEPVPPPVKQPPLPPTISPTAPTSWTLPPGPLLGVLPVVGVVRPAPPPPPPPLTLVLSSGPASPPRQAIRVKRVSTFSGRSPPAPPPYKAPRLDEDGEASEDTPQVPGLGSGGFSRVRMKTPTVRGVLDLDRPGEPAGEESPGPLQERSPLLPLPEDGPPQVPDGPPDLLLESQWHHYSGEASSSEEEPPSPDDKENQAPKRTGPHLRFEISSEDGFSVEAESLEGAWRTLIEKVQEARGHARLRHLSFSGMSGARLLGIHHDAVIFLAEQLPGAQRCQHYKFRYHQQGEGQEEPPLNPHGAARAEVYLRKCTFDMFNFLASQHRVLPEGATCDEEEDEVQLRSTRRATSLELPMAMRFRHLKKTSKEAVGVYRSAIHGRGLFCKRNIDAGEMVIEYSGIVIRSVLTDKREKFYDGKGIGCYMFRMDDFDVVDATMHGNAARFINHSCEPNCFSRVIHVEGQKHIVIFALRRILRGEELTYDYKFPIEDASNKLPCNCGAKRCRRFLN

SEQ ID NO: 850027 - protein, 2715 aa, Homo sapiens; identical to SEQ ID NO: 850024

SEQ ID NO: 850028 - protein, 2715 aa, Homo sapiens; identical to SEQ ID NO: 850024

SEQ ID NO: 850029 - protein, 67 aa, Homo sapiens
VWAQGLARVGGGLKVRASLCQQVSPSLSPHPTAPPGVRALPPCIPPGLSGAQLSNPGHAQTAPLGER

SEQ ID NO: 850030 - protein, 112 aa, Homo sapiens
VGEASLSAGTEHLISPPPSLQGIGCYMFRMDDFDVVDATMHGNAARFINHSCEPNCFSRVIHVEGQKHIVIFALRRILRGEELTYDYKFPIEDASNKLPCNCGAKRCRRFLN

SEQ ID NO: 850031 - protein, 2661 aa, Homo sapiens
MAAAAGGGSCPGPGSARGRFPGRPRGAGGGGGRGGRGNGAERVRVALRRGGGATGPGGAEPGEDTALLRLLGLRRGLRRLRRLWAGPRVQRGRGRGRGRGWGPSRGCVPEEESSDGESDEEEFQGFHSDEDVAPSSLRSALRSQRGRAPRGRGRKHKTTPLPPPRLADVAPTPPKTPARKRGEEGTERMVQALTELLRRAQAPQAPRSRACEPSTPRRSRGRPPGRPAGPCRRKQQAVVVAEAAVTIPFVIKFVSRAKKVKMGQLSLGLESGQGQGQHEESWQDVPQRRVGSGQGGSPCWKKQEQKLDDEEEEKKEEEEKDKEGEEKEERAVAEEMMPAAEKEEAKLPPPPLTPPAPSPPPPLPPPSTSPPPPLCPPPPPPVSPPPLPSPPPPPAQEEQEESPPPVVPATCSRKRGRPPLTPSQRAEREAARAGPEGTSPPTPTPSTATGGPPEDSPTVAPKSTTFLKNIRQFIMPVVSARSSRVIKTPRRFMDEDPPKPPKVEVSPVLRPPITTSPPVPQEPAPVPSPPRAPTPPSTPVPLPEKRRSILREPTFRWTSLTRELPPPPPAPPPPPAPSPPPAPATSSRRPLLLRAPQFTPSEAHLKIYESVLTPPPLGAPEAPEPEPPPADDSPAEPEPRAVGRTNHLSLPRFAPVVTTPVKAEVSPHGAPALSNGPQTQAQLLQPLQALQTQLLPQALPPPQPQLQPPPSPQQMPPLEKARIAGVGSLPLSGVEEKMFSLLKRAKVQLFKIDQQQQQKVAASMPLSPGGQMEEVAGAVKQISDRGPVRSEDESVEAKRERPSGPESPVQGPRIKHVCRHAAVALGQARAMVPEDVPRLSALPLRDRQDLATEDTSSASETESVPSRSRRGKVEAAGPGGESEPTGSGGTLAHTPRRSLPSHHGKKMRMARCGHCRGCLRVQDCGSCVNCLDKPKFGGPNTKKQCCVYRKCDKIEARKMERLAKKGRTIVKTLLPWDSDESPEASPGPPGPRRGAGAGGPREEVVAHPGPEEQDSLLQRKSARRCVKQRPSYDIFEDSDDSEPGGPPAPRRRTPRENELPLPEPEEQSRPRKPTLQPVLQLKARRRLDKDALAPGPFASFPNGWTGKQKSPDGVHRVRVDFKEDCDLENVWLMGGLSVLTSVPGGPPMVCLLCASKGLHELVFCQVCCDPFHPFCLEEAERPLPQHHDTWCCRRCKFCHVCGRKGRGSKHLLECERCRHAYHPACLGPSYPTRATRKRRHWICSACVRCKSCGATPGKNWDVEWSGDYSLCPRCTQLYEKGNYCPICTRCYEDNDYESKMMQCAQCDHWVHAKCEGLSDEDYEILSGLPDSVLYTCGPCAGAAQPRWREALSGALQGGLRQVLQGLLSSKVVGPLLLCTQCGPDGKQLHPGPCGLQAVSQRFEDGHYKSVHSFMEDMVGILMRHSEEGETPDRRAGGQMKGLLLKLLESAFGWFDAHDPKYWRRSTRLPNGVLPNAVLPPSLDHVYAQWRQQEPETPESGQPPGDPSAAFQGKDPAAFSHLEDPRQCALCLKYGDADSKEAGRLLYIGQNEWTHVNCAIWSAEVFEENDGSLKNVHAAVARGRQMRCELCLKPGATVGCCLSSCLSNFHFMCARASYCIFQDDKKVFCQKHTDLLDGKEIVNPDGFDVLRRVYVDFEGINFKRKFLTGLEPDAINVLIGSIRIDSLGTLSDLSDCEGRLFPIGYQCSRLYWSTVDARRRCWYRCRILEYRPWGPREEPAHLEAAEENQTIVHSPAPSSEPPGGEDPPLDTDVLVPGAPERHSPIQNLDPPLRPDSGSAPPPAPRSFSGARIKVPNYSPSRRPLGGVSFGPLPSPGSPSSLTHHIPTVGDPDFPAPPRRSRRPSPLAPRPPPSRWASPPLKTSPQLRVPPPTSVVTALTPTSGELAPPGPAPSPPPPEDLGPDFEDMEVVSGLSAADLDFAASLLGTEPFQEEIVAAGAMGSSHGGPGDSSEEESSPTSRYIHFPVTVVSAPGLAPSATPGAPRIEQLDGVDDGTDSEAEAVQQPRGQGTPPSGPGVVRAGVLGAAGDRARPPEDLPSEIVDFVLKNLGGPGDGGAGPREESLPPAPPLANGSQPSQGLTASPADPTRTFAWLPGAPGVRVLSLGPAPEPPKPATSKIILVNKLGQVFVKMAGEGEPVPPPVKQPPLPPTISPTAPTSWTLPPGPLLGVLPVVGVVRPAPPPPPPPLTLVLSSGPASPPRQAIRVKRVSTFSGRSPPAPPPYKAPRLDEDGEASEDTPQVPGLGSGGFSRVRMKTPTVRGVLDLDRPGEPAGEESPGPLQERSPLLPLPEDGPPQVPDGPPDLLLESQWHHYSGEASSSEEEPPSPDDKENQAPKRTGPHLRFEISSEDGFSVEAESLEGAWRTLIEKVQEARGHARLRHLSFSGMSGARLLGIHHDAVIFLAEQLPGAQRCQHYKFRYHQQGEGQEEPPLNPHGAARAEVYLRKCTFDMFNFLASQHRVLPEGATCDEEEDEVQLRSTRRATSLELPMAMRFRHLKKTSKEAVGVYRSAIHGRGLFCKRNIDAGEMVIEYSGIVIRSVLTDKREKFYDGKGIGCYMFRMDDFDVVDATMHGNAARFINHSCEPNCFSRVIHVEGQKHIVIFALRRILRGEELTYDYKFPIEDASNKLPCNCGAKRCRRFLN

SEQ ID NO: 850032 - protein, 2427 aa, Homo sapiens
MAAAAGGGSCPGPGSARGRFPGRPRGAGGGGGRGGRGNGAERVRVALRRGGGATGPGGAEPGEDTALLRLLGLRRGLRRLRRLWAGPRVQRGRGRGRGRGWGPSRGCVPEEESSDGESDEEEFQGFHSDEDVAPSSLRSALRSQRGRAPRGRGRKHKTTPLPPPRLADVAPTPPKTPARKRGEEGTERMVQALTELLRRAQAPQAPRSRACEPSTPRRSRGRPPGRPAGPCRRKQQAVVVAEAAVTIPKPEPPPPVVPVKHQTGSWKCKEGPGPGPGTPRRGGQSSRGGRGGRGRGRGGGLPFVIKFVSRAKKVKMGQLSLGLESGQGQGQHEESWQDVPQRRVGSGQGGSPCWKKQEQKLDDEEEEKKEEEEKDKEGEEKEERAVAEEMMPAAEKEEAKLPPPPLTPPAPSPPPPLPPPSTSPPPPLCPPPPPPVSPPPLPSPPPPPAQEEQEESPPPVVPATCSRKRGRPPLTPSQRAEREAARAGPEGTSPPTPTPSTATGGPPEDSPTVAPKSTTFLKNIRQFIMPVVSARSSRVIKTPRRFMDEDPPKPPKVEVSPVLRPPITTSPPVPQEPAPVPSPPRAPTPPSTPVPLPEKRRSILREPTFRWTSLTRELPPPPPAPPPPPAPSPPPAPATSSRRPLLLRAPQFTPSEAHLKIYESVLTPPPLGAPEAPEPEPPPADDSPAEPEPRAVGRTNHLSLPRFAPVVTTPVKAEVSPHGAPALSNGPQTQAQLLQPLQALQTQLLPQALPPPQPQLQPPPSPQQMPPLEKARIAGVGSLPLSGVEEKMFSLLKRAKVQLFKIDQQQQQKVAASMPLSPGGQMEEVAGAVKQISDRGPVRSEDESVEAKRERPSGPESPVQGPRIKHVCRHAAVALGQARAMVPEDVPRLSALPLRDRQDLATEDTSSASETESVPSRSRRGKVEAAGPGGESEPTGSGGTLAHTPRRSLPSHHGKKMRMARCGHCRGCLRVQDCGSCVNCLDKPKFGGPNTKKQCCVYRKCDKIEARKMERLAKKGRTIVKTLLPWDSDESPEASPGPPGPRRGAGAGGPREEVVAHPGPEEQDSLLQRKSARRCVKQRPSYDIFEDSDDSEPGGPPAPRRRTPRENELPLPEPEEQSRPRKPTLQPVLQLKARRRLDKDALAPGPFASFPNGWTGKQKSPDGVHRVRVDFKEDCDLENVWLMGGLSVLTSVPGGPPMVCLLCASKGLHELVFCQVCCDPFHPFCLEEAERPLPQHHDTWCCRRCKFCHVCGRKGRGSKHLLECERCRHAYHPACLGPSYPTRATRKRRHWICSACVRCKSCGATPGKNWDVEWSGDYSLCPRCTQLYEKGNYCPICTRCYEDNDYESKMMQCAQCDHWVHAKCEGLSDEDYEILSGLPDSVLYTCGPCAGAAQPRWREALSGALQGGLRQVLQGLLSSKVVGPLLLCTQCGPDGKQLHPGPCGLQAVSQRFEDGHYKSVHSFMEDMVGILMRHSEEGETPDRRAGGQMKGLLLKLLESAFGWFDAHDPKYWRRSTRLPNGVLPNAVLPPSLDHVYAQWRQQEPETPESGQPPGDPSAAFQGKDPAAFSHLEDPRQCALCLKYGDADSKEAGRLLYIGQNEWTHVNCAIWSAEVFEENDGSLKNVHAAVARGRQMRCELCLKPGATVGCCLSSCLSNFHFMCARASYCIFQDDKKVFCQKHTDLLDGKEIVNPDGFDVLRRVYVDFEGINFKRKFLTGLEPDAINVLIGSIRIDSLGTLSDLSDCEGRLFPIGYQCSRLYWSTVDARRRCWYRCRILEYRPWGPREEPAHLEAAEENQTIVHSPAPSSEPPGGEDPPLDTDVLVPGAPERHSPIQNLDPPLRPDSGSAPPPAPRSFSGARIKVPNYSPSRRPLGGVSFGPLPSPGSPSSLTHHIPTVGDPDFPAPPRRSRRPSPLAPRPPPSRWASPPLKTSPQLRVPPPTSVVTALTPTSGELAPPGPAPSPPPPPLTLVLSSGPASPPRQAIRVKRVSTFSGRSPPAPPPYKAPRLDEDGEASEDTPQVPGLGSGGFSRVRMKTPTVRGVLDLDRPGEPAGEESPGPLQERSPLLPLPEDGPPQVPDGPPDLLLESQWHHYSGEASSSEEEPPSPDDKENQAPKRTGPHLRFEISSEDGFSVEAESLEGAWRTLIEKVQEARGHARLRHLSFSGMSGARLLGIHHDAVIFLAEQLPGAQRCQHYKFRYHQQGEGQEEPPLNPHGAARAEVYLRKCTFDMFNFLASQHRVLPEGATCDEEEDEVQLRSTRRATSLELPMAMRFRHLKKTSKEAVGVYRSAIHGRGLFCKRNIDAGEMVIEYSGIVIRSVLTDKREKFYDGKGIGCYMFRMDDFDVVDATMHGNAARFINHSCEPNCFSRVIHVEGQKHIVIFALRRILRGEELTYDYKFPIEDASNKLPCNCGAKRCRRFLN

SEQ ID NO: 850033 - protein, 2715 aa, Homo sapiens; identical to SEQ ID NO: 850024

SEQ ID NO: 850034 - protein, 342 aa, Homo sapiens
GRVIFTPTCFLGPGEASSSEEEPPSPDDKENQAPKRTGPHLRFEISSEDGFSVEAESLEGAWRTLIEKVQEARGHARLRHLSFSGMSGARLLGIHHDAVIFLAEQLPGAQRCQHYKFRYHQQGEGQEEPPLNPHGAARAEVYLRKCTFDMFNFLASQHRVLPEGATCDEEEDEVQLRSTRRATSLELPMAMRFRHLKKTSKEAVGVYRSAIHGRGLFCKRNIDAGEMVIEYSGIVIRSVLTDKREKFYDGKGIGCYMFRMDDFDVVDATMHGNAARFINHSCEPNCFSRVIHVEGQKHIVIFALRRILRGEELTYDYKFPIEDASNKLPCNCGAKRCRRFLN

SEQ ID NO: 850035 - protein, 375 aa, Homo sapiens
YSAFPVMCFRFFYTTATLIIAFTSAGSAVLLFLAMPMLTIGGILFLITNLQIGNLFGQHRSTIITLYNGAFDSSSAVFLIIKLLYEKGISLRASFIFISVCSTWHVARTFLLMPRGHIPYPLPPNYSMACALGMAPQRKRRKQLSMKTGSYSQRSSFQRRKRPRGRAEAGTPLLLELRFLSALCLAPGVAVCDTVVALPLHWHSQLLAANMAGGDMARVSTYTNAFAFTQFGVLCAPWNGLLMDRLKQKYQKEARKTGSFNIRGPHSLYFPNHHLPHATYRDKAKMKLPLLLALLFGAVSALHLRSETSTFETPLGAKTLPEDEETPEQEMEETPCRELEEEEEWGSGSEDASKKDGAVESISVPDMVGQKPYVS

SEQ ID NO: 850036 - protein, 113 aa, Homo sapiens
NYQLTHVGRSKDPGRSLGWDKAKMKLPLLLALLFGAVSALHLRSETSTFETPLGAKTLPEDEETPEQEMEETPCRELEEEEEWGSGSEDASKKDGAVESISVPDMVGQKPYVS

SEQ ID NO: 850037 - protein, 105 aa, Homo sapiens
MRRHQSRRWRRPLAGSWRKRRSGALEVKMPPRKMGLLSLSQCQIWWDKNLTCPEEEDTVKVVGHPWGARPAATSWVRSLQTFSQAWFYLPEVLQGQPGFHPQLQY

SEQ ID NO: 850038 - protein, 164 aa, Homo sapiens
HPSCISSVDTFVDARGLGERAGCSHTWVCGWALHMRLMTGCGEQAQNDPVFLPRNPRRGSLADAFSGLTAAAGTLRTGLLTSPGPAVVTAWPCVPEEATGVEPTASEDFLSSVPTELVPASSSELPSPGQLPPLLCKEPTHFAPPGTVSSFVAKLFIFVSARNP

SEQ ID NO: 850039 - protein, 105 aa, Homo sapiens; identical to SEQ ID NO: 850037

SEQ ID NO: 850040 - protein, 154 aa, Homo sapiens
VRGSKEGPGLWEDLKTQEGLWVGECFLCCGGAGDSLFSQEVPGCGSQFLEGWQASTCGFQDKAKMKLPLLLALLFGAVSALHLRSETSTFETPLGAKTLPEDEETPEQEMEETPCRELEEEEEWGSGSEDASKKDGAVESISVPDMVGQKPYVS

SEQ ID NO: 850041 - protein, 123 aa, Homo sapiens
MKLPLLLAPLWVLRRCLRMRRHQSRRWRRPLAGSWRKRRSGALEVKMPPRKMGLLSLSQCQIWWDKNLTCPEEEDTVKVVGHPWGARPAATSWVRSLQTFSQAWFYLPEVLQGQPGFHPQLQY

SEQ ID NO: 850042 - protein, 218 aa, Homo sapiens
SVADSTTPQLPLPGQEGVLVPGLPPHHPELLDYGFSCSSDELPVLGLTKSGGSDRTIAYENKALMLCEGLFVADVTDFEGWKAAIPSALDTNSSKSTSSFPCPAGHFNGFRTVIRPFYLTNSSGVDKTAWPRGGENGRTPGRPHCRLPSRASFLSARNPRAWVACRRFQWVDGSRWNFAYWAAHQPWSRGGHCVALCTRGGYWRRAHCLRRLPFICSY

SEQ ID NO: 850043 - protein, 115 aa, Homo sapiens
HPSCISSVDTFVDARGLGERAGCSHTWVCGWALHMRLMTGCGEQAQNDPGFSAKEPPAWVACRRFQWVDGSRWNFAYWAAHQPWSRGGHCVALCTRGGYWRRAHCLRRLPFICSY

SEQ ID NO: 850044 - protein, 218 aa, Homo sapiens; identical to SEQ ID NO: 850042

SEQ ID NO: 850045 - protein, 105 aa, Homo sapiens; identical to SEQ ID NO: 850037

SEQ ID NO: 850046 - protein, 105 aa, Homo sapiens; identical to SEQ ID NO: 850037

SEQ ID NO: 850047 - protein, 105 aa, Homo sapiens; identical to SEQ ID NO: 850037

SEQ ID NO: 850048 - protein, 100 aa, Homo sapiens
GCAEVTLRIPRGSLADAFSGLTAAAGTLRTGLLTSPGPAVVTAWPCVPEEATGVEPTASEDFLSSVPTELVPASSSELPSPGQLPPLLCKEPTRDPLDRN

SEQ ID NO: 850049 - protein, 105 aa, Homo sapiens; identical to SEQ ID NO: 850037

SEQ ID NO: 850050 - protein, 105 aa, Homo sapiens; identical to SEQ ID NO: 850037

SEQ ID NO: 850051 - protein, 109 aa, Homo sapiens
IFTLIKGSLQNDPFYDKAKMKLPLLLALLFGAVSALHLRSETSTFETPLGAKTLPEDEETPEQEMEETPCRELEEEEEWGSGSEDASKKDGAVESISVPDMVGQKPYVS

SEQ ID NO: 850052 - protein, 112 aa, Homo sapiens
MRGEGHEGGAHMNWIGASVRRGTRRLFSSLSAMGEYSKSWQRPLPEPVSARNPRAWVACRRFQWVDGSRWNFAYWAAHQPWSRGGHCVALCTRGGYWRRAHCLRRLPFICSY

SEQ ID NO: 850053 - protein, 189 aa, Homo sapiens
PKAPHVTVSLHTYHIFFPEAFTNCIGPKHYSQAALEEMHCSGPPKARDRTTGWRMISLQGTHARGSLADAFSGLTAAAGTLRTGLLTSPGPAVVTAWPCVPEEATGVEPTASEDFLSSVPTELVPASSSELPSPGQLPPLLCLPSLPPPPCNKMGFTEMDLFSPLIADPLCLALIETSSLSSLPTPQLS

SEQ ID NO: 850054 - protein, 1325 aa, Homo sapiens
MLPVYQEVKPNPLQDANICSRVFFWWLNPLFKIGHKRRLEEDDMYSVLPEDRSQHLGEELQGFWDKEVLRAENDAQKPSLTRAIIKCYWKSYLVLGIFTLIEESAKVIQPIFLGKIINYFENYDPMDSVALNTAYAYATVLTFCTLILAILHHLYFYHVQCAGMRLRVAMCHMIYRKALRLSNMAMGKTTTGQIVNLLSNDVNKFDQVTVFLHFLWAGPLQAIAVTALLWMEIGISCLAGMAVLIILLPLQSCFGKLFSSLRSKTATFTDARIRTMNEVITGIRIIKMYAWEKSFSNLITNLRKKEISKILRSSCLRGMNLASFFSASKIIVFVTFTTYVLLGSVITASRVFVAVTLYGAVRLTVTLFFPSAIERVSEAIVSIRRIQTFLLLDEISQRNRQLPSDGKKMVHVQDFTAFWDKASETPTLQGLSFTVRPGELLAVVGPVGAGKSSLLSAVLGELAPSHGLVSVHGRIAYVSQQPWVFSGTLRSNILFGKKYEKERYEKVIKACALKKDLQLLEDGDLTVIGDRGTTLSGGQKARVNLARAVYQDADIYLLDDPLSAVDAEVSRHLFELCICQILHEKITILVTHQLQYLKAASQILILKDGKMVQKGTYTEFLKSGIDFGSLLKKDNEESEQPPVPGTPTLRNRTFSESSVWSQQSSRPSLKDGALESQDTENVPVTLSEENRSEGKVGFQAYKNYFRAGAHWIVFIFLILLNTAAQVAYVLQDWWLSYWANKQSMLNVTVNGGGNVTEKLDLNWYLGIYSGLTVATVLFGIARSLLVFYVLVNSSQTLHNKMFESILKAPVLFFDRNPIGRILNRFSKDIGHLDDLLPLTFLDFIQTLLQVVGVVSVAVAVIPWIAIPLVPLGIIFIFLRRYFLETSRDVKRLESTTRSPVFSHLSSSLQGLWTIRAYKAEERCQELFDAHQDLHSEAWFLFLTTSRWFAVRLDAICAMFVIIVAFGSLILAKTLDAGQVGLALSYALTLMGMFQWCVRQSAEVENMMISVERVIEYTDLEKEAPWEYQKRPPPAWPHEGVIIFDNVNFMYSPGGPLVLKHLTALIKSQEKVGIVGRTGAGKSSLISALFRLSEPEGKIWIDKILTTEIGLHDLRKKMSIIPQEPVLFTGTMRKNLDPFNEHTDEELWNALQEVQLKETIEDLPGKMDTELAESGSNFSVGQRQLVCLARAILRKNQILIIDEATANVDPRTDELIQKKIREKFAHCTVLTIAHRLNTIIDSDKIMVLDSGRLKEYDEPYVLLQNKESLFYKMVQQLGKAEAAALTETAKQVYFKRNYPHIGHTDHMVTNTSNGQPSTLTIFETAL

SEQ ID NO: 850055 - protein, 1325 aa, Homo sapiens; identical to SEQ ID NO: 850054

SEQ ID NO: 850056 - protein, 1325 aa, Homo sapiens; identical to SEQ ID NO: 850054

SEQ ID NO: 850057 - protein, 470 aa, Homo sapiens
MKPPRRPACAVWWIRDHGAWEAAGFSAPSLTELFSLSVSPARSPVFSHLSSSLQGLWTIRAYKAEERCQELFDAHQDLHSEAWFLFLTTSRWFAVRLDAICAMFVIIVAFGSLILAKTLDAGQVGLALSYALTLMGMFQWCVRQSAEVENMMISVERVIEYTDLEKEAPWEYQKRPPPAWPHEGVIIFDNVNFMYSPGGPLVLKHLTALIKSQEKVGIVGRTGAGKSSLISALFRLSEPEGKIWIDKILTTEIGLHDLRKKMSIIPQEPVLFTGTMRKNLDPFNEHTDEELWNALQEVQLKETIEDLPGKMDTELAESGSNFSVGQRQLVCLARAILRKNQILIIDEATANVDPRTDELIQKKIREKFAHCTVLTIAHRLNTIIDSDKIMVLDSGRLKEYDEPYVLLQNKESLFYKMVQQLGKAEAAALTETAKQVYFKRNYPHIGHTDHMVTNTSNGQPSTLTIFETAL

SEQ ID NO: 850058 - protein, 225 aa, Homo sapiens
DLINPNFTFGFWRFKEENVNHTEPVLFTGTMRKNLDPFNEHTDEELWNALQEVQLKETIEDLPGKMDTELAESGSNFSVGQRQLVCLARAILRKNQILIIDEATANVDPRTDELIQKKIREKFAHCTVLTIAHRLNTIIDSDKIMVLDSGRLKEYDEPYVLLQNKESLFYKMVQQLGKAEAAALTETAKQVYFKRNYPHIGHTDHMVTNTSNGQPSTLTIFETAL

SEQ ID NO: 850059 - protein, 332 aa, Homo sapiens
  misc_feature (293)..(293): Xaa can be any naturally occurring amino acid
  misc_feature (303)..(303): Xaa can be any naturally occurring amino acid
  misc_feature (315)..(315): Xaa can be any naturally occurring amino acid
  misc_feature (322)..(322): Xaa can be any naturally occurring amino acid
  misc_feature (328)..(328): Xaa can be any naturally occurring amino acid
MGMFQWCVRQSAEVENMMISVERVIEYTDLEKEAPWEYQKRPPPAWPHEGVIIFDNVNFMYSPGGPLVLKHLTALIKSQEKVGIVGRTGAGKSSLISALFRLSEPEGKIWIDKILTTEIGLHDLRKKMSIIPQEPVLFTGTMRKNLDPFNEHTDEELWNALQEVQLKETIEDLPGKMDTELAESGSNFSVGQRQLVCLARAILRKNQILIIDEATANVDPRTDELIQKKIREKFAHCTVLTIAHRLNTIIDSDKIMVLDSGRLKEYDEPYVLLQNKESLFFTRWVANHLGPGXEAACPSLGNXPNRVLLSQRDFXPLFGFTXGPLGVXNPFP

SEQ ID NO: 850060 - protein, 301 aa, Homo sapiens
MLPVYQEVKPNPLQDANICSRVFFWWLNPLFKIGHKRRLEEDDMYSVLPEDRSQHLGEELQGFWDKEVLRAENDAQKPSLTRAIIKCYWKSYLVLGIFTLIEESAKVIQPIFLGKIINYFENYDPMDSVALNTAYAYATVLTFCTLILAILHHLYFYHVQCAGMRLRVAMCHMIYRKALRLSNMAMGKTTTGQIVNLLSNDVNKFDQVTVFLHFLWAGPLQAIAVTALLWMEIGISCLAGMAVLIILLPLQSCFGKLFSSLRSKTATFTDARIRTMNEVITGIRIIKMYACGKTGSSESLA

SEQ ID NO: 850061 - protein, 1325 aa, Homo sapiens; identical to SEQ ID NO: 850054

SEQ ID NO: 850062 - protein, 336 aa, Homo sapiens [sequence omitted]

SEQ ID NO: 850063 - protein, 286 aa, Homo sapiens
LHLLGSSDSPVSASRVAGITGAPHPAWLLFVFLVEMGFHHVGQAGLELLTTSEPPASASQSAGITGMSHHTQPGHMFNISLSYEPVLFTGTMRKNLDPFNEHTDEELWNALQEVQLKETIEDLPGKMDTELAESGSNFSVGQRQLVCLARAILRKNQILIIDEATANVDPRTDELIQKKIREKFAHCTVLTIAHRLNTIIDSDKIMVLDSGRLKEYDEPYVLLQNKESLFYKMVQQLGKAEAAALTETAKQVYFKRNYPHIGHTDHMVTNTSNGQPSTLTIFETAL

SEQ ID NO: 850064 - protein, 954 aa, Homo sapiens
MLPVYQEVKPNPLQDANICSRVFFWWLNPLFKIGHKRRLEEDDMYSVLPEDRSQHLGEELQGFWDKEVLRAENDAQKPSLTRAIIKCYWKSYLVLGIFTLIEESAKVIQPIFLGKIINYFENYDPMDSVALNTAYAYATVLTFCTLILAILHHLYFYHVQCAGMRLRVAMCHMIYRKALRLSNMAMGKTTTGQIVNLLSNDVNKFDQVTVFLHFLWAGPLQAIAVTALLWMEIGISCLAGMAVLIILLPLQSCFGKLFSSLRSKTATFTDARIRTMNEVITGIRIIKMYAWEKSFSNLITNLRKKEISKILRSSCLRGMNLASFFSASKIIVFVTFTTYVLLGSVITASRVFVAVTLYGAVRLTVTLFFPSAIERVSEAIVSIRRIQTFLLLDEISQRNRQLPSDGKKMVHVQDFTAFWDKASETPTLQGLSFTVRPGELLAVVGPVGAGKSSLLSAVLGELAPSHGLVSVHGRIAYVSQQPWVFSGTLRSNILFGKKYEKERYEKVIKACALKKDLQLLEDGDLTVIGDRGTTLSGGQKARVNLARAVYQDADIYLLDDPLSAVDAEVSRHLFELCICQILHEKITILVTHQLQYLKAASQILILKDGKMVQKGTYTEFLKSGIDFGSLLKKDNEESEQPPVPGTPTLRNRTFSESSVWSQQSSRPSLKDGALESQDTENVPVTLSEENRSEGKVGFQAYKNYFRAGAHWIVFIFLILLNTAAQVAYVLQDWWLSYWANKQSMLNVTVNGGGNVTEKLDLNWYLGIYSGLTVATVLFGIARSLLVFYVLVNSSQTLHNKMFESILKAPVLFFDRNPIGRILNRFSKDIGHLDDLLPLTFLDFIQTLLQVVGVVSVAVAVIPWIAIPLVPLGIIFIFLRRYFLETSRDVKRLESTTRSPVFSHLSSSLQGLWTIRAYKAEERCQELFDAHQDLHSGLSISGNGFKGQDLLLFLA

SEQ ID NO: 850065 - protein, 99 aa, Homo sapiens
AAAYYYKIRGRVDLELHLRMARTLEPLAKKIFKGVLVAELVGVFGAYFLFSKMHTSQDFRQTMSKKYPFILEVYYKSTEKSGMYGIRELDQKTWLNSKN

SEQ ID NO: 850066 - protein, 682 aa, Homo sapiens
SPTMVLSSKEEEQQRLINDLTAQRARLQTESGEYSRQLDEKDTLVSQLSRGKQAFTQQIEELKRQLEEEIKAKSALAHALQSSRHDCDLLREQYEEEQEAKAELQRAMSKANSEVAQWRTKYETDAIQRTEELEEAKKKLAQRLQDAEEHVEAVNAKCASLEKTKQRLQNEVEDLMIDVERTNAACAALDKKQRNFDKILAEWKQKCEETHAELEASQKESRSLSTELFKIKNAYEESLDQLETLKRENKNLQQEISDLTEQIAEGGKRIHELEKIKKQVEQEKSELQAALEEAEASLEHEEGKILRIQLELNQVKSEVDRKIAEKDEEIDQMKRNHIRIVESMQSTLDAEIRSRNDAIRLKKKMEGDLNEMEIQLNHANRMAAEALRNYRNTQAILKDTQLHLDDALRSQEDLKEQLAMVERRANLLQAEIEELRATLEQTERSRKIAEQELLDASERVQLLHTQNTSLINTKKKLETDISQIQGEMEDIIQEARNAEEKAKKAITDAAMMAEELKKEQDTSAHLERMKKNLEQTVKDLQHRLDEAEQLALKGGKKQIQKLEARVRELEGEVESEQKRNVEAVKGLRKHERKVKELTYQTEEDRKNILRLQDLVDKLQAKVKSYKRQAEEAEEQSNVNLSKFRRIQHELEEAEERADIAESQVNKLRVKSREVHTKIISEE

SEQ ID NO: 850067 - protein, 1901 aa, Homo sapiens
MSSDSEMAIFGEAAPFLRKSERERIEAQNKPFDAKTSVFVVDPKESFVKATVQSREGGKVTAKTEAGATVTVKDDQVFPMNPPKYDKIEDMAMMTHLHEPAVLYNLKERYAAWMIYTYSGLFCVTVNPYKWLPVYNAEVVTAYRGKKRQEAPPHIFSISDNAYQFMLTDRENQSILITGESGAGKTVNTKRVIQYFATIAVTGEKKKEEVTSGKMQGTLEDQIISANPLLEAFGNAKTVRNDNSSRFGKFIRIHFGTTGKLASADIETYLLEKSRVTFQLKAERSYHIFYQIMSNKKPDLIEMLLITTNPYDYAFVSQGEITVPSIDDQEELMATDSAIEILGFTSDERVSIYKLTGAVMHYGNMKFKQKQREEQAEPDGTEVADKAAYLQNLNSADLLKALCYPRVKVGNEYVTKGQTVQQVYNAVGALAKAVYDKMFLWMVTRINQQLDTKQPRQYFIGVLDIAGFEIFDFNSLEQLCINFTNEKLQQFFNHHMFVLEQEEYKKEGIEWTFIDFGMDLAACIELIEKPMGIFSILEEECMFPKATDTSFKNKLYEQHLGKSNNFQKPKPAKGKPEAHFSLIHYAGTVDYNIAGWLDKNKDPLNETVVGLYQKSAMKTLALLFVGATGAEAEAGGGKKGGKKKGSSFQTVSALFRENLNKLMTNLRSTHPHFVRCIIPNETKTPGAMEHELVLHQLRCNGVLEGIRICRKGFPSRILYADFKQRYKVLNASAIPEGQFIDSKKASEKLLGSIDIDHTQYKFGHTKVFFKAGLLGLLEEMRDEKLAQLITRTQAMCRGFLARVEYQKMVERRESIFCIQYNVRAFMNVKHWPWMKLYFKIKPLLKSAETEKEMATMKEEFEKTKEELAKTEAKRKELEEKMVTLMQEKNDLQLQVQAEADSLADAEERCDQLIKTKIQLEAKIKEVTERAEDEEEINAELTAKKRKLEDECSELKKDIDDLELTLAKVEKEKHATENKVKNLTEEMAGLDETIAKLTKEKKALQEAHQQTLDDLQAEEDKVNTLTKAKIKLEQQVDDLEGSLEQEKKIRMDLERAKRKLEGDLKLAQESAMDIENDKQQLDEKLKKKEFEMSGLQSKIEDEQALGMQLQKKIKELQARIEELEEEIEAERASRAKAEKQRSDLSRELEEISERLEEAGGATSAQIEMNKKREAEFQKMRRDLEEATLQHEATAATLRKKHADSVAELGEQIDNLQRVKQKLEKEKSEMKMEIDDLASNMETVSKAKGNLEKMCRALEDQLSEIKTKEEEQQRLINDLTAQRARLQTESGEYSRQLDEKDTLVSQLSRGKQAFTQQIEELKRQLEEEIKAKSALAHALQSSRHDCDLLREQYEEEQEAKAELQRAMSKANSEVAQWRTKYETDAIQRTEELEEAKKKLAQRLQDAEEHVEAVNAKCASLEKTKQRLQNEVEDLMIDVERTNAACAALDKKQRNFDKILAEWKQKCEETHAELEASQKESRSLSTELFKIKNAYEESLDQLETLKRENKNLQQEISDLTEQIAEGGKRIHELEKIKKQVEQEKSELQAALEEAEASLEHEEGKILRIQLELNQVKSEVDRKIAEKDEEIDQMKRNHIRIVESMQSTLDAEIRSRNDAIRLKKKMEGDLNEMEIQLNHANRMAAEALRNYRNTQAILKDTQLHLDDALRSQEDLKEQLAMVERRANLLQAEIEELRATLEQTERSRKIAEQELLDASERVQLLHTQNTSLINTKKKLETDISQIQGEMEDIIQEARNAEEKAKKAITDAAMMAEELKKEQDTSAHLERMKKNLEQTVKDLQHRLDEAEQLALKGGKKQIQKLEARVRELEGEVESEQKRNVEAVKGLRKHERKVKELTYQTEEDRKNILRLQDLVDKLQAKVKSYKRQAEEADPARAGGGRGTG

SEQ ID NO: 850068 - protein, 144 aa, Homo sapiens
SLSITLLLTLNLSFQLPYPGLQKLEARVRELEGEVESEQKRNVEAVKGLRKHERKVKELTYQTEEDRKNILRLQDLVDKLQAKVKSYKRQAEEAEEQSNVNLSKFRRIQHELEEAEERADIAESQVNKLRVKSREVHTKIISEE

SEQ ID NO: 850069 - protein, 1939 aa, Homo sapiens
MSSDSEMAIFGEAAPFLRKSERERIEAQNKPFDAKTSVFVVDPKESFVKATVQSREGGKVTAKTEAGATVTVKDDQVFPMNPPKYDKIEDMAMMTHLHEPAVLYNLKERYAAWMIYTYSGLFCVTVNPYKWLPVYNAEVVTAYRGKKRQEAPPHIFSISDNAYQFMLTDRENQSILITGESGAGKTVNTKRVIQYFATIAVTGEKKKEEVTSGKMQGTLEDQIISANPLLEAFGNAKTVRNDNSSRFGKFIRIHFGTTGKLASADIETYLLEKSRVTFQLKAERSYHIFYQIMSNKKPDLIEMLLITTNPYDYAFVSQGEITVPSIDDQEELMATDSAIEILGFTSDERVSIYKLTGAVMHYGNMKFKQKQREEQAEPDGTEVADKAAYLQNLNSADLLKALCYPRVKVGNEYVTKGQTVQQVYNAVGALAKAVYDKMFLWMVTRINQQLDTKQPRQYFIGVLDIAGFEIFDFNSLEQLCINFTNEKLQQFFNHHMFVLEQEEYKKEGIEWTFIDFGMDLAACIELIEKPMGIFSILEEECMFPKATDTSFKNKLYEQHLGKSNNFQKPKPAKGKPEAHFSLIHYAGTVDYNIAGWLDKNKDPLNETVVGLYQKSAMKTLALLFVGATGAEAEAGGGKKGGKKKGSSFQTVSALFRENLNKLMTNLRSTHPHFVRCIIPNETKTPGAMEHELVLHQLRCNGVLEGIRICRKGFPSRILYADFKQRYKVLNASAIPEGQFIDSKKASEKLLGSIDIDHTQYKFGHTKVFFKAGLLGLLEEMRDEKLAQLITRTQAMCRGFLARVEYQKMVERRESIFCIQYNVRAFMNVKHWPWMKLYFKIKPLLKSAETEKEMATMKEEFEKTKEELAKTEAKRKELEEKMVTLMQEKNDLQLQVQAEADSLADAEERCDQLIKTKIQLEAKIKEVTERAEDEEEINAELTAKKRKLEDECSELKKDIDDLELTLAKVEKEKHATENKVKNLTEEMAGLDETIAKLTKEKKALQEAHQQTLDDLQAEEDKVNTLTKAKIKLEQQVDDLEGSLEQEKKIRMDLERAKRKLEGDLKLAQESAMDIENDKQQLDEKLKKKEFEMSGLQSKIEDEQALGMQLQKKIKELQARIEELEEEIEAERASRAKAEKQRSDLSRELEEISERLEEAGGATSAQIEMNKKREAEFQKMRRDLEEATLQHEATAATLRKKHADSVAELGEQIDNLQRVKQKLEKEKSEMKMEIDDLASNMETVSKAKGNLEKMCRALEDQLSEIKTKEEEQQRLINDLTAQRARLQTESGEYSRQLDEKDTLVSQLSRGKQAFTQQIEELKRQLEEEIKAKSALAHALQSSRHDCDLLREQYEEEQEAKAELQRAMSKANSEVAQWRTKYETDAIQRTEELEEAKKKLAQRLQDAEEHVEAVNAKCASLEKTKQRLQNEVEDLMIDVERTNAACAALDKKQRNFDKILAEWKQKCEETHAELEASQKESRSLSTELFKIKNAYEESLDQLETLKRENKNLQQEISDLTEQIAEGGKRIHELEKIKKQVEQEKSELQAALEEAEASLEHEEGKILRIQLELNQVKSEVDRKIAEKDEEIDQMKRNHIRIVESMQSTLDAEIRSRNDAIRLKKKMEGDLNEMEIQLNHANRMAAEALRNYRNTQAILKDTQLHLDDALRSQEDLKEQLAMVERRANLLQAEIEELRATLEQTERSRKIAEQELLDASERVQLLHTQNTSLINTKKKLETDISQIQGEMEDIIQEARNAEEKAKKAITDAAMMAEELKKEQDTSAHLERMKKNLEQTVKDLQHRLDEAEQLALKGGKKQIQKLEARVRELEGEVESEQKRNVEAVKGLRKHERKVKELTYQTEEDRKNILRLQDLVDKLQAKVKSYKRQAEEAEEQSNVNLSKFRRIQHELEEAEERADIAESQVNKLRVKSREVHTKIISEE

SEQ ID NO: 850070 - protein, 1939 aa, Homo sapiens; identical to SEQ ID NO: 850069

SEQ ID NO: 850071 - protein, 162 aa, Homo sapiens
  misc_feature (1)..(1): Xaa can be any naturally occurring amino acid
XEKKEDCGRGENLEQTVKDLQHRLDEAEQLALKGGKKQIQKLEARVRELEGEVESEQKRNVEAVKGLRKHERKVKELTYQTEEDRKNILRLQDLVDKLQAKVKSYKRQAEEAEEQSNVNLSKFRRIQHELEEAEERADIAESQVNKLRVKSREVHTKIISEE

SEQ ID NO: 850072 - protein, 484 aa, Homo sapiens
GGEAAVEGAGGGDAALGEPGLSFTTTDLSLVEMTEVEYTQLQHILCSHMEAAADGELETRLNSALLAAAGPGAGAGGFAAGGQGGAAPVYPVLCPSALAADAPCLGHIDFQELRMMLLSEAGAAEKTSGGGDGARARADGAAKEGAGAAAAAAGPDGAPEARAKPAVRVRLEDRFNSIPAEPPPAPRGPEPPEPGGALNNLVTLIRHPSELMNVPLQQQNKCTALVKNKTAATTTALQFTYPLFTTNACSTSGNSNLSQTQSSSNSCSVLEAAKHQDIGLPRAFSFCYQQEIESTKQTLGSRNKVLPEQVWIKVGEAALCKQALKRNRSRMRQLDTNVERRALGEIQNVGEGATATQGAWQSSESSQANLGEQAQSGPQGGRSQRRERHNRMERDRRRRIRICCDELNLLVPFCNAETDKATTLQWTTAFLKYIQERHGDSLKKEFESVFCGKTGRRLKLTRPDSLVTCPAQGSLQSSPSMEIK

SEQ ID NO: 850073 - protein, 228 aa, Homo sapiens
GGEAAVEGAGGGDAALGEPGLSFTTTDLSLVEMTEVEYTQLQHILCSHMEAAADGELETRLNSALLAAAGPGAGAGGFAAGGQGGAAPVYPVLCPSALAADAPCLGHIDFQELRMMLLSEAGAAEKTSGGGDGARARADGAAKEGAGAAAAAAGPDGAPEARAKPAVRVRLEDRFNSIPAEPPPAPRGPEPPEPGGALNKCVPGGRGLAGPGWRPRPGPGPGRRQRGP

SEQ ID NO: 850074 - protein, 273 aa, Homo sapiens
MNVPLQQQNKCTALVKNKTAATTTALQFTYPLFTTNACSTSGNSNLSQTQSSSNSCSVLEAAKHQDIGLPRAFSFCYQQEIESTKQTLGSRNKVLPEQVWIKVGEAALCKQALKRNRSRMRQLDTNVERRALGEIQNVGEGATATQGAWQSSESSQANLGEQAQSGPQGGRSQRRERHNRMERDRRRRIRICCDELNLLVPFCNAETDKATTLQWTTAFLKYIQERHGDSLKKEFESVFCGKTGRRLKLTRPDSLVTCPAQGSLQSSPSMEIK

SEQ ID NO: 850075 - protein, 273 aa, Homo sapiens; identical to SEQ ID NO: 850074

SEQ ID NO: 850076 - protein, 273 aa, Homo sapiens; identical to SEQ ID NO: 850074

SEQ ID NO: 850077 - protein, 105 aa, Homo sapiens
MFVLLRSLSVMTLGFDYRRRIRICCDELNLLVPFCNAETDKATTLQWTTAFLKYIQERHGDSLKKEFESVFCGKTGRRLKLTRPDSLVTCPAQGSLQSSPSMEIK

SEQ ID NO: 850078 - protein, 235 aa, Homo sapiens
MDSDEMKKILAENSRKITVLQVNEKSLIRQYTTLVELERQLRKENEKQKNELLSMEAEVCEKIGCLQRFKEMAIFKIAALQKVVDNSVSLSELELANKQYNELTAKYRDILQKDNMLVQRTSNLEHLECENISLKEQVESINKELEITKEKLHTIEQAWEQETKLGNESSMDKAKKSITNSDIVSISKKITMLEMKELNERQRAEHCQKMYEHLRTSLKQMEERNFELETKFAEV

SEQ ID NO: 850079 - protein, 1610 aa, Homo sapiens
MDSDEMKKILAENSRKITVLQVNEKSLIRQYTTLVELERQLRKENEKQKNELLSMEAEVCEKIGCLQRFKEMAIFKIAALQKVVDNSVSLSELELANKQYNELTAKYRDILQKDNMLVQRTSNLEHLECENISLKEQVESINKELEITKEKLHTIEQAWEQETKLGNESSMDKAKKSITNSDIVSISKKITMLEMKELNERQRAEHCQKMYEHLRTSLKQMEERNFELETKFAELTKINLDAQKVEQMLRDELADSVSKAVSDADRQRILELEKNEMELKVEVSKLREISDIARRQVEILNAQQQSRDKEVESLRMQLLDYQAQSDEKSLIAKLHQHNVSLQLSEATALGKLESITSKLQKMEAYNLRLEQKLDEKEQALYYARLEGRNRAKHLRQTIQSLRRQFSGALPLAQQEKFSKTMIQLQNDKLKIMQEMKNSQQEHRNMENKTLEMELKLKGLEELISTLKDTKGAQKVINWHMKIEELRLQELKLNRELVKDKEEIKYLNNIISEYERTISSLEEEIVQQNKFHEERQMAWDQREVDLERQLDIFDRQQNEILNAAQKFEEATGSIPDPSLPLPNQLEIALRKIKENIRIILETRATCKSLEEKLKEKESALRLAEQNILSRDKVINELRLRLPATAEREKLIAELGRKEMEPKSHHTLKIAHQTIANMQARLNQKEEVLKKYQRLLEKAREEQREIVKKHEEDLHILHHRLELQADSSLNKFKQTAWDLMKQSPTPVPTNKHFIRLAEMEQTVAEQDDSLSSLLVKLKKVSQDLERQREITELKVKEFENIKLQLQENHEDEVKKVKAEVEDLKYLLDQSQKESQCLKSELQAQKEANSRAPTTTMRNLVERLKSQLALKEKQQKALSRALLELRAEMTAAAEERIISATSQKEAHLNVQQIVDRHTRELKTQVEDLNENLLKLKEALKTSKNRENSLTDNLNDLNNELQKKQKAYNKILREKEEIDQENDELKRQIKRLTSGLQGKPLTDNKQSLIEELQRKVKKLENQLEGKVEEVDLKPMKEKNAKEELIRWEEGKKWQAKIEGIRNKLKEKEGEVFTLTKQLNTLKDLFAKADKEKLTLQRKLKTTGMTVDQVLGIRALESEKELEELKKRNLDLENDILYMRAHQALPRDSVVEDLHLQNRYLQEKLHALEKQFSKDTYSKPSISGIESDDHCQREQELQKENLKLSSENIELKFQLEQANKDLPRLKNQVRDLKEMCEFLKKEKAEVQRKLGHVRGSGRSGKTIPELEKTIGLMKKVVEKVQRENEQLKKASGILTSEKMANIEQENEKLKAELEKLKAHLGHQLSMHYESKTKGTEKIIAENERLRKELKKETDAAEKLRIAKNNLEILNEKMTVQLEETGKRLQFAESRGPQLEGADSKSWKSIVVTRMYETKLKELETDIAKKNQSITDLKQLVKEATEREQKVNKYNEDLEQQIKILKHVPEGAETEQGLKRELQVLRLANHQLDKEKAELIHQIEANKDQSGAESTIPDADQLKEKIKDLETQLKMSDLEKQHLKEEIKKLKKELENFDPSFFEEIEDLKYNYKEEVKKNILLEEKVKKLSEQLGVELTSPVAASEEFEDEEESPVNFPIY

SEQ ID NO: 850080 - protein, 290 aa, Homo sapiens
MHYESKTKGTEKIIAENERLRKELKKETDAAEKLRIAKNNLEILNEKMTVQLEETGKRLQFAESRGPQLEGADSKSWKSIVVTRMYETKLKELETDIAKKNQSITDLKQLVKEATEREQKVNKYNEDLEQQIKILKHVPEGAETEQGLKRELQVLRLANHQLDKEKAELIHQIEANKDQSGAESTIPDADQLKEKIKDLETQLKMSDLEKQHLKEEIKKLKKELENFDPSFFEEIEDLKYNYKEEVKKNILLEEKVKKLSEQLGVELTSPVAASEEFEDEEESPVNFPIY

SEQ ID NO: 850081 - protein, 1539 aa, Homo sapiens
MAIFKIAALQKVVDNSVSLSELELANKQYNELTAKYRDILQKDNMLVQRTSNLEHLECENISLKEQVESINKELEITKEKLHTIEQAWEQETKLGNESSMDKAKKSITNSDIVSISKKITMLEMKELNERQRAEHCQKMYEHLRTSLKQMEERNFELETKFAELTKINLDAQKVEQMLRDELADSVSKAVSDADRQRILELEKNEMELKVEVSKLREISDIARRQVEILNAQQQSRDKEVESLRMQLLDYQAQSDEKSLIAKLHQHNVSLQLSEATALGKLESITSKLQKMEAYNLRLEQKLDEKEQALYYARLEGRNRAKHLRQTIQSLRRQFSGALPLAQQEKFSKTMIQLQNDKLKIMQEMKNSQQEHRNMENKTLEMELKLKGLEELISTLKDTKGAQKVINWHMKIEELRLQELKLNRELVKDKEEIKYLNNIISEYERTISSLEEEIVQQNKFHEERQMAWDQREVDLERQLDIFDRQQNEILNAAQKFEEATGSIPDPSLPLPNQLEIALRKIKENIRIILETRATCKSLEEKLKEKESALRLAEQNILSRDKVINELRLRLPATAEREKLIAELGRKEMEPKSHHTLKIAHQTIANMQARLNQKEEVLKKYQRLLEKAREEQREIVKKHEEDLHILHHRLELQADSSLNKFKQTAWDLMKQSPTPVPTNKHFIRLAEMEQTVAEQDDSLSSLLVKLKKVSQDLERQREITELKVKEFENIKLQLQENHEDEVKKVKAEVEDLKYLLDQSQKESQCLKSELQAQKEANSRAPTTTMRNLVERLKSQLALKEKQQKALSRALLELRAEMTAAAEERIISATSQKEAHLNVQQIVDRHTRELKTQVEDLNENLLKLKEALKTSKNRENSLTDNLNDLNNELQKKQKAYNKILREKEEIDQENDELKRQIKRLTSGLQGKPLTDNKQSLIEELQRKVKKLENQLEGKVEEVDLKPMKEKNAKEELIRWEEGKKWQAKIEGIRNKLKEKEGEVFTLTKQLNTLKDLFAKADKEKLTLQRKLKTTGMTVDQVLGIRALESEKELEELKKRNLDLENDILYMRAHQALPRDSVVEDLHLQNRYLQEKLHALEKQFSKDTYSKPSISGIESDDHCQREQELQKENLKLSSENIELKFQLEQANKDLPRLKNQVRDLKEMCEFLKKEKAEVQRKLGHVRGSGRSGKTIPELEKTIGLMKKVVEKVQRENEQLKKASGILTSEKMANIEQENEKLKAELEKLKAHLGHQLSMHYESKTKGTEKIIAENERLRKELKKETDAAEKLRIAKNNLEILNEKMTVQLEETGKRLQFAESRGPQLEGADSKSWKSIVVTRMYETKLKELETDIAKKNQSITDLKQLVKEATEREQKVNKYNEDLEQQIKILKHVPEGAETEQGLKRELQVLRLANHQLDKEKAELIHQIEANKDQSGAESTIPDADQLKEKIKDLETQLKMSDLEKQHLKEEIKKLKKELENFDPSFFEEIEDLKYNYKEEVKKNILLEEKVKKLSEQLGVELTSPVAASEEFEDEEESPVNFPIY

SEQ ID NO: 850082 - protein, 1571 aa, Homo sapiens
MDSDEMKKILAENSRKITVLQVNEKSLIRQYTTLVELERQLRKENEKQKNELLSMEAEVCEKIGCLQRFKEMAIFKIAALQKVVDNSVSLSELELANKQYNELTAKYRDILQKDNMLVQRTSNLEHLECENISLKEQVESINKELEITKEKLHTIEQAWEQETKLGNESSMDKAKKSITNSDIVSISKKITMLEMKELNERQRAEHCQKMYEHLRTSLKQMEERNFELETKFAELTKINLDAQKVEQMLRDELADSVSKAVSDADRQRILELEKNEMELKVEVSKLREISDIARRQVEILNAQQQSRDKEVESLRMQLLDYQAQSDEKSLIAKLHQHNVLSIMLVWREETEQNICAKQFSLYDDSLVELYPWHNRKSSPKQMIQLQNDKLKIMQEMKNSQQEHRNMENKTLEMELKLKGLEELISTLKDTKGAQKVINWHMKIEELRLQELKLNRELVKDKEEIKYLNNIISEYERTISSLEEEIVQQNKFHEERQMAWDQREVDLERQLDIFDRQQNEILNAAQKFEEATGSIPDPSLPLPNQLEIALRKIKENIRIILETRATCKSLEEKLKEKESALRLAEQNILSRDKVINELRLRLPATAEREKLIAELGRKEMEPKSHHTLKIAHQTIANMQARLNQKEEVLKKYQRLLEKAREEQREIVKKHEEDLHILHHRLELQADSSLNKFKQTAWDLMKQSPTPVPTNKHFIRLAEMEQTVAEQDDSLSSLLVKLKKVSQDLERQREITELKVKEFENIKLQLQENHEDEVKKVKAEVEDLKYLLDQSQKESQCLKSELQAQKEANSRAPTTTMRNLVERLKSQLALKEKQQKALSRALLELRAEMTAAAEERIISATSQKEAHLNVQQIVDRHTRELKTQVEDLNENLLKLKEALKTSKNRENSLTDNLNDLNNELQKKQKAYNKILREKEEIDQENDELKRQIKRLTSGLQGKPLTDNKQSLIEELQRKVKKLENQLEGKVEEVDLKPMKEKNAKEELIRWEEGKKWQAKIEGIRNKLKEKEGEVFTLTKQLNTLKDLFAKADKEKLTLQRKLKTTGMTVDQVLGIRALESEKELEELKKRNLDLENDILYMRAHQALPRDSVVEDLHLQNRYLQEKLHALEKQFSKDTYSKPSISGIESDDHCQREQELQKENLKLSSENIELKFQLEQANKDLPRLKNQVRDLKEMCEFLKKEKAEVQRKLGHVRGSGRSGKTIPELEKTIGLMKKVVEKVQRENEQLKKASGILTSEKMANIEQENEKLKAELEKLKAHLGHQLSMHYESKTKGTEKIIAENERLRKELKKETDAAEKLRIAKNNLEILNEKMTVQLEETGKRLQFAESRGPQLEGADSKSWKSIVVTRMYETKLKELETDIAKKNQSITDLKQLVKEATEREQKVNKYNEDLEQQIKILKHVPEGAETEQGLKRELQVLRLANHQLDKEKAELIHQIEANKDQSGAESTIPDADQLKEKIKDLETQLKMSDLEKQHLKEEIKKLKKELENFDPSFFEEIEDLKYNYKEEVKKNILLEEKVKKLSEQLGVELTSPVAASEEFEDEEESPVNFPIY

SEQ ID NO: 850083 - protein, 1555 aa, Homo sapiens
MDSDEMKKILAENSRKITVLQVNEKSLIRQYTTLVELERQLRKENEKQKNELLSMEAEVCEKIGCLQRFKEMAIFKIAALQKVVDNSVSLSELELANKQYNELTAKYRDILQKDNMLVQRTSNLEHLECENISLKEQVESINKELEITKEKLHTIEQAWEQETKLGNESSMDKAKKSITNSDIVSISKKITMLEMKELNERQRAEHCQKMYEHLRTSLKQMEERNFELETKFAELTKINLDAQKVEQMLRDELADSVSKAVSDADRQRILELEKNEMELKVEVSKLREISDIARRQVEILNAQQQSRDKEVESLRMQLLDYQAQSDEKSLIAKLHQHNVSLQLSEATALGKLESITSKLQKMEAYNLRLEQKLDEKEQALYYARLEGRNRAKHLRQTIQSLRRQFSGALPLAQQEKFSKTMIQLQNDKLKIMQEMKNSQQEHRNMENKTLEMELKLKGLEELISTLKDTKGAQKVINWHMKIEELRLQELKLNRELVKDKEEIKYLNNIISEYERTISSLEEEIVQQNKFHEERQMAWDQREVDLERQLDIFDRQQNEILNAAQKFEEATGSIPDPSLPLPNQLEIALRKIKENIRIILETRATCKSLEEKLKEKESALRLAEQNILSRDKVINELRLRLPATAEREKLIAELGRKEMEPKSHHTLKIAHQTIANMQARLNQKEEVLKKYQRLLEKAREEQREIVKKHEEDLHILHHRLELQADSSLNKFKQTAWDLMKQSPTPVPTNKHFIRLAEMEQTVAEQDDSLSSLLVKLKKVSQDLERQREITELKVKEFENIKLQLQENHEDEVKKVKAEVEDLKYLLDQSQKESQCLKSELQAQKEANSRAPTTTMRNLVERLKSQLALKEKQQKALSRALLELRAEMTAAAEERIISATSQKEAHLNVQQIVDRHTRELKTQVEDLNENLLKLKEALKTSKNRENSLTDNLNDLNNELQKKQKAYNKILREKEEIDQENDELKRQIKRLTSGLQGKPLTDNKQSLIEELQRKVKKLENQLEGKVEEVDLKPMKEKNAKEELIRWEEGKKWQAKIEGIRNKLKEKEGEVFTLTKQLNTLKDLFAKADKEKLTLQRKLKTTGMTVDQVLGIRALESEKELEELKKRNLDLENDILYMRAHQALPRDSVVEDLHLQNRYLQEKLHALEKQFSKDTYSKPSISGIESDDHCQREQELQKENLKLSSENIELKFQLEQANKDLPRLKNQVRDLKEMCEFLKKEKAEVQRKLGHVRGAELEKLKAHLGHQLSMHYESKTKGTEKIIAENERLRKELKKETDAAEKLRIAKNNLEILNEKMTVQLEETGKRLQFAESRGPQLEGADSKSWKSIVVTRMYETKLKELETDIAKKNQSITDLKQLVKEATEREQKVNKYNEDLEQQIKILKHVPEGAETEQGLKRELQVLRLANHQLDKEKAELIHQIEANKDQSGAESTIPDADQLKEKIKDLETQLKMSDLEKQHLKEEIKKLKKELENFDPSFFEEIEDLKYNYKEEVKKNILLEEKVKKLSEQLGVELTSPVAASEEFEDEEESPVNFPIY

SEQ ID NO: 850084 - protein, 429 aa, Homo sapiens
MSGGVYGGDEVGALVFDIGSYTVRAGYAGEDCPKVDFPTAIGMVVERDDGSTLMEIDGDKGKQGGPTYYIDTNALRVPRENMEAISPLKNGMVEDWDSFQAILDHTYKMHVKSEASLHPVLMSEAPWNTRAKREKLTELMFEHYNIPAFFLCKTAVLTAFANGRSTGLILDSGATHTTAIPVHDGYVLQQGIVKSPLAGDFITMQCRELFQEMNIELVPPYMIASKEAVREGSPANWKRKEKLPQVTRSWHNYMCNCVIQDFQASVLQVSDSTYDEQVAAQMPTVHYEFPNGYNCDFGAERLKIPEGLFDPSNVKGLSGNTMLGVSHVVTTSVGMCDIDIRPGLYGSVIVAGGNTLIQSFTDRLNRELSQKTPPSMRLKLIANNTTVERRFSSWIGGSILASLGTFQQMWISKQEYEEGGKQCVERKCP

SEQ ID NO: 850085 - protein, 130 aa, Homo sapiens
LLIHFNTPISTDPPLQGLSGNTMLGVSHVVTTSVGMCDIDIRPGLYGSVIVAGGNTLIQSFTDRLNRELSQKTPPSMRLKLIANNTTVERRFSSWIGGSILASLGTFQQMWISKQEYEEGGKQCVERKCP

SEQ ID NO: 850086 - protein, 313 aa, Homo sapiens
TRGSTHASTVRAGYAGEDCPKVDFPTAIGMVVERDDGSTLMEIDGDKGKQGGPTYYIDTNALRVPRENMEAISPLKNGMVEDWDSFQAILDHTYKMHVKSEASLHPVLMSEAPWNTRAKREKLTELMFEHYNIPAFFLCKTAVLTAFANGRSTGLILDSGATHTTAIPVHDGYVLQQGIVKSPLAGDFITMQCRELFQEMNIELVPPYMIASKGKALVTAGKGNSLQRQNVEKDKARSVTIQRYTEGIPLWGTETHEIYNFNLVGFQNYRLRLINTPRGKFYITHKKPLSRRIKSLYTKKGIGFTPRENFFTQ

SEQ ID NO: 850087 - protein, 486 aa, Homo sapiens
  misc_feature (1)..(1): Xaa can be any naturally occurring amino acid
XRKVCKKRGGTVRNSREGGWRWKLRESGAIAPRDSQSRPLQSLRQLALRVGVAPAAAMSGGVYGGDEVGALVFDIGSYTVRAGYAGEDCPKVDFPTAIGMVVERDDGSTLMEIDGDKGKQGGPTYYIDTNALRVPRENMEAISPLKNGMVEDWDSFQAILDHTYKMHVKSEASLHPVLMSEAPWNTRAKREKLTELMFEHYNIPAFFLCKTAVLTAFANGRSTGLILDSGATHTTAIPVHDGYVLQQGIVKSPLAGDFITMQCRELFQEMNIELVPPYMIASKEAVREGSPANWKRKEKLPQVTRSWHNYMCNCVIQDFQASVLQVSDSTYDEQVAAQMPTVHYEFPNGYNCDFGAERLKIPEGLFDPSNVKGLSGNTMLGVSHVVTTSVGMCDIDIRPGLYGSVIVAGGNTLIQSFTDRLNRELSQKTPPSMRLKLIANNTTVERRFSSWIGGSILASLGTFQQMWISKQEYEEGGKQCVERKCP

SEQ ID NO: 850088 - protein, 429 aa, Homo sapiens; identical to SEQ ID NO: 850084

SEQ ID NO: 850089 - protein, 429 aa, Homo sapiens; identical to SEQ ID NO: 850084

SEQ ID NO: 850090 - protein, 429 aa, Homo sapiens; identical to SEQ ID NO: 850084

SEQ ID NO: 850091 - protein, 429 aa, Homo sapiens; identical to SEQ ID NO: 850084

SEQ ID NO: 850092 - protein, 412 aa, Homo sapiens
FCRVGGLTMVPRLILNSVDFPTAIGMVVERDDGSTLMEIDGDKGKQGGPTYYIDTNALRVPRENMEAISPLKNGMVEDWDSFQAILDHTYKMHVKSEASLHPVLMSEAPWNTRAKREKLTELMFEHYNIPAFFLCKTAVLTAFANGRSTGLILDSGATHTTAIPVHDGYVLQQGIVKSPLAGDFITMQCRELFQEMNIELVPPYMIASKEAVREGSPANWKRKEKLPQVTRSWHNYMCNCVIQDFQASVLQVSDSTYDEQVAAQMPTVHYEFPNGYNCDFGAERLKIPEGLFDPSNVKGLSGNTMLGVSHVVTTSVGMCDIDIRPGLYGSVIVAGGNTLIQSFTDRLNRELSQKTPPSMRLKLIANNTTVERRFSSWIGGSILASLGTFQQMWISKQEYEEGGKQCVERKCP

SEQ ID NO: 850093 - protein, 161 aa, Homo sapiens
MSGGVYGGDEVGALVFDIGSYTVRAGYAGEDCPKVDFPTAIGMVVERDDGSTLMEIDGDKGKQGGPTYYIDTNALRVPRENMEAISPLKNGMVEDWDSFQAILDHTYKMHVKSEASLHPVLMSEAPWNTRAKREKLTELMFEHYNIPAFFLCKTAVLTAYP

SEQ ID NO: 850094 - protein, 174 aa, Homo sapiens
MSGGVYGGDEVGALVFDIGSYTVRAGYAGEDCPKVDFPTAIGMVVERDDGSTLMEIDGDKGKQGGPTYYIDTNALRVPRENMEAISPLKNGMVEDWDSFQAILDHTYKMHVKSEASLHPVLMSEAPWNTRAKREKLTELMFEHYNIPAFFLCTVEPLIPLQFQSTMAMSFNKAL

SEQ ID NO: 850095 - protein, 161 aa, Homo sapiens; identical to SEQ ID NO: 850093

SEQ ID NO: 850096 - protein, 226 aa, Homo sapiens
MQCRELFQEMNIELVPPYMIASKEAVREGSPANWKRKEKLPQVTRSWHNYMCNCVIQDFQASVLQVSDSTYDEQVAAQMPTVHYEFPNGYNCDFGAERLKIPEGLFDPSNVKGLSGNTMLGVSHVVTTSVGMCDIDIRPGLYGSVIVAGGNTLIQSFTDRLNRELSQKTPPSMRLKLIANNTTVERRFSSWIGGSILASLGTFQQMWISKQEYEEGGKQCVERKCP

SEQ ID NO: 850097 - protein, 429 aa, Homo sapiens; identical to SEQ ID NO: 850084

SEQ ID NO: 850098 - protein, 226 aa, Homo sapiens; identical to SEQ ID NO: 850096

SEQ ID NO: 850099 - protein, 326 aa, Homo sapiens
MSGGVYGGDEVGALVFDIGSYTVRAGYAGEDCPKVDFPTAIGMVVERDDGSTLMEIDGDKGKQGGPTYYIDTNALRVPRENMEAISPLKNGMVEDWDSFQAILDHTYKMHVKSEASLHPVLMSEAPWNTRAKREKLTELMFEHYNIPAFFLCKTAVLTAFANGRSTGLILDSGATHTTAIPVHDGYVLQQGIVKSPLAGDFITMQCRELFQEMNIELVPPYMIASKGKALVTAGKGNSLQRQNVEKDKARSVTIQRYTEGIPLWGTETHEIYNFNLVGFQNYRLRLINTPRGKFYITHKKPLSRRIKSLYTKKGIGFTPRENFFTQ

SEQ ID NO: 850100 - protein, 75 aa, Homo sapiens
RPSGQGRYVLVVRTNAGGVTMMRLKLIANNTTVERRFSSWIGGSILASLGTFQQMWISKQEYEEGGKQCVERKCP

SEQ ID NO: 850101 - protein, 113 aa, Homo sapiens
MSGGVYGGDEVGALVFDIGSYTVRAGYAGEDCPKVDFPTAIGMVVERDDGSTLMEIDGDKGKQGGPTYYIDTNALRVPRENMEAISPLKNGMGDDVFPMELIMECTCYILDTK

SEQ ID NO: 850102 - protein, 387 aa, Homo sapiens
MVVERDDGSTLMEIDGDKGKQGGPTYYIDTNALRVPRENMEAISPLKNGMVEDWDSFQAILDHTYKMHVKSEASLHPVLMSEAPWNTRAKREKLTELMFEHYNIPAFFLCKTAVLTAFANGRSTGLILDSGATHTTAIPVHDGYVLQQGIVKSPLAGDFITMQCRELFQEMNIELVPPYMIASKEAVREGSPANWKRKEKLPQVTRSWHNYMCNCVIQDFQASVLQVSDSTYDEQVAAQMPTVHYEFPNGYNCDFGAERLKIPEGLFDPSNVKGLSGNTMLGVSHVVTTSVGMCDIDIRPGLYGSVIVAGGNTLIQSFTDRLNRELSQKTPPSMRLKLIANNTTVERRFSSWIGGSILASLGTFQQMWISKQEYEEGGKQCVERKCP

SEQ ID NO: 850103 - protein, 244 aa, Homo sapiens
DAWVDPRVDSGATHTTAIPVHDGYVLQQGIVKSPLAGDFITMQCRELFQEMNIELVPPYMIASKEAVREGSPANWKRKEKLPQVTRSWHNYMCNCVIQDFQASVLQVSDSTYDEQVAAQMPTVHYEFPNGYNCDFGAERLKIPEGLFDPSNVKGLSGNTMLGVSHVVTTSVGMCDIDIRPGLYGSVIVAGGNTLIQSFTDRLNRELSQKTPPSMRLKLIANNTTVERRFSSWIGGSILASLVSR

SEQ ID NO: 850104 - protein, 387 aa, Homo sapiens; identical to SEQ ID NO: 850102

SEQ ID NO: 850105 - protein, 387 aa, Homo sapiens; identical to SEQ ID NO: 850102

SEQ ID NO: 850106 - protein, 429 aa, Homo sapiens; identical to SEQ ID NO: 850084

SEQ ID NO: 850107 - protein, 355 aa, Homo sapiens
MSGGVYGGDEVGALVFDIGSYTVRAGYAGEDCPKVDFPTAIGMVVERDDGSTLMEIDGDKGKQGGPTYYIDTNALRVPRENMEAISPLKNGMVEDWDSFQAILDHTYKMHVKSEASLHPVLMSEAPWNTRAKREKLTELMFEHYNIPAFFLCKTAVLTAFANGRSTGLILDSGATHTTAIPVHDGYVLQQGIVKSPLAGDFITMQCRELFQEMNIELVPPYMIASKEAVREGSPANWKRKEKLPQVTRSWHNYMCNCVIQDFQASVLQVSDSTYDEQVAAQMPTVHYEFPNGYNCDFGAERLKIPEGLFDPSNVKGLSGNTMLGVSHVVTTSVGMWISKQEYEEGGKQCVERKCP

SEQ ID NO: 850108 - protein, 166 aa, Homo sapiens
MSGGVYGGDEVGALVFDIGSYTVRAGYAGEDCPKVDFPTAIGMVVERDDGSTLMEIDGDKGKQGGPTYYIDTNALRVPRENMEAISPLKNGMVEDWDSFQAILDHTYKMHVKSEASLHPVLMSEAPWNTRAKREKLTELMFEHYNIPAFFLCKTAVLTAFIHHLLH

SEQ ID NO: 850109 - protein, 321 aa, Homo sapiens
MGWLKTGIVSKLFWIIPTWNTRAKREKLTELMFEHYNIPAFFLCKTAVLTAFANGRSTGLILDSGATHTTAIPVHDGYVLQQGIVKSPLAGDFITMQCRELFQEMNIELVPPYMIASKEAVREGSPANWKRKEKLPQVTRSWHNYMCNCVIQDFQASVLQVSDSTYDEQVAAQMPTVHYEFPNGYNCDFGAERLKIPEGLFDPSNVKGLSGNTMLGVSHVVTTSVGMCDIDIRPGLYGSVIVAGGNTLIQSFTDRLNRELSQKTPPSMRLKLIANNTTVERRFSSWIGGSILASLGTFQQMWISKQEYEEGGKQCVERKCP

SEQ ID NO: 850110 - protein, 429 aa, Homo sapiens; identical to SEQ ID NO: 850084

SEQ ID NO: 850111 - protein, 355 aa, Homo sapiens; identical to SEQ ID NO: 850107

SEQ ID NO: 850112 - protein, 429 aa, Homo sapiens; identical to SEQ ID NO: 850084

SEQ ID NO: 850113 - protein, 406 aa, Homo sapiens [sequence omitted]

SEQ ID NO: 850114 - protein, 217 aa, Homo sapiens
  misc_feature (180)..(180): Xaa can be any naturally occurring amino acid
  misc_feature (184)..(184): Xaa can be any naturally occurring amino acid
MSGGVYGGDEVGALVFDIGSYTVRAGYAGEDCPKVDFPTAIGMVVERDDGSTLMEIDGDKGKQGGPTYYIDTNALRVPRENMEAISPLKNGMVEDWDSFQAILDHTYKMHVKSEASLHPVLMSEAPWNTRAKREKLTELMFEHYNIPAFFLCKTAVLTAFANGRSTGLILDSGATHTTAXFPSXPQNPENFGGGPLFKILGVFPPPFFFPKKTPKKR

SEQ ID NO: 850115 - protein, 180 aa, Homo sapiens
RAVQLVTSVTSKVSPLHIGQHIMIADRNYCDLLDLPCVGTSSGSDRSYKEFLPGKPVALFLDQSEEALGHLLFPGQLYLMHPWNLLPYLTALDLALAISAAWPPALGLEACFFLSVRHTKVCVNLHYFCSLVADRSMLLQILLFLAPSFLGHQKILLVLSLTMWYEVIYIGERMSHLVYS

SEQ ID NO: 850116 - protein, 685 aa, Homo sapiens [sequence omitted]

SEQ ID NO: 850117 - protein, 641 aa, Homo sapiens
MRSITQGACRFIWEDKGYISGDHINLVSSSLSSFPILQRSSEEKILYSDRLSLERQKLTVCPIINGEDHLRLLNFQHNFITRIQNISNLQKLISLDLYDNQIEEISGLSTLRCLRVLLLGKNRIKKISNLENLKSLDVLDLHGNQITKIENINHLCELRVLNLARNFLSHVDNLNGLDSLTELNLRHNQITFVRDVDNLPCLQHLFLSFNNISSFDSVSCLADSSSLSDITFDGNPIAQESWYKHTVLQNMMQLRQLDMKRITEEERRMASVLAKKEEEKKRESHKQSLLKEKKRLTINNVARQWDLQQRVANIATNEDRKDSDSPQDPCQIDGSTLSAFPEETGPLDSGLNNALQGLSVIDTYLVEVDGDTLSLYGSGALESLDRNWSVQTAGMITTVSFTFIEFDEIVQVLPKLKIKFPNSLHLKFKETNLVMLQQFNALAQLRRIDQLTIDPQGNPVVNFTLWKYYVLFRLSHFSMQKINGTEVTQNDMIMAERLFGILAHVASSELPQYRLISILGDARKKQFRYLLESKGKKPGIINEENNDSKRLVGENTNRATLNYTTRDFYNEKLEEIKEKKKFCKTYIEDLVKEATEINMKNEALQKLWPQMFIELVRDAVIEIRNKNSYMKLCLQQITDQK

SEQ ID NO: 850118 - protein, 390 aa, Homo sapiens
MQLRQLDMKRITEEERRMASVLAKKEEEKKRESHKQSLLKEKKRLTINNVARQWDLQQRVANIATNEDRKDSDSPQDPCQIDGSTLSAFPEETGPLDSGLNNALQGLSVIDTYLVEVDGDTLSLYGSGALESLDRNWSVQTAGMITTVSFTFIEFDEIVQVLPKLKIKFPNSLHLKFKETNLVMLQQFNALAQLRRIDQLTIDPQGNPVVNFTLWKYYVLFRLSHFSMQKINGTEVTQNDMIMAERLFGILAHVASSELPQYRLISILGDARKKQFRYLLESKGKKPGIINEENNDSKRLVGENTNRATLNYTTRDFYNEKLEEIKEKKKFCKTYIEDLVKEATEINMKNEALQKLWPQMFIELVRDAVIEIRNKNSYMKLCLQQITDQK

SEQ ID NO: 850119 - protein, 477 aa, Homo sapiens
MIPGKYRSVSGRAANNVNCGLHLVIQTSSLPEKNKVEFKLNKDTSSFPGRLLQHDLERNYSSRQGDHINLVSSSLSSFPILQRSSEEKILYSDRLSLERQKLTVCPIINGEDHLRLLNFQHNFITRIQNISNLQKLISLDLYDNQIEEISGLSTLRCLRVLLLGKNRIKKISNLENLKSLDVLDLHGNQITKIENINHLCELRVLNLARNFLSHVDNLNGLDSLTELNLRHNQITFVRDVDNLPCLQHLFLSFNNISSFDSVSCLADSSSLSDITFDGNPIAQESWYKHTVLQNMMQLRQLDMKRITEEERRMASVLAKKEEEKKRESHKQSLLKEKKRLTINNVARQWDLQQRVANIATNEDRKDSDSPQDPCQIDGSTLSAFPEETGPLDSGLNNALQGLSVIDTYLVEVDGDTLSLYGSGALESLDRNWSVQTAGMITTVSFTFIEFDEIVQVLPKLKIKFPNSLHLKFKETIL

SEQ ID NO: 850120 - protein, 685 aa, Homo sapiens [sequence omitted]

SEQ ID NO: 850121 - protein, 85 aa, Homo sapiens
GGLVRNSDDGRRECFGEQEIKEKKKFCKTYIEDLVKEATEINMKNEALQKLWPQMFIELVRDAVIEIRNKNSYMKLCLQQITDQK

SEQ ID NO: 850122 - protein, 641 aa, Homo sapiens; identical to SEQ ID NO: 850117

SEQ ID NO: 850123 - protein, 685 aa, Homo sapiens [sequence omitted]

SEQ ID NO: 850124 - protein, 685 aa, Homo sapiens [sequence omitted]

SEQ ID NO: 850125 - protein, 142 aa, Homo sapiens
MSVEPPPELEEKAASEPEAGAMPEKRAGAQAAGSTWLQGFGPPSVYHAAIVIFLEFFAWGLLTTPMLTVLHETFSQHTFLMNGLIQGVKGLLSFLSAPLIGALSDVWGRKPFLLGTVFFTCFPIPLMRISPCFLKKKTHQWT

SEQ ID NO: 850126 - protein, 110 aa, Homo sapiens
MSVEPPPELEEKAASEPEAGAMPEKRAGAQAAGSTWVLHETFSQHTFLMNGLIQGVKGLLSFLSAPLIGALSDVWGRKPFLLGTVFFTCFPIPLMRISPCFLKKKTHQWT

SEQ ID NO: 850127 - protein, 132 aa, Homo sapiens [sequence omitted]

SEQ ID NO: 850128 - protein, 151 aa, Homo sapiens
MSVEPPPELEEKAASEPEAGAMPEKRAGAQAAGSTWLQGFGPPSVYHAAIVIFLEFFAWGLLTTPMLTVLHETFSQHTFLMNGLIQGVKGLLSFLSAPLIGALSDVWGRKPFLLGTVFFTCFPIPLMRISPCLCKYRIRDKRPYNMIFGMN

SEQ ID NO: 850129 - protein, 150 aa, Homo sapiens
MSVEPPPELEEKAASEPEAGAMPEKRAGAQAAGSTWLQGFGPPSVYHAAIVIFLEFFAWGLLTTPMLTVLHETFSQHTFLMNGLIQGVKGLLSFLSAPLIGALSDVWGRKPFLLGTVFFTCFPIPLMRISPCRVWWRAPVVPATCGRRMA

SEQ ID NO: 850130 - protein, 104 aa, Homo sapiens
DSFSRRELRCGVGPPTVQPAPDAAGNCDSRGRCGLLSGRFLELRSSASLIRSFSLRRLLSPRRRRLTRRPPRAAEPMRARAPPPPPRRRRRPGAPRAGAGMAAA

SEQ ID NO: 850131 - protein, 178 aa, Homo sapiens
MSVEPPPELEEKAASEPEAGAMPEKRAGAQAAGSTWLQGFGPPSVYHAAIVIFLEFFAWGLLTTPMLTVLHETFSQHTFLMNGLIQGVKGLLSFLSAPLIGALSDVWGRKPFLLGTVFFTCFPIPLMRISPWYFAMISVSGVFSVTFSVIFAYIADVTQEHERSTAYGWVSATFAASL

SEQ ID NO: 850132 - protein, 304 aa, Homo sapiens
MAEASAAGADSGAAVAAHRFFCHFCKGEVSPKLPEYICPRCESGFIEEVTDDSSFLGGGGSRIDNTTTTHFAELWGHLDHTMFFQDFRPFLSSSPLDQDNRANERGHQTHTDFWGARPPRLPLGRRYRSRGSSRPDRSPAIEGILQHIFAGFFANSAIPGSPHPFSWSGMLHSNPGDYAWGQTGLDAIVTQLLGQLENTGPPPADKEKITSLPTVTVTQEQVDMGLECPVCKEDYTVEEEVRQLPCNHFFHSSCIVPWLELHDTCPVCRKSLNGEDSTRQSQSTEASASNRFSNDSQLHDRWTF

SEQ ID NO: 850133 - protein, 223 aa, Homo sapiens
MFFQDFRPFLSSSPLDQDNRANERGHQTHTDFWGARPPRLPLGRRYRSRGSSRPDRSPAIEGILQHIFAGFFANSAIPGSPHPFSWSGMLHSNPGDYAWGQTGLDAIVTQLLGQLENTGPPPADKEKITSLPTVTVTQEQVDMGLECPVCKEDYTVEEEVRQLPCNHFFHSSCIVPWLELHDTCPVCRKSLNGEDSTRQSQSTEASASNRFSNDSQLHDRWTF

SEQ ID NO: 850134 - protein, 223 aa, Homo sapiens; identical to SEQ ID NO: 850133

SEQ ID NO: 850135 - protein, 223 aa, Homo sapiens; identical to SEQ ID NO: 850133

SEQ ID NO: 850136 - protein, 135 aa, Homo sapiens [sequence omitted]

SEQ ID NO: 850137 - protein, 330 aa, Homo sapiens
MAEASAAGADSGAAVAAHRFFCHFCKGEVSPKLPEYICPRCESGFIEEVTDDSSFLGGGGSRIDNTTTTHFAELWGHLDHTMFFQDFRPFLSSSPLDQDNRANERGHQTHTDFWGARPPRLPLGRRYRSRGSSRPDRSPAIEGILQHIFAGFFANSAIPGSPHPFSWSGMLHSNPGDYAWGQTGLDAIVTQLLGQLENTGPPPADKEKITSLPTVTVTQEQVDMGLECPVCKEDYTVEEEVRQLPCNHFFHSSCIVPWLELPCSCMYGRLSMGRTLPSGKPGAWGSCRHRLASRRLWPRLLESGPPDRWGTLLLAVHQLYGALCPPYASS

SEQ ID NO: 850138 - protein, 224 aa, Homo sapiens
MAEASAAGADSGAAVAAHRFFCHFCKGEVSPKLPEYICPRCESGFIEEVTDDSSFLGGGGSRIDNTTTTHFAELWGHLDHTMFFQDFRPFLSSSPLDQDNRANERGHQTHTDFWGARPPRLPLGRRYRSRGSSRPDRSPAIEGILQHIFAGFFANSAIPGSPHPFSWSGMLHSNPGDYAWGQTGLDAIVTQLLGQLENTGPPPADKEKITSLPTVTVTQEQVGS

SEQ ID NO: 850139 - protein, 120 aa, Homo sapiens
AGSEAVGRTEAAAAATTAAREVAAWRGTGRLPSRTAAAEGKNGGGFGGRGGLGRRCSRPPVFLPLLQGRGQPQTTGKSAVFSILGNLIDSWPRFPGTGSGAFCTSLTRPTSVCRIPAAHF

SEQ ID NO: 850140 - protein, 304 aa, Homo sapiens; identical to SEQ ID NO: 850132

SEQ ID NO: 850141 - protein, 271 aa, Homo sapiens
MIPESKVEGPFHNQEKLHILHFLGGGGSRIDNTTTTHFAELWGHLDHTMFFQDFRPFLSSSPLDQDNRANERGHQTHTDFWGARPPRLPLGRRYRSRGSSRPDRSPAIEGILQHIFAGFFANSAIPGSPHPFSWSGMLHSNPGDYAWGQTGLDAIVTQLLGQLENTGPPPADKEKITSLPTVTVTQEQVDMGLECPVCKEDYTVEEEVRQLPCNHFFHSSCIVPWLELHDTCPVCRKSLNGEDSTRQSQSTEASASNRFSNDSQLHDRWTF

SEQ ID NO: 850142 - protein, 266 aa, Homo sapiens
MGLKVNMTLLLNHRSSFLGGGGSRIDNTTTTHFAELWGHLDHTMFFQDFRPFLSSSPLDQDNRANERGHQTHTDFWGARPPRLPLGRRYRSRGSSRPDRSPAIEGILQHIFAGFFANSAIPGSPHPFSWSGMLHSNPGDYAWGQTGLDAIVTQLLGQLENTGPPPADKEKITSLPTVTVTQEQVDMGLECPVCKEDYTVEEEVRQLPCNHFFHSSCIVPWLELHDTCPVCRKSLNGEDSTRQSQSTEASASNRFSNDSQLHDRWTF

SEQ ID NO: 850143 - protein, 144 aa, Homo sapiens
MIPESKVEGPFHNQEKLHILHFLGGGGSRIDNTTTTHFAELWGHLDHTMFFQDFRPFLSSSPLDQDNRANERGHQTHTDFWGARPPRLPLGRRYRSRGSSRPDRSPAIEGILQHIFAGFFANSAIPGSPHPFSCMTHVLYVGRA

SEQ ID NO: 850144 - protein, 245 aa, Homo sapiens
MAEASAAGADSGAAVAAHRFFCHFCKGEVSPKLPEYICPRCESGFIEEVTDDSSFLGGGGSRIDNTTTTHFAELWGHLDHTMFFQDFRPFLSSSPLDQDNRANERGHQTHTDFWGARPPRLPLGRRYRSRGSSRPDRSPAIEGILQHIFAGFFANSAIPGSPHPFSWSGMLHSNPGDYAWGQTGLDAIVTQLLGQLENTGPPPADKEKITSLPTVTVTQEQVDMGLECPGENVFSLWAPALMGWG

SEQ ID NO: 850145 - protein, 229 aa, Homo sapiens
MAEASAAGADSGAAVAAHRFFCHFCKGEVSPKLPEYICPRCESGFIEEVTDDSSFLGGGGSRIDNTTTTHFAELWGHLDHTMFFQDFRPFLSSSPLDQDNRANERGHQTHTDFWGARPPRLPLGRRYRSRGSSRPDRSPAIEGILQHIFAGFFANSAIPGSPHPFSWSGMLHSNPGDYAWGQTGLDAIVTQVRSCLLRVSVQCVSWFHRLPAFLLLLSEMAVTLLSLIF

SEQ ID NO: 850146 - protein, 205 aa, Homo sapiens
KHSCFLFAFSCFGPATKGGFHTIAFDSGGAGTGGLGHSPAAPTLGHGLSEQAVASAFSGNQQLLFGEFVQMLACQHSFKSGNHAFRPACVLILAGILTNGKKKAVPRRSRQGLFLATGPGLLMISPLLQACMKISCCSHDLKKEVDLLQHLQVSPPVSGLQKVVLDVLRHALSWLEEVEQLLRDLGILPSSPNKGYWDFFSHMVA

SEQ ID NO: 850147 - protein, 240 aa, Homo sapiens
ISALQKGYSKVLCQTLSERNSEITSLKNEGENLKRDNAITSGMVSSLQKDILAKDEQVQQLKEEVSHLKSQNKDKDHQLEALGSRLEHFRSQVIKATYGRAKPFRDKPVTDQQLIEKITQVTEDNINFQQKKWTLQKETQLSNSKQEETTENIEKLRTSLDSCQACMKISCCSHDLKKEVDLLQHLQVSPPVSGLQKVVLDVLRHALSWLEEVEQLLRDLGILPSSPNKGYWDFFSHMVA

SEQ ID NO: 850148 - protein, 178 aa, Homo sapiens
METLPPLAGPCCPPDTVAPSLLQLEHFRSQVIKATYGRAKPFRDKPVTDQQLIEKITQVTEDNINFQQKKWTLQKETQLSNSKQEETTENIEKLRTSLDSCQACMKISCCSHDLKKEVDLLQHLQVSPPVSGLQKVVLDVLRHALSWLEEVEQLLRDLGILPSSPNKGYWDFFSHMVA

SEQ ID NO: 850149 - protein, 364 aa, Homo sapiens
MIGSSIASSSRGIGSHCKSEGQEESFVPQSSVQPPEGDSETKAPEESSEDVTKYQEGVSAENPVENHINITQSDKFTAKPLDSNSGERNDLNLDRSCGVPEESASSEKAKEPETSDQTSTESATNENNTNPEPQFQTEATGPSAHEETSTRDSALQDTDDSDDDPVLIPGARYRAGPGDRRSAVARIQEFFRRRKERKEMEELDTLNIRRPLVKMVYKGHRNSRTMIKEANFWGANFVMSGSDCGHIFIWDRHTAEHLMLLEADNHVVNCLQPHPFDPILASSGIDYDIKIWSPLEESRIFNRKLADEVITRNELMLEETRNTITVPASFMLRMLASLNHIRADRLEGDRSEGSGQENENEDEE

SEQ ID NO: 850150 - protein, 733 aa, Homo sapiens
MTVPNDPYTFLSCGEDGTVRWFDTRIKTSCTKEDCKDDILINCRRAATSVAICPPIPYYLAVGCSDSSVRIYDRRMLGTRATGNYAGRGTTGMVARFIPSHLNNKSCRVTSLCYSEDGQEILVSYSSDYIYLFDPKDDTARELKTPSAEERREELRQPPVKRLRLRGDWSDTGPRARPESERERDGEQSPNVSLMQRMSDMLSRWFEEASEVAQSNRGRGRSRPRGGTSQSDISTLPTVPSSPDLEVSETAMEVDTPAEQFLQPSTSSTMSAQAHSTSSPTESPHSTPLLSSPDSEQRQSVEASGHHTHHQSDSPSSVVNKQLGSMSLDEQQDNNNEKLSPKPGTGEPVLSLHYSTEGTTTSTIKLNFTDEWSSIASSSRGIGSHCKSEGQEESFVPQSSVQPPEGDSETKAPEESSEDVTKYQEGVSAENPVENHINITQSDKFTAKPLDSNSGERNDLNLDRSCGVPEESASSEKAKEPETSDQTSTESATNENNTNPEPQFQTEATGPSAHEETSTRDSALQDTDDSDDDPVLIPGARYRAGPGDRRSAVARIQEFFRRRKERKEMEELDTLNIRRPLVKMVYKGHRNSRTMIKEANFWGANFVMSGSDCGHIFIWDRHTAEHLMLLEADNHVVNCLQPHPFDPILASSGIDYDIKIWSPLEESRIFNRKLADEVITRNELMLEETRNTITVPASFMLRMLASLNHIRADRLEGDRSEGSGQENENEDEE

SEQ ID NO: 850151 - protein, 959 aa, Homo sapiens
APLYRGAGGRWPAGLGHRRPTSPPRDRWQPGGSVAVFSSLADNEGELVTFPATTTRVRLSPGVPFPRLSLPAVNRKAAARAPRRLRGRRLPTASPRSASGPRQEEGGAMATGRREFIQRLKLEATLNVHDGCVNTICWNDTGEYILSGSDDTKLVISNPYSRKVLTTIRSGHRANIFSAKFLPCTNDKQIVSCSGDGVIFYTNVEQDAETNRQCQFTCHYGTTYEIMTVPNDPYTFLSCGEDGTVRWFDTRIKTSCTKEDCKDDILINCRRAATSVAICPPIPYYLAVGCSDSSVRIYDRRMLGTRATGNYAGRGTTGMVARFIPSHLNNKSCRVTSLCYSEDGQEILVSYSSDYIYLFDPKDDTARELKTPSAEERREELRQPPVKRLRLRGDWSDTGPRARPESERERDGEQSPNVSLMQRMSDMLSRWFEEASEVAQSNRGRGRSRPRGGTSQSDISTLPTVPSSPDLEVSETAMEVDTPAEQFLQPSTSSTMSAQAHSTSSPTESPHSTPLLSSPDSEQRQSVEASGHHTHHQSDSPSSVVNKQLGSMSLDEQQDNNNEKLSPKPGTGEPVLSLHYSTEGTTTSTIKLNFTDEWSSIASSSRGIGSHCKSEGQEESFVPQSSVQPPEGDSETKAPEESSEDVTKYQEGVSAENPVENHINITQSDKFTAKPLDSNSGERNDLNLDRSCGVPEESASSEKAKEPETSDQTSTESATNENNTNPEPQFQTEATGPSAHEETSTRDSALQDTDDSDDDPVLIPGARYRAGPGDRRSAVARIQEFFRRRKERKEMEELDTLNIRRPLVKMVYKGHRNSRTMIKEANFWGANFVMSGSDCGHIFIWDRHTAEHLMLLEADNHVVNCLQPHPFDPILASSGIDYDIKIWSPLEESRIFNRKLADEVITRNELMLEETRNTITVPASFMLRMLASLNHIRADRLEGDRSEGSGQENENEDEE

SEQ ID NO: 850152 - protein, 733 aa, Homo sapiens; identical to SEQ ID NO: 850150

SEQ ID NO: 850153 - protein, 733 aa, Homo sapiens; identical to SEQ ID NO: 850150

SEQ ID NO: 850154 - protein, 937 aa, Homo sapiens
MSRGGSYPHLLWDVRKRSLGLEDPSRLRSRYLGRREFIQRLKLEATLNVHDGCVNTICWNDTGEYILSGSDDTKLVISNPYSRKVLTTIRSGHRANIFSAKFLPCTNDKQIVSCSGDGVIFYTNVEQDAETNRQCQFTCHYGTTYEIMTVPNDPYTFLSCGEDGTVRWFDTRIKTSCTKEDCKDDILINCRRAATSVAICPPIPYYLAVGCSDSSVRIYDRRMLGTRATGNYAGRGTTGMVARFIPSHLNNKSCRVTSLCYSEDGQEILVSYSSDYIYLFDPKDDTARELKTPSAEERREELRQPPVKRLRLRGDWSDTGPRARPESERERDGEQSPNVSLMQRMSDMLSRWFEEASEVAQSNRGRGRSRPRGGTSQSDISTLPTVPSSPDLEVSETAMEVDTPAEQFLQPSTSSTMSAQAHSTSSPTESPHSTPLLSSPDSEQRQSVEASGHHTHHQSEFLRGPEIALLRKRLQQLRLKKAEQQRQQELAAHTQQQPSTSDQSSHEGSSQDPHASDSPSSVVNKQLGSMSLDEQQDNNNEKLSPKPGTGEPVLSLHYSTEGTTTSTIKLNFTDEWSSIASSSRGIGSHCKSEGQEESFVPQSSVQPPEGDSETKAPEESSEDVTKYQEGVSAENPVENHINITQSDKFTAKPLDSNSGERNDLNLDRSCGVPEESASSEKAKEPETSDQTSTESATNENNTNPEPQFQTEATGPSAHEETSTRDSALQDTDDSDDDPVLIPGARYRAGPGDRRSAVARIQEFFRRRKERKEMEELDTLNIRRPLVKMVYKGHRNSRTMIKEANFWGANFVMSGSDCGHIFIWDRHTAEHLMLLEADNHVVNCLQPHPFDPILASSGIDYDIKIWSPLEESRIFNRKLADEVITRNELMLEETRNTITVPASFMLRMLASLNHIRADRLEGDRSEGSGQENENEDEE

SEQ ID NO: 850155 - protein, 880 aa, Homo sapiens
MSRGGSYPHLLWDVRKRSLGLEDPSRLRSRYLGRREFIQRLKLEATLNVHDGCVNTICWNDTGEYILSGSDDTKLVISNPYSRKVLTTIRSGHRANIFSAKFLPCTNDKQIVSCSGDGVIFYTNVEQDAETNRQCQFTCHYGTTYEIMTVPNDPYTFLSCGEDGTVRWFDTRIKTSCTKEDCKDDILINCRRAATSVAICPPIPYYLAVGCSDSSVRIYDRRMLGTRATGNYAGRGTTGMVARFIPSHLNNKSCRVTSLCYSEDGQEILVSYSSDYIYLFDPKDDTARELKTPSAEERREELRQPPVKRLRLRGDWSDTGPRARPESERERDGEQSPNVSLMQRMSDMLSRWFEEASEVAQSNRGRGRSRPRGGTSQSDISTLPTVPSSPDLEVSETAMEVDTPAEQFLQPSTSSTMSAQAHSTSSPTESPHSTPLLSSPDSEQRQSVEASGHHTHHQSDSPSSVVNKQLGSMSLDEQQDNNNEKLSPKPGTGEPVLSLHYSTEGTTTSTIKLNFTDEWSSIASSSRGIGSHCKSEGQEESFVPQSSVQPPEGDSETKAPEESSEDVTKYQEGVSAENPVENHINITQSDKFTAKPLDSNSGERNDLNLDRSCGVPEESASSEKAKEPETSDQTSTESATNENNTNPEPQFQTEATGPSAHEETSTRDSALQDTDDSDDDPVLIPGARYRAGPGDRRSAVARIQEFFRRRKERKEMEELDTLNIRRPLVKMVYKGHRNSRTMIKEANFWGANFVMSGSDCGHIFIWDRHTAEHLMLLEADNHVVNCLQPHPFDPILASSGIDYDIKIWSPLEESRIFNRKLADEVITRNELMLEETRNTITVPASFMLRMLASLNHIRADRLEGDRSEGSGQENENEDEE

SEQ ID NO: 850156 - protein, 420 aa, Homo sapiens
CAVVVNYMVRFFVNLTEQQDNNNEKLSPKPGTGEPVLSLHYSTEGTTTSTIKLNFTDEWSSIASSSRGIGSHCKSEGQEESFVPQSSVQPPEGDSETKAPEESSEDVTKYQEGVSAENPVENHINITQSDKFTAKPLDSNSGERNDLNLDRSCGVPEESASSEKAKEPETSDQTSTESATNENNTNPEPQFQTEATGPSAHEETSTRDSALQDTDDSDDDPVLIPGARYRAGPGDRRSAVARIQEFFRRRKERKEMEELDTLNIRRPLVKMVYKGHRNSRTMIKEANFWGANFVMSGSDCGHIFIWDRHTAEHLMLLEADNHVVNCLQPHPFDPILASSGIDYDIKIWSPLEESRIFNRKLADEVITRNELMLEETRNTITVPASFMLRMLASLNHIRADRLEGDRSEGSGQENENEDEE

SEQ ID NO: 850157 - protein, 860 aa, Homo sapiens
MSRGGSYPHLLWDVRKRSLGLEDPSRLRSRYLGRREFIQRLKLEATLNVHDGCVNTICWNDTGEYILSGSDDTKLVISNPYSRKVLTTIRSGHRANIFSAKFLPCTNDKQIVSCSGDGVIFYTNVEQDAETNRQCQFTCHYGTTYEIMTVPNDPYTFLSCGEDGTVRWFDTRIKTSCTKEDCKDDILINCRRAATSVAICPPIPYYLAVGCSDSSVRIYDRRMLGTRATGNYAGRGTTGMVARFIPSHLNNKSCRVTSLCYSEDGQEILVSYSSDYIYLFDPKDDTARELKTPSAEERREELRQPPVKRLRLRGDWSDTGPRARPESERERDGEQSPNVSLMQRMSDMLSRWFEEASEVAQSNRGRGRSRPRGGTSQSDISTLPTVPSSPDLEVSETAMEVDTPAEQFLQPSTSSTMSAQAHSTSSPTESPHSTPLLSSPDSEQRQSVEASGHHTHHQSDNNNEKLSPKPGTGEPVLSLHYSTEGTTTSTIKLNFTDEWSSIASSSRGIGSHCKSEGQEESFVPQSSVQPPEGDSETKAPEESSEDVTKYQEGVSAENPVENHINITQSDKFTAKPLDSNSGERNDLNLDRSCGVPEESASSEKAKEPETSDQTSTESATNENNTNPEPQFQTEATGPSAHEETSTRDSALQDTDDSDDDPVLIPGARYRAGPGDRRSAVARIQEFFRRRKERKEMEELDTLNIRRPLVKMVYKGHRNSRTMIKEANFWGANFVMSGSDCGHIFIWDRHTAEHLMLLEADNHVVNCLQPHPFDPILASSGIDYDIKIWSPLEESRIFNRKLADEVITRNELMLEETRNTITVPASFMLRMLASLNHIRADRLEGDRSEGSGQENENEDEE

SEQ ID NO: 850158 - protein, 364 aa, Homo sapiens; identical to SEQ ID NO: 850149

SEQ ID NO: 850159 - protein, 685 aa, Homo sapiens
MSRGGSYPHLLWDVRKRSLGLEDPSRLRSRYLGRREFIQRLKLEATLNVHDGCVNTICWNDTGEYILSGSDDTKLVISNPYSRKVLTTIRSGHRANIFSAKFLPCTNDKQIVSCSGDGVIFYTNVEQDAETNRQCQFTCHYGTTYEIMTVPNDPYTFLSCGEDGTVRWFDTRIKTSCTKEDCKDDILINCRRAATSVAICPPIPYYLAVGCSDSSVRIYDRRMLGTRATGNYAGRGTTGMVARFIPSHLNNKSCRVTSLCYSEDGQEILVSYSSDYIYLFDPKDDTARELKTPSAEERREELRQPPVKRLRLRGDWSDTGPRARPESERERDGEQSPNVSLMQRMSDMLSRWFEEASEVAQSNRGRGRSRPRGGTSQSDISTLPTVPSSPDLEVSETAMEVDTPAEQFLQPSTSSTMSAQAHSTSSPTESPHSTPLLSSPDSEQRQSVEASGHHTHHQSDNNNEKLSPKPGTGEPVLSLHYSTEGTTTSTIKLNFTDEWSSIASSSRGIGSHCKSEGQEESFVPQSSVQPPEGDSETKAPEESSEDVTKYQEGVSAENPVENHINITQSDKFTAKPLDSNSGERNDLNLDRSCGVPEESASSEKAKEPETSDQTSTESATNENNTNPEPQFQTEATGPSAHEETSTRDSALQDTDDSDDDALLLPVFRSSSDGEKKGKKWKNWIL

SEQ ID NO: 850160 - protein, 561 aa, Homo sapiens
MSRGGSYPHLLWDVRKRSLGLEDPSRLRSRYLGRREFIQRLKLEATLNVHDGCVNTICWNDTGEYILSGSDDTKLVISNPYSRKVLTTIRSGHRANIFSAKFLPCTNDKQIVSCSGDGVIFYTNVEQDAETNRQCQFTCHYGTTYEIMTVPNDPYTFLSCGEDGTVRWFDTRIKTSCTKEDCKDDILINCRRAATSVAICPPIPYYLAVGCSDSSVRIYDRRMLGTRATGNYAGRGTTGMVARFIPSHLNNKSCRVTSLCYSEDGQEILVSYSSDYIYLFDPKDDTARELKTPSAEERREELRQPPVKRLRLRGDWSDTGPRARPESERERDGEQSPNVSLMQRMSDMLSRWFEEASEVAQSNRGRGRSRPRGGTSQSDISTLPTVPSSPDLEVSETAMEVDTPAEQFLQPSTSSTMSAQAHSTSSPTESPHSTPLLSSPDSEQRQSVEASGHHTHHQSDNNNEKLSPKPGTGEPVLSLHYSTEGTTTSTIKLNFTDEWSSIASSSRGIGSHCKSEGQEESFVPQSSVQPPEGDSETKLLKNHQRMRHYQGVSASCSELMT

SEQ ID NO: 850161 - protein, 414 aa, Homo sapiens
KNSARVRRGFSSEVLTTIRSGHRANIFSAKFLPCTNDKQIVSCSGDGVIFYTNVEQDAETNRQCQFTCHYGTTYEIMTVPNDPYTFLSCGEDGTVRWFDTRIKTSCTKEDCKDDILINCRRAATSVAICPPIPYYLAVGCSDSSVRIYDRRMLGTRATGNYAGRGTTGMVARFIPSHLNNKSCRVTSLCYSEDGQEILVSYSSDYIYLFDPKDDTARELKTPSAEERREELRQPPVKRLRLRGDWSDTGPRARPESERERDGEQSPNVSLMQRMSDMLSRWFEEASEVAQSNRGRGRSRPRGGTSQSDISTLPTVPSSPDLEVSETAMEVDTPAEQFLQPSTSSTMSAQAHSTSSPTESPHSTPLLSSPDSEQRQSVEASGHHTHHQSVLLLLWLTNSSDPCHLTSNRITIMKS

SEQ ID NO: 850162 - protein, 880 aa, Homo sapiens; identical to SEQ ID NO: 850155

SEQ ID NO: 850163 - protein, 882 aa, Homo sapiens
AEFRAGASPSQAPCACCQPPPLLGFSRRAGPWAEGRREFIQRLKLEATLNVHDGCVNTICWNDTGEYILSGSDDTKLVISNPYSRKVLTTIRSGHRANIFSAKFLPCTNDKQIVSCSGDGVIFYTNVEQDAETNRQCQFTCHYGTTYEIMTVPNDPYTFLSCGEDGTVRWFDTRIKTSCTKEDCKDDILINCRRAATSVAICPPIPYYLAVGCSDSSVRIYDRRMLGTRATGNYAGRGTTGMVARFIPSHLNNKSCRVTSLCYSEDGQEILVSYSSDYIYLFDPKDDTARELKTPSAEERREELRQPPVKRLRLRGDWSDTGPRARPESERERDGEQSPNVSLMQRMSDMLSRWFEEASEVAQSNRGRGRSRPRGGTSQSDISTLPTVPSSPDLEVSETAMEVDTPAEQFLQPSTSSTMSAQAHSTSSPTESPHSTPLLSSPDSEQRQSVEASGHHTHHQSDSPSSVVNKQLGSMSLDEQQDNNNEKLSPKPGTGEPVLSLHYSTEGTTTSTIKLNFTDEWSSIASSSRGIGSHCKSEGQEESFVPQSSVQPPEGDSETKAPEESSEDVTKYQEGVSAENPVENHINITQSDKFTAKPLDSNSGERNDLNLDRSCGVPEESASSEKAKEPETSDQTSTESATNENNTNPEPQFQTEATGPSAHEETSTRDSALQDTDDSDDDPVLIPGARYRAGPGDRRSAVARIQEFFRRRKERKEMEELDTLNIRRPLVKMVYKGHRNSRTMIKEANFWGANFVMSGSDCGHIFIWDRHTAEHLMLLEADNHVVNCLQPHPFDPILASSGIDYDIKIWSPLEESRIFNRKLADEVITRNELMLEETRNTITVPASFMLRMLASLNHIRADRLEGDRSEGSGQENENEDEE

SEQ ID NO: 850164 - protein, 860 aa, Homo sapiens; identical to SEQ ID NO: 850157

SEQ ID NO: 850165 - protein, 462 aa, Homo sapiens
MSRGGSYPHLLWDVRKRSLGLEDPSRLRSRYLGRREFIQRLKLEATLNVHDGCVNTICWNDTGEYILSGSDDTKLVISNPYSRKVLTTIRSGHRANIFSAKFLPCTNDKQIVSCSGDGVIFYTNVEQDAETNRQCQFTCHYGTTYEIMTVPNDPYTFLSCGEDGTVRWFDTRIKTSCTKEDCKDDILINCRRAATSVAICPPIPYYLAVGCSDSSVRIYDRRMLGTRATGNYAGRGTTGMVARFIPSHLNNKSCRVTSLCYSEDGQEILVSYSSDYIYLFDPKDDTARELKTPSAEERREELRQPPVKRLRLRGDWSDTGPRARPESERERDGEQSPNVSLMQRMSDMLSRWFEEASEVAQSNRGRGRSRPRGGTSQSDISTLPTVPSSPDLEVSETAMEVDTPAEQFLQPSTSSTMSAQAHSTSSPTESPHSTPLLSSPDSEQRQSVEASGHHTHHQSGAV

SEQ ID NO: 850166 - protein, 408 aa, Homo sapiens [sequence omitted]

SEQ ID NO: 850167 - protein, 860 aa, Homo sapiens; identical to SEQ ID NO: 850157

SEQ ID NO: 850168 - protein, 305 aa, Homo sapiens
TTCYIQLYFLTAQSDKFTAKPLDSNSGERNDLNLDRSCGVPEESASSEKAKEPETSDQTSTESATNENNTNPEPQFQTEATGPSAHEETSTRDSALQDTDDSDDDPVLIPGARYRAGPGDRRSAVARIQEFFRRRKERKEMEELDTLNIRRPLVKMVYKGHRNSRTMIKEANFWGANFVMSGSDCGHIFIWDRHTAEHLMLLEADNHVVNCLQPHPFDPILASSGIDYDIKIWSPLEESRIFNRKLADEVITRNELMLEETRNTITVPASFMLRMLASLNHIRADRLEGDRSEGSGQENENEDEE

SEQ ID NO: 850169 - protein, 731 aa, Homo sapiens
MSRGGSYPHLLWDVRKRSLGLEDPSRLRSRYLGRREFIQRLKLEATLNVHDGCVNTICWNDTGEYILSGSDDTKLVISNPYSRKVLTTIRSGHRANIFSAKFLPCTNDKQIVSCSGDGVIFYTNVEQDAETNRQCQFTCHYGTTYEIMTVPNDPYTFLSCGEDGTVRWFDTRIKTSCTKEDCKDDILINCRRAATSVAICPPIPYYLAVGCSDSSVRIYDRRMLGTRATGNYAGRGTTGMVARFIPSHLNNKSCRVTSLCYSEDGQEILVSYSSDYIYLFDPKDDTARELKTPSAEERREELRQPPVKRLRLRGDWSDTGPRARPESERERDGEQSPNVSLMQRMSDMLSRWFEEASEVAQSNRGRGRSRPRGGTSQSDISTLPTVPSSPDLEVSETAMEVDTPAEQFLQPSTSSTMSAQAHSTSSPTESPHSTPLLSSPDSEQRQSVEASGHHTHHQSDNNNEKLSPKPGTGEPVLSLHYSTEGTTTSTIKLNFTDEWSSIASSSRGIGSHCKSEGQEESFVPQSSVQPPEGDSETKAPEESSEDVTKYQEGVSAENPVENHINITQSDKFTAKPLDSNSGERNDLNLDRSCGVPEESASSEKAKEPETSDQTSTESATNENNTNPEPQFQTEATGPSAHEETSTRDSALQDTDDSDDDPVLIPGARYRAGPGDRRSAVARIQEFFRRRKERKEMEELDTLNIRRPLVKMVYKGHRNSRTMVPNVHGIFW

SEQ ID NO: 850170 - protein, 680 aa, Homo sapiens
MSRGGSYPHLLWDVRKRSLGLEDPSRLRSRYLGRREFIQRLKLEATLNVHDGCVNTICWNDTGEYILSGSDDTKLVISNPYSRKVLTTIRSGHRANIFSAKFLPCTNDKQIVSCSGDGVIFYTNVEQDAETNRQCQFTCHYGTTYEIMTVPNDPYTFLSCGEDGTVRWFDTRIKTSCTKEDCKDDILINCRRAATSVAICPPIPYYLAVGCSDSSVRIYDRRMLGTRATGNYAGRGTTGMVARFIPSHLNNKSCRVTSLCYSEDGQEILVSYSSDYIYLFDPKDDTARELKTPSAEERREELRQPPVKRLRLRGDWSDTGPRARPESERERDGEQSPNVSLMQRMSDMLSRWFEEASEVAQSNRGRGRSRPRGGTSQSDISTLPTVPSSPDLEVSETAMEVDTPAEQFLQPSTSSTMSAQAHSTSSPTESPHSTPLLSSPDSEQRQSVEASGHHTHHQSDNNNEKLSPKPGTGEPVLSLHYSTEGTTTSTIKLNFTDEWSSIASSSRGIGSHCKSEGQEESFVPQSSVQPPEGDSETKAPEESSEDVTKYQEGVSAENPVENHINITQSDKFTAKPLDSNSGERNDLNLDRSCGVPEESASSEKAKEPETSDQTSTESATNENNTNPEPQFQTEATGPSAHEETSTRDSALQDTDDSDDDPVLIPGARYRAGPGDRLVNF

SEQ ID NO: 850171 - protein, 529 aa, Homo sapiens
MSRGGSYPHLLWDVRKRSLGLEDPSRLRSRYLGRREFIQRLKLEATLNVHDGCVNTICWNDTGEYILSGSDDTKLVISNPYSRKVLTTIRSGHRANIFSAKFLPCTNDKQIVSCSGDGVIFYTNVEQDAETNRQCQFTCHYGTTYEIMTVPNDPYTFLSCGEDGTVRWFDTRIKTSCTKEDCKDDILINCRRAATSVAICPPIPYYLAVGCSDSSVRIYDRRMLGTRATGNYAGRGTTGMVARFIPSHLNNKSCRVTSLCYSEDGQEILVSYSSDYIYLFDPKDDTARELKTPSAEERREELRQPPVKRLRLRGDWSDTGPRARPESERERDGEQSPNVSLMQRMSDMLSRWFEEASEVAQSNRGRGRSRPRGGTSQSDISTLPTVPSSPDLEVSETAMEVDTPAEQFLQPSTSSTMSAQAHSTSSPTESPHSTPLLSSPDSEQRQSVEASGHHTHHQSEFLRGPEIALLRKRLQQLRLKKAEQQRQQELAAHTQQQPSTSDQSSHEGSSQDPHASGPLKSWVAGSCSE

SEQ ID NO: 850172 - protein, 102 aa, Homo sapiens [sequence omitted]

SEQ ID NO: 850173 - protein, 496 aa, Homo sapiens
MRVLSGTSLMLCSLLLLLQALCSPGLAPQSRGHLCRTRPTDLVFVVDSSRSVRPVEFEKVKVFLSQVIESLDVGPNATRVGMVNYASTVKQEFSLRAHVSKAALLQAVRRIQPLSTGTMTGLAIQFAITKAFGDAEGGRSRSPDISKVVIVVTDGRPQDSVQDVSARARASGVELFAIGVGSVDKATLRQIASEPQDEHVDYVESYSVIEKLSRKFQEAFCVVSDLCATGDHDCEQVCISSPGSYTCACHEGFTLNSDGKTCNVCSGGGGSSATDLVFLIDGSKSVRPENFELVKKFISQIVDTLDVSDKLAQVGLVQYSSSVRQEFPLGRFHTKKDIKAAVRNMSYMEKGTMTGAALKYLIDNSFTVSSGARPGAQKVGIVFTDGRSQDYINDAAKKAKDLGFKMFAVGVGNAVEDELREIASEPVAEHYFYTADFKTINQIGKKLQKKICVEEDPCACESLVKFQAKVEGLLQALTRKLEAVSKRLAILENTVV

SEQ ID NO: 850174 - protein, 444 aa, Homo sapiens
MALTLETPIWRWGITSLRASQSCLPEGGEQMESPPATSLSQRKRVSSSASRVLFPRVPPGCATRQSSRLSGPQPPLLDSPVGFREPGVTPPRVSQVVIVVTDGRPQDSVQDVSARARASGVELFAIGVGSVDKATLRQIASEPQDEHVDYVESYSVIEKLSRKFQEAFCVVSDLCATGDHDCEQVCISSPGSYTCACHEGFTLNSDGKTCNVCSGGGGSSATDLVFLIDGSKSVRPENFELVKKFISQIVDTLDVSDKLAQVGLVQYSSSVRQEFPLGRFHTKKDIKAAVRNMSYMEKGTMTGAALKYLIDNSFTVSSGARPGAQKVGIVFTDGRSQDYINDAAKKAKDLGFKMFAVGVGNAVEDELREIASEPVAEHYFYTADFKTINQIGKKLQKKICVEEDPCACESLVKFQAKVEGLLQALTRKLEAVSKRLAILENTVV

SEQ ID NO: 850175 - protein, 1068 aa, Homo sapiens
LSAGRVLAMASALNSKINPPGTCQGSKADGGAGWRMDCDPQMHVKMCKKIAQLTKVIYALNTRQDEAEASMEALREAHQEELQNAVAETKARLLQEQGCAEEEALLQRIQALESALELQKRLTEEALAESASCRLETKERELRVEAEHAERVLTLSREMLELKADYERRLQHLTSHEATPQGRLPQESPETKSEPGQGPEMQEVLLEVQRLRVENQQLSKDYARKAEELQATYERENEAIRQAMQQSVSQALWQWQEKESDLRKNFQVQESALQAQVRKLEGDLEHRGRKISDLKKYAQKLKERIQDLDVQLKEARQENSELKGTAKKLGEKLAVAKDRMMLQECRGTQQTDAMKTELVSENKVLREENDLEAGNLHPQQDQSCLKECPCMKGGTDMQTKKEASAETEYMKQQYEEDLRKIKHQTEEEKKHLKDQLVKRLEDLVKKHTVEIKSVRSSVEAERKKLQREVEAQLEEVRKKSEKEIKQLEEEKAALNVKLQNSLLEVLRLEEFIQQNKTRPTGAEESPQELGRQHCSILETQDPCLKLDETSPRGEEYQDKLAAEEGTSSDEEERTKVLLKEGSDPQPPLGSLLKEKTSKIQRLEEDWQSQKAKLQAQVSQMQQALEQCTSNYREDLQALKQLSDLEREKLQRELQETTQQNHAMKAQLEASHQRALRMLEKARHQELKATEERLKKESSHSLQIQHQTHRLELQALEEKARQELQEERERMQAQQALLLESLRQELSEQQAACSGHQKDLEALQAELRALGRQQASSQCPGDSKDHIIATEERGGPGQAGSPPGAAGQGSGEGCGLWEENAQLQDAVRRLRAEVEQHQQEAQKLRDQRRFLEETQQAQRAREVETLRQEHRKEMQAMVADFSSAQAQLQARLAALEAELKDSGEKPGKGASRPEDLQLIGRLQTRLKEREDIIKQLTEERRFHYAAFPSAMSHRNRSFSFNPHPGYLTPSMKKKKVEDVPSRVVSVPNLASYAKNFLSGDLSSRINAPPITTSPSLDPSPSCGRTYKPNQSTDAKTATRTPDGETAQAKEAQQKQGSPHQEWFTKYFSF

SEQ ID NO: 850176 - protein, 698 aa, Homo sapiens
MFTVLTLLSVHTDLSYLLTEQCDLTRLNNNFWGQNIFSVFGAGPEGGPQTNVNSMHCQIFAALNKTLNNWAIKMVDLYVIFHRKVKLDEDSLEIESSVHINLNHTILKKKKLITYNCQTYVLKVNLLPESKRGSNAFLNANKHLSPYINTPYCFSLPNIFCEFPAESVLVRSGCSNKISYLYWIIYKNRNMSLTVLEAKSKIKAPADMESGEGPFFRNGCLLRVLTWWKRQERLPEPLLKGTYPTHEGEALMTPLLPKSPTSEYYYIDIRFQHMNFGRDINIQDIAVNPVGLLFILCFQKDYIQVVLFLCVETLSQAALCISVLKLSMIPGQGENFTELRSYIGFDSFLAAGDLKRSFSLKFLNSTRNDYIFVNKIFACFHNFLLRPYALGIEVKAFKDTNLSFLFVITKLPFRKFLTIYTLTSSKCTYCALTLLTKKYNLIDKTFYFSLHNDSINLSTAERSRDDSDGVEVTVKMKRNIQFGIKLRERKKQYLMVNLFRLYYDRGGRVNMFLQQNWKEYYLFHMKANCFVIGVGKNGFTQSMAAHHIPEPLTALTLMYISNPTFVIEATWLIFLQDPSGFCRGGWQIKWNYDRDHLTVSVRFPRVALISTVTSPPPLGYSTVCLFLRRSLALSPKLGCSGAISAHCNLGLPGSSDSPASASRVAGTTGTRHQLINVFLVETGFHHVGQAGHELLTSK

SEQ ID NO: 850177 - protein, 1068 aa, Homo sapiens; identical to SEQ ID NO: 850175

SEQ ID NO: 850178 - protein, 90 aa, Homo sapiens
DPCLKLDETSPRGEEYQDKLAAEEGTSSDEEERYRRTCRLLSAPLNEDSDVEGFIHSFILSSSIYHCSLQHAWGGNKHILYVFSTAMGFT

SEQ ID NO: 850179 - protein, 184 aa, Homo sapiens [sequence omitted]

SEQ ID NO: 850180 - protein, 873 aa, Homo sapiens
VGGLLRLKHKRLEAELAAHEPAIQGVLDTGKKLSDDNTIGKEERIQDLDVQLKEARQENSELKGTAKKLGEKLAVAKDRMMLQECRGTQQTDAMKTELVSENKVLREENDLEAGNLHPQQDQSCLKECPCMKGGTDMQTKKEASAETEYMKQQYEEDLRKIKHQTEEEKKHLKDQLVKRLEDLVKKHTVEIKSVRSSVEAERKKLQREVEAQLEEVRKKSEKEIKQLEEEKAALNVKLQNSLLEVLRLEEFIQQNKTRPTGAEESPQELGRQHCSILETQDPCLKLDETSPRGEEYQDKLAAEEGTSSDEEERTKVLLKEGSDPQPPLGSLLKEKTSKIQRLEEDWQSQKAKLQAQVSQMQQALEQCTSNYREDLQALKQLSDLEREKLQRELQETTQQNHAMKAQLEASHQRALRMLEKARHQELKATEERLKKESSHSLQIQHQTHRLELQALEEKARQELQEERERMQAQQALLLESLRQELSEQQAACSGHQKDLEALQAELRALGRQQASSQCPGDSKDHIIATEERGGPGQAGSPPGAAGQGSGEGCGLWEENAQLQDAVRRLRAEVEQHQQEAQKLRDQRRFLEETQQAQRAREVETLRQEHRKEMQAMVADFSSAQAQLQARLAALEAELKDSGEKPGKGASRPEDLQLIGRLQTRLKEREDIIKQLTEERRFHYAAFPSAMSHRNRSFSFNPHPGYLTPSMKKKKVEDVPSRVVSVPNLASYAKNFLSGDLSSRINAPPITTSPSLDPSPSCGRTYKPNQSTDAKTATRFGGCWGQGPLFYFPVDKRGSRILSSTWYQIPEGLFSWMIRQGTLNHLPENFSMGYTKGGLHLAWRSEFKLQSSSFLALWPWTGHLTSPGLHIPCL

SEQ ID NO: 850181 - protein, 78 aa, Homo sapiens
VRSPTLMPTFMPSCSHFFPQATEERLKKESSHSLQIQHQTHRLELQALEEKARQELQEERERMQAQQALLLGIHPIVY

SEQ ID NO: 850182 - protein, 110 aa, Homo sapiens
MAAVVAKREGPPFISEAAVRGNAAVLDYCRTSVSALSGATAGILGLTGLYGFIFYLLASVLLSLLLILKAGRRWNKYFKSRRPLFTGGLIGGLFTYVLFWTFLYGMVHVY

SEQ ID NO: 850183 - protein, 110 aa, Homo sapiens; identical to SEQ ID NO: 850182

SEQ ID NO: 850184 - protein, 110 aa, Homo sapiens; identical to SEQ ID NO: 850182

SEQ ID NO: 850185 - protein, 110 aa, Homo sapiens; identical to SEQ ID NO: 850182

SEQ ID NO: 850186 - protein, 100 aa, Homo sapiens
MAAVVAKREGPPFISEAAVRGNAAVLDYCRTSVSALSGATAGILGLTGLYGFIFYLLASVLLSLLLILKAGRRWNKYFKSRRACNICSTPCSSFSRREGG

SEQ ID NO: 850187 - protein, 110 aa, Homo sapiens; identical to SEQ ID NO: 850182

SEQ ID NO: 850188 - protein, 110 aa, Homo sapiens; identical to SEQ ID NO: 850182

SEQ ID NO: 850189 - protein, 110 aa, Homo sapiens; identical to SEQ ID NO: 850182

SEQ ID NO: 850190 - protein, 939 aa, Homo sapiens
GRARADQRITESRQVVELAVKEHKAEILALQQALKEQKLKAESLSDKLNDLEKKHAMLEMNARSLQQKLETERELKQRLLEEQAKLQQQMDLQKNHIFRLTQGLQEALDRADLLKTERSDLEYQLENIQVLYSHEKVKMEGTISQQTKLIDFLQAKMDQPAKKKKVPLQYNELKLALEKEKARCAELEEALQKTRIELRSAREEAAHRKATDHPHPSTPATARQQIAMSAIVRSPEHQPSAMSLLAPPSSRRKESSTPEEFSRRLKERMHHNIPHRFNVGLNMRATKCAVCLDTVHFGRQASKCLECQVMCHPKCSTCLPATCGLPAEYATHFTEAFCRDKMNSPGLQTKEPSSSLHLEGWMKVPRNNKRGQQGWDRKYIVLEGSKVLIYDNEAREAGQRPVEEFELCLPDGDVSIHGAVGASELANTAKADVPYILKMESHPHTTCWPGRTLYLLAPSFPDKQRWVTALESVVAGGRVSREKAEADAKLLGNSLLKLEGDDRLDMNCTLPFSDQVVLVGTEEGLYALNVLKNSLTHVPGIGAVFQIYIIKDLEKLLMIAGEERALCLVDVKKVKQSLAQSHLPAQPDISPNIFEAVKGCHLFGAGKIENGLCICAAMPSKVVILRYNENLSKYCIRKEIETSEPCSCIHFTNYSILIGTNKFYEIDMKQYTLEEFLDKNDHSLAPAVFAASSNSFPVSIVQVNSAGQREEYLLCFHEFGVFVDSYGRRSRTDDLKWSRLPLAFAYREPYLFVTHFNSLEVIEIQARSSAGTPARAYLDIPNPRYLGPAISSGAIYLASSYQDKLRVICCKGNLVKESGTEHHRGPSTSRSSPNKRGPPTYNEHITKRVASSPAPPEGPSHPREPSTPHRYREGRTELRRDKSPGRPLEREKSPGRMLSTRRERSPGRLFEDSSRGRLPAGAVRTPLSQVNKVWDQSSV

SEQ ID NO: 850191 - protein, 999 aa, Homo sapiens
GAEQIADLGVRRAASGEMLKFKYGARNPLDAGAAEPIASRASRLNLFFQGKPPFMTQQQMSPLSREGILDALFVLFEECSQPALMKIKHVSNFVRKYSDTIAELQELQPSAKDFEVRSLVGCGHFAEVQVVREKATGDIYAMKVMKKKALLAQEQVSFFEEERNILSRSTSPWIPQLQYAFQDKNHLYLVLYSHEKVKMEGTISQQTKLIDFLQAKMDQPAKKKKVPLQYNELKLALEKEKARCAELEEALQKTRIELRSAREEAAHRKATDHPHPSTPATARQQIAMSAIVRSPEHQPSAMSLLAPPSSRRKESSTPEEFSRRLKERMHHNIPHRFNVGLNMRATKCAVCLDTVHFGRQASKCLECQVMCHPKCSTCLPATCGLPAEYATHFTEAFCRDKMNSPGLQTKEPSSSLHLEGWMKVPRNNKRGQQGWDRKYIVLEGSKVLIYDNEAREAGQRPVEEFELCLPDGDVSIHGAVGASELANTAKADVPYILKMESHPHTTCWPGRTLYLLAPSFPDKQRWVTALESVVAGGRVSREKAEADAKLLGNSLLKLEGDDRLDMNCTLPFSDQVVLVGTEEGLYALNVLKNSLTHVPGIGAVFQIYIIKDLEKLLMIAGEERALCLVDVKKVKQSLAQSHLPAQPDISPNIFEAVKGCHLFGAGKIENGLCICAAMPSKVVILRYNENLSKYCIRKEIETSEPCSCIHFTNYSILIGTNKFYEIDMKQYTLEEFLDKNDHSLAPAVFAASSNSFPVSIVQVNSAGQREEYLLCFHEFGVFVDSYGRRSRTDDLKWSRLPLAFAYREPYLFVTHFNSLEVIEIQARSSAGTPARAYLDIPNPRYLGPAISSGAIYLASSYQDKLRVICCKGNLVKESGTEHHRGPSTSRSSPNKRGPPTYNEHITKRVASSPAPPEGPSHPREPSTPHRYREGRTELRRDKSPGRPLEREKSPGRMLSTRRERSPGRLFEDSSRGRLPAGAVRTPLSQVNKVWDQSSV

SEQ ID NO: 850192 - protein, 981 aa, Homo sapiens
GAEQIADLGVRRAASGEMLKFKYGARNPLDAGAAEPIASRASRLNLFFQGKPPFMTQQQMSPLSREGILDALFVLFEECSQPALMKIKHVSNFVRKYSDTIAELQELQPSAKDFEVRSLVGCGHFAEVQVVREKATGDIYAMKVMKKKALLAQEQVSFFEEERNILSRSTSPWIPQLQYAFQDKNHLYLVLYSHEKVKMEGTISQQTKLIDFLQAKMDQPAKKKKVPLQYNELKLALEKEKARCAELEEALQKTRIELRSAREEAAHRKATDHPHPSTPATARQQIAMSAIVRSPEHQPSAMSLLAPPSSRRKESSTPEEFSRRLKERMHHNIPHRFNVGLNMRATKCAVCLDTVHFGRQASKCLECQVMCHPKCSTCLPATCGLPAEYATHFTEAFCRDKMNSPGLQTKEPSSSLHLEGWMKVPRNNKRGQQGWDRKYIVLEGSKVLIYDNEAREAGQRPVEEFELCLPDGDVSIHGAVGASELANTAKADVPYILKMESHPHTTCWPGRTLYLLAPSFPDKQRWVTALESVVAGGRVSREKAEADAKLLGNSLLKLEGDDRLDMNCTLPFSDQVVLVGTEEGLYALNVLKNSLTHVPGIGAVFQIYIIKDLEKLLMIAGEERALCLVDVKKVKQSLAQSHLPAQPDISPNIFEAVKGCHLFGAGKIENGLCICAAMPSKVVILRYNDCIHFTNYSILIGTNKFYEIDMKQYTLEEFLDKNDHSLAPAVFAASSNSFPVSIVQVNSAGQREEYLLCFHEFGVFVDSYGRRSRTDDLKWSRLPLAFAYREPYLFVTHFNSLEVIEIQARSSAGTPARAYLDIPNPRYLGPAISSGAIYLASSYQDKLRVICCKGNLVKESGTEHHRGPSTSRSSPNKRGPPTYNEHITKRVASSPAPPEGPSHPREPSTPHRYREGRTELRRDKSPGRPLEREKSPGRMLSTRRERSPGRLFEDSSRGRLPAGAVRTPLSQVNKVWDQSSV

SEQ ID NO: 850193 - protein, 784 aa, Homo sapiens
GAEQIADLGVRRAASGEMLKFKYGARNPLDAGAAEPIASRASRLNLFFQGKPPFMTQQQMSPLSREGILDALFVLFEECSQPALMKIKHVSNFVRKYSDTIAELQELQPSAKDFEVRSLVGCGHFAEVQVVREKATGDIYAMKVMKKKALLAQEQVSFFEEERNILSRSTSPWIPQLQYAFQDKNHLYLVLYSHEKVKMEGTISQQTKLIDFLQAKMDQPAKKKKVPLQYNELKLALEKEKARCAELEEALQKTRIELRSAREEAAHRKATDHPHPSTPATARQQIAMSAIVRSPEHQPSAMSLLAPPSSRRKESSTPEEFSRRLKERMHHNIPHRFNVGLNMRATKCAVCLDTVHFGRQASKCLECQVMCHPKCSTCLPATCGLPAEYATHFTEAFCRDKMNSPGLQTKEPSSSLHLEGWMKVPRNNKRGQQGWDRKYIVLEGSKVLIYDNEAREAGQRPVEEFELCLPDGDVSIHGAVGASELANTAKADVPYILKMESHPHTTCWPGRTLYLLAPSFPDKQRWVTALESVVAGGRVSREKAEADAKLLGNSLLKLEGDDRLDMNCTLPFSDQVVLVGTEEGLYALNVLKNSLTHVPGIGAVFQIYIIKDLEKLLMIAGEERALCLVDVKKVKQSLAQSHLPAQPDISPNIFEAVKGCHLFGAGKIENGLCICAAMPSKVVILRYNENLSKYCIRKEIETSEPCSCIHFTNYSILIGTNKFYEIDMKQYTLEEFLDNTFARDNTFARDNTFARDNTFARDNTFARDNTFARDNTFARDNTFA

SEQ ID NO: 850194 - protein, 563 aa, Homo sapiens
GAEQIADLGVRRAASGEMLKFKYGARNPLDAGAAEPIASRASRLNLFFQGKPPFMTQQQMSPLSREGILDALFVLFEECSQPALMKIKHVSNFVRKYSDTIAELQELQPSAKDFEVRSLVGCGHFAEVQVVREKATGDIYAMKVMKKKALLAQEQVSFFEEERNILSRSTSPWIPQLQYAFQDKNHLYLVLYSHEKVKMEGTISQQTKLIDFLQAKMDQPAKKKKVPLQYNELKLALEKEKARCAELEEALQKTRIELRSAREEAAHRKATDHPHPSTPATARQQIAMSAIVRSPEHQPSAMSLLAPPSSRRKESSTPEEFSRRLKERMHHNIPHRFNVGLNMRATKCAVCLDTVHFGRQASKCLECQVMCHPKCSTCLPATCGLPAEYATHFTEAFCRDKMNSPGLQTKEPSSSLHLEGWMKVPRNNKRGQQGWDRKYIVLEGSKVLIYDNEAREAGQRPVEEFELCLPDGDVSIHGAVGASELANTAKADVPYILKMESHPHTTCWPGRTLYLLAPSFPDKQRWVTALESVVAGGRVSREKAEADAVSMKAGPGGCLCKGG

SEQ ID NO: 850195 - protein, 898 aa, Homo sapiens
MLEMNARSLQQKLETERELKQRLLEEQAKLQQQMDLQKNHIFRLTQGLQEALDRADLLKTERSDLEYQLENIQVLYSHEKVKMEGTISQQTKLIDFLQAKMDQPAKKKKGLFSRRKEDPALPTQVPLQYNELKLALEKEKARCAELEEALQKTRIELRSAREEAAHRKATDHPHPSTPATARQQIAMSAIVRSPEHQPSAMSLLAPPSSRRKESSTPEEFSRRLKERMHHNIPHRFNVGLNMRATKCAVCLDTVHFGRQASKCLECQVMCHPKCSTCLPATCGLPAEYATHFTEAFCRDKMNSPGLQTKEPSSSLHLEGWMKVPRNNKRGQQGWDRKYIVLEGSKVLIYDNEAREAGQRPVEEFELCLPDGDVSIHGAVGASELANTAKADVPYILKMESHPHTTCWPGRTLYLLAPSFPDKQRWVTALESVVAGGRVSREKAEADAKLLGNSLLKLEGDDRLDMNCTLPFSDQVVLVGTEEGLYALNVLKNSLTHVPGIGAVFQIYIIKDLEKLLMIAGEERALCLVDVKKVKQSLAQSHLPAQPDISPNIFEAVKGCHLFGAGKIENGLCICAAMPSKVVILRYNENLSKYCIRKEIETSEPCSCIHFTNYSILIGTNKFYEIDMKQYTLEEFLDKNDHSLAPAVFAASSNSFPVSIVQVNSAGQREEYLLCFHEFGVFVDSYGRRSRTDDLKWSRLPLAFAYREPYLFVTHFNSLEVIEIQARSSAGTPARAYLDIPNPRYLGPAISSGAIYLASSYQDKLRVICCKGNLVKESGTEHHRGPSTSRSSPNKRGPPTYNEHITKRVASSPAPPEGPSHPREPSTPHRYREGRTELRRDKSPGRPLEREKSPGRMLSTRRERSPGRLFEDSSRGRLPAGAVRTPLSQVNKVWDQSSV

SEQ ID NO: 850196 - protein, 67 aa, Homo sapiens
  misc_feature (18)..(18): Xaa can be any naturally occurring amino acid
SPVLGNILIGDRLHNIRXSDEQVGSKVDPFPPQQVNMTVFSTVSTVQIPFQIATWPASQLLPARVLT

SEQ ID NO: 850197 - protein, 206 aa, Homo sapiens
GAEQIADLGVRRAASGEMLKFKYGARNPLDAGAAEPIASRASRLNLFFQGKPPFMTQQQMSPLSREGILDALFVLFEECSQPALMKIKHVSNFVRKYSDTIAELQELQPSAKDFEVRSLVGCGHFAEVQVVREKATGDIYAMKVMKKKALLAQEQVSFFEEERNILSRSTSPWIPQLQYAFQDKNHLYLVMEYQPGGDLLSLLNRY

SEQ ID NO: 850198 - protein, 222 aa, Homo sapiens
MCLRLGGLSVGDFRKVLMKTGLVLVVLGHVSFITAALFHGTVLRYVGTPQDAVALQYCVVNILSVTSAIVVITSGIAAIVLSRYLPSTPLRWTVFSSSVACALLSLTCALGLLASIAMTFATQGKALLAACTFGSSELLALAPDCPFDPTRIYSSSLCLWGIALVLCVAENVFAVRCAQLTHQLLELRPWWGKSSHHMMRENPELVEGRDLLSCTSSEPLTL

SEQ ID NO: 850199 - protein, 222 aa, Homo sapiens; identical to SEQ ID NO: 850198

SEQ ID NO: 850200 - protein, 222 aa, Homo sapiens; identical to SEQ ID NO: 850198

SEQ ID NO: 850201 - protein, 189 aa, Homo sapiens
MCLRLGGLSVGDFRKVLMKTGLVLVVLGHVSFITAALFHGTVLRYVGTPQDAVALQYCVVNILSVTSAIVVITSGIAAIVLSRYLPSTPLGKALLAACTFGSSELLALAPDCPFDPTRIYSSSLCLWGIALVLCVAENVFAVRCAQLTHQLLELRPWWGKSSHHMMRENPELVEGRDLLSCTSSEPLTL

SEQ ID NO: 850202 - protein, 202 aa, Homo sapiens
MCLRLGGLSVGDFRKVLMKTGLVLVVLGHVSFITAALFHGTVLRYVGTPQDAVALQYCVVNILSVTSAIVRWTVFSSSVACALLSLTCALGLLASIAMTFATQGKALLAACTFGSSELLALAPDCPFDPTRIYSSSLCLWGIALVLCVAENVFAVRCAQLTHQLLELRPWWGKSSHHMMRENPELVEGRDLLSCTSSEPLTL

SEQ ID NO: 850203 - protein, 169 aa, Homo sapiens
MCLRLGGLSVGDFRKVLMKTGLVLVVLGHVSFITAALFHGTVLRYVGTPQDAVALQYCVVNILSVTSAIVGKALLAACTFGSSELLALAPDCPFDPTRIYSSSLCLWGIALVLCVAENVFAVRCAQLTHQLLELRPWWGKSSHHMMRENPELVEGRDLLSCTSSEPLTL

SEQ ID NO: 850204 - protein, 260 aa, Homo sapiens
MCLRLGGLSVGDFRKVLMKTGLVLVVLGHVSFITAALFHGTVLRYVGTPQDAVALQYCVVNILSVTSAIVVITSGIAAIVLSRYLPSTPLRWTVFSSSVACALLSLTCALGLLASIAMTFATQGKALLAACTFGSSELLALAPDCPFDPTRIYVVPRPGVGAPGPRTGGKGSWNPPSTPNSSQPSLPHAPQSSSLCLWGIALVLCVAENVFAVRCAQLTHQLLELRPWWGKSSHHMMRENPELVEGRDLLSCTSSEPLTL

SEQ ID NO: 850205 - protein, 105 aa, Homo sapiens [sequence omitted]

SEQ ID NO: 850206 - protein, 136 aa, Homo sapiens
GSKSFRNTFRTQCPSLGPGPQLPLLPSRISPTHSPDKLSPTGGLSVGDFRKVLMKTGLVLVVLGHVSFITAALFHGTVLRYVGTPQDAVALQYCVVNILSVTSAIVVWPGWEGGWWEEAGGGLKGLQQVPTQSLWW

SEQ ID NO: 850207 - protein, 222 aa, Homo sapiens; identical to SEQ ID NO: 850198

SEQ ID NO: 850208 - protein, 222 aa, Homo sapiens; identical to SEQ ID NO: 850198

SEQ ID NO: 850209 - protein, 105 aa, Homo sapiens
MTFATQGKALLAACTFGSSELLALAPDCPFDPTRIYSSSLCLWGIALVLCVAENVFAVRCAQLTHQLLELRPWWGKSSHHMMRENPELVEGRDLLSCTSSEPLTL

SEQ ID NO: 850210 - protein, 222 aa, Homo sapiens; identical to SEQ ID NO: 850198

SEQ ID NO: 850211 - protein, 177 aa, Homo sapiens
MCLRLGGLSVGDFRKVLMKTGLVLVVLGHVSFITAALFHGTVLRYRWTVFSSSVACALLSLTCALGLLASIAMTFATQGKALLAACTFGSSELLALAPDCPFDPTRIYSSSLCLWGIALVLCVAENVFAVRCAQLTHQLLELRPWWGKSSHHMMRENPELVEGRDLLSCTSSEPLTL

SEQ ID NO: 850212 - protein, 136 aa, Homo sapiens
MCLRLGGLSVGDFRKVLMKTGLVLVVLGHVSFITAALFHGTVLRYVGTPQDAVALQYCVVNILSVTSAIVVITSGIAAIVLSRYLPSTPLGKALLAACTFGSSELLALAPAAGAEALVGEKQPPHDAGEPRAGGGP

SEQ ID NO: 850213 - protein, 373 aa, Homo sapiens
MPRGWTALCLLSLLPSGFMSLDNNGTATPELPTQGTFSNVSTNVSYQETTTPSTLGSTSLHPVSQHGNEATTNITETTVKFTSTSVITSVYGNTNSSVQSQTSVISTVFTTPANVSTPETTLKPSLSPGNVSDLSTTSTSLATSPTKPYTSSSPILSDIKAEIKCSGIREVKLTQGICLEQNKTSSCAEFKKDRGEGLARVLCGEEQADADAGAQVCSLLLAQSEVRPQCLLLVLANRTEISSKLQLMKKHQSDLKKLGILDFTEQDVASHQSYSQKTLIALVTSGALLAVLGITGYFLMNRRSWSPTGERLGEDPYYTENGGGQGYSSGPGTSPEAQGKASVNRGAQENGTGQATSRNGHSARQHVVADTEL

SEQ ID NO: 850214 - protein, 316 aa, Homo sapiens
MPRGWTALCLLSLLPSGFMSLDNNGTATPELPTQGTFSNVSTNVSYQETTTPSTLGSTSLHPVSQHGNEATTNITETTVKFTSTSVITSVYGNTNSSVQSQTSVISTVFTTPANVSTPETTLKPSLSPGNVSDLSTTSTSLATSPTKPYTSSSPILSDIKAEIKCSGIREVKLTQGICLEQNKTSSCAEFKKDRGEGLARVLCGEEQADADAGAQVCSLLLAQSEVRPQCLLLVLANRTEISSKLQLMKKHQSDLKKLGILDFTEQDVASHQSYSQKTLIALVTSGALLAVLGITGYFLMNRRSWSPTGERLELEP

SEQ ID NO: 850215 - protein, 373 aa, Homo sapiens; identical to SEQ ID NO: 850213

SEQ ID NO: 850216 - protein, 373 aa, Homo sapiens; identical to SEQ ID NO: 850213

SEQ ID NO: 850217 - protein, 336 aa, Homo sapiens
MPRGWTALCLLSLLPSGFMSLDNNGTATPELPTQGTFSNVSTNVSYQETTTPSTLGSTSLHPVSQHGNEATTNITETTVKFTSTSVITSVYGNTNSSVQSQTSVISTVFTTPANVSTPETTLKPSLSPGNVSDLSTTSTSLATSPTKPYTSSSPILSDIKAEIKCSGIREVKLTQGICLEQNKTSSCAEFKKDRGEGLARVLCGEEQADADAGAQVCSLLLAQSEVRPQCLLLVLANRTEISSKLQLMKKHQSDLKKLGILDFTEQDVASHQSYSQKTLIALVTSGALLAVLGITGYFLMNRRSWSPTGERLDAASLPKAPIEEASSHHSIIHQVL

SEQ ID NO: 850218 - protein, 48 aa, Homo sapiens
MLKQRLRPRGQEPVAHHRKSESRHSHTRDVSADVKLLPLMHQDVDFLF

SEQ ID NO: 850219 - protein, 1025 aa, Homo sapiens
DGLSTGACQALAEVHAPLGGPRPRLCALAAEGHFLGHSWTGSRAGAHTGAPAWPSRRLRDLPAGGMWRLRRAAVACEVCQSLVKHSSGIKGSLPLQKLHLVSRSIYHSHHPTLKLQRPQLRTSFQQFSSLTNLPLRKLKFSPIKYGYQPRRNFWPARLATRLLKLRYLILGSAVGGGYTAKKTFDQWKDMIPDLSEYKWIVPDIVWEIDEYIDFEKIRKALPSSEDLVKLAPDFDKIVESLSLLKDFFTSGSPEETAFRATDRGSESDKHFRKVSDKEKIDQLQEELLHTQLKYQRILERLEKENKELRKLVLQKDDKGIHHRKLKKSLIDMYSEVLDVLSDYDASYNTQDHLPRVVVVGDQSAGKTSVLEMIAQARIFPRGSGEMMTRSPVKVTLSEGPHHVALFKDSSREFDLTKEEDLAALRHEIELRMRKNVKEGCTVSPETISLNVKGPGLQRMVLVDLPGVINTVTSGMAPDTKETIFSISKAYMQNPNAIILCIQDGSVDAERSIVTDLVSQMDPHGRRTIFVLTKVDLAEKNVASPSRIQQIIEGKLFPMKALGYFAVVTGKGNSSESIEAIREYEEEFFQNSKLLKTSMLKAHQVTTRNLSLAVSDCFWKMVRESVEQQADSFKATRFNLETEWKNNYPRLRELDRNELFEKAKNEILDEVISLSQVTPKHWEEILQQSLWERVSTHVIENIYLPAAQTMNSGTFNTTVDIKLKQWTDKQLPNKAVEVAWETLQEEFSRFMTEPKGKEHDDIFDKLKEAVKEESIKRHKWNDFAEDSLRVIQHNALEDRSISDKQQWDAAIYFMEEALQARLKDTENAIENMVGPDWKKRWLYWKNRTQEQCVHNETKNELEKMLKCNEEHPAYLASDEITTVRKNLESRGVEVDPSLIKDTWHQVYRRHFLKTALNHCNLCRRGFYYYQRHFVDSELECNDVVLFWRIQRMLAITANTLRQQLTNTEVRRLEKNVKEVLEDFAEDGEKKIKLLTGKRVQLAEDLKKVREIQEKLDAFIEALHQEK

SEQ ID NO: 850220 - protein, 1062 aa, Homo sapiens
DGLSTGACQALAEVHAPLGGPRPRLCALAAEGHFLGHSWTGSRAGAHTGAPAWPSRRLRDLPAGGMWRLRRAAVACEVCQSLVKHSSGIKGSLPLQKLHLVSRSIYHSHHPTLKLQRPQLRTSFQQFSSLTNLPLRKLKFSPIKYGYQPRRNFWPARLATRLLKLRYLILGSAVGGGYTAKKTFDQWKDMIPDLSEYKWIVPDIVWEIDEYIDFEKIRKALPSSEDLVKLAPDFDKIVESLSLLKDFFTSGSPEETAFRATDRGSESDKHFRKGLLGELILLQQQIQEHEEEARRAAGQYSTSYAQQKRKVSDKEKIDQLQEELLHTQLKYQRILERLEKENKELRKLVLQKDDKGIHHRKLKKSLIDMYSEVLDVLSDYDASYNTQDHLPRVVVVGDQSAGKTSVLEMIAQARIFPRGSGEMMTRSPVKVTLSEGPHHVALFKDSSREFDLTKEEDLAALRHEIELRMRKNVKEGCTVSPETISLNVKGPGLQRMVLVDLPGVINTVTSGMAPDTKETIFSISKAYMQNPNAIILCIQDGSVDAERSIVTDLVSQMDPHGRRTIFVLTKVDLAEKNVASPSRIQQIIEGKLFPMKALGYFAVVTGKGNSSESIEAIREYEEEFFQNSKLLKTSMLKAHQVTTRNLSLAVSDCFWKMVRESVEQQADSFKATRFNLETEWKNNYPRLRELDRNELFEKAKNEILDEVISLSQVTPKHWEEILQQSLWERVSTHVIENIYLPAAQTMNSGTFNTTVDIKLKQWTDKQLPNKAVEVAWETLQEEFSRFMTEPKGKEHDDIFDKLKEAVKEESIKRHKWNDFAEDSLRVIQHNALEDRSISDKQQWDAAIYFMEEALQARLKDTENAIENMVGPDWKKRWLYWKNRTQEQCVHNETKNELEKMLKCNEEHPAYLASDEITTVRKNLESRGVEVDPSLIKDTWHQVYRRHFLKTALNHCNLCRRGFYYYQRHFVDSELECNDVVLFWRIQRMLAITANTLRQQLTNTEVRRLEKNVKEVLEDFAEDGEKKIKLLTGKRVQLAEDLKKVREIQEKLDAFIEALHQEK

SEQ ID NO: 850221 - protein, 694 aa, Homo sapiens
MYSEVLDVLSDYDASYNTQDHLPRVVVVGDQSAGKTSVLEMIAQARIFPRGSGEMMTRSPVKVTLSEGPHHVALFKDSSREFDLTKEEDLAALRHEIELRMRKNVKEGCTVSPETISLNVKGPGLQRMVLVDLPGVINTVTSGMAPDTKETIFSISKAYMQNPNAIILCIQDGSVDAERSIVTDLVSQMDPHGRRTIFVLTKVDLAEKNVASPSRIQQIIEGKLFPMKALGYFAVVTGKGNSSESIEAIREYEEEFFQNSKLLKTSMLKAHQVTTRNLSLAVSDCFWKMVRESVEQQADSFKATRFNLETEWKNNYPRLRELDRNELFEKAKNEILDEVISLSQVTPKHWEEILQQSLWERVSTHVIENIYLPAAQTMNSGTFNTTVDIKLKQWTDKQLPNKAVEVAWETLQEEFSRFMTEPKGKEHDDIFDKLKEAVKEESIKRHKWNDFAEDSLRVIQHNALEDRSISDKQQWDAAIYFMEEALQARLKDTENAIENMVGPDWKKRWLYWKNRTQEQCVHNETKNELEKMLKCNEEHPAYLASDEITTVRKNLESRGVEVDPSLIKDTWHQVYRRHFLKTALNHCNLCRRGFYYYQRHFVDSELECNDVVLFWRIQRMLAITANTLRQQLTNTEVRRLEKNVKEVLEDFAEDGEKKIKLLTGKRVQLAEDLKKVREIQEKLDAFIEALHQEK

SEQ ID NO: 850222 - protein, 1062 aa, Homo sapiens; identical to SEQ ID NO: 850220

SEQ ID NO: 850223 - protein, 1062 aa, Homo sapiens; identical to SEQ ID NO: 850220

SEQ ID NO: 850224 - protein, 1062 aa, Homo sapiens; identical to SEQ ID NO: 850220

SEQ ID NO: 850225 - protein, 1166 aa, Homo sapiens
DGLSTGACQALAEVHAPLGGPRPRLCALAAEGHFLGHSWTGSRAGAHTGAPAWPSRRLRDLPAGGMWRLRRAAVACEVCQSLVKHSSGIKGSLPLQKLHLVSRSIYHSHHPTLKLQRPQLRTSFQQFSSLTNLPLRKLKFSPIKYGYQPRRNFWPARLATRLLKLRYLILGSAVGGGYTAKKTFDQWKDMIPDLSEYKWIVPDIVWEIDEYIDFEKIRKALPSSEDLVKLAPDFDKIVESLSLLKDFFTSGSPEETAFRATDRGSESDKHFRKGLLGELILLQQQIQEHEEEARRAAGQYSTSYAQQKRKVSDKEKIDQLQEELLHTQLKYQRILERLEKENKELRKLVLQKDDKGIHHRKLKKSLIDMYSEVLDVLSDYDASYNTQDHLPRVVVVGDQSAGKTSVLEMIAQARIFPRGSGEMMTRSPVKVTLSEGPHHVALFKDSSREFDLTKEEDLAALRHEIELRMRKNVKEGCTVSPETISLNVKGPGLQRMVLVDLPGVINTVTSGMAPDTKETIFSISKAYMQNPNAIILCIQDGSVDAERSIVTDLVSQMDPHGRRTIFVLTKVDLAEKNVASPSRIQQIIEGKLFPMKALGYFAVVTGKGNSSESIEAIREYEEEFFQNSKLLKTSMLKAHQVTTRNLSLAVSDCFWKMVRESVEQQADSFKATRFNLETEWKNNYPRLRELDRNELFEKAKNEILDEVISLSQVTPKHWEEILQQSLWERVSTHVIENIYLPAAQTMNSGTFNTTVDIKLKQWTDKQLPNKAVEVAWETLQEEFSRFMTEPKGKEHDDIFDKLKEAVKEESIKRHKWNDFAEDSLRVIQHNALEDRSISDKQQWDAAIYFMEEALQARLKDTENAIENMVGPDWKKRWLYWKNRTQEQCVHNETKNELEKMLKCNEEHPAYLASDEITTVRKNLESRGVEVDPSLIKDTWHQVYRRHFLKTALNHCNLCRRGFYYYQRHFVDSELECNDVVLFWRIQRMLAITANTLRQQLTNTEVRRLEKNVKEVLEDFAEDGEKKIKLLTGKRVQLAEDLTRTQHYTPGHHMAPHPALTLLLPCLGSDIRARLLFVMESLLLSSALTLCARCLSISSFPPASLCPTPDRFLPHLKPDHAFVEIPSLPCLCFASLHQATLLHRYSPQYWTRLPTAPCEPIVTQVRH

SEQ ID NO: 850226 - protein, 220 aa, Homo sapiens
DGLSTGACQALAEVHAPLGGPRPRLCALAAEGHFLGHSWTGSRAGAHTGAPAWPSRRLRDLPAGGMWRLRRAAVACEVCQSLVKHSSGIKGSLPLQKLHLVSRSIYHSHHPTLKLQRPQLRTSFQQFSSLTNLPLRKLKFSPIKYGYQPRRNFWPARLATRLLKLRYLILGSAVGGGYTAKKTFDQWKDMIPDLSEYKWIVPDIVWEIDEYIDFGLYHEH

SEQ ID NO: 850227 - protein, 959 aa, Homo sapiens
DGLSTGACQALAEVHAPLGGPRPRLCALAAEGHFLGHSWTGSRAGAHTGAPAWPSRRLRDLPAGGMWRLRRAAVACEVCQSLVKHSSGIKGSLPLQKLHLVSRSIYHSHHPTLKLQRPQLRTSFQQFSSLTNLPLRKLKFSPIKYGYQPRRNFWPARLATRLLKLRYLILGSAVGGGYTAKKTFDQWKDMIPDLSEYKWIVPDIVWEIDEYIDFEKIRKALPSSEDLVKLAPDFDKIVESLSLLKDFFTSGSPEETAFRATDRGSESDKHFRKGLLGELILLQQQIQEHEEEARRAAGQYSTSYAQQKRKVSDKEKIDQLQEELLHTQLKYQRILERLEKENKELRKLVLQKDDKGIHHRKLKKSLIDMYSEVLDVLSDYDASYNTQDHLPRVVVVGDQSAGKTSVLEMIAQARIFPRGSGEMMTRSPVKVTLSEGPHHVALFKDSSREFDLTKEEDLAALRHEIELRMRKNVKEGCTVSPETISLNVKGPGLQRMVLVDLPGVINTVTSGMAPDTKETIFSISKAYMQNPNAIILCIQDGSVDAERSIVTDLVSQMDPHGRRTIFVLTKVDLAEKNVASPSRIQQIIEGKLFPMKALGYFAVVTGKGNSSESIEAIREYEEEFFQNSKLLKTSMLKAHQVTTRNLSLAVSDCFWKMVRESVEQQADSFKATRFNLETEWKNNYPRLRELDRNELFEKAKNEILDEVISLSQVTPKHWEEILQQSLWERVSTHVIENIYLPAAQTMNSGTFNTTVDIKLKQWTDKQLPNKAVEVAWETLQEEFSRFMTEPKGKEHDDIFDKLKEAVKEESIKRHKWNDFAEDSLRVIQHNALEDRSISDKQQWDAAIYFMEEALQARLKDTENAIENMVGPDWKKRWLYWKNRTQEQCVHNETKNELEKMLKCNEEHPAYLASDEITTVRKNLESRGVEVDPSLVINTAEKQESASLIFVSCSKCYYMC

SEQ ID NO: 850228 - protein, 868 aa, Homo sapiens
DGLSTGACQALAEVHAPLGGPRPRLCALAAEGHFLGHSWTGSRAGAHTGAPAWPSRRLRDLPAGGMWRLRRAAVACEVCQSLVKHSSGIKGSLPLQKLHLVSRSIYHSHHPTLKLQRPQLRTSFQQFSSLTNLPLRKLKFSPIKYGYQPRRNFWPARLATRLLKLRYLILGSAVGGGYTAKKTFDQWKDMIPDLSEYKWIVPDIVWEIDEYIDFEKIRKALPSSEDLVKLAPDFDKIVESLSLLKDFFTSGSPEETAFRATDRGSESDKHFRKGLLGELILLQQQIQEHEEEARRAAGQYSTSYAQQKRKVSDKEKIDQLQEELLHTQLKYQRILERLEKENKELRKLVLQKDDKGIHHRKLKKSLIDMYSEVLDVLSDYDASYNTQDHLPRVVVVGDQSAGKTSVLEMIAQARIFPRGSGEMMTRSPVKVTLSEGPHHVALFKDSSREFDLTKEEDLAALRHEIELRMRKNVKEGCTVSPETISLNVKGPGLQRMVLVDLPGVINTVTSGMAPDTKETIFSISKAYMQNPNAIILCIQDGSVDAERSIVTDLVSQMDPHGRRTIFVLTKVDLAEKNVASPSRIQQIIEGKLFPMKALGYFAVVTGKGNSSESIEAIREYEEEFFQNSKLLKTSMLKAHQVTTRNLSLAVSDCFWKMVRESVEQQADSFKATRFNLETEWKNNYPRLRELDRNELFEKAKNEILDEVISLSQVTPKHWEEILQQSLWERVSTHVIENIYLPAAQTMNSGTFNTTVDIKLKQWTDKQLPNKAVEVAWETLQEEFSRFMTEPKGKEHDDIFDKLKEAVKEESIKRHKWNDFAEDSLRVIQHNALEDRSISDKQQWDAAIYFMEEALQARLKDRILYNERS

SEQ ID NO: 850229 - protein, 612 aa, Homo sapiens
DGLSTGACQALAEVHAPLGGPRPRLCALAAEGHFLGHSWTGSRAGAHTGAPAWPSRRLRDLPAGGMWRLRRAAVACEVCQSLVKHSSGIKGSLPLQKLHLVSRSIYHSHHPTLKLQRPQLRTSFQQFSSLTNLPLRKLKFSPIKYGYQPRRNFWPARLATRLLKLRYLILGSAVGGGYTAKKTFDQWKDMIPDLSEYKWIVPDIVWEIDEYIDFEKIRKALPSSEDLVKLAPDFDKIVESLSLLKDFFTSGSPEETAFRATDRGSESDKHFRKGLLGELILLQQQIQEHEEEARRAAGQYSTSYAQQKRKVSDKEKIDQLQEELLHTQLKYQRILERLEKENKELRKLVLQKDDKGIHHRKLKKSLIDMYSEVLDVLSDYDASYNTQDHLPRVVVVGDQSAGKTSVLEMIAQARIFPRGSGEMMTRSPVKVTLSEGPHHVALFKDSSREFDLTKEEDLAALRHEIELRMRKNVKEGCTVSPETISLNVKGPGLQRMVLVDLPGVINTVTSGMAPDTKETIFSISKAYMQNPNAIILCIQDGSVDAERSIVTDLVSQMDPHGRRTIFVLTKVDLAEKNVASPSRIQQIIEGKLFPMKALGYFAVVTGKDIGVL

SEQ ID NO: 850230 - protein, 1062 aa, Homo sapiens; identical to SEQ ID NO: 850220

SEQ ID NO: 850231 - protein, 280 aa, Homo sapiens
GVPQTGRAIGKEHDDIFDKLKEAVKEESIKRHKWNDFAEDSLRVIQHNALEDRSISDKQQWDAAIYFMEEALQARLKDTENAIENMVGPDWKKRWLYWKNRTQEQCVHNETKNELEKMLKCNEEHPAYLASDEITTVRKNLESRGVEVDPSLIKDTWHQVYRRHFLKTALNHCNLCRRGFYYYQRHFVDSELECNDVVLFWRIQRMLAITANTLRQQLTNTEVRRLEKNVKEVLEDFAEDGEKKIKLLTGKRVQLAEDLKKVREIQEKLDAFIEALHQEK

SEQ ID NO: 850232 - protein, 1062 aa, Homo sapiens; identical to SEQ ID NO: 850220

SEQ ID NO: 850233 - protein, 213 aa, Homo sapiens
MEEALQARLKDTENAIENMVGPDWKKRWLYWKNRTQEQCVHNETKNELEKMLKCNEEHPAYLASDEITTVRKNLESRGVEVDPSLIKDTWHQVYRRHFLKTALNHCNLCRRGFYYYQRHFVDSELECNDVVLFWRIQRMLAITANTLRQQLTNTEVRRLEKNVKEVLEDFAEDGEKKIKLLTGKRVQLAEDLKKVREIQEKLDAFIEALHQEK

SEQ ID NO: 850234 - protein, 1062 aa, Homo sapiens; identical to SEQ ID NO: 850220

SEQ ID NO: 850235 - protein, 205 aa, Homo sapiens
DGLSTGACQALAEVHAPLGGPRPRLCALAAEGHFLGHSWTGSRAGAHTGAPAWPSRRLRDLPAGGMWRLRRAAVACEVCQSLVKHSSGIKGSLPLQKLHLVSRSIYHSHHPTLKLQRPQLRTSFQQFSSLTNLPLRKLKFSPIKYGYQPRRNFWPARLATRLLKLRYLILGSAVGGGYTAKKTFDQWKDMIPDLSEYKWIVPDIV

SEQ ID NO: 850236 - protein, 113 aa, Homo sapiens
MDTNLLSNIQKLFSERIDVFSPVEFNKVSVLTGIIKISLKTLLECVRLRTFGRFGLQQVQVDCHFLQLYLWRFVADEELVHLLLDEVVASAALRCPDPVPMEPSVVEVICERG

SEQ ID NO: 850237 - protein, 813 aa, Homo sapiens
  misc_feature (9)..(9): Xaa can be any naturally occurring amino acid
QAGYGPRSXIGSASSPSPSFPASRPWAAVGTMAAAAAAGPSPGSGPGDSPEGPEGEAPERRRKAHGMLKLYYGLSEGEAAGRPAGPDPLDPTDLNGAHFDPEVYLDKLRRECPLAQLMDSETDMVRQIRALDSDMQTLVYENYNKFISATDTIRKMKNDFRKMEDEMDRLATNMAVITDFSARISATLQDRHERITKLAGVHALLRKLQFLFELPSRLTKCVELGAYGQAVRYQGRAQAVLQQYQHLPSFRAIQDDCQVITARLAQQLRQRFREGGSGAPEQAECVELLLALGEPAEELCEEFLAHARGRLEKELRNLEAELGPSPPAPDVLEFTDHGGSGFVGGLCQVAAAYQELFAAQGPAGAEKLAAFARQLGSRYFALVERRLAQEQGGGDNSLLVRALDRFHRRLRAPGALLAAAGLADAATEIVERVARERLGHHLQGLRAAFLGCLTDVRQALAAPRVAGKEGPGLAELLANVASSILSHIKASLAAVHLFTAKEVSFSNKPYFRGEFCSQGVREGLIVGFVHSMCQTAQSFCDSPGEKGGATPPALLLLLSRLCLDYETATISYILTLTDEQFLVQDQFPVTPVSTLCAEARETARRLLTHYVKVQGLVISQMLRKSVETRDWLSTLEPRNVRAVMKRVVEDTTAIDVQVGLLYEEGVRKAQSSDSSKRTFSVYSSSRQQGRYAPSYTPSAPMDTNLLSNIQKLFSERIDVFSPVEFNKVSVLTGIIKISLKTLLECVRLRTFGRFGLQQVQVDCHFLQLYLWRFVADEELVHLLLDEVVASAALRCPDPVPMEPSVVEVICERG

SEQ ID NO: 850238 - protein, 812 aa, Homo sapiens
RFNNNFMAPGSASSPSPSFPASRPWAAVGTMAAAAAAGPSPGSGPGDSPEGPEGEAPERRRKAHGMLKLYYGLSEGEAAGRPAGPDPLDPTDLNGAHFDPEVYLDKLRRECPLAQLMDSETDMVRQIRALDSDMQTLVYENYNKFISATDTIRKMKNDFRKMEDEMDRLATNMAVITDFSARISATLQDRHERITKLAGVHALLRKLQFLFELPSRLTKCVELGAYGQAVRYQGRAQAVLQQYQHLPSFRAIQDDCQVITARLAQQLRQRFREGGSGAPEQAECVELLLALGEPAEELCEEFLAHARGRLEKELRNLEAELGPSPPAPDVLEFTDHGGSGFVGGLCQVAAAYQELFAAQGPAGAEKLAAFARQLGSRYFALVERRLAQEQGGGDNSLLVRALDRFHRRLRAPGALLAAAGLADAATEIVERVARERLGHHLQGLRAAFLGCLTDVRQALAAPRVAGKEGPGLAELLANVASSILSHIKASLAAVHLFTAKEVSFSNKPYFRGEFCSQGVREGLIVGFVHSMCQTAQSFCDSPGEKGGATPPALLLLLSRLCLDYETATISYILTLTDEQFLVQDQFPVTPVSTLCAEARETARRLLTHYVKVQGLVISQMLRKSVETRDWLSTLEPRNVRAVMKRVVEDTTAIDVQVGLLYEEGVRKAQSSDSSKRTFSVYSSSRQQGRYAPSYTPSAPMDTNLLSNIQKLFSERIDVFSPVEFNKVSVLTGIIKISLKTLLECVRLRTFGRFGLQQVQVDCHFLQLYLWRFVADEELVHLLLDEVVASAALRCPDPVPMEPSVVEVICERG

SEQ ID NO: 850239 - protein, 812 aa, Homo sapiens; identical to SEQ ID NO: 850238

SEQ ID NO: 850240 - protein, 796 aa, Homo sapiens
LVANSARGSFPVGTMAAAAAAGPSPGSGPGDSPEGPEGEAPERRRKAHGMLKLYYGLSEGEAAGRPAGPDPLDPTDLNGAHFDPEVYLDKLRRECPLAQLMDSETDMVRQIRALDSDMQTLVYENYNKFISATDTIRKMKNDFRKMEDEMDRLATNMAVITDFSARISATLQDRHERITKLAGVHALLRKLQFLFELPSRLTKCVELGAYGQAVRYQGRAQAVLQQYQHLPSFRAIQDDCQVITARLAQQLRQRFREGGSGAPEQAECVELLLALGEPAEELCEEFLAHARGRLEKELRNLEAELGPSPPAPDVLEFTDHGGSGFVGGLCQVAAAYQELFAAQGPAGAEKLAAFARQLGSRYFALVERRLAQEQGGGDNSLLVRALDRFHRRLRAPGALLAAAGLADAATEIVERVARERLGHHLQGLRAAFLGCLTDVRQALAAPRVAGKEGPGLAELLANVASSILSHIKASLAAVHLFTAKEVSFSNKPYFRGEFCSQGVREGLIVGFVHSMCQTAQSFCDSPGEKGGATPPALLLLLSRLCLDYETATISYILTLTDEQFLVQDQFPVTPVSTLCAEARETARRLLTHYVKVQGLVISQMLRKSVETRDWLSTLEPRNVRAVMKRVVEDTTAIDVQVGLLYEEGVRKAQSSDSSKRTFSVYSSSRQQGRYAPSYTPSAPMDTNLLSNIQKLFSERIDVFSPVEFNKVSVLTGIIKISLKTLLECVRLRTFGRFGLQQVQVDCHFLQLYLWRFVADEELVHLLLDEVVASAALRCPDPVPMEPSVVEVICERG

SEQ ID NO: 850241 - protein, 731 aa, Homo sapiens
RFNNNFMAPGSASSPSPSFPASRPWAAVGTMAAAAAAGPSPGSGPGDSPEGPEGEAPERRRKAHGMLKLYYGLSEGEAAGRPAGPDPLDPTDLNGAHFDPEVYLDKLRRECPLAQLMDSETDMVRQIRALDSDMQTLVYENYNKFISATDTIRKMKNDFRKMEDEMDRLATNMAVITDFSARISATLQDRHERITKLAGVHALLRKLQFLFELPSRLTKCVELGAYGQAVRYQGRAQAVLQQYQHLPSFRAIQDDCQVITARLAQQLRQRFREGGSGAPEQAECVELLLALGEPAEELCEEFLAHARGRLEKELRNLEAELGPSPPAPDVLEFTDHGGSGFVGGLCQVAAAYQELFAAQGPAGAEKLAAFARQLGSRYFALVERRLAQEQGGGDNSLLVRALDRFHRRLRAPGALLAAAGLADAATEIVERVARERLGHHLQGLRAAFLGCLTDVRQALAAPRVAGKEGPGLAELLANVASSILSHIKASLAAVHLFTAKEVSFSNKPYFRGEFCSQGVREGLIVGFVHSMCQTAQSFCDSPGEKGGATPPALLLLLSRLCLDYETATISYILTLTDEQFLVQDQFPVTPVSTLCAEARETARRLLTHYVKVQGLVISQMLRKSVETRDWLSTLEPRNVRAVMKRVVEDTTAIDVQVGLLYEEGVRKAQSSDSSKRTFSVYSSSRQQGRYAPSYTPSAPMDTNLLSNIQKLFSERIDVFSPVEFNKVRLPT

SEQ ID NO: 850242 - protein, 696 aa, Homo sapiens [sequence omitted]

SEQ ID NO: 850243 - protein, 875 aa, Homo sapiens
  misc_feature (9)..(9): Xaa can be any naturally occurring amino acid
QAGYGPRSXIGSASSPSPSFPASRPWAAVGTMAAAAAAGPSPGSGPGDSPEGPEGEAPERRRKAHGMLKLYYGLSEGEAAGRPAGPDPLDPTDLNGAHFDPEVYLDKLRRECPLAQLMDSETDMVRQIRALDSDMQTLVYENYNKFISATGSALDTQMRLGASGPCLGCLWSDGAVEAQWWQLAKHLRPASDLDYILRAGSPGTRVRGLRGVYTIRKMKNDFRKMEDEMDRLATNMAVITDFSARISATLQDRHERITKLAGVHALLRKLQFLFELPSRLTKCVELGAYGQAVRYQGRAQAVLQQYQHLPSFRAIQDDCQVITARLAQQLRQRFREGGSGAPEQAECVELLLALGEPAEELCEEFLAHARGRLEKELRNLEAELGPSPPAPDVLEFTDHGGSGFVGGLCQVAAAYQELFAAQGPAGAEKLAAFARQLGSRYFALVERRLAQEQGGGDNSLLVRALDRFHRRLRAPGALLAAAGLADAATEIVERVARERLGHHLQGLRAAFLGCLTDVRQALAAPRVAGKEGPGLAELLANVASSILSHIKASLAAVHLFTAKEVSFSNKPYFRGEFCSQGVREGLIVGFVHSMCQTAQSFCDSPGEKGGATPPALLLLLSRLCLDYETATISYILTLTDEQFLVQDQFPVTPVSTLCAEARETARRLLTHYVKVQGLVISQMLRKSVETRDWLSTLEPRNVRAVMKRVVEDTTAIDVQVGLLYEEGVRKAQSSDSSKRTFSVYSSSRQQGRYAPSYTPSAPMDTNLLSNIQKLFSERIDVFSPVEFNKVSVLTGIIKISLKTLLECVRLRTFGRFGLQQVQVDCHFLQLYLWRFVADEELVHLLLDEVVASAALRCPDPVPMEPSVVEVICERG

SEQ ID NO: 850244 - protein, 835 aa, Homo sapiens
MPLYSKLGDREKKKRKEKASRPWAAVGTMAAAAAAGPSPGSGPGDSPEGPEGEAPERRRKAHGMLKLYYGLSEGEAAGRPAGPDPLDPTDLNGAHFDPEVYLDKLRRECPLAQLMDSETDMVRQIRALDSDMQTLVYENYNKFISATDTIRKMKNDFRKMEDEMDRLATNMAVITDFSARISATLQDRHERITKLAGGRCRAGPAVGLSWGSGANVTLRPPGVHALLRKLQFLFELPSRLTKCVELGAYGQAVRYQGRAQAVLQQYQHLPSFRAIQDDCQVITARLAQQLRQRFREGGSGAPEQAECVELLLALGEPAEELCEEFLAHARGRLEKELRNLEAELGPSPPAPDVLEFTDHGGSGFVGGLCQVAAAYQELFAAQGPAGAEKLAAFARQLGSRYFALVERRLAQEQGGGDNSLLVRALDRFHRRLRAPGALLAAAGLADAATEIVERVARERLGHHLQGLRAAFLGCLTDVRQALAAPRVAGKEGPGLAELLANVASSILSHIKASLAAVHLFTAKEVSFSNKPYFRGEFCSQGVREGLIVGFVHSMCQTAQSFCDSPGEKGGATPPALLLLLSRLCLDYETATISYILTLTDEQFLVQDQFPVTPVSTLCAEARETARRLLTHYVKVQGLVISQMLRKSVETRDWLSTLEPRNVRAVMKRVVEDTTAIDVQVGLLYEEGVRKAQSSDSSKRTFSVYSSSRQQGRYAPSYTPSAPMDTNLLSNIQKLFSERIDVFSPVEFNKVSVLTGIIKISLKTLLECVRLRTFGRFGLQQVQVDCHFLQLYLWRFVADEELVHLLLDEVVASAALRCPDPVPMEPSVVEVICERG

SEQ ID NO: 850245 - protein, 282 aa, Homo sapiens
MCQTAQSFCDSPGEKGGATPPALLLLLSRLCLDYETATISYILTLTDEQFLVQDQFPVTPVSTLCAEARETARRLLTHYVKVQGLVISQMLRKSVETRDWLSTLEPRNVRAVMKRVVEDTTAIDVQVGLLYEEGVRKAQSSDSSKRTFSVYSSSRQQGRYAPSYTPSAPMDTNLLSNIQKLFSERIDVFSPVEFNKVSVLTGIIKISLKTLLECVRLRTFGRFGLQQVQVDCHFLQLYLWRFVADEELVHLLLDEVVASAALRCPDPVPMEPSVVEVICERG

SEQ ID NO: 850246 - protein, 269 aa, Homo sapiens
MSSALSISVLLLLLSRLCLDYETATISYILTLTDEQFLVQDQFPVTPVSTLCAEARETARRLLTHYVKVQGLVISQMLRKSVETRDWLSTLEPRNVRAVMKRVVEDTTAIDVQVGLLYEEGVRKAQSSDSSKRTFSVYSSSRQQGRYAPSYTPSAPMDTNLLSNIQKLFSERIDVFSPVEFNKVSVLTGIIKISLKTLLECVRLRTFGRFGLQQVQVDCHFLQLYLWRFVADEELVHLLLDEVVASAALRCPDPVPMEPSVVEVICERG

SEQ ID NO: 850247 - protein, 113 aa, Homo sapiens; identical to SEQ ID NO: 850236

SEQ ID NO: 850248 - protein, 113 aa, Homo sapiens; identical to SEQ ID NO: 850236

SEQ ID NO: 850249 - protein, 319 aa, Homo sapiens
  misc_feature (9)..(9): Xaa can be any naturally occurring amino acid
QAGYGPRSXIGSASSPSPSFPASRPWAAVGTMAAAAAAGPSPGSGPGDSPEGPEGEAPERRRKAHGMLKLYYGLSEGEAAGRPAGPDPLDPTDLNGAHFDPEVYLDKLRRECPLAQLMDSETDMVRQIRALDSDMQTLVYENYNKFISATDTIRKMKNDFRKMEDEMDRLATNMAVITDFSARISATLQDRHERITKLAGVHALLRKLQFLFELPSRRRLRSAVGDGARGPRKNFVSFTHLVPFLLGTVYGLEKIQLVLADDAEVNVASGAQVVEDASCDGFAHQILGFLLLRNRTAAIMSPAKLGLLRDIQQCTSTNS

SEQ ID NO: 850250 - protein, 210 aa, Homo sapiens
  misc_feature (9)..(9): Xaa can be any naturally occurring amino acid
QAGYGPRSXIGSASSPSPSFPASRPWAAVGTMAAAAAAGPSPGSGPGDSPEGPEGEAPERRRKAHGMLKLYYGLSEGEAAGRPAGPDPLDPTDLNGAHFDPEVYLDKLRRECPLAQLMDSETDMVRQIRALDSDMQTLVYENYNKFISATDTNPGHESQTENRNFFPRGTRQWAQGATLQATWGTRGALGALIPKSICGQRLQFQPRNVS

SEQ ID NO: 850251 - protein, 78 aa, Homo sapiens
MYCLIQAVRWTRRCAWEPAVPALAACGLMEQLRHSGGSWLSTCGLLRIWTNSEGRLSWAPGLGGYGEYVSNACFGNIN

SEQ ID NO: 850252 - protein, 242 aa, Homo sapiens
PRVADAWVQFLVQDQFPVTPVSTLCAEARETARRLLTHYVKVQGLVISQMLRKSVETRDWLSTLEPRNVRAVMKRVVEDTTAIDVQVGLLYEEGVRKAQSSDSSKRTFSVYSSSRQQGRYAPSYTPSAPMDTNLLSNIQKLFSERIDVFSPVEFNKVSVLTGIIKISLKTLLECVRLRTFGRFGLQQVQVDCHFLQLYLWRFVADEELVHLLLDEVVASAALRCPDPVPMEPSVVEVICERG

SEQ ID NO: 850253 - protein, 812 aa, Homo sapiens; identical to SEQ ID NO: 850238

SEQ ID NO: 850254 - protein, 803 aa, Homo sapiens
LVANSARGSFPASRPWAAVGTMAAAAAAGPSPGSGPGDSPEGPEGEAPERRRKAHGMLKLYYGLSEGEAAGRPAGPDPLDPTDLNGAHFDPEVYLDKLRRECPLAQLMDSETDMVRQIRALDSDMQTLVYENYNKFISATDTIRKMKNDFRKMEDEMDRLATNMAVITDFSARISATLQDRHERITKLAGVHALLRKLQFLFELPSRLTKCVELGAYGQAVRYQGRAQAVLQQYQHLPSFRAIQDDCQVITARLAQQLRQRFREGGSGAPEQAECVELLLALGEPAEELCEEFLAHARGRLEKELRNLEAELGPSPPAPDVLEFTDHGGSGFVGGLCQVAAAYQELFAAQGPAGAEKLAAFARQLGSRYFALVERRLAQEQGGGDNSLLVRALDRFHRRLRAPGALLAAAGLADAATEIVERVARERLGHHLQGLRAAFLGCLTDVRQALAAPRVAGKEGPGLAELLANVASSILSHIKASLAAVHLFTAKEVSFSNKPYFRGEFCSQGVREGLIVGFVHSMCQTAQSFCDSPGEKGGATPPALLLLLSRLCLDYETATISYILTLTDEQFLVQDQFPVTPVSTLCAEARETARRLLTHYVKVQGLVISQMLRKSVETRDWLSTLEPRNVRAVMKRVVEDTTAIDVQVGLLYEEGVRKAQSSDSSKRTFSVYSSSRQQGRYAPSYTPSAPMDTNLLSNIQKLFSERIDVFSPVEFNKVSVLTGIIKISLKTLLECVRLRTFGRFGLQQVQVDCHFLQLYLWRFVADEELVHLLLDEVVASAALRCPDPVPMEPSVVEVICERG

SEQ ID NO: 850255 - protein, 810 aa, Homo sapiens [sequence omitted]

SEQ ID NO: 850256 - protein, 731 aa, Homo sapiens; identical to SEQ ID NO: 850241

SEQ ID NO: 850257 - protein, 861 aa, Homo sapiens
LVANSARGSFPASRPWAAVGTMAAAAAAGPSPGSGPGDSPEGPEGEAPERRRKAHGMLKLYYGLSEGEAAGRPAGPDPLDPTDLNGAHFDPEVYLDKVCAHGEWGGAGRGEGNQAPAILLPQIMPPTFCEVQEEQVFIRGRTSAREYEQLRRLRGLRRECPLAQLMDSETDMVRQIRALDSDMQTLVYENYNKFISATDTIRKMKNDFRKMEDEMDRLATNMAVITDFSARISATLQDRHERITKLAGVHALLRKLQFLFELPSRLTKCVELGAYGQAVRYQGRAQAVLQQYQHLPSFRAIQDDCQVITARLAQQLRQRFREGGSGAPEQAECVELLLALGEPAEELCEEFLAHARGRLEKELRNLEAELGPSPPAPDVLEFTDHGGSGFVGGLCQVAAAYQELFAAQGPAGAEKLAAFARQLGSRYFALVERRLAQEQGGGDNSLLVRALDRFHRRLRAPGALLAAAGLADAATEIVERVARERLGHHLQGLRAAFLGCLTDVRQALAAPRVAGKEGPGLAELLANVASSILSHIKASLAAVHLFTAKEVSFSNKPYFRGEFCSQGVREGLIVGFVHSMCQTAQSFCDSPGEKGGATPPALLLLLSRLCLDYETATISYILTLTDEQFLVQDQFPVTPVSTLCAEARETARRLLTHYVKVQGLVISQMLRKSVETRDWLSTLEPRNVRAVMKRVVEDTTAIDVQVGLLYEEGVRKAQSSDSSKRTFSVYSSSRQQGRYAPSYTPSAPMDTNLLSNIQKLFSERIDVFSPVEFNKVSVLTGIIKISLKTLLECVRLRTFGRFGLQQVQVDCHFLQLYLWRFVADEELVHLLLDEVVASAALRCPDPVPMEPSVVEVICERG

SEQ ID NO: 850258 - protein, 690 aa, Homo sapiens
PPPPTLRLVRAWFNRPRENYNKFISATDTIRKMKNDFRKMEDEMDRLATNMAVITDFSARISATLQDRHERITKLAGVHALLRKLQFLFELPSRLTKCVELGAYGQAVRYQGRAQAVLQQYQHLPSFRAIQDDCQVITARLAQQLRQRFREGGSGAPEQAECVELLLALGEPAEELCEEFLAHARGRLEKELRNLEAELGPSPPAPDVLEFTDHGGSGFVGGLCQVAAAYQELFAAQGPAGAEKLAAFARQLGSRYFALVERRLAQEQGGGDNSLLVRALDRFHRRLRAPGALLAAAGLADAATEIVERVARERLGHHLQGLRAAFLGCLTDVRQALAAPRVAGKEGPGLAELLANVASSILSHIKASLAAVHLFTAKEVSFSNKPYFRGEFCSQGVREGLIVGFVHSMCQTAQSFCDSPGEKGGATPPALLLLLSRLCLDYETATISYILTLTDEQFLVQDQFPVTPVSTLCAEARETARRLLTHYVKVQGLVISQMLRKSVETRDWLSTLEPRNVRAVMKRVVEDTTAIDVQVGLLYEEGVRKAQSSDSSKRTFSVYSSSRQQGRYAPSYTPSAPMDTNLLSNIQKLFSERIDVFSPVEFNKVSVLTGIIKISLKTLLECVRLRTFGRFGLQQVQVDCHFLQLYLWRFVADEELVHLLLDEVVASAALRCPDPVPMEPSVVEVICERG

SEQ ID NO: 850259 - protein, 656 aa, Homo sapiens
RFNNNFMAPGSASSPSPSFPASRPWAAVGTMAAAAAAGPSPGSGPGDSPEGPEGEAPERRRKAHGMLKLYYGLSEGEAAGRPAGPDPLDPTDLNGAHFDPEVYLDKLRRECPLAQLMDSETDMVRQIRALDSDMQTLVYENYNKFISATDTIRKMKNDFRKMEDEMDRLATNMAVITDFSARISATLQDRHERITKLAGVHALLRKLQFLFELPSRLTKCVELGAYGQAVRYQGRAQAVLQQYQHLPSFRAIQDDCQVITARLAQQLRQRFREGGSGAPEQAECVELLLALGEPAEELCEEFLAHARGRLEKELRNLEAELGPSPPAPDVLEFTDHGGSGFVGGLCQVAAAYQELFAAQGPAGAEKLAAFARQLGSRYFALVERRLAQEQGGGDNSLLVRALDRFHRRLRAPGALLAAAGLADAATEIVERVARERLGHHLQGLRAAFLGCLTDVRQALAAPPAPDVSEYTTMDAVRYAGRPLPGGGGLPGAARGPPAQHAAEKLRETYARQPDKDRITLAAACNKTNKKPTYRKPGHIETKQPQQTQRKLEKPKLGAKSREDRRNPTGNPEDTPRDTPTNRQTHTENPARSQNAQTQRHNTTATAPKIRKRENGNPTPPQRGPQIPRHKDTPQRTPPDHTTPQRTKKRPTEHTAR

SEQ ID NO: 850260 - protein, 381 aa, Homo sapiens
RFNNNFMAPGSASSPSPSFPASRPWAAVGTMAAAAAAGPSPGSGPGDSPEGPEGEAPERRRKAHGMLKLYYGLSEGEAAGRPAGPDPLDPTDLNGAHFDPEVYLDKLRRECPLAQLMDSETDMVRQIRALDSDMQTLVYENYNKFISATDTIRKMKNDFRKMEDEMDRLATNMAVITDFSARISATLQDRHERITKLAGVHALLRKLQFLFELPSRLTKCVELGAYGQAVRYQGRAQAVLQQYQHLPSFRAIQDDCQVITARLAQQLRQRFREGGQAPGAGNAWSCVAWGPWRAARSLDTPAVEQPETRGTWGQTGTKVRLRPESSGKETTNERDTDAVTAQKSKEGTEKTTQKRATENLAGDHDKNEEATRDDAAQRARE

SEQ ID NO: 850261 - protein, 121 aa, Homo sapiens
TASVQGKEAVLLDQRTSYVSEKSRRWIWDQKNWILAPVSPSLLGELEPALPSLCLRALLCTLGMVEHAIPRALWSVHSRQQTGAVVTAIITVIALVLTADHDVKSLSTQLRNSYCDLQCGV

SEQ ID NO: 850262 - protein, 306 aa, Homo sapiens
GRGLGSAHSQPRSHPAPRRSTRANPVTHLRRANSSLALPLTHAHTRLEMAAAAAAAGDSDSWDADAFSVEDPVRKVGGGGTAGGDRWEGEDEDEDVKDNWDDDDDEKKEEAEVKPEVKISEKKKIAEKIKEKERQQKKRQEEIKKRLEEPEEPKVLTPEEQLADKLRLKKLQEESDLELAKETFGVNNAVYGIDAMNPSSRDDFTEFGKLLKDKITQYEKSLYYASFLEVLVRDVCISLEIDDLKKITNSLTVLCSEKQKQEKQSKAKKKKKGVVPGGGLKATMKDDLADYGGYDGGYVQDYEDFM

SEQ ID NO: 850263 - protein, 221 aa, Homo sapiens
MQELLMEVLFFEDNWDDDDDEKKEEAEVKPEVKISEKKKIAEKIKEKERQQKKRQEEIKKRLEEPEEPKVLTPEEQLADKLRLKKLQEESDLELAKETFGVNNAVYGIDAMNPSSRDDFTEFGKLLKDKITQYEKSLYYASFLEVLVRDVCISLEIDDLKKITNSLTVLCSEKQKQEKQSKAKKKKKGVVPGGGLKATMKDDLADYGGYDGGYVQDYEDFM

SEQ ID NO: 850264 - protein, 250 aa, Homo sapiens
GGREREGDIGYVRGWVVIRPRLRRANSSLALPLTHAHTRLEMAAAAAAAGDSDSWDADAFSVEDPVRKVGGGGTAGGDRWEGEDEDEDVKLEEPEEPKVLTPEEQLADKLRLKKLQEESDLELAKETFGVNNAVYGIDAMNPSSRDDFTEFGKLLKDKITQYEKSLYYASFLEVLVRDVCISLEIDDLKKITNSLTVLCSEKQKQEKQSKAKKKKKGVVPGGGLKATMKDDLADYGGYDGGYVQDYEDFM

SEQ ID NO: 850265 - protein, 177 aa, Homo sapiens
MGVRAGRTQGKKKLKKRLEEPEEPKVLTPEEQLADKLRLKKLQEESDLELAKETFGVNNAVYGIDAMNPSSRDDFTEFGKLLKDKITQYEKSLYYASFLEVLVRDVCISLEIDDLKKITNSLTVLCSEKQKQEKQSKAKKKKKGVVPGGGLKATMKDDLADYGGYDGGYVQDYEDFM

SEQ ID NO: 850266 - protein, 306 aa, Homo sapiens; identical to SEQ ID NO: 850262

SEQ ID NO: 850267 - protein, 306 aa, Homo sapiens; identical to SEQ ID NO: 850262

SEQ ID NO: 850268 - protein, 306 aa, Homo sapiens; identical to SEQ ID NO: 850262

SEQ ID NO: 850269 - protein, 306 aa, Homo sapiens; identical to SEQ ID NO: 850262

SEQ ID NO: 850270 - protein, 232 aa, Homo sapiens
GRGLGSAHSQPRSHPAPRRSTRANPVTHLRRANSSLALPLTHAHTRLEMAAAAAAAGDSDSWDADAFSVEDPVRKVGGGGTAGGDRWEGEDEDEDVKDNWDDDDDEKKEEAEVKPEVKISEKKKIAEKIKEKERQQKKRQEEIKKRLEEPEEPKVLTPEEQLADKLRLKKLQEESDLELAKETFGVNNAVYGIDAMNPSSRDDFTEFGKLLKDKITQYEKSLYYASFFWEGL

SEQ ID NO: 850271 - protein, 299 aa, Homo sapiens
GGREREGDIGYVRGWVVIRPRLRRANSSLALPLTHAHTRLEMAAAAAAAGDSDSWDADAFSVEDPVRKVGGGGTAGGDRWEGEDEDEDVKDNWDDDDDEKKEEAEVKPEVKISEKKKIAEKIKEKERQQKKRQEEIKKRLEEPEEPKVLTPEEQLADKLRLKKLQEESDLELAKETFGVNNAVYGIDAMNPSSRDDFTEFGKLLKDKITQYEKSLYYASFLEVLVRDVCISLEIDDLKKITNSLTVLCSEKQKQEKQSKAKKKKKGVVPGGGLKATMKDDLADYGGYDGGYVQDYEDFM

SEQ ID NO: 850272 - protein, 306 aa, Homo sapiens; identical to SEQ ID NO: 850262

SEQ ID NO: 850273 - protein, 75 aa, Homo sapiens
GGREREGDIGYVRGWVVIRPRVLCSDKQKQKKQSKAKKKKKGVVPGGGLKATMKDDLADYGGYDGGYVQDYEDFM

SEQ ID NO: 850274 - protein, 306 aa, Homo sapiens; identical to SEQ ID NO: 850262

SEQ ID NO: 850275 - protein, 240 aa, Homo sapiens
GRGLGSAHSQPRSHPAPRRSTRANPVTHLRRANSSLALPLTHAHTRLEMAAAAAAAGDSDSWDADAFSVEDPVRKVGGGGTAGGDRWEGEDEDEDVKDNWDDDDDEKKEEAEVKPEVKISEKKKIAEKIKEKERQQKKRQEEIKKRLEEPEEPKVLTPEEQLADKLRLKKLQEESDLELAKETFGVNNAVYGIDAMNPSSRDDFTEFGKLLKDKITQYEKSLYYASFLEVLVRDVCISCK

SEQ ID NO: 850276 - protein, 239 aa, Homo sapiens
GRGLGSAHSQPRSHPAPRRSTRANPVTHLRRANSSLALPLTHAHTRLEMAAAAAAAGDSDSWDADAFSVEDPVRKVGGGGTAGGDRWEGEDEDEDVKDNWDDDDDEKKEEAEVKPEVKISEKKKIAEKIKEKERQQKKRQEEIKKRLEEPEEPKVLTPEEQLADKLRLKKLQEESDLELAKETFGVNNAVYGIVYAVQHKLFNVCPSLPVAHLVKLDNGSLESYLSVSKLMFSFRFISQ

SEQ ID NO: 850277 - protein, 1142 aa, Homo sapiens
MYGSARSVGKVEPSSQSPGRSPRLPRSPRLGHRRTNSTGGSSGSSVGGGSGKTLSMENIQSLNAAYATSGPMYLSDHENVGSETPKSTMTLGRSGGRLPYGVRMTAMGSSPNIASSGVASDTIAFGEHHLPPVSMASTVPHSLRQARDNTIMDLQTQLKEVLRENDLLRKDVEVKESKLSSSMNSIKTFWSPELKKERALRKDEASKITIWKEQYRVVQEENQHMQMTIQALQDELRIQRDLNQLFQQDSSSRTGEPCVAELTEENFQRLHAEHERQAKELFLLRKTLEEMELRIETQKQTLNARDESIKKLLEMLQSKGLSAKATEEDHERTRRLAEAEMHVHHLESLLEQKEKENSMLREEMHRRFENAPDSAKTKALQTVIEMKDSKISSMERGLRDLEEEIQMLKSNGALSTEEREEEMKQMEVYRSHSKFMKNKVEQLKEELSSKEAQWEELKKKAAGLQAEIGQVKQELSRKDTELLALQTKLETLTNQFSDSKQHIEVLKESLTAKEQRAAILQTEVDALRLRLEEKETMLNKKTKQIQDMAEEKGTQAGEIHDLKDMLDVKERKVNVLQKKIENLQEQLRDKEKQMSSLKERVKSLQADTTNTDTALTTLEEALAEKERTIERLKEQRDRDEREKQEEIDNYKKDLKDLKEKVSLLQGDLSEKEASLLDLKEHASSLASSGLKKDSRLKTLEIALEQKKEECLKMESQLKKAHEAALEARASPEMSDRIQHLEREITRYKDESSKAQAEVDRLLEILKEVENEKNDKDKKIAELESLTSRQVKDQNKKVANLKHKEQVEKKKSAQMLEEARRREDNLNDSSQQLQDSLRKKDDRIEELEEALRESVQITAEREMVLAQEESARTNAEKQVEELLMAMEKVKQELESMKAKLSSTQQSLAEKETHLTNLRAERRKHLEEVLEMKQEALLAAISEKDANIALLELSSSKKKTQEEVAALKREKDRLVQQLKQQTQNRMKLMADNYEDDHFKSSHSNQTNHKPSPDQDEEEGIMGIANQRLSSAILFRTIIQPLLELDQNRSKLKLYIGHLTTLCHDRDPLILRGLTPPASYNLDDDQAAWENELQKMTRGQLQDELEKGERDNAELQEFANAILQQIADHCPDILEQVVNALEESS

SEQ ID NO: 850278 - protein, 960 aa, Homo sapiens
MNSIKTFWSPELKKERALRKDEASKITIWKEQYRVVQEENQHMQMTIQALQDELRIQRDLNQLFQQDSSSRTGEPCVAELTEENFQRLHAEHERQAKELFLLRKTLEEMELRIETQKQTLNARDESIKKLLEMLQSKGLSAKATEEDHERTRRLAEAEMHVHHLESLLEQKEKENSMLREEMHRRFENAPDSAKTKALQTVIEMKDSKISSMERGLRDLEEEIQMLKSNGALSTEEREEEMKQMEVYRSHSKFMKNKVEQLKEELSSKEAQWEELKKKAAGLQAEIGQVKQELSRKDTELLALQTKLETLTNQFSDSKQHIEVLKESLTAKEQRAAILQTEVDALRLRLEEKETMLNKKTKQIQDMAEEKGTQAGEIHDLKDMLDVKERKVNVLQKKIENLQEQLRDKEKQMSSLKERVKSLQADTTNTDTALTTLEEALAEKERTIERLKEQRDRDEREKQEEIDNYKKDLKDLKEKVSLLQGDLSEKEASLLDLKEHASSLASSGLKKDSRLKTLEIALEQKKEECLKMESQLKKAHEAALEARASPEMSDRIQHLEREITRYKDESSKAQAEVDRLLEILKEVENEKNDKDKKIAELESLTSRQVKDQNKKVANLKHKEQVEKKKSAQMLEEARRREDNLNDSSQQLQDSLRKKDDRIEELEEALRESVQITAEREMVLAQEESARTNAEKQVEELLMAMEKVKQELESMKAKLSSTQQSLAEKETHLTNLRAERRKHLEEVLEMKQEALLAAISEKDANIALLELSSSKKKTQEEVAALKREKDRLVQQLKQQTQNRMKLMADNYEDDHFKSSHSNQTNHKPSPDQDEEEEYMGIANQRLSSAILFRTIIQPLLELDQNRSKLKLYIGHLTTLCHDRDPLILRGLTPPASYNLDDDQAAWENELQKMTRGQLQDELEKGERDNAELQEFANAILQQIADHCPDILEQVVNALEESS

SEQ ID NO: 850279 - protein, 595 aa, Homo sapiens
MAEEKGTQAGEIHDLKDMLDVKERKVNVLQKKIENLQEQLRDKEKQMSSLKERVKSLQADTTNTDTALTTLEEALAEKERTIERLKEQRDRDEREKQEEIDNYKKDLKDLKEKVSLLQGDLSEKEASLLDLKEHASSLASSGLKKDSRLKTLEIALEQKKEECLKMESQLKKAHEAALEARASPEMSDRIQHLEREITRYKDESSKAQAEVDRLLEILKEVENEKNDKDKKIAELESLTSRQVKDQNKKVANLKHKEQVEKKKSAQMLEEARRREDNLNDSSQQLQDSLRKKDDRIEELEEALRESVQITAEREMVLAQEESARTNAEKQVEELLMAMEKVKQELESMKAKLSSTQQSLAEKETHLTNLRAERRKHLEEVLEMKQEALLAAISEKDANIALLELSSSKKKTQEEVAALKREKDRLVQQLKQQTQNRMKLMADNYEDDHFKSSHSNQTNHKPSPDQDEEEEYMGIANQRLSSAILFRTIIQPLLELDQNRSKLKLYIGHLTTLCHDRDPLILRGLTPPASYNLDDDQAAWENELQKMTRGQLQDELEKGERDNAELQEFANAILQQIADHCPDILEQVVNALEESS

SEQ ID NO: 850280 - protein, 793 aa, Homo sapiens
QESTESLSASFLQEMHRRFENAPDSAKTKALQTVIEMKDSKISSMERGLRDLEEEIQMLKSNGALSTEEREEEMKQMEVYRSHSKFMKNKVEQLKEELSSKEAQWEELKKKAAGLQAEIGQVKQELSRKDTELLALQTKLETLTNQFSDSKQHIEVLKESLTAKEQRAAILQTEVDALRLRLEEKETMLNKKTKQIQDMAEEKGTQAGEIHDLKDMLDVKERKVNVLQKKIENLQEQLRDKEKQMSSLKERVKSLQADTTNTDTALTTLEEALAEKERTIERLKEQRDRDEREKQEEIDNYKKDLKDLKEKVSLLQGDLSEKEASLLDLKEHASSLASSGLKKDSRLKTLEIALEQKKEECLKMESQLKKAHEAALEARASPEMSDRIQHLEREITRYKDESSKAQAEVDRLLEILKEVENEKNDKDKKIAELESLTSRQVKDQNKKVANLKHKEQVEKKKSAQMLEEARRREDNLNDSSQQLQDSLRKKDDRIEELEEALRESVQITAEREMVLAQEESARTNAEKQVEELLMAMEKVKQELESMKAKLSSTQQSLAEKETHLTNLRAERRKHLEEVLEMKQEALLAAISEKDANIALLELSSSKKKTQEEVAALKREKDRLVQQLKQQTQNRMKLMADNYEDDHFKSSHSNQTNHKPSPDQDEEEEYMGIANQRLSSAILFRTIIQPLLELDQNRSKLKLYIGHLTTLCHDRDPLILRGLTPPASYNLDDDQAAWENELQKMTRGQLQDELEKGERDNAELQEFANAILQQIADHCPDILEQVVNALEESS

SEQ ID NO: 850281 - protein, 1082 aa, Homo sapiens
MYGSARSVGKVEPSSQSPGRSPRLPRSPRLGHRRTNSTGGSSGSSVGGGSGKTLSMENIQSLNAAYATSGPMYLSDHENVGSETPKSTMTLGRSGGRLPYGVRMTAMGSSPNIASSGVASDTIAFGEHHLPPVSMASTVPHSLRQARDNTIMDLQTQLKEVLRENDLLRKDVEVKESKLSSSMNSIKTFWSPELKKERALRKDEASKITIWKEQYRVVQEENQHMQMTIQALQDELRIQRDLNQLFQQDSSSRTGEPCVAELTEENFQRLHAEHERQAKELFLLRKTLEEMELRIETQKQTLNARDESIKKLLEMLQSKGLSAKATEEDHERTRRLAEAEMHVHHLESLLEQKEKENSMLREEMHRRFENAPDSAKTKALQTVIEMKDSKISSMERGLRDLEEEIQMLKSNGALSTEEREEEMKQMEVYRSHSKFMKNKVEQLKEELSSKEAQWEELKKKAAGLQAEIGQVKQELSRKDTELLALQTKLETLTNQFSDSKQHIEVLKESLTAKEQRAAILQTEVDALRLRLEEKETMLNKKTKQIQDMAEEKGTQAGEIHDLKDMLDVKERKVNVLQKKIENLQEQLRDKEKQMSSLKERVKSLQADTTNTDTALTTLEEALAEKERTIERLKEQRDRDEREKQEEIDNYKKDLKDLKEKVSLLQGDLSEKEASLLDLKEHASSLASSGLKKDSRLKTLEIALEQKKEECLKMESQLKKAHEAALEARASPEMSDRIQHLEREITRYKDESSKAQAEVDRLLEILKEVENEKNDKDKKIAELESLTSRQVKDQNKKVANLKHKEQVEKKKSAQMLEEARRREDNLNDSSQQLQDSLRKKDDRIEELEEALRESVQITAEREMVLAQEESARTNAEKQVEELLMAMEKVKQELESMKAKLSSTQQSLAEKETHLTNLRAERRKHLEEVLEMKQEALLAAISEKDANIALLELSSSKKKTQEEVAALKREKDRLVQQLKQQTQNRMKLMADNYEDDHFKSSHSNQTNHKPSPDQIIQPLLELDQNRSKLKLYIGHLTTLCHDRDPLILRGLTPPASYNLDDDQAAWENELQKMTRGQVSLSLKL

SEQ ID NO: 850282 - protein, 513 aa, Homo sapiens
MYGSARSVGKVEPSSQSPGRSPRLPRSPRLGHRRTNSTGGSSGSSVGGGSGKTLSMENIQSLNAAYATSGPMYLSDHENVGSETPKSTMTLGRSGGRLPYGVRMTAMGSSPNIASSGVASDTIAFGEHHLPPVSMASTVPHSLRQARDNTIMDLQTQLKEVLRENDLLRKDVEVKESKLSSSMNSIKTFWSPELKKERALRKDEASKITIWKEQYRVVQEENQHMQMTIQALQDELRIQRDLNQLFQQDSSSRTGEPCVAELTEENFQRLHAEHERQAKELFLLRKTLEEMELRIETQKQTLNARDESIKKLLEMLQSKGLSAKATEEDHERTRRLAEAEMHVHHLESLLEQKEKENSMLREEMHRRFENAPDSAKTKALQTVIEMKDSKISSMERGLRDLEEEIQMLKSNGALSTEEREEEMKQMEVYRSHSKFMKNKVEQLKEELSSKEAQWEELKKKAAGLQAEIGQVKQELSRKDTELLALQTKLETLTNQFSDSKQHIEVLKESLMSH

SEQ ID NO: 850283 - protein, 540 aa, Homo sapiens
MYGSARSVGKVEPSSQSPGRSPRLPRSPRLGHRRTNSTGGSSGSSVGGGSGKTLSMENIQSLNAAYATSGPMYLSDHENVGSETPKSTMTLGRSGGRLPYGVRMTAMGSSPNIASSGVASDTIAFGEHHLPPVSMASTVPHSLRQARDNTIMDLQTQLKEVLRENDLLRKDVEVKESKLSSSMNSIKTFWSPELKKERALRKDEASKITIWKEQYRVVQEENQHMQMTIQALQDELRIQRDLNQLFQQDSSSRTGEPCVAELTEENFQRLHAEHERQAKELFLLRKTLEEMELRIETQKQTLNARDESIKKLLEMLQSKGLSAKATEEDHERTRRLAEAEMHVHHLESLLEQKEKENSMLREEMHRRFENAPDSAKTKALQTVIEMKDSKISSMERGLRDLEEEIQMLKSNGALSTEEREEEMKQMEVYRSHSKFMKNKVEQLKEELSSKEAQWEELKKKAAGLQAEIGQVKQELSRKDTELLALQTKLETLTNQFSDSKQHIEVLKESLTAKEQRAAILQTEVETILGFVGSWFLGTFS

SEQ ID NO: 850284 - protein, 1070 aa, Homo sapiens
MYGSARSVGKVEPSSQSPGRSPRLPRSPRLGHRRTNSTGGSSGSSVGGGSGKTLSMENIQSLNAAYATSGPMYLSDHENVGSETPKSTMTLGRSGGRLPYGVRMTAMGSSPNIASSGVASDTIAFGEHHLPPVSMASTVPHSLRQARDNTIMDLQTQLKEVLRENDLLRKDVEVKESKLSSSMNSIKTFWSPELKKERALRKDEASKITIWKEQYRVVQEENQHMQMTIQALQDELRIQRDLNQLFQQDSSSRTGEPCVAELTEENFQRLHAEHERQAKELFLLRKTLEEMELRIETQKQTLNARDESIKKLLEMLQSKGLSAKATEEDHERTRRLAEAEMHVHHLESLLEQKEKENSMLREEMHRRFENAPDSAKTKALQTVIEMKDSKISSMERGLRDLEEEIQMLKSNGALSTEEREEEMKQMEVYRSHSKFMKNKIGQVKQELSRKDTELLALQTKLETLTNQFSDSKQHIEVLKESLTAKEQRAAILQTEVDALRLRLEEKETMLNKKTKQIQDMAEEKGTQAGEIHDLKDMLDVKERKVNVLQKKIENLQEQLRDKEKQMSSLKERVKSLQADTTNTDTALTTLEEALAEKERTIERLKEQRDRDEREKQEEIDNYKKDLKDLKEKVSLLQGDLSEKEASLLDLKEHASSLASSGLKKDSRLKTLEIALEQKKEECLKMESQLKKAHEAALEARASPEMSDRIQHLEREITRYKDESSKAQAEVDRLLEILKEVENEKNDKDKKIAELESLTSRQVKDQNKKVANLKHKEQVEKKKSAQMLEEARRREDNLNDSSQQLQVEELLMAMEKVKQELESMKAKLSSTQQSLAEKETHLTNLRAERRKHLEEVLEMKQEALLAAISEKDANIALLELSSSKKKTQEEVAALKREKDRLVQQLKQQTQNRMKLMADNYEDDHFKSSHSNQTNHKPSPDQDEEEEYMGIANQRLSSAILFRTIIQPLLELDQNRSKLKLYIGHLTTLCHDRDPLILRGLTPPASYNLDDDQAAWENELQKMTRGQLQDELEKGERDNAELQEFANAILQQIADHCPDILEQVVNALEESS

SEQ ID NO: 850285 - protein, 916 aa, Homo sapiens
MTIQALQDELRIQRDLNQLFQQDSSSRTGEPCVAELTEENFQRLHAEHERQAKELFLLRKTLEEMELRIETQKQTLNARDESIKKLLEMLQSKGLSAKATEEDHERTRRLAEAEMHVHHLESLLEQKEKENSMLREEMHRRFENAPDSAKTKALQTVIEMKDSKISSMERGLRDLEEEIQMLKSNGALSTEEREEEMKQMEVYRSHSKFMKNKVEQLKEELSSKEAQWEELKKKAAGLQAEIGQVKQELSRKDTELLALQTKLETLTNQFSDSKQHIEVLKESLTAKEQRAAILQTEVDALRLRLEEKETMLNKKTKQIQDMAEEKGTQAGEIHDLKDMLDVKERKVNVLQKKIENLQEQLRDKEKQMSSLKERVKSLQADTTNTDTALTTLEEALAEKERTIERLKEQRDRDEREKQEEIDNYKKDLKDLKEKVSLLQGDLSEKEASLLDLKEHASSLASSGLKKDSRLKTLEIALEQKKEECLKMESQLKKAHEAALEARASPEMSDRIQHLEREITRYKDESSKAQAEVDRLLEILKEVENEKNDKDKKIAELESLTSRQVKDQNKKVANLKHKEQVEKKKSAQMLEEARRREDNLNDSSQQLQDSLRKKDDRIEELEEALRESVQITAEREMVLAQEESARTNAEKQVEELLMAMEKVKQELESMKAKLSSTQQSLAEKETHLTNLRAERRKHLEEVLEMKQEALLAAISEKDANIALLELSSSKKKTQEEVAALKREKDRLVQQLKQQTQNRMKLMADNYEDDHFKSSHSNQTNHKPSPDQDEEEGIMGIANQRLSSAILFRTIIQPLLELDQNRSKLKLYIGHLTTLCHDRDPLILRGLTPPASYNLDDDQAAWENELQKMTRGQLQDELEKGERDNAELQEFANAILQQIADHCPDILEQVVNALEESS

SEQ ID NO: 850286 - protein, 1120 aa, Homo sapiens
MYGSARSVGKVEPSSQSPGRSPRLPRSPRLGHRRTNSTGGSSGSSVGGGSGKTLSMENIQSLNAAYATSGPMYLSDHENVGSETPKSTMTLGRSGGRLPYGVRMTAMGSSPNIASSGVASDTIAFGEHHLPPVSMASTVPHSLRQARDNTIMDLQTQLKEVLRENDLLRKDVEVKESKLSSSMNSIKTFWSPELKKERALRKDEASKITIWKEQYRVVQEENQHMQMTIQALQDELRIQRDLNQLFQQDSSSRTGEPCVAELTEENFQRLHAEHERQAKELFLLRKTLEEMELRIETQKQTLNARDESIKKLLEMLQSKGLSAKATEEDHERTRRLAEAEMHVHHLESLLEQKEKENSMLREEMHRRFENAPDSAKTKALQTVIEMKDSKISSMERGLRDLEEEIQMLKSNGALSTEEREEEMKQMEVYRSHSKFMKNKVEQLKEELSSKEAQWEELKKKAAGLQAEIGQVKQELSRKDTELLALQTKLETLTNQFSDSKQHIEVLKESLTAKEQRAAILQTEVDALRLRLEEKETMLNKKTKQIQDMAEEKGTQAGEIHDLKDMLDVKERKVNVLQKKIENLQEQLRDKEKQMSSLKERVKSLQADTTNTDTALTTLEEALAEKERTIERLKEQRDRDEREKQEEIDNYKKDLKDLKEKVSLLQGDLSEKEASLLDLKEHASSLASSGLKKDSRLKTLEIALEQKKEECLKMESQLKKAHEAALEARASPEMSDRIQHLEREITRYKDESSKAQAEVDRLLEILKEVENEKNDKDKKIAELESLTSRQVKDQNKKVANLKHKEQVEKKKSAQMLEEARRREDNLNDSSQQLQDSLRKKDDRIEELEEALRESVQITAEREMVLAQEESARTNAEKQVEELLMAMEKVKQELESMKAKLSSTQQSLAEKETHLTNLRAERRKHLEEVLEMKQEALLAAISEKDANIALLELSSSKKKTQEEVAALKREKDRLVQQLKQQTQNRMKLMADNYEDDHFKSSHSNQTNHKPSPDQIIQPLLELDQNRSKLKLYIGHLTTLCHDRDPLILRGLTPPASYNLDDDQAAWENELQKMTRGQLQDELEKGERDNAELQEFANAILQQIADHCPDILEQVVNALEESS

SEQ ID NO: 850287 - protein, 513 aa, Homo sapiens
EHGMVVQAMSGILRKEGLHVRLEMTRKNVDRDEREKQEEIDNYKKDLKDLKEKVSLLQGDLSEKEASLLDLKEHASSLASSGLKKDSRLKTLEIALEQKKEECLKMESQLKKAHEAALEARASPEMSDRIQHLEREITRYKDESSKAQAEVDRLLEILKEVENEKNDKDKKIAELESLTSRQVKDQNKKVANLKHKEQVEKKKSAQMLEEARRREDNLNDSSQQLQDSLRKKDDRIEELEEALRESVQITAEREMVLAQEESARTNAEKQVEELLMAMEKVKQELESMKAKLSSTQQSLAEKETHLTNLRAERRKHLEEVLEMKQEALLAAISEKDANIALLELSSSKKKTQEEVAALKREKDRLVQQLKQQTQNRMKLMADNYEDDHFKSSHSNQTNHKPSPDQIIQPLLELDQNRSKLKLYIGHLTTLCHDRDPLILRGLTPPASYNLDDDQAAWENELQKMTRGQLQDELEKGERDNAELQEFANAILQQIADHCPDILEQVVNALEESS

SEQ ID NO: 850288 - protein, 979 aa, Homo sapiens
MYGSARSVGKVEPSSQSPGRSPRLPRSPRLGHRRTNSTGGSSGSSVGGGSGKTLSMENIQSLNAAYATSGPMYLSDHENVGSETPKSTMTLGRSGGRLPYGVRMTAMGSSPNIASSGVASDTIAFGEHHLPPVSMASTVPHSLRQARDNTIMDLQTQLKEVLRENDLLRKDVEVKESKLSSSMNSIKTFWSPELKKERALRKDEASKITIWKEQYRVVQEENQHMQMTIQALQDELRIQRDLNQLFQQDSSSRTGEPCVAELTEENFQRLHAEHERQAKELFLLRKTLEEMELRIETQKQTLNARDESIKKLLEMLQSKGLSAKATEEDHERTRRLAEAEMHVHHLESLLEQKEKENSMLREEMHRRFENAPDSAKTKALQTVIEMKDSKISSMERGLRDLEEEIQMLKSNGALSTEEREEEMKQMEVYRSHSKFMKNKVEQLKEELSSKEAQWEELKKKAAGLQAEIGQVKQELSRKDTELLALQTKLETLTNQFSDSKQHIEVLKESLTAKEQRAAILQTEVDALRLRLEEKETMLNKKTKQIQDMAEEKGTQAGEIHDLKDMLDVKERKVNVLQKKIENLQEQLRDKEKQMSSLKERVKSLQADTTNTDTALTTLEEALAEKERTIERLKEQRDRDEREKQEEIDNYKKDLKDLKEKVSLLQGDLSEKEASLLDLKEHASSLASSGLKKDSRLKTLEIALEQKKEECLKMESQLKKAHEAALEARASPEMSDRIQHLEREITRYKDESSKAQAEVDRLLEILKEVENEKNDKDKKIAELESLTSRQVKDQNKKVANLKHKEQVEKKKSAQMLEEARRREDNLNDSSQQLQDSLRKKDDRIEELEEALRESVQITAEREMVLAQEESARTNAEKQVEELLMAMEKVKQELESMKAKLSSTQQSLAEKETHLTNLRAERRKHLEEVLEMKQEALLAAISEKDANIALLELSSSKKKTQEEVAALKREKDRLVQQLKQQ

SEQ ID NO: 850289 - protein, 439 aa, Homo sapiens
MYGSARSVGKVEPSSQSPGRSPRLPRSPRLGHRRTNSTGGSSGSSVGGGSGKTLSMENIQSLNAAYATSGPMYLSDHENVGSETPKSTMTLGRSGGRLPYGVRMTAMGSSPNIASSGVASDTIAFGEHHLPPVSMASTVPHSLRQARDNTIMDLQTQLKEVLRENDLLRKDVEVKESKLSSSMNSIKTFWSPELKKERALRKDEASKITIWKEQYRVVQEENQHMQMTIQALQDELRIQRDLNQLFQQDSSSRTGEPCVAELTEENFQRLHAEHERQAKELFLLRKTLEEMELRIETQKQTLNARDESIKKLLEMLQSKGLSAKATEEDHERTRRLAEAEMHVHHLESLLEQKEKENSMLREEMHRRFENAPDSAKTKALQTVIEMKDSKISSMERGLRDLEEEIQMLKSNGALSTEEREEEMKQMEVYRNGHIGDSSG

SEQ ID NO: 850290 - protein, 686 aa, Homo sapiens [sequence omitted]

SEQ ID NO: 850291 - protein, 529 aa, Homo sapiens [sequence omitted]

SEQ ID NO: 850292 - protein, 510 aa, Homo sapiens
MNAEEDSEEMPSLLTSTVQVASDNLIPQIRDKEDPQEMPHSPLGSMPEIRDNSPEPNDPEEPQEVSSTPSDKKGKKRKRCIWSTPKRRHKKKSLPRGTASSRHGIQKKLKRVDQVPQKKDDSTCNSTVETRAQKARTECARKSRSEEIIDGTSEMNEGKRSQKTPSTPRRVTQGAASPGHGIQEKLQVVDKVTQRKDDSTWNSEVMMRVQKARTKCARKSRSKEKKKEKDICSSSKRRFQKNIHRRGKPKSDTVDFHCSKLPVTCGEAKGILYKKKMKHGSSVKCIRNEDGTWLTPNEFEVEGKGRNAKNWKRNIRCEGMTLGELLKRKNSDECEVCCQGGQLLCCGTCPRVFHEDCHIPPVEAKRMLWSCTFCRMKRSSGSQQCHHVSKTLERQMQPQDQLKCEFLLLKAYCHPQSSFFTGIPFNIRDYGEPFQEAMWLDLVKERLITEMYTVAWFVRDMRLMFRNHKTFYKASDFGQVGLDLEAEFEKDLKDVLGFHEANDGGFWTLP

SEQ ID NO: 850293 - protein, 165 aa, Homo sapiens
RYLPLQRKNSDECEVCCQGGQLLCCGTCPRVFHEDCHIPPVEAKRMLWSCTFCRMKRSSGSQQCHHVSKTLERQMQPQDQLIRDYGEPFQEAMWLDLVKERLITEMYTVAWFVRDMRLMFRNHKTFYKASDFGQVGLDLEAEFEKDLKDVLGFHEANDGGFWTLP

SEQ ID NO: 850294 - protein, 546 aa, Homo sapiens [sequence omitted]

SEQ ID NO: 850295 - protein, 710 aa, Homo sapiens [sequence omitted]

SEQ ID NO: 850296 - protein, 496 aa, Homo sapiens
MTRAMEEALFQHFMHQKLGIAYAIHKPFPFFEGLLDNSIITKRMYMESLEACRNLIPVSRVVHNILTQLERTFNLSLLVTLFSQINLREYPNLVTIYRSFKRVGASYERQSRDTPILLEAPTGLAEGSSLHTPLALPPPQPPQPSCSPCAPRVSEPGTSSQQSDEILSESPSPSDPVLPLPALIQEGRSTSVTNDKLTSKMNAEEDSEEMPSLLTSTVQVASDNLIPQIRDKEDPQEMPHSPLGSMPEIRDNSPEPNDPEEPQEVSSTPSDKKGKKRKRCIWSTPKRRHKKKSLPREIIDGTSEMNEGKRSQKTPSTPRRVTQGAASPGHGIQEKLQVVDKVTQRKDDSTWNSEVMMRVQKARTKCARKSRSKEKKKEKDICSSSKRRFQKNIHRRGKPKSDTVDFHCSKLPVTCGEAKGILYKKKMKHGSSVKCIRNEDGTWLTPNEFEVEGKGRNAKNWKRNIRCEGMTLGELLKSGLLLCPPRINLKRELNSK

SEQ ID NO: 850297 - protein, 396 aa, Homo sapiens [sequence omitted]

SEQ ID NO: 850298 - protein, 546 aa, Homo sapiens [sequence omitted]

SEQ ID NO: 850299 - protein, 346 aa, Homo sapiens [sequence omitted]

SEQ ID NO: 850300 - protein, 248 aa, Homo sapiens
MASSGVKNTPRWRRKAPHGRERKEKGKKRKRCIWSTPKRRHKKKSLPREIIDGTSEMNEGKRSQKTPSTPRRVTQGAASPGHGIQEKLQVVDKVTQRKDDSTWNSEVMMRVQKARTKCARKSRSKEKKKEKDICSSSKRRFQKNIHRRGKPKSDTVDFHCSKLPVTCGEAKGILYKKKMKHGSSVKCIRNEDGTWLTPNEFEVEGKGRNAKNWKRNIRCEGMTLGELLKSGLLLCPPRINLKRELNSK

SEQ ID NO: 850301 - protein, 68 aa, Homo sapiens
TASSRHGIQKKLKRVDQVPQKKDDSTCNSTVETRAQKARTECARKSRSEGKADDGICHLNGSVWEGLS

SEQ ID NO: 850302 - protein, 390 aa, Homo sapiens
MVTRAGAGTAVAGAVVVALLSAALALYGPPLDAVLERAFSLRKAHSIKDMENTLQLVRNIIPPLSSTKHKGQDGRIGVVGGCQEYTGAPYFAAISALKVGADLSHVFCASAAAPVIKAYSPELIVHPVLDSPNAVHEVEKWLPRLHALVVGPGLGRDDALLRNVQGILEVSKARDIPVVIDADGLWLVAQQPALIHGYRKAVLTPNHVEFSRLYDAVLRGPMDSDDSHGSVLRLSQALGNVTVVQKGERDILSNGQQVLVCSQEGSSRRCGGQGDLLSGSLGVLVHWALLAGPQKTNGGISDLKLTIWGPEIETGVKTRAQGSCGPRTTTPTSPHLLLSPSPQVQPSPGGRVWRLLSHQAVQPPSLPEARSLHHHLRHDRRGGGRLQQAL

SEQ ID NO: 850303 - protein, 108 aa, Homo sapiens
MCSPAELWGWTRYQNQGRTLRRLWAGVCTSTLVHSHSHAHMCTRMQFIHMHSCAHSLARPCTLALIHMHGHAHSLAHALAHSSTHSCAQGTQSRCSQRDSDTFEMRVF

SEQ ID NO: 850304 - protein, 225 aa, Homo sapiens
MIVHPVLDSPNAVHEVEKWLPRLHALVVGPGLGRDDALLRNVQGILEVSKARDIPVVIDADGLWLVAQQPALIHGYRKAVLTPNHVEFSRLYDAVLRGPMDSDDSHGSVLRLSQALGNVTVVQKGERDILSNGQQVLVCSQEGSSRRCGGQGDLLSGSLGVLVHWALLAGPQKTNGSSPLLVAAFGACSLTRQCNHQAFQKHGRSTTTSDMIAEVGAAFSKLFET

SEQ ID NO: 850305 - protein, 349 aa, Homo sapiens
FQWLVSGDGAGAAGNPECCPMALGPRCGAIRACRRVLERAFSLRKAHSIKDMENTLQLVRNIIPPLSSTKHKGQDGRIGVVGGCQEYTGAPYFAAISALKVGADLSHVFCASAAAPVIKAYSPELIVHPVLDSPNAVHEVEKWLPRLHALVVGPGLGRDDALLRNVQGILEVSKARDIPVVIDADGLWLVAQQPALIHGYRKAVLTPNHVEFSRLYDAVLRGPMDSDDSHGSVLRLSQALGNVTVVQKGERDILSNGQQVLVCSQEGSSRRCGGQGDLLSGSLGVLVHWALLAGPQKTNGSSPLLVAAFGACSLTRQCNHQAFQKHGRSTTTSDMIAEVGAAFSKLFET

SEQ ID NO: 850306 - protein, 295 aa, Homo sapiens
MAGFRRRRGGSWESGMLPDGPGSSLWGNPGLQTSDSPNAVHEVEKWLPRLHALVVGPGLGRDDALLRNVQGILEVSKARDIPVVIDADGLWLVAQQPALIHGYRKAVLTPNHVEFSRLYDAVLRGPMDSDDSHGSVLRLSQALGNVTVVQKGERDILSNGQQVLVCSQEGSSRRCGGQGDLLSGSLGVLVHWALLAGPQKTNGGISDLKLTIWGPEIETGVKTRAQGSCGPRTTTPTSPHLLLSPSPQVQPSPGGRVWRLLSHQAVQPPSLPEARSLHHHLRHDRRGGGRLQQAL

SEQ ID NO: 850307 - protein, 126 aa, Homo sapiens
MDSDDSHGSVLRLSQALGNVTVVQKGERDILSNGQQVLVCSQEGSSRRCGGQGDLLSGSLGVLVHWALLAGPQKTNGSSPLLVAAFGACSLTRQCNHQAFQKHGRSTTTSDMIAEVGAAFSKLFET

SEQ ID NO: 850308 - protein, 283 aa, Homo sapiens
FQWLVSGDGAGAAGNPECCPMALGPRCGAIRACRRVLERAFSLRKAHSIKDMENTLQLVRNIIPPLSSTKHKGQDGRIGVVGGCQEYTGAPYFAAISALKVGILEVSKARDIPVVIDADGLWLVAQQPALIHGYRKAVLTPNHVEFSRLYDAVLRGPMDSDDSHGSVLRLSQALGNVTVVQKGERDILSNGQQVLVCSQEGSSRRCGGQGDLLSGSLGVLVHWALLAGPQKTNGSSPLLVAAFGACSLTRQCNHQAFQKHGRSTTTSDMIAEVGAAFSKLFET

SEQ ID NO: 850309 - protein, 349 aa, Homo sapiens; identical to SEQ ID NO: 850305

SEQ ID NO: 850310 - protein, 121 aa, Homo sapiens
MALRRPGERQYRGHVCLGSSTAVSLGMFASSKDTGNCGFSQHSSWQCRPRVSFCCLCGWFSWSGLTLTCSLVPCLSGAWYGFVPDACIRVFSYTFSSIFPQQGPNPPGSLQSLFGLMMTLE

SEQ ID NO: 850311 - protein, 121 aa, Homo sapiens; identical to SEQ ID NO: 850310

SEQ ID NO: 850312 - protein, 121 aa, Homo sapiens; identical to SEQ ID NO: 850310

SEQ ID NO: 850313 - protein, 121 aa, Homo sapiens; identical to SEQ ID NO: 850310

SEQ ID NO: 850314 - protein, 310 aa, Homo sapiens
FQWLVSGDGAGAAGNPECCPMALGPRCGAIRACRRVLERAFSLRKAHSIKDMENTLQLVRNIIPPLSSTKHKGQDGRIGVVGGCQEYTGAPYFAAISALKVGADLSHVFCASAAAPVIKAYSPELIVHPVLDSPNAVHEVEKWLPRLHALVVGPGLGRDDALLRNVQGILEVSKARDIPVVIDADGLWLVAQQPALIHGYRKAVLTPNHVEFSRLYDAVLRGPMDSDDSHGSVLRLSQALGNVTVVQKGERDILSNGQQVLVCSQEGSSRRCGGQGDLLSGSLGVLVHWALLAGPQKTNGGKATSSFILL

SEQ ID NO: 850315 - protein, 101 aa, Homo sapiens
FQWLVSGDGAGAAGNPECCPMALGPRCGAIRACRRVLERAFSLRKAHSIKDMENTLQLVRNIIPPLSSTKHKGQDGRIGVVGGCQEYTGAPYFAAISALKV

SEQ ID NO: 850316 - protein, 126 aa, Homo sapiens; identical to SEQ ID NO: 850307

SEQ ID NO: 850317 - protein, 349 aa, Homo sapiens; identical to SEQ ID NO: 850305

SEQ ID NO: 850318 - protein, 414 aa, Homo sapiens
FQWLVSGDGAGAAGNPECCPMALGPRCGAIRACRRVLERAFSLRKAHSIKDMENTLQLVRNIIPPLSSTKHKGQDGRIGVVGGCQEYTGAPYFAAISALKVGADLSHVFCASAAAPVIKAYSPELIVHPVLDSPNAVHEVEKWLPRLHALVVGPGLGRDDALLRNVQGILEVSKARDIPVVIDADGLWLVAQQPALIHGYRKAVLTPNHVEFSRLYDAVLRGPMDSDDSHGSVLRLSQALGNVTVVQKGERDILSNGQQVLVCSQEGSSRRCGGQGDLLSGSLGVLVHWALLAGPQKTNGSSPLLVAAFGACSLTRQCNHQAFQKHGRSTTTSDMIAELLGSNWEDRNEENHMRMKNSLAAQQSFSACSQIGEVSTCYSLCRRPSFLLCFPSLVFPPAGSWAGVPGCLPESRLH

SEQ ID NO: 850319 - protein, 126 aa, Homo sapiens; identical to SEQ ID NO: 850307

SEQ ID NO: 850320 - protein, 126 aa, Homo sapiens; identical to SEQ ID NO: 850307

SEQ ID NO: 850321 - protein, 121 aa, Homo sapiens; identical to SEQ ID NO: 850310

SEQ ID NO: 850322 - protein, 111 aa, Homo sapiens
MDSDDSHGSVLRLSQALGNVTVVQKGERDILSNGQQVLVCSQEGSSRRCGGQGDLLSGSLGVLVHWALLAGPQKTNGRQCNHQAFQKHGRSTTTSDMIAEVGAAFSKLFET

SEQ ID NO: 850323 - protein, 121 aa, Homo sapiens; identical to SEQ ID NO: 850310

SEQ ID NO: 850324 - protein, 349 aa, Homo sapiens; identical to SEQ ID NO: 850305

SEQ ID NO: 850325 - protein, 186 aa, Homo sapiens
FQWLVSGDGAGAAGNPECCPMALGPRCGAIRACRRVLERAFSLRKAHSIKDMENTLQLVRNIIPPLSSTKHKGQDGRIGVVGGCQEYTGAPYFAAISALKVGADLSHVFCASAAAPVIKAYSPELIVHPVLDSPNAVHEVEKWLPRLHALVVGPGLGRDDALLRNVQGILEVSKARDIPVVIDAVS

SEQ ID NO: 850326 - protein, 150 aa, Homo sapiens
  misc_feature (147)..(147): Xaa can be any naturally occurring amino acid
PSGLLGAGGEITVCVQGSELLSDDEVPLGIGGQFLKHQAEAQPEDLSLEEEARFSSQQPPAQLSHRPQRGPLLWPERGPPAPRHQEMASASPFLSAWSQVPVNLEDVAVYLSGEEPRCMDPAQRDAPLENEDLGIQFGGRPLIGKEXCPF

SEQ ID NO: 850327 - protein, 480 aa, Homo sapiens
MATVPGLQPLPTLEQDLEQEEILIVKVEEDFCLEEEPSVETEDPSPETFRQLFRLFCYQEVAGPREALSRLWELCCRWLRPELRTKEQILELLVLEQFLTVLPGEIQARVREQQPESGEEAVVLVEGLQRKPRKHRQRGSELLSDDEVPLGIGGQFLKHQAEAQPEDLSLEEEARFSSQQPPAQLSHRPQRGPLLWPERGPPAPRHQEMASASPFLSAWSQVPVNLEDVAVYLSGEEPRCMDPAQRDAPLENEGPGIQLEDGGDGREDAPLRMEWYRVLSARCQGPGHPLPGQRPAPVRGLVRPDQPRGGPPPGRRASHGADKPYTCPECGKGFSKTSHLTKHQRTHTGERPYKCLVCGKGFSDRSNFSTHQRVHTGEKPYPCPECGKRFSQSSSLVIHRRTHSGERPYACTQCGKRFNNSSHFSAHRRTHTGEKPYTCPACGRGFRRGTDLHKHQRTHMGAGSLPTLQPVAPGGPGAKA

SEQ ID NO: 850328 - protein, 480 aa, Homo sapiens; identical to SEQ ID NO: 850327

SEQ ID NO: 850329 - protein, 208 aa, Homo sapiens [sequence omitted]

SEQ ID NO: 850330 - protein, 208 aa, Homo sapiens [sequence omitted]

SEQ ID NO: 850331 - protein, 208 aa, Homo sapiens [sequence omitted]

SEQ ID NO: 850332 - protein, 480 aa, Homo sapiens; identical to SEQ ID NO: 850327

SEQ ID NO: 850333 - protein, 208 aa, Homo sapiens [sequence omitted]

SEQ ID NO: 850334 - protein, 208 aa, Homo sapiens [sequence omitted]

SEQ ID NO: 850335 - protein, 208 aa, Homo sapiens [sequence omitted]

SEQ ID NO: 850336 - protein, 462 aa, Homo sapiens
MSAGGPCPAAAGGGPGGASCSVGAPGGVSMFRWLEVLEKEFDKAFVDVDLLLGEIDPDQADITYEGRQKMTSLSSCFAQLCHKAQSVSQINHKLEAQLVDLKSELTETQAEKVVLEKEVHDQLLQLHSIQLQLHAKTGQSADSGTIKAKLSGPSVEELERELEANKKEKMKEAQLEAEVKLLRKENEALRRHIAVLQAEVYGARLAAKYLDKELAGRVQQIQLLGRDMKGPAHDKLWNQLEAEIHLHRHKTVIRACRGRNDLKRPMQAPPGHDQDSLKKSQGVGPIRKVLLLKEDHEGLGISITGGKEHGVPILISEIHPGQPADRCGGLHVGDAILAVNGVNLRDTKHKEAVTILSQQRGEIEFEVVYVAPEVDSDDENVEYEDESGHRYRLYLDELEGGGNPGASCKDTSGEIKVLQGFNKKAVTDTHENGDLGTASETPLDDGASKLDDLHTLYHKKSY

SEQ ID NO: 850337 - protein, 311 aa, Homo sapiens
MSAGGPCPAAAGGGPGGASCSVGAPGGVSMFRWLEVLEKEFDKAFVDVDLLLGEIDPDQADITYEGRQKMTSLSSCFAQLCHKAQSVSQINHKLEAQLVDLKSELTETQAEKVVLEKEVHDQLLQLHSIQLQLHAKTGQSADSGTIKAKLERELEANKKEKMKEAQLEAEVKLLRKENEALRRHIAVLQAEVYGARLAAKYLDKELAGRVQQIQLLGRDMKGPAHDKLWNQLEAEIHLHRHKTVIRACRGRNDLKRPMQAPPGHHARRIFVFLIETGFHHIVQAGLEPLTSGYPPTLASQSAGITGMSHCT

SEQ ID NO: 850338 - protein, 539 aa, Homo sapiens
MSAGGPCPAAAGGGPGGASCSVGAPGGVSMFRWLEVLEKEFDKAFVDVDLLLGEIDPDQADITYEGRQKMTSLSSCFAQLCHKAQSVSQINHKLEAQLVDLKSELTETQAEKVVLEKEVHDQLLQLHSIQLQLHAKTGQSADSGTIKAKLERELEANKKEKMKEAQLEAEVKLLRKENEALRRHIAVLQAEVYGARLAAKYLDKELAGRVQQIQLLGRDMKGPAHDKLWNQLEAEIHLHRHKTVIRACRGRNDLKRPMQAPPGHDQDSLKKSQGVGPIRKVLLLKEDHEGLGISITGGKEHGVPILISEIHPGQPADRCGGLHVGDAILAVNGVNLRDTKHKEAVTILSQQRGEIEFEVVYVAPEVDSDDENVEYEDESGHRYRLYLDELEGGGNPGASCKDTSGEIKVLQVWHRRLKNQKSAKEGVTVLINEDKELAELRGLAAGVGLANACYAIQYVALAIIMEHLGKGTLPTQEEIENLPAFPREKLTLRLLLGSGAFGEVYEGTAVDILGVGSGEIKVAVKTLKKGSTDQEKIEF

SEQ ID NO: 850339 - protein, 454 aa, Homo sapiens
MSAGGPCPAAAGGGPGGASCSVGAPGGVSMFRWLEVLEKEFDKAFVDVDLLLGEIDPDQADITYEGRQKMTSLSSCFAQLCHKAQSVSQINHKLEAQLVDLKSELTETQAEKVVLEKEVHDQLLQLHSIQLQLHAKTGQSADSGTIKAKLERELEANKKEKMKEAQLEAEVKLLRKENEALRRHIAVLQAEVYGARLAAKYLDKELAGRVQQIQLLGRDMKGPAHDKLWNQLEAEIHLHRHKTVIRACRGRNDLKRPMQAPPGHDQDSLKKSQGVGPIRKVLLLKEDHEGLGISITGGKEHGVPILISEIHPGQPADRCGGLHVGDAILAVNGVNLRDTKHKEAVTILSQQRGEIEFEVVYVAPEVDSDDENVEYEDESGHRYRLYLDELEGGGNPGASCKDTSGEIKVLQGFNKKAVTDTHENGDLGTASETPLDDGASKLDDLHTLYHKKSY

SEQ ID NO: 850340 - protein, 772 aa, Homo sapiens
MRLSSLLALLRPALPLILGLSLGCSLSLLRVSWIQGEGEDPCVEAVGERGGPQNPDSRARLDQSDEDFKPRIVPYYRDPNKPYKKVLRTRYIQTELGSRERLLVAVLTSRATLSTLAVAVNRTVAHHFPRLLYFTGQRGARAPAGMQVVSHGDERPAWLMSETLRHLHTHFGADYDWFFIMQDDTYVQAPRLAALAGHLSINQDLYLGRAEEFIGAGEQARYCHGGFGYLLSRSLLLRLRPHLDGCRGDILSARPDEWLGRCLIDSLGVGCVSQHQGQQYRSFELAKNRDPEKEGSSAFLSAFAVHPVSEGTLMYRLHKRFSALELERAYSEIEQLQAQIRNLTVLTPEGEAGLSWPVGLPAPFTPHSRFEVLGWDYFTEQHTFSCADGAPKCPLQGASRADVGDALETALEQLNRRYQPRLRFQKQRLLNGYRRFDPARGMEYTLDLLLECVTQRGHRRALARRVSLLRPLSRVEILPMPYVTEATRVQLVLPLLVAEAAAAPAFLEAFAANVLEPREHALLTLLLVYGPREGGRGAPDPFLGVKAAAAELERRYPGTRLAWLAVRAEAPSQVRLMDVVSKKHPVDTLFFLTTVWTRPGPEVLNRCRMNAISGWQAFFPVHFQEFNPALSPQRSPPGPPGAGPDPPSPPGADPSRGAPIGGRFDRQASAEGCFYNADYLAARARLAGELAGQEEEEALEGLEVMDVFLRFSGLHLFRAVEPGLVQKFSLRDCSPRLSEELYHRCRLSNLEGLGGRAQLAMALFEQEQANST

SEQ ID NO: 850341 - protein, 162 aa, Homo sapiens
MRLSSLLALLRPALPLILGLSLGCSLSLLRVSWIQGEGEDPCVEAVGERGGPQNPDSRARLDQSDEDFKPRIVPYYRDPNKPYKKVLRTRYIQTELGSRERLLVAVLTSRATLSIWLSLSRSRPIALSPPGGPNLITFPLSASAPGRARQDGGQIENCCCIF

SEQ ID NO: 850342 - protein, 345 aa, Homo sapiens
MRLSSLLALLRPALPLILGLSLGCSLSLLRVSWIQGEGEDPCVEAVGERGGPQNPDSRARLDQSDEDFKPRIVPYYRDPNKPYKKVLRTRYIQTELGSRERLLVAVLTSRATLSTLAVAVNRTVAHHFPRLLYFTGQRGARAPAGMQVVSHGDERPAWLMSETLRHLHTHFGADYDWFFIMQDDTYVQAPRLAALAGHLSINQDLYLGRAEEFIGAGEQARYCHGGFGYLLSRSLLLRLRPHLDGCRGDILSARPDEWLGRCLIDSLGVGCVSQHQGQQYRSFELAKNRDPEKEGSSAFLSAFAVHPVSEGTLMYRLHKRFSALELERAYSEIEQLQNCPKKAQG

SEQ ID NO: 850343 - protein, 844 aa, Homo sapiens
MRLSSLLALLRPALPLILGLSLGCSLSLLRVSWIQGEGEDPCVEAVGERGGPQNPDSRARLDQSDEDFKPRIVPYYRDPNKPYKKVLRTRYIQTELGSRERLLVAVLTSRATLSTLAVAVNRTVAHHFPRLLYFTGQRGARAPAGMQVVSHGDERPAWLMSETLRHLHTHFGADYDWFFIMQDDTYVQAPRLAALAGHLSINQDLYLGRAEEFIGAGEQARYCHGGFGYLLSRSLLLRLRPHLDGCRGDILSARPDEWLGRCLIDSLGVGCVSQHQGQQYRSFELAKNRDPEKEGSSAFLSAFAVHPVSEGTLMYRLHKRFSALELERAYSEIEQLQNCPKKAQGRRENSQVERQAWQRWSVDENKGGDYEEDVSPLGVGEKGCELLFQDTFTCAKSTFSTSFSWHLCKAQIRNLTVLTPEGEAGLSWPVGLPAPFTPHSRFEVLGWDYFTEQHTFSCADGAPKCPLQGASRADVGDALETALEQLNRRYQPRLRFQKQRLLNGYRRFDPARGMEYTLDLLLECVTQRGHRRALARRVSLLRPLSRVEILPMPYVTEATRVQLVLPLLVAEAAAAPAFLEAFAANVLEPREHALLTLLLVYGPREGGRGAPDPFLGVKAAAAELERRYPGTRLAWLAVRAEAPSQVRLMDVVSKKHPVDTLFFLTTVWTRPGPEVLNRCRMNAISGWQAFFPVHFQEFNPALSPQRSPPGPPGAGPDPPSPPGADPSRGAPIGGRFDRQASAEGCFYNADYLAARARLAGELAGQEEEEALEGLEVMDVFLRFSGLHLFRAVEPGLVQKFSLRDCSPRLSEELYHRCRLSNLEGLGGRAQLAMALFEQEQANST

SEQ ID NO: 850344 - protein, 420 aa, Homo sapiens
MRLSSLLALLRPALPLILGLSLGCSLSLLRVSWIQGEGEDPCVEAVGERGGPQNPDSRARLDQSDEDFKPRIVPYYRDPNKPYKKVLRTRYIQTELGSRERLLVAVLTSRATLSTLAVAVNRTVAHHFPRLLYFTGQRGARAPAGMQVVSHGDERPAWLMSETLRHLHTHFGADYDWFFIMQDDTYVQAPRLAALAGHLSINQDLYLGRAEEFIGAGEQARYCHGGFGYLLSRSLLLRLRPHLDGCRGDILSARPDEWLGRCLIDSLGVGCVSQHQGQQYRSFELAKNRDPEKEGSSAFLSAFAVHPVSEGTLMYRLHKRFSALELERAYSEIEQLQAQIRNLTVLTPEGEAGLSWPVGLPAPFTPHSRFEVLGWDYFTDSSIGAISPACASRSSDCSTAIGASTQHGAWSTPWTCCWNV

SEQ ID NO: 850345 - protein, 331 aa, Homo sapiens
MEYTLDLLLECVTQRGHRRALARRVSLLRPLSRVEILPMPYVTEATRVQLVLPLLVAEAAAAPAFLEAFAANVLEPREHALLTLLLVYGPREGGRGAPDPFLGVKAAAAELERRYPGTRLAWLAVRAEAPSQVRLMDVVSKKHPVDTLFFLTTVWTRPGPEVLNRCRMNAISGWQAFFPVHFQEFNPALSPQRSPPGPPGAGPDPPSPPGADPSRGAPIGGRFDRQASAEGCFYNADYLAARARLAGELAGQEEEEALEGLEVMDVFLRFSGLHLFRAVEPGLVQKFSLRDCSPRLSEELYHRCRLSNLEGLGGRAQLAMALFEQEQANST

SEQ ID NO: 850346 - protein, 772 aa, Homo sapiens; identical to SEQ ID NO: 850340

SEQ ID NO: 850347 - protein, 119 aa, Homo sapiens
FLPGPLLPPDHLSFSFSSRCWLMTDQDRIINLVVGSLTSLLILVTLISAFVFPQLPPKPLNIFFAVCISLSSITACILVSTVENLNSVLEGLSCNAQDKNFQPWVYTKGYLLIISSSSP

SEQ ID NO: 850348 - protein, 118 aa, Homo sapiens
MEDFATRTYGTSGLDNRPLFGETSAKDRIINLVVGSLTSLLILVTLISAFVFPQLPPKPLNIFFAVCISLSSITACILIYWYRQGDLEPKFRKLIYYIIFSIIMLCICANLYFHDVGR

SEQ ID NO: 850349 - protein, 134 aa, Homo sapiens
PTCDGGSGSGSGDLRRSREVIRSAATGPRDSSPTHLARVPGPRHRIPAGVWTQGPLSPARPGPPSVRAPRGCRAAQDEEVRGAGAEQSRSPRVSPHPSLAPALPRPLGFGYAGAVRRRLAVVDLRPREVMLSCF

SEQ ID NO: 850350 - protein, 134 aa, Homo sapiens; identical to SEQ ID NO: 850349

SEQ ID NO: 850351 - protein, 118 aa, Homo sapiens; identical to SEQ ID NO: 850348

SEQ ID NO: 850352 - protein, 108 aa, Homo sapiens
HSVPSSPRPRASARTGGDGANSQRGPIPPLAAVAEVAVAVPECEVRVSWGEEERQALLGPRSGAVRDQELSPTKSSLQPGEERGAVPGRELSPTGSCPKLRTDFRTRF

SEQ ID NO: 850353 - protein, 1836 aa, Homo sapiens
MSAKRPWPFSFPILFPLIPTIVCKDGLVIPLVELSAKQVAFHIPFEVVEKVYPPVPEQLQLRIAFWSFPENEEDIRLYSCLANGSADEFQRGDQLFRMRAVKDPLQIGFHLSATVVPPQMVPPKGAYNVAVMFDRCRVTSCSCTCGAGAKWCTHVVALCLFRIHNASAVCLRAPVSESLSRLQRDQLQKFAQYLISELPQQVGEVGTPSCNELRARPHNSLPVRPRPPWVHLGRVLPASVSFSLRSSPQLSVSWTNSCLPSQQPSIQCVELLDPTAGPSASDQSTWYLDESTLTDNIKKTLHKFCGPSPVVFSDVNSMYLSSTEPPAAAEWACLLRPLRGREPEGVWNLLSIVREMFKRRDSNAAPLLEILTDQCLTYEQITGWWYSVRTSASHSSASGHTGRSNGQSEVAAHACASMCDEMVTLWRLAVLDPALSPQRRRELCTQLRQWQLKVIENVKRGQHKKTLERLFPGFRPAVEACYFNWEEAYPLPGVTYSGTDRKLALCWARALPSRPGASRSGGLEESRDRPRPLPTEPAVRPKEPGTKRKGLGEGVPSSQRGPRRLSAEGGDKALHKMGPGGGKAKALGGAGSGSKGSAGGGSKRRLSSEDSSLEPDLAEMSLDDSSLALGAEASTFGGFPESPPPCPLHGGSRGPSTFLPEPPDTYEEDGGVYFSEGPEPPTASVGPPGLLPGDVCTQDDLPSTDESGNGLPKTKEAAPAVGEEDDDYQAYYLNAQDGAGGEEEKAEGGAGEEHDLFAGLKPLEQESRMEVLFACAEALHAHGYSSEASRLTVELAQDLLANPPDLKVEPPPAKGKKNKVSTSRQTWVATNTLSKAAFLLTVLSERPEHHNLAFRVGMFALELQRPPASTKALEVKLAYQESEVAALLKKIPLGPSEMSTMRCRAEELREGTLCDYRPVLPLMLASFIFDVLCAPGSRPPSRNWNSETPGDEELGFEAAVAALGMKTTVSEAEHPLLCEGTRREKGDLALALMITYKDDQAKLKKILDKLLDRESQTHKPQTLSSFYSSSRPTTASQRSPSKHGGPSAPGALQPLTSGSAGPAQPGSVAGAGPGPTEGFTEKNVPESSPHSPCEGLPSEAALTPRPEGKVPSRLALGSRGGYNGRGWGSPGRPKKKHTGMASIDSSAPETTSDSSPTLSRRPLRGGWAPTSWGRGQDSDSISSSSSDSLGSSSSSGSRRASASGGARAKTVEVGRYKGRRPESHAPHVPNQPSEAAAHFYFELAKTVLIKAGGNSSTSIFTHPSSSGGHQGPHRNLHLCAFEIGLYALGLHNFVSPNWLSRTYSSHVSWITGQAMEIGSAALTILVECWDGHLTPPEVASLADRASRARDSNMVRAAAELALSCLPHAHALNPNEIQRALVQCKEQDNLMLEKACMAVEEAAKGGGVYPEVLFEVAHQWFWLYEQTAGGSSTAREGATSCSASGIRAGGEAGRGMPEGRGGPGTEPVTVAAAAVTAAATVVPVISVGSSLYPGPGLGHGHSPGLHPYTALQPHLPCSPQYLTHPAHPAHPMPHMPRPAVFPVPSSAYPQGVHPAFLGAQYPYSVTPPSLAATAVSFPVPSMAPITVHPYHTEPGLPLPTSVACELWGQGTVSSVHPASTFPAIQGASLPALTTQPSPLVSGGFPPPEEETHSQPVNPHSLHHLHAAYRVGMLALEMLGRRAHNDHPNNFSRSPPYTDDVKWLLGLAAKLGVNYVHQFCVGAAKGVLSPFVLQEIVMETLQRLSPAHAHNHLRAPAFHQLVQRCQQAYMQYIHHRLIHLTPADYDDFVNAIRSARSAFCLTPMGMMQFNDILQNLKRSKQTKELWQRVSLEMATFSP

SEQ ID NO: 850354 - protein, 1803 aa, Homo sapiens
LCSFISEAESLCQNWRGWRKQSAGPNSPTGGGGGGGSGGTRMRDGLVIPLVELSAKQVAFHIPFEVVEKVYPPVPEQLQLRIAFWSFPENEEDIRLYSCLANGSADEFQRGDQLFRMRAVKDPLQIGFHLSATVVPPQMVPPKGAYNVAVMFDRCRVTSCSCTCGAGAKWCTHVVALCLFRIHNASAVCLRAPVSESLSRLQRDQLQKFAQYLISELPQQVGEVGTPSCNELRARPHNSLPVRPRPPWVHLGRVLPASVSFSLRSSPQLSVSWTNSCLPSQQPSIQCVELLDPTAGPSASDQSTWYLDESTLTDNIKKTLHKFCGPSPVVFSDVNSMYLSSTEPPAAAEWACLLRPLRGREPEGVWNLLSIVREMFKRRDSNAAPLLEILTDQCLTYEQITGWWYSVRTSASHSSASGHTGRSNGQSEVAAHACASMCDEMVTLWRLAVLDPALSPQRRRELCTQLRQWQLKVIENVKRGQHKKTLERLFPGFRPAVEACYFNWEEAYPLPGVTYSGTDRKLALCWARALPSRPGASRSGGLEESRDRPRPLPTEPAVRPKEPGTKRKGLGEGVPSSQRGPRRLSAEGGDKALHKMGPGGGKAKALGGAGSGSKGSAGGGSKRRLSSEDSSLEPDLAEMSLDDSSLALGAEASTFGGFPESPPPCPLHGGSRGPSTFLPEPPDTYEEDGGVYFSEGPEPPTASVGPPGLLPGDVCTQDDLPSTDESGNGLPKTKEAAPAVGEEDDDYQAYYLNAQDGAGGEEEKAEGGAGEEHDLFAGLKPLEQESRMEVLFACAEALHAHGYSSEASRLTVELAQDLLANPPDLKVEPPPAKGKKNKVSTSRQTWVATNTLSKAAFLLTVLSERPEHHNLAFRVGMFALELQRPPASTKALEVKLAYQESEVAALLKKIPLGPSEMSTMRCRAEELREGTLCDYRPVLPLMLASFIFDVLCAPGSRPPSRNWNSETPGDEELGFEAAVAALGMKTTVSEAEHPLLCEGTRREKGDLALALMITYKDDQAKLKKILDKLLDRESQTHKPQTLSSFYSSSRPTTASQRSPSKHGGPSAPGALQPLTSGSAGPAQPGSVAGAGPGPTEGFTEKNVPESSPHSPCEGLPSEAALTPRPEGKVPSRLALGSRGGYNGRGWGSPGRPKKKHTGMASIDSSAPETTSDSSPTLSRRPLRGGWAPTSWGRGQDSDSISSSSSDSLGSSSSSGSRRASASGGARAKTVEVGRGPPGSSPNLHLCAFEIGLYALGLHNFVSPNWLSRTYSSHVSWITGQAMEIGSAALTILVECWDGHLTPPEVASLADRASRARDSNMVRAAAELALSCLPHAHALNPNEIQRALVQCKEQDNLMLEKACMAVEEAAKGGGVYPEVLFEVAHQWFWLYEQTAGGSSTAREGATSCSASGIRAGGEAGRGMPEGRGGPGTEPVTVAAAAVTAAATVVPVISVGSSLYPGPGLGHGHSPGLHPYTALQPHLPCSPQYLTHPAHPAHPMPHMPRPAVFPVPSSAYPQGVHPAFLGAQYPYSVTPPSLAATAVSFPVPSMAPITVHPYHTEPGLPLPTSVACELWGQGTVSSVHPASTFPAIQGASLPALTTQPSPLVSGGFPPPEEETHSQPVNPHSLHHLHAAYRVGMLALEMLGRRAHNDHPNNFSRSPPYTDDVKWLLGLAAKLGVNYVHQFCVGAAKGVLSPFVLQEIVMETLQRLSPAHAHNHLRAPAFHQLVQRCQQAYMQYIHHRLIHLTPADYDDFVNAIRSARSAFCLTPMGMMQFNDILQNLKRSKQTKELWQRVSLEMATFSP

SEQ ID NO: 850355 - protein, 1608 aa, Homo sapiens
MGSPRPCSACLRLFLPQILPTAQRLLDELLSSQSTAINTVCGAPDPTAGPSASDQSTWYLDESTLTDNIKKTLHKFCGPSPVVFSDVNSMYLSSTEPPAAAEWACLLRPLRGREPEGVWNLLSIVREMFKRRDSNAAPLLEILTDQCLTYEQITGWWYSVRTSASHSSASGHTGRSNGQSEVAAHACASMCDEMVTLWRLAVLDPALSPQRRRELCTQLRQWQLKVIENVKRGQHKKTLERLFPGFRPAVEACYFNWEEAYPLPGVTYSGTDRKLALCWARALPSRPGASRSGGLEESRDRPRPLPTEPAVRPKEPGTKRKGLGEGVPSSQRGPRRLSAEGGDKALHKMGPGGGKAKALGGAGSGSKGSAGGGSKRRLSSEDSSLEPDLAEMSLDDSSLALGAEASTFGGFPESPPPCPLHGGSRGPSTFLPEPPDTYEEDGGVYFSEGPEPPTASVGPPGLLPGDVCTQDDLPSTDESGNGLPKTKEAAPAVGEEDDDYQAYYLNAQDGAGGEEEKAEGGAGEEHDLFAGLKPLEQESRMEVLFACAEALHAHGYSSEASRLTVELAQDLLANPPDLKVEPPPAKGKKNKVSTSRQTWVATNTLSKAAFLLTVLSERPEHHNLAFRVGMFALELQRPPASTKALEVKLAYQESEVAALLKKIPLGPSEMSTMRCRAEELREGTLCDYRPVLPLMLASFIFDVLCAPGSRPPSRNWNSETPGDEELGFEAAVAALGMKTTVSEAEHPLLCEGTRREKGDLALALMITYKDDQAKLKKILDKLLDRESQTHKPQTLSSFYSSSRPTTASQRSPSKHGGPSAPGALQPLTSGSAGPAQPGSVAGAGPGPTEGFTEKNVPESSPHSPCEGLPSEAALTPRPEGKVPSRLALGSRGGYNGRGWGSPGRPKKKHTGMASIDSSAPETTSDSSPTLSRRPLRGGWAPTSWGRGQDSDSISSSSSDSLGSSSSSGSRRASASGGARAKTVEVGRYKGRRPESHAPHVPNQPSEAAAHFYFELAKTVLIKAGGNSSTSIFTHPSSSGGHQGPHRNLHLCAFEIGLYALGLHNFVSPNWLSRTYSSHVSWITGQAMEIGSAALTILVECWDGHLTPPEVASLADRASRARDSNMVRAAAELALSCLPHAHALNPNEIQRALVQCKEQDNLMLEKACMAVEEAAKGGGVYPEVLFEVAHQWFWLYEQTAGGSSTAREGATSCSASGIRAGGEAGRGMPEGRGGPGTEPVTVAAAAVTAAATVVPVISVGSSLYPGPGLGHGHSPGLHPYTALQPHLPCSPQYLTHPAHPAHPMPHMPRPAVFPVPSSAYPQGVHPAFLGAQYPYSVTPPSLAATAVSFPVPSMAPITVHPYHTEPGLPLPTSVACELWGQGTVSSVHPASTFPAIQGASLPALTTQPSPLVSGGFPPPEEETHSQPVNPHSLHHLHAAYRVGMLALEMLGRRAHNDHPNNFSRSPPYTDDVKWLLGLAAKLGVNYVHQFCVGAAKGVLSPFVLQEIVMETLQRLSPAHAHNHLRAPAFHQLVQRCQQAYMQYIHHRLIHLTPADYDDFVNAIRSARSAFCLTPMGMMQFNDILQNLKRSKQTKELWQRVSLEMATFSP

SEQ ID NO: 850356 - protein, 1597 aa, Homo sapiens
LCSFISEAESLCQNWRGWRKQSAGPNSPTGGGGGGGSGGTRMRDGLVIPLVELSAKQVAFHIPFEVVEKVYPPVPEQLQLRIAFWSFPENEEDIRLYSCLANGSADEFQRGDQLFRMRAVKDPLQIGFHLSATVVPPQMVPPKGAYNVAVMFDRCRVTSCSCTCGAGAKWCTHVVALCLFRIHNASAVCLRAPVSESLSRLQRDQLQKFAQYLISELPQQVGEVGTPSCNELRARPHNSLPVRPRPPWVHLGRVLPASVSFSLRSSPQLSVSWTNSCLPSQQPSIQCVELLDPTAGPSASDQSTWYLDESTLTDNIKKTLHKFCGPSPVVFSDVNSMYLSSTEPPAAAEWACLLRPLRGREPEGVWNLLSIVREMFKRRDSNAAPLLEILTDQCLTYEQITGWWYSVRTSASHSSASGHTGRSNGQSEVAAHACASMCDEMVTLWRLAVLDPALSPQRRRELCTQLRQWQLKVIENVKRGQHKKTLERLFPGFRPAVEACYFNWEEAYPLPGVTYSGTDRKLALCWARALPSRPGASRSGGLEESRDRPRPLPTEPAVRPKEPGTKRKGLGEGVPSSQRGPRRLSAEGGDKALHKMGPGGGKAKALGGAGSGSKGSAGGGSKRRLSSEDSSLEPDLAEMSLDDSSLALGAEASTFGGFPESPPPCPLHGGSRGPSTFLPEPPDTYEEDGGVYFSEGPEPPTASVGPPGLLPGDVCTQDDLPSTDESGNGLPKTKEAAPAVGEEDDDYQAYYLNAQDGAGGEEEKAEGGAGEEHDLFAGLKPLEQESRMEVLFACAEALHAHGYSSEASRLTVELAQDLLANPPDLKGKKNKVSTSRQTWVATNTLSKAAFLLTVLSERPEHHNLAFRVGMFALELQRPPASTKALEVKLAYQESEVAALLKKIPLGPSEMSTMRCRAEELREGTLCDYRPVLPLMLASFIFDVLCAPGSRPPSRNWNSETPGDEELGFEAAVAALGMKTTVSEAEHPLLCEGTRREKGDLALALMITYKDDQAKLKKILDKLLDRESQTHKPQTLSSFYSSSRPTTASQRSPSKHGGPSAPGALQPLTSGSAGPAQPGSVAGAGPGPTEGFTEKNVPESSPHSPCEGLPSEAALTPRPEGKVPSRLALGSRGGYNGRGWGSPGRPKKKHTGMASIDSSAPETTSDSSPTLSRRPLRGGWAPTSWGRGQDSDSISSSSSDSLGSSSSSGSRRASASGGARAKTVEVGRYKGRRPESHAPHVPNQPSEAAAHFYFELAKTVLIKAGGNSSTSIFTHPSSSGGHQGPHRNLHLCAFEIGLYALGLHNFVSPNWLSRTYSSHVSWITGQAMEIGSAALTILVECWDGHLTPPEVASLADRASRARDSNMVRAAAELALSCLPHAHALNPNEIQRALVQCKEQDNLMLEKACMAVEEAAKGGGVYPEVLFEVAHQWFWLYEQTAGGSSTAREGATSCSASGIRAGGEAGRGMPEGRGGPGTEPVTVAAAAVTAAATVVPVISVGSSLYPGPGLGHGHSPGLHPYTALQPHLPCSPQYLTHPAHPAHPMPHMPRPAVFPVPSSAYPQVRPVFCWGVRHGKILGIHRGLEWVLWEYNWSVGESW

SEQ ID NO: 850357 - protein, 1597 aa, Homo sapiens; identical to SEQ ID NO: 850356

SEQ ID NO: 850358 - protein, 1842 aa, Homo sapiens
LCSFISEAESLCQNWRGWRKQSAGPNSPTGGGGGGGSGGTRMRDGLVIPLVELSAKQVAFHIPFEVVEKVYPPVPEQLQLRIAFWSFPENEEDIRLYSCLANGSADEFQRGDQLFRMRAVKDPLQIGFHLSATVVPPQMVPPKGAYNVAVMFDRCRVTSCSCTCGAGAKWCTHVVALCLFRIHNASAVCLRAPVSESLSRLQRDQLQKFAQYLISELPQQVGEVGTPSCNELRARPHNSLPVRPRPPWVHLGRVLPASVSFSLRSSPQLSVSWTNSCLPSQQPSIQCVELLDPTAGPSASDQSTWYLDESTLTDNIKKTLHKFCGPSPVVFSDVNSMYLSSTEPPAAAEWACLLRPLRGREPEGVWNLLSIVREMFKRRDSNAAPLLEILTDQCLTYEQITGWWYSVRTSASHSSASGHTGRSNGQSEVAAHACASMCDEMVTLWRLAVLDPALSPQRRRELCTQLRQWQLKVIENVKRGQHKKTLERLFPGFRPAVEACYFNWEEAYPLPGVTYSGTDRKLALCWARALPSRPGASRSGGLEESRDRPRPLPTEPAVRPKEPGTKRKGLGEGVPSSQRGPRRLSAEGGDKALHKMGPGGGKAKALGGAGSGSKGSAGGGSKRRLSSEDSSLEPDLAEMSLDDSSLALGAEASTFGGFPESPPPCPLHGGSRGPSTFLPEPPDTYEEDGGVYFSEGPEPPTASVGPPGLLPGDVCTQDDLPSTDESGNGLPKTKEAAPAVGEEDDDYQAYYLNAQDGAGGEEEKAEGGAGEEHDLFAGLKPLEQESRMEVLFACAEALHAHGYSSEASRLTVELAQDLLANPPDLKVEPPPAKGKKNKVSTSRQTWVATNTLSKAAFLLTVLSERPEHHNLAFRVGMFALELQRPPASTKALEVKLAYQESEVAALLKKIPLGPSEMSTMRCRAEELREGTLCDYRPVLPLMLASFIFDVLCAPGSRPPSRNWNSETPGDEELGFEAAVAALGMKTTVSEAEHPLLCEGTRREKGDLALALMITYKDDQAKLKKILDKLLDRESQTHKPQTLSSFYSSSRPTTASQRSPSKHGGPSAPGALQPLTSGSAGPAQPGSVAGAGPGPTEGFTEKNVPESSPHSPCEGLPSEAALTPRPEGKVPSRLALGSRGGYNGRGWGSPGRPKKKHTGMASIDSSAPETTSDSSPTSWGRGQDSDSISSSSSDSLGSSSSSGSRRASASGGARAKTVEVGRYKGRRPESHAPHVPNQPSEAAAHFYFELAKTVLIKAGGNSSTSIFTHPSSSGGHQGPHRNLHLCAFEIGLYALGLHNFVSPNWLSRTYSSHVSWITGQAMEIGSAALTILVECWDGHLTPPEVASLADRASRARDSNMVRAAAELALSCLPHAHALNPNEIQRALVQCKEQDNLMLEKACMAVEEAAKGGGVYPEVLFEVAHQWFWLYEQTAGGSSTAREGATSCSASGIRAGGEAGRGMPEGRGGPGTEPVTVAAAAVTAAATVVPVISVGSSLYPGPGLGHGHSPGLHPYTALQPHLPCSPQYLTHPAHPAHPMPHMPRPAVFPVPSSAYPQGVHPAFLGAQYPYSVTPPSLAATAVSFPVPSMAPITVHPYHTEPGLPLPTSVACELWGQGTVSSVHPASTFPAIQGASLPALTTQPSPLVSGGFPPPEEETHSQPVNPHSLHHLHAAYRVGMLALEMLGRRAHNDHPNNFSRSPPYTDDVKWLLGLAAKLGVNYVHQFCVGAAKGVLSPFVLQEIVMETLQRLSPAHAHNHLRAPAFHQLVQRCQQAYMQYIHHRLIHLTPADYDDFVNAIRSARSAFCLTPMGMMQFNDILQNLKRSKQTKELWQRVSLEMATFSP

SEQ ID NO: 850359 - protein, 1492 aa, Homo sapiens
LCSFISEAESLCQNWRGWRKQSAGPNSPTGGGGGGGSGGTRMRDGLVIPLVELSAKQVAFHIPFEVVEKVYPPVPEQLQLRIAFWSFPENEEDIRLYSCLANGSADEFQRGDQLFRMRAVKDPLQIGFHLSATVVPPQMVPPKGAYNVAVMFDRCRVTSCSCTCGAGAKWCTHVVALCLFRIHNASAVCLRAPVSESLSRLQRDQLQKFAQYLISELPQQVGEVGTPSCNELRARPHNSLPVRPRPPWVHLGRVLPASVSFSLRSSPQLSVSWTNSCLPSQQPSIQCVELLDPTAGPSASDQSTWYLDESTLTDNIKKTLHKFCGPSPVVFSDVNSMYLSSTEPPAAAEWACLLRPLRGREPEGVWNLLSIVREMFKRRDSNAAPLLEILTDQCLTYEQITGWWYSVRTSASHSSASGHTGRSNGQSEVAAHACASMCDEMVTLWRLAVLDPALSPQRRRELCTQLRQWQLKVIENVKRGQHKKTLERLFPGFRPAVEACYFNWEEAYPLPGVTYSGTDRKLALCWARALPSRPGASRSGGLEESRDRPRPLPTEPAVRPKEPGTKRKGLGEGVPSSQRGPRRLSAEGGDKALHKMGPGGGKAKALGGAGSGSKGSAGGGSKRRLSSEDSSLEPDLAEMSLDDSSLALGAEASTFGGFPESPPPCPLHGGSRGPSTFLPEPPDTYEEDGGVYFSEGPEPPTASVGPPGLLPGDVCTQDDLPSTDESGNGLPKTKEAAPAVGEEDDDYQAYYLNAQDGAGGEEEKAEGGAGEEHDLFAGLKPLEQESRMEVLFACAEALHAHGYSSEASRLTVELAQDLLANPPDLKVEPPPAKGKKNKVSTSRQTWVATNTLSKAAFLLTVLSERPEHHNLAFRVGMFALELQRPPASTKALEVKLAYQESEVAALLKKIPLGPSEMSTMRCRAEELREGTLCDYRPVLPLMLASFIFDVLCAPGSRPPSRNWNSETPGDEELGFEAAVAALGMKTTVSEAEHPLLCEGTRREKGDLALALMITYKDDQAKLKKILDKLLDRESQTHKPQTLSSFYSSSRPTTASQRSPSKHGGPSAPGALQPLTSGSAGPAQPGSVAGAGPGPTEGFTEKNVPESSPHSPCEGLPSEAALTPRPEGKVPSRLALGSRGGYNGRGWGSPGRPKKKHTGMASIDSSAPETTSDSSPTLSRRPLRGGWAPTSWGRGQDSDSISSSSSDSLGSSSSSGSRRASASGGARAKTVEVGRYKGRRPESHAPHVPNQPSEAAAHFYFELAKTVLIKAGGNSSTSIFTHPSSSGGHQGPHRNLHLCAFEIGLYALGLHNFVSPNWLSRTYSSHVSWITGQAMEIGSAALTILVECWDGHLTPPEVASLADRASRARDSNMVRAAAELALSCLPHAHALNPNEIQRALVQCKEQDNLMLEKACMAVEEAAKGGGVYPEVLFEVAHQWFWLYEQTAGGSSTAREGATSCSASGIRAGGEAGRGMPEGRGGPGLSRLQWQRQQ

SEQ ID NO: 850360 - protein, 1597 aa, Homo sapiens; identical to SEQ ID NO: 850356

SEQ ID NO: 850361 - protein, 1462 aa, Homo sapiens
LCSFISEAESLCQNWRGWRKQSAGPNSPTGGGGGGGSGGTRMRDGLVIPLVELSAKQVAFHIPFEVVEKVYPPVPEQLQLRIAFWSFPENEEDIRLYSCLANGSADEFQRGDQLFRMRAVKDPLQIGFHLSATVVPPQMVPPKGAYNVAVMFDRCRVTSCSCTCGAGAKWCTHVVALCLFRIHNASAVCLRAPVSESLSRLQRDQLQKFAQYLISELPQQVGEVGTPSCNELRARPHNSLPVRPRPPWVHLGRVLPASVSFSLRSSPQLSVSWTNSCLPSQQPSIQCVELLDPTAGPSASDQSTWYLDESTLTDNIKKTLHKFCGPSPVVFSDVNSMYLSSTEPPAAAEWACLLRPLRGREPEGVWNLLSIVREMFKRRDSNAAPLLEILTDQCLTYEQITGWWYSVRTSASHSSASGHTGRSNGQSEVAAHACASMCDEMVTLWRLAVLDPALSPQRRRELCTQLRQWQLKVIENVKRGQHKKTLERLFPGFRPAVEACYFNWEEAYPLPGVTYSGTDRKLALCWARALPSRPGASRSGGLEESRDRPRPLPTEPAVRPKEPGTKRKGLGEGVPSSQRGPRRLSAEGGDKALHKMGPGGGKAKALGGAGSGSKGSAGGGSKRRLSSEDSSLEPDLAEMSLDDSSLALGAEASTFGGFPESPPPCPLHGGSRGPSTFLPEPPDTYEEDGGVYFSEGPEPPTASVGPPGLLPGDVCTQDDLPSTDESGNGLPKTKEAAPAVGEEDDDYQAYYLNAQDGAGGEEEKAEGGAGEEHDLFAGLKPLEQESRMEVLFACAEALHAHGYSSEASRLTVELAQDLLANPPDLKVEPPPAKGKKNKVSTSRQTWVATNTLSKAAFLLTVLSERPEHHNLAFRVGMFALELQRPPASTKALEVKLAYQESEVAALLKKIPLGPSEMSTMRCRAEELREGTLCDYRPVLPLMLASFIFDVLCAPGSRPPSRNWNSETPGDEELGFEAAVAALGMKTTVSEAEHPLLCEGTRREKGDLALALMITYKDDQAKLKKILDKLLDRESQTHKPQTLSSFYSSSRPTTASQRSPSKHGGPSAPGALQPLTSGSAGPAQPGSVAGAGPGPTEGFTEKNVPESSPHSPCEGLPSEAALTPRPEGKVPSRLALGSRGGYNGRGWGSPGRPKKKHTGMASIDSSAPETTSDSSPTLSRRPLRGGWAPTSWGRGQDSDSISSSSSDSLGSSSSSGSRRASASGGARAKTVEVGRYKGRRPESHAPHVPNQPSEAAAHFYFELAKTVLIKAGGNSSTSIFTHPSSSGGHQGPHRNLHLCAFEIGLYALGLHNFVSPNWLSRTYSSHVSWITGQAMEIGSAALTILVECWDGHLTPPEVASLADRASRARDSNMVRAAAELALSCLPHAHALNPNEIQRALVQCKEQDNLMLEKACMAVEEAAKGGGVYPEVLFEVAHQWFWLYEQTAGGSSTAREGATSCTAL

SEQ ID NO: 850362 - protein, 970 aa, Homo sapiens
LCSFISEAESLCQNWRGWRKQSAGPNSPTGGGGGGGSGGTRMRDGLVIPLVELSAKQVAFHIPFEVVEKVYPPVPEQLQLRIAFWSFPENEEDIRLYSCLANGSADEFQRGDQLFRMRAVKDPLQIGFHLSATVVPPQMVPPKGAYNVAVMFDRCRVTSCSCTCGAGAKWCTHVVALCLFRIHNASAVCLRAPVSESLSRLQRDQLQKFAQYLISELPQQVGEVGTPSCNELRARPHNSLPVRPRPPWVHLGRVLPASVSFSLRSSPQLSVSWTNSCLPSQQPSIQCVELLDPTAGPSASDQSTWYLDESTLTDNIKKTLHKFCGPSPVVFSDVNSMYLSSTEPPAAAEWACLLRPLRGREPEGVWNLLSIVREMFKRRDSNAAPLLEILTDQCLTYEQITGWWYSVRTSASHSSASGHTGRSNGQSEVAAHACASMCDEMVTLWRLAVLDPALSPQRRRELCTQLRQWQLKVIENVKRGQHKKTLERLFPGFRPAVEACYFNWEEAYPLPGVTYSGTDRKLALCWARALPSRPGASRSGGLEESRDRPRPLPTEPAVRPKEPGTKRKGLGEGVPSSQRGPRRLSAEGGDKALHKMGPGGGKAKALGGAGSGSKGSAGGGSKRRLSSEDSSLEPDLAEMSLDDSSLALGAEASTFGGFPESPPPCPLHGGSRGPSTFLPEPPDTYEEDGGVYFSEGPEPPTASVGPPGLLPGDVCTQDDLPSTDESGNGLPKTKEAAPAVGEEDDDYQAYYLNAQDGAGGEEEKAEGGAGEEHDLFAGLKPLEQESRMEVLFACAEALHAHGYSSEASRLTVELAQDLLANPPDLKVEPPPAKGKKNKVSTSRQTWVATNTLSKAAFLLTVLSERPEHHNLAFRVGMFALELQRPPASTKALEVKLAYQESEVAALLKKIPLGPSEMSTMRCRAEELREGTLCDYRPVLPLMLASFIFDVLCAPGFPAPKSQLEQRDTWG

SEQ ID NO: 850363 - protein, 967 aa, Homo sapiens
LCSFISEAESLCQNWRGWRKQSAGPNSPTGGGGGGGSGGTRMRDGLVIPLVELSAKQVAFHIPFEVVEKVYPPVPEQLQLRIAFWSFPENEEDIRLYSCLANGSADEFQRGDQLFRMRAVKDPLQIGFHLSATVVPPQMVPPKGAYNVAVMFDRCRVTSCSCTCGAGAKWCTHVVALCLFRIHNASAVCLRAPVSESLSRLQRDQLQKFAQYLISELPQQVGEVGTPSCNELRARPHNSLPVRPRPPWVHLGRVLPASVSFSLRSSPQLSVSWTNSCLPSQQPSIQCVELLDPTAGPSASDQSTWYLDESTLTDNIKKTLHKFCGPSPVVFSDVNSMYLSSTEPPAAAEWACLLRPLRGREPEGVWNLLSIVREMFKRRDSNAAPLLEILTDQCLTYEQITGWWYSVRTSASHSSASGHTGRSNGQSEVAAHACASMCDEMVTLWRLAVLDPALSPQRRRELCTQLRQWQLKVIENVKRGQHKKTLERLFPGFRPAVEACYFNWEEAYPLPGVTYSGTDRKLALCWARALPSRPGASRSGGLEESRDRPRPLPTEPAVRPKEPGTKRKGLGEGVPSSQRGPRRLSAEGGDKALHKMGPGGGKAKALGGAGSGSKGSAGGGSKRRLSSEDSSLEPDLAEMSLDDSSLALGAEASTFGGFPESPPPCPLHGGSRGPSTFLPEPPDTYEEDGGVYFSEGPEPPTASVGPPGLLPGDVCTQDDLPSTDESGNGLPKTKEAAPAVGEEDDDYQAYYLNAQDGAGGEEEKAEGGAGEEHDLFAGLKPLEQESRMEVLFACAEALHAHGYSSEASRLTVELAQDLLANPPDLKVEPPPAKGKKNKVSTSRQTWVATNTLSKAAFLLTVLSERPEHHNLAFRVGMFALELQRPPASTKALEVKLAYQESEVAALLKKIPLGPSEMSTMRCRAEELREGTLCDYRPVLPLMLASFIFDVLCAPGMMPDPTVSGELG

SEQ ID NO: 850364 - protein, 1855 aa, Homo sapiens
LCSFISEAESLCQNWRGWRKQSAGPNSPTGGGGGGGSGGTRMRDGLVIPLVELSAKQVAFHIPFEVVEKVYPPVPEQLQLRIAFWSFPENEEDIRLYSCLANGSADEFQRGDQLFRMRAVKDPLQIGFHLSATVVPPQMVPPKGAYNVAVMFDRCRVTSCSCTCGAGAKWCTHVVALCLFRIHNASAVCLRAPVSESLSRLQRDQLQKFAQYLISELPQQVGEVGTPSCNELRARPHNSLPVRPRPPWVHLGRVLPASVSFSLRSSPQLSVSWTNSCLPSQQPSIQCVELLDPTAGPSASDQSTWYLDESTLTDNIKKTLHKFCGPSPVVFSDVNSMYLSSTEPPAAAEWACLLRPLRGREPEGVWNLLSIVREMFKRRDSNAAPLLEILTDQCLTYEQITGWWYSVRTSASHSSASGHTGRSNGQSEVAAHACASMCDEMVTLWRLAVLDPALSPQRRRELCTQLRQWQLKVIENVKRGQHKKTLERLFPGFRPAVEACYFNWEEAYPLPGVTYSGTDRKLALCWARALPSRPGASRSGGLEESRDRPRPLPTEPAVRPKEPGTKRKGLGEGVPSSQRGPRRLSAEGGDKALHKMGPGGGKAKALGGAGSGSKGSAGGGSKRRLSSEDSSLEPDLAEMSLDDSSLALGAEASTFGGFPESPPPCPLHGGSRGPSTFLPEPPDTYEEDGGVYFSEGPEPPTASVGPPGLLPGDVCTQDDLPSTDESGNGLPKTKEAAPAVGEEDDDYQAYYLNAQDGAGGEEEKAEGGAGEEHDLFAGLKPLEQESRMEVLFACAEALHAHGYSSEASRLTVELAQDLLANPPDLKVEPPPAKGKKNKVSTSRQTWVATNTLSKAAFLLTVLSERPEHHNLAFRVGMFALELQRPPASTKALEVKLAYQESEVAALLKKIPLGPSEMSTMRCRAEELREGTLCDYRPVLPLMLASFIFDVLCAPGSRPPSRNWNSETPGDEELGFEAAVAALGMKTTVSEAEHPLLCEGTRREKGDLALALMITYKDDQAKLKKILDKLLDRESQTHKPQTLSSFYSSSRPTTASQRSPSKHGGPSAPGALQPLTSGSAGPAQPGSVAGAGPGPTEGFTEKNVPESSPHSPCEGLPSEAALTPRPEGKVPSRLALGSRGGYNGRGWGSPGRPKKKHTGMASIDSSAPETTSDSSPTLSRRPLRGGWAPTSWGRGQDSDSISSSSSDSLGSSSSSGSRRASASGGARAKTVEVGRYKGRRPESHAPHVPNQPSEAAAHFYFELAKTVLIKAGGNSSTSIFTHPSSSGGHQGPHRNLHLCAFEIGLYALGLHNFVSPNWLSRTYSSHVSWITGQAMEIGSAALTILVECWDGHLTPPEVASLADRASRARDSNMVRAAAELALSCLPHAHALNPNEIQRALVQCKEQDNLMLEKACMAVEEAAKGGGVYPEVLFEVAHQWFWLYEQTAGGSSTAREGATSCSASGIRAGGEAGRGMPEGRGGPGTEPVTVAAAAVTAAATVVPVISVGSSLYPGPGLGHGHSPGLHPYTALQPHLPCSPQYLTHPAHPAHPMPHMPRPAVFPVPSSAYPQGVHPAFLGAQYPYSVTPPSLAATAVSFPVPSMAPITVHPYHTEPGLPLPTSVACELWGQGTVSSVHPASTFPAIQGASLPALTTQPSPLVSGGFPPPEEETHSQPVNPHSLHHLHAAYRVGMLALEMLGRRAHNDHPNNFSRSPPYTDDVKWLLGLAAKLGVNYVHQFCVGAAKGVLSPFVLQEIVMETLQRLSPAHAHNHLRAPAFHQLVQRCQQAYMQYIHHRLIHLTPADYDDFVNAIRSARSAFCLTPMGMMQFNDILQNLKRSKQTKELWQRVSLEMATFSP

SEQ ID NO: 850365 - protein, 1792 aa, Homo sapiens
MSAKRPWPFSFPILFPLIPTIVCKDGLVIPLVELSAKQVAFHIPFEVVEKVYPPVPEQLQLRIAFWSFPENEEDIRLYSCLANGSADEFQRGDQLFRMRAVKDPLQIGFHLSATVVPPQMVPPKGAYNVAVMFDRCRVTSCSCTCGAGAKWCTHVVALCLFRIHNASAVCLRAPVSESLSRLQRDQLQKFAQYLISELPQQILPTAQRLLDELLSSQSTAINTVCGAPDPTAGPSASDQSTWYLDESTLTDNIKKTLHKFCGPSPVVFSDVNSMYLSSTEPPAAAEWACLLRPLRGREPEGVWNLLSIVREMFKRRDSNAAPLLEILTDQCLTYEQITGWWYSVRTSASHSSASGHTGRSNGQSEVAAHACASMCDEMVTLWRLAVLDPALSPQRRRELCTQLRQWQLKVIENVKRGQHKKTLERLFPGFRPAVEACYFNWEEAYPLPGVTYSGTDRKLALCWARALPSRPGASRSGGLEESRDRPRPLPTEPAVRPKEPGTKRKGLGEGVPSSQRGPRRLSAEGGDKALHKMGPGGGKAKALGGAGSGSKGSAGGGSKRRLSSEDSSLEPDLAEMSLDDSSLALGAEASTFGGFPESPPPCPLHGGSRGPSTFLPEPPDTYEEDGGVYFSEGPEPPTASVGPPGLLPGDVCTQDDLPSTDESGNGLPKTKEAAPAVGEEDDDYQAYYLNAQDGAGGEEEKAEGGAGEEHDLFAGLKPLEQESRMEVLFACAEALHAHGYSSEASRLTVELAQDLLANPPDLKVEPPPAKGKKNKVSTSRQTWVATNTLSKAAFLLTVLSERPEHHNLAFRVGMFALELQRPPASTKALEVKLAYQESEVAALLKKIPLGPSEMSTMRCRAEELREGTLCDYRPVLPLMLASFIFDVLCAPGSRPPSRNWNSETPGDEELGFEAAVAALGMKTTVSEAEHPLLCEGTRREKGDLALALMITYKDDQAKLKKILDKLLDRESQTHKPQTLSSFYSSSRPTTASQRSPSKHGGPSAPGALQPLTSGSAGPAQPGSVAGAGPGPTEGFTEKNVPESSPHSPCEGLPSEAALTPRPEGKVPSRLALGSRGGYNGRGWGSPGRPKKKHTGMASIDSSAPETTSDSSPTLSRRPLRGGWAPTSWGRGQDSDSISSSSSDSLGSSSSSGSRRASASGGARAKTVEVGRYKGRRPESHAPHVPNQPSEAAAHFYFELAKTVLIKAGGNSSTSIFTHPSSSGGHQGPHRNLHLCAFEIGLYALGLHNFVSPNWLSRTYSSHVSWITGQAMEIGSAALTILVECWDGHLTPPEVASLADRASRARDSNMVRAAAELALSCLPHAHALNPNEIQRALVQCKEQDNLMLEKACMAVEEAAKGGGVYPEVLFEVAHQWFWLYEQTAGGSSTAREGATSCSASGIRAGGEAGRGMPEGRGGPGTEPVTVAAAAVTAAATVVPVISVGSSLYPGPGLGHGHSPGLHPYTALQPHLPCSPQYLTHPAHPAHPMPHMPRPAVFPVPSSAYPQGVHPAFLGAQYPYSVTPPSLAATAVSFPVPSMAPITVHPYHTEPGLPLPTSVACELWGQGTVSSVHPASTFPAIQGASLPALTTQPSPLVSGGFPPPEEETHSQPVNPHSLHHLHAAYRVGMLALEMLGRRAHNDHPNNFSRSPPYTDDVKWLLGLAAKLGVNYVHQFCVGAAKGVLSPFVLQEIVMETLQRLSPAHAHNHLRAPAFHQLVQRCQQAYMQYIHHRLIHLTPADYDDFVNAIRSARSAFCLTPMGMMQFNDILQNLKRSKQTKELWQRVSLEMATFSP

SEQ ID NO: 850366 - protein, 1734 aa, Homo sapiens
FDRARVPSEQLGMKKDIRLYSCLANGSADEFQRGDQLFRMRAVKDPLQIGFHLSATVVPPQMVPPKGAYNVAVMFDRCRVTSCSCTCGAGAKWCTHVVALCLFRIHNASAVCLRAPVSESLSRLQRDQLQKFAQYLISELPQQILPTAQRLLDELLSSQSTAINTVCGAPDPTAGPSASDQSTWYLDESTLTDNIKKTLHKFCGPSPVVFSDVNSMYLSSTEPPAAAEWACLLRPLRGREPEGVWNLLSIVREMFKRRDSNAAPLLEILTDQCLTYEQITGWWYSVRTSASHSSASGHTGRSNGQSEVAAHACASMCDEMVTLWRLAVLDPALSPQRRRELCTQLRQWQLKVIENVKRGQHKKTLERLFPGFRPAVEACYFNWEEAYPLPGVTYSGTDRKLALCWARALPSRPGASRSGGLEESRDRPRPLPTEPAVRPKEPGTKRKGLGEGVPSSQRGPRRLSAEGGDKALHKMGPGGGKAKALGGAGSGSKGSAGGGSKRRLSSEDSSLEPDLAEMSLDDSSLALGAEASTFGGFPESPPPCPLHGGSRGPSTFLPEPPDTYEEDGGVYFSEGPEPPTASVGPPGLLPGDVCTQDDLPSTDESGNGLPKTKEAAPAVGEEDDDYQAYYLNAQDGAGGEEEKAEGGAGEEHDLFAGLKPLEQESRMEVLFACAEALHAHGYSSEASRLTVELAQDLLANPPDLKVEPPPAKGKKNKVSTSRQTWVATNTLSKAAFLLTVLSERPEHHNLAFRVGMFALELQRPPASTKALEVKLAYQESEVAALLKKIPLGPSEMSTMRCRAEELREGTLCDYRPVLPLMLASFIFDVLCAPGSRPPSRNWNSETPGDEELGFEAAVAALGMKTTVSEAEHPLLCEGTRREKGDLALALMITYKDDQAKLKKILDKLLDRESQTHKPQTLSSFYSSSRPTTASQRSPSKHGGPSAPGALQPLTSGSAGPAQPGSVAGAGPGPTEGFTEKNVPESSPHSPCEGLPSEAALTPRPEGKVPSRLALGSRGGYNGRGWGSPGRPKKKHTGMASIDSSAPETTSDSSPTLSRRPLRGGWAPTSWGRGQDSDSISSSSSDSLGSSSSSGSRRASASGGARAKTVEVGRYKGRRPESHAPHVPNQPSEAAAHFYFELAKTVLIKAGGNSSTSIFTHPSSSGGHQGPHRNLHLCAFEIGLYALGLHNFVSPNWLSRTYSSHVSWITGQAMEIGSAALTILVECWDGHLTPPEVASLADRASRARDSNMVRAAAELALSCLPHAHALNPNEIQRALVQCKEQDNLMLEKACMAVEEAAKGGGVYPEVLFEVAHQWFWLYEQTAGGSSTAREGATSCSASGIRAGGEAGRGMPEGRGGPGTEPVTVAAAAVTAAATVVPVISVGSSLYPGPGLGHGHSPGLHPYTALQPHLPCSPQYLTHPAHPAHPMPHMPRPAVFPVPSSAYPQGVHPAFLGAQYPYSVTPPSLAATAVSFPVPSMAPITVHPYHTEPGLPLPTSVACELWGQGTVSSVHPASTFPAIQGASLPALTTQPSPLVSGGFPPPEEETHSQPVNPHSLHHLHAAYRVGMLALEMLGRRAHNDHPNNFSRSPPYTDDVKWLLGLAAKLGVNYVHQFCVGAAKGVLSPFVLQEIVMETLQRLSPAHAHNHLRAPAFHQLVQRCQQAYMQYIHHRLIHLTPADYDDFVNAIRSARSAFCLTPMGMMQFNDILQNLKRSKQTKELWQRVSLEMATFSP

SEQ ID NO: 850367 - protein, 1597 aa, Homo sapiens; identical to SEQ ID NO: 850356

SEQ ID NO: 850368 - protein, 1847 aa, Homo sapiens
LCSFISEAESLCQNWRGWRKQSAGPNSPTGGGGGGGSGGTRMRDGLVIPLVELSAKQVAFHIPFEVVEKVYPPVPEQLQLRIAFWSFPENEEDIRLYSCLANGSADEFQRGDQLFRMRAVKDPLQIGFHLSATVVPPQMVPPKGAYNVAVMFDRCRVTSCSCTCGAGAKWCTHVVALCLFRIHNASAVCLRAPVSESLSRLQRDQLQKFAQYLISELPQQVGEVGTPSCNELRARPHNSLPVRPRPPWVHLGRVLPASVSFSLRSSPQLSVSWTNSCLPSQQPSIQCVELLDPTAGPSASDQSTWYLDESTLTDNIKKTLHKFCGPSPVVFSDVNSMYLSSTEPPAAAEWACLLRPLRGREPEGVWNLLSIVREMFKRRDSNAAPLLEILTDQCLTYEQITGWWYSVRTSASHSSASGHTGRSNGQSEVAAHACASMCDEMVTLWRLAVLDPALSPQRRRELCTQLRQWQLKVIENVKRGQHKKTLERLFPGFRPAVEACYFNWEEAYPLPGVTYSGTDRKLALCWARALPSRPGASRSGGLEESRDRPRPLPTEPAVRPKEPGTKRKGLGEGVPSSQRGPRRLSAEGGDKALHKMGPGGGKAKALGGAGSGSKGSAGGGSKRRLSSEDSSLEPDLAEMSLDDSSLALGAEASTFGGFPESPPPCPLHGGSRGPSTFLPEPPDTYEEDGGVYFSEGPEPPTASVGPPGLLPGDVCTQDDLPSTDESGNGLPKTKEAAPAVGEEDDDYQAYYLNAQDGAGGEEEKAEGGAGEEHDLFAGLKPLEQESRMEVLFACAEALHAHGYSSEASRLTVELAQDLLANPPDLKVEPPPAKGKKNKVSTSRQTWVATNTLSKAAFLLTVLSERPEHHNLAFRVGMFALELQRPPASTKALEVKLAYQESEVAALLKKIPLGPSEMSTMRCRAEELREGTLCDYRPVLPLMLASFIFDVLCAPGSRPPSRNWNSETPGDEELGFEAAVAALGMKTTVSEAEHPLLCEGTRREKGDLALALMITYKDDQAKLKKILDKLLDRESQTHKPQTLSSFYSSSRPTTASQRSPSKHGGPSAPGALQPLTSGSAGPAQPGSVAGAGPGPTEGFTEKNVPESSPHSPCEGLPSEAALTPRPEGKVPSRLALGSRGGYNGRGWGSPGRPKKKHTGMASIDSSAPETTSDSSPTLSRRPLRGGWAPTSWGRGQDSDSISSSSSDSLGSSSSSGSRRASASGGARAKTVEVGRYKGRRPESHAPHVPNQPSEAAAHFYFELAKTVLIKAGGNSSTSIFTHPSSSGGHQGPHRNLHLCAFEIGLYALGLHNFVSPNWLSRTYSSHVSWITGQAMEIGSAALTILVECWDGHLTPPEVASLADRASRARDSNMVRAAAELALSCLPHAHALNPNEIQRALVQCKEQDNLMLEKACMAVEEAAKGGGVYPEVLFEVAHQWFWLYEQTAGGSSTAREGATSCSASGIRAGGEAGRGMPEGRGGPGTEPVTVAAAAVTAAATVVPVISVGSSLYPGPGLGHGHSPGLHPYTALQPHLPCSPQYLTHPAHPAHPMPHMPRPAVFPVPSSAYPQGVHPAFLGAQYPYSVTPPSLAATAVSFPVPSMAPITVHPYHTEPGLPLPTSVALSSVHPASTFPAIQGASLPALTTQPSPLVSGGFPPPEEETHSQPVNPHSLHHLHAAYRVGMLALEMLGRRAHNDHPNNFSRSPPYTDDVKWLLGLAAKLGVNYVHQFCVGAAKGVLSPFVLQEIVMETLQRLSPAHAHNHLRAPAFHQLVQRCQQAYMQYIHHRLIHLTPADYDDFVNAIRSARSAFCLTPMGMMQFNDILQNLKRSKQTKELWQRVSLEMATFSP

SEQ ID NO: 850369 - protein, 1597 aa, Homo sapiens; identical to SEQ ID NO: 850356

SEQ ID NO: 850370 - protein, 1929 aa, Homo sapiens
LCSFISEAESLCQNWRGWRKQSAGPNSPTGGGGGGGSGGTRMRDGLVIPLVELSAKQVAFHIPFEVVEKVYPPVPEQLQLRIAFWSFPENEEDIRLYSCLANGSADEFQRGDQLFRMRAVKDPLQIGFHLSATVVPPQMVPPKGAYNVAVMFDRCRVTSCSCTCGAGAKWCTHVVALCLFRIHNASAVCLRAPVSESLSRLQRDQLQKFAQYLISELPQQVGEVGTPSCNELRARPHNSLPVRPRPPWVHLGRVLPASVSFSLRSSPQLSVSWTNSCLPSQQPSIQCVELLDPTAGPSASDQSTWYLDESTLTDNIKKTLHKFCGPSPVVFSDVNSMYLSSTEPPAAAEWACLLRPLRGREPEGVWNLLSIVREMFKRRDSNAAPLLEILTDQCLTYEQITGWWYSVRTSASHSSASGHTGRSNGQSEVAAHACASMCDEMVTLWRLAVLDPALSPQRRRELCTQLRQWQLKVIENVKRGQHKKTLERLFPGFRPAVEACYFNWEEAYPLPGVTYSGTDRKLALCWARALPSRPGASRSGGLEESRDRPRPLPTEPAVRPKEPGTKRKGLGEGVPSSQRGPRRLSAEGGDKALHKMGPGGGKAKALGGAGSGSKGSAGGGSKRRLSSEDSSLEPDLAEMSLDDSSLALGAEASTFGGFPESPPPCPLHGGSRGPSTFLPEPPDTYEEDGGVYFSEGPEPPTASVGPPGLLPGDVCTQDDLPSTDESGNGLPKTKEAAPAVGEEDDDYQAYYLNAQDGAGGEEEKAEGGAGEEHDLFAGLKPLEQESRMEVLFACAEALHAHGYSSEASRLTVELAQDLLANPPDLKVEPPPAKGKKNKVSTSRQTWVATNTLSKAAFLLTVLSERPEHHNLAFRVGMFALELQRPPASTKALEVKLAYQESEVAALLKKIPLGPSEMSTMRCRAEELREGTLCDYRPVLPLMLASFIFDVLCAPGMMPDPTVSGELVVGVAFSKKDQEPQVSESPLGPIRQLHGWSVMMRILGSPVFFPMHDTSVCLTYPNFYYSGFSGSRPPSRNWNSETPGDEELGFEAAVAALGMKTTVSEAEHPLLCEGTRREKGDLALALMITYKDDQAKLKKILDKLLDRESQTHKPQTLSSFYSSSRPTTASQRSPSKHGGPSAPGALQPLTSGSAGPAQPGSVAGAGPGPTEGFTEKNVPESSPHSPCEGLPSEAALTPRPEGKVPSRLALGSRGGYNGRGWGSPGRPKKKHTGMASIDSSAPETTSDSSPTLSRRPLRGGWAPTSWGRGQDSDSISSSSSDSLGSSSSSGSRRASASGGARAKTVEVGRYKGRRPESHAPHVPNQPSEAAAHFYFELAKTVLIKAGGNSSTSIFTHPSSSGGHQGPHRNLHLCAFEIGLYALGLHNFVSPNWLSRTYSSHVSWITGQAMEIGSAALTILVECWDGHLTPPEVASLADRASRARDSNMVRAAAELALSCLPHAHALNPNEIQRALVQCKEQDNLMLEKACMAVEEAAKGGGVYPEVLFEVAHQWFWLYEQTAGGSSTAREGATSCSASGIRAGGEAGRGMPEGRGGPGTEPVTVAAAAVTAAATVVPVISVGSSLYPGPGLGHGHSPGLHPYTALQPHLPCSPQYLTHPAHPAHPMPHMPRPAVFPVPSSAYPQGVHPAFLGAQYPYSVTPPSLAATAVSFPVPSMAPITVHPYHTEPGLPLPTSVACELWGQGTVSSVHPASTFPAIQGASLPALTTQPSPLVSGGFPPPEEETHSQPVNPHSLHHLHAAYRVGMLALEMLGRRAHNDHPNNFSRSPPYTDDVKWLLGLAAKLGVNYVHQFCVGAAKGVLSPFVLQEIVMETLQRLSPAHAHNHLRAPAFHQLVQRCQQAYMQYIHHRLIHLTPADYDDFVNAIRSARSAFCLTPMGMMQFNDILQNLKRSKQTKELWQRVSLEMATFSP

SEQ ID NO: 850371 - protein, 967 aa, Homo sapiens; identical to SEQ ID NO: 850363

SEQ ID NO: 850372 - protein, 87 aa, Homo sapiens
MPLFGVYTYSMPILFPVAPQQPPAPCSHRRRELCTQLRQWQLKVIENVKRGQHKKTLERLFPGFRPAVEACYFNWEEAYPLPGVTYS

SEQ ID NO: 850373 - protein, 659 aa, Homo sapiens
LPLLHAGFNRRFMENSSIIACYNELIQIEHGEVRSQFKLRACNSVFTALDHCHEAIEITSDDHVIQYVNPAFERMMGYHKGELLGKELADLPKSDKNRADLLDTINTCIKKGKEWQGVYYARRKSGDSIQQHVKITPVIGQGGKIRHFVSLKKLCCTTDNNKQIHKIHRDSGDNSQTEPHSFRYKNRRKESIDVKSISSRGSDAPSLQNRRYPSMARIHSMTIEAPITKVINIINAAQENSPVTVAEALDRVLEILRTTELYSPQLGTKDEDPHTSDLVGGLMTDGLRRLSGNEYVFTKNVHQSHSHLAMPITINDVPPCISQLLDNEESWDFNIFELEAITHKRPLVYLGLKVFSRFGVCEFLNCSETTLRAWFQVIEANYHSSNAYHNSTHAADVLHATAFFLGKERVKGSLDQLDEVAALIAATVHDVDHPGRTNSFLCNAGSELAVLYNDTAVLESHHTALAFQLTVKDTKCNIFKNIDRNHYRTLRQAIIDMVLATEMTKHFEHVNKFVNSINKPMAAEIEGSDCECNPAGKNFPENQILIKRMMIKCADVANPCRPLDLCIEWAGRISEEYFAQTDEEKRQGLPVVMPVFDRNTCSIPKSQISFIDYFITDMFDAWDAFAHLPALMQHLADNYKHWKTLDDLKCKSLRLPSDS

SEQ ID NO: 850374 - protein, 612 aa, Homo sapiens
LPLLHAGFNRRFMENSSIIACYNELIQIEHGEVRSQFKLRACNSVFTALDHCHEAIEITSDDHVIQEWQGVYYARRKSGDSIQQHVKITPVIGQGGKIRHFVSLKKLCCTTDNNKQIHKIHRDSGDNSQTEPHSFRYKNRRKESIDVKSISSRGSDAPSLQNRRYPSMARIHSMTIEAPITKVINIINAAQENSPVTVAEALDRVLEILRTTELYSPQLGTKDEDPHTSDLVGGLMTDGLRRLSGNEYVFTKNVHQSHSHLAMPITINDVPPCISQLLDNEESWDFNIFELEAITHKRPLVYLGLKVFSRFGVCEFLNCSETTLRAWFQVIEANYHSSNAYHNSTHAADVLHATAFFLGKERVKGSLDQLDEVAALIAATVHDVDHPGRTNSFLCNAGSELAVLYNDTAVLESHHTALAFQLTVKDTKCNIFKNIDRNHYRTLRQAIIDMVLATEMTKHFEHVNKFVNSINKPMAAEIEGSDCECNPAGKNFPENQILIKRMMIKCADVANPCRPLDLCIEWAGRISEEYFAQTDEEKRQGLPVVMPVFDRNTCSIPKSQISFIDYFITDMFDAWDAFAHLPALMQHLADNYKHWKTLDDLKCKSLRLPSDS

SEQ ID NO: 850375 - protein, 659 aa, Homo sapiens; identical to SEQ ID NO: 850373

SEQ ID NO: 850376 - protein, 659 aa, Homo sapiens; identical to SEQ ID NO: 850373

SEQ ID NO: 850377 - protein, 86 aa, Homo sapiens
LGWAGLARGGLWLLPAVLLSFAQARGADRMGKCRGLRTARKLRSHRRDQKWHDKQYKKAHLGTALKGQPFWRCFSCKRNRAGKSRS

SEQ ID NO: 850378 - protein, 68 aa, Homo sapiens
LLPLTRLLPLTRLLALTRLLAPTLSLRPVAPTGWASVVDFVLLGSSVVTDETRSGMINSIRKLIWAQP

SEQ ID NO: 850379 - protein, 86 aa, Homo sapiens; identical to SEQ ID NO: 850377

SEQ ID NO: 850380 - protein, 86 aa, Homo sapiens; identical to SEQ ID NO: 850377

SEQ ID NO: 850381 - protein, 86 aa, Homo sapiens; identical to SEQ ID NO: 850377

SEQ ID NO: 850382 - protein, 86 aa, Homo sapiens; identical to SEQ ID NO: 850377

SEQ ID NO: 850383 - protein, 86 aa, Homo sapiens; identical to SEQ ID NO: 850377

SEQ ID NO: 850384 - protein, 86 aa, Homo sapiens; identical to SEQ ID NO: 850377

SEQ ID NO: 850385 - protein, 157 aa, Homo sapiens
MRLGAARAAPVGKWGTGATKRGPGETPAGRNWGLGSPHNKKGPGGNNRRLFSTTKSREGGGTRRRQKGGAALLQQGGLQKESDRAIKNIPRAVREKKERKKYKQTKDSEKRKTRHEENKEKETTDTARESRQRKKKDNEKARKKRSKTDNKKQEKNK

SEQ ID NO: 850386 - protein, 138 aa, Homo sapiens
MLVKKARRLKRGGTPVLGEKGLRTRALGRDISPKRDLNPFGGKGPGINQRRAERASLYKGLKVPRGITTSPGPDRQRATQRVKGAPKAKPEDKEEKGEHGGPGEKTGGCKGGTPRRDPGLGAEITPYTWGDTEAQVGE

SEQ ID NO: 850387 - protein, 86 aa, Homo sapiens; identical to SEQ ID NO: 850377

SEQ ID NO: 850388 - protein, 86 aa, Homo sapiens; identical to SEQ ID NO: 850377

SEQ ID NO: 850389 - protein, 68 aa, Homo sapiens; identical to SEQ ID NO: 850378

SEQ ID NO: 850390 - protein, 32 aa, Homo sapiens
MKFWLLDLVAKVMVGDIRGPLKGVRGHVAAWA

SEQ ID NO: 850391 - protein, 68 aa, Homo sapiens; identical to SEQ ID NO: 850378

SEQ ID NO: 850392 - protein, 68 aa, Homo sapiens; identical to SEQ ID NO: 850378

SEQ ID NO: 850393 - protein, 99 aa, Homo sapiens
ELARLQVRRQMGKCRGLRTARKLRSHRRDQKWHDKQYKKAHLGTALKGQPFWRCFSCKRNRAGKSRSEATAKSAIRKCVRLQLIKNGKKITAFVPMTFA

SEQ ID NO: 850394 - protein, 86 aa, Homo sapiens; identical to SEQ ID NO: 850377

SEQ ID NO: 850395 - protein, 86 aa, Homo sapiens; identical to SEQ ID NO: 850377

SEQ ID NO: 850396 - protein, 86 aa, Homo sapiens; identical to SEQ ID NO: 850377

SEQ ID NO: 850397 - protein, 86 aa, Homo sapiens; identical to SEQ ID NO: 850377

SEQ ID NO: 850398 - protein, 113 aa, Homo sapiens
MRTNRRVNPGSSCSGSEKFRKQEDGTEDGGQNETAKQSKDTRHPRPKENSNAEQQEKTRNRGHTEQKENTWGNKKKTTQANDSTTQANKNRRNKRQDEARREEQNKNTTKSET

SEQ ID NO: 850399 - protein, 86 aa, Homo sapiens; identical to SEQ ID NO: 850377

SEQ ID NO: 850400 - protein, 86 aa, Homo sapiens; identical to SEQ ID NO: 850377

SEQ ID NO: 850401 - protein, 86 aa, Homo sapiens; identical to SEQ ID NO: 850377

SEQ ID NO: 850402 - protein, 86 aa, Homo sapiens; identical to SEQ ID NO: 850377

SEQ ID NO: 850403 - protein, 171 aa, Homo sapiens
LRAILVGAGSQVRIPEHGSLSCRLYARMRGPMTYVLRSPRPLDCVTEGHSNQSLEATSRVDVSRRVIKQGLYSGRESIDELDYSRVELPLVIEKGIVLEKVGVEAKQPNSAIRKCVRVQLIKNGKKITAFVPNDGCLNFIGGTMMKFWLLDLVAKVMLLVIFLESALRLSK

SEQ ID NO: 850404 - protein, 86 aa, Homo sapiens; identical to SEQ ID NO: 850377

SEQ ID NO: 850405 - protein, 86 aa, Homo sapiens; identical to SEQ ID NO: 850377

SEQ ID NO: 850406 - protein, 120 aa, Homo sapiens
MHPNYGHGHHIHVPQTMSSHPRQAPERSAWELGIEAGVTAATYTPGALHPHLAHYHAPPRLHHLQLGALPLMVPDMAGYPHIRYISSGLDGTSFRGPFRGNFEVCNKINEYVCHSIFNAD

SEQ ID NO: 850407 - protein, 133 aa, Homo sapiens
MAGYPHIRYISSGLDGTSFRGPFRGNFEELIHLEERLGNVNRGASQGTIERCTYPHKYKKRKLHCKQDGEEGTEEDTEEKCTICLSILEEGEDVRRLPCMHLFHQVCVDQWLITNKKCPICRVDIEAQLPSES

SEQ ID NO: 850408 - protein, 208 aa, Homo sapiens
MHPNYGHGHHIHVPQTMSSHPRQAPERSAWELGIEAGVTAATYTPGALHPHLAHYHAPPRLHHLQLGALPLMVPDMAGYPHIRYISSGLDGTSFRGPFRGNFEELIHLEERLGNVNRGASQGTIERCTYPHKYKKRKLHCKQDGEEGTEEDTEEKCTICLSILEEGEDVRRLPCMHLFHQVCVDQWLITNKKCPICRVDIEAQLPSES

SEQ ID NO: 850409 - protein, 892 aa, Homo sapiens
RKSQQAGPSYVQNCVKENQGILGLRQHLGTPSDEDNDSSFSDCLSSPSSSLHFGDSDTVTSDEDKEVSVRHSQTILNAKSRSHSARSHKWPRTETESVSGLLMKRPCLHGSSLRRLPCRKRFVKNNSSQRTQKQKERILMQRKKREVLARRKYALLPSSSSSSENDLSSESSSSSSTEGEEDLFVSASENHQNNPAVPSGSIDEDVVVIEASSTPQVTANEEINVTSTDSEVEIVTVGESYRSRSTLGHSRSHWSQGSSSHASRPQEPRNRSRISTVIQPLRQNAAEVVDLTVDEDEPTVVPTTSARMESQATSASINNSNPSTSEQASDTASAVTSSQPSTVSETSATLTSNSTTGTSIGDDSRRTTSSAVTETGPPAMPRLPSCCPQHSPCGGSSQNHHALGHPHTSCFQQHGHHFQHHHHHHHTPHPAVPVSPSFSDPACPVERPPQVQAPCGANSSSGTSYHEQQALPVDLSNSGIRSHGSGSFHGASAFDPCCPVSSSRAAIFGHQAAAAAPSQPLSSIDGYGSSMVAQPQPQPPPQPSLSSCRHYMPPPYASLTRPLHHQASACPHSHGNPPPQTQPPPQVDYVIPHPVHAFHSQISSHATSHPVAPPPPTHLASTAAPIPQHLPPTHQPISHHIPATAPPAQRLHPHEVMQRMEVQRRRMMQHPTRAHERPPPHPHRMHPNYGHGHHIHVPQTMSSHPRQAPERSAWELGIEAGVTAATYTPGALHPHLAHYHAPPRLHHLQLGALPLMVPDMAGYPHIRYISSGLDGTSFRGPFRGNFEELIHLEERLGNVNRGASQGTIERCTYPHKYKKRKLHCKQDGEEGTEEDTEEKCTICLSILEEGEDVRRLPCMHLFHQVCVDQWLITNKKCPICRVDIEAQLPSES

SEQ ID NO: 850410 - protein, 900 aa, Homo sapiens
RKSQQAGPSYVQNCVKENQGILGLRQHLGTPSDEDNDSSFSDCLSSPSSSLHFGDSDTVTSDEDKEVSVRHSQTILNAKSRSHSARSHKWPRTETESVSGLLMKRPCLHGSSLRRLPCRKRFVKNNSSQRTQKQKERILMQRKKREVLARRKYALLPSSSSSSENDLSSESSSSSSTEGEEDLFVSASENHQNNPAVPSGSIDEDVVVIEASSTPQVTANEEINVTSTDSEVEIVTVGESYRSRSTLGHSRSHWSQGSSSHASRPQEPRNRSRISTVIQPLRQNAAEVVDLTVDEDEPTVVPTTSARMESQATSASINNSNPSTSEQASDTASAVTSSQPSTVSETSATLTSNSTTGTSIGDDSRRTTSSAVTETGPPAMPRLPSCCPQHSPCGGSSQNHHALGHPHTSCFQQHGHHFQHHHHHHHTPHPAVPVSPSFSDPACPVERPPQVQAPCGANSSSGTSYHEQQALPVDLSNSGIRSHGSGSFHGASAFDPCCPVSSSRAAIFGHQAAAAAPSQPLSSIDGYGSSMVAQPQPQPPPQPSLSSCRHYMPPPYASLTRPLHHQASACPHSHGNPPPQTQPPPQVDYVIPHPVHAFHSQISSHATSHPVAPPPPTHLASTAAPIPQHLPPTHQPISHHIPATAPPAQRLHPHEVMQRMEVQRRRMMQHPTRAHERPPPHPHRMHPNYGHGHHIHVPQTMSSHPRQAPERSAWELGIEAGVTAATYTPGALHPHLAHYHAPPRLHHLQLGALPLMVPDMAGYPHIRYISSGLDGTSFRGPFRGNFEELIHLEERLGNVNRGASQGTIERCTYPHKYKKVTTDWFSQRKLHCKQDGEEGTEEDTEEKCTICLSILEEGEDVRRLPCMHLFHQVCVDQWLITNKKCPICRVDIEAQLPSES

SEQ ID NO: 850411 - protein, 892 aa, Homo sapiens; identical to SEQ ID NO: 850409

SEQ ID NO: 850412 - protein, 426 aa, Homo sapiens
RKSQQAGPSYVQNCVKENQGILGLRQHLGTPSDEDNDSSFSDCLSSPSSSLHFGDSDTVTSDEDKEVSVRHSQTILNAKSRSHSARSHKWPRTETESVSGLLMKRPCLHGSSLRRLPCRKRFVKNNSSQRTQKQKERILMQRKKREVLARRKYALLPSSSSSSENDLSSESSSSSSTEGEEDLFVSASENHQNNPAVPSGSIDEDVVVIEASSTPQVTANEEINVTSTDSEVEIVTVGESYRSRSTLGHSRSHWSQGSSSHASRPQEPRNRSRISTVIQPLRQNAAEVVDLTVDEDEPTVVPTTSARMESQATSASINNSNPSTSEQASDTASAVTSSQPSTVSETSATLTSNSTTGTSIGDDSRRTTSSAVTETGPPAMPRLPSCCPQHSPCGGSSQNHHALGHPHTSCFQQHGHHFQHHHHHNF

SEQ ID NO: 850413 - protein, 203 aa, Homo sapiens
RKSQQAGPSYVQNCVKENQGILGLRQHLGTPSDEDNDSSFSDCLSSPSSSLHFGDSDTVTSDEDKEVSVRHSQTILNAKSRSHSARSHKWPRTETESVSGLLMKRPCLHGSSLRRLPCRKRFVKNNSSQRTQKQKERILMQRKKREVLARRKYALLPSSSSSSENDLSSESSSSSSTEGEEDLFVSASENHQNNPAVPSGKNV

SEQ ID NO: 850414 - protein, 892 aa, Homo sapiens; identical to SEQ ID NO: 850409

SEQ ID NO: 850415 - protein, 900 aa, Homo sapiens; identical to SEQ ID NO: 850410

SEQ ID NO: 850416 - protein, 240 aa, Homo sapiens
MFLISPIFLLLESLSLITNQTASQTRNCRIMVSDSSSTLLSEPWPRAGSERSAWELGIEAGVTAATYTPGALHPHLAHYHAPPRLHHLQLGALPLMVPDMAGYPHIRYISSGLDGTSFRGPFRGNFEELIHLEERLGNVNRGASQGTIERCTYPHKYKKVTTDWFSQRKLHCKQDGEEGTEEDTEEKCTICLSILEEGEDVRRLPCMHLFHQVCVDQWLITNKKCPICRVDIEAQLPSES

SEQ ID NO: 850417 - protein, 804 aa, Homo sapiens
RKSQQAGPSYVQNCVKENQGILGLRQHLGTPSDEDNDSSFSDCLSSPSSSLHFGDSDTVTSDEDKEVSVRHSQTILNAKSRSHSARSHKWPRTETESVSGLLMKRPCLHGSSLRRLPCRKRFVKNNSSQRTQKQKERILMQRKKREVLARRKYALLPSSSSSSENDLSSESSSSSSTEGEEDLFVSASENHQNNPAVPSGSIDEDVVVIEASSTPQVTANEEINVTSTDSEVEIVTVGESYRSRSTLGHSRSHWSQGSSSHASRPQEPRNRSRISTVIQPLRQNAAEVVDLTVDEDEPTVVPTTSARMESQATSASINNSNPSTSEQASDTASAVTSSQPSTVSETSATLTSNSTTGTSIGDDSRRTTSSAVTETGPPAMPRLPSCCPQHSPCGGSSQNHHALGHPHTSCFQQHGHHFQHHHHHHHTPHPAVPVSPSFSDPACPVERPPQVQAPCGANSSSGTSYHEQQALPVDLSNSGIRSHGSGSFHGASAFDPCCPVSSSRAAIFGHQAAAAAPSQPLSSIDGYGSSMVAQPQPQPPPQPSLSSCRHYMPPPYASLTRPLHHQASACPHSHGNPPPQTQPPPQVDYVIPHPVHAFHSQISSHATSHPVAPPPPTHLASTAAPIPQHLPPTHQPISHHIPATAPPAQRLHPHEVMQRMEVQRRRMMQHPTRAHERPPPHPHRMHPNYGHGHHIHVPQTMSSHPRQAPERSAWELGIEAGVTAATYTPGALHPHLAHYHAPPRLHHLQLGALPLMVPDMAGYPHIRYISSGLDGTSFRGPFRGNFEVCNKINEYVCHSIFNAD

SEQ ID NO: 850418 - protein, 300 aa, Homo sapiens
RKSQQAGPSYVQNCVKENQGILGLRQHLGTPSDEDNDSSFSDCLSSPSSSLHFGDSDTVTSDEDKEVSVRHSQTILNAKSRSHSARSHKWPRTETESVSGLLMKRPCLHGSSLRRLPCRKRFVKNNSSQRTQKQKERILMQRKKREVLARRKYALLPSSSSSSENDLSSESSSSSSTEGEEDLFVSASENHQNNPAVPSGSIDEDVVVIEASSTPQVTANEEINVTSTDSEVEIVTVGESYRSRSTLGHSRSHWSQGSSSHASRPQEPRNRSRISTVIQPLRQNAAEVVDLTVDEDGKLK

SEQ ID NO: 850419 - protein, 249 aa, Homo sapiens
WGVGQATVGKMAYQSLRLEYLQIPPVSRAYTTACVLTTAAVQLELITPFQLYFNPELIFKHFQIWRLITNFLFFGPVGFNFLFNMIFLYRYCRMLEEGSFRGRTADFVFMFLFGGFLMTLFGLFVSLVFLGQAFTIMLVYVWSRRNPYVRMNFFGLLNFQAPFLPWVLMGFSLLLGNSIIVDLLGIAVGHIYFFLEDVFPNQPGGIRILKTPSILKAIFDTPDEDPNYNPLPEERPGGFAWGEGQRLGG

SEQ ID NO: 850420 - protein, 147 aa, Homo sapiens
WGVGQATVGKMAYQSLRLEYLQIPPVSRAYTTACVLTTAAVQLELITPFQLYFNPELIFKHFQIWRLITNFLFFGPVGFNFLFNMIFLYRYCRMLEEGSFRGRTADFVFMFLFGGFLMTVSFNKQHGKMLKNTLALPKACHLSPTVL

SEQ ID NO: 850421 - protein, 101 aa, Homo sapiens
WGVGQATVGKMAYQSLRLEYLQIPPVSRAYTTACVLTTAAVQLELITPFQLYFNPELIFKHFQIWRLITNFLFFGPVGFNFLFNMIFLYPLLNGVSIKTFS

SEQ ID NO: 850422 - protein, 275 aa, Homo sapiens
VCGTRGCRKMAYHSFRLELTDIIASVTSCVRIILPSHMTVHIDPARRTRTRLRRISNTTQRICVRCSVSVSYYTWEILIPYLENDLYHRIWRLITNFLFFGPVGFNFLFNMIFLYRYCRMLEEGSFRGRTADFVFMFLFGGFLMTLFGLFVSLVFLGQAFTIMLVYVWSRRNPYVRMNFFGLLNFQAPFLPWVLMGFSLLLGNSIIVDLLGIAVGHIYFFLEDVFPNQPGGIRILKTPSILKAIFDTPDEDPNYNPLPEERPGGFAWGEGQRLGG

SEQ ID NO: 850423 - protein, 113 aa, Homo sapiens
MLVYVWSRRNPYVRMNFFGLLNFQAPFLPWVLMGFSLLLGNSIIVDLLGIAVGHIYFFLEDVFPNQPGGIRILKTPSILKAIFDTPDEDPNYNPLPEERPGGFAWGEGQRLGG

SEQ ID NO: 850424 - protein, 142 aa, Homo sapiens
MTERGRAGKLAVAGGDWQKEPVLTRFSRTLAGGEERQLELITPFQLYFNPELIFKHFQIWRLITNFLFFGPVGFNFLFNMIFLYRYCRMLEEGSFRGRTADFVFMFLFGGFLMTVSFNKQHGKMLKNTLALPKACHLSPTVL

SEQ ID NO: 850425 - protein, 228 aa, Homo sapiens
WGVGQATVGKMAYQSLRLEYLQIPPVSRAYTTACVLTTAAVQLELITPFQLYFNPELIFKHFQIWRLITNFLFFGPVGFNFLFNMIFLYRYCRMLEEGSFRGRTADFVFMFLFGGFLMTLFGLFVSLVFLGQAFTIMLVYVWSRRNPYVRMNFFGLLNFQAPFLPWVLMGFSLLLGNSIIVDLLGIAVGHIYFFLEDVFPNQPGGIRILKTPSIFPRISCFFKEPWFL

SEQ ID NO: 850426 - protein, 147 aa, Homo sapiens; identical to SEQ ID NO: 850420

SEQ ID NO: 850427 - protein, 80 aa, Homo sapiens
GLTVACGLTVACGLTVACGLTVAVWVDRGLEVKAAVPIMRPSWEGLGDTHWDLLSFVAKVWTLLTAWQILTPEALYEMVH

SEQ ID NO: 850428 - protein, 244 aa, Homo sapiens
MTERGRAGKLAVAGGDWQKEPVLTRFSRTLAGGEERQLELITPFQLYFNPELIFKHFQIWRLITNFLFFGPVGFNFLFNMIFLYRYCRMLEEGSFRGRTADFVFMFLFGGFLMTLFGLFVSLVFLGQAFTIMLVYVWSRRNPYVRMNFFGLLNFQAPFLPWVLMGFSLLLGNSIIVDLLGIAVGHIYFFLEDVFPNQPGGIRILKTPSILKAIFDTPDEDPNYNPLPEERPGGFAWGEGQRLGG

SEQ ID NO: 850429 - protein, 113 aa, Homo sapiens
WGVGQATVGKMAYQSLRLEYLQIPPVSRAYTTACVLTTAAVVSSCSATFSLSGLDMTGSSGNWGLGLGEAQRGWSRGWVEAYRDYSGVRVGAKNAYPVTREGSAASWGVSSWN

SEQ ID NO: 850430 - protein, 249 aa, Homo sapiens; identical to SEQ ID NO: 850419

SEQ ID NO: 850431 - protein, 147 aa, Homo sapiens; identical to SEQ ID NO: 850420

SEQ ID NO: 850432 - protein, 249 aa, Homo sapiens; identical to SEQ ID NO: 850419

SEQ ID NO: 850433 - protein, 201 aa, Homo sapiens
WGVGQATVGKMAYQSLRLEYLQIPPVSRAYTTACVLTTAAVQLELITPFQLYFNPELIFKHFQIWRLITNFLFFGPVGFNFLFNMIFLYRYCRMLEEGSFRGRTADFVFMFLFGGFLMTQSDRMSKSKELLTQAPFLPWVLMGFSLLLGNSIIVDLLGIAVGHIYFFLEDVFPNQPGGIRILKTPSIFPRISCFFKEPWFL

SEQ ID NO: 850434 - protein, 74 aa, Homo sapiens
RRHCSSRPAAVWRLRPVGAGGSGRGQPGVGKLVSMAKPSPPSVLFPVLPNLRYGLHQISASERIWKDIDPNFIQ

SEQ ID NO: 850435 - protein, 323 aa, Homo sapiens
MAEGERQPPPDSSEEAPPATQNFIIPKKEIHTVPDMGKWKRSQAYADYIGFILTLNEGVKGKKLTFEYRVSEAIEKLVALLNTLDRWIDETPPVDQPSRFGNKAYRTWYAKLDEEAENLVATVVPTHLAAAVPEVAVYLKESVGNSTRIDYGTGHEAAFAAFLCCLCKIGVLRVDDQIAIVFKVFNRYLEVMRKLQKTYRMEPAGSQGVWGLDDFQFLPFIWGSSQLIDHPYLEPRHFVDEKAVNENHKDYMFLECILFITEMKTGPFAEHSNQLWNISAVPSWSKVNQGLIRMYKAECLEKFPVIQHFKFGSLLPIHPVTSG

SEQ ID NO: 850436 - protein, 391 aa, Homo sapiens
HEGRKEEVTVQLSLPCPHMSSKLLEPAGAHLSSGSSEPLVEPGRGRVGARVKGERGLQASGSAPGRSKMAEGERQPPPDSSEEAPPATQNFIIPKKEIHTVPDMGKWKRSQAYADYIGFILTLNEGVKGKKLTFEYRVSEAIEKLVALLNTLDRWIDETPPVDQPSRFGNKAYRTWYAKLDEEAENLVATVVPTHLAAAVPEVAVYLKESVGNSTRIDYGTGHEAAFAAFLCCLCKIGVLRVDDQIAIVFKVFNRYLEVMRKLQKTYRMEPAGSQGVWGLDDFQFLPFIWGSSQLIDHPYLEPRHFVDEKAVNENHKDYMFLECILFITEMKTGPFAEHSNQLWNISAVPSWSKVNQGLIRMYKAECLEKFPVIQHFKFGSLLPIHPVTSG

SEQ ID NO: 850437 - protein, 323 aa, Homo sapiens; identical to SEQ ID NO: 850435

SEQ ID NO: 850438 - protein, 358 aa, Homo sapiens
MAEGERQPPPDSSEEAPPATQNFIIPKKEIHTVPDMGKWKRSQAYADYIGFILTLNEGVKGKKLTFEYRVSEMWNEVHEEKEQAAKQSVSCDECIPLPRAGHCAPSEAIEKLVALLNTLDRWIDETPPVDQPSRFGNKAYRTWYAKLDEEAENLVATVVPTHLAAAVPEVAVYLKESVGNSTRIDYGTGHEAAFAAFLCCLCKIGVLRVDDQIAIVFKVFNRYLEVMRKLQKTYRMEPAGSQGVWGLDDFQFLPFIWGSSQLIDHPYLEPRHFVDEKAVNENHKDYMFLECILFITEMKTGPFAEHSNQLWNISAVPSWSKVNQGLIRMYKAECLEKFPVIQHFKFGSLLPIHPVTSG

SEQ ID NO: 850439 - protein, 132 aa, Homo sapiens
MRKLQKTYRMEPAGSQGVWGLDDFQFLPFIWGSSQLIDHPYLEPRHFVDEKAVNENHKDYMFLECILFITEMKTGPFAEHSNQLWNISAVPSWSKVNQGLIRMYKAECLEKFPVIQHFKFGSLLPIHPVTSG

SEQ ID NO: 850440 - protein, 323 aa, Homo sapiens; identical to SEQ ID NO: 850435

SEQ ID NO: 850441 - protein, 124 aa, Homo sapiens
SWRVRLFGKREDQEWSRPCACLFQLLWRPPLPHLLARPGWLLLQAPLPPIGPLFPACMAGRGLSDTWVWSYPPWSSCKLTLSSSLLALLVADEDWPICRALQPAVEHQRRPFLVQSEPGSHPHV

SEQ ID NO: 850442 - protein, 323 aa, Homo sapiens; identical to SEQ ID NO: 850435

SEQ ID NO: 850443 - protein, 323 aa, Homo sapiens; identical to SEQ ID NO: 850435

SEQ ID NO: 850444 - protein, 323 aa, Homo sapiens; identical to SEQ ID NO: 850435

SEQ ID NO: 850445 - protein, 413 aa, Homo sapiens
MAEGERQPPPDSSEEAPPATQNFIIPKKEIHTVPDMGKWKRSQAYADYIGFILTLNEGVKGKKLTFEYRVSEAIEKLVALLNTLDRWIDETPPVDQPSRFGNKAYRTWYAKLDEEAENLVATVVPTHLAAAVPEVAVYLKESVGNSTRIDYGTGHEAAFAAFLCCLCKIGVLRVDDQIAIVFKVFNRYLEVMRKLQKTYRMEPAGSQGVWGLDDFQFLPFIWGSSQLIDHPYLEPRHFVDEKAVNENHKDYMFLECILFITEMKTGPFAEHSNQLWNISAVPSWSKVNQGLIRMYKAEVSGGWPVCPSLLPHLVLGWGQSKRCGTWGSCFLLPHCFALNLRPAPLTLGASESPIWGMGSQRSTSHPSPEKLQSSSVLMSLEAEARTCCMGSGGDGGLPSPLSSGQRLLKARAV

SEQ ID NO: 850446 - protein, 115 aa, Homo sapiens
  misc_feature (14)..(14): Xaa can be any naturally occurring amino acid
MGAPGRRTTTFVWXIKHLLWCPLLVSLVGRGRLAQHPFGGAPTLGGAPPALFLIFDFSPTFGGMILAVFGGRPTRENLLVRPQVVATHHHTSCVLRLANTLRPPLRPSVPTYRVL

SEQ ID NO: 850447 - protein, 110 aa, Homo sapiens
IRFQLEGKELTGRRCAEPPHPRPSPQLLTEEPFTKGRFSGEWRGRNAASMKTGPFAEHSNQLWNISAVPSWSKVNQGLIRMYKAECLEKFPVIQHFKFGSLLPIHPVTSG

SEQ ID NO: 850448 - protein, 286 aa, Homo sapiens [sequence omitted]

SEQ ID NO: 850449 - protein, 77 aa, Homo sapiens
RSEAPGESVGTTPEAQMKTGPFAEHSNQLWNISAVPSWSKVNQGLIRMYKAECLEKFPVIQHFKFGSLLPIHPVTSG

SEQ ID NO: 850450 - protein, 148 aa, Homo sapiens
MAPGCLSSRFLPCRFGLPFLFLSLVGLVVEWVSLDRRSEELGEEGLGDPLAGLLPGPGMDTWELLRLLGSWQGCGVALTTLLTCSFLTVPGEVPCDPALQVREPAAHPSCHVGLGGAKPKSHPGHSSCACLPHPSSGPSPSPPSVRPV

SEQ ID NO: 850451 - protein, 323 aa, Homo sapiens; identical to SEQ ID NO: 850435

SEQ ID NO: 850452 - protein, 323 aa, Homo sapiens; identical to SEQ ID NO: 850435

SEQ ID NO: 850453 - protein, 621 aa, Homo sapiens
MSPVFPMLTVLTMFYYICLRRRARTATRGEMMNTHRAIESNSQTSPLNAEVVQYAKEVVDFSSHYGSENSMSYTMWNLAGVPNVFPSSGDFTQTAVFRTYGTWWDQCPSASLPFKRTPPNFQSQDYVELTFEQQVYPTAVHVLETYHPGAVIRILACSANPYSPNPPAEVRWEILWSERPTKVNASQARQFKPCIKQINFPTNLIRLEVNSSLLEYYTELDAVVLHGVKDKPVLSLKTSLIDMNDIEDDAYAEKDGCGMDSLNKKFSSAVLGEGPNNGYFDKLPYELIQLILNHLTLPDLCRLAQTCKLLSQHCCDPLQYIHLNLQPYWAKLDDTSLEFLQSRCTLVQWLNLSWTGNRGFISVAGFSRFLKVCGSELVRLELSCSHFLNETCLEVISEMCPNLQALNLSSCDKLPPQAFNHIAKLCSLKRLVLYRTKVEQTALLSILNFCSELQHLSLGSCVMIEDYDVIASMIGAKCKKLRTLDLWRCKNITENGIAELASGCPLLEELDLGWCPTLQSSTGCFTRLAHQLPNLQKLFLTANRSVCDTDIDELACNCTRLQQLDILGTRMVSPASLRKLLESCKDLSLLDVSFCSQIDNRAVLELNASFPKVFIKKSFTQ

SEQ ID NO: 850454 - protein, 617 aa, Homo sapiens
MSPVFPMLTVLTMFYYICLRRRARTATRGEMMNTHRAIESNSQTSPLNAEVVQYAKEVVDFSSHYGSENSMSYTMWNLAGVPNVFPSSGDFTQTAVFRTYGTWWDQCPSASLPFKRTPPNFQSQDYVELTFEQQVYPTAVHVLETYHPGAVIRILACSANPYSPNPPAEVRWEILWSERPTKVNASQARQFKPCIKQINFPTNLIRLEVNSSLLEYYTELDAVVLHGVKDKPVLSLKTSLIDMNDIEDDAYAEKDGCGMDSLNKKFSSAVLGEGPNNGYFDKLPYELIQLILNHLTLPDLCRLAQTCKLLSQHCCDPLQYIHLNLQPYWAKLDDTSLEFLQSRCTLVQWLNLSWTGNRGFISVAGFSRFLKVCGSELVRLELSCSHFLNETCLEVISEMCPNLQALNLSSCDKLPPQAFNHIAKLCSLKRLVLYRTKVEQTALLSILNFCSELQHLSLGSCVMIEDYDVIASMIGAKCKKLRTLDLWRCKNITENGIAELASGCPLLEELDLGWCPTLQSSTGCFTRLAHQLPNLQKLFLTANRSVCDTDIDELACNCTRLQQLDILGKVTIYKFVLNVCFLDRKANLRLFVRKKKIFGYNKNFILIRWLGLIGNAR

SEQ ID NO: 850455 - protein, 375 aa, Homo sapiens
MNDIEDDAYAEKDGCGMDSLNKKFSSAVLGEGPNNGYFDKLPYELIQLILNHLTLPDLCRLAQTCKLLSQHCCDPLQYIHLNLQPYWAKLDDTSLEFLQSRCTLVQWLNLSWTGNRGFISVAGFSRFLKVCGSELVRLELSCSHFLNETCLEVISEMCPNLQALNLSSCDKLPPQAFNHIAKLCSLKRLVLYRTKVEQTALLSILNFCSELQHLSLGSCVMIEDYDVIASMIGAKCKKLRTLDLWRCKNITENGIAELASGCPLLEELDLGWCPTLQSSTGCFTRLAHQLPNLQKLFLTANRSVCDTDIDELACNCTRLQQLDILGKVTIYKFVLNVCFLDRKANLRLFVRKKKIFGYNKNFILIRWLGLIGNAR

SEQ ID NO: 850456 - protein, 74 aa, Homo sapiens
RACGGCAASRESGSRPRTQAFSRCLVAGEARGARLSRTLQDFSSWPGSLAFSICFIRLDFQEALKLDRSLQSSS

SEQ ID NO: 850457 - protein, 621 aa, Homo sapiens; identical to SEQ ID NO: 850453

SEQ ID NO: 850458 - protein, 174 aa, Homo sapiens
MSPVFPMLTVLTMFYYICLRRRARTATRGEMMNTHRAIESNSQTSPLNAEVVQYAKEVVDFSSHYGSENSMSYTMWNLAGVPNVFPSSGDFTQTAVFRTYGTWWDQCPSASLPFKRTPPNFQSQDYVELTFEQQVYPTAVHVLETYHPGAVIRILACSANPYSPNPPAEVSLFS

SEQ ID NO: 850459 - protein, 171 aa, Homo sapiens [sequence omitted]

SEQ ID NO: 850460 - protein, 456 aa, Homo sapiens
MPGMICKNPDLEFDSLQPCFYPDEDDFYFGGPDSTPPGEDIWKKFELLPTPPLSPSRGFAEHSSEPPSWVTEMLLENELWGSPAEEDAFGLGGLGGLTPNPVILQDCMWSGFSAREKLERAVSEKLQHGRGPPTAGSTAQSPGAGAASPAGRGHGGAAGAGRAGAALPAELAHPAAECVDPAVVFPFPVNKREPAPVPAAPASAPAAGPAVASGAGIAAPAGAPGVAPPRPGGRQTSGGDHKALSTSGEDTLSDSDDEDDEEEDEEEEIDVVTVEKRRSSSNTKAVTTFTITVRPKNAALGPGRAQSSELILKRCLPIHQQHNYAAPSPYVESEDAPPQKKIKSEASPRPLKSVIPPKAKSLSPRNSDSEDSERRRNHNILERQRRNDLRSSFLTLRDHVPELVKNEKAAKVVILKKATEYVHSLQAEEHQLLLEKEKLQARQQQLLKKIEHARTC

SEQ ID NO: 850461 - protein, 418 aa, Homo sapiens
MPGMICKNPDLEFDSLQPCFYPDEDDFYFGGPDSTPPGEDIWKKFELLPTPPLSPSRGFAEHSSEPPSWVTEMLLENELWGSPAEEDAFGLGGLGGLTPNPVILQDCMWSGFSAREKLERAVSEKLQHGRGPPTAAGRRVRGSRRGLPLSREQARASARARSPGQCPGGGPCGRLGGGYCRPSRGPGGRPSAPRRPQTSGGDHKALSTSGEDTLSDSDDEDDEEEDEEEEIDVVTVEKRRSSSNTKAVTTFTITVRPKNAALGPGRAQSSELILKRCLPIHQQHNYAAPSPYVESEDAPPQKKIKSEASPRPLKSVIPPKAKSLSPRNSDSEDSERRRNHNILERQRRNDLRSSFLTLRDHVPELVKNEKAAKVVILKKATEYVHSLQAEEHQLLLEKEKLQARQQQLLKKIEHARTC

SEQ ID NO: 850462 - protein, 302 aa, Homo sapiens
FPLLSPSPLSAPQPPSLPAPRVCQIFQLIISPELQSAGCDSHLSGRAGWMRGAPGNCVGAEQALARRKRAQTVAIRGHPRPPGPPGDTRAESPPDPLQSAGDDEDDEEEDEEEEIDVVTVEKRRSSSNTKAVTTFTITVRPKNAALGPGRAQSSELILKRCLPIHQQHNYAAPSPYVESEDAPPQKKIKSEASPRPLKSVIPPKAKSLSPRNSDSEDSERRRNHNILERQRRNDLRSSFLTLRDHVPELVKNEKAAKVVILKKATEYVHSLQAEEHQLLLEKEKLQARQQQLLKKIEHARTC

SEQ ID NO: 850463 - protein, 456 aa, Homo sapiens; identical to SEQ ID NO: 850460

SEQ ID NO: 850464 - protein, 456 aa, Homo sapiens; identical to SEQ ID NO: 850460

SEQ ID NO: 850465 - protein, 373 aa, Homo sapiens
MPGMICKNPDLEFDSLQPCFYPDEDDFYFGGPDSTPPGEDIWKKFELLPTPPLSPSRGFAEHSSEPPSWVTEMLLENELWGSPAEEDAFGLGGLGGLTPNPVILQDCMWSGFSAREKLERAVSEKLQHGRGPPTAGSTAQSPGAGAASPAGRGHGGAAGAGRAGAALPAELAHPAAECVDPAVVFPFPVNKREPAPVPAAPASAPAAGPAVASGAGIAAPAGAPGVAPPRPGGRQTSGGDHKALSTSGEDTLSDSGKDRTRVRLPPWGTGPRVASPLLVLVCLGLGSILEAVLGAERSCFPQVSPRGKEKGLRECRCKRGALQFSPSLKFLPPSPGEPSSRPSRALTRSPTSLLQRSLRNKIGESWWLNRVGV

SEQ ID NO: 850466 - protein, 117 aa, Homo sapiens
MLLAQEEEECRRELLSWVPVPQPPRESCLDLLVDQPHSLLSILDAQTWLSQTEFGSCCPGWSAMVRSRLTATSTSQATDHTFLQKSHYHHGDHPSCTSPVSEWGPGRIWLGRGAREA

SEQ ID NO: 850467 - protein, 1530 aa, Homo sapiens
MKEASGVGGGHSPMCPPHCHMPPGPAGEWPGATVQQPRQRAPTALLQPDAAGPGGGGVSAGVAVLGACPSASEGVLPRPPGRSAPQPPEYPGRPDMAVPGWSAMVRSRLTATSTSQATDHTFLQKSHYHHGDHPSYAKPRLPLPVFTVRHYAGTVTYQVHKFLNRNRDQLDPAVVEMLGQSQLQLVGSLFQEAEPQSRGGRGRPTLASRFQQALEDLIARLGRSHVYFIQCLTPNPGKLPGLFDVGHVTEQLHQAAILEAVGTRSANFPVRVPFEAFLASFQALGSEGQEDLSDREKCGAVLSQVLGAESPLYHLGATKVLLQEQGWQRLEELRDQQRSQALVDLHRSFHTCISRQRVLPRMQARMRGFQARKRYLRRRAALGQLNTILLVAQPLLQRRQRLQLGRWQGWHSSERALERVPSMELGRLEIPAELAVMLKTAESHRDALAGSITECLPPEVPARPSLTLPADIDLFPFSSFVAIGFQEPSLPRPGQPLAKPLTQLDGDNPQRALDINKVMLRLLGDGSLESWQRQIMGAYLVRQGQCRPGLRNELFSQLVAQLWQNPDEQQSQRGWALMAVLLSAFPPLPVLQKPLLKFVSDQAPRGMAALCQHKLLGALEQSQLASGATRAHPPTQLEWLAGWRRGRMALDVFTFSEECYSAEVESWTTGEQLAGWILQSRGLEAPPRGWSVSLHSRDAWQDLAGCDFVLDLISQTEDLGDPARPRSYPITPLGSAEAIPLAPGIQAPSLPPGPPPGPAPTLPSRDHTGEVQRSGSLDGFLDQIFQPVISSGLSDLEQSWALSSRMKGGGAIGPTQQGYPMVYPGMIQMPAYQPGMVPAPMPMMPAMGTVPAMPAMVVPPQPPLPSLDAGQLAVQQQNFIQQQALILAQQMTAQAMSLSLEQQMQQRQQQARASEAASQASPSAVTSKPRKPPTPPEKPQRDLGSEGGCLRETSEEAEDRPYQPKSFQQKRNYFQRMGQPQITVRTMKPPAKVHIPQGEAQEEEEEEEEEEEQEEQEVETRAVPSPPPPPIVKKPLKQGGAKAPKEAEAEPAKETAAKAMAKGQPKAGGTVVRSSDSKPKRPQPSREIGNIIRMYQSRPGPVPVPVQPSRPPKAFLRKIDPKDEALAKLGINGAHSSPPMLSPSPGKGPPPAVAPRPKAPLQLGPSSSIKEKQGPLLDLFGQKLPIAHTPPPPPAPPLPLPEDPGTLSAERRCLTQPVEDQGVSTQLLAPSGSVCFSYTGTPWKLFLRKEVFYPRENFSHPYYLRLLCEQILRDTFSESCIRISQNERRKMKDLLGGLEVDLDSLTTTEDSVKKRIVVAARDNWANYFSRFFPVSGESGSDVQLLAVSHRGLRLLKVTQGPGLRPDQLKILCSYSFAEVLGVECRGGSTLELSLKSEQLVLHTARARAIEALVELFLNELKKDSGYVIALRSYITDNCSLLSFHRGDLIKLLPVATLEPGWQFGSAGGRSGLFPADIVQPAAAPDFSFSKEQRSGWHKGQLSNGEPGLARWDRASEVRKMGEGQAEARPA

SEQ ID NO: 850468 - protein, 1530 aa, Homo sapiens; identical to SEQ ID NO: 850467

SEQ ID NO: 850469 - protein, 1530 aa, Homo sapiens; identical to SEQ ID NO: 850467

SEQ ID NO: 850470 - protein, 701 aa, Homo sapiens
MELGRLEIPAELAVMLKTAESHRDALAGSITECLPPEVPARPSLTLPQNFIQQQALILAQQMTAQAMSLSLEQQMQQRQQQARASEAASQASPSAVTSKPRKPPTPPEKPQRDLGSEGGCLRETSEEAEDRPYQPKSFQQKRNYFQRMGQPQITVRTMKPPAKVHIPQGEAQEEEEEEEEEEEQEEQEVETRAVPSPPPPPIVKKPLKQGGAKAPKEAEAEPAKETAAKAMAKGQPKAGGTVVRSSDSKPKRPQPSREIGNIIRMYQSRPGPVPVPVQPSRPPKAFLRKIDPKDEALAKLGINGAHSSPPMLSPSPGKGPPPAVAPRPKAPLQLGPSSSIKEKQGPLLDLFGQKLPIAHTPPPPPAPPLPLPEDPGTLSAERRCLTQPVEDQGVSTQLLAPSGSVCFSYTGTPWKLFLRKEVFYPRENFSHPYYLRLLCEQILRDTFSESCIRISQNERRKMKDLLGGLEVDLDSLTTTEDSVKKRIVVAARDNWANYFSRFFPVSGESGSDVQLLAVSHRGLRLLKVTQGPGLRPDQLKILCSYSFAEVLGVECRGGSTLELSLKSEQLVLHTARARAIEALVELFLNELKKDSGYVIALRSYITDNCSLLSFHRGDLIKLLPVATLEPGWQFGSAGGRSGLFPADIVQPAAAPDFSFSKEQRSGWHKGQLSNGEPGLARWDRASEVRKMGEGQAEARPA

SEQ ID NO: 850471 - protein, 1530 aa, Homo sapiens; identical to SEQ ID NO: 850467

SEQ ID NO: 850472 - protein, 484 aa, Homo sapiens
GCLATSWRSQALLGQTDGGAAGKDTDSLVQYTKAPIQESLLSLSDDVSKLAVASFLALMRFMGDQSKPRGKDEMDLLYELLKLCQQEKLRDEIYCQVIKQVTGHPRPEHCTRGWSFLSLLTGFFPPSTRLMPYLTKFLQDSGPSQELARSSQEHLQRTVKYGGRRRMPPPGEMKAFLKGQAIRLLLIHLPGGVDYRTNIQTFTVAAEVQEELCRQMGITEPQEVQEFALFLIKEKSQLVRPLQPAEYLNSVVVDQDVSLHSRRLHWETPLHFDNSTYISTHYSQVLWDYLQGKLPVSAKADAQLARLAALQHLSKANRNTPSGQDLLAYVPKQLQRQVNTASIKNLMGQELRRLEGHSPQEAQISFIEAMSQLPLFGYTVYGVLRVSMQALSGPTLLGLNRQHLILMDPSSQSLYCRIALKSLQRLHLLSPLEEKGPPGLEVNYGSADNPQTIWFELPQAQELLYTTVFLIDSSASCTEWPSIN

SEQ ID NO: 850473 - protein, 1554 aa, Homo sapiens
MKEASGVGGGHSPMCPPHCHMPPGPAGEWPGATVQQPRQRAPTALLQPDAAGPGGGGVSAGVAVLGACPSASEGVLPRPPGRSAPQPPEYPGRPDMAVPGWSAMVRSRLTATSTSQATDHTFLQKSHYHHGDHPSYAKPRLPLPVFTVRHYAGTVTYQVHKFLNRNRDQLDPAVVEMLGQSQLQLVGSLFQEAEPQSRGGRGRPTLASRFQQALEDLIARLGRSHVYFIQCLTPNPGKLPGLFDVGHVTEQLHQAAILEAVGTRSANFPVRVPFEAFLASFQALGSEGQEDLSDREKCGAVLSQVLGAESPLYHLGATKVLLQEQGWQRLEELRDQQRSQALVDLHRSFHTCISRQRVLPRMQARMRGFQASLSSHIPPTAVGLTVCLIYPWARCWKRYLRRRAALGQLNTILLVAQPLLQRRQRLQLGRWQGWHSSERALERVPSMELGRLEIPAELAVMLKTAESHRDALAGSITECLPPEVPARPSLTLPADIDLFPFSSFVAIGFQEPSLPRPGQPLAKPLTQLDGDNPQRALDINKVMLRLLGDGSLESWQRQIMGAYLVRQGQCRPGLRNELFSQLVAQLWQNPDEQQSQRGWALMAVLLSAFPPLPVLQKPLLKFVSDQAPRGMAALCQHKLLGALEQSQLASGATRAHPPTQLEWLAGWRRGRMALDVFTFSEECYSAEVESWTTGEQLAGWILQSRGLEAPPRGWSVSLHSRDAWQDLAGCDFVLDLISQTEDLGDPARPRSYPITPLGSAEAIPLAPGIQAPSLPPGPPPGPAPTLPSRDHTGEVQRSGSLDGFLDQIFQPVISSGLSDLEQSWALSSRMKGGGAIGPTQQGYPMVYPGMIQMPAYQPGMVPAPMPMMPAMGTVPAMPAMVVPPQPPLPSLDAGQLAVQQQNFIQQQALILAQQMTAQAMSLSLEQQMQQRQQQARASEAASQASPSAVTSKPRKPPTPPEKPQRDLGSEGGCLRETSEEAEDRPYQPKSFQQKRNYFQRMGQPQITVRTMKPPAKVHIPQGEAQEEEEEEEEEEEQEEQEVETRAVPSPPPPPIVKKPLKQGGAKAPKEAEAEPAKETAAKAMAKGQPKAGGTVVRSSDSKPKRPQPSREIGNIIRMYQSRPGPVPVPVQPSRPPKAFLRKIDPKDEALAKLGINGAHSSPPMLSPSPGKGPPPAVAPRPKAPLQLGPSSSIKEKQGPLLDLFGQKLPIAHTPPPPPAPPLPLPEDPGTLSAERRCLTQPVEDQGVSTQLLAPSGSVCFSYTGTPWKLFLRKEVFYPRENFSHPYYLRLLCEQILRDTFSESCIRISQNERRKMKDLLGGLEVDLDSLTTTEDSVKKRIVVAARDNWANYFSRFFPVSGESGSDVQLLAVSHRGLRLLKVTQGPGLRPDQLKILCSYSFAEVLGVECRGGSTLELSLKSEQLVLHTARARAIEALVELFLNELKKDSGYVIALRSYITDNCSLLSFHRGDLIKLLPVATLEPGWQFGSAGGRSGLFPADIVQPAAAPDFSFSKEQRSGWHKGQLSNGEPGLARWDRASEVRKMGEGQAEARPA

SEQ ID NO: 850474 - protein, 587 aa, Homo sapiens
MKEASGVGGGHSPMCPPHCHMPPGPAGEWPGATVQQPRQRAPTALLQPDAAGPGGGGVSAGVAVLGACPSASEGVLPRPPGRSAPQPPEYPGRPDMAVPGWSAMVRSRLTATSTSQATDHTFLQKSHYHHGDHPSYAKPRLPLPVFTVRHYAGTVTYQVHKFLNRNRDQLDPAVVEMLGQSQLQLVGSLFQEAEPQSRGGRGRPTLASRFQQALEDLIARLGRSHVYFIQCLTPNPGKLPGLFDVGHVTEQLHQAAILEAVGTRSANFPVRVPFEAFLASFQALGSEGQEDLSDREKCGAVLSQVLGAESPLYHLGATKVLLQEQGWQRLEELRDQQRSQALVDLHRSFHTCISRQRVLPRMQARMRGFQASLSSHIPPTAVGLTVCLIYPWARCWKRYLRRRAALGQLNTILLVAQPLLQRRQRLQLGRWQGWHSSERALERVPSMELGRLEIPAELAVMLKTAESHRDALAGSITECLPPEVPARPSLTLPADIDLFPFSSFVAIGFQEVNDNLWETRTLPPSPEVEEGGQGGVYSGTALTKVEGNVIAHLRCSLVKVAGVVLGKQLGCSWQELVTAFPSRAGTP

SEQ ID NO: 850475 - protein, 383 aa, Homo sapiens
MKEASGVGGGHSPMCPPHCHMPPGPAGEWPGATVQQPRQRAPTALLQPDAAGPGGGGVSAGVAVLGACPSASEGVLPRPPGRSAPQPPEYPGRPDMAVPGWSAMVRSRLTATSTSQATDHTFLQKSHYHHGDHPSYAKPRLPLPVFTVRHYAGTVTYQVHKFLNRNRDQLDPAVVEMLGQSQLQLVGSLFQEAEPQSRGGRGRPTLASRFQQALEDLIARLGRSHVYFIQCLTPNPGKLPGLFDVGHVTEQLHQAAILEAVGTRSANFPVRVPFEAFLASFQALGSEGQEDLSDREKCGAVLSQVLGAESPLYHLGATKVLLQEQGWQRLEELRDQQRSQALVDLHRSFHTCISRQRVLPRMQARMRGFQASLSSHIPPTAVG

SEQ ID NO: 850476 - protein, 181 aa, Homo sapiens
RSLTVGPLPCPGVRWFGFCWGGRAGCVWSEQQWTQAPHAGQLVRPLQPAEYLNSVVVDQDVSLHSRRLHWETPLHFDNSTYISTHYSQVSLPASELLLQFEGAASCLGDLQSPSPHKGVGLWWLGGDSGKRRLEPLEPPTDGGLWTTAALLTVLPAQVLWDYLQGKLPVSAKADAQLARLA

SEQ ID NO: 850477 - protein, 1530 aa, Homo sapiens; identical to SEQ ID NO: 850467

SEQ ID NO: 850478 - protein, 1554 aa, Homo sapiens; identical to SEQ ID NO: 850473

SEQ ID NO: 850479 - protein, 1530 aa, Homo sapiens; identical to SEQ ID NO: 850467

SEQ ID NO: 850480 - protein, 624 aa, Homo sapiens
MRWDHPAVRLLWLPLCPLLMARLVSPARLCTPCRQGLGWMLLLCPTWYLVQGCPSRCLINSSSLSWLLVLLLWCLAGEGWGWGRTPGTGHWTLRWHQVSCDPSALPTLGARHTVTDSEATSLSSVAYAFLPDSHSYTMQEFARRYFRRSQALLGQTDGGAAGKDTDSLVQYTKAPIQESLLSLSDDVSKLAVASFLALMRFMGDQSKPRGKDEMDLLYELLKLCQQEKLRDEIYCQVIKQVTGHPRPEHCTRGWSFLSLLTGFFPPSTRLMPYLTKFLQDSGPSQELARSSQEHLQRTVKYGGRRRMPPPGEMKAFLKGQAIRLLLIHLPGGVDYRTNIQTFTVAAEVQEELCRQMGITEPQEVQEFALFLIKEKSQLVRPLQPAEYLNSVVVDQDVSLHSRRLHWETPLHFDNSTYISTHYSQVLWDYLQGKLPVSAKADAQLARLAALQHLSKANRNTPSGQDLLAYVPKQLQRQVNTASIKNLMGQELRRLEGHSPQEAQISFIEAMSQLPLFGYTVYGVLRVSMQALSGPTLLGLNRQHLILMDPSSQSLYCRIALKSLQRLHLLSPLEEKGPPGLEVNYGSADNPQTIWFELPQAQELLYTTVFLIDSSASCTEWPSIN

SEQ ID NO: 850481 - protein, 337 aa, Homo sapiens
MTASVNRWPRVNRCRVYRDVPRTTKVSVILKGQAIRLLLIHLPGGVDYRTNIQTFTVAAEVQEELCRQMGITEPQEVQEFALFLIKEKSQLVRPLQPAEYLNSVVVDQDVSLHSRRLHWETPLHFDNSTYISTHYSQVLWDYLQGKLPVSAKADAQLARLAALQHLSKANRNTPSGQDLLAYVPKQLQRQVNTASIKNLMGQELRRLEGHSPQEAQISFIEAMSQLPLFGYTVYGVLRVSMQALSGPTLLGLNRQHLILMDPSSQSLYCRIALKSLQRLHLLSPLEEKGPPGLEVNYGSADNPQTIWFELPQAQELLYTTVFLIDSSASCTEWPSIN

SEQ ID NO: 850482 - protein, 1437 aa, Homo sapiens
MKEASGVGGGHSPMCPPHCHMPPGPAGEWPGATVQQPRQRAPTALLQPDAAGPGGGGVSAGVAVLGACPSASEGVLPRPPGRSAPQPPEYPGRPDMAVPGWSAMVRSRLTATSTSQATDHTFLQKSHYHHGDHPSYAKPRLPLPVFTVRHYAGTVTYQVHKFLNRNRDQLDPAVVEMLGQSQLQLVGSLFQEAEPQSRGGRGRPTLASRFQQALEDLIARLGRSHVYFIQCLTPNPGKLPGLFDVGHVTEQLHQAAILEAVGTRSANFPVRVPFEAFLASFQALGSEGQEDLSDREKCGAVLSQVLGAESPLYHLGATKVLLQEQGWQRLEELRDQQRSQALVDLHRSFHTCISRQRVLPRMQARMRGFQASLSSHIPPTAVGLTVCLIYPWARCWKRYLRRRAALGQLNTILLVAQPLLQRRQRLQLGRWQGWHSSERALERVPSMELGRLEIPAELAVMLKTAESHRDALAGSITECLPPEVPARPSLTLPADIDLFPFSSFVAIGFQEPSLPRPGQPLAKPLTQLDGDNPQRALDINKVMLRLLGDGSLESWQRQIMGAYLVRQGQCRPGLRNELFSQLVAQLWQNPDEQQSQRGWALMAVLLSAFPPLPVLQKPLLKFVSDQAPRGMAALCQHKLLGALEQSQLASGATRAHPPTQLEWLAGWRRGRMALDVFTFSEECYSAEVESWTTGEQLAGWILQSRGLEAPPRGWSVSLHSRDAWQDLAGCDFVLDLISQTEDLGDPARPRSYPITPLGSAEAIPLAPGIQAPSLPPGPPPGPAPTLPSRDHTGEVQRSGSLDGFLDQIFQPVISSGLSDLEQSWALSSRMKGGGAIGPTQQGYPMVYPGMIQMPAYQPGMVPAPMPMMPAMGTVPAMPAMVVPPQPPLPSLDAGQLAVQQQNFIQQQALILAQQMTAQAMSLSLEQQMQQRQQQARASEAASQASPSAVTSKPRKPPTPPEKPQRDLGSEGGCLRETSEEAEDRPYQPKSFQQKRNYFQRMGQPQITVRTMKPPAKVHIPQGEAQEEEEEEEEEEEQEEQEVETRAVPSPPPPPIVKKPLKQGGAKAPKEAEAEPAKETAAKAMAKGQPKAGGTVVRSSDSKPKRPQPSREIGNIIRMYQSRPGPVPVPVQPSRPPKAFLRKIDPKDEALAKLGINGAHSSPPMLSPSPGKGPPPAVAPRPKAPLQLGPSSSIKEKQGPLLDLFGQKLPIAHTPPPPPAPPLPLPEDPGTLSAERRCLTQPVEDQGVSTQLLAPSGSVCFSYTGTPWKLFLRKEVFYPRENFSHPYYLRLLCEQILRDTFSESCIRISQNERRKMKDLLGGLEVDLDSLTTTEDSVKKRIVVAARDNWANYFSRFFPVSKSRERVCLGVASWLPGSGPQRASVEEFPALKVLLVAVSKDAAAVRLMSFLVGQMEVQRRPWLVKYGDSGEQIAGVPVG

SEQ ID NO: 850483 - protein, 74 aa, Homo sapiens
LALGSSRASWAVAGPRRLPETHHLPVGREWQRRAAVSRVPPWAATAQGDPRPRPPPRPAEDSLLIQVRWPTTLG

SEQ ID NO: 850484 - protein, 125 aa, Homo sapiens
MSTRRTRTRRPRISQQENGHCMDTNECIQFPFVCPRDKPVCVNTYGSYRCRTNKKCSRGYEPNEDGTACVGTLGQSPGPRPTTPTAAAATAAAAAAAGAATAAPVLVDGDLNLGSVVKESCEPSC

SEQ ID NO: 850485 - protein, 679 aa, Homo sapiens
AGIKRARGVGAGGSRPARDRGWEQAGGGAGGRGGSERPLPTPLGGGAESGRMAPSADPGMSRMLPFLLLLWFLPITEGSQRAEPMFTAVTNSVLPPDYDSNPTQLNYGVAVTDVDHDGDFEIVVAGYNGPNLVLKYDRAQKRLVNIAVDERSSPYYALRDRQGNAIGVTACDIDGDGREEIYFLNTNNAFSGVATYTDKLFKFRNNRWEDILSDEVNVARGVASLFAGRSVACVDRKGSGRYSIYIANYAYGNVGPDALIEMDPEASDLSRGILALRDVAAEAGVSKYTGGRGVSVGPILSSSASDIFCDNENGPNFLFHNRGDGTFVDAAASAGVDDPHQHGRGVALADFNRDGKVDIVYGNWNGPHRLYLQMSTHGKVRFRDIASPKFSMPSPVRTVITADFDNDQELEIFFNNIAYRSSSANRLFRVIRREHGDPLIEELNPGDALEPEGRGTGGVVTDFDGDGMLDLILSHGESMAQPLSVFRGNQGFNNNWLRVVPRTRFGAFARGAKVVLYTKKSGAHLRIIDGGSGYLCEMEPVAHFGLGKDEASSVEVTWPDGKMVSRNVASGEMNSVLEILYPRDEDTLQDPAPLETPMNASSSHSCALETSPYVSTPMEATGAGPTRSAVGATSPTRMAQPAWGLSASHRAPAPPPPPLLLPLPLLLPLLELPLLHRSS

SEQ ID NO: 850486 - protein, 645 aa, Homo sapiens
MAPSADPGMSRMLPFLLLLWFLPITEGSQRAEPMFTAVTNSVLPPDYDSNPTQLNYGVAVTDVDHDGDFEIVVAGYNGPNLVLKYDRAQKRLVNIAVDERSSPYYALRDRQGNAIGVTACDIDGDGREEIYFLNTNNAFSGVATYTDKLFKFRNNRWEDILSDEVNVARGVASLFAGRSVACVDRKGSGRYSIYIANYAYGNVGPDALIEMDPEASDLSRGILALRDVAAEAGVSKYTGGRGVSVGPILSSSASDIFCDNENGPNFLFHNRGDGTFVDAAASAGVDDPHQHGRGVALADFNRDGKVDIVYGNWNGPHRLYLQMSTHGKVRFRDIASPKFSMPSPVRTVITADFDNDQELEIFFNNIAYRSSSANRLFRVIRREHGDPLIEELNPGDALEPEGRGTGGVVTDFDGDGMLDLILSHGESMAQPLSVFRGNQGFNNNWLRVVPRTRFGAFARGAKVVLYTKKSGAHLRIIDGGSGYLCEMEPVAHFGLGKDEASSVEVTWPDGKMVSRNVASGEMNSVLEILYPRDEDTLQDPAPLECGQGFSQQENGHCMDTNECIQFPFVCPRDKPVCVNTYGSYRCRTNKKCSRGYEPNEDGTACVAQVAFLGGYSSAASRISEPLSRASYLSLGLGLCLQLYAL

SEQ ID NO: 850487 - protein, 610 aa, Homo sapiens
MAPSADPGMSRMLPFLLLLWFLPITEGSQRAEPMFTAVTNSVLPPDYDSNPTQLNYGVAVTDVDHDGDFEIVVAGYNGPNLVLKYDRAQKRLVNIAVDERSSPYYALRDRQGNAIGVTACDIDGDGREEIYFLNTNNAFSGVATYTDKLFKFRNNRWEDILSDEVNVARGVASLFAGRSVACVDRKGSGRYSIYIANYAYGNVGPDALIEMDPEASDLSRGILALRDVAAEAGVSKYTGGRGVSVGPILSSSASDIFCDNENGPNFLFHNRGDGTFVDAAASAGVDDPHQHGRGVALADFNRDGKVDIVYGNWNGPHRLYLQMSTHGKVRFRDIASPKFSMPSPVRTVITADFDNDQELEIFFNNIAYRSSSANRLFRVIRREHGDPLIEELNPGDALEPEGRGTGGVVTDFDGDGMLDLILSHGESMAQPLSVFRGNQGFNNNWLRVVPRTRFGAFARGAKVVLYTKKSGAHLRIIDGGSGYLCEMEPVAHFGLGKDEASSVEVTWPDGKMVSRNVASGEMNSVLEILYPRDEDTLQDPAPLETPMNASSSHSCALETSPYVSTPMEATGAGPTRSAVGATSPTRMAQPAWKEPCYLVSAISLENRMLL

SEQ ID NO: 850488 - protein, 712 aa, Homo sapiens
AGIKRARGVGAGGSRPARDRGWEQAGGGAGGRGGSERPLPTPLGGGAESGRMAPSADPGMSRMLPFLLLLWFLPITEGSQRAEPMFTAVTNSVLPPDYDSNPTQLNYGVAVTDVDHDGDFEIVVAGYNGPNLVLKYDRAQKRLVNIAVDERSSPYYALRDRQGNAIGVTACDIDGDGREEIYFLNTNNAFSGVATYTDKLFKFRNNRWEDILSDEVNVARGVASLFAGRSVACVDRKGSGRYSIYIANYAYGNVGPDALIEMDPEASDLSRGILALRDVAAEAGVSKYTGGRGVSVGPILSSSASDIFCDNENGPNFLFHNRGDGTFVDAAASAGVDDPHQHGRGVALADFNRDGKVDIVYGNWNGPHRLYLQMSTHGKVRFRDIASPKFSMPSPVRTVITADFDNDQELEIFFNNIAYRSSSANRLFRVIRREHGDPLIEELNPGDALEPEGRGTGGVVTDFDGDGMLDLILSHGESMAQPLSVFRGNQGFNNNWLRVVPRTRFGAFARGAKVVLYTKKSGAHLRIIDGGSGYLCEMEPVAHFGLGKDEASSVEVTWPDGKMVSRNVASGEMNSVLEILYPRDEDTLQDPAPLECGQGFSQQENGHCMDTNECIQFPFVCPRDKPVCVNTYGSYRCRTNKKCSRGYEPNEDGTACVGTLGQSPGPRPTTPTAAAATAAAAAAAGAATAAPVLVDGDLNLGSVVKESCEPSC

SEQ ID NO: 850489 - protein, 179 aa, Homo sapiens
CRQTGLLDSIAPERRDLKSVLFTISLALRTVLNSCFYSMDELVDADASAESLLLSSAADALSFCPSGKDEASSVEVTWPDGKMVSRNVASGEMNSVLEILYPRDEDTLQDPAPLECGQGFSQQENGHCMDTNECIQFPFVCPRDKVEPRDKVEPRDKVEPRDKVEPRDKVEPRDKVEPR

SEQ ID NO: 850490 - protein, 668 aa, Homo sapiens
AGIKRARGVGAGGSRPARDRGWEQAGGGAGGRGGSERPLPTPLGGGAESGRMAPSADPGMSRMLPFLLLLWFLPITEGSQRAEPMFTAVTNSVLPPDYDSNPTQLNYGVAVTDVDHDGDFEIVVAGYNGPNLVLKYDRAQKRLVNIAVDERSSPYYALRDRQGNAIGVTACDIDGDGREEIYFLNTNNAFSGVATYTDKLFKFRNNRWEDILSDEVNVARGVASLFAGRSVACVDRKGSGRYSIYIANYAYGNVGPDALIEMDPEASDLSRGILALRDVAAEAGVSKYTGGRGVSVGPILSSSASDIFCDNENGPNFLFHNRGDGTFVDAAASAGVDDPHQHGRGVALADFNRDGKVDIVYGNWNGPHRLYLQMSTHGKVRFRDIASPKFSMPSPVRTVITADFDNDQELEIFFNNIAYRSSSANRLFRVIRREHGDPLIEELNPGDALEPEGRGTGGVVTDFDGDGMLDLILSHGESMAQPLSVFRGNQGFNNNWLRVVPRTRFGAFARGAKVVLYTKKSGAHLRIIDGGSGYLCEMEPVAHFGLGKDEASSVEVTWPDGKMVSRNVASGEMNSVLEILYPRDEDTLQDPAPLECGQGFSQQENGHCMDTNECIQFPFVCPRDKPVCVNTYGSYRCRTNKKCSRGYEPNEDGTACVAQVASINTGYR

SEQ ID NO: 850491 - protein, 102 aa, Homo sapiens
MIPLSAVSRAVMLCGRGMISRFHVMPMKYRKNWTPRNHHKVITLPSLLGTFDSSTSTSQAAKKIVLNFMFCGFLSKIIDMEFAISPVRRICFGKNGSHMEVT

SEQ ID NO: 850492 - protein, 234 aa, Homo sapiens
MAASRWARKAVVLLCASDLLLLLLLLPPPGSCAAEGSPGTPDESTPPPRKKKKDIRDYNDADMARLLEQWEKDDDIEEGDLPEHKRPSAPVDFSKIDPSKPESILKMTKKGKTLMMFVTVSGSPTEKETEEITSLWQGSLFNANYDVQRFIVGSDRAIFMLRDGSYAWEIKDFLVGQDRCADVTLEGQVYPGKGGGSKEKNKTKQDKGKKKKEGDLKSRSSKEENRAGNKREDL

SEQ ID NO: 850493 - protein, 234 aa, Homo sapiens; identical to SEQ ID NO: 850492

SEQ ID NO: 850494 - protein, 234 aa, Homo sapiens; identical to SEQ ID NO: 850492

SEQ ID NO: 850495 - protein, 162 aa, Homo sapiens
ASSSFAGVHLAHKRPSAPVDFSKIDPSKPESILKMTKKGKTLMMFVTVSGSPTEKETEEITSLWQGSLFNANYDVQRFIVGSDRAIFMLRDGSYAWEIKDFLVGQDRCADVTLEGQVYPGKGGGSKEKNKTKQDKGKKKKEGDLKSRSSKEENRAGNKREDL

SEQ ID NO: 850496 - protein, 234 aa, Homo sapiens; identical to SEQ ID NO: 850492

SEQ ID NO: 850497 - protein, 251 aa, Homo sapiens
MAASRWARKAVVLLCASDLLLLLLLLPPPGSCAAEGSPGTPDESTPPPRKKKKDIRDYNDADMARLLEQWEKDDDIEEGDLPEHKRPSAPVDFSKIDPSKPESILKMTKKGKTLMMFVTVSGSPTEKETEEITSLWQGSLFNANYDVQRFIVGSDRAIFMLRDGSYAWEIKDFLVGQDRCADVTLEGQVYPGKGGGSKEKNKTKQDKGKKKKEGDLKSRSSKEENRAGLTTQTVRAHDACWGSDRHSCPQV

SEQ ID NO: 850498 - protein, 214 aa, Homo sapiens
NLRLGTRLGVMAEEALRGAAKMAASRWARKAVVLLCASDLLLLLLLLPPPGSCAAEGSPGTPDESTPPPRKKKKDIRDYNDADMARLLEQWEKDDDIEEGDLPEHKRPSAPVDFSKIDPSKPESILKMTKKGKTLMMFVTVSGSPTEKETEEITSLWQGSLFNANYDVQRLECSGVISAHCNLRLPGSSDSPASASRVAGTTGARHHAWLILYF

SEQ ID NO: 850499 - protein, 234 aa, Homo sapiens; identical to SEQ ID NO: 850492

SEQ ID NO: 850500 - protein, 234 aa, Homo sapiens; identical to SEQ ID NO: 850492

SEQ ID NO: 850501 - protein, 234 aa, Homo sapiens; identical to SEQ ID NO: 850492

SEQ ID NO: 850502 - protein, 234 aa, Homo sapiens; identical to SEQ ID NO: 850492

SEQ ID NO: 850503 - protein, 234 aa, Homo sapiens; identical to SEQ ID NO: 850492

SEQ ID NO: 850504 - protein, 234 aa, Homo sapiens; identical to SEQ ID NO: 850492

SEQ ID NO: 850505 - protein, 136 aa, Homo sapiens
MAASRWARKAVVLLCASDLLLLLLLLPPPGSCAAEGSPGTPDESTPPPRKKKKDIRDYNDADMARLLEQWETPEPLPVLPEVPSTCACLSSASLIWTCFSHLSPHALVKRVWLQPNRAWEEKRVLLLPGFPIGEGS

SEQ ID NO: 850506 - protein, 492 aa, Homo sapiens
MEDQAGQRDYDLLVVGGGSGGLACAKEAAQLGRKVSVVDYVEPSPQGTRWGLGGTCVNVGCIPKKLMHQAALLGGLIQDAPNYGWEVAQPVPHDWRKMAEAVQNHVKSLNWGHRVQLQDRKVKYFNIKASFVDEHTVCGVAKGGKEILLSADHIIIATGGRPRYPTHIEGALEYGITSDDIFWLKESPGKTLVVGASYVALECAGFLTGIGLDTTIMMRSIPLRGFDQQMSSMVIEHMASHGTRFLRGCAPSRVRRLPDGQLQVTWEDSTTGKEDTGTFDTVLWAIGRVPDTRSLNLEKAGVDTSPDTQKILVDSREATSVPHIYAIGDVVEGRPELTPTAIMAGRLLVQRLFGGSSDLMDYDNVPTTVFTPLEYGCVGLSEEEAVARHGQEHVEVYHAHYKPLEFTVAGRDASQCYVKMVCLREPPQLVLGLHFLGPNAGEVTQGFALGIKCGASYAQVMRTVGIHPTCSEEVVKLRISKRSGLDPTVTGC

SEQ ID NO: 850507 - protein, 520 aa, Homo sapiens
MVLQRSTALLPTVEVDKHCTEKKKRLGPIWIGSGQRDYDLLVVGGGSGGLACAKEAAQLGRKVSVVDYVEPSPQGTRWGLGGTCVNVGCIPKKLMHQAALLGGLIQDAPNYGWEVAQPVPHDWRKMAEAVQNHVKSLNWGHRVQLQDRKVKYFNIKASFVDEHTVCGVAKGGKEILLSADHIIIATGGRPRYPTHIEGALEYGITSDDIFWLKESPGKTLVVGASYVALECAGFLTGIGLDTTIMMRSIPLRGFDQQMSSMVIEHMASHGTRFLRGCAPSRVRRLPDGQLQVTWEDSTTGKEDTGTFDTVLWAIGRVPDTRSLNLEKAGVDTSPDTQKILVDSREATSVPHIYAIGDVVEGRPELTPTAIMAGRLLVQRLFGGSSDLMDYDNVPTTVFTPLEYGCVGLSEEEAVARHGQEHVEVYHAHYKPLEFTVAGRDASQCYVKMVCLREPPQLVLGLHFLGPNAGEVTQGFALGIKCGASYAQVMRTVGIHPTCSEEVVKLRISKRSGLDPTVTGC

SEQ ID NO: 850508 - protein, 585 aa, Homo sapiens
IPHTLSQCSTLGLKAPAPNPAAFGPGLASALTSPATARPGLDPPRSGAGSAAGSPSCPRSPTTMAAMAVALRGLGGRFRWRTQAVAGGVRGAARGAAAGQRDYDLLVVGGGSGGLACAKEAAQLGRKVSVVDYVEPSPQGTRWGLGGTCVNVGCIPKKLMHQAALLGGLIQDAPNYGWEVAQPVPHDWRKMAEAVQNHVKSLNWGHRVQLQDRKVKYFNIKASFVDEHTVCGVAKGGKEILLSADHIIIATGGRPRYPTHIEGALEYGITSDDIFWLKESPGKTLVVGASYVALECAGFLTGIGLDTTIMMRSIPLRGFDQQMSSMVIEHMASHGTRFLRGCAPSRVRRLPDGQLQVTWEDSTTGKEDTGTFDTVLWAIGRVPDTRSLNLEKAGVDTSPDTQKILVDSREATSVPHIYAIGDVVEGRPELTPTAIMAGRLLVQRLFGGSSDLMDYDNVPTTVFTPLEYGCVGLSEEEAVARHGQEHVEVYHAHYKPLEFTVAGRDASQCYVKMVCLREPPQLVLGLHFLGPNAGEVTQGFALGIKCGASYAQVMRTVGIHPTCSEEVVKLRISKRSGLDPTVTGC

SEQ ID NO: 850509 - protein, 150 aa, Homo sapiens
MAGRLLVQRLFGGSSDLMDYDNVPTTVFTPLEYGCVGLSEEEAVARHGQEHVEVYHAHYKPLEFTVAGRDASQCYVKMVCLREPPQLVLGLHFLGPNAGEVTQGFALGIKCGASYAQVMRTVGIHPTCSEEVVKLRISKRSGLDPTVTGC

SEQ ID NO: 850510 - protein, 172 aa, Homo sapiens
MPLRRTSSRGNAGRPELTPTAIMAGRLLVQRLFGGSSDLMDYDNVPTTVFTPLEYGCVGLSEEEAVARHGQEHVEVYHAHYKPLEFTVAGRDASQCYVKMVCLREPPQLVLGLHFLGPNAGEVTQGFALGIKCGASYAQVMRTVGIHPTCSEEVVKLRISKRSGLDPTVTGC

SEQ ID NO: 850511 - protein, 209 aa, Homo sapiens
CTRSLSGHSEKQFKHNRSEVKATEDNLSAPSLFPSGRVPDTRSLNLEKAGVDTSPDTQKILVDSREATSVPHIYAIGDVVEVPTTVFTPLEYGCVGLSEEEAVARHGQEHVEVYHAHYKPLEFTVAGRDASQCYVKMVCLREPPQLVLGLHFLGPNAGEVTQGFALGIKCGASYAQVMRTVGIHPTCSEEVVKLRISKRSGLDPTVTGC

SEQ ID NO: 850512 - protein, 585 aa, Homo sapiens; identical to SEQ ID NO: 850508

SEQ ID NO: 850513 - protein, 172 aa, Homo sapiens; identical to SEQ ID NO: 850510

SEQ ID NO: 850514 - protein, 46 aa, Homo sapiens
MISWWSAGDLVAWLVPRRVCILYTSWQGLEAFRAPREGGAVQKTSM

SEQ ID NO: 850515 - protein, 585 aa, Homo sapiens; identical to SEQ ID NO: 850508

SEQ ID NO: 850516 - protein, 423 aa, Homo sapiens
MVAAYLLVHLSHSIQALLGAGAPFYQCSLLIQLVRFNLQRKCLKILSLSFRKVKYFNIKASFVDEHTVCGVAKGGKEILLSADHIIIATGGRPRYPTHIEGALEYGITSDDIFWLKESPGKTLVVGASYVALECAGFLTGIGLDTTIMMRSIPLRGFDQQMSSMVIEHMASHGTRFLRGCAPSRVRRLPDGQLQVTWEDSTTGKEDTGTFDTVLWAIGRVPDTRSLNLEKAGVDTSPDTQKILVDSREATSVPHIYAIGDVVEGRPELTPTAIMAGRLLVQRLFGGSSDLMDYDNVPTTVFTPLEYGCVGLSEEEAVARHGQEHVEVYHAHYKPLEFTVAGRDASQCYVKMVCLREPPQLVLGLHFLGPNAGEVTQGFALGIKCGASYAQVMRTVGIHPTCSEEVVKLRISKRSGLDPTVTGC

SEQ ID NO: 850517 - protein, 1278 aa, Homo sapiens
MPPPPSANRACVGLARGQCLLGEGSQRHKLCHEGDALLKQSLGMGNQKGNQPGAAEASLLCSGHKRRGDDRGGPEMPERTQGSWPGGDQYSKSNVLSHVVKVDFKYVYYDKHYEGLGNILDSGVYLMVLILNSTLFFFQNLSSYCHSQINSTLKGRWRVSPSHRALALLLCLLTPPFTHSIRELLPLNRGAALDQAHRDVADQWAGGCVPGKPGRQPGRQQARPLPTQQSCRGLHAHPPLLGVCFIFLYFQNEHPPDSLPGMIDAGGGSFSQSLASDPASRGRLRLLRACWGPLGHVLTSLLLRARFCKHSGATSQVSNCERFLLVCTKAFNQALFLLAIKDDPLWEVKIKRPRGGTAGNANISDSASCTGCALRPHKLGSDRKGGCLRARCTHTQKGPRCCTELPCGAECWPCPLPVCLAPGRSWRGPWTLALRSGPCSLEAEEDQSPFLDAALISTWWIKHIEQLKQLIAVQGAPAHCLSLNHPPTPGVSDNRLGTSVRRISCLQMCRYSAEWRQSASTAAGSNSPAELTSCGLNPWLSRGAGPGWGILSKRLPVQGLLSAVKFRFGFKEGTDCLWTAALKNWKLSLHVPLWRPQPLWMVLCPSLEGEMLKALAYPSLHHRSPAHGQKSQQTQEGTRYTWGSHSQAAVVPECQGGWPQVCLGPCDMAGETRPREGIRLDLTPATEAISSLGFILDNSEMSTCVYNQHQSLKHNMHGAWELGFPASSWHHTEATPTACPCIVSPTWHVCLDHSQRDWGAQEMMMGAGGAQEGSCCQGGLQPWAPLSTQALFAGMYRQATVFAQLCSADGSRTPQTQLHKSLRIVPLLSARQQERAESKNQAGDGWEHPKPGEREGAAPPGCPLCWCGCSWGLGAAVGVDAARARGLRWAHQDCSQGCALLQLRETKFVAMLFPVGMGPAVTLASTCLHALRVEWPSLSSDTDRRPLFDSLTPFYFSANLVCELMTSRETQICLHCEFDIFGSGAKMNIHGALPMSGGCGLPLHTTWPRACAAAPETALLAQPQLMVVLTPHRGQARVAGGSALCLPTSLVPHAWLEGKFTLMSRAHSYLTGQPAPAYMVVQLGLVTMTNSVLNELELSGNQLKKKEQHGEKSSRDRSAPFMHITMHPLMSAGALGQPTCYNCNYVNKLLKGRVRWLMPVIPHFGMPRWEDHLSPGVQDQPEQQSETSFQIINNNNNNNNCFLFVFETVSSSVAQVGVQERDLAHRNLHLPNSSDSPASAFQVAGITGTRHRAQLIFVFLVETGFHCVSQAGLELLTS

SEQ ID NO: 850518 - protein, 301 aa, Homo sapiens
MAFSGIYVALECAGFLTGIGLDTTIMMRSIPLRGFDQQMSSMVIEHMASHGTRFLRGCAPSRVRRLPDGQLQVTWEDSTTGKEDTGTFDTVLWAIGRVPDTRSLNLEKAGVDTSPDTQKILVDSREATSVPHIYAIGDVVEGRPELTPTAIMAGRLLVQRLFGGSSDLMDYDNVPTTVFTPLEYGCVGLSEEEAVARHGQEHVEVYHAHYKPLEFTVAGRDASQCYVKMVCLREPPQLVLGLHFLGPNAGEVTQGFALGIKCGASYAQVMRTVGIHPTCSEEVVKLRISKRSGLDPTVTGC

SEQ ID NO: 850519 - protein, 585 aa, Homo sapiens; identical to SEQ ID NO: 850508

SEQ ID NO: 850520 - protein, 403 aa, Homo sapiens
IPHTLSQCSTLGLKAPAPNPAAFGPGLASALTSPATARPGLDPPRSGAGSAAGSPSCPRSPTTMAAMAVALRGLGGRFRWRTQAVAGGVRGAARGAAAGQRDYDLLVVGGGSGGLACAKEAAQLGRKVSVVDYVEPSPQGTRWGLGGTCVNVGCIPKKLMHQAALLGGLIQDAPNYGWEVAQPVPHDWRKMAEAVQNHVKSLNWGHRVQLQDRKVKYFNIKASFVDEHTVCGVAKGGKEILLSADHIIIATGGRPRYPTHIEGALEYGITSDDIFWLKESPGKTLVVGASYVALECAGFLTGIGLDTTIMMRSIPLRGFDQQMSSMVIEHMASHGTRFLRGCAPSRVRRLPDGQLQVTWEDSTTGKEDTGTFDTVLWAIGVSDNRLGTSVRRISCLQMCRLQR

SEQ ID NO: 850521 - protein, 401 aa, Homo sapiens
IPHTLSQCSTLGLKAPAPNPAAFGPGLASALTSPATARPGLDPPRSGAGSAAGSPSCPRSPTTMAAMAVALRGLGGRFRWRTQAVAGGVRGAARGAAAGQRDYDLLVVGGGSGGLACAKEAAQLGRKVSVVDYVEPSPQGTRWGLGGTCVNVGCIPKKLMHQAALLGGLIQDAPNYGWEVAQPVPHDWRKMAEAVQNHVKSLNWGHRVQLQDRKVKYFNIKASFVDEHTVCGVAKGGKEILLSADHIIIATGGRPRYPTHIEGALEYGITSDDIFWLKESPGKTLVVGASYVALECAGFLTGIGLDTTIMMRSIPLRGFDQQMSSMVIEHMASHGTRFLRGCAPSRVRRLPDGQLQVTWEDSTTGKEDTGTFDTVLWAIGLPHPAGCQAGWPLPSAPREQP

SEQ ID NO: 850522 - protein, 574 aa, Homo sapiens
MGNNFSSIPSLPRGNPSRAPRGHPQNLKDSIGGPFPVTSHRCHHKQKHCPAVLPSGGLPATPLLFHPHTKGSQILMDLSHKAVKRQASFCNAITFSNRPVLIYEQVRLKITKKQCCWSGALRLGFTSKDPSRIHPDSLPKYACPDLVSQSGFWAKALPEEFANEGNIIAFWVDKKGRVFHRINDSAVMLFFSGVRTADPLWALVDVYGLTRGVQLLDSELVLPDCLRPRSFTALRRPSLRREADDARLSVSLCDLNVPGADGDEAAPAAGCPIPQNSLNSQHSRALPAQLDGDLRFHALRAGAHVRILDEQTVARVEHGRDERALVFTSRPVRVAETIFVKVTRSGGARPGALSFGVTTCDPGTLRPADLPFSPEALVDRKEFWAVCRVPGPLHSGDILGLVVNADGELHLSHNGAAAGMQLCVDASQPLWMLFGLHGTITQIRILGSTILAERGIPSLPCSPASTPTSPSALGSRLSDPLLSTCSSGPLGSSAGGTAPNSPVSLPESPVTPGLGQWSDECTICYEHAVDTVIYTCGHMCLCYACGLRLKKALHACCPICRRPIKDIIKTYRSS

SEQ ID NO: 850523 - protein, 574 aa, Homo sapiens; identical to SEQ ID NO: 850522

SEQ ID NO: 850524 - protein, 466 aa, Homo sapiens [sequence omitted]

SEQ ID NO: 850525 - protein, 489 aa, Homo sapiens
RREAALGLIDQVGEGGLRPPPATQITKKQCCWSGALRLGFTSKDPSRIHPDSLPKYACPDLVSQSGFWAKALPEEFANEGNIIAFWVDKKGRVFHRINDSAVMLFFSGVRTADPLWALVDVYGLTRGVQLLDSELVLPDCLRPRSFTALRRPSLRREADDARLSVSLCDLNVPGADGDEAAPAAGCPIPQNSLNSQHSRALPAQLDGDLRFHALRAGAHVRILDEQTVARVEHGRDERALVFTSRPVRVAETIFVKVTRSGGARPGALSFGVTTCDPGTLRPADLPFSPEALVDRKEFWAVCRVPGPLHSGDILGLVVNADGELHLSHNGAAAGMQLCVDASQPLWMLFGLHGTITQIRILGSTILAERGIPSLPCSPASTPTSPSALGSRLSDPLLSTCSSGPLGSSAGGTAPNSPVSLPESPVTPGLGQWSDECTICYEHAVDTVIYTCGHMCLCYACGLRLKKALHACCPICRRPIKDIIKTYRSS

SEQ ID NO: 850526 - protein, 367 aa, Homo sapiens [sequence omitted]

SEQ ID NO: 850527 - protein, 252 aa, Homo sapiens
MGNNFSSIPSLPRGNPSRAPRGHPQNLKDSIGGPFPVTSHRCHHKQKHCPAVLPSGGLPATPLLFHPHTKGSQILMDLSHKAVKRQASFCNAITFSNRPVLIYEQVRLKITKKQCCWSGALRLGFTSKDPSRIHPDSLPKYACPDLVSQSGFWAKALPEEFANEGNIIAFWVDKKGRVFHRINDSAVMLFFSGVRTADPLWALVDVYGLTRGVQLLGLDTRQERGQWPSCAFQSRAYKSSRHQGSTAHVGHR

SEQ ID NO: 850528 - protein, 574 aa, Homo sapiens; identical to SEQ ID NO: 850522

SEQ ID NO: 850529 - protein, 577 aa, Homo sapiens
FGTVTSRPAQQRWLHCPSPEMGGQITRSTLHDSIGGPFPVTSHRCHHKQKHCPAVLPSGGLPATPLLFHPHTKGSQILMDLSHKAVKRQASFCNAITFSNRPVLIYEQVRLKITKKQCCWSGALRLGFTSKDPSRIHPDSLPKYACPDLVSQSGFWAKALPEEFANEGNIIAFWVDKKGRVFHRINDSAVMLFFSGVRTADPLWALVDVYGLTRGVQLLDSELVLPDCLRPRSFTALRRPSLRREADDARLSVSLCDLNVPGADGDEAAPAAGCPIPQNSLNSQHSRALPAQLDGDLRFHALRAGAHVRILDEQTVARVEHGRDERALVFTSRPVRVAETIFVKVTRSGGARPGALSFGVTTCDPGTLRPADLPFSPEALVDRKEFWAVCRVPGPLHSGDILGLVVNADGELHLSHNGAAAGMQLCVDASQPLWMLFGLHGTITQIRILGSTILAERGIPSLPCSPASTPTSPSALGSRLSDPLLSTCSSGPLGSSAGGTAPNSPVSLPESPVTPGLGQWSDECTICYEHAVDTVIYTCGHMCLCYACGLRLKKALHACCPICRRPIKDIIKTYRSS

SEQ ID NO: 850530 - protein, 367 aa, Homo sapiens [sequence omitted]

SEQ ID NO: 850531 - protein, 466 aa, Homo sapiens [sequence omitted]

SEQ ID NO: 850532 - protein, 102 aa, Homo sapiens
MGDTPSSSTSWISSKVTGCVLKRDWRGRSRPGPWAAWRAHGLRELVGQAHEVRHHRLVTGADAHQLAGLGGHGASGVCGAGRRGAGALRGRPQCFFFFFFLQ

SEQ ID NO: 850533 - protein, 102 aa, Homo sapiens; identical to SEQ ID NO: 850532

SEQ ID NO: 850534 - protein, 102 aa, Homo sapiens; identical to SEQ ID NO: 850532

SEQ ID NO: 850535 - protein, 225 aa, Homo sapiens
HCANILTLFVSFQEPHRHIQVKRSLNKCLQPSQCKNKYQSSRRSSSRAAPKVPTATPNNYKSVQRECWRECEWVCAGGHGGAVCKIGVANHRTRAWSGYPPPILGLLLLHGGHPLLLHLLDLVEGHRLRLEARLARPQPARPLGSLAGARAAGTRRPGTRSAASPPGNWSRCPSARRAWRPWRLRRLRGRAAGRRGSPRAAAMLFFFFFFTMRIIIHLYFHNSLQ

SEQ ID NO: 850536 - protein, 207 aa, Homo sapiens
FFCAILYCPDYYGSRARHIQVKRSLNKCLQPSQCKNKYQSSRRSSSRGVAGVQAVPQFAAAELLPLQRQALRAAAQALQALQERLLGLLLLHGGHPLLLHLLDLVEGHRLRLEARLARPQPARPLGSLAGARAAGTRRPGTRSAASPPGNWSRCPSARRAWRPWRLRRLRGRAAGRRGSPRAAAMLFFFFFFTMRIIIHLYFHNSLQ

SEQ ID NO: 850537 - protein, 102 aa, Homo sapiens; identical to SEQ ID NO: 850532

SEQ ID NO: 850538 - protein, 102 aa, Homo sapiens; identical to SEQ ID NO: 850532

SEQ ID NO: 850539 - protein, 264 aa, Homo sapiens
HCANILTLFVSFQEPHRHIQVKRSLNKCLQPSQCKNKYQSSRRSSSRAAPKVPTATPNNYKSVQRECWRECEWVCAGGHGGAVCKIGVANHRTRAWSGYPPPTQRGRASPHTLTAEFAESLESRLFLSLQLLSCSRCSDRLCVLRRRHSRLCRNDFLAFSSSMGDTPSSSTSWISSKVTGCVLKRDWRGRSRPGPWAAWRAHGLRELVGQAHEVRHHRLVTGADAHQLAGLGGHGASGVCGAGRRGAGALRGRPQCFFFFFFLQ

SEQ ID NO: 850540 - protein, 52 aa, Homo sapiens
APGPPGRQQPGARRAGDPNLLRGGGGLAGPGRRSSGGRAGGRTRRGARGSGG

SEQ ID NO: 850541 - protein, 1429 aa, Homo sapiens
MAGGAWGRLACYLEFLKKEELKEFQLLLANKAHSRSSSGETPAQPEKTSGMEVASYLVAQYGEQRAWDLALHTWEQMGLRSLCAQAQEGAGHSPSFPYSPSEPHLGSPSQPTSTAVLMPWIHELPAGCTQGSERRVLRQLPDTSGRRWREISASLLYQALPSSPDHESPSQESPNAPTSTAVLGSWGSPPQPSLAPREQEAPGTQWPLDETSGIYYTEIREREREKSEKGRPPWAAVVGTPPQAHTSLQPHHHPWEPSVRESLCSTWPWKNEDFNQKFTQLLLLQRPHPRSQDPLVKRSWPDYVEENRGHLIEIRDLFGPGLDTQEPRIVILQGAAGIGKSTLARQVKEAWGRGQLYGDRFQHVFYFSCRELAQSKVVSLAELIGKDGTATPAPIRQILSRPERLLFILDGVDEPGWVLQEPSSELCLHWSQPQPADALLGSLLGKTILPEASFLITARTTALQNLIPSLEQARWVEVLGFSESSRKEYFYRYFTDERQAIRAFRLVKSNKELWALCLVPWVSWLACTCLMQQMKRKEKLTLTSKTTTTLCLHYLAQALQAQPLGPQLRDLCSLAAEGIWQKKTLFSPDDLRKHGLDGAIISTFLKMGILQEHPIPLSYSFIHLCFQEFFAAMSYVLEDEKGRGKHSNCIIDLEKTLEAYGIHGLFGASTTRFLLGLLSDEGEREMENIFHCRLSQGRNLMQWVPSLQLLLQPHSLESLHCLYETRNKTFLTQVMAHFEEMGMCVETDMELLVCTFCIKFSRHVKKLQLIEGRQHRSTWSPTMVVLFRWVPVTDAYWQILFSVLKVTRNLKELDLSGNSLSHSAVKSLCKTLRRPRCLLETLRLAGCGLTAEDCKDLAFGLRANQTLTELDLSFNVLTDAGAKHLCQRLRQPSCKLQRLQLVSCGLTSDCCQDLASVLSASPSLKELDLQQNNLDDVGVRLLCEGLRHPACKLIRLGLDQTTLSDEMRQELRALEQEKPQLLIFSRRKPSVMTPTEGLDTGEMSNSTSSLKRQRLGSERAASHVAQANLKLLDVSKIFPIAEIAEESSPEVVPVELLCVPSPASQGDLHTKPLGTDDDFWGPTGPVATEVVDKEKNLYRVHFPVAGSYRWPNTGLCFVMREAVTVEIEFCVWDQFLGEINPQHSWMVAGPLLDIKAEPGAVEAVHLPHFVALQGGHVDTSLFQMAHFKEEGMLLEKPARVELHHIVLENPSFSPLGVLLKMIHNALRFIPVTSVVLLYHRVHPEEVTFHLYLIPSDCSIRKELELCYRSPGEDQLFSEFYVGHLGSGIRLQVKDKKDETLVWEALVKPGDLMPATTLIPPARIAVPSPLDAPQLLHFVDQYREQLIARVTSVEVVLDKLHGQVLSQEQYERVLAENTRPSQMRKLFSLSQSWDRKCKDGLYQALKETHPHLIMELWEKGSKKGLLPLSS

SEQ ID NO: 850542 - protein, 1429 aa, Homo sapiens; identical to SEQ ID NO: 850541

SEQ ID NO: 850543 - protein, 1386 aa, Homo sapiens
MAGGAWGRLACYLEFLKKEELKEFQLLLANKAHSRSSSGETPAQPEKTSGMEVASYLVAQYGEQRAWDLALHTWEQMGLRSLCAQAQEGAGHSPSFPYSPSEPHLGSPSQPTSTAVLMPWIHELPAGCTQGSERRVLRQLPDTSGRRWREISASLLYQALPSSPDHESPSQESPNAPTSTAVLGSWGSPPQPSLAPREQEAPGTQWPLDETSGIYYTEIREREREKSEKGRPPWAAVVGTPPQAHTSLQPHHHPWEPSVRESLCSTWPWKNEDFNQKFTQLLLLQRPHPRSQDPLVKRSWPDYVEENRGHLIEIRDLFGPGLDTQEPRIVILQGAAGIGKSTLARQVKEAWGRGQLYGDRFQHVFYFSCRELAQSKVVSLAELIGKDGTATPAPIRQILSRPERLLFILDGVDEPGWVLQEPSSELCLHWSQPQPADALLGSLLGKTILPEASFLITARTTALQNLIPSLEQARWVEVLGFSESSRKEYFYRYFTDERQAIRAFRLVKSNKELWALCLVPWVSWLACTCLMQQMKRKEKLTLTSKTTTTLCLHYLAQALQAQPLGPQLRDLCSLAAEGIWQKKTLFSPDDLRKHGLDGAIISTFLKMGILQEHPIPLSYSFIHLCFQEFFAAMSYVLEDEKGRGKHSNCIIDLEKTLEAYGIHGLFGASTTRFLLGLLSDEGEREMENIFHCRLSQGRNLMQWVPSLQLLLQPHSLESLHCLYETRNKTFLTQVMAHFEEMGMCVETDMELLVCTFCIKFSRHVKKLQLIEGRQHRSTWSPTMVVLFRWVPVTDAYWQILFSVLKVTRNLKELDLSGNSLSHSAVKSLCKTLRRPRCLLETLRLAGCGLTAEDCKDLAFGLRANQTLTELDLSFNVLTDAGAKHLCQRLRQPSCKLQRLQLVSCGLTSDCCQDLASVLSASPSLKELDLQQNNLDDVGVRLLCEGLRHPACKLIRLGLDQTTLSDEMRQELRALEQEKPQLLIFSRRKPSVMTPTEGLDTGEMSNSTSSLKRQRLGSERAASHVAQANLKLLDVSKIFPIAEIAEESSPEVVPVELLCVPSPASQGDLHTKPLGTDDDFWGPTGPVATEVVDKEKNLYRVHFPVAGSYRWPNTGLCFVMREAVTVEIEFCVWDQFLGEINPQHSWMVAGPLLDIKAEPGAVEAVHLPHFVALQGGHVDTSLFQMAHFKEEGMLLEKPARVELHHIVLENPSFSPLGVLLKMIHNALRFIPVTSVVLLYHRVHPEEVTFHLYLIPSDCSIRKAIDDLEMKFQFVRIHKPPPLTPLYMGCRYTVSGSGSGMLEILPKELELCYRSPGEDQLFSEFYVGHLGSGIRLQVKDKKDETLVWEALVKPGDLMPATTLIPPARIGRNTSQPWNLRCNRDARRY

SEQ ID NO: 850544 - protein, 610 aa, Homo sapiens
MYFSSFTKLKFRWVPVTDAYWQILFSVLKVTRNLKELDLSGNSLSHSAVKSLCKTLRRPRCLLETLRLAGCGLTAEDCKDLAFGLRANQTLTELDLSFNVLTDAGAKHLCQRLRQPSCKLQRLQLVSCGLTSDCCQDLASVLSASPSLKELDLQQNNLDDVGVRLLCEGLRHPACKLIRLGLDQTTLSDEMRQELRALEQEKPQLLIFSRRKPSVMTPTEGLDTGEMSNSTSSLKRQRLGSERAASHVAQANLKLLDVSKIFPIAEIAEESSPEVVPVELLCVPSPASQGDLHTKPLGTDDDFWGPTGPVATEVVDKEKNLYRVHFPVAGSYRWPNTGLCFVMREAVTVEIEFCVWDQFLGEINPQHSWMVAGPLLDIKAEPGAVEAVHLPHFVALQGGHVDTSLFQMAHFKEEGMLLEKPARVELHHIVLENPSFSPLGVLLKMIHNALRFIPVTSVVLLYHRVHPEEVTFHLYLIPSDCSIRKAIDDLEMKFQFVRIHKPPPLTPLYMGCRYTVSGSGSGMLEILPKELELCYRSPGEDQLFSEFYVGHLGSGIRLQVKDKKDETLVWEALVKPGDLMPATTLIPPARIGRNTSQPWNLRCNRDARRY

SEQ ID NO: 850545 - protein, 119 aa, Homo sapiens
MADGLFRRRPWGLEQIRPDPESEGLFDKPPPEDPPAARGPRSASAAGKKAGRRAGGRAQGGRAGQPPKAASRPPPKKEAPPLDEGCYLDHFPHLSIFIYAAIAFSITSCIFTYIHLQLA

SEQ ID NO: 850546 - protein, 1473 aa, Homo sapiens
MAGGAWGRLACYLEFLKKEELKEFQLLLANKAHSRSSSGETPAQPEKTSGMEVASYLVAQYGEQRAWDLALHTWEQMGLRSLCAQAQEGAGHSPSFPYSPSEPHLGSPSQPTSTAVLMPWIHELPAGCTQGSERRVLRQLPDTSGRRWREISASLLYQALPSSPDHESPSQESPNAPTSTAVLGSWGSPPQPSLAPREQEAPGTQWPLDETSGIYYTEIREREREKSEKGRPPWAAVVGTPPQAHTSLQPHHHPWEPSVRESLCSTWPWKNEDFNQKFTQLLLLQRPHPRSQDPLVKRSWPDYVEENRGHLIEIRDLFGPGLDTQEPRIVILQGAAGIGKSTLARQVKEAWGRGQLYGDRFQHVFYFSCRELAQSKVVSLAELIGKDGTATPAPIRQILSRPERLLFILDGVDEPGWVLQEPSSELCLHWSQPQPADALLGSLLGKTILPEASFLITARTTALQNLIPSLEQARWVEVLGFSESSRKEYFYRYFTDERQAIRAFRLVKSNKELWALCLVPWVSWLACTCLMQQMKRKEKLTLTSKTTTTLCLHYLAQALQAQPLGPQLRDLCSLAAEGIWQKKTLFSPDDLRKHGLDGAIISTFLKMGILQEHPIPLSYSFIHLCFQEFFAAMSYVLEDEKGRGKHSNCIIDLEKTLEAYGIHGLFGASTTRFLLGLLSDEGEREMENIFHCRLSQGRNLMQWVPSLQLLLQPHSLESLHCLYETRNKTFLTQVMAHFEEMGMCVETDMELLVCTFCIKFSRHVKKLQLIEGRQHRSTWSPTMVVLFRWVPVTDAYWQILFSVLKVTRNLKELDLSGNSLSHSAVKSLCKTLRRPRCLLETLRLAGCGLTAEDCKDLAFGLRANQTLTELDLSFNVLTDAGAKHLCQRLRQPSCKLQRLQLVSCGLTSDCCQDLASVLSASPSLKELDLQQNNLDDVGVRLLCEGLRHPACKLIRLGLDQTTLSDEMRQELRALEQEKPQLLIFSRRKPSVMTPTEGLDTGEMSNSTSSLKRQRLGSERAASHVAQANLKLLDVSKIFPIAEIAEESSPEVVPVELLCVPSPASQGDLHTKPLGTDDDFWGPTGPVATEVVDKEKNLYRVHFPVAGSYRWPNTGLCFVMREAVTVEIEFCVWDQFLGEINPQHSWMVAGPLLDIKAEPGAVEAVHLPHFVALQGGHVDTSLFQMAHFKEEGMLLEKPARVELHHIVLENPSFSPLGVLLKMIHNALRFIPVTSVVLLYHRVHPEEVTFHLYLIPSDCSIRKAIDDLEMKFQFVRIHKPPPLTPLYMGCRYTVSGSGSGMLEILPKELELCYRSPGEDQLFSEFYVGHLGSGIRLQVKDKKDETLVWEALVKPGDLMPATTLIPPARIAVPSPLDAPQLLHFVDQYREQLIARVTSVEVVLDKLHGQVLSQEQYERVLAENTRPSQMRKLFSLSQSWDRKCKDGLYQALKETHPHLIMELWEKGSKKGLLPLSS

SEQ ID NO: 850547 - protein, 1443 aa, Homo sapiens
MAGGAWGRLACYLEFLKKEELKEFQLLLANKAHSRSSSGETPAQPEKTSGMEVASYLVAQYGEQRAWDLALHTWEQMGLRSLCAQAQEGAGHSPSFPYSPSEPHLGSPSQPTSTAVLMPWIHELPAGCTQGSERRVLRQLPDTSGRRWREISASLLYQALPSSPDHESPSQESPNAPTSTAVLGSWGSPPQPSLAPREQEAPGTQWPLDETSGIYYTEIREREREKSEKGRPPWAAVVGTPPQAHTSLQPHHHPWEPSVRESLCSTWPWKNEDFNQKFTQLLLLQRPHPRSQDPLVKRSWPDYVEENRGHLIEIRDLFGPGLDTQEPRIVILQGAAGIGKSTLARQVKEAWGRGQLYGDRFQHVFYFSCRELAQSKVVSLAELIGKDGTATPAPIRQILSRPERLLFILDGVDEPGWVLQEPSSELCLHWSQPQPADALLGSLLGKTILPEASFLITARTTALQNLIPSLEQARWVEVLGFSESSRKEYFYRYFTDERQAIRAFRLVKSNKELWALCLVPWVSWLACTCLMQQMKRKEKLTLTSKTTTTLCLHYLAQALQAQPLGPQLRDLCSLAAEGIWQKKTLFSPDDLRKHGLDGAIISTFLKMGILQEHPIPLSYSFIHLCFQEFFAAMSYVLEDEKGRGKHSNCIIDLEKTLEAYGIHGLFGASTTRFLLGLLSDEGEREMENIFHCRLSQGRNLMQWVPSLQLLLQPHSLESLHCLYETRNKTFLTQVMAHFEEMGMCVETDMELLVCTFCIKFSRHVKKLQLIEGRQHRSTWSPTMVVLFRWVPVTDAYWQILFSVLKVTRNLKELDLSGNSLSHSAVKSLCKTLRRPRCLLETLRLAGCGLTAEDCKDLAFGLRANQTLTELDLSFNVLTDAGAKHLCQRLRQPSCKLQRLQLVSCGLTSDCCQDLASVLSASPSLKELDLQQNNLDDVGVRLLCEGLRHPACKLIRLGKPSVMTPTEGLDTGEMSNSTSSLKRQRLGSERAASHVAQANLKLLDVSKIFPIAEIAEESSPEVVPVELLCVPSPASQGDLHTKPLGTDDDFWGPTGPVATEVVDKEKNLYRVHFPVAGSYRWPNTGLCFVMREAVTVEIEFCVWDQFLGEINPQHSWMVAGPLLDIKAEPGAVEAVHLPHFVALQGGHVDTSLFQMAHFKEEGMLLEKPARVELHHIVLENPSFSPLGVLLKMIHNALRFIPVTSVVLLYHRVHPEEVTFHLYLIPSDCSIRKAIDDLEMKFQFVRIHKPPPLTPLYMGCRYTVSGSGSGMLEILPKELELCYRSPGEDQLFSEFYVGHLGSGIRLQVKDKKDETLVWEALVKPGDLMPATTLIPPARIAVPSPLDAPQLLHFVDQYREQLIARVTSVEVVLDKLHGQVLSQEQYERVLAENTRPSQMRKLFSLSQSWDRKCKDGLYQALKETHPHLIMELWEKGSKKGLLPLSS

SEQ ID NO: 850548 - protein, 1371 aa, Homo sapiens
MAGGAWGRLACYLEFLKKEELKEFQLLLANKAHSRSSSGETPAQPEKTSGMEVASYLVAQYGEQRAWDLALHTWEQMGLRSLCAQAQEGAGHSPSFPYSPSEPHLGSPSQPTSTAVLMPWIHELPAGCTQGSERRVLRQLPDTSGRRWREISASLLYQALPSSPDHESPSQESPNAPTSTAVLGSWGSPPQPSLAPREQEAPGTQWPLDETSGIYYTEIREREREKSEKGRPPWAAVVGTPPQAHTSLQPHHHPWEPSVRESLCSTWPWKNEDFNQKFTQLLLLQRPHPRSQDPLVKRSWPDYVEENRGHLIEIRDLFGPGLDTQEPRIVILQGAAGIGKSTLARQVKEAWGRGQLYGDRFQHVFYFSCRELAQSKVVSLAELIGKDGTATPAPIRQILSRPERLLFILDGVDEPGWVLQEPSSELCLHWSQPQPADALLGSLLGKTILPEASFLITARTTALQNLIPSLEQARWVEVLGFSESSRKEYFYRYFTDERQAIRAFRLVKSNKELWALCLVPWVSWLACTCLMQQMKRKEKLTLTSKTTTTLCLHYLAQALQAQPLGPQLRDLCSLAAEGIWQKKTLFSPDDLRKHGLDGAIISTFLKMGILQEHPIPLSYSFIHLCFQEFFAAMSYVLEDEKGRGKHSNCIIDLEKTLEAYGIHGLFGASTTRFLLGLLSDEGEREMENIFHCRLSQGRNLMQWVPSLQLLLQPHSLESLHCLYETRNKTFLTQVMAHFEEMGMCVETDMELLVCTFCIKFSRHVKKLQLIEGRQHRSTWSPTMVVLFRWVPVTDAYWQILFSVLKVTRNLKELDLSGNSLSHSAVKSLCKTLRRPRCLLETLRLAGCGLTAEDCKDLAFGLRANQTLTELDLSFNVLTDAGAKHLCQRLRQPSCKLQRLQLVSCGLTSDCCQDLASVLSASPSLKELDLQQNNLDDVGVRLLCEGLRHPACKLIRLGLDQTTLSDEMRQELRALEQEKPQLLIFSRRKPSVMTPTEGLDTGEMSNSTSSLKRQRLGSERAASHVAQANLKLLDVSKIFPIAEIAEESSPEVVPVELLCVPSPASQGDLHTKPLGTDDDFWGPTGPVATEVVDKEKNLYRVHFPVAGSYRWPNTGLCFVMREAVTVEIEFCVWDQFLGEINPQHSWMVAGPLLDIKAEPGAVEAVHLPHFVALQGGHVDTSLFQMAHFKEEGMLLEKPARVELHHIVLENPSFSPLGVLLKMIHNALRFIPVTSVVLLYHRVHPEEVTFHLYLIPSDCSIRKAIDDLEMKFQFVRIHKPPPLTPLYMGCRYTVSGSGSGMLEILPKELELCYRSPGEDQLFSEFYVGHLGSGIRLQVKDKKDETLVWEALVKPGRNTSQPWNLRCNRDARRY

SEQ ID NO: 850549 - protein, 1371 aa, Homo sapiens; identical to SEQ ID NO: 850548

SEQ ID NO: 850550 - protein, 83 aa, Homo sapiens
VLRRLEDPLRRIWYPEELSHQETTSWKCPGLAGPVAADPAGTQAQSWRTPEDETLGALAGVHGRAVLGDSRMASFWPGSLLEL

SEQ ID NO: 850551 - protein, 31 aa, Homo sapiens
MTWAGVYLSCRLVSCGLTSDCCQDLASVLSA

SEQ ID NO: 850552 - protein, 1429 aa, Homo sapiens; identical to SEQ ID NO: 850541

SEQ ID NO: 850553 - protein, 1371 aa, Homo sapiens; identical to SEQ ID NO: 850548

SEQ ID NO: 850554 - protein, 300 aa, Homo sapiens
MTSGAPRGLWLLRVHFPVAGSYRWPNTGLCFVMREAVTVEIEFCVWDQFLGEINPQHSWMVAGPLLDIKAEPGAVEAVHLPHFVALQGGHVDTSLFQMAHFKEEGMLLEKPARVELHHIVLENPSFSPLGVLLKMIHNALRFIPVTSVVLLYHRVHPEEVTFHLYLIPSDCSIRKAIDDLEMKFQFVRIHKPPPLTPLYMGCRYTVSGSGSGMLEILPKELELCYRSPGEDQLFSEFYVGHLGSGIRLQVKDKKDETLVWEALVKPGDLMPATTLIPPARIGRNTSQPWNLRCNRDARRY

SEQ ID NO: 850555 - protein, 1473 aa, Homo sapiens; identical to SEQ ID NO: 850546

SEQ ID NO: 850556 - protein, 1371 aa, Homo sapiens; identical to SEQ ID NO: 850548

SEQ ID NO: 850557 - protein, 1399 aa, Homo sapiens
MAGGAWGRLACYLEFLKKEELKEFQLLLANKAHSRSSSGETPAQPEKTSGMEVASYLVAQYGEQRAWDLALHTWEQMGLRSLCAQAQEGAGHSPSFPYSPSEPHLGSPSQPTSTAVLMPWIHELPAGCTQGSERRVLRQLPDTSGRRWREISASLLYQALPSSPDHESPSQESPNAPTSTAVLGSWGSPPQPSLAPREQEAPGTQWPLDETSGIYYTEIREREREKSEKGRPPWAAVVGTPPQAHTSLQPHHHPWEPSVRESLCSTWPWKNEDFNQKFTQLLLLQRPHPRSQDPLVKRSWPDYVEENRGHLIEIRDLFGPGLDTQEPRIVILQGAAGIGKSTLARQVKEAWGRGQLYGDRFQHVFYFSCRELAQSKVVSLAELIGKDGTATPAPIRQILSRPERLLFILDGVDEPGWVLQEPSSELCLHWSQPQPADALLGSLLGKTILPEASFLITARTTALQNLIPSLEQARWVEVLGFSESSRKEYFYRYFTDERQAIRAFRLVKSNKELWALCLVPWVSWLACTCLMQQMKRKEKLTLTSKTTTTLCLHYLAQALQAQPLGPQLRDLCSLAAEGIWQKKTLFSPDDLRKHGLDGAIISTFLKMGILQEHPIPLSYSFIHLCFQEFFAAMSYVLEDEKGRGKHSNCIIDLEKTLEAYGIHGLFGASTTRFLLGLLSDEGEREMENIFHCRLSQGRNLMQWVPSLQLLLQPHSLESLHCLYETRNKTFLTQVMAHFEEMGMCVETDMELLVCTFCIKFSRHVKKLQLIEGRQHRSTWSPTMVVLFRWVPVTDAYWQILFSVLKVTRNLKELDLSGNSLSHSAVKSLCKTLRRPRCLLETLRLAGCGLTAEDCKDLAFGLRANQTLTELDLSFNVLTDAGAKHLCQRLRQPSCKLQRLQLVSCGLTSDCCQDLASVLSASPSLKELDLQQNNLDDVGVRLLCEGLRHPACKLIRLGKPSVMTPTEGLDTGEMSNSTSSLKRQRLGSERAASHVAQANLKLLDVSKIFPIAEIAEESSPEVVPVELLCVPSPASQGDLHTKPLGTDDDFWGPTGPVATEVVDKEKNLYRVHFPVAGSYRWPNTGLCFVMREAVTVEIEFCVWDQFLGEINPQHSWMVAGPLLDIKAEPGAVEAVHLPHFVALQGGHVDTSLFQMAHFKEEGMLLEKPARVELHHIVLENPSFSPLGVLLKMIHNALRFIPVTSVVLLYHRVHPEEVTFHLYLIPSDCSIRKELELCYRSPGEDQLFSEFYVGHLGSGIRLQVKDKKDETLVWEALVKPGDLMPATTLIPPARIAVPSPLDAPQLLHFVDQYREQLIARVTSVEVVLDKLHGQVLSQEQYERVLAENTRPSQMRKLFSLSQSWDRKCKDGLYQALKETHPHLIMELWEKGSKKGLLPLSS

SEQ ID NO: 850558 - protein, 1371 aa, Homo sapiens; identical to SEQ ID NO: 850548

SEQ ID NO: 850559 - protein, 118 aa, Homo sapiens [sequence omitted]

SEQ ID NO: 850560 - protein, 1013 aa, Homo sapiens
GSPWRGMAPRRLLLVGEGNFSFAAALSETLDQSTQLTATCLQRPAELARDPLAWENLQCLRERGIDVRFGVDCTQLADVFELHEREFDQIYFNFPHCGRKAGVAKNRELLAKFFQSCADVLAEEGEVHVALCRGQGGTPADKPQREWHNSWQVVAMAALGGLILSDVYPFSCKAVAGYKCTGYRSQDKSFHVEGALNHIFTRSLPFEGSQPRIFRIKLGNQWFSFPEPEALVGKLNRGFLEAPSCHPIKTINEKLIAELGKVFPLKRLKCSYPLLPQEGTSVLPFWNCDFLSAAFWISLHEDNSNSESLTGGTSQDVEDFLVSFSELSLLKNPGRDGKEEACEGTCGQAKICLRPSLLVHVQDVIEVPDFLSGYAMASRGARQRLKGSGASSGDTAPAADKLRELLGSREAGGAEHRTELSGNKAGQVWAPEGSTAFKCLLSARLCAALLSNISDCDETFNYWEPTHYLIYGEGFQTWEYSPAYAIRSYAYLLLHAWPAAFHARILQTNKILVFYFLRCLLAFVSCICELYFYKAVCKKFGLHVSRMMLAFLVLSTGMFCSSSAFLPSSFCMYTTLIAMTGWYMDKTSIAVLGVAAGAILGWPFSAALGLPIAFDLLVMKHRWKSFFHWSLMALILFLVPVVVIDSYYYGKLVIAPLNIVCIMSLLLMDLIFMVQNPGISDLINGFLNFNVAFALALLVLPLTSLMEYLLQRFHVQNLGHPYWLTLAPMYIWFIIFFIQPHKEERFLFPVYPLICLCGAVALSALQKCYHFVFQRYRLEHYTVTSNWLALGTVFLFGLLSFSRSVALFRGYHGPLDLYPEFYRIATDPTIHTVPEGRPVNVCVGKEWYRFPSSFLLPDNWQLQFIPSEFRGQLPKPFAEGPLATRIVPTDMNDQNLEEPSRYIDISKCHYLVDLDTMRETPREPKYSSNKEEWISLAYRPFLDASRLNLLPRLGSTPGLKQSSHFSLSKYWDYRPEPTVPGHNSLLELGSSKVLRDSCPFCQIRYAAVIHILN

SEQ ID NO: 850561 - protein, 681 aa, Homo sapiens
GSPWRGMAPRRLLLVGEGNFSFAAALSETLDQSTQLTATCLQRPAELARDPLAWENLQCLRERGIDVRFGVDCTQLADVFELHEREFDQIYFNFPHCGRKAGVAKNRELLAKFFQSCADVLAEEGEVHVALCRGQGGTPADKPQREWHNSWQVVAMAALGGLILSDVYPFSCKAVAGYKCTGYRSQDKSFHVEGALNHIFTRSLPFEGSQPRIFRIKLGNQWFSFPEPEALVGKLNRGFLEAPSCHPIKTINEKLIAELGKVFPLKRLKCSYPLLPQEGTSVLPFWNCDFLSAAFWISLHEDNSNSESLTGGTSQDVEDFLVSFSELSLLKNPGRDGKEEACEGTCGQAKICLRPSLLVHVQDVIEVPDFLSGYAMASRGARQRLKGSGASSGDTAPAADKLRELLGSREAGGAEHRTELSGNKAGQVWAPEGSTAFKCLLSARLCAALLSNISDCDETFNYWEPTHYLIYGEGFQTWEYSPAYAIRSYAYLLLHAWPAAFHARILQTNKILVFYFLRCLLAFVSCICELYFYKAVCKKFGLHVSRMMLAFLVLSTGMFCSSSAFLPSSFCMYTTLIAMTGWYMDKTSIAVLGVAAGAILGWPFSAALGLPIAFDLLVMKHRWKSFFHWSLMALILFLVPVVVIDSYYYGKLVIAPLNIVCIMSLLLMDLIFMVQNPGISI

SEQ ID NO: 850562 - protein, 620 aa, Homo sapiens
MNKAIKSNDLVEEKKEKENDSFVAFKLSGNKAGQVWAPEGSTAFKCLLSARLCAALLSNISDCDETFNYWEPTHYLIYGEGFQTWEYSPAYAIRSYAYLLLHAWPAAFHARILQTNKILVFYFLRCLLAFVSCICELYFYKAVCKKFGLHVSRMMLAFLVLSTGMFCSSSAFLPSSFCMYTTLIAMTGWYMDKTSIAVLGVAAGAILGWPFSAALGLPIAFDLLVMKHRWKSFFHWSLMALILFLVPVVVIDSYYYGKLVIAPLNIVCIMSLLLMDLIFMVQNPGISDLINGFLNFNVAFALALLVLPLTSLMEYLLQRFHVQNLGHPYWLTLAPMYIWFIIFFIQPHKEERFLFPVYPLICLCGAVALSALQKCYHFVFQRYRLEHYTVTSNWLALGTVFLFGLLSFSRSVALFRGYHGPLDLYPEFYRIATDPTIHTVPEGRPVNVCVGKEWYRFPSSFLLPDNWQLQFIPSEFRGQLPKPFAEGPLATRIVPTDMNDQNLEEPSRYIDISKCHYLVDLDTMRETPREPKYSSNKEEWISLAYRPFLDASRLNLLPRLGSTPGLKQSSHFSLSKYWDYRPEPTVPGHNSLLELGSSKVLRDSCPFCQIRYAAVIHILN

SEQ ID NO: 850563 - protein, 234 aa, Homo sapiens
GSPWRGMAPRRLLLVGEGNFSFAAALSETLDQSTQLTATCLQRPAELARDPLAWENLQCLRERGIDVRFGVDCTQLADVFELHEREFDQIYFNFPHCGRKAGVAKNRELLAKFFQSCADVLAEEGEVHVALCRGQGGTPADKPQREWHNSWQVVAMAALGGLILSDVYPFSCKAVAGYKCTGYRSQDKSFHVEGALNHIFTRSLPFEGSQPRIFRIKLGNQWFSFPEPEALVGK

SEQ ID NO: 850564 - protein, 129 aa, Homo sapiens
VPDFLSGSLHILSGPVFQKCHILPFTMPAFHETLFILGVNQNLKDGCLQSLLDHLKGILDSLLTQTLPESSKLSSLVKFVLQSNGKDYMIRVKTHNFSPDCTEDLIIGSVITSATSVIHKDQCFVFVSM

SEQ ID NO: 850565 - protein, 630 aa, Homo sapiens
GSPWRGMAPRRLLLVGEGNFSFAAALSETLDQSTQLTATCLQRPAELARDPLAWENLQCLRERGIDVRFGVDCTQLADVFELHEREFDQIYFNFPHCGRKAGVAKNRELLAKFFQSCADVLAEEGEVHVALCRGQGGTPADKPQREWHNSWQVVAMAALGGLILSDVYPFSCKAVAGYKCTGYRSQDKSFHVEGALNHIFTRSLPFEGSQPRIFRIKLGNQWFSFPEPEALVGKLNRGFLEAPSCHPIKTINEKLIAELGKVFPLKRLKCSYPLLPQEGTSVLPFWNCDFLSAAFWISLHEDNSNSESLTGGTSQDVEDFLVSFSELSLLKNPGRDGKEEACEGTCGQAKICLRPSLLVHVQDVIEVPDFLSGSLHILSGPVFQKCHILPFTMPAFHETLFILGVNQNLKDGCLQSLLDHLKGILDSLLTQTLPESSKLSSLVKFVLQSNGKDYMIRVKTHNFSPDCTEDLIIGSVITSATSVIHKDQCFVFVSMNLDLLAMLVWCISDWRMLWTFDNRFLKNFVPGKIEPFKSHSLYPPCYVHDVSFWIDQKKGFDELEFHTVARAVSQDTIISIQFLSRFQHPKTQQVSLCYRLTYQTCDKALTQQQVASMQSQFRKEIQQHLYVIPR

SEQ ID NO: 850566 - protein, 638 aa, Homo sapiens
MASRGARQRLKGSGASSGDTAPAADKLRELLGSREAGGAEHRTELSGNKAGQVWAPEGSTAFKCLLSARLCAALLSNISDCDETFNYWEPTHYLIYGEGFQTWEYSPAYAIRSYAYLLLHAWPAAFHARILQTNKILVFYFLRCLLAFVSCICELYFYKAVCKKFGLHVSRMMLAFLVLSTGMFCSSSAFLPSSFCMYTTLIAMTGWYMDKTSIAVLGVAAGAILGWPFSAALGLPIAFDLLVMKHRWKSFFHWSLMALILFLVPVVVIDSYYYGKLVIAPLNIVCIMSLLLMDLIFMVQNPGISDLINGFLNFNVAFALALLVLPLTSLMEYLLQRFHVQNLGHPYWLTLAPMYIWFIIFFIQPHKEERFLFPVYPLICLCGAVALSALQKCYHFVFQRYRLEHYTVTSNWLALGTVFLFGLLSFSRSVALFRGYHGPLDLYPEFYRIATDPTIHTVPEGRPVNVCVGKEWYRFPSSFLLPDNWQLQFIPSEFRGQLPKPFAEGPLATRIVPTDMNDQNLEEPSRYIDISKCHYLVDLDTMRETPREPKYSSNKEEWISLAYRPFLDASRLNLLPRLGSTPGLKQSSHFSLSKYWDYRPEPTVPGHNSLLELGSSKVLRDSCPFCQIRYAAVIHILN

SEQ ID NO: 850567 - protein, 745 aa, Homo sapiens
GSPWRGMAPRRLLLVGEGNFSFAAALSETLDQSTQLTATCLQRPAELARDPLAWENLQCLRERGIDVRFGVDCTQLADVFELHEREFDQIYFNFPHCGRKAGVAKNRELLAKFFQSCADVLAEEGEVHVALCRGQGGTPADKPQREWHNSWQVVAMAALGGLILSDVYPFSCKAVAGYKCTGYRSQDKSFHVEGALNHIFTRSLPFEGSQPRIFRIKLGNQWFSFPEPEALVGKLNRGFLEAPSCHPIKTINEKLIAELGKVFPLKRLKCSYPLLPQEGTSVLPFWNCDFLSAAFWISLHEDNSNSESLTGGTSQDVEDFLVSFSELSLLKNPGRDGKEEACEGTCGQAKICLRPSLLVHVQDVIEVPDFLSGYAMASRGARQRLKGSGASSGDTAPAADKLRELLGSREAGGAEHRTELSGNKAGQVWAPEGSTAFKCLLSARLCAALLSNISDCDETFNYWEPTHYLIYGEGFQTWEYSPAYAIRSYAYLLLHAWPAAFHARILQTNKILVFYFLRCLLAFVSCICELYFYKAVCKKFGLHVSRMMLAFLVLSTGMFCSSSAFLPSSFCMYTTLIAMTGWYMDKTSIAVLGVAAGAILGWPFSAALGLPIAFDLLVMKHRWKSFFHWSLMALILFLVPVVVIDSYYYGKLVIAPLNIVCIMSLLLMDLIFMAPEPWFPFNSRDSEFHGALAWAPCLTRVSLKPGGFVEFGPRGSGRSFGKFAQRGRHKMGACKKCPKQVKVLR

SEQ ID NO: 850568 - protein, 630 aa, Homo sapiens; identical to SEQ ID NO: 850565

SEQ ID NO: 850569 - protein, 103 aa, Homo sapiens
NTAISWGDQAIDSLCNMAVFVQHYKRLLSLSNPSVCKKLWELFCILTTTNSGMYGLLCGRVLCQDCKVPPHVKASKQTSHIFPLDIMIECVKNSLVSSSPFLF

SEQ ID NO: 850570 - protein, 74 aa, Homo sapiens
YLCDALEIPRLYCKNGGFFLRIHPDGRVDGVREKSDPHIKLQLQAEERGVVSIKGVCANRYLAMKEGGSSRVIH

SEQ ID NO: 850571 - protein, 155 aa, Homo sapiens [sequence omitted]

SEQ ID NO: 850572 - protein, 104 aa, Homo sapiens
MGVVFSVFARSLRSIHSHLKHSSWQKFMVNEYGFRRQMIYISDFPKAPGFVCCCRILRTDLNSDFIPVSSKTSRTAVSLRKKRDVQINNNYTFRNCIIKDFQLK

SEQ ID NO: 850573 - protein, 123 aa, Homo sapiens
MGVVFSVFARSLRSIHSHLKHSSWQKFMVNEYGFRRQMIYISDFPKAPGFVCCCRILRTDLNSDFIPVSSKTSRTAVSPISSSGSDRPPGNFHIFFNCSIKSENKVNITFTNTHICRFHKIHL

SEQ ID NO: 850574 - protein, 108 aa, Homo sapiens
MGVVFSVFARSLRSIHSHLKHSSWQKFMVNEYGFRRQMIYISDFPKAPGFVCCCRILRTDLNSDFIPVSSKTSRTAVSPISSSGSDRPPGNFHIFFNGPVVNKKVLAR

SEQ ID NO: 850575 - protein, 602 aa, Homo sapiens
MFKCPFLFIMLGKIIMGKYMFVIKFIIKDSSTSLKFDITSPNLFKCPFLFFMFENKLWGSYLALSTTNQKFGMELMIYAVSMSWKHRMGVVSKSALLSSHHRQLTENQHCLSSFDQFNLNHYTDLKIEWANKCFCLQSMRETLPPQDGYFFPKDFKMNEIFNQDSVLYSVVFFIILIYCKPNWNNICCFIGLKNIGKTKRFCFFFADEEICLNMLYCFVLLQDNNEMEFIFVISILLYLIIELDGNKIYMGNNLQNVGFPGVSSDSSALMISDKAQLLYSSLANAADTLPASGEYDFLRRQFVNFNLVDTFILLGYYFIQKPSGLHSIFYMTLLIFKKHYWITILHLPSIMKERRSSNKCVSQLTRVYCLSQYKCLTVCDGSIPKVHCMFSKIQSLNNFSEFLDDSASSLRISFVLFELEMPSYRHSLSDLYCQFSFLSCFQGFMNFQAKLEFILSLGSMANANGSFFLLNSNMTEAYMISGWVSCCDNHKHFFFFERKKGSELFNHLDFKKDSGVYLGLKLYIFGLEMCFSSITSTSKYQLKFRGPIRVHMKKINYLKRQDAGERKPCKPADCFLPNIDWVRLQNISLISSHALLSRGTSG

SEQ ID NO: 850576 - protein, 95 aa, Homo sapiens
MAAGSITTLPALPEDGGSGAFPPGHFKDPKRLYCKNGGFFLRIHPDGRVDGVREKSDPHIKLQLQAEERGVVSIKGVCANRYLAMKEGGSSRVIH

SEQ ID NO: 850577 - protein, 140 aa, Homo sapiens
MDSRIPYDDYPVVFLPAYENPPAWIPPHERVHHPDYNNELTQFLPRTITLKKPPGAQLGFNIRGGKASQLGIFISKVIPDSDAHRAGLQEGDQVLAVNDVDFQDIEHSKAVEILKTAREISMRVRFFPYNYHRQKERTVH

SEQ ID NO: 850578 - protein, 162 aa, Homo sapiens
RGRIGRWVRLRSLWTAHWALPEMDSRIPYDDYPVVFLPAYENPPAWIPPHERVHHPDYNNELTQFLPRTITLKKPPGAQLGFNIRGGKASQLGIFISKVIPDSDAHRAGLQEGDQVLAVNDVDFQDIEHSKAVEILKTAREISMRVRFFPYNYHRQKERTVH

SEQ ID NO: 850579 - protein, 140 aa, Homo sapiens; identical to SEQ ID NO: 850577

SEQ ID NO: 850580 - protein, 172 aa, Homo sapiens
MGWSCCLKLAGLLSLLNHFLSVLIHSSRALPEMDSRIPYDDYPVVFLPAYENPPAWIPPHERVHHPDYNNELTQFLPRTITLKKPPGAQLGFNIRGGKASQLGIFISKVIPDSDAHRAGLQEGDQVLAVNDVDFQDIEHSKAVEILKTAREISMRVRFFPYNYHRQKERTVH

SEQ ID NO: 850581 - protein, 145 aa, Homo sapiens [sequence omitted]

SEQ ID NO: 850582 - protein, 140 aa, Homo sapiens; identical to SEQ ID NO: 850577

SEQ ID NO: 850583 - protein, 162 aa, Homo sapiens; identical to SEQ ID NO: 850578

SEQ ID NO: 850584 - protein, 140 aa, Homo sapiens; identical to SEQ ID NO: 850577

SEQ ID NO: 850585 - protein, 140 aa, Homo sapiens; identical to SEQ ID NO: 850577

SEQ ID NO: 850586 - protein, 174 aa, Homo sapiens
MDSRIPYDDYPVVFLPAYENPPAWIPPHERVHHPDYNNELTQFLPRTITLKKPPGAQLGFNIRGGKASQLGIFISKVIPDSDAHRAGLQEGDQVLAVNDVDFQDIEHSKAVEILKTAREISMRVRFFPYICHDMLTRLQGSHFCFQPLPGIVSWEDGETANQLHYPNHIALLVP

SEQ ID NO: 850587 - protein, 259 aa, Homo sapiens
APARREPRDRCACAVRVCETDLDGAELRLGFLLMVRVLATPRCERGRECSRRRRDLKASVWQKDQLVTQPHWQENGPTFSSTPYRYQACRFGQVPDQPAGLRLFTVQIPHKRRAPELYRAPFPLYALQVDPSTGLLIAAGGGGAAKTGIKNGVHFLQLELINGRLSASLLHSHDTETRATMNLALAGDILAAGQDAHCQLLRFQAHQQQGNKAEKAGSKEQGPRQRKGAAPAEKKCGAETQHEGLELRVENLQGGADRL

SEQ ID NO: 850588 - protein, 151 aa, Homo sapiens
MGRRRAPELYRAPFPLYALQVDPSTGLLIAAGGGGAAKTGIKNGVHFLQLELINGRLSASLLHSHDTETRATMNLALAGDILAAGQDAHCQLLRFQAHQQQGNKAEKAGSKEQGPRQRKGAAPAEKKCGAETQHEGLELRVENLQGGADRL

SEQ ID NO: 850589 - protein, 151 aa, Homo sapiens; identical to SEQ ID NO: 850588

SEQ ID NO: 850590 - protein, 151 aa, Homo sapiens; identical to SEQ ID NO: 850588

SEQ ID NO: 850591 - protein, 109 aa, Homo sapiens
MGRRRAPELYRAPFPLYALQVDPSTGLLIAAGGGGAAKTGIKNGVVRAQGHWGWVLLRAGGDSRVAGGSRGGPHSSFGPCPLLLGRPACLTPRGEFQSRTQRAEERLLR

SEQ ID NO: 850592 - protein, 151 aa, Homo sapiens; identical to SEQ ID NO: 850588

SEQ ID NO: 850593 - protein, 151 aa, Homo sapiens; identical to SEQ ID NO: 850588

SEQ ID NO: 850594 - protein, 151 aa, Homo sapiens; identical to SEQ ID NO: 850588

SEQ ID NO: 850595 - protein, 109 aa, Homo sapiens; identical to SEQ ID NO: 850591

SEQ ID NO: 850596 - protein, 151 aa, Homo sapiens; identical to SEQ ID NO: 850588

SEQ ID NO: 850597 - protein, 259 aa, Homo sapiens; identical to SEQ ID NO: 850587

SEQ ID NO: 850598 - protein, 109 aa, Homo sapiens; identical to SEQ ID NO: 850591

SEQ ID NO: 850599 - protein, 151 aa, Homo sapiens; identical to SEQ ID NO: 850588

SEQ ID NO: 850600 - protein, 965 aa, Homo sapiens
MASSHSSSPVPQGSSSDVFFKIEVDPSKHIRPVPSLPDVCPKEPTVTDQHRWTVYHSKVNLPAALNDPRLAKRESDFFTKTWGLDFVDTEVIPSFYLPQISKEHFTVYQQEISQREKIHERCKNICPPKDTFERTLLHTHDKSRTDLEQVPKIFMKPDFALDDSLTFNSVLPWSHFNTAGGKGNRDAASSKLLQEKLSHYLDIVEVNIAHQISLRSEAFFHAMTSQHELQDYLRKTSQAVKMLRDKIAQIDKVMCEGSLHILRLALTRNNCVKVYNKLKLMATVHQTQPTVQVLLSTSEFVGALDLIATTQEVLQQELQGIHSFRHLGSQLCELEKLIDKMMIAEFSTYSHSDLNRPLEDDCQVLEEERLISLVFGLLKQRKLNFLEIYGEKMVITAKNIIKQCVINKVSQTEEIDTDVVVKLADQMRMLNFPQWFDLLKDIFSKFTIFLQRVKATLNIIHSVVLSVLDKNQRTRELEEISQQKNAAKDNSLDTEVAYLIHEGMFISDAFGEGELTPIAVDTTSQRNASPNSEPCSSDSVSEPECTTDSSSSKEHTSSSAIPGGVDIMVSEDMKLTDSELGKLANNIQELLYSASDICHDRAVKFLMSRAKDGFLEKLNSMEFITLSRLMETFILDTEQICGRKSTSLLGALQSQAIKFVNRFHEERKTKLSLLLDNERWKQADVPAEFQDLVDSLSDGKIALPEKKSGATEERKPAEVLIVEGQQYAVVGTVLLLIRIILEYCQCVDNIPSVTTDMLTRLSDLLKYFNSRSCQLVLGAGALQVVGLKTITTKNLALSSRCLQLIVHYIPVIRAHFEARLPPKQYSMLRHFDHITKDYHDHIAEISAKLVAIMDSLFDKLLSKYEVKAPVPSACFRNICKQMTKMHEAIFDLLPEEQTQMLFLRINASYKLHLKKQLSHLNVINDGGPQNGLVTADVAFYTGNLQALKGLKDLDLNMAEIWEQKR

SEQ ID NO: 850601 - protein, 965 aa, Homo sapiens; identical to SEQ ID NO: 850600

SEQ ID NO: 850602 - protein, 999 aa, Homo sapiens
MASSHSSSPVPQGSSSDVFFKIEVDPSKHIRPVPSLPDVCPKEPTVTDQHRWTVYHSKVNLPAALNDPRLAKRESDFFTKTWGLDFVDTEVIPSFYLPQISKEHFTVYQQEISQREKIHERCKNICPPKDTFERTLLHTHDKSRTDLEQVPKIFMKPDFALDDSLTFNSVLPWSHFNTAGGKGNRDAASSKLLQEKLSHYLDIVEVNIAHQISLRSEAFFHAMTSQHELQDYLRKTSQAVKMLRDKIAQIDKVMCEGSLHILRLALTRNNCVKVYNKLKLMATVHQTQPTVQVLLSTSEFVGALDLIATTQEVLQQELQGIHSFRHLGSQLCELEKLIDKMMIAEFSTYSHSDLNRPLEDDCQVLEEERLISLVFGLLKQRKLNFLEIYGEKMVITAKNIIKQCVINKVSQTEEIDTDVVVKLADQMRMLNFPQWFDLLKDIFSKFTIFLQRVKATLNIIHSVVLSVLDKNQRTRELEEISQQKNAAKDNSLDTEVAYLIHEGMFISDAFGEGELTPIAVDTTSQRNASPNSEPCSSDSVSEPECTTDSSSSKEHTSSSAIPGGVDIMVSEDMKLTDSELGKLANNIQELLYSASDICHDRAVKFLMSRAKDGFLEKLNSMEFITLSRLMETFILDTEQICGRKSTSLLGALQSQAIKFVNRFHEERKTKLSLLLDNERWKQADVPAEFQDLVDSLSDGKIALPEKKSGATEERKPAEVLIVEGQQYAVVGTVLLLIRIILEYCQCVDNIPSVTTDMLTRLSDLLKVLNMTEATSGQKTWTGFKCAWKEFTELYKIHLTKYFNSRSCQLVLGAGALQVVGLKTITTKNLALSSRCLQLIVHYIPVIRAHFEARLPPKQYSMLRHFDHITKDYHDHIAEISAKLVAIMDSLFDKLLSKYEVKAPVPSACFRNICKQMTKMHEAIFDLLPEEQTQMLFLRINASYKLHLKKQLSHLNVINDGGPQNGLVTADVAFYTGNLQALKGLKDLDLNMAEIWEQKR

SEQ ID NO: 850603 - protein, 977 aa, Homo sapiens
MASSHSSSPVPQGSSSDVFFKIEVDPSKHIRPVPSLPDVCPKEPTGDSHSLYVAPSLVTDQHRWTVYHSKVNLPAALNDPRLAKRESDFFTKTWGLDFVDTEVIPSFYLPQISKEHFTVYQQEISQREKIHERCKNICPPKDTFERTLLHTHDKSRTDLEQVPKIFMKPDFALDDSLTFNSVLPWSHFNTAGGKGNRDAASSKLLQEKLSHYLDIVEVNIAHQISLRSEAFFHAMTSQHELQDYLRKTSQAVKMLRDKIAQIDKVMCEGSLHILRLALTRNNCVKVYNKLKLMATVHQTQPTVQVLLSTSEFVGALDLIATTQEVLQQELQGIHSFRHLGSQLCELEKLIDKMMIAEFSTYSHSDLNRPLEDDCQVLEEERLISLVFGLLKQRKLNFLEIYGEKMVITAKNIIKQCVINKVSQTEEIDTDVVVKLADQMRMLNFPQWFDLLKDIFSKFTIFLQRVKATLNIIHSVVLSVLDKNQRTRELEEISQQKNAAKDNSLDTEVAYLIHEGMFISDAFGEGELTPIAVDTTSQRNASPNSEPCSSDSVSEPECTTDSSSSKEHTSSSAIPGGVDIMVSEDMKLTDSELGKLANNIQELLYSASDICHDRAVKFLMSRAKDGFLEKLNSMEFITLSRLMETFILDTEQICGRKSTSLLGALQSQAIKFVNRFHEERKTKLSLLLDNERWKQADVPAEFQDLVDSLSDGKIALPEKKSGATEERKPAEVLIVEGQQYAVVGTVLLLIRIILEYCQCVDNIPSVTTDMLTRLSDLLKYFNSRSCQLVLGAGALQVVGLKTITTKNLALSSRCLQLIVHYIPVIRAHFEARLPPKQYSMLRHFDHITKDYHDHIAEISAKLVAIMDSLFDKLLSKYEVKAPVPSACFRNICKQMTKMHEAIFDLLPEEQTQMLFLRINASYKLHLKKQLSHLNVINDGGPQNGLVTADVAFYTGNLQALKGLKDLDLNMAEIWEQKR

SEQ ID NO: 850604 - protein, 462 aa, Homo sapiens
MFISDAFGEGELTPIAVDTTSQRNASPNSEPCSSDSVSEPECTTDSSSSKEHTSSSAIPGGVDIMVSEDMKLTDSELGKLANNIQELLYSASDICHDRAVKFLMSRAKDGFLEKLNSMEFITLSRLMETFILDTEQICGRKSTSLLGALQSQAIKFVNRFHEERKTKLSLLLDNERWKQADVPAEFQDLVDSLSDGKIALPEKKSGATEERKPAEVLIVEGQQYAVVGTVLLLIRIILEYCQCVDNIPSVTTDMLTRLSDLLKYFNSRSCQLVLGAGALQVVGLKTITTKNLALSSRCLQLIVHYIPVIRAHFEARLPPKQYSMLRHFDHITKDYHDHIAEISAKLVAIMDSLFDKLLSKYEVKAPVPSACFRNICKQMTKMHEAIFDLLPEEQTQMLFLRINASYKLHLKKQLSHLNVINDGGPQNGLVTADVAFYTGNLQALKGLKDLDLNMAEIWEQKR

SEQ ID NO: 850605 - protein, 999 aa, Homo sapiens; identical to SEQ ID NO: 850602

SEQ ID NO: 850606 - protein, 407 aa, Homo sapiens
PCGRGAPAGGAGRATDKEAGPAAGLEAPRSGGSGAAWGPHLWAAAAAETHGQAKAKSGWLKPYYFIELMESRKDITNQEELWKMKPRRNLEEDDYLHKDTGETSMLKRPVLLHLHQTAHADEFDCPSELQHTQELFPQWHLPIKIAAIIASLTFLYTLLREVIHPLATSHQQYFYKIPILVINKVLPMVSITLLALVYLPGVIAAIVQLHNGTKYKKFPHWLDKWMLTRKQFGLLSFFFAVLHAIYSLSYPMRRSYRYKLLNWAYQQVQQNKEDAWIEHDVWRMEIYVSLGIVGLAILALLAVTSIPSVSDSLTWREFHYIQSKLGIVSLLLGTIHALIFAWNKWIDIKQFVWYTPPTFMIAVFLPIVVLIFKSILFLPCLRKKILKIRHGWEDVTKINKTEICSQL

SEQ ID NO: 850607 - protein, 323 aa, Homo sapiens
AAATTTTKFGGRHKDTGETSMLKRPVLLHLHQTAHADEFDCPSELQHTQELFPQWHLPIKIAAIIASLTFLYTLLREVIHPLATSHQQYFYKIPILVINKVLPMVSITLLALVYLPGVIAAIVQLHNGTKYKKFPHWLDKWMLTRKQFGLLSFFFAVLHAIYSLSYPMRRSYRYKLLNWAYQQVQQNKEDAWIEHDVWRMEIYVSLGIVGLAILALLAVTSIPSVSDSLTWREFHYIQSKLGIVSLLLGTIHALIFAWNKWIDIKQFVWYTPPTFMIAVFLPIVVLIFKSILFLPCLRKKILKIRHGWEDVTKINKTEICSQL

SEQ ID NO: 850608 - protein, 291 aa, Homo sapiens
  misc_feature (265)..(265): Xaa can be any naturally occurring amino acid
  misc_feature (289)..(289): Xaa can be any naturally occurring amino acid
ARFRRRRAFASLGWSSGRVSRPEHVDAHPPLSLMEVVTFGDVAVHFSREEWQCLDPGQRALYREVMLENHSSVAGLAGFLVFKPELISRLEQGEEPWVLDLQGAEGTEAPRTSKTDSTIRTENEQACEDMDILKSESYGTVVRISPQDFPQNPGFGDVSDSEVWLDSHLGSPGLKVTGFTFQNNCLNEETVVPKTFTKDAPQGCKELGSSGLDCQPLESQGESAEGMSQRCEECGKGIRATSDIALHWEINTQKISRCQECQKKXNLDWLCQGGKPFPNLTLAHWEEEXPR

SEQ ID NO: 850609 - protein, 719 aa, Homo sapiens
ARFRRRRAFASLGWSSGRVSRPEHVDAHPPLSLMEVVTFGDVAVHFSREEWQCLDPGQRALYREVMLENHSSVAGLAGFLVFKPELISRLEQGEEPWVLDLQGAEGTEAPRTSKTDSTIRTENEQACEDMDILKSESYGTVVRISPQDFPQNPGFGDVSDSEVWLDSHLGSPGLKVTGFTFQNNCLNEETVVPKTFTKDAPQGCKELGSSGLDCQPLESQGESAEGMSQRCEECGKGIRATSDIALHWEINTQKISRCQECQKKLSDCLQGKHTNNCHGEKPYECAECGKVFRLCSQLNQHQRIHTGEKPFKCTECGKAFRLSSKLIQHQRIHTGEKPYRCEECGKAFGQSSSLIHHQRIHTGERPYGCRECGKAFSQQSQLVRHQRTHTGERPYPCKECGKAFSQSSTLAQHQRMHTGEKAQILKASDSPSLVAHQRIHAVEKPFKCDECGKAFRWISRLSQHQLIHTGEKPYKCNKCTKAFGCSSRLIRHQRTHTGEKPFKCDECGKGFVQGSHLIQHQRIHTGEKPYVCNDCGKAFSQSSSLIYHQRIHKGEKPYECLQCGKAFSMSTQLTIHQRVHTGERPYKCNECGKAFSQNSTLFQHQIIHAGVKPYECSECGKAFSRSSYLIEHQRIHTRAQWFYEYGNALEGSTFVSRKKVNTIKKLHQCEDCEKIFRWRSHLIIHQRIHTGEKPYKCNDCGKAFNRSSRLTQHQKIHMG

SEQ ID NO: 850610 - protein, 707 aa, Homo sapiens
MRQRQKGAGTQGFLGCWCVSFQEVVTFGDVAVHFSREEWQCLDPGQRALYREVMLENHSSVAGLAGFLVFKPELISRLEQGEEPWVLDLQGAEGTEAPRTSKTDSTIRTENEQACEDMDILKSESYGTVVRISPQDFPQNPGFGDVSDSEVWLDSHLGSPGLKVTGFTFQNNCLNEETVVPKTFTKDAPQGCKELGSSGLDCQPLESQGESAEGMSQRCEECGKGIRATSDIALHWEINTQKISRCQECQKKLSDCLQGKHTNNCHGEKPYECAECGKVFRLCSQLNQHQRIHTGEKPFKCTECGKAFRLSSKLIQHQRIHTGEKPYRCEECGKAFGQSSSLIHHQRIHTGERPYGCRECGKAFSQQSQLVRHQRTHTGERPYPCKECGKAFSQSSTLAQHQRMHTGEKAQILKASDSPSLVAHQRIHAVEKPFKCDECGKAFRWISRLSQHQLIHTGEKPYKCNKCTKAFGCSSRLIRHQRTHTGEKPFKCDECGKGFVQGSHLIQHQRIHTGEKPYVCNDCGKAFSQSSSLIYHQRIHKGEKPYECLQCGKAFSMSTQLTIHQRVHTGERPYKCNECGKAFSQNSTLFQHQIIHAGVKPYECSECGKAFSRSSYLIEHQRIHTRAQWFYEYGNALEGSTFVSRKKVNTIKKLHQCEDCEKIFRWRSHLIIHQRIHTGEKPYKCNDCGKAFNRSSRLTQHQKIHMG

SEQ ID NO: 850611 - protein, 564 aa, Homo sapiens
ARFRRRRAFASLGWSSGRVSRPEHVDAHPPLSLMEVVTFGDVAVHFSREEWQCLDPGQRALYREVMLENHSSVAGLAGFLVFKPELISRLEQGEEPWVLDLQGAEGTEAPRTSKTGEHTNNCHGEKPYECAECGKVFRLCSQLNQHQRIHTGEKPFKCTECGKAFRLSSKLIQHQRIHTGEKPYRCEECGKAFGQSSSLIHHQRIHTGERPYGCRECGKAFSQQSQLVRHQRTHTGERPYPCKECGKAFSQSSTLAQHQRMHTGEKAQILKASDSPSLVAHQRIHAVEKPFKCDECGKAFRWISRLSQHQLIHTGEKPYKCNKCTKAFGCSSRLIRHQRTHTGEKPFKCDECGKGFVQGSHLIQHQRIHTGEKPYVCNDCGKAFSQSSSLIYHQRIHKGEKPYECLQCGKAFSMSTQLTIHQRVHTGERPYKCNECGKAFSQNSTLFQHQIIHAGVKPYECSECGKAFSRSSYLIEHQRIHTRAQWFYEYGNALEGSTFVSRKKVNTIKKLHQCEDCEKIFRWRSHLIIHQRIHTGEKPYKCNDCGKAFNRSSRLTQHQKIHMG

SEQ ID NO: 850612 - protein, 169 aa, Homo sapiens
MRQRQKGAGTQGFLGCWCVSFQEVVTFGDVAVHFSREEWQCLDPGQRALYREVMLENHSSVAGLAGFLVFKPELISRLEQGEEPWVLDLQGAEGTEAPRTSKTGFLGRPTMGQEPRHPHAPPATPVPGLPKHCSQRLTLPPPGLSSSPLGHFLVHDQDRRRGTSAIWMV

SEQ ID NO: 850613 - protein, 128 aa, Homo sapiens
ARFRRRRAFASLGWSSGRVSRPEHVDAHPPLSLMEVVTFGDVAVHFSREEWQCLDPGQRALYREVMLENHSSVAGLAGFLVFKPELISRLEQGEEPWVLDLQGAEGTEAPRTSKTVLVIQGEPGTPDW

SEQ ID NO: 850614 - protein, 686 aa, Homo sapiens
MEVVTFGDVAVHFSREEWQCLDPGQRALYREVMLENHSSVAGLAGFLVFKPELISRLEQGEEPWVLDLQGAEGTEAPRTSKTDSTIRTENEQACEDMDILKSESYGTVVRISPQDFPQNPGFGDVSDSEVWLDSHLGSPGLKVTGFTFQNNCLNEETVVPKTFTKDAPQGCKELGSSGLDCQPLESQGESAEGMSQRCEECGKGIRATSDIALHWEINTQKISRCQECQKKLSDCLQGKHTNNCHGEKPYECAECGKVFRLCSQLNQHQRIHTGEKPFKCTECGKAFRLSSKLIQHQRIHTGEKPYRCEECGKAFGQSSSLIHHQRIHTGERPYGCRECGKAFSQQSQLVRHQRTHTGERPYPCKECGKAFSQSSTLAQHQRMHTGEKAQILKASDSPSLVAHQRIHAVEKPFKCDECGKAFRWISRLSQHQLIHTGEKPYKCNKCTKAFGCSSRLIRHQRTHTGEKPFKCDECGKGFVQGSHLIQHQRIHTGEKPYVCNDCGKAFSQSSSLIYHQRIHKGEKPYECLQCGKAFSMSTQLTIHQRVHTGERPYKCNECGKAFSQNSTLFQHQIIHAGVKPYECSECGKAFSRSSYLIEHQRIHTRAQWFYEYGNALEGSTFVSRKKVNTIKKLHQCEDCEKIFRWRSHLIIHQRIHTGEKPYKCNDCGKAFNRSSRLTQHQKIHMG

SEQ ID NO: 850615 - protein, 74 aa, Homo sapiens
SSVPPCWHHWDSERKEESPTASCLPPPPSLTSVELPLALLLLPHPRSKSWTPFLGPYQLSPSRRAGCHPGFPAS

SEQ ID NO: 850616 - protein, 552 aa, Homo sapiens
MRQRQKGAGTQGFLGCWCVSFQEVVTFGDVAVHFSREEWQCLDPGQRALYREVMLENHSSVAGLAGFLVFKPELISRLEQGEEPWVLDLQGAEGTEAPRTSKTGEHTNNCHGEKPYECAECGKVFRLCSQLNQHQRIHTGEKPFKCTECGKAFRLSSKLIQHQRIHTGEKPYRCEECGKAFGQSSSLIHHQRIHTGERPYGCRECGKAFSQQSQLVRHQRTHTGERPYPCKECGKAFSQSSTLAQHQRMHTGEKAQILKASDSPSLVAHQRIHAVEKPFKCDECGKAFRWISRLSQHQLIHTGEKPYKCNKCTKAFGCSSRLIRHQRTHTGEKPFKCDECGKGFVQGSHLIQHQRIHTGEKPYVCNDCGKAFSQSSSLIYHQRIHKGEKPYECLQCGKAFSMSTQLTIHQRVHTGERPYKCNECGKAFSQNSTLFQHQIIHAGVKPYECSECGKAFSRSSYLIEHQRIHTRAQWFYEYGNALEGSTFVSRKKVNTIKKLHQCEDCEKIFRWRSHLIIHQRIHTGEKPYKCNDCGKAFNRSSRLTQHQKIHMG

SEQ ID NO: 850617 - protein, 661 aa, Homo sapiens
GPFPAASRVCEPRVVLREAGFLVFKPELISRLEQGEEPWVLDLQGAEGTEAPRTSKTDSTIRTENEQACEDMDILKSESYGTVVRISPQDFPQNPGFGDVSDSEVWLDSHLGSPGLKVTGFTFQNNCLNEETVVPKTFTKDAPQGCKELGSSGLDCQPLESQGESAEGMSQRCEECGKGIRATSDIALHWEINTQKISRCQECQKKLSDCLQGKHTNNCHGEKPYECAECGKVFRLCSQLNQHQRIHTGEKPFKCTECGKAFRLSSKLIQHQRIHTGEKPYRCEECGKAFGQSSSLIHHQRIHTGERPYGCRECGKAFSQQSQLVRHQRTHTGERPYPCKECGKAFSQSSTLAQHQRMHTGEKAQILKASDSPSLVAHQRIHAVEKPFKCDECGKAFRWISRLSQHQLIHTGEKPYKCNKCTKAFGCSSRLIRHQRTHTGEKPFKCDECGKGFVQGSHLIQHQRIHTGEKPYVCNDCGKAFSQSSSLIYHQRIHKGEKPYECLQCGKAFSMSTQLTIHQRVHTGERPYKCNECGKAFSQNSTLFQHQIIHAGVKPYECSECGKAFSRSSYLIEHQRIHTRAQWFYEYGNALEGSTFVSRKKVNTIKKLHQCEDCEKIFRWRSHLIIHQRIHTGEKPYKCNDCGKAFNRSSRLTQHQKIHMG

SEQ ID NO: 850618 - protein, 200 aa, Homo sapiens
MRQRQKGAGTQGFLGCWCVSFQEVVTFGDVAVHFSREEWQCLDPGQRALYREVMLENHSSVAGLAGFLVFKPELISRLEQGEEPWVLDLQGAEGTEAPRTSKTDSTIRTENEQACEDMDILKSESYGTVVRISPQDFPQNPGFGDVSDSEVWLDSHLGSPGLKVTGFTFQNNCLNEETVVPKTFTKDAPPLLTYWENSLC

SEQ ID NO: 850619 - protein, 517 aa, Homo sapiens
MFKKRNKLSSTEIKRFSRSLGGPWEAPEVGAGAGWLQRSAAGAGSGPWAAQEKQFPPALLSFFIYNPRFGPREGQEENKILFYHPNEVEKNEKIRNVGLCEAIVQFTRTFSPSKPAKSLHTQKNRQFFNEPEENFWMVMVVRNPIIEKQSKDGKPVIEYQEEELLDKVYSSVLRQCYSMYKLFNGTFLKAMEDGGVKLLKERLEKFFHRYLQTLHLQSCDLLDIFGGISFFPLDKMTYLKIQSFINRMEESLNIVKYTAFLYNDQLIWSGLEQDDMRILYKYLTTSLFPRHIEPELAGRDSPIRAEMPGNLQHYGRFLTGPLNLNDPDAKCRFPKIFVNTDDTYEELHLIVYKAMSAAVCFMIDASVHPTLDFCRRLDSIVGPQLTVLASDICEQFNINKRMSGSEKEPQFKFIYFNHMNLAEKSTVHMRKTPSVSLTSVHPDLMKILGDINSDFTRVDEDEEIIVKAMSDYWVVGKKSDRRELYVILNQKNANLIEVNEEVKKLCATQFNNIFFLD

SEQ ID NO: 850620 - protein, 517 aa, Homo sapiens; identical to SEQ ID NO: 850619

SEQ ID NO: 850621 - protein, 517 aa, Homo sapiens; identical to SEQ ID NO: 850619

SEQ ID NO: 850622 - protein, 457 aa, Homo sapiens
MFKKRNKLSSTEIKRFSRSLGGPWEAPEVGAGAGWLQRSAAGAGSGPWAAQEKQFPPALLSFFIYNPRFGPREGQEENKILFYHPNEVEKNEKIRNVGLCEAIVQFTRTFSPSKPAKSLHTQKNRQFFNEPEENFWMVMVVRNPIIEKQSKDGKPVIEYQEEELLDKVYSSVLRQCYSMYKLFNGTFLKAMEDGGVKLLKERLEKFFHRYLQTLHLQSCDLLDIFGGISFFPLDKMTYLKIQSFINRMEESLNIVKYTAFLYNDQLIWSGLEQDDMRILYKYLTTSLFPRHIEPELAGRDSPIRAEMPGNLQHYGRFLTGPLNLNDPDAKCRFPKIFVNTDDTYEELHLIVYKAMSAAVCFMIDASVHPTLDFCRRLDSIVGPQLTVLASDICEQFNINKRMSGSEKEPQFKFIYFNHMNLAEKSTVHMRKTPSVSLTSVHPDLMKILGDINSDFTR

SEQ ID NO: 850623 - protein, 268 aa, Homo sapiens
MFKKRNKLSSTEIKRFSRSLGGPWEAPEVGAGAGWLQRSAAGAGSGPWAAQEKQFPPALLSFFIYNPRFGPREGQEENKILFYHPNEVEKNEKIRNVGLCEAIVQFTRTFSPSKPAKSLHTQKNRQFFNEPEENFWMVMVVRNPIIEKQSKDGKPVIEYQEEELLDKVYSSVLRQCYSMYKLFNGTFLKAMEDGGVKLLKERLEKFFHRYLQTLHLQSCDLLDIFGGISFFPLDKMTYLKIQSFINRMEESLNIVKYTAFLYNDQLIW

SEQ ID NO: 850624 - protein, 457 aa, Homo sapiens; identical to SEQ ID NO: 850622

SEQ ID NO: 850625 - protein, 415 aa, Homo sapiens
MFKKRNKLSSTEIKRFSRSLGGPWEAPEVGAGAGWLQRSAAGAGSGPWAAQEKQFPPALLSFFIYNPRFGPREGQEENKILFYHPNEVEKNEKIRNVGLCEAIVQFTRTFSPSKPAKSLHTQKNRQFFNEPEENFWMVMVVRNPIIEKQSKDGKPVIEYQEEELLDKVYSSVLRQCYSMYKLFNGTFLKAMEDGGVKLLKERLEKFFHRYLQTLHLQSCDLLDIFGGISFFPLDKMTYLKIQSFINRMEESLNIVKYTAFLYNDQLIWSGLEQDDMRILYKYLTTSLFPRHIEPELAGRDSPIRAEMPGNLQHYGRFLTGPLNLNDPDAKCRFPKIFVNTDDTYEELHLIVYKAMSAAVCFMIDASVHPTLDFCRRLDSIVGPQLTVLASDICEQFNINKRMSGFVLCFRFTFRH

SEQ ID NO: 850626 - protein, 572 aa, Homo sapiens
PTPMGGAGATCCSRRPVRRRWLGGKMAAVSLRLGDLVWGKLGRYPPWPGKIVNPPKDLKKPRGKKCFFVKFFGTEDHAWIKVEQLKPYHAHKEEMIKINKGKRFQQAVDAVEEFLRRAKGKDQTSSHNSSDDKNRRNSSEERSRPNSGDEKRKLSLSEGKVKKNMGEGKKRVSSGSSERGSKSPLKRAQEQSPRKRGRPPKDEKDLTIPESSTVKGMMAGPMAAFKWQPTASEPVKDADPHFHHFLLSQTEKPAVCYQAITKKLKICEEETGSTSIQAADSTAVNGSITPTDKKIGFLGLGLMGSGIVSNLLKMGHTVTVWNRTAEKEGARLGRTPAEVVSTCDITFACVSDPKAAKDLVLGPSGVLQGIRPGKCYVDMSTVDADTVTELAQVIVSRGGRFLEAPVSGNQQLSNDGMLVILAAGDRGLYEDCSSCFQAMGKTSFFLGEVGNAAKMMLIVNMVQGSFMATIAEGLTLAQVTGQSQQTLLDILNQGQLASIFLDQKCQNILQGNFKPDFYLKYIQKDLRLAIALGDAVNHPTPMAAAANEVYKRAKALDQSDNDMSAVYRAYIH

SEQ ID NO: 850627 - protein, 167 aa, Homo sapiens
PTPMGGAGATCCSRRPVRRRWLGGKMAAVSLRLGDLVWGKLGRYPPWPGKIVNPPKDLKKPRGKKCFFVKFFGTEDHAWIKVEQLKPYHAHKEEMIKINKGKRFQQAVDAVEEFLRRAKGKDQVRDTMFTFYQCQTGDFCIATNRLNVTQTQTFVLLKCYWRKLLQF

SEQ ID NO: 850628 - protein, 617 aa, Homo sapiens
PTPMGGAGATCCSRRPVRRRWLGGKMAAVSLRLGDLVWGKLGRYPPWPGKIVNPPKDLKKPRGKKCFFVKFFGTEDHAWIKVEQLKPYHAHKEEMIKINKGKRFQQAVDAVEEFLRRAKGKDQTSSHNSSDDKNRRNSSEERSRPNSGDEKRKLSLSEGKVKKNMGEGKKRVSSGSSERGSKSPLKRAQEQSPRKRGRPPKDEKDLTIPESSTVKGMMAGPMAAFKWQPTASEPVKDADPHFHHFLLSQTEKPAVCYQAITKKLKICEEETGSTSIQAADSTAVNGSITPTDKKIGFLGLGLMGSGIVSNLLKMGHTVTVWNRTAEKCDLFIQEGARLGRTPAEVVSTCDITFACVSDPKAAKDLIEIRKWPKQQQDSDLRCCRAPEHLPGSLGYCFSLVSPQLVLGPSGVLQGIRPGKCYVDMSTVDADTVTELAQVIVSRGGRFLEAPVSGNQQLSNDGMLVILAAGDRGLYEDCSSCFQAMGKTSFFLGEVGNAAKMMLIVNMVQGSFMATIAEGLTLAQVTGQSQQTLLDILNQGQLASIFLDQKCQNILQGNFKPDFYLKYIQKDLRLAIALGDAVNHPTPMAAAANEVYKRAKALDQSDNDMSAVYRAYIH

SEQ ID NO: 850629 - protein, 561 aa, Homo sapiens
PTPMGGAGATCCSRRPVRRRWLGGKMAAVSLRLGDLVWGKLGRYPPWPGKIVNPPKDLKKPRGKKCFFVKFFGTEDHAWIKVEQLKPYHAHKEEMIKINKGKRFQQAVDAVEEFLRRAKGKDQTSSHNSSDDKNRRNSSEERSRPNSGDEKRKLSLSEGKVKKNMGEGKKRVSSGSSERGSKSPLKRAQEQSPRKRGRPPKDEKDLTIPESSTVKGMMAGPMAAFKWQPTASEPVKDADPHFHHFLLSQTEKETGSTSIQAADSTAVNGSITPTDKKIGFLGLGLMGSGIVSNLLKMGHTVTVWNRTAEKCDLFIQEGARLGRTPAEVVSTCDITFACVSDPKAAKDLVLGPSGVLQGIRPGKCYVDMSTVDADTVTELAQVIVSRGGRFLEAPVSGNQQLSNDGMLVILAAGDRGLYEDCSSCFQAMGKTSFFLGEVGNAAKMMLIVNMVQGSFMATIAEGLTLAQVTGQSQQTLLDILNQGQLASIFLDQKCQNILQGNFKPDFYLKYIQKDLRLAIALGDAVNHPTPMAAAANEVYKRAKALDQSDNDMSAVYRAYIH

SEQ ID NO: 850630 - protein, 555 aa, Homo sapiens
PTPMGGAGATCCSRRPVRRRWLGGKMAAVSLRLGDLVWGKLGRYPPWPGKIVNPPKDLKKPRGKKCFFVKFFGTEDHAWIKVEQLKPYHAHKEEMIKINKGKRFQQAVDAVEEFLRRAKGKDQTSSHNSSDDKNRRNSSEERSRPNSGDEKRKLSLSEGKVKKNMGEGKKRVSSGSSERGSKSPLKRAQEQSPRKRGRPPKDEKDLTIPESSTVKGMMAGPMAAFKWQPTASEPVKDADPHFHHFLLSQTEKPAVCYQAITKKLKICEEETGSTSIQAADSTAVNGSITPTDKKIGFLGLGLMGSGIVSNLLKMGHTVTVWNRTAEKEGARLGRTPAEVVSTCDITFACVSDPKAAKDLKKSGNEPKQQQDSDAEVIVSRGGRFLEAPVSGNQQLSNDGMLVILAAGDRGLYEDCSSCFQAMGKTSFFLGEVGNAAKMMLIVNMVQGSFMATIAEGLTLAQVTGQSQQTLLDILNQGQLASIFLDQKCQNILQGNFKPDFYLKYIQKDLRLAIALGDAVNHPTPMAAAANEVYKRAKALDQSDNDMSAVYRAYIH

SEQ ID NO: 850631 - protein, 276 aa, Homo sapiens
MGSGIVSNLLKMGHTVTVWNRTAEKCDLFIQEGARLGRTPAEVVSTCDITFACVSDPKAAKDLVLGPSGVLQGIRPGKCYVDMSTVDADTVTELAQVIVSRGGRFLEAPVSGNQQLSNDGMLVILAAGDRGLYEDCSSCFQAMGKTSFFLGEVGNAAKMMLIVNMVQGSFMATIAEGLTLAQVTGQSQQTLLDILNQGQLASIFLDQKCQNILQGNFKPDFYLKYIQKDLRLAIALGDAVNHPTPMAAAANEVYKRAKALDQSDNDMSAVYRAYIH

SEQ ID NO: 850632 - protein, 530 aa, Homo sapiens
PTPMGGAGATCCSRRPVRRRWLGGKMAAVSLRLGDLVWGKLGRYPPWPGKIVNPPKDLKKPRGKKCFFVKFFGTEDHAWIKVEQLKPYHAHKEEMIKINKGKRFQQAVDAVEEFLRRAKGKDQDLTIPESSTVKGMMAGPMAAFKWQPTASEPVKDADPHFHHFLLSQTEKPAVCYQAITKKLKICEEETGSTSIQAADSTAVNGSITPTDKKIGFLGLGLMGSGIVSNLLKMGHTVTVWNRTAEKEGARLGRTPAEVVSTCDITFACVSDPKAAKDLKKSGNEPKQQQDSDLRCCRAPEHLPGSLGYCFSLVSPQLVLGPSGVLQGIRPGKCYVDMSTVDADTVTELAQVIVSRGGRFLEAPVSGNQQLSNDGMLVILAAGDRGLYEDCSSCFQAMGKTSFFLGEVGNAAKMMLIVNMVQGSFMATIAEGLTLAQVTGQSQQTLLDILNQGQLASIFLDQKCQNILQGNFKPDFYLKYIQKDLRLAIALGDAVNHPTPMAAAANEVYKRAKALDQSDNDMSAVYRAYIH

SEQ ID NO: 850633 - protein, 47 aa, Homo sapiens
MMLIVNMVQGSFMATIAEGLTLAQVTGQSQQTLLDILNQGQLASIFL

SEQ ID NO: 850634 - protein, 276 aa, Homo sapiens
PTPMGGAGATCCSRRPVRRRWLGGKMAAVSLRLGDLVWGKLGRYPPWPGKIVNPPKDLKKPRGKKCFFVKFFGTEDHAWIKVEQLKPYHAHKEEMIKINKGKRFQQAVDAVEEFLRRAKGKDQDLTIPESSTVKGMMAGPMAAFKWQPTASEPVKDADPHFHHFLLSQTEKHLGTKSVASQCCVEAKNIVLNGKTIVMNDCIIRGDLANVRVGRHCVVKSRSVIRPPFKKFSKGVAFFPLHIGDHVFIEERSCGSPQAQIGSYVHVGKNCVIGRAC

SEQ ID NO: 850635 - protein, 578 aa, Homo sapiens
PTPMGGAGATCCSRRPVRRRWLGGKMAAVSLRLGDLVWGKLGRYPPWPGKIVNPPKDLKKPRGKKCFFVKFFGTEDHAWIKVEQLKPYHAHKEEMIKINKGKRFQQAVDAVEEFLRRAKGKDQTSSHNSSDDKNRRNSSEERSRPNSGDEKRKLSLSEGKVKKNMGEGKKRVSSGSSERGSKSPLKRAQEQSPRKRGRPPKDEKDLTIPESSTVKGMMAGPMAAFKWQPTASEPVKDADPHFHHFLLSQTEKPAVCYQAITKKLKICEEETGSTSIQAADSTAVNGSITPTDKKIGFLGLGLMGSGIVSNLLKMGHTVTVWNRTAEKCDLFIQEGARLGRTPAEVVSTCDITFACVSDPKAAKDLVLGPSGVLQGIRPGKCYVDMSTVDADTVTELAQVIVSRGGRFLEAPVSGNQQLSNDGMLVILAAGDRGLYEDCSSCFQAMGKTSFFLGEVGNAAKMMLIVNMVQGSFMATIAEGLTLAQVTGQSQQTLLDILNQGQLASIFLDQKCQNILQGNFKPDFYLKYIQKDLRLAIALGDAVNHPTPMAAAANEVYKRAKALDQSDNDMSAVYRAYIH

SEQ ID NO: 850636 - protein, 561 aa, Homo sapiens
PTPMGGAGATCCSRRPVRRRWLGGKMAAVSLRLGDLVWGKLGRYPPWPGKIVNPPKDLKKPRGKKCFFVKFFGTEDHAWIKVEQLKPYHAHKEEMIKINKGKRFQQAVDAVEEFLRRAKGKDQTSSHNSSDDKNRRNSSEERSRPNSGDEKRKLSLSEGKVKKNMGEGKKRVSSGSSERGSKSPLKRAQEQSPRKRGRPPKDEKDLTIPESSTVKGMMAGPMAAFKWQPTASEPVKDADPHFHHFLLSQTEKPAVCYQAITKKLKICEEETGSTSIQAADSTAVNGSITPTDKKIGFLGLGLMGSGIVSNLLKMGHTVTVWNRTAEKCDLFIQEGARLGRTPAEVVSTCDITFACVSDPKAAKDLIEIKEMSQNSSRILIEVIVSRGGRFLEAPVSGNQQLSNDGMLVILAAGDRGLYEDCSSCFQAMGKTSFFLGEVGNAAKMMLIVNMVQGSFMATIAEGLTLAQVTGQSQQTLLDILNQGQLASIFLDQKCQNILQGNFKPDFYLKYIQKDLRLAIALGDAVNHPTPMAAAANEVYKRAKALDQSDNDMSAVYRAYIH

SEQ ID NO: 850637 - protein, 414 aa, Homo sapiens
MGEGKKRVSSGSSERGSKSPLKRAQEQSPRKRGRPPKDEKDLTIPESSTVKGMMAGPMAAFKWQPTASEPVKDADPHFHHFLLSQTEKPAVCYQAITKKLKICEEETGSTSIQAADSTAVNGSITPTDKKIGFLGLGLMGSGIVSNLLKMGHTVTVWNRTAEKCDLFIQEGARLGRTPAEVVSTCDITFACVSDPKAAKDLVLGPSGVLQGIRPGKCYVDMSTVDADTVTELAQVIVSRGGRFLEAPVSGNQQLSNDGMLVILAAGDRGLYEDCSSCFQAMGKTSFFLGEVGNAAKMMLIVNMVQGSFMATIAEGLTLAQVTGQSQQTLLDILNQGQLASIFLDQKCQNILQGNFKPDFYLKYIQKDLRLAIALGDAVNHPTPMAAAANEVYKRAKALDQSDNDMSAVYRAYIH

SEQ ID NO: 850638 - protein, 270 aa, Homo sapiens
MGSGIVSNLLKMGHTVTVWNRTAEKEGARLGRTPAEVVSTCDITFACVSDPKAAKDLVLGPSGVLQGIRPGKCYVDMSTVDADTVTELAQVIVSRGGRFLEAPVSGNQQLSNDGMLVILAAGDRGLYEDCSSCFQAMGKTSFFLGEVGNAAKMMLIVNMVQGSFMATIAEGLTLAQVTGQSQQTLLDILNQGQLASIFLDQKCQNILQGNFKPDFYLKYIQKDLRLAIALGDAVNHPTPMAAAANEVYKRAKALDQSDNDMSAVYRAYIH

SEQ ID NO: 850639 - protein, 342 aa, Homo sapiens
PTPMGGAGATCCSRRPVRRRWLGGKMAAVSLRLGDLVWGKLGRYPPWPGKIVNPPKDLKKPRGKKCFFVKFFGTEDHAWIKVEQLKPYHAHKEEMIKINKGKRFQQAVDAVEEFLRRAKGKDQTSSHNSSDDKNRRNSSEERSRPNSGDEKRKLSLSEGKVKKNMGEGKKRVSSGSSERGSKSPLKRAQEQSPRKRGRPPKDEKDLTIPESSTVKGMMAGPMAAFKWQPTASEPVKDADPHFHHFLLSQTEKPAVCYQAITKKLKICEEETGSTSIQAADSTAVNGSITPTDKKIGFLGLGLMGSGIVSNLLKMGHTVTVWNRTAEKVSIQGWCLLDRWSLG

SEQ ID NO: 850640 - protein, 130 aa, Homo sapiens; identical to SEQ ID NO: 742470

SEQ ID NO: 850641 - protein, 433 aa, Homo sapiens
RRARAHGDGRMAAWGCVAALGAARGLCWRAARAAAGLQGRPARRCYAVGPAQSPPTFGFLLDIDGVLVRGHRVIPAALKAFRRLVNSQGQLRVPVVFVTNAGNILQHSKAQELSALLGCEVDADQVILSHSPMKLFSEYHEKRMLVSGQGPVMENAQGLGFRNVVTVDELRMAFPLLDMVDLERRLKTTPLPRNDFPRIEGVLLLGEPVRWETSLQLIMDVLLSNGSPGAGLATPPYPHLPVLASNMDLLWMAEAKMPRFGHGTFLLCLETIYQKVTGKELRYEGLMGKPSILTYQYAEDLIRRQAERRGWAAPIRKLYAVGDNPMSDVYGANLFHQYLQKATHDGAPELGAGGTRQQQPSASQSCISILVCTGVYNPRNPQSTEPVLGGGEPPFHGHRDLCFSPGLMEASHVVNDVNEAVQLVFRKEGWALE

SEQ ID NO: 850642 - protein, 433 aa, Homo sapiens; identical to SEQ ID NO: 850641

SEQ ID NO: 850643 - protein, 439 aa, Homo sapiens
RRARAHGDGRMAAWGCVAALGAARGLCWRAARAAAGLQGRPARRCYAVGPAQSPPTFGFLLDIDGVLVRGHRVIPAALKAFRRLVNSQGQLRVPVVFVTNAGNILQHSKAQELSALLGCEVDADQVILSHSPMKLFSEYHEKRMLVSGQGPVMENAQGLGFRNVVTVDELRMAFPLLDMVDLERRLKTTPLPRNDFPRIEGVLLLGEPVRWETSLQLIMDVLLSNGSPGAGLATPPYPHLPVLASNMDLLWMAEAKMPRFGHGTFLLCLETIYQKVTGKELRYEGLMGKPSILTYQYAEDLIRRQAERRGWAAPIRKLYAVGCGCPASDNPMSDVYGANLFHQYLQKATHDGAPELGAGGTRQQQPSASQSCISILVCTGVYNPRNPQSTEPVLGGGEPPFHGHRDLCFSPGLMEASHVVNDVNEAVQLVFRKEGWALE

SEQ ID NO: 850644 - protein, 365 aa, Homo sapiens
RRARAHGDGRMAAWGCVAALGAARGLCWRAARAAAGLQGRPARRCYAVGPAQVDADQVILSHSPMKLFSEYHEKRMLVSGQGPVMENAQGLGFRNVVTVDELRMAFPLLDMVDLERRLKTTPLPRNDFPRIEGVLLLGEPVRWETSLQLIMDVLLSNGSPGAGLATPPYPHLPVLASNMDLLWMAEAKMPRFGHGTFLLCLETIYQKVTGKELRYEGLMGKPSILTYQYAEDLIRRQAERRGWAAPIRKLYAVGDNPMSDVYGANLFHQYLQKATHDGAPELGAGGTRQQQPSASQSCISILVCTGVYNPRNPQSTEPVLGGGEPPFHGHRDLCFSPGLMEASHVVNDVNEAVQLVFRKEGWALE

SEQ ID NO: 850645 - protein, 450 aa, Homo sapiens
RRARAHGDGRMAAWGCVAALGAARGLCWRAARAAAGLQGRPARRCYAVGPAQSPPTFGFLLDIDGVLVRGHRVIPAALKAFRRLVNSQGQLRVPVVFVTNAGNILQHSKAQELSALLGCEVDADQVILSHSPMKLFSEYHEKRMLVSGQGPVMENAQGKASSPRTVQHYFLSLLQLGFRNVVTVDELRMAFPLLDMVDLERRLKTTPLPRNDFPRIEGVLLLGEPVRWETSLQLIMDVLLSNGSPGAGLATPPYPHLPVLASNMDLLWMAEAKMPRFGHGTFLLCLETIYQKVTGKELRYEGLMGKPSILTYQYAEDLIRRQAERRGWAAPIRKLYAVGDNPMSDVYGANLFHQYLQKATHDGAPELGAGGTRQQQPSASQSCISILVCTGVYNPRNPQSTEPVLGGGEPPFHGHRDLCFSPGLMEASHVVNDVNEAVQLVFRKEGWALE

SEQ ID NO: 850646 - protein, 147 aa, Homo sapiens
MGKPSILTYQYAEDLIRRQAERRGWAAPIRKLYAVGDNPMSDVYGANLFHQYLQKATHDGAPELGAGGTRQQQPSASQSCISILVCTGVYNPRNPQSTEPVLGGGEPPFHGHRDLCFSPGLMEASHVVNDVNEAVQLVFRKEGWALE

SEQ ID NO: 850647 - protein, 217 aa, Homo sapiens
RRARAHGDGRMAAWGCVAALGAARGLCWRAARAAAGLQGRPARRCYAVGPAQSPPTFGFLLDIDGVLVRGHRVIPAALKAFRRLVNSQGQLRVPVVFVTNAGNILQHSKAQELSALLGCEVDADQVILSHSPMKLFSEYHEKRMLVSGQGPVMENAQGLGFRNVVTVDELRMAFPLLDMVDLERRLKTTPLPRNDFPRIEGLDMAPFCCAWKPFTRK

SEQ ID NO: 850648 - protein, 104 aa, Homo sapiens
MPPGARGVGRVRLARGFPMAQGAGGTRQQQPSASQSCISILVCTGVYNPRNPQSTEPVLGGGEPPFHGHRDLCFSPGLMEASHVVNDVNEAVQLVFRKEGWALE

SEQ ID NO: 850649 - protein, 165 aa, Homo sapiens
TPCTCARRRPDGCVGLCGCARRGAWALLAGGARGCGAPGPPRPQVLCCGPRSGEDVRVLAEPLATQGRRRGGEPRGRRGGRAGIPASWELPGPSSRPSASRSCWRADAPCLPLTRWRPRKRYSRGRALVGRPGPGCLSAPALPGSFRVPVFPARLLISTMRTFGS

SEQ ID NO: 850650 - protein, 433 aa, Homo sapiens; identical to SEQ ID NO: 850641

SEQ ID NO: 850651 - protein, 393 aa, Homo sapiens
MYAWFFLPSFSQSPPTFGFLLDIDGVLVRGHRVIPAALKAFRRLVNSQGQLRVPVVFVTNAGNILQHSKAQELSALLGCEVDADQVILSHSPMKLFSEYHEKRMLVSGQGPVMENAQGLGFRNVVTVDELRMAFPLLDMVDLERRLKTTPLPRNDFPRIEGVLLLGEPVRWETSLQLIMDVLLSNGSPGAGLATPPYPHLPVLASNMDLLWMAEAKMPRFGHGTFLLCLETIYQKVTGKELRYEGLMGKPSILTYQYAEDLIRRQAERRGWAAPIRKLYAVGDNPMSDVYGANLFHQYLQKATHDGAPELGAGGTRQQQPSASQSCISILVCTGVYNPRNPQSTEPVLGGGEPPFHGHRDLCFSPGLMEASHVVNDVNEAVQLVFRKEGWALE

SEQ ID NO: 850652 - protein, 301 aa, Homo sapiens
MKLFSEYHEKRMLVSGQGPVMENAQGLGFRNVVTVDELRMAFPLLDMVDLERRLKTTPLPRNDFPRIEGVLLLGEPVRWETSLQLIMDVLLSNGSPGAGLATPPYPHLPVLASNMDLLWMAEAKMPRFGHGTFLLCLETIYQKVTGKELRYEGLMGKPSILTYQYAEDLIRRQAERRGWAAPIRKLYAVGDNPMSDVYGANLFHQYLQKATHDGAPELGAGGTRQQQPSASQSCISILVCTGVYNPRNPQSTEPVLGGGEPPFHGHRDLCFSPGLMEASHVVNDVNEAVQLVFRKEGWALE

SEQ ID NO: 850653 - protein, 301 aa, Homo sapiens; identical to SEQ ID NO: 850652

SEQ ID NO: 850654 - protein, 338 aa, Homo sapiens
VSSPTRERQLTTLPPGDFTHGVLPVLWPHLAIVFSPFLHLSQSSPAFPWLGLDHGCGVCGVCLPSPPSTLEVGLWFSWSGRRLVLIAISFVSLQPLPRNDFPRIEGVLLLGEPVRWETSLQLIMDVLLSNGSPGAGLATPPYPHLPVLASNMDLLWMAEAKMPRFGHGTFLLCLETIYQKVTGKELRYEGLMGKPSILTYQYAEDLIRRQAERRGWAAPIRKLYAVGDNPMSDVYGANLFHQYLQKATHDGAPELGAGGTRQQQPSASQSCISILVCTGVYNPRNPQSTEPVLGGGEPPFHGHRDLCFSPGLMEASHVVNDVNEAVQLVFRKEGWALE

SEQ ID NO: 850655 - protein, 147 aa, Homo sapiens; identical to SEQ ID NO: 850646

SEQ ID NO: 850656 - protein, 114 aa, Homo sapiens
MKLFSEYHEKRMLVSGQGPVMENAQGLGFRNVVTVDELRMAFPLLDMVDLERRLKTTPLPRNDFPRIEETGSHYVAQAGLKLLSSSNPTTLASQSAGITDTSHRTQPWDGFFKN

SEQ ID NO: 850657 - protein, 459 aa, Homo sapiens
MSNCLQNFLKITSTRLLCSRLCQQLRSKRKFFGTVPISRLHRRVVITGIGLVTPLGVGTHLVWDRLIGGESGIVSLVGEEYKSIPCSVAAYVPRGSDEGQFNEQNFVSKSDIKSMSSPTIMAIGAAELAMKDSGWHPQSEADQVATGVAIGMGMIPLEVVSETALNFQTKGYNKVSPFFVPKILVNMAAGQVSIRYKLKGPNHAVSTACTTGAHAVGDSFRFIAHGDADVMVAGGTDSCISPLSLAGFSRARALSTNSDPKLACRPFHPKRDGFVMGEGAAVLVLEEYEHAVQRRARIYAEVLGYGLSGDAGHITAPDPEGEGALRCMAAALKDAGVQPEEISYINAHATSTPLGDAAENKAIKHLFKDHAYALAVSSTKGATGHLLGAAGAVEAAFTTLACYYQKLPPTLNLDCSEPEFDLNYVPLKAQEWKTEKRFIGLTNSFGFGGTNATLCIAGL

SEQ ID NO: 850658 - protein, 459 aa, Homo sapiens; identical to SEQ ID NO: 850657

SEQ ID NO: 850659 - protein, 80 aa, Homo sapiens [sequence omitted]

SEQ ID NO: 850660 - protein, 459 aa, Homo sapiens; identical to SEQ ID NO: 850657

SEQ ID NO: 850661 - protein, 184 aa, Homo sapiens
MGEGAAVLVLEEYEHAVQRRARIYAEVLGYGLSGDAGHITAPDPEGEGALRCMAAALKDAGVQPEEISYINAHATSTPLGDAAENKAIKHLFKDHAYALAVSSTKGATGHLLGAAGAVEAAFTTLACYYQKLPPTLNLDCSEPEFDLNYVPLKAQEWKTEKRFIGLTNSFGFGGTNATLCIAGL

SEQ ID NO: 850662 - protein, 121 aa, Homo sapiens
PEEISYINAHATSTPLGDAAENKAIKHLFKDHAYALAVSSTKGATGHLLGAAGAVEAAFTTLACYYQKLPPTLNLDCSEPEFDLNYVPLKAQEWKTEKRFIGLTNSFGFGGTNATLCIAGL

SEQ ID NO: 850663 - protein, 565 aa, Homo sapiens
MNRSIPVEVDESEPYPSQLLKPIPEYSPEEESEPPAPNIRNMAPNSLSAPTMLHNSSGDFSQAHSTLKLANHQRPVSRQVTCLRTQVLEDSEDSFCRRHPGLGKAFPSGCSAVSEPASESVVGALPAEHQFSFMEKRNQWLVSQLSAASPDTGHDSDKSDQSLPNASADSLGGSQEMVQRPQPHRNRAGLDLPTIDTGYDSQPQDVLGIRQLERPLPLTSVCYPQDLPRPLRSREFPQFEPQRYPACAQMLPPNLSPHAPWNYHYHCPGSPDHQVPYGHDYPRAAYQQVIQPALPGQPLPGASVRGLHPVQKVILNYPSPWDQEERPAQRDCSFPGLPRHQDQPHHQPPNRAGAPGESLECPAELRPQVPQPPSPAAVPRPPSNPPARGTLKTSNLPEELRKVFITYSMDTAMEVVKFVNFLLVNGFQTAIDIFEDRIRGIDIIKWMERYLRDKTVMIIVAISPKYKQDVEGAESQLDEDEHGLHTKYIHRMMQIEFIKQGSMNFRFIPVLFPNAKKEHVPTWLQNTHVYSWPKNKKNILLRLLREEEYVAPPRGPLPTLQVVPL

SEQ ID NO: 850664 - protein, 565 aa, Homo sapiens; identical to SEQ ID NO: 850663

SEQ ID NO: 850665 - protein, 565 aa, Homo sapiens; identical to SEQ ID NO: 850663

SEQ ID NO: 850666 - protein, 610 aa, Homo sapiens
ERTWPDDQKRLRVDYAPRGHAVSVRWCIYQTRMSANAFLMDVARLTSNSRKVRCSHEKPTLAQEVIAREQERESPATLCADDSEDTMAPNSLSAPTMLHNSSGDFSQAHSTLKLANHQRPVSRQVTCLRTQVLEDSEDSFCRRHPGLGKAFPSGCSAVSEPASESVVGALPAEHQFSFMEKRNQWLVSQLSAASPDTGHDSDKSDQSLPNASADSLGGSQEMVQRPQPHRNRAGLDLPTIDTGYDSQPQDVLGIRQLERPLPLTSVCYPQDLPRPLRSREFPQFEPQRYPACAQMLPPNLSPHAPWNYHYHCPGSPDHQVPYGHDYPRAAYQQVIQPALPGQPLPGASVRGLHPVQKVILNYPSPWDQEERPAQRDCSFPGLPRHQDQPHHQPPNRAGAPGESLECPAELRPQVPQPPSPAAVPRPPSNPPARGTLKTSNLPEELRKVFITYSMDTAMEVVKFVNFLLVNGFQTAIDIFEDRIRGIDIIKWMERYLRDKTVMIIVAISPKYKQDVEGAESQLDEDEHGLHTKYIHRMMQIEFIKQGSMNFRFIPVLFPNAKKEHVPTWLQNTHVYSWPKNKKNILLRLLREEEYVAPPRGPLPTLQVVPL

SEQ ID NO: 850667 - protein, 565 aa, Homo sapiens; identical to SEQ ID NO: 850663

SEQ ID NO: 850668 - protein, 109 aa, Homo sapiens
MIIVAISPKYKQDVEGAESQLDEDEHGLHTKYIHRMMQIEFIKQGSMNFRFIPVLFPNAKKEHVPTWLQNTHVYSWPKNKKNILLRLLREEEYVAPPRGPLPTLQVVPL

SEQ ID NO: 850669 - protein, 278 aa, Homo sapiens [sequence omitted]

SEQ ID NO: 850670 - protein, 565 aa, Homo sapiens; identical to SEQ ID NO: 850663

SEQ ID NO: 850671 - protein, 116 aa, Homo sapiens
VCISSTRFIHIQADMHTETHILLSFFTQNSSIVCTLLCAWLLKKNSIYLRDHSISVTKIYFFMYSKHTRSSPHYDNFSFLNTGQLIFICVFPLLVNDFYHRMVQSHSLNCLPDKIS

SEQ ID NO: 850672 - protein, 565 aa, Homo sapiens; identical to SEQ ID NO: 850663

SEQ ID NO: 850673 - protein, 540 aa, Homo sapiens
MNRSIPVEVDESEPYPSQLLKPIPEYSPEEESEPPAPNIRNMAPNSLSAPTMLHNSSGDFSQAHSTLKLANHQRPVSRQVTCLRTQVLEDSEDSFCRRHPGLGKAFPSGCSAVSEPASESVVGALPAEHQFSFMEKRNQWLVSQLSAASPDTGHDSDKSDQSLPNASADSLGGSQEMVQRPQPHRNRAGLDLPTIDTGYDSQPQDVLGIRQLERPLPLTSVCYPQDLPRPLRSREFPQFEPQRYPACAQMLPPNLSPHAPWNYHYHCPGSPDHQVPYGHDYPRAAYQQVIQPALPGQPLPGASVRGLHPVQKVILNYPSPWDQEERPAQRDCSFPGLPRHQDQPHHQPPNRAGAPGESLECPAELRPQVPQPPSPAAVPRPPSNPPARGTLKTSNLPEELRKVFITYSMDTAMEVVKFVNFLLVNGFQTAIDIFEDRIRGIDIIKWMERYLRDKTVMIIVAISPKYKQDVEGAESQLDEDEHGLHTKYIHRMEHVPTWLQNTHVYSWPKNKKNILLRLLREEEYVAPPRGPLPTLQVVPL

SEQ ID NO: 850674 - protein, 109 aa, Homo sapiens; identical to SEQ ID NO: 850668

SEQ ID NO: 850675 - protein, 109 aa, Homo sapiens; identical to SEQ ID NO: 850668

SEQ ID NO: 850676 - protein, 1539 aa, Homo sapiens
MEPGCDEFLPPPECPVFEPSWAEFQDPLGYIAKIRPIAEKSGICKIRPPADWQPPFAVEVDNFRFTPRVQRLNELEAQTRVKLNYLDQIAKFWEIQGSSLKIPNVERKILDLYSLSKIVIEEGGYEAICKDRRWARVAQRLHYPPGKNIGSLLRSHYERIIYPYEMFQSGANHVQCNTHPFDNEVKDKEYKPHSIPLRQSVQPSKFSSYSRRAKRLQPDPEPTEEDIEKHPELKKLQIYGPGPKMMGLGLMAKDKDKTVHKKVTCPPTVTVKDEQSGGGNVSSTLLKQHLSLEPCTKTTMQLRKNHSSAQFIDSYICQVCSRGDEDDKLLFCDGCDDNYHIFCLLPPLPEIPRGIWRCPKCILAECKQPPEAFGFEQATQEYSLQSFGEMADSFKSDYFNMPVHMVPTELVEKEFWRLVSSIEEDVTVEYGADIHSKEFGSGFPVSNSKQNLSPEEKEYATSGWNLNVMPVLDQSVLCHINADISGMKVPWLYVGMVFSAFCWHIEDHWSYSINYLHWGEPKTWYGVPSLAAEHLEEVMKMLTPELFDSQPDLLHQLVTLMNPNTLMSHGVPVVRTNQCAGEFVITFPRAYHSGFNQGYNFAEAVNFCTADWLPAGRQCIEHYRRLRRYCVFSHEELICKMAAFPETLDLNLAVAVHKEMFIMVQEERRLRKALLEKGVTEAEREAFELLPDDERQCIKCKTTCFLSALACYDCPDGLVCLSHINDLCKCSSSRQYLRYRYTLDELPTMLHKLKIRAESFDTWANKVRVALEVEDGRKRSFEELRALESEARERRFPNSELLQRLKNCLSEVEACIAQVLGLVSGQVARMDTPQLTLTELRVLLEQMGSLPCAMHQIGDVKDVLEQVEAYQAEAREALATLPSSPGLLRSLLERGQQLGVEVPEAHQLQQQVEQAQWLDEVKQALAPSAHRGSLVIMQGLLVMGAKIASSPSVDKARAELQELLTIAERWEEKAHFCLEARQKHPPATLEAIIRETENIPVHLPNIQALKEALTKAQAWIADVDEIQNGDHYPCLDDLEGLVAVGRDLPVGLEELRQLELQVLTAHSWREKASKTFLKKNSCYTLLEVLCPCADAGSDSTKRSRWMEKALGLYQCDTELLGLSAQDLRDPGSVIVAFKEGEQKEKEGILQLRRTNSAKPSPLAPSLMASSPTSICVCGQVPAGVGVLQCDLCQDWFHGQCVSVPHLLTSPKPSLTSSPLLAWWEWDTKFLCPLCMRSRRPRLETILALLVALQRLPVRLPEGEALQCLTERAIGWQDRARKALASEDVTALLRQLAELRQQLQAKPRPEEASVYTSATACDPIREGSGNNISKVQGLLENGDSVTSPENMAPGKGSDLELLSSLLPQLTGPVLELPEAIRAPLEELMMEGDLLEVTLDENHSIWQLLQAGQPPDLDRIRTLLELEKFEHQGSRTRSRALERRRRRQKVDQGRNVENLVQQELQSKRARSSGIMSQVGREEEHYQEKADRENMFLTPSTDHSPFLKGNQNSLQHKDSGSSAACPSLMPLLQLSYSDEQQL

SEQ ID NO: 850677 - protein, 442 aa, Homo sapiens
MEPGCDEFLPPPECPVFEPSWAEFQDPLGYIAKIRPIAEKSGICKIRPPADWQPPFAVEVDNFRFTPRVQRLNELEAQTRVKLNYLDQIAKFWEIQGSSLKIPNVERKILDLYSLSKIVIEEGGYEAICKDRRWARVAQRLHYPPGKNIGSLLRSHYERIIYPYEMFQSGANHVPEPTEEDIEKHPELKKLQIYGPGPKMMGLGLMAKDKDKTVHKKVTCPPTVTVKDEQSGGGNVSSTLLKQHLSLEPCTKTTMQLRKNHSSAQFIDSYICQVCSRGDEDDKLLFCDGCDDNYHIFCLLPPLPEIPRGIWRCPKCILAECKQPPEAFGFEQATQEYSLQSFGEMADSFKSDYFNMPVHMVPTELVEKEFWRLVSSIEEDVTVEYGADIHSKEFGSGFPVSNSKQNLSPEEKEYATSGWNLNVEPDGTGLTCSLAPNIISQL

SEQ ID NO: 850678 - protein, 231 aa, Homo sapiens [sequence omitted]

SEQ ID NO: 850679 - protein, 1417 aa, Homo sapiens
MEPGCDEFLPPPECPVFEPSWAEFQDPLGYIAKIRPIAEKSGICKIRPPADWQPPFAVEVDNFRFTPRVQRLNELEAQTRVKLNYLDQIAKFWEIQGSSLKIPNVERKILDLYSLSKIVIEEGGYEAICKDRRWARVAQRLHYPPGKNIGSLLRSHYERIIYPYEMFQSGANHVPEPTEEDIEKHPELKKLQIYGPGPKMMGLGLMAKDKDKTVHKKVTCPPTVTVKDEQSGGGNVSSTLLKQHLSLEPCTKTTMQLRKNHSSAQFIDSYICQVCSRGDEDDKLLFCDGCDDNYHIFCLLPPLPEIPRGIWRCPKCILAECKQPPEAFGFEQATQEYSLQSFGEMADSFKSDYFNMPVHMVPTELVEKEFWRLVSSIEEDVTVEYGADIHSKEFGSGFPVSNSKQNLSPEEKEYATSGWNLNVMPVLDQSVLCHINADISGMKVPWLYVGMVFSAFCWHIEDHWSYSINYLHWGEPKTWYGVPSLAAEHLEEVMKMLTPELFDSQPDLLHQLVTLMNPNTLMSHGVPVVRTNQCAGEFVITFPRAYHSGFNQGYNFAEAVNFCTADWLPAGRQCIEHYRRLRRYCVFSHEELICKMAAFPETLDLNLAVAVHKEMFIMVQEERRLRKALLEKGVTEAEREAFELLPDDERQCIKCKTTCFLSALACYDCPDGLVCLSHINDLCKCSSSRQYLRYRYTLDELPTMLHKLKIRAESFDTWANKVRVALEVEDGRKRSFEELRALESEARERRFPNSELLQRLKNCLSEVEACIAQVLGLVSGQVARMDTPQLTLTELRVLLEQMGSLPCAMHQIGDVKGLLVMGAKIASSPSVDKARAELQELLTIAERWEEKAHFCLEARQKHPPATLEAIIRETENIPVHLPNIQALKEALTKAQAWIADVDEIQNGDHYPCLDDLEGLVAVGRDLPVGLEELRQLELQVLTAHSWREKASKTFLKKNSCYTLLEVLCPCADAGSDSTKRSRWMEKALGLYQCDTELLGLSAQDLRDPGSVIVAFKEGEQKEKEGILQLRRTNSAKPSPLAPSLMASSPTSICVCGQVPAGVGVLQCDLCQDWFHGQCVSVPHLLTSPKPSLTSSPLLAWWEWDTKFLCPLCMRSRRPRLETILALLVALQRLPVRLPEGEALQCLTERAIGWQDRARKALASEDVTALLRQLAELRQQLQAKPRPEEASVYTSATACDPIREGSGNNISKVQGLLENGDSVTSPENMAPGKGSDLELLSSLLPQLTGPVLELPEAIRAPLEELMMEGDLLEVTLDENHSIWQLLQAGQPPDLDRIRTLLELEKFEHQGSRTRSRALERRRRRQKVDQGRNVENLVQQELQSKRARSSGIMSQVGREEEHYQEKADRENMFLTPSTDHSPFLKGNQNSLQHKDSGSSAACPSLMPLLQLSYSDEQQL

SEQ ID NO: 850680 - protein, 788 aa, Homo sapiens
MEPGCDEFLPPPECPVFEPSWAEFQDPLGYIAKIRPIAEKSGICKIRPPADWQPPFAVEVDNFRFTPRVQRLNELEAQTRVKLNYLDQIAKFWEIQGSSLKIPNVERKILDLYSLSKIVIEEGGYEAICKDRRWARVAQRLHYPPGKNIGSLLRSHYERIIYPYEMFQSGANHVQCNTHPFDNEVKDKEYKPHSIPLRQSVQPSKFSSYSRRAKRLQPDPEPTEEDIEKHPELKKLQIYGPGPKMMGLGLMAKDKDKTVHKKVTCPPTVTVKDEQSGGGNVSSTLLKQHLSLEPCTKTTMQLRKNHSSAQFIDSYICQVCSRGDEDDKLLFCDGCDDNYHIFCLLPPLPEIPRGIWRCPKCILAECKQPPEAFGFEQATQEYSLQSFGEMADSFKSDYFNMPVHMVPTELVEKEFWRLVSSIEEDVTVEYGADIHSKEFGSGFPVSNSKQNLSPEEKEYATSGWNLNVMPVLDQSVLCHINADISGMKVPWLYVGMVFSAFCWHIEDHWSYSINYLHWGEPKTWYGVPSLAAEHLEEVMKMLTPELFDSQPDLLHQLVTLMNPNTLMSHGVPVVRTNQCAGEFVITFPRAYHSGFNQGYNFAEAVNFCTADWLPAGRQCIEHYRRLRRYCVFSHEELICKMAAFPETLDLNLAVAVHKEMFIMVQEERRLRKALLEKGVTEAEREAFELLPDDERQCIKCKTTCFLSALACYDCPDGLVCLSHINDLCKCSSSRQYLRYRYTLDELPTMLHKLKIRAESFDTWANKVRVALEVEDGRKRRVFSTFLFC

SEQ ID NO: 850681 - protein, 1482 aa, Homo sapiens
MEPGCDEFLPPPECPVFEPSWAEFQDPLGYIAKIRPIAEKSGICKIRPPADWQPPFAVEVDNFRFTPRVQRLNELEAQTRVKLNYLDQIAKFWEIQGSSLKIPNVERKILDLYSLSKQCNTHPFDNEVKDKEYKPHSIPLRQSVQPSKFSSYSRRAKRLQPDPEPTEEDIEKHPELKKLQIYGPGPKMMGLGLMAKDKDKTVHKKVTCPPTVTVKDEQSGGGNVSSTLLKQHLSLEPCTKTTMQLRKNHSSAQFIDSYICQVCSRGDEDDKLLFCDGCDDNYHIFCLLPPLPEIPRGIWRCPKCILAECKQPPEAFGFEQATQEYSLQSFGEMADSFKSDYFNMPVHMVPTELVEKEFWRLVSSIEEDVTVEYGADIHSKEFGSGFPVSNSKQNLSPEEKEYATSGWNLNVMPVLDQSVLCHINADISGMKVPWLYVGMVFSAFCWHIEDHWSYSINYLHWGEPKTWYGVPSLAAEHLEEVMKMLTPELFDSQPDLLHQLVTLMNPNTLMSHGVPVVRTNQCAGEFVITFPRAYHSGFNQGYNFAEAVNFCTADWLPAGRQCIEHYRRLRRYCVFSHEELICKMAAFPETLDLNLAVAVHKEMFIMVQEERRLRKALLEKGVTEAEREAFELLPDDERQCIKCKTTCFLSALACYDCPDGLVCLSHINDLCKCSSSRQYLRYRYTLDELPTMLHKLKIRAESFDTWANKVRVALEVEDGRKRSFEELRALESEARERRFPNSELLQRLKNCLSEVEACIAQVLGLVSGQVARMDTPQLTLTELRVLLEQMGSLPCAMHQIGDVKDVLEQVEAYQAEAREALATLPSSPGLLRSLLERGQQLGVEVPEAHQLQQQVEQAQWLDEVKQALAPSAHRGSLVIMQGLLVMGAKIASSPSVDKARAELQELLTIAERWEEKAHFCLEARQKHPPATLEAIIRETENIPVHLPNIQALKEALTKAQAWIADVDEIQNGDHYPCLDDLEGLVAVGRDLPVGLEELRQLELQVLTAHSWREKASKTFLKKNSCYTLLEVLCPCADAGSDSTKRSRWMEKALGLYQCDTELLGLSAQDLRDPGSVIVAFKEGEQKEKEGILQLRRTNSAKPSPLAPSLMASSPTSICVCGQVPAGVGVLQCDLCQDWFHGQCVSVPHLLTSPKPSLTSSPLLAWWEWDTKFLCPLCMRSRRPRLETILALLVALQRLPVRLPEGEALQCLTERAIGWQDRARKALASEDVTALLRQLAELRQQLQAKPRPEEASVYTSATACDPIREGSGNNISKVQGLLENGDSVTSPENMAPGKGSDLELLSSLLPQLTGPVLELPEAIRAPLEELMMEGDLLEVTLDENHSIWQLLQAGQPPDLDRIRTLLELEKFEHQGSRTRSRALERRRRRQKVDQGRNVENLVQQELQSKRARSSGIMSQVGREEEHYQEKADRENMFLTPSTDHSPFLKGNQNSLQHKDSGSSAACPSLMPLLQLSYSDEQQL

SEQ ID NO: 850682 - protein, 1462 aa, Homo sapiens
MEPGCDEFLPPPECPVFEPSWAEFQDPLGYIAKIRPIAEKSGICKIRPPADWQPPFAVEVDNFRFTPRVQRLNELEAQTRVKLNYLDQIAKFWEIQGSSLKIPNVERKILDLYSLSKIVIEEGGYEAICKDRRWARVAQRLHYPPGKNIGSLLRSHYERIIYPYEMFQSGANHVQCNTHPFDNEVKDKEYKPHSIPLRQSVQPSKFSSYSRRAKRLQPDPEPTEEDIEKHPELKKLQIYGPGPKMMGLGLMAKDKDKTVHKKVTCPPTVTVKDEQSGGGNVSSTLLKQHLSLEPCTKTTMQLRKNHSSAQFIDSYICQVCSRGDEDDKLLFCDGCDDNYHIFCLLPPLPEIPRGIWRCPKCILAECKQPPEAFGFEQATQEYSLQSFGEMADSFKSDYFNMPVHMVPTELVEKEFWRLVSSIEEDVTVEYGADIHSKEFGSGFPVSNSKQNLSPEEKEYATSGWNLNVMPVLDQSVLCHINADISGMKVPWLYVGMVFSAFCWHIEDHWSYSINYLHWGEPKTWYGVPSLAAEHLEEVMKMLTPELFDSQPDLLHQLVTLMNPNTLMSHGVPVVRTNQCAGEFVITFPRAYHSGFNQGYNFAEAVNFCTADWLPAGRQCIEHYRRLRRYCVFSHEELICKMAAFPETLDLNLAVAVHKEMFIMVQEERRLRKALLEKGVTEAEREAFELLPDDERQCIKCKTTCFLSALACYDCPDGLVCLSHINDLCKCSSSRQYLRYRYTLDELPTMLHKLKIRAESFDTWANKVRVALEVEDGRKRSFEELRALESEARERRFPNSELLQRLKNCLSEVEACIAQVLGLVSGQVARMDTPQLTLTELRVLLEQMGSLPCAMHQIGDVKGLLVMGAKIASSPSVDKARAELQELLTIAERWEEKAHFCLEARQKHPPATLEAIIRETENIPVHLPNIQALKEALTKAQAWIADVDEIQNGDHYPCLDDLEGLVAVGRDLPVGLEELRQLELQVLTAHSWREKASKTFLKKNSCYTLLEVLCPCADAGSDSTKRSRWMEKALGLYQCDTELLGLSAQDLRDPGSVIVAFKEGEQKEKEGILQLRRTNSAKPSPLAPSLMASSPTSICVCGQVPAGVGVLQCDLCQDWFHGQCVSVPHLLTSPKPSLTSSPLLAWWEWDTKFLCPLCMRSRRPRLETILALLVALQRLPVRLPEGEALQCLTERAIGWQDRARKALASEDVTALLRQLAELRQQLQAKPRPEEASVYTSATACDPIREGSGNNISKVQGLLENGDSVTSPENMAPGKGSDLELLSSLLPQLTGPVLELPEAIRAPLEELMMEGDLLEVTLDENHSIWQLLQAGQPPDLDRIRTLLELEKFEHQGSRTRSRALERRRRRQKVDQGRNVENLVQQELQSKRARSSGIMSQVGREEEHYQEKADRENMFLTPSTDHSPFLKGNQNSLQHKDSGSSAACPSLMPLLQLSYSDEQQL

SEQ ID NO: 850683 - protein, 887 aa, Homo sapiens
MEPGCDEFLPPPECPVFEPSWAEFQDPLGYIAKIRPIAEKSGICKIRPPADWQPPFAVEVDNFRFTPRVQRLNELEAQTRVKLNYLDQIAKFWEIQGSSLKIPNVERKILDLYSLSKIVIEEGGYEAICKDRRWARVAQRLHYPPGKNIGSLLRSHYERIIYPYEMFQSGANHVQCNTHPFDNEVKDKEYKPHSIPLRQSVQPSKFSSYSRRAKRLQPDPEPTEEDIEKHPELKKLQIYGPGPKMMGLGLMAKDKDKTVHKKVTCPPTVTVKDEQSGGGNVSSTLLKQHLSLEPCTKTTMQLRKNHSSAQFIDSYICQVCSRGDEDDKLLFCDGCDDNYHIFCLLPPLPEIPRGIWRCPKCILAECKQPPEAFGFEQATQEYSLQSFGEMADSFKSDYFNMPVHMVPTELVEKEFWRLVSSIEEDVTVEYGADIHSKEFGSGFPVSNSKQNLSPEEKEYATSGWNLNVMPVLDQSVLCHINADISGMKVPWLYVGMVFSAFCWHIEDHWSYSINYLHWGEPKTWYGVPSLAAEHLEEVMKMLTPELFDSQPDLLHQLVTLMNPNTLMSHGVPVVRTNQCAGEFVITFPRAYHSGFNQGYNFAEAVNFCTADWLPAGRQCIEHYRRLRRYCVFSHEELICKMAAFPETLDLNLAVAVHKEMFIMVQEERRLRKALLEKGVTEAEREAFELLPDDERQCIKCKTTCFLSALACYDCPDGLVCLSHINDLCKCSSSRQYLRYRYTLDELPTMLHKLKIRAESFDTWANKVRVALEVEDGRKRSGDRKWKEPLCKPYFFLLGILNLPFLLTLPTCCNLHSPGFEELRALESEARERRFPNSELLQRLKNCLSEVEACIAQVLGLVSGQVARYVRGEGKEGCQCVKMNNKNG

SEQ ID NO: 850684 - protein, 214 aa, Homo sapiens
MNVFRILGDLSHLLAMILLLGKIWRSKCCKGISGKSQILFALVFTTRYLDLFTNFISIYNTVMKVVFLLCAYVTVYMIYGKFRKTFDSENDTFRLEFLLVPVIGLSFLENYSFTLLEILWTFSIYLESVAILPQLFMISKTGEAETITTHYLFFLGLYRALYLANWIRRYQTENFYDQIAVVSGVVQTIFYCDFFYLYVTKVLKGKKLSLPMPI

SEQ ID NO: 850685 - protein, 126 aa, Homo sapiens
MNVFRILGDLSHLLAMILLLGKIWRSKCCKGISGKSQILFALVFTTRYLDLFTNFISIYNTVMKVVFLLCAYVTVYMIYGKFRKTFDSENDTFRLEFLLVPVIGLSFLGISGYPAPALHDQQDWRG

SEQ ID NO: 850686 - protein, 214 aa, Homo sapiens; identical to SEQ ID NO: 850684

SEQ ID NO: 850687 - protein, 220 aa, Homo sapiens
MNVFRILGDLSHLLAMILLLGKIWRSKCCKGISGKSQILFALVFTTRYLDLFTNFISIYNTVMKVVFLLCAYVTVYMIYGKFRKTFDSENDTFRLEFLLVPVIGLSFLENYSFTLLEILWTFSIYLESVAILPQLFMISKTGEAETITTHYLFFLGLYRALYLANWIRRYQTENFYDQIAVVSGVVQTIFYCDFFYLYVTKGRSWDDSNADTGLRSYSSI

SEQ ID NO: 850688 - protein, 214 aa, Homo sapiens; identical to SEQ ID NO: 850684

SEQ ID NO: 850689 - protein, 156 aa, Homo sapiens
AGLERAHRRQQWPSLGGMAVCARLCGVGPSRGCRRRQQRRGPAETAAADSEPDTDPEEERIEASAGVGGGLCAGPSPPPPRCSLLELPPELLVEIFASLPGTDLPSLAQVCTKRARVVAGRAPGSPSQALPSPGQRRPARAQMGHLVRMVASLGMP

SEQ ID NO: 850690 - protein, 112 aa, Homo sapiens
GPRKICTRYEPGLFIFESPGFLSLSHSGAGSSLLSGVGLPAVQLCTPERVLCHLFGNDVIEDFREVIGGFSVPALNVHLHEEVANDFCRLRFKAGGIGVPQPTWAVTSSVHC

SEQ ID NO: 850691 - protein, 556 aa, Homo sapiens
AGLERAHRRQQWPSLGGMAVCARLCGVGPSRGCRRRQQRRGPAETAAADSEPDTDPEEERIEASAGVGGGLCAGPSPPPPRCSLLELPPELLVEIFASLPGTDLPSLAQVCTKFRRILHTDTIWRRRCREEYGVCENLRKLEITGVSCRDVYAKLLHRYRHILGLWQPDIGPYGGLLNVVVDGLFIIGWMYLPPHDPHVDDPMRFKPLFRIHLMERKAATVECMYGHKGPHHGHIQIVKKDEFSTKCNQTDHHRMSGGRQEEFRTWLREEWGRTLEDIFHEHMQELILMKFIYTSQYDNCLTYRRIYLPPSRPDDLIKPGLFKGTYGSHGLEIVMLSFHGRRARGTKITGDPNIPAGQQTVEIDLRHRIQLPDLENQRNFNELSRIVLEVRERVRQEQQEGGHEAGEGRGRQGPRESQPSPAQPRAEAPSKGPDGTPGEDGGEPGDAVAAAEQPAQCGQGQPFVLPVGVSSRNEDYPRTCRMCFYGTGLIAGHGFTSPERTPGVFILFDEDRFGFVWLELKSFSLYSRVQATFRNADAPSPQAFDEMLKNIQSLTS

SEQ ID NO: 850692 - protein, 400 aa, Homo sapiens
IAMSGRGNRTEGADIGHTEDCERVVDGLFIIGWMYLPPHDPHVDDPMRFKPLFRIHLMERKAATVECMYGHKGPHHGHIQIVKKDEFSTKCNQTDHHRMSGGRQEEFRTWLREEWGRTLEDIFHEHMQELILMKFIYTSQYDNCLTYRRIYLPPSRPDDLIKPGLFKGTYGSHGLEIVMLSFHGRRARGTKITGDPNIPAGQQTVEIDLRHRIQLPDLENQRNFNELSRIVLEVRERVRQEQQEGGHEAGEGRGRQGPRESQPSPAQPRAEAPSKGPDGTPGEDGGEPGDAVAAAEQPAQCGQGQPFVLPVGVSSRNEDYPRTCRMCFYGTGLIAGHGFTSPERTPGVFILFDEDRFGFVWLELKSFSLYSRVQATFRNADAPSPQAFDEMLKNIQSLTS

SEQ ID NO: 850693 - protein, 556 aa, Homo sapiens; identical to SEQ ID NO: 850691

SEQ ID NO: 850694 - protein, 483 aa, Homo sapiens
AGLERAHRRQQWPSLGGMAVCARLCGVGPSRGCRRRQQRRGPAETAAADSEPDTDPEEERIEASAGVGGGLCAGPSPPPPRCSLLELPPELLVEIFASLPGTDLPSLAQVCTKFRRILHTDTIWRRRCREEYGVCENLRKLEITGVSCRDVYAKLLHRYRHILGLWQPDIGPYGGLLNVVVDGLFIIGWMYLPPHDPHVDDPMRFKPLFRIHLMERKAATVECMYGHKGPHHGHIQIVKKDEFSTKCNQTDHHRMSGGRQEEFRTWLREEWGRTLEDIFHEHMQELILMKFIYTSQYDNCLTYRRIYLPPSRPDDLIKPGLFKGTYGSHGLEIVMLSFHGRRARGTKITGDPNIPAGQQTVEIDLRHRIQLPDLENQRNFNELSRIVLEVRERVRQEQQEGGHEAGEGRGRQGPRESQPSPAQPRAEAPSKGPDGTPGEDGGEPGDAVAAAEQPAQCGQGQPFVLPVGVSSRNEDYPRTCRMW

SEQ ID NO: 850695 - protein, 556 aa, Homo sapiens; identical to SEQ ID NO: 850691

SEQ ID NO: 850696 - protein, 104 aa, Homo sapiens
EDLEAAWFVIHDVPGYVHTGPGRHCTTGVGLPAVQLCTPERVLCHLFGNDVIEDFREVIGGFSVPALNVHLHEEVANDFCRLRFKAGGIGVPQPTWAVTSSVHC

SEQ ID NO: 850697 - protein, 443 aa, Homo sapiens
MATVCWFVFCENRKKKSEYGVCENLRKLEITGVSCRDVYAKLLHRYRHILGLWQPDIGPYGGLLNVVVDGLFIIGWMYLPPHDPHVDDPMRFKPLFRIHLMERKAATVECMYGHKGPHHGHIQIVKKDEFSTKCNQTDHHRMSGGRQEEFRTWLREEWGRTLEDIFHEHMQELILMKFIYTSQYDNCLTYRRIYLPPSRPDDLIKPGLFKGTYGSHGLEIVMLSFHGRRARGTKITGDPNIPAGQQTVEIDLRHRIQLPDLENQRNFNELSRIVLEVRERVRQEQQEGGHEAGEGRGRQGPRESQPSPAQPRAEAPSKGPDGTPGEDGGEPGDAVAAAEQPAQCGQGQPFVLPVGVSSRNEDYPRTCRMCFYGTGLIAGHGFTSPERTPGVFILFDEDRFGFVWLELKSFSLYSRVQATFRNADAPSPQAFDEMLKNIQSLTS

SEQ ID NO: 850698 - protein, 556 aa, Homo sapiens; identical to SEQ ID NO: 850691

SEQ ID NO: 850699 - protein, 106 aa, Homo sapiens
RRTAAERQTAAARRRGGQRRRGGQRRRGGQRRRGGETDSGGEADSGGEARSGGAGAERRWRRLWRGEAQAQAPLPSCERVFCLLLSQFIHSKKIFHFIQVKQNLLE

SEQ ID NO: 850700 - protein, 147 aa, Homo sapiens
VAAEESLAEGGPRSGGRRAARARAREAAVGEVERRSRGEEEEGLSGGGPRVPCLYGEKQTMDYDFKAKLAAERERVEDLFEYEGCKVGRGTYGHVYKARRKDGFQEGFVYGPQALEVADFSAEGKACKLGASQRLETSKYPSNGRRS

SEQ ID NO: 850701 - protein, 504 aa, Homo sapiens
REGRPWYAGAHALWGRGCGGPRFQEGFVYGPQALEVADFSAEGKAKDEKEYALKQIEGTGISMSACREIALLRELKHPNVIALQKVFLSHSDRKVWLLFDYAEHDLWHIIKFHRASKANKKPMQLPRSMVKSLLYQILDGIHYLHANWVLHRDLKPANILVMGEGPERGRVKIADMGFARLFNSPLKPLADLDPVVVTFWYRAPELLLGARHYTKAIDIWAIGCIFAELLTSEPIFHCRQEDIKTSNPFHHDQLDRIFSVMGFPADKDWEDIRKMPEYPTLQKDFRRTTYANSSLIKYMEKHKVKPDSKVFLLLQKLLTMDPTKRITSEQALQDPYFQEDPLPTLDVFAGCQIPYPKREFLNEDDPEEKGDKNQQQQQNQHQQPTAPPQQAAAPPQAPPPQQNSTQTNGTAGGAGAGVGGTGAGLQHSQDSSLNQVPPNKKPRLGPSGANSGGPVMPSDYQHSSSRLNYQSSVQGSSQSQSTLGYSSSSQQSSQYHPSHQAHRY

SEQ ID NO: 850702 - protein, 502 aa, Homo sapiens
MDYDFKAKLAAERERVEDLFEYEGCKVGRGTYGHVYKARRKDGKDEKEYALKQIEGTGISMSACREIALLRELKHPNVIALQKVFLSHSDRKVWLLFDYAEHDLWHIIKFHRASKANKKPMQLPRSMVKSLLYQILDGIHYLHANWVLHRDLKPANILVMGEGPERGRVKIADMGFARLFNSPLKPLADLDPVVVTFWYRAPELLLGARHYTKAIDIWAIGCIFAELLTSEPIFHCRQEDIKTSNPFHHDQLDRIFSVMGFPADKDWEDIRKMPEYPTLQKDFRRTTYANSSLIKYMEKHKVKPDSKVFLLLQKLLTMDPTKRITSEQALQDPYFQEDPLPTLDVFAGCQIPYPKREFLNEDDPEEKGDKNQQQQQNQHQQPTAPPQQAAAPPQAPPPQQNSTQTNGTAGGAGAGVGGTGAGLQHSQDSSLNQVPPNKKPRLGPSGANSGGPVMPSDYQHSSSRLNYQSSVQGSSQSQSTLGYSSSSQQSSQYHPSHQAHRY

SEQ ID NO: 850703 - protein, 502 aa, Homo sapiens; identical to SEQ ID NO: 850702

SEQ ID NO: 850704 - protein, 68 aa, Homo sapiens
GRHSPAPANEQRDGGRGNRRTHCPRKETSCGTTVLTSPRLPSHCSQPFSKELRENCRNTLGSLYWLSS

SEQ ID NO: 850705 - protein, 108 aa, Homo sapiens
VAAEESLAEGGPRSGGRRAARARAREAAVGEVERRSRGEEEEGLSGGGPRVPCLYGGSRQWIMISRRSWRRSGSGWRICLSTKGAKWDAAPTVTSTRRGGKMGVEGEL

SEQ ID NO: 850706 - protein, 502 aa, Homo sapiens; identical to SEQ ID NO: 850702

SEQ ID NO: 850707 - protein, 502 aa, Homo sapiens; identical to SEQ ID NO: 850702

SEQ ID NO: 850708 - protein, 163 aa, Homo sapiens
RSRLARVLALPATWRDGWVGSQSGRARGARRRGSRGCVRTPTPRGARSARLPRAAPSRTSNSRGAARSEASVPSQRGALRVLGDGGGTRVGTAVEEEFVGSSLLGERSGQAELRCGVAAPALGSDGRCGTSNRLSASRGRRFETSPGSLSGERGLGSSPAPRL

SEQ ID NO: 850709 - protein, 175 aa, Homo sapiens
ATSETGASVSTRGSHFVGSAAHEVAVAKSFTIECRVPTVEPLDSLTLFLFRGNETLHYETFGKAAPAPQEATATFNSTADREDGHRNFSCLAVLDLMSRGGNIFHKHSAPKMLEIYEPVSDSQMVIIVTVVSVLLSLFVTSVLLCFIFGQHLRQQRMGTYGVRAAWRRLPQAFRP

SEQ ID NO: 850710 - protein, 275 aa, Homo sapiens
MSSFGYRTLTVALFTLICCPGSDEKVFEVHVRPKKLAVEPKGSLEVNCSTTCNQPEVGGLETSLDKILLDEQAQWKHYLVSNISHDTVLQCHFTCSGKQESMNSNVSVYQPPRQVILTLQPTLVAVGKSFTIECRVPTVEPLDSLTLFLFRGNETLHYETFGKAAPAPQEATATFNSTADREDGHRNFSCLAVLDLMSRGGNIFHKHSAPKMLEIYEPVSDSQMVIIVTVVSVLLSLFVTSVLLCFIFGQHLRQQRMGTYGVRAAWRRLPQAFRP

SEQ ID NO: 850711 - protein, 275 aa, Homo sapiens; identical to SEQ ID NO: 850710

SEQ ID NO: 850712 - protein, 275 aa, Homo sapiens; identical to SEQ ID NO: 850710

SEQ ID NO: 850713 - protein, 174 aa, Homo sapiens
MNSNVSVYQPPRQVILTLQPTLVAVGKSFTIECRVPTVEPLDSLTLFLFRGNETLHYETFGKAAPAPQEATATFNSTADREDGHRNFSCLAVLDLMSRGGNIFHKHSAPKMLEIYEPVSDSQMVIIVTVVSVLLSLFVTSVLLCFIFGQHLRQQRMGTYGVRAAWRRLPQAFRP

SEQ ID NO: 850714 - protein, 273 aa, Homo sapiens
MEDIRTLTVALFTLICCPGSDEKVFEVHVRPKKLAVEPKGSLEVNCSTTCNQPEVGGLETSLDKILLDEQAQWKHYLVSNISHDTVLQCHFTCSGKQESMNSNVSVYQPPRQVILTLQPTLVAVGKSFTIECRVPTVEPLDSLTLFLFRGNETLHYETFGKAAPAPQEATATFNSTADREDGHRNFSCLAVLDLMSRGGNIFHKHSAPKMLEIYEPVSDSQMVIIVTVVSVLLSLFVTSVLLCFIFGQHLRQQRMGTYGVRAAWRRLPQAFRP

SEQ ID NO: 850715 - protein, 154 aa, Homo sapiens
MSSFGYRTLTVALFTLICCPGSDEKVFEVHVRPKKLAVEPKGSLEVNCSTTCNQPEVGGLETSLDKILLDEQAQWKHYLVSNISHDTVLQCHFTCSGKQESMNSNVSVYQPPRQVILTLQPTLVAVGKSPQPHSTARLTERMATATSPAWLCWT

SEQ ID NO: 850716 - protein, 224 aa, Homo sapiens
MSSFGYRTLTVALFTLICCPGSDEKVFEVHVRPKKLAVEPKGSLEVNCSTTCNQPEVGGLETSLDKILLDEQAQWKHYLVSNISHDTVLQCHFTCSGKQESMNSNVSVYQPPRQVILTLQPTLVAVGKSFTIECRVPTVEPLDSLTLFLFRGNETLHYETFGKAAPAPQEATATFNSTADREDGHRNFSSVLLCFIFGQHLRQQRMGTYGVRAAWRRLPQAFRP

SEQ ID NO: 850717 - protein, 149 aa, Homo sapiens
MSSFGYRTLTVALFTLICCPGSDEKVFEVHVRPKKLAVEPKGSLEVNCSTTCNQPEVGGLETSLDKILLDEQAQWKHYLVSNISHDTVLQCHFTCSGKQESMNSNVSVYREWLCCGALLSPGTEAVSTECTQSPSVPAPGHCHRGALPP

SEQ ID NO: 850718 - protein, 140 aa, Homo sapiens
MSSFGYRTLTVALFTLICCPGSDEKVFEVHVRPKKLAVEPKGSLEVNCSTTCNQRLAVLDLMSRGGNIFHKHSAPKMLEIYEPVSDSQMVIIVTVVSVLLSLFVTSVLLCFIFGQHLRQQRMGTYGVRAAWRRLPQAFRP

SEQ ID NO: 850719 - protein, 261 aa, Homo sapiens
MSSFGYRTLTVALFTLICCPGSDEKVFEVHVRPKKLAVEPKGSLEVNCSTTCNQPEVGGLETSLDKILLDEQAQWKHYLVSNISHDTVLQCHFTCSGKQESMNSNVSVYQPPRQVILTLQPTLVAVGKSFTIECRVPTVEPLDSLTLFLFRGNETLHYETFGKAAPAPQEATATFNSTADREDGHRNFSCLAVLDLMSRGGNIFHKHSAPKMLEIYEAVSDSPMVIKSHRGRGVAWLGICLVGYLRQIGQRDGPRVEGVGG

SEQ ID NO: 850720 - protein, 275 aa, Homo sapiens; identical to SEQ ID NO: 850710

SEQ ID NO: 850721 - protein, 278 aa, Homo sapiens
MAHCTSLGSGDPPTSASWVAGITGSDEKVFEVHVRPKKLAVEPKGSLEVNCSTTCNQPEVGGLETSLDKILLDEQAQWKHYLVSNISHDTVLQCHFTCSGKQESMNSNVSVYQPPRQVILTLQPTLVAVGKSFTIECRVPTVEPLDSLTLFLFRGNETLHYETFGKAAPAPQEATATFNSTADREDGHRNFSCLAVLDLMSRGGNIFHKHSAPKMLEIYEPVSDSQMVIIVTVVSVLLSLFVTSVLLCFIFGQHLRQQRMGTYGVRAAWRRLPQAFRP

SEQ ID NO: 850722 - protein, 330 aa, Homo sapiens
MSSFGYRTLTVALFTLICCPGSDEKVFEVHVRPKKLAVEPKGSLEVNCSTTCNQPEVGGLETSLDKILLDEQAQWKHYLVSNISHDTVLQCHFTCSGKQESMNSNVSVYLGCTISEPCPCRHLVTGNHHVCKTTTQSSLHPQLRPLPLCTGAGQATSSPTVEHHEPPRQVILTLQPTLVAVGKSFTIECRVPTVEPLDSLTLFLFRGNETLHYETFGKAAPAPQEATATFNSTADREDGHRNFSCLAVLDLMSRGGNIFHKHSAPKMLEIYEPVSDSQMVIIVTVVSVLLSLFVTSVLLCFIFGQHLRQQRMGTYGVRAAWRRLPQAFRP

SEQ ID NO: 850723 - protein, 275 aa, Homo sapiens; identical to SEQ ID NO: 850710

SEQ ID NO: 850724 - protein, 116 aa, Homo sapiens
MNQTDKNQQEIPSYLNDEPPEGSMKDHPQQQPGMLSRVTGGIFSVTKGAVGATIGGVAWIGGKSLEVTKTAVTTVPSMGIGLVKGGVSAVAGGVTAVGSAVVNKVPLTGKKKDKSD

SEQ ID NO: 850725 - protein, 116 aa, Homo sapiens; identical to SEQ ID NO: 850724

SEQ ID NO: 850726 - protein, 116 aa, Homo sapiens; identical to SEQ ID NO: 850724

SEQ ID NO: 850727 - protein, 289 aa, Homo sapiens
AGPCENGWACARWAREGPGLHERACASDWSRGRRRELRRRRRGRVASGATSAARGLRLHHRRHSLPAPHPERTPLEPRLPGVVPAAAAAQAASALLCAGPLTPPGPSPSAGRDPGAFETSAGVSALRGSPGISIQHQQAGVQWLDLHSLQHPSPRFKRFSCLSLPGSWDYQEIMNQTDKNQQEIPSYLNDEPPEGSMKDHPQQQPGMLSRVTGGIFSVTKGAVGATIGGVAWIGGKSLEVTKTAVTTVPSMGIGLVKGGVSAVAGGVTAVGSAVVNKVPLTGKKKDKSD

SEQ ID NO: 850728 - protein, 256 aa, Homo sapiens
AGPCENGWACARWAREGPGLHERACASDWSRGRRRELRRRRRGRVASGATSAARGLRLHHRRHSLPAPHPERTPLEPRLPGVVPAAAAAQAASALLCAGPLTPPGPSPSAGRDPGAFETSAGVSALRGSPGISIQHQQEIMNQTDKNQQEIPSYLNDEPPEGSMKDHPQQQPGMLSRVTGGIFSVTKGAVGATIGGVAWIGGKSLEVTKTAVTTVPSMGIGLVKGGVSAVAGGVTAVGSAVVNKVPLTGKKKDKSD

SEQ ID NO: 850729 - protein, 256 aa, Homo sapiens; identical to SEQ ID NO: 850728

SEQ ID NO: 850730 - protein, 256 aa, Homo sapiens; identical to SEQ ID NO: 850728

SEQ ID NO: 850731 - protein, 116 aa, Homo sapiens; identical to SEQ ID NO: 850724

SEQ ID NO: 850732 - protein, 256 aa, Homo sapiens; identical to SEQ ID NO: 850728

SEQ ID NO: 850733 - protein, 337 aa, Homo sapiens
APAPCASLPGRAQPGVPSSAGEDPRAVTREPPQTLGGSAAGAAGSSPQLPALPGSSLSRARGPARHSQPRAMMKTLSSGNCTLSVPAKNSYRMVVLGASRVGKSSIVSRFLNGRFEDQYTPTIEDFHRKVYNIRGDMYQLDILDTSGNHPFPAMRRLSILTGDVFILVFSLDNRESFDEVKRLQKQILEVKSCLKNKTKEAAELPMVICGNKNDHGELCRQVPTTEAELLVSGDENCAYFEVSAKKNTNVDEMFYVLFSMAKLPHEMSPALHRKISVQYGDAFHPRPFCMRRVKEMDAYGMVSPFARRPSVNSDLKYIKAKVLREGQARERDKCTIQ

SEQ ID NO: 850734 - protein, 278 aa, Homo sapiens
MPASLALLQPRAMMKTLSSGNCTLSVPAKNSYRMVVLGASRVGKSSIVSRFLNGRFEDQYTPTIEDFHRKVYNIRGDMYQLDILDTSGNHPFPAMRRLSILTGDVFILVFSLDNRESFDEVKRLQKQILEVKSCLKNKTKEAAELPMVICGNKNDHGELCRQVPTTEAELLVSGDENCAYFEVSAKKNTNVDEMFYVLFSMAKLPHEMSPALHRKISVQYGDAFHPRPFCMRRVKEMDAYGMVSPFARRPSVNSDLKYIKAKVLREGQARERDKCTIQ

SEQ ID NO: 850735 - protein, 223 aa, Homo sapiens
MPEIVDTCSLASPASVCRTKHLHLRCSVDFTRRTLTGTAALTVQSQEDNLRSLVLDTKDLTIEKVVINGQEVKYALGERQSYKGSPMEISLPIALSKNQEIVIEISFETSPKSSALQWLTPEQTSGKEHPYLFSQCQAIHCRAILPCQDTPSVKLTYTAEVSVPKELVALMSAIRDGETPDPEDPSRKIYKFIQKVNNLVLMLVVGLEGGIGRLVWLKGGKVV

SEQ ID NO: 850736 - protein, 593 aa, Homo sapiens
MPEIVDTCSLASPASVCRTKHLHLRCSVDFTRRTLTGTAALTVQSQEDNLRSLVLDTKDLTIEKVVINGQEVKYALGERQSYKGSPMEISLPIALSKNQEIVIEISFETSPKSSALQWLTPEQTSGKEHPYLFSQCQAIHCRAILPCQDTPSVKLTYTAEVSVPKELVALMSAIRDGETPDPEDPSRKIYKFIQKVPIPCYLIALVVGALESRQIGPRTLVWSEKEQVEKSAYEFSETESMLKIAEDLGGPYVWGQYDLLVLPPSFPYGGMENPCLTFVTPTLLAGDKSLSNVIAHEISHSWTGNLVTNKTWDHFWLNEGHTVYLERHICGRLFGVKTFGETHPFTKLVVDLTDIDPDVAYSSVPYEKGFALLFYLEQLLGGPEIFLGFLKAYVEKFSYKSITTDDWKDFLYSYFKDKVDVLNQVDWNAWLYSPGLPPIKPNYDMTLTNACIALSQRWITAKEDDLNSFNATDLKDLSSHQLNEFLAQTLQRAPLPLGHIKRMQEVYNFNAINNSEIRFRWLRLCIQSKWEDAIPLALKMATEQGRMKFTRPLFKDLAAFDKSHDQAVRTYQEHKASMHPVTAMLVGKDLKVD

SEQ ID NO: 850737 - protein, 597 aa, Homo sapiens
MPEIVDTCSLASPASVCRTKHLHLRCSVDFTRRTLTGTAALTVQSQEDNLRSLVLDTKDLTIEKVVINGQEVKYALGERQSYKGSPMEISLPIALSKNQEIVIEISFETSPKSSALQWLTPEQTSGKEHPYLFSQCQAIHCRAILPCQDTPSVKLTYTAEVSVPKELVALMSAIRDGETPDPEDPSRKIYKFIQKVPIPCYLIALVVGALESRQIGPRTLVWSEKEQVEKSAYEFSETESMLKIAEDLGGPYVWGQYDLLVLPPSFPYGGMENPCLTFVTPTLLAGDKSLSNVIAHEISHSWTGNLVTNKTWDHFWLNEGHTVYLERHICGRLFGEKFRHFNALGGWGELQNSVKTFGETHPFTKLVVDLTDIDPDVAYSSVPYEKGFALLFYLEQLLGGPEIFLGFLKAYVEKFSYKSITTDDWKDFLYSYFKDKSPGLPPIKPNYDMTLTNACIALSQRWITAKEDDLNSFNATDLKDLSSHQLNEFLAQTLQRAPLPLGHIKRMQEVYNFNAINNSEIRFRWLRLCIQSKWEDAIPLALKMATEQGRMKFTRPLFKDLAAFDKSHDQAVRTYQEHKASMHPVTAMLVGKDLKVD

SEQ ID NO: 850738 - protein, 611 aa, Homo sapiens
MPEIVDTCSLASPASVCRTKHLHLRCSVDFTRRTLTGTAALTVQSQEDNLRSLVLDTKDLTIEKVVINGQEVKYALGERQSYKGSPMEISLPIALSKNQEIVIEISFETSPKSSALQWLTPEQTSGKEHPYLFSQCQAIHCRAILPCQDTPSVKLTYTAEVSVPKELVALMSAIRDGETPDPEDPSRKIYKFIQKVPIPCYLIALVVGALESRQIGPRTLVWSEKEQVEKSAYEFSETESMLKIAEDLGGPYVWGQYDLLVLPPSFPYGGMENPCLTFVTPTLLAGDKSLSNVIAHEISHSWTGNLVTNKTWDHFWLNEGHTVYLERHICGRLFGEKFRHFNALGGWGELQNSVKTFGETHPFTKLVVDLTDIDPDVAYSSVPYEKGFALLFYLEQLLGGPEIFLGFLKAYVEKFSYKSITTDDWKDFLYSYFKDKVDVLNQVDWNAWLYSPGLPPIKPNYDMTLTNACIALSQRWITAKEDDLNSFNATDLKDLSSHQLNEFLAQTLQRAPLPLGHIKRMQEVYNFNAINNSEIRFRWLRLCIQSKWEDAIPLALKMATEQGRMKFTRPLFKDLAAFDKSHDQAVRTYQEHKASMHPVTAMLVGKDLKVD

SEQ ID NO: 850739 - protein, 611 aa, Homo sapiens; identical to SEQ ID NO: 850738

SEQ ID NO: 850740 - protein, 532 aa, Homo sapiens
MPEIVDTCSLASPASVCRTKHLHLRCSVDFTRRTLTGTAALTVQSQEDNLRSLVLDTKDLTIEKVVINGQEVKYALGERQSYKGSPMEISLPIALSKNQEIVIEISFETSPKSSALQWLTPEQTSGKEHPYLFSQCQAIHCRAILPCQDTPSVKLTYTAEVSVPKELVALMSAIRDGETPDPEDPSRKIYKFIQKVPIPCYLIALVVGALESRQIGPRTLVWSEKEQVEKSAYEFSETESMLKIAEDLGGPYVWGQYDLLVLPPSFPYGGMENPCLTFVTPTLLAGDKSLSNVIAHEISHSWTGNLVTNKTWDHFWLNEGHTVYLERHICGRLFGEKFRHFNALGGWGELQNSVKTFGETHPFTKLVVDLTDIDPDVAYSSVPYEKGFALLFYLEQLLGGPEIFLGFLKAYVEKFSYKSITTDDWKDFLYSYFKDKVDVLNQVDWNAWLYSPGLPPIKPNYDMTLTNACIALSQRWITAKEDDLNSFNATDLKDLSSHQLNEFLAQTLQRMAAALHSIQVGGRNSFGAKDGN

SEQ ID NO: 850741 - protein, 397 aa, Homo sapiens
RSRCNRMEMLERAGGKVAYEFSETESMLKIAEDLGGPYVWGQYDLLVLPPSFPYGGMENPCLTFVTPTLLAGTKSLSHVIAHEISHSWTGNLVTNKTWDHFWLNEGHTVYLERHICGRLFGEKFRHFNALGGWGELQNSVKTFGETHPFTKLVVDLTDIDPDVAYSSVPYEKGFALLFYLEQLLGGPEIFLGFLKAYVEKFSYKSITTDDWKDFLYSYFKDKVDVLNQVDWNAWLYSPGLPPIKPNYDMTLTNACIALSQRWITAKEDDLNSFNATDLKDLSSHQLNEFLAQTLQRAPLPLGHIKRMQEVYNFNAINNSEIRFRWLRLCIQSKWEDAIPLALKMATEQGRMKFTRPLFKDLAAFDKSHDQAVRTYQEHKASMHPVTAMLVGKDLKVD

SEQ ID NO: 850742 - protein, 518 aa, Homo sapiens
MPEIVDTCSLASPASVCRTKHLHLRCSVDFTRRTLTGTAALTVQSQEDNLRSLVLDTKDLTIEKVVINGQEVKYALGERQSYKGSPMEISLPIALSKNQEIVIEISFETSPKSSALQWLTPEQTSGKEHPYLFSQCQAIHCRAILPCQDTPSVKLTYTAEVSVPKELVALMSAIRDGETPDPEDPSRKIYKFIQKVPIPCYLIALVVGALESRQIGPRTLVWSEKEQVEKSAYEFSETESMLKIAEDLGGPYVWGQYDLLVLPPSFPYGGMENPCLTFVTPTLLAGDKSLSNVIAHEISHSWTGNLVTNKTWDHFWLNEGHTVYLERHICGRLFGEKFRHFNALGGWGELQNSVKTFGETHPFTKLVVDLTDIDPDVAYSSVPYEKGFALLFYLEQLLGGPEIFLGFLKAYVEKFSYKSITTDDWKDFLYSYFKDKVDVLNQVDWNAWLYSPGLPPIKPNYDMTLTNACIALSQRWITAKEDDLNSFNATDLKDLSSHQLNEFLAQTLQRLLSSKESC

SEQ ID NO: 850743 - protein, 616 aa, Homo sapiens
  misc_feature (503)..(504): Xaa can be any naturally occurring amino acid
  misc_feature (512)..(513): Xaa can be any naturally occurring amino acid
  misc_feature (516)..(516): Xaa can be any naturally occurring amino acid
  misc_feature (530)..(530): Xaa can be any naturally occurring amino acid
  misc_feature (533)..(533): Xaa can be any naturally occurring amino acid
MPEIVDTCSLASPASVCRTKHLHLRCSVDFTRRTLTGTAALTVQSQEDNLRSLVLDTKDLTIEKVVINGQEVKYALGERQSYKGSPMEISLPIALSKNQEIVIEISFETSPKSSALQWLTPEQTSGKEHPYLFSQCQAIHCRAILPCQDTPSVKLTYTAEVSVPKELVALMSAIRDGETPDPEDPSRKIYKFIQKVPIPCYLIALVVGALESRQIGPRTLVWSEKEQVEKSAYEFSETESMLKIAEDLGGPYVWGQYDLLVLPPSFPYGGMENPCLTFVTPTLLAGDKSLSNVIAHEISHSWTGNLVTNKTWDHFWLNEGHTVYLERHICGRLFGEKFRHFNALGGWGELQNSVKTFGETHPFTKLVVDLTDIDPDVAYSSVPYEKGFALLFYLEQLLGGPEIFLGFLKAYVEKFSYKSITTDDWKDFLYSYFKDKVDVLNQVDWNAWLYSPGLPPIKPNYDMTLTNACIALSQRWITAKEDDLNSFNATDLKDLSSHQLNDXXPHTPQSPXXPMXHKKQKQKKNNNKAXNKXKKPPRSLPPPWLRLCIQSKWEDAIPLALKMATEQGRMKFTRPLFKDLAAFDKSHDQAVRTYQEHKASMHPVTAMLVGKDLKVD

SEQ ID NO: 850744 - protein, 149 aa, Homo sapiens
MTLTNACIALSQRWITAKEDDLNSFNATDLKDLSSHQLNEFLAQTLQRAPLPLGHIKRMQEVYNFNAINNSEIRFRWLRLCIQSKWEDAIPLALKMATEQGRMKFTRPLFKDLAAFDKSHDQAVRTYQEHKASMHPVTAMLVGKDLKVD

SEQ ID NO: 850745 - protein, 611 aa, Homo sapiens; identical to SEQ ID NO: 850738

SEQ ID NO: 850746 - protein, 106 aa, Homo sapiens
MPEIVDTCSLASPASVCRTKHLHLRCSVDFTRRTLTGTAALTVQSQEDNLRSLVLDTKDLTIEKVVINGQEVKYALGERQSYKGSPMEISLPIALSNQDCYDLSLL

SEQ ID NO: 850747 - protein, 593 aa, Homo sapiens
MPEIVDTCSLASPASVCRTKHLHLRCSVDFTRRTLTGTAALTVQSQEDNLRSLVLDTKDLTIEKVVINGQEVKYALGERQSYKGSPMEISLPIALSKNQEIVIEISFETSPKSSALQWLTPEQTSGKEHPYLFSQCQAIHCRAILPCQDTPSVKLTYTAEVSVPKELVALMSAIRDGETPDPEDPSRKIYKFIQKVPIPCYLIALVVGALESRQIGPRTLVWSEKEQVEKSAYEFSETESMLKIAEDLGGPYVWGQYDLLVLPPSFPYGGMENPCLTFVTPTLLAGDKSLSNVIAHEISHSWTGNLVTNKTWDHFWLNEGHTVYLERHICGRLFGEKFRHFNALGGWGELQNSVKTFGETHPFTKLVVDLTDIDPDVAYSSVPYEKGFALLFYLEQLLGGPEIFLGFLDFPDSYFKDKVDVLNQVDWNAWLYSPGLPPIKPNYDMTLTNACIALSQRWITAKEDDLNSFNATDLKDLSSHQLNEFLAQTLQRAPLPLGHIKRMQEVYNFNAINNSEIRFRWLRLCIQSKWEDAIPLALKMATEQGRMKFTRPLFKDLAAFDKSHDQAVRTYQEHKASMHPVTAMLVGKDLKVD

SEQ ID NO: 850748 - protein, 611 aa, Homo sapiens; identical to SEQ ID NO: 850738

SEQ ID NO: 850749 - protein, 326 aa, Homo sapiens
LITLFSLVIAHEISHSWTGNLVTNKTWDHFWLNEGHTVYLERHICGRLFGEKFRHFNALGGWGELQNSVKTFGETHPFTKLVVDLTDIDPDVAYSSVPYEKGFALLFYLEQLLGGPEIFLGFLKAYVEKFSYKSITTDDWKDFLYSYFKDKVDVLNQVDWNAWLYSPGLPPIKPNYDMTLTNACIALSQRWITAKEDDLNSFNATDLKDLSSHQLNEFLAQTLQRAPLPLGHIKRMQEVYNFNAINNSEIRFRWLRLCIQSKWEDAIPLALKMATEQGRMKFTRPLFKDLAAFDKSHDQAVRTYQEHKASMHPVTAMLVGKDLKVD

SEQ ID NO: 850750 - protein, 555 aa, Homo sapiens
MPEIVDTCSLASPASVCRTKHLHLRCSVDFTRRTLTGTAALTVQSQEDNLRSLVLDTKDLTIEKVVINGQEVKYALGERQSYKGSPMEISLPIALSKNQEIVIEISFETSPKSSALQWLTPEQTSGKEHPYLFSQCQAIHCRAILPCQDTPSVKLTYTAEVSVPKELVALMSAIRDGETPDPEDPSRKIYKFIQKVPIPCYLIALVVGALESRQIGPRTLVWSEKEQVEKSAYEFSETESMLKIAEDLGGPYVWGQYDLLVLPPSFPYGGMENPCLTFVTPTLLAGDKSLSNVIAHEISHSWTGNLVTNKTWDHFWLNEGHTVYLERHICGRLFGEKFRHFNALGGWGELQNSVKTFGETHPFTKLVVDLTDIDPDVAYSSVPYEKGFALLFYLEQLLGGPEIFLGFLKAYVEKFSYKSITTDDWKDFLYSYFKDKVDVLNQVDWNAWLYSPGLPPIKPNYDMTLTNACIALSQRWITAKEDDLNSFNATDLKDLSSHQLNEFLAQTLQRAPLPLGHIKRMQEVYNFNAINNSEIRFRYIILTCLCGRKQKTKLL

SEQ ID NO: 850751 - protein, 532 aa, Homo sapiens; identical to SEQ ID NO: 850740

SEQ ID NO: 850752 - protein, 149 aa, Homo sapiens; identical to SEQ ID NO: 850744

SEQ ID NO: 850753 - protein, 156 aa, Homo sapiens
MTQTQSLSFLLGSSASLDCGFSMAPGLDLISVEWRLQHKGRGQLVYSWTAGQGQAVRKGATLEPAQLGMARDASLTLPGLTIQDEGTYICQITTSLYRAQQIIQLNIQGEARTWLSQGRGYNMSTGSVSRLGPKCKNDFLRSRLQSHNLNAITTME

SEQ ID NO: 850754 - protein, 468 aa, Homo sapiens
MGTQEGWCLLLCLALSGAAETKPHPAEGQWRAVDVVLDCFLVKDGAHRGALASSEDRARASLVLKQVPVLDDGSLEDFTDFQGGTLAQDDPPIIFEASVDLVQIPQAEALLHADCSGKEVTCEISRYFLQMTETTVKTAAWFMANVQVSGGGPSISLVMKTPRVAKNEVLWHPTLNLPLSPQGTVRTAVEFQVMTQTQSLSFLLGSSASLDCGFSMAPGLDLISVEWRLQHKGRGQLVYSWTAGQGQAVRKGATLEPAQLGMARDASLTLPGLTIQDEGTYICQITTSLYRAQQIIQLNIQASPKVRLSLANEALLPTLICDIAGYYPLDVVVTWTREELGGSPAQVSGASFSSLRQSVAGTYSISSSLTAEPGSAGATYTCQVTHISLEEPLGASTQVVPPERRTALGVIFASSLFLLALMFLGLQRRQAPTGLGLLQAERWETTSCADTQSSHLHEDRTARVSQPS

SEQ ID NO: 850755 - protein, 262 aa, Homo sapiens [sequence omitted]

SEQ ID NO: 850756 - protein, 474 aa, Homo sapiens
AILLSVKVKEKSAAEGTGKKPKGCRLPEPHPAEGQWRAVDVVLDCFLVKDGAHRGALASSEDRARASLVLKQVPVLDDGSLEDFTDFQGGTLAQDDPPIIFEASVDLVQIPQAEALLHADCSGKEVTCEISRYFLQMTETTVKTAAWFMANVQVSGGGPSISLVMKTPRVAKNEVLWHPTLNLPLSPQGTVRTAVEFQVMTQTQSLSFLLGSSASLDCGFSMAPGLDLISVEWRLQHKGRGQLVYSWTAGQGQAVRKGATLEPAQLGMARDASLTLPGLTIQDEGTYICQITTSLYRAQQIIQLNIQASPKVRLSLANEALLPTLICDIAGYYPLDVVVTWTREELGGSPAQVSGASFSSLRQSVAGTYSISSSLTAEPGSAGATYTCQVTHISLEEPLGASTQVVPPERRTALGVIFASSLFLLALMFLGLQRRQAPTGLGLLQAERWETTSCADTQSSHLHEDRTARVSQPS

SEQ ID NO: 850757 - protein, 185 aa, Homo sapiens
MGTQEGWCLLLCLALSGAAETMDLVQIPQAEALLHADCSGKEVTCEISRYFLQMTETTVKTAAWFMANVQVSGGGPSISLVMKTPRVAKNEVLWHPTLNLPLSPQGTVRTAVEFQVMTQTQSLSFLLGSSASLDCGFSMAPGLDLISVEWRLQHKGRGRGDLHLPDHHLSVPSSADHPAQHPSFP

SEQ ID NO: 850758 - protein, 128 aa, Homo sapiens
HTRSFHTFCLLERLKAGSPAHPQADLKRHETTRKKRHPSPSPHSYSNPNNNQASLMVGICIFCLCSEYMTLVNMPHAFGGSTTVVITLYKYEIRVRKKRQRGDDRHTVETPHRLMANRRTGCGKLSFI

SEQ ID NO: 850759 - protein, 154 aa, Homo sapiens
TTLQLSSFLSEIPVPKSSFLAAPGSEPHPAEGQWRAVDVVLDCFLVKDGAHRGALTAEPGSAGATYTCQVTHISLEEPLGASTQVVPPERRTALGVIFASSLFLLALMFLGLQRRQAPTGLGLLQAERWETTSCADTQSSHLHEDRTARVSQPS

SEQ ID NO: 850760 - protein, 104 aa, Homo sapiens
TWTREELGGSPAQVSGASFSSLRQSVAGTYSISSSLTAEPGSAGATYTCQVTHISLEEPLGASTQVVPPGTGSVLLFPTSTLGLMALLPQLIYGLVLLPIHFVR

SEQ ID NO: 850761 - protein, 468 aa, Homo sapiens; identical to SEQ ID NO: 850754

SEQ ID NO: 850762 - protein, 104 aa, Homo sapiens [sequence omitted]

SEQ ID NO: 850763 - protein, 472 aa, Homo sapiens
PPCSSPASSLKSQSQNPVSWPPPGSEPHPAEGQWRAVDVVLDCFLVKDGAHRGALASSEDRARASLVLKQVPVLDDGSLEDFTDFQGGTLAQDDPPIIFEASVDLVQIPQAEALLHADCSGKEVTCEISRYFLQMTETTVKTAAWFMANVQVSGGGPSISLVMKTPRVAKNEALWHPTLNLPLSPQGTVRTAVEFQVMTQTQSLSFLLGSSASLDCGFSMAPGLDLISVEWRLQHKGRGQLVYSWTAGQGQAVRKGATLEPAQLGMARDASLTLPGLTIQDEGTYICQITTSLYRAQQIIQLNIQASPKVRLSLANEALLPTLICDIAGYYPLDVVVTWTREELGGSPAQVSGASFSSLRQSVAGTYSISSSLTAEPGSAGATYTCQVTHISLEEPLGASTQVVPPERRTALGVIFASSLFLLALMFLGLQRRQAPTGLGLLQAERWETTSCADTQSSHLHEDRTARVSQPS

SEQ ID NO: 850764 - protein, 275 aa, Homo sapiens [sequence omitted]

SEQ ID NO: 850765 - protein, 468 aa, Homo sapiens; identical to SEQ ID NO: 850754

SEQ ID NO: 850766 - protein, 89 aa, Homo sapiens
MTPQLEGGGRKQVWSSFLGKAVLTPAFVCREPHPAEGQWRAVDVVLDCFLVKDGAHRGALASSEDRARASLVLKQVPVLDDGSLEDFTD

SEQ ID NO: 850767 - protein, 333 aa, Homo sapiens
MIWRSRAGAELFSLMALWEWIALSLHCWVLAVAAVSDQHATSPFDWLLSDKGPFHRSQEYTDFVDRSRQGFSTRYKIYREFGRWKVNNLAVERRNFLGSPLPLAPEFFRNIRLLGRRPTLQQITENLIKKYGTHFLLSATLGGEESLTIFVDKRKLSKRAEGSDSTTNSSSVTLETLHQLAASYFIDRDSTLRRLHHIQIASTAIKVTETRTGPLGCSNYDNLDSVSSVLVQSPENKIQLQGLQVLLPDYLQERFVQAALSYIACNSEGEFICKENDCWCHCGPKFPECNCPSMDIQAMEENLLRITETWKAYNSDFEESGLKFKSCYTLHRQ

SEQ ID NO: 850768 - protein, 597 aa, Homo sapiens
MIWRSRAGAELFSLMALWEWIALSLHCWVLAVAAVSDQHATSPFDWLLSDKGPFHRSQEYTDFVDRSRQGFSTRYKIYREFGRWKVNNLAVERRNFLGSPLPLAPEFFRNIRLLGRRPTLQQITENLIKKYGTHFLLSATLGGEESLTIFVDKRKLSKRAEGSDSTTNSSSVTLETLHQLAASYFIDRDSTLRRLHHIQIASTAIKVTETRTGPLGCSNYDNLDSVSSVLVQSPENKIQLQGLQVLLPDYLQERFVQAALSYIACNSEGEFICKENDCWCHCGPKFPECNCPSMDIQAMEENLLRITETWKAYNSDFEESDEFKLFMKRLPMNYFLNTSTIMHLWTMDSNFQRRYEQLENSMKQLFLKAQKIVHKLFSLSKRCHKQPLISLPRQRTSTYWLTRIQSFLYCNENGLLGSFSEETHSCTCPNDQVVCTAFLPCTVGDASACLTCAPDNRTRCGTCNTGYMLSQGLCKPEVAESTDHYIGFETDLQDLEMKYLLQKTDRRIEVHAIFISNDMRLNSWFDPSWRKRMLLTLKSNKYKSSLVHMILGLSLQICLTKNSTLEPVLAVYVNPFGGSHSESWFMPVNENSFPDWE

SEQ ID NO: 850769 - protein, 597 aa, Homo sapiens; identical to SEQ ID NO: 850768

SEQ ID NO: 850770 - protein, 78 aa, Homo sapiens
ESANYFPRLHATECKRVTQVLWLGFSHRLQLKTNNINNMNQDELPVSAGARVTERDLRSLEGAVARFLVVEPCTQREW

SEQ ID NO: 850771 - protein, 753 aa, Homo sapiens
MRPVSVWQWSPWGLLLCLLCSSCLGSPSPSTGPEKKAGSQGLRFRLAGFPRKPYEGRVEIQRAGEWGTICDDDFTLQAAHILCRELGFTEATGWTHSAKYGPGTGRIWLDNLSCSGTEQSVTECASRGWGNSDCTHDEDAGVICKDQRLPGFSDSNVIEVEHHLQVEEVRIRPAVGWGRRPLPVTEGLVEVRLPDGWSQVCDKGWSAHNSHVVCGMLGFPSEKRVNAAFYRLLAQRQQHSFGLHGVACVGTEAHLSLCSLEFYRANDTARCPGGGPAVVSCVPGPVYAASSGQKKQQQSKPQGEARVRLKGGAHPGEGRVEVLKASTWGTVCDRKWDLHAASVVCRELGFGSAREALSGARMGQGMGAIHLSEVRCSGQELSLWKCPHKNITAEDCSHSQDAGVRCNLPYTGAETRIRLSGGRSQHEGRVEVQIGGPGPLRWGLICGDDWGTLEAMVACRQLGLGYANHGLQETWYWDSGNITEVVMSGVRCTGTELSLDQCAHHGTHITCKRTGTRFTAGVICSETASDLLLHSALVQETAYIEDRPLHMLYCAAEENCLASSARSANWPYGHRRLLRFSSQIHNLGRADFRPKAGRHSWVWHECHGHYHSMDIFTHYDILTPNGTKVAEGHKASFCLEDTECQEDVSKRYECANFGEQGITVGCWDLYRHDIDCQWIDITDVKPGNYILQVVINPNFEVAESDFTNNAMKCNCKYDGHRIWVHNCHIGDAFSEEANRRFERYPGQTSNQII

SEQ ID NO: 850772 - protein, 624 aa, Homo sapiens
MRPVSVWQWSPWGLLLCLLCSSCLGSPSPSTGPEKKAGSQGLRFRLAGFPRKPYEGRVEIQRAGEWGTICDDDFTLQAAHILCRELGFTEATGWTHSAKYGPGTGRIWLDNLSCSGTEQSVTECASRGWGNSDCTHDEDAGVICKDQRLPGFSDSNVIEVEHHLQVEEVRIRPAVGWGRRPLPVTEGLVEVRLPDGWSQVCDKGWSAHNSHVVCGMLGFPSEKRVNAAFYRPVSVYKGGAHPGEGRVEVLKASTWGTVCDRKWDLHAASVVCRELGFGSAREALSGARMGQGMGAIHLSEVRCSGQELSLWKCPHKNITAEDCSHSQDAGVRCNLPYTGAETRETWYWDSGNITEVVMSGVRCTGTELSLDQCAHHGTHITCKRTGTRFTAGVICSETASDLLLHSALVQETAYIEDRPLHMLYCAAEENCLASSARSANWPYGHRRLLRFSSQIHNLGRADFRPKAGRHSWVWHECHGHYHSMDIFTHYDILTPNGTKVAEGHKASFCLEDTECQEDVSKRYECANFGEQGITVGCWDLYRHDIDCQWIDITDVKPGNYILQVVINPNFEVAESDFTNNAMKCNCKYDGHRIWVHNCHIGDAFSEEANRRFERYPGQTSNQII

SEQ ID NO: 850773 - protein, 654 aa, Homo sapiens
MRPVSVWQWSPWGLLLCLLCSSCLGSPSPSTGPEKKAGSQGLRFRLAGFPRKPYEGRVEIQRAGEWGTICDDDFTLQAAHILCRELGFTEATGWTHSAKYGPGTGRIWLDNLSCSGTEQSVTECASRGWGNSDCTHDEDAGVICKDQRLPGFSDSNVIEVEHHLQVEEVRIRPAVGWGRRPLPVTEGLVEVRLPDGWSQVCDKGWSAHNSHVVCGMLGFPSEKRVNAAFYRPVSVYKGGAHPGEGRVEVLKASTWGTVCDRKWDLHAASVVCRELGFGSAREALSGARMGQGMGAIHLSEVRCSGQELSLWKCPHKNITAEDCSHSQDAGVRCNLPYTGAETRETWYWDSGNITEVVMSGVRCTGTELSLDQCAHHGTHITCKRTGTRFTAGVICSETASDLLLHSALVQETAYIEDRPLHMLYCAAEENCLASSARSANWPYGHRRLLRFSSQIHNLGRADFRPKAGRHSWVWHECHGHYHSMDIFTHYDILTPNGTKVAEGHKASFCLEDTECQEDVSKRYECANFGEQGITVGCWDLYRHDIDCQWIDITDVKPGNYILQVVINPNFEVAESDFTNNAMKCNCKYDGHRIWVHNCHIAPLAPNGRGLRLPLPQELTKKPMSATALIRPCTMDVELSSRSFHPPSEASCQYL

SEQ ID NO: 850774 - protein, 324 aa, Homo sapiens
WEGKGSRGCCLKACVLGRGLRNESLWPQMLDPGPYRNICICPQETWYWDSGNITEVVMSGVRCTGTELSLDQCAHHGTHITCKRTGTRFTAGVICSETASDLLLHSALVQETAYIEDRPLHMLYCAAEENCLASSARSANWPYGHRRLLRFSSQIHNLGRADFRPKAGRHSWVWHECHGHYHSMDIFTHYDILTPNGTKVAEGHKASFCLEDTECQEDVSKRYECANFGEQGITVGCWDLYRHDIDCQWIDITDVKPGNYILQVVINPNFEVAESDFTNNAMKCNCKYDGHRIWVHNCHIGDAFSEEANRRFERYPGQTSNQII

SEQ ID NO: 850775 - protein, 70 aa, Homo sapiens
SHHQAADQPYREKWTERKEGVQSLVQGHMHTLPIPISHCSLSLTVCRGAQDDFMDEYTMLNIGKAWFSKL

SEQ ID NO: 850776 - protein, 713 aa, Homo sapiens
MLLATLLLLLLGGALAHPDRIIFPNHACEDPPAVLLEVQGTLQRPLVRDSRTSPANCTWLILGSKEQTVTIRFQKLHLACGSERLTLRSPLQPLISLCEAPPSPLQLPGGNVTITYSYAGARAPMGQGFLLSYSQDWLMCLQEEFQCLNHRCVSAVQRCDGVDACGDGSDEAGCSSDPFPGLTPRPVPSLPCNVTLEDFYGVFSSPGYTHLASVSHPQSCHWLLDPHDGRRLAVRFTALDLGFGDAVHVYDGPGPPESSRLLRSLTHFSNGKAVTVETLSGQAVVSYHTVAWSNGRGFNATYHVRGYCLPWDRPCGLGSGLGAGEGLGERCYSEAQRCDGSWDCADGTDEEDCPGCPPGHFPCGAAGTSGATACYLPADRCNYQTFCADGADERRCRHCQPGNFRCRDEKCVYETWVCDGQPDCADGSDEWDCSYVLPRKVITAAVIGSLVCGLLLVIALGCTCKLYAIRTQEYSIFAPLSRMEAEIVQQQAPPSYGQLIAQGAIPPVEDFPTENPNDNSVLGNLRSLLQILRQDMTPGGGPGARRRQRGRLMRRLVRRLRRWGLLPRTNTPARASEARSQVTPSAAPLEALDGGTGPAREGGAVGGQDGEQAPPLPIKAPLPSASTSPAPTTVPEAPGPLPSLPLEPSLLSGVVQALRGRLLPSLGPPGPTRSPPGPHTAVLALEDEDDVLLVPLAEPGVWVAEAEDEPLLT

SEQ ID NO: 850777 - protein, 713 aa, Homo sapiens; identical to SEQ ID NO: 850776

SEQ ID NO: 850778 - protein, 683 aa, Homo sapiens
PESSRLLRSLTHFSNGKAVTVETLSGQAVVSYHTVAWSNGRGFNATYHVRGYCLPWDRPCGLGSGLGAGEGLCERCYSGGNVTITYSYAGARAPMGQGFLLSYSQDWLMCLQEEFQCLNHRCVSAVQRCDGVDACGDGSDEAGCSSDPFPGLTPRPVPSLPCNVTLEDFYGVFSSPGYTHLASVSHPQSCHWLLDPHDGRRLAVRFTALDLGFGDAVHVYDGPGPPESSRLLRSLTHFSNGKAVTVETLSGQAVVSYHTVAWSNGRGFNATYHVRGYCLPWDRPCGLGSGLGAGEGLGERCYSEAQRCDGSWDCADGTDEEDCPGCPPGHFPCGAAGTSGATACYLPADRCNYQTFCADGADERRCRHCQPGNFRCRDEKCVYETWVCDGQPDCADGSDEWDCSYVLPRKVITAAVIGSLVCGLLLVIALGCTCKLYAIRTQEYSIFAPLSRMEAEIVQQQAPPSYGQLIAQGAIPPVEDFPTENPNDNSVLGNLRSLLQILRQDMTPGGGPGARRRQRGRLMRRLVRRLRRWGLLPRTNTPARASEARSQVTPSAAPLEALDGGTGPAREGGAVGGQDGEQAPPLPIKAPLPSASTSPAPTTVPEAPGPLPSLPLEPSLLSGVVQALRGRLLPSLGPPGPTRSPPGPHTAVLALEDEDDVLLVPLAEPGVWVAEAEDEPLLT

SEQ ID NO: 850779 - protein, 557 aa, Homo sapiens
GLLWGLLLSWIYTPSLSLPPPVLQGDIARQGGDGSCNVTLEDFYGVFSSPGYTHLASVSHPQSCHWLLDPHDGRRLAVRFTALDLGFGDAVHVYDGPGPPESSRLLRSLTHFSNGKAVTVETLSGQAVVSYHTVAWSNGRGFNATYHVRGYCLPWDRPCGLGSGLGAGEGLGERCYSEAQRCDGSWDCADGTDEEDCPGCPPGHFPCGAAGTSGATACYLPADRCNYQTFCADGADERRCRHCQPGNFRCRDEKCVYETWVCDGQPDCADGSDEWDCSYVLPRKVITAAVIGSLVCGLLLVIALGCTCKLYAIRTQEYSIFAPLSRMEAEIVQQQAPPSYGQLIAQGAIPPVEDFPTENPNDNSVLGNLRSLLQILRQDMTPGGGPGARRRQRGRLMRRLVRRLRRWGLLPRTNTPARASEARSQVTPSAAPLEALDGGTGPAREGGAVGGQDGEQAPPLPIKAPLPSASTSPAPTTVPEAPGPLPSLPLEPSLLSGVVQALRGRLLPSLGPPGPTRSPPGPHTAVLALEDEDDVLLVPLAEPGVWVAEAEDEPLLT

SEQ ID NO: 850780 - protein, 329 aa, Homo sapiens
EAGLCSYRRPRKCPPWGEAPMISLSVVSCKGQVQILKAVSREEGPQMTFGKAMAQLQLAWPGCGSGRTVQAEVVYSGRELPVTEQSSFLLSIFAPLSRMEAEIVQQQAPPSYGQLIAQGAIPPVEDFPTENPNDNSVLGNLRSLLQILRQDMTPGGGPGARRRQRGRLMRRLVRRLRRWGLLPRTNTPARASEARSQVTPSAAPLEALDGGTGPAREGGAVGGQDGEQAPPLPIKAPLPSASTSPAPTTVPEAPGPLPSLPLEPSLLSGVVQALRGRLLPSLGPPGPTRSPPGPHTAVLALEDEDDVLLVPLAEPGVWVAEAEDEPLLT

SEQ ID NO: 850781 - protein, 114 aa, Homo sapiens
PPRLLQPLGGRGYRLGKGRGAGPSHLFPSPAPTTVPEAPGPLPSLPLEPSLLSGVVQALRGRLLPSLGPPGPTRSPPGPHTAVLALEDEDDVLLVPLAEPGVWVAEAEDEPLLT

SEQ ID NO: 850782 - protein, 713 aa, Homo sapiens; identical to SEQ ID NO: 850776

SEQ ID NO: 850783 - protein, 713 aa, Homo sapiens; identical to SEQ ID NO: 850776

SEQ ID NO: 850784 - protein, 532 aa, Homo sapiens
MLLATLLLLLLGGALAHPDRIIFPNHACEDPPAVLLEVQGTLQRPLVRDSRTSPANCTWLILGSKEQTVTIRFQKLHLACGSERLTLRSPLQPLISLCEAPPSPLQLPGGNVTITYSYAGARAPMGQGFLLSYSQDWLMCLQEEFQCLNHRCVSAVQRCDGVDACGDGSDEAGCSSDPFPGLTPRPVPSLPCNVTLEDFYGVFSSPGYTHLASVSHPQSCHWLLDPHDGRRLAVRFTALDLGFGDAVHVYDGPGPPESSRLLRSLTHFSNGKAVTVETLSGQAVVSYHTVAWSNGRGFNATYHVRGYCLPWDRPCGLGSGLGAGEGLGERCYSEAQRCDGSWDCADGTDEEDCPGCPPGHFPCGAAGTSGATACYLPADRCNYQTFCADGADERRCRHCQPGNFRCRDEKCVYETWVCDGQPDCADGSDEWDCSYVLPRKVITAAVIGSLVCGLLLVIALGCTCKLYAIRTQEYSIFAPLSRMEAEIVQQQAPPSYGQLIAQGAIPPVEDFPTENPNDDGGHLGHLLESYPS

SEQ ID NO: 850785 - protein, 299 aa, Homo sapiens
MLLATLLLLLLGGALAHPDRIIFPNHACEDPPAVLLEVQGTLQRPLVRDSRTSPANCTWLILGSKEQTVTIRFQKLHLACGSERLTLRSPLQPLISLCEAPPSPLQLPGGNVTITYSYAGARAPMGQGFLLSYSQDWLMCLQEEFQCLNHRCVSAVQRCDGVDACGDGSDEAGCSSDPFPGLTPRPVPSLPCNVTLEDFYGVFSSPGYTHLASVSHPQSCHWLLDPHDGRRLAVRFTALDLGFGDAVHVYDGPGPPESSRLLRSLTHFSNGKAVTVETLSGQAVVSYHATTIWVAVFKK

SEQ ID NO: 850786 - protein, 713 aa, Homo sapiens; identical to SEQ ID NO: 850776

SEQ ID NO: 850787 - protein, 747 aa, Homo sapiens
MWRERAKLEGCNSRLCVGRGRYSAPPCRAQTFGNLKPPSGRGRVGCKGAVYYPCPTFLSPACEDPPAVLLEVQGTLQRPLVRDSRTSPANCTWLILGSKEQTVTIRFQKLHLACGSERLTLRSPLQPLISLCEAPPSPLQLPGGNVTITYSYAGARAPMGQGFLLSYSQDWLMCLQEEFQCLNHRCVSAVQRCDGVDACGDGSDEAGCSSDPFPGLTPRPVPSLPCNVTLEDFYGVFSSPGYTHLASVSHPQSCHWLLDPHDGRRLAVRFTALDLGFGDAVHVYDGPGPPESSRLLRSLTHFSNGKAVTVETLSGQAVVSYHTVAWSNGRGFNATYHVRGYCLPWDRPCGLGSGLGAGEGLGERCYSEAQRCDGSWDCADGTDEEDCPGCPPGHFPCGAAGTSGATACYLPADRCNYQTFCADGADERRCRHCQPGNFRCRDEKCVYETWVCDGQPDCADGSDEWDCSYVLPRKVITAAVIGSLVCGLLLVIALGCTCKLYAIRTQEYSIFAPLSRMEAEIVQQQAPPSYGQLIAQGAIPPVEDFPTENPNDNSVLGNLRSLLQILRQDMTPGGGPGARRRQRGRLMRRLVRRLRRWGLLPRTNTPARASEARSQVTPSAAPLEALDGGTGPAREGGAVGGQDGEQAPPLPIKAPLPSASTSPAPTTVPEAPGPLPSLPLEPSLLSGVVQALRGRLLPSLGPPGPTRSPPGPHTAVLALEDEDDVLLVPLAEPGVWVAEAEDEPLLT

SEQ ID NO: 850788 - protein, 713 aa, Homo sapiens; identical to SEQ ID NO: 850776

SEQ ID NO: 850789 - protein, 231 aa, Homo sapiens
MEAEIVQQQAPPSYGQLIAQGAIPPVEDFPTENPNDNSVLGNLRSLLQILRQDMTPGGGPGARRRQRGRLMRRLVRRLRRWGLLPRTNTPARASEARSQVTPSAAPLEALDGGTGPAREGGAVGGQDGEQAPPLPIKAPLPSASTSPAPTTVPEAPGPLPSLPLEPSLLSGVVQALRGRLLPSLGPPGPTRSPPGPHTAVLALEDEDDVLLVPLAEPGVWVAEAEDEPLLT

SEQ ID NO: 850790 - protein, 578 aa, Homo sapiens
MLLATLLLLLLGGALAHPDRIIFPNHACEDPPAVLLEVQGTLQRPLVRDSRTSPANCTWLILGSKEQTVTIRFQKLHLACGSERLTLRSPLQPLISLCEAPPSPLQLPGGNVTITYSYAGARAPMGQGFLLSYSQDWLMCLQEEFQCLNHRCVSAVQRCDGVDACGDGSDEAGCSSDPFPGLTPRPVPSLPCNVTLEDFYGVFSSPGYTHLASVSHPQSCHWLLDPHDGRRLAVRFTALDLGFGDAVHVYDGPGPPESSRLLRSLTHFSNGKAVTVETLSGQAVVSYHTVAWSNGRGFNATYHVRGYCLPWDRPCGLGSGLGAGEGLGERCYSEAQRCDGSWDCADGTDEEDCPGCPPGHFPCGAAGTSGATACYLPADRCNYQTFCADGADERRCRHCQPGNFRCRDEKCVYETWVCDGQPDCADGSDEWDCSYVLPRKVITAAVIGSLVCGLLLVIALGCTCKLYAIRTQEYSIFAPLSRMEAEIVQQQAPPSYGQLIAQGAIPPVEDFPTENPNDNSVLGNLRSLLQILRQDMTPGGGPGARRRQRGRLMRRLQSWPWKMRTMCYWCHWLSRGCG

SEQ ID NO: 850791 - protein, 556 aa, Homo sapiens
MLLATLLLLLLGGALAHPDRIIFPNHACEDPPAVLLEVQGTLQRPLVRDSRTSPANCTWLILGSKEQTVTIRFQKLHLACGSERLTLRSPLQPLISLCEAPPSPLQLPGGNVTITYSYAGARAPMGQGFLLSYSQDWLMCLQEEFQCLNHRCVSAVQRCDGVDACGDGSDEAGCSSDPFPGLTPRPVPSLPCNVTLEDFYGVFSSPGYTHLASVSHPQSCHWLLDPHDGRRLAVRFTALDLGFGDAVHVYDGPGPPESSRLLRSLTHFSNGKAVTVETLSGQAVVSYHTVAWSNGRGFNATYHVRGYCLPWDRPCGLGSGLGAGEGLGERCYSEAQRCDGSWDCADGTDEEDCPGCPPGHFPCGAAGTSGATACYLPADRCNYQTFCADGADERRCRHCQPGNFRCRDEKCVYETWVCDGQPDCADGSDEWDCSYVLPRKVITAAVIGSLVCGLLLVIALGCTCKLYAIRTQEYSIFAPLSRMEAEIVQQQAPPSYGQLIAQGAIPPVEDFPTENPNDNSVLGNLRSLLQILRQDMTPGGGPGARRRQRGRLMRRL

SEQ ID NO: 850792 - protein, 713 aa, Homo sapiens; identical to SEQ ID NO: 850776

SEQ ID NO: 850793 - protein, 485 aa, Homo sapiens
MLLATLLLLLLGGALAHPDRIIFPNHACEDPPAVLLEVQGTLQRPLVRDSRTSPANCTWLILGSKEQTVTIRFQKLHLACGSERLTLRSPLQPLISLCEAPPSPLQLPGGNVTITYSYAGARAPMGQGFLLSYSQDWLMCLQEEFQCLNHRCVSAVQRCDGVDACGDGSDEAGCSSDPFPGLTPRPVPSLPCNVTLEDFYGVFSSPGYTHLASVSHPQSCHWLLDPHDGRRLAVRFTALDLGFGDAVHVYDGPGPPESSRLLRSLTHFSNGKAVTVETLSGQAVVSYHTVAWSNGRGFNATYHVRGYCLPWDRPCGLGSGLGAGEGLGERCYSEAQRCDGSWDCADGTDEEDCPGCPPGHFPCGAAGTSGATACYLPADRCNYQTFCADGADERRCRHCQPGNFRCRDEKCVYETWVCDGQPDCADGSDEWDCSYVLPRKVITAAVIGSLVCGLLLVIALGCTCKLYAIRTQEYRSVGVGLAVEE

SEQ ID NO: 850794 - protein, 111 aa, Homo sapiens
TTALQPDRARLHLKKKERKANSAADSGYRANEQQLPLHAVTAGIIGICYIFNTSYLYHATMASVANTYRPVYSFLSLLSNKLLVFSLLINDLRLPGIKTTLPSLLCSWPGN

SEQ ID NO: 850795 - protein, 158 aa, Homo sapiens
MKFGCLSFRQPYAGFVLNGIKTVETRWRPLLSSQRNCTIAVHIAHRDWEGDAWRELLVERLGMTPAQIQALLRKGEKFGRGVIAGLVDIGETLQCPEDLTPDEVVELENQAVLTNLKQKYLTVISNPRWLLEPIPRKGGKDVFQVDIPEHLIPLGHEV

SEQ ID NO: 850796 - protein, 158 aa, Homo sapiens; identical to SEQ ID NO: 850795

SEQ ID NO: 850797 - protein, 158 aa, Homo sapiens; identical to SEQ ID NO: 850795

SEQ ID NO: 850798 - protein, 158 aa, Homo sapiens; identical to SEQ ID NO: 850795

SEQ ID NO: 850799 - protein, 158 aa, Homo sapiens; identical to SEQ ID NO: 850795

SEQ ID NO: 850800 - protein, 158 aa, Homo sapiens; identical to SEQ ID NO: 850795

SEQ ID NO: 850801 - protein, 158 aa, Homo sapiens; identical to SEQ ID NO: 850795

SEQ ID NO: 850802 - protein, 205 aa, Homo sapiens
MIRHSLLWTVKQLSPPYSGPPQRLHGMDLSQPNPSPFRYGRPGALAKMKFGCLSFRQPYAGFVLNGIKTVETRWRPLLSSQRNCTIAVHIAHRDWEGDAWRELLVERLGMTPAQIQALLRKGEKFGRGVIAGLVDIGETLQCPEDLTPDEVVELENQAVLTNLKQKYLTVISNPRWLLEPIPRKGGKDVFQVDIPEHLIPLGHEV

SEQ ID NO: 850803 - protein, 34 aa, Homo sapiens
MLGCKNAAQHGEMIFCPAGWCTLWSLTQTGAEGP

SEQ ID NO: 850804 - protein, 34 aa, Homo sapiens; identical to SEQ ID NO: 850803

SEQ ID NO: 850805 - protein, 151 aa, Homo sapiens
MKFGCLSFRQPYAGFVLNGIKTVETRWRPLLSSQRNCTIAVHIAHRDWEGDAWRELLVERLGMTPAQIQALLRKGEKFGRGVIAGLVDIGETLQCPEDLTPDEVVELENQAVLTNLKQKYLTVISNPRWLLEPIPRKGGKDVFQECSRETS

SEQ ID NO: 850806 - protein, 158 aa, Homo sapiens; identical to SEQ ID NO: 850795

SEQ ID NO: 850807 - protein, 158 aa, Homo sapiens; identical to SEQ ID NO: 850795

SEQ ID NO: 850808 - protein, 146 aa, Homo sapiens
MKFGCLSFRQPYAGFVLNGIKTVETRWRPLLSSQRNCTIAVHIAHRDWEGDAWRELLVERLGMTPAQIQALLRKGEKFGRGVIAGLVDIGETLQCPEDLTPDEVVELENQAVLTNLKQKYLTVISNPRWLLEPIPRKGGKDVFQNP

SEQ ID NO: 850809 - protein, 179 aa, Homo sapiens
MDLSQPNPSPFRYGRPGALAKMKFGCLSFRQPYAGFVLNGIKTVETRWRPLLSSQRNCTIAVHIAHRDWEGDAWRELLVERLGMTPAQIQALLRKGEKFGRGVIAGLVDIGETLQCPEDLTPDEVVELENQAVLTNLKQKYLTVISNPRWLLEPIPRKGGKDVFQVDIPEHLIPLGHEV

SEQ ID NO: 850810 - protein, 155 aa, Homo sapiens
MKFGCLSFRQPYAGFVLNGIKTVETRWRPLLSSQRNCTIAVHIAHRDWEGDAWRELLVERLGMTPAQIQALLRKGEKFGRGVIAGLVDIGETLQCPEDLTPDEVVVLDISDRRKQETIKATGGPGRLLKMKFGCLSFRQPYAGFVLNGIKTVETR

SEQ ID NO: 850811 - protein, 140 aa, Homo sapiens
ASYEGSGGGGGRHLGSGRNGGGSVNAPPAFESFLLFEGEKKITINKDTKVPNACLFTINKEDHTLGNIIKSQCDLKDPQVLFAGYKVPHPLEHKIIIRVQTTPDYSPQEAFTNAITDLISELSLLEERFRAIKDKQEGIE

SEQ ID NO: 850812 - protein, 140 aa, Homo sapiens
ASYEGSGGGGGRHLGSGRNGGGSVNAPPAFESFLLFEGEKKITINKDTKVPNACLFTINKEDHTLGNIIKSQCDLKDPQVLFAGYKVPHPLEHKIIIRVQTTPDYSPQEAFTNAITDLISELSLLEERFRTCLLPLRLLP

SEQ ID NO: 850813 - protein, 118 aa, Homo sapiens
PPQPPKVLGLQARATTPGREETGFRLRVGGGEPLLLICGLCVFLGSPLTRTPRYPMPVYSPSTKKTTHWETSLNRKFPVTGSQGLCLMGPSGQSTSSKSSSVSLSYRKSFWGLALGIL

SEQ ID NO: 850814 - protein, 183 aa, Homo sapiens
ASYEGSGGGGGRHLGSGRNGGGSVNAPPAFESFLLFEGEKKITINKDTKVPNACLFTINKEDHTLGNIIKSQCDLKDPQVLFAGYKVPHPLEHKIIIRVQTTPDYSPQEAFTNAITDLISELSLLEERFRVRAGPGGADGVGWTLARVPRPGTALACFFGGPGGEAAVMEEQGLPPQAPGHVD

SEQ ID NO: 850815 - protein, 187 aa, Homo sapiens
PPQPPKVLGLQARATTPGREETGFETQGGRRGAPAPHLWPLCLPRITINKDTKVPNACLFTINKEDHTLGNIIKSQCDLKDPQVLFAGYKVPHPLEHKIIIRVQTTPDYSPQEAFTNAITDLISELSLLEERFRVRAGPGGADGVGWTLARVPRPGTALACFFGGPGGEAAVMEEQGLPPQAPGHVD

SEQ ID NO: 850816 - protein, 140 aa, Homo sapiens
ASYEGSGGGGGRHLGSGRNGGGSVNAPPAFESFLLFEGEKKITINKDTKVPNACLFTINKEDHTLGNIIKSQCDLKDPQVLFAGYKVPHPLEHKIIIRVQTTPDYSPQEAFTNAITDLISELSLLEERFRESLAHRKGTN

SEQ ID NO: 850817 - protein, 140 aa, Homo sapiens; identical to SEQ ID NO: 850812

SEQ ID NO: 850818 - protein, 168 aa, Homo sapiens
ASYEGSGGGGGRHLGSGRNGGGSVNAPPAFESFLLFEGEKKITINKDTKVPNACLFTINKEDHTLGNIIKSQCDLKDPQVLFAGYKVPHPLEHKIIIRVQTTPDYSPQEAFTNAITDLISELSLLEERFRSPHLMVPTLHHPPPPGGGTPRCSAGDSAHSGGAVDGWS

SEQ ID NO: 850819 - protein, 183 aa, Homo sapiens; identical to SEQ ID NO: 850814

SEQ ID NO: 850820 - protein, 139 aa, Homo sapiens
MFFCSDLAATQLGHEARPSHCLSLDLRQCDLKDPQVLFAGYKVPHPLEHKIIIRVQTTPDYSPQEAFTNAITDLISELSLLEERFRVRAGPGGADGVGWTLARVPRPGTALACFFGGPGGEAAVMEEQGLPPQAPGHVD

SEQ ID NO: 850821 - protein, 540 aa, Homo sapiens
MVRTDGHTLSEKRNYQVTNSMFGASRKKFVEGVDSDYHDENMYYSQSSMFPHRSEKDMLASPSTSGQLSQFGASLYGQQSALGLPMRGMSNNTPQLNRSLSQGTQLPSHVTPTTGVPTMSLHTPPSPSRGILPMNPRNMMNHSQVGQGIGIPSRTNSMSSSGLGSPNRSSPSIICMPKQQPSRQPFTVNSMSGFGMNRNQAFGMNNSLSSNIFNGTDGSENVTGLDLSDFPALADRNRREGSGNPTPLINPLAGRAPYVGMVTKPANEQSQDFSIHNEDFPALPGSSYKDPTSSNDDSKSNLNTSGKTTSSTDGPKFPGDKSSTTQNNNQQKKGIQVLPDGRVTNIPQGMVTDQFGMIGLLTFIRAAETDPGMVHLALGSDLTTLGLNLNSPENLYPKFASPWASSPCRPQDIDFHVPSEYLTNIHIRDKLAAIKLGRYGEDLLFYLYYMNGGDVLQLLAAVELFNRDWRYHKEERVWITRAPGMEPTMKTNTYERGTYYFFDCLNWRKVAKEFHLEYDKLEERPHLPSTFNYNPAQQAF

SEQ ID NO: 850822 - protein, 540 aa, Homo sapiens; identical to SEQ ID NO: 850821

SEQ ID NO: 850823 - protein, 540 aa, Homo sapiens; identical to SEQ ID NO: 850821

SEQ ID NO: 850824 - protein, 251 aa, Homo sapiens
MVRTDGHTLSEKRNYQVTNSMFGASRKKFVEGVDSDYHDENMYYSQSSMFPHRSEKDMLASPSTSGQLSQFGASLYGQQSALGLPMRGMSNNTPQLNRSLSQGTQLPSHVTPTTGVPTMSLHTPPSPSRGILPMNPRNMMNHSQVGQGIGIPSRTNSMSSSGLGSPNRSSPSIICMPKQQPSRQPFTVNSMSGFGMNRNQAFGMNNSLSSNIFNGTDGSENVTGLDLSDFPHYQAPAIKIQHQVMMTVNLI

SEQ ID NO: 850825 - protein, 433 aa, Homo sapiens
MVRTDGHTLSEKRNYQVTNSMFGASRKKFVEGVDSDYHDENMYYSQSSMFPHRSEKDMLASPSTSGQLSQFGASLYGQQSALGLPMRGMSNNTPQLNRSLSQGTQLPSHVTPTTGVPTMSLHTPPSPSRGILPMNPRNMMNHSQVGQGIGIPSRTNSMSSSGLGSPNRSSPSIICMPKQQPSRQPFTVNSMSGFGMNRNQAFGMNNSLSSNIFNGTDGSENVTGLDLSDFPALADRNRREGSGNPTPLINPLAGRAPYVGMVTKPANEQSQDFSIHNEDFPALPGSSYKDPTSSNDDSKSNLNTSGKTTSSTDGPKFPGDKSSTTQNNNQQKKGIQVLPDGRVTNIPQGMVTDQFGMIGLLTFIRAAETDPGMVHLALGSDLTTLGLNLNSPENLYPKFASPWASSPCRPQDIGRRIYLCLDLLKRNLQLRIS

SEQ ID NO: 850826 - protein, 531 aa, Homo sapiens
MLKEVAQVTNSMFGASRKKFVEGVDSDYHDENMYYSQSSMFPHRSEKDMLASPSTSGQLSQFGASLYGQQSALGLPMRGMSNNTPQLNRSLSQGTQLPSHVTPTTGVPTMSLHTPPSPSRGILPMNPRNMMNHSQVGQGIGIPSRTNSMSSSGLGSPNRSSPSIICMPKQQPSRQPFTVNSMSGFGMNRNQAFGMNNSLSSNIFNGTDGSENVTGLDLSDFPALADRNRREGSGNPTPLINPLAGRAPYVGMVTKPANEQSQDFSIHNEDFPALPGSSYKDPTSSNDDSKSNLNTSGKTTSSTDGPKFPGDKSSTTQNNNQQKKGIQVLPDGRVTNIPQGMVTDQFGMIGLLTFIRAAETDPGMVHLALGSDLTTLGLNLNSPENLYPKFASPWASSPCRPQDIDFHVPSEYLTNIHIRDKLAAIKLGRYGEDLLFYLYYMNGGDVLQLLAAVELFNRDWRYHKEERVWITRAPGMEPTMKTNTYERGTYYFFDCLNWRKVAKEFHLEYDKLEERPHLPSTFNYNPAQQAF

SEQ ID NO: 850827 - protein, 520 aa, Homo sapiens
MFGASRKKFVEGVDSDYHDENMYYSQSSMFPHRSEKDMLASPSTSGQLSQFGASLYGQQSALGLPMRGMSNNTPQLNRSLSQGTQLPSHVTPTTGVPTMSLHTPPSPSRGILPMNPRNMMNHSQVGQGIGIPSRTNSMSSSGLGSPNRSSPSIICMPKQQPSRQPFTVNSMSGFGMNRNQAFGMNNSLSSNIFNGTDGSENVTGLDLSDFPALADRNRREGSGNPTPLINPLAGRAPYVGMVTKPANEQSQDFSIHNEDFPALPGSSYKDPTSSNDDSKSNLNTSGKTTSSTDGPKFPGDKSSTTQNNNQQKKGIQVLPDGRVTNIPQGMVTDQFGMIGLLTFIRAAETDPGMVHLALGSDLTTLGLNLNSPENLYPKFASPWASSPCRPQDIDFHVPSEYLTNIHIRDKLAAIKLGRYGEDLLFYLYYMNGGDVLQLLAAVELFNRDWRYHKEERVWITRAPGMEPTMKTNTYERGTYYFFDCLNWRKVAKEFHLEYDKLEERPHLPSTFNYNPAQQAF

SEQ ID NO: 850828 - protein, 455 aa, Homo sapiens
MRGMSNNTPQLNRSLSQGTQLPSHVTPTTGVPTMSLHTPPSPSRGILPMNPRNMMNHSQVGQGIGIPSRTNSMSSSGLGSPNRSSPSIICMPKQQPSRQPFTVNSMSGFGMNRNQAFGMNNSLSSNIFNGTDGSENVTGLDLSDFPALADRNRREGSGNPTPLINPLAGRAPYVGMVTKPANEQSQDFSIHNEDFPALPGSSYKDPTSSNDDSKSNLNTSGKTTSSTDGPKFPGDKSSTTQNNNQQKKGIQVLPDGRVTNIPQGMVTDQFGMIGLLTFIRAAETDPGMVHLALGSDLTTLGLNLNSPENLYPKFASPWASSPCRPQDIDFHVPSEYLTNIHIRDKLAAIKLGRYGEDLLFYLYYMNGGDVLQLLAAVELFNRDWRYHKEERVWITRAPGMEPTMKTNTYERGTYYFFDCLNWRKVAKEFHLEYDKLEERPHLPSTFNYNPAQQAF

SEQ ID NO: 850829 - protein, 403 aa, Homo sapiens
MVRTDGHTLSEKRNYQVTNSMFGASRKKFVEGVDSDYHDENMYYSQSSMFPHRSEKDMLASPSTSGQLSQFGASLYGQQNGSENVTGLDLSDFPALADRNRREGSGNPTPLINPLAGRAPYVGMVTKPANEQSQDFSIHNEDFPALPGSSYKDPTSSNDDSKSNLNTSGKTTSSTDGPKFPGDKSSTTQNNNQQKKGIQVLPDGRVTNIPQGMVTDQFGMIGLLTFIRAAETDPGMVHLALGSDLTTLGLNLNSPENLYPKFASPWASSPCRPQDIDFHVPSEYLTNIHIRDKLAAIKLGRYGEDLLFYLYYMNGGDVLQLLAAVELFNRDWRYHKEERVWITRAPGMEPTMKTNTYERGTYYFFDCLNWRKVAKEFHLEYDKLEERPHLPSTFNYNPAQQAF

SEQ ID NO: 850830 - protein, 394 aa, Homo sapiens
MLKEVAQVTNSMFGASRKKFVEGVDSDYHDENMYYSQSSMFPHRSEKDMLASPSTSGQLSQFGASLYGQQNGSENVTGLDLSDFPALADRNRREGSGNPTPLINPLAGRAPYVGMVTKPANEQSQDFSIHNEDFPALPGSSYKDPTSSNDDSKSNLNTSGKTTSSTDGPKFPGDKSSTTQNNNQQKKGIQVLPDGRVTNIPQGMVTDQFGMIGLLTFIRAAETDPGMVHLALGSDLTTLGLNLNSPENLYPKFASPWASSPCRPQDIDFHVPSEYLTNIHIRDKLAAIKLGRYGEDLLFYLYYMNGGDVLQLLAAVELFNRDWRYHKEERVWITRAPGMEPTMKTNTYERGTYYFFDCLNWRKVAKEFHLEYDKLEERPHLPSTFNYNPAQQAF

SEQ ID NO: 850831 - protein, 520 aa, Homo sapiens
MVRTDGHTLSEKRNYQVTNSMFGASRKKFVEGVDSDYHDENMYYSQSSMFPHRSEKDMLASPSTSGQLSQFGASLYGQQSALGLPMRGMSNNTPQLNRSLSQGTQLPSHVTPTTGVPTMSLHTPPSPSRGILPMNPRNMMNHSQVGQGIGIPSRTNSMSSSGLGSPNRSSPSIICMPKQQPSRQPFTVNSMSGFGMNRNQAFGMNNSLSSNIFNGTDGSENVTGLDLSDFPALADRNRREGSGNPTPLINPLAGRAPYVGMVTKPANEQSQDFSIHNEDFPALPGSSYKDPTSSNDDSKSNLNTSGKTTSSTDGPKFPGDKSSTTQNNNQQKKGIQVLPDGRVTNIPQGMVTDQFGMIGLLTFIRAAETDPGMVHLALGSDLTTLGLNLNSPENLYPKFASPWASSPCRPQDIDFHVPSEYLTNIHIRDKLAAIKLGRYGEDLLFYLYYMNGGDVLQLLAAVELFNRDWRYHKEERVWITRAPGMEPTMKTNTYERGTYYFFDCLNWRKVAKSSIWNMTN

SEQ ID NO: 850832 - protein, 521 aa, Homo sapiens
MVRTDGHTLSEKRNYQVTNSMFGASRKKFVEGVDSDYHDENMYYSQSSMFPHRSEKDMLASPSTSGQLSQFGASLYGQQSALGLPMRGMSNNTPQLNRSLSQGTQLPSHVTPTTGVPTMSLHTPPSPSRGILPMNPRNMMNHSQVGQGIGIPSRTNSMSSSGLGSPNRSSPSIICMPKQQPSRQPFTVNSMSGFGMNRNQAFGMNNSLSSNIFNGTDGSENVTGLDLSDFPALADRNRREGSGNPTPLINPLAGRAPYVGMVTKPANEQSQDFSIHNEDFPALPGSSYKDPTSSNDDSKSNLNTSGKTTSSTDGPKFPGDKSSTTQNNNQQKKGIQVLPDGRVTNIPQGMVTDQFGMIGLLTFIRAAETDPGMVHLALGSDLTTLGLNLNSPENLYPKFASPWASSPCRPQDIDFHVPSEYLTNIHIRDKLAAIKLGRYGEDLLFYLYYMNGGDVLQLLAAVELFNRDWRYHKEERVWITRAPGMEPTMKTNTYERGTYYFFDCLNWRKVAKVYFFPCANV

SEQ ID NO: 850833 - protein, 134 aa, Homo sapiens
AAPTTTKLAAVRTEYLTNIHIRDKLAAIKLGRYGEDLLFYLYYMNGGDVLQLLAAVELFNRDWRYHKEERVWITRAPGMEPTMKTNTYERGTYYFFDCLNWRKVAKEFHLEYDKLEERPHLPSTFNYNPAQQAF

SEQ ID NO: 850834 - protein, 540 aa, Homo sapiens; identical to SEQ ID NO: 850821

SEQ ID NO: 850835 - protein, 475 aa, Homo sapiens
MVRTDGHTLSEKRNYQVTNSMFGASRKKFVEGVDSDYHDENMYYSQSSMFPHRSEKDMLASPSTSGQLSQFGASLYGQQSALGLPMRGMSNNTPQLNRSLSQGTQLPSHVTPTTGVPTMSLHTPPSPSRGILPMNPRNMMNHSQVGQGIGIPSRTNSMSSSGLGSPNRSSPSIICMPKQQPSRQPFTVNSMSGFGMNRNQAFGMNNSLSSNIFNGTDGSENVTGLDLSDFPALADRNRREGSGNPTPLINPLAGRAPYVGMVTKPANEQSQDFSIHNEDFPALPGSSYKDPTSSNDDSKSNLNTSGKTTSSTDGPKFPGDKSSTTQNNNQQKKGIQVLPDGRVTNIPQGMVTDQFGMIGLLTFIRAAETDPGMVHLALGSDLTTLGLNLNSPENLYPKFASPWASSPCRPQDIDFHVPSEYLTNIHIRDKLAAIKLGRYGEDLLFYLYYMNGGDVLQLLAAVELYVQSILITFVL

SEQ ID NO: 850836 - protein, 472 aa, Homo sapiens
MVRTDGHTLSEKRNYQVTNSMFGASRKKFVEGVDSDYHDENMYYSQSSMFPHRSEKDMLASPSTSGQLSQFGASLYGQQSALGLPMRGMSNNTPQLNRSLSQGTQLPSHVTPTTGVPTMSLHTPPSPSRGILPMNPRNMMNHSQVGQGIGIPSRTNSMSSSGLGSPNRSSPSIICMPKQQPSRQPFTVNSMSGFGMNRNQAFGMNNSLSSNIFNGTDGSENVTGLDLSDFPALADRNRREGSGNPTPLINPLAGRAPYVGMVTKPANEQSQDFSIHNEDFPALPGSSYKDPTSSNDDSKSNLNTSGKTTSSTDGPKFPGDKSSTTQNNNQQKKGIQVLPDGRVTNIPQGMVTDQFGMIGLLTFIRAAETDPGMVHLALGSDLTTLGLNLNSPENLYPKFASPWASSPCRPQDIDFHVPSEYLTNIHIRDKLAAIKLGRYGEDLLFYLYYMNGGDVLQLLAAVELSSIWNMTN

SEQ ID NO: 850837 - protein, 455 aa, Homo sapiens; identical to SEQ ID NO: 850828

SEQ ID NO: 850838 - protein, 479 aa, Homo sapiens
MVRTDGHTLSEKRNYQVTNSMFGASRKKFVEGVDSDYHDENMYYSQSSMFPHRSEKDMLASPSTSGQLSQFGASLYGQQSALGLPMRGMSNNTPQLNRSLSQGTQLPSHVTPTTGVPTMSLHTPPSPSSMSGFGMNRNQAFGMNNSLSSNIFNGTDGSENVTGLDLSDFPALADRNRREGSGNPTPLINPLAGRAPYVGMVTKPANEQSQDFSIHNEDFPALPGSSYKDPTSSNDDSKSNLNTSGKTTSSTDGPKFPGDKSSTTQNNNQQKKGIQVLPDGRVTNIPQGMVTDQFGMIGLLTFIRAAETDPGMVHLALGSDLTTLGLNLNSPENLYPKFASPWASSPCRPQDIDFHVPSEYLTNIHIRDKLAAIKLGRYGEDLLFYLYYMNGGDVLQLLAAVELFNRDWRYHKEERVWITRAPGMEPTMKTNTYERGTYYFFDCLNWRKVAKEFHLEYDKLEERPHLPSTFNYNPAQQAF

SEQ ID NO: 850839 - protein, 280 aa, Homo sapiens
MVTKPANEQSQDFSIHNEDFPALPGSSYKDPTSSNDDSKSNLNTSGKTTSSTDGPKFPGDKSSTTQNNNQQKKGIQVLPDGRVTNIPQGMVTDQFGMIGLLTFIRAAETDPGMVHLALGSDLTTLGLNLNSPENLYPKFASPWASSPCRPQDIDFHVPSEYLTNIHIRDKLAAIKLGRYGEDLLFYLYYMNGGDVLQLLAAVELFNRDWRYHKEERVWITRAPGMEPTMKTNTYERGTYYFFDCLNWRKVAKEFHLEYDKLEERPHLPSTFNYNPAQQAF

SEQ ID NO: 850840 - protein, 475 aa, Homo sapiens; identical to SEQ ID NO: 850835

SEQ ID NO: 850841 - protein, 169 aa, Homo sapiens
  misc_feature (5)..(5): Xaa can be any naturally occurring amino acid
DPGGXLQGGDLSTLGLNLNSPENLYPKFASPWASSPCRPQDIDFHVPSEYLTNIHIRDKLAAIKLGRYGEDLLFYLYYMNGGDVLQLLAAVELFNRDWRYHKEERVWITRAPGMEPTMKTNTYERGTYYFFDCLNWRKVAKEFHLEYDKLEERPHLPSTFNYNPAQQAF

SEQ ID NO: 850842 - protein, 388 aa, Homo sapiens
MAVSVTPIRDTKWLTLEVCREFQRGTCSRPDTECKFAHPSKSCQVENGRVIACFDSLKGRCSRENCKYLHPPPHLKTQLEINGRNNLIQQKNMAMLAQQMQLANAMMPGAPLQPVPMFSVAPSLATNASAAAFNPYLGPVSPSLVPAEILPTAPMLVTGNPGVPVPAAAAAAAQKLMRTDRLEVCREYQRGNCNRGENDCRFAHPADSTMIDTNDNTVTVCMDYIKGRCSREKCKYFHPPAHLQAKIKAAQYQVNQAAAAQAAATAAAMTQSAVKSLKRPLEATFDLGIPQAVLPPLPKRPALEKTNGATAVFNTGIFQYQQALANMQLQQHTAFLPPVPMVHGATPATVSAATTSATSVPFAATATANQIPIISAEHLTSHKYVTQM

SEQ ID NO: 850843 - protein, 388 aa, Homo sapiens; identical to SEQ ID NO: 850842

SEQ ID NO: 850844 - protein, 388 aa, Homo sapiens; identical to SEQ ID NO: 850842

SEQ ID NO: 850845 - protein, 382 aa, Homo sapiens
MAVSVTPIRDTKWLTLEVCREFQRGTCSRPDTECKFAHPSKSCQVENGRVIACFDSLKGRCSRENCKYLHPPPHLKTQLEINGRNNLIQQKNMAMLAQQMQLANAMMPGAPLQPVPMFSVAPSLATNASAAAFNPYLGPVSPSLVPAEILPTAPMLVTGNPGVPVPAAAAAAAQKLMRTDRLEVCREYQRGNCNRGENDCRFAHPADSTMIDTNDNTVTVCMDYIKGRCSREKCKYFHPPAHLQAKIKAAQYQVNQAAAAQAAATAAAMGIPQAVLPPLPKRPALEKTNGATAVFNTGIFQYQQALANMQLQQHTAFLPPGSILCMTPATSVVPMVHGATPATVSAATTSATSVPFAATATANQIPIISAEHLTSHKYVTQM

SEQ ID NO: 850846 - protein, 340 aa, Homo sapiens
MAVSVTPIRDTKWLTLEVCREFQRGTCSRPDTECKFAHPSKSCQVENGRVIACFDSLKGRCSRENCKYLHPPPHLKTQLEINGRNNLIQQKNMAMLAQQMQLANAMMPGAPLQPVPMFSVAPSLATNASAAAFNPYLGPVSPSLVPAEILPTAPMLVTGNPGVPVPAAAAAAAQKLMRTDRLEVCREYQRGNCNRGENDCRFAHPADSTMIDTNDNTVTVCMDYIKGRCSREKCKYFHPPAHLQAKIKAAQYQVNQAAAAQAAATAAAMFPWCTVLRQPLCPQQQHLPQVFPSLQQPQPTSPILDASTLLGATSCPAAAGKMIPIISAEHLTSHKYVTQM

SEQ ID NO: 850847 - protein, 382 aa, Homo sapiens; identical to SEQ ID NO: 850845

SEQ ID NO: 850848 - protein, 86 aa, Homo sapiens
RKCSFRCNSHSHPDTHTSLNNHAKEERTVCLVRVKDEVISHIVYIVKQHTQKFLSHKTSTYCMLTRRKDNIFRKSTAHCCLYTLYI

SEQ ID NO: 850849 - protein, 302 aa, Homo sapiens
MAVSVTPIRDTKWLTLEVCREFQRGTCSRPDTECKFAHPSKSCQVENGRVIACFDSLKGRCSRENCKYLHPPPHLKTQLEINGRNNLIQQKNMAMLAQQMQLANAMMPGAPLQPVVCREYQRGNCNRGENDCRFAHPADSTMIDTNDNTVTVCMDYIKGRCSREKCKYFHPPAHLQAKIKAAQYQVNQAAAAQAAATAAAMGIPQAVLPPLPKRPALEKTNGATAVFNTGIFQYQQALANMQLQQHTAFLPPVPMVHGATPATVSAATTSATSVPFAATATANQIPIISAEHLTSHKYVTQM

SEQ ID NO: 850850 - protein, 302 aa, Homo sapiens; identical to SEQ ID NO: 850849

SEQ ID NO: 850851 - protein, 382 aa, Homo sapiens; identical to SEQ ID NO: 850845

SEQ ID NO: 850852 - protein, 382 aa, Homo sapiens; identical to SEQ ID NO: 850845

SEQ ID NO: 850853 - protein, 370 aa, Homo sapiens
MAVSVTPIRDTKWLTLEVCREFQRGTCSRPDTECKFAHPSKSCQVENGRVIACFDSLKGRCSRENCKYLHPPPHLKTQLEINGRNNLIQQKNMAMLAQQMQLANAMMPGAPLQPVPMFSVAPSLATNASAAAFNPYLGPVSPSLVPAEILPTAPMLVTGNPGVPVPAAAAAAAQKLMRTDRLEVCREYQRGNCNRGENDCRFAHPADSTMIDTNDNTVTVCMDYIKGRCSREKCKYFHPPAHLQAKIKAAQYQVNQAAAAQAAATAAAMGIPQAVLPPLPKRPALEKTNGATAVFNTGIFQYQQALANMQLQQHTAFLPPVPMVHGATPATVSAATTSATSVPFAATATANQIPIISAEHLTSHKYVTQM

SEQ ID NO: 850854 - protein, 388 aa, Homo sapiens; identical to SEQ ID NO: 850842

SEQ ID NO: 850855 - protein, 302 aa, Homo sapiens; identical to SEQ ID NO: 850849

SEQ ID NO: 850856 - protein, 314 aa, Homo sapiens
MAVSVTPIRDTKWLTLEVCREFQRGTCSRPDTECKFAHPSKSCQVENGRVIACFDSLKGRCSRENCKYLHPPPHLKTQLEINGRNNLIQQKNMAMLAQQMQLANAMMPGAPLQPVVCREYQRGNCNRGENDCRFAHPADSTMIDTNDNTVTVCMDYIKGRCSREKCKYFHPPAHLQAKIKAAQYQVNQAAAAQAAATAAAMGIPQAVLPPLPKRPALEKTNGATAVFNTGIFQYQQALANMQLQQHTAFLPPGSILCMTPATSVVPMVHGATPATVSAATTSATSVPFAATATANQIPIISAEHLTSHKYVTQM

SEQ ID NO: 850857 - protein, 382 aa, Homo sapiens; identical to SEQ ID NO: 850845

SEQ ID NO: 850858 - protein, 330 aa, Homo sapiens
MAVSVTPIRDTKWLTLEVCREFQRGTCSRPDTECKFAHPSKSCQVENGRVIACFDSLKGRCSRENCKYLHPPPHLKTQLEINGRNNLIQQKNMAMLAQQMQLANAMMPGAPLQPVPMFSVAPSLATNASAAAFNPYLGPVSPSLVPAEILPTAPMLVTGNPGVPVPAAAAAAAQKLMRTDRLEVCREYQRGNCNRGENDCRFAHPADSTMIDTNDNTVTVCMDYIKGRCSREKCKYFHPPAHLQAKIKAAQYQVNQAAAAQAAATAAAMGIPQAVLPPLPKRPALEKTNGATAVFNTGIFQYQQALANMQLQQHTAFLPPDTHNICRTSD

SEQ ID NO: 850859 - protein, 288 aa, Homo sapiens [sequence omitted]

SEQ ID NO: 850860 - protein, 302 aa, Homo sapiens; identical to SEQ ID NO: 850849

SEQ ID NO: 850861 - protein, 302 aa, Homo sapiens; identical to SEQ ID NO: 850849

SEQ ID NO: 850862 - protein, 382 aa, Homo sapiens; identical to SEQ ID NO: 850845

SEQ ID NO: 850863 - protein, 382 aa, Homo sapiens; identical to SEQ ID NO: 850845

SEQ ID NO: 850864 - protein, 382 aa, Homo sapiens; identical to SEQ ID NO: 850845

SEQ ID NO: 850865 - protein, 73 aa, Homo sapiens
MELPKLKLSGVVRLSSYSSPTLQSVLGSGTNGRVPVLRPLKCIPASKKTDPQKDLKPAPQQCRLPTIVRKGGR

SEQ ID NO: 850866 - protein, 73 aa, Homo sapiens; identical to SEQ ID NO: 850865

SEQ ID NO: 850867 - protein, 462 aa, Homo sapiens
HAQATAHGVQGLTVARVTGTQHGGGISNALLRGTTTEILVRDPASDYKAIGKIGEGTFSEVMKMQSLRDGNYYACKQMKQRFESIEQVNNLREIQALRRLNPHPNILMLHEVVFDRKSGSLALICELMDMNIYELIRGRRYPLSEKKIMHYMYQLCKSLDHIHRNGIFHRDVKPENILIKQDVLKLGDFGSCRSVYSKQPYTEYISTRWYRAPECLLTDGFYTYKMDLWSAGCVFYEIASLQPLFPGVNELDQISKIHDVIGTPAQKILTKFKQSRAMNFDFPFKKGSGIPLLTTNLSPQCLSLLHAMVAYDPDERIAAHQALQHPYFQEQRKTEKRALGSHRKAGFPEHPVAPEPLSNSCQISKEGRKQKQSLKQEEDRPKRRGPAYVMELPKLKLSGVVRLSSYSSPTLQSVLGSGTNGRVPVLRPLKCIPASKKTDPQKDLKPAPQQCRLPTIVRKGGR

SEQ ID NO: 850868 - protein, 236 aa, Homo sapiens
MKNYKAIGKIGEGTFSEVMKMQSLRDGNYYACKQMKQRFESIEQVNNLREIQALRRLNPHPNILMLHEVVFDRKSGSLALICELMDMNIYELIRGRRYPLSEKKIMHYMYQLCKSLDHIHRNGIFHRDVKPENILIKQDVLKLGDFGSCRSVYSKQPYTEYISTRWYRAPECLLTDGFYTYKMDLWSAGCVFYEIASLQPLFPGVNELDQISKIHDVIGTPAQKILTKFKHESYEF

SEQ ID NO: 850869 - protein, 262 aa, Homo sapiens
MKNYKAIGKIGEGTFSEVMKMQSLRDGNYYACKQMKQRFESDRKSGSLALICELMDMNIYELIRGRRYPLSEKKIMHYMYQLCKSLDHIHRNGIFHRDVKPENILIKQDVLKLGDFGSCRSVYSKQPYTEYISTRWYRAPECLLTDGFYTYKMDLWSAGCVFYEIASLQPLFPGVNELDQISKIHDVIGTPAQKILTKFKQSRAMNFDFPFKKGSGIPLLTTNLSPQCLSLLHAMVAYDPDERIAAHQALQHPYFQEQRNSP

SEQ ID NO: 850870 - protein, 262 aa, Homo sapiens; identical to SEQ ID NO: 850869

SEQ ID NO: 850871 - protein, 335 aa, Homo sapiens
MDMNIYELIRGRRYPLSEKKIMHYMYQLCKSLDHIHRNGIFHRDVKPENILIKQDVLKLGDFGSCRSVYSKQPYTEYISTRWYRAPECLLTDGFYTYKMDLWSAGCVFYEIASLQPLFPGVNELDQISKIHDVIGTPAQKILTKFKQSRAMNFDFPFKKGSGIPLLTTNLSPQCLSLLHAMVAYDPDERIAAHQALQHPYFQEQRKTEKRALGSHRKAGFPEHPVAPEPLSNSCQISKEGRKQKQSLKQEEDRPKRRGPAYVMELPKLKLSGVVRLSSYSSPTLQSVLGSGTNGRVPVLRPLKCIPASKKTDPQKDLKPAPQQCRLPTIVRKGGR

SEQ ID NO: 850872 - protein, 475 aa, Homo sapiens
MKNYKAIGKIGEGTFSEVMKMQSLRDGNYYACKQMKQRFESIEQVNNLREIQALRRLNPHPNILMLHEVVFDRKSGSLALICELMDMNIYELIRGRRYPLSEKKIMHYMYQLCKSLDHIHRNGIFHRDVKPENILIKVVKNGLFKNAINITDCTWKKIIESTIFTPQTKMNPIQTAVQTFYEGNVAEAGFELQQDVLKLGDFGSCRSVYSKQPYTEYISTRWYRAPECLLTDGFYTYKMDLWSAGCVFYEIASLQPLFPGVNELDQISKIHDVIGTPAQKILTKFKQSRAMNFDFPFKKGSGIPLLTTNLSPQCLSLLHAMVAYDPDERIAAHQALQHPYFQEQRKTEKRALGSHRKAGFPEHPVAPEPLSNSCQISKEGRKQKQSLKQEEDRPKRRGPAYVMELPKLKLSGVVRLSSYSSPTLQSVLGSGTNGRVPVLRPLKCIPASKKTDPQKDLKPAPQQCRLPTIVRKGGR

SEQ ID NO: 850873 - protein, 311 aa, Homo sapiens [sequence omitted]

SEQ ID NO: 850874 - protein, 122 aa, Homo sapiens
MRESPPTRPCSTPTSKNRETVPKARGGPSQETRTGLCHGTAQTKAFGSGQTVVLLQPHAAVRAWIWNKWKSAGAETLEVHPCEQEGSAEPASLTALLFDPAQAATEFCVCNFSLTDRSAEGP

SEQ ID NO: 850875 - protein, 262 aa, Homo sapiens; identical to SEQ ID NO: 850869

SEQ ID NO: 850876 - protein, 389 aa, Homo sapiens
MKNYKAIGKIGEGTFSEVMKMQSLRDGNYYACKQMKQRFESDRKSGSLALICELMDMNIYELIRGRRYPLSEKKIMHYMYQLCKSLDHIHRNGIFHRDVKPENILIKQDVLKLGDFGSCRSVYSKQPYTEYISTRWYRAPECLLTDGFYTYKMDLWSAGCVFYEIASLQPLFPGVNELDQISKIHDVIGTPAQKILTKFKQSRAMNFDFPFKKGSGIPLLTTNLSPQCLSLLHAMVAYDPDERIAAHQALQHPYFQEQRKTEKRALGSHRKAGFPEHPVAPEPLSNSCQISKEGRKQKQSLKQEEDRPKRRGPAYVMELPKLKLSGVVRLSSYSSPTLQSVLGSGTNGRVPVLRPLKCIPASKKTDPQKDLKPAPQQCRLPTIVRKGGR

SEQ ID NO: 850877 - protein, 299 aa, Homo sapiens
MKNYKAIGKIGEGTFSEVMKMQSLRDGNYYACKQMKQRFESDRKSGSLALICELMDMNIYELIRGRRYPLSEKKIMHYMYQLCKSLDHIHRNGIFHRDVKPENILIKQDVLKLGDFGSCRSVYSKQPYTEYISTRWYRAPECLLTDGFYTYKMDLWSAGCVFYEIASLQPLFPGVNELDQISKIHDVIGTPAQKILTKFKQSRAMNFDFPFKKGSGIPLLTTNLSPQCLSLLHAMVAYDPDERIAAHQALQHPYFQEQRTQNGSEDEASAVLLPIQTRSSLNPLLSTCMLPGRSVTLLV

SEQ ID NO: 850878 - protein, 263 aa, Homo sapiens
MKNYKAIGKIGEGTFSEVMKMQSLRDGNYYACKQMKQRFESDRKSGSLALICELMDMNIYELIRGRRYPLSEKKIMHYMYQLCKSLDHIHRNGIFHRDVKPENILIKQDVLKLGDFGSCRSVYSKQPYTEYISTRWYRAPECLLTDGFYTYKMDLWSAGCVFYEIASLQPLFPGVNELDQISKIHDVIGTPAQKILTKFKQSRAMNFDFPFKKGSGIPLLTTNLSPQCLSLLHAMVAYDPDERIAAHQALQHPYFQEQRRLTP

SEQ ID NO: 850879 - protein, 419 aa, Homo sapiens
MKNYKAIGKIGEGTFSEVMKMQSLRDGNYYACKQMKQRFESIEQVNNLREIQALRRLNPHPNILMLHEVVFDRKSGSLALICELMDMNIYELIRGRRYPLSEKKIMHYMYQLCKSLDHIHRNGIFHRDVKPENILIKQDVLKLGDFGSCRSVYSKQPYTEYISTRWYRAPECLLTDGFYTYKMDLWSAGCVFYEIASLQPLFPGVNELDQISKIHDVIGTPAQKILTKFKQSRAMNFDFPFKKGSGIPLLTTNLSPQCLSLLHAMVAYDPDERIAAHQALQHPYFQEQRKTEKRALGSHRKAGFPEHPVAPEPLSNSCQISKEGRKQKQSLKQEEDRPKRRGPAYVMELPKLKLSGVVRLSSYSSPTLQSVLGSGTNGRVPVLRPLKCIPASKKTDPQKDLKPAPQQCRLPTIVRKGGR

SEQ ID NO: 850880 - protein, 389 aa, Homo sapiens; identical to SEQ ID NO: 850876

SEQ ID NO: 850881 - protein, 231 aa, Homo sapiens
MKNYKAIGKIGEGTFSEVMKMQSLRDGNYYACKQMKQRFESIEQVNNLREIQALRRLNPHPNILMLHEVVFDRKSGSLALICELMDMNIYELIRGRRYPLSEKKIMHYMYQLCKSLDHIHRNGIFHRDVKPENILIKQDVLKLGDFGSCRSVYSKQPYTEYISTRWYRAPECLLTDGFYTYKMDLWSAGCVFYEIASLQPLFPGVNELDQISKIHDVIGTPAQKILTKFKQ

SEQ ID NO: 850882 - protein, 231 aa, Homo sapiens; identical to SEQ ID NO: 850881

SEQ ID NO: 850883 - protein, 237 aa, Homo sapiens
MKNYKAIGKIGEGTFSEVMKMQSLRDGNYYACKQMKQRFESIEQVNNLREIQALRRLNPHPNILMLHEVVFDRKSGSLALICELMDMNIYELIRGRRYPLSEKKIMHYMYQLCKSLDHIHRNGIFHRDVKPENILIKQDVLKLGDFGSCRSVYSKQPYTEYISTRWYRAPECLLTDGFYTYKMDLWSAGCVFYEIASLQPLFPGVNELDQISKIHDVIGTPAQKILTKFKQDQEYLY

SEQ ID NO: 850884 - protein, 457 aa, Homo sapiens
MKNYKAIGKIGEGTFSEVMKMQSLRDGNYYACKQMKQRFESIEQVNNLREIQALRRLNPHPNILMLHEVVFDRKSGSLALICELMDMNIYELIRGRRYPLSEKKIMHYMYQLCKSLDHIHRYALGDLTALKLIKCVNIQIQEFEYNEDVILFFLYTECRNGIFHRDVKPENILIKQDVLKLGDFGSCRSVYSKQPYTEYISTRWYRAPECLLTDGFYTYKMDLWSAGCVFYEIASLQPLFPGVNELDQISKIHDVIGTPAQKILTKFKQSRAMNFDFPFKKGSGIPLLTTNLSPQCLSLLHAMVAYDPDERIAAHQALQHPYFQEQRKTEKRALGSHRKAGFPEHPVAPEPLSNSCQISKEGRKQKQSLKQEEDRPKRRGPAYVMELPKLKLSGVVRLSSYSSPTLQSVLGSGTNGRVPVLRPLKCIPASKKTDPQKDLKPAPQQCRLPTIVRKGGR

SEQ ID NO: 850885 - protein, 155 aa, Homo sapiens [sequence omitted]

SEQ ID NO: 850886 - protein, 262 aa, Homo sapiens; identical to SEQ ID NO: 850869

SEQ ID NO: 850887 - protein, 262 aa, Homo sapiens; identical to SEQ ID NO: 850869

SEQ ID NO: 850888 - protein, 262 aa, Homo sapiens; identical to SEQ ID NO: 850869

SEQ ID NO: 850889 - protein, 75 aa, Homo sapiens
HAQATAHGVQGLTVARVTGTQHGGGISNALLRGTTTEILVRDPASGKWKAGGQPSCFFLFRPVSARGCHRLPHPR

SEQ ID NO: 850890 - protein, 187 aa, Homo sapiens
MNFDFPFKKGSGIPLLTTNLSPQCLSLLHAMVAYDPDERIAAHQALQHPYFQEQRTQNGSEDEGLSRPPPHSNTFIPQPSAEHLHAARPQCHPSCVSLPSSTHLTLLTLKKTPGRSTGEPSHTPHWRGQALQGEAVSSHLHQPFPSGTQTCTSSCDRRQQCDRDLPSALLSPHLRCSQPATRQLESS

SEQ ID NO: 850891 - protein, 73 aa, Homo sapiens; identical to SEQ ID NO: 850865

SEQ ID NO: 850892 - protein, 256 aa, Homo sapiens
MKLTRKMVLTRAKASELHSVRKLNCWGSRLTDISICQEMPSLEVITLSVNSISTLEPVSRCQRLSELYLRRNRIPSLAELFYLKGLPRLRVLWLAENPCCGTSPHRYRMTVLRTLPRLQKLDNQAVTEEELSRALSEGEEITAAPEREGTGHGGPKLCCTLSSLSSAAETGRDPLDSEEEATSGAQDERGLKPPSRGQFPSLSARDASSSHRGRNVLTAILLLLRELDAEGLEAVQQTVGSRLQALRGEEVQEHAE

SEQ ID NO: 850893 - protein, 229 aa, Homo sapiens
  misc_feature (9)..(9): Xaa can be any naturally occurring amino acid
SIRAGGGRXDGRTGRLGCKVVSEGNLAYSWASKVMNALSPLLAASDSNDAVVKFNKDRVRARRSLTFLLQSAGRLGCKVVSEENLAYSWAFILGTLAEQGRSPQGGHICPGTPRVLASSAPQCHHCLPVSLHPMTCARLLGSLPSQQTKGSLNEQMLLDFQAVGVYLGALGKRRAPFIPEFPPAYCGTHGGSRRSWLTTAHQTLDGRLLWVSAFKSSQGFKPCGEGPPL

SEQ ID NO: 850894 - protein, 256 aa, Homo sapiens; identical to SEQ ID NO: 850892

SEQ ID NO: 850895 - protein, 256 aa, Homo sapiens; identical to SEQ ID NO: 850892

SEQ ID NO: 850896 - protein, 218 aa, Homo sapiens
MPSLEVITLSVNSISTLEPVSRCQRLSELYLRRNRIPSLAELFYLKGLPRLRVLWLAENPCCGTSPHRYRMTVLRTLPRLQKLDNQAVTEEELSRALSEGEEITAAPEREGTGHGGPKLCCTLSSLSSAAETGRDPLDSEEEATSGAQDERGLKPPSRGQFPSLSARDASSSHRGRNVLTAILLLLRELDAEGLEAVQQTVGSRLQALRGEEVQEHAE

SEQ ID NO: 850897 - protein, 143 aa, Homo sapiens
MKLTRKMVLTRAKASELHSVRKLNCWGSRLTDISICQEMPSLEVITLSVNSISTLEPVSRCQRLSELYLRRNRIPSLAELFYLKGLPRLRVLWLAENPCCGTSPHRYRMTVLRTLPRLQKLDNQDVSCEVSSRGCSPGFCVSS

SEQ ID NO: 850898 - protein, 121 aa, Homo sapiens
MKLTRKMVLTRAKASELHSVRKLNCCVNSISTLEPVSRCQRLSELYLRRNRIPSLAELFYLKGLPRLRVLWLAENPCCGTSPHRYRMTVLRTLPRLQKLDNQDVSCEVSSRGCSPGFCVSS

SEQ ID NO: 850899 - protein, 278 aa, Homo sapiens
LSSGPGLPTALSSAQVLLHVTCDIRFRLLRRGQGHRSHECLLLGVGIERWPWGPWPRPSLTVLVSVQVNSVNSISTLEPVSRCQRLSELYLRRNRIPSLAELFYLKGLPRLRVLWLAENPCCGTSPHRYRMTVLRTLPRLQKLDNQAVTEEELSRALSEGEEITAAPEREGTGHGGPKLCCTLSSLSSAAETGRDPLDSEEEATSGAQDERGLKPPSRGQFPSLSARDASSSHRGRNVLTAILLLLRELDAEGLEAVQQTVGSRLQALRGEEVQEHAE

SEQ ID NO: 850900 - protein, 256 aa, Homo sapiens; identical to SEQ ID NO: 850892

SEQ ID NO: 850901 - protein, 172 aa, Homo sapiens
GPCWAEGNRSHVEEVPHTRPQAGLLCSDSPSVPVSHLDGPHPRDQSLRGGAPLARPQPLWREAASLCRVGLVRTPLPSERPDCHPAAAAGAGCRGAGGRAADCGQPAAGPAWGRGAGARRVTAGPERRSSLHGDPSVFPSPRELEGGCHGRSPGPTQKPPRFATSAEGRSGC

SEQ ID NO: 850902 - protein, 114 aa, Homo sapiens
SRANVSAAPKRPQRARVAPLSSPSRQSAQDPPLTTRAPPLETRAAQSSPARDQEAGGARRSGLGGRHEADAEDGSDPGQGLGAAQRAQAQLLGQPPHRCKYCLTDVSIALIISK

SEQ ID NO: 850903 - protein, 256 aa, Homo sapiens; identical to SEQ ID NO: 850892

SEQ ID NO: 850904 - protein, 182 aa, Homo sapiens [sequence omitted]

SEQ ID NO: 850905 - protein, 143 aa, Homo sapiens; identical to SEQ ID NO: 850897

SEQ ID NO: 850906 - protein, 172 aa, Homo sapiens; identical to SEQ ID NO: 850901

SEQ ID NO: 850907 - protein, 157 aa, Homo sapiens
MKLTRKMVLTRAKASELHSVRKLNCWGSRLTDISICQEMPSLEVITLRYLAPAVMLSLGPGSRGRASRPSSGTQHCDITWKPPTQTEGGFQKGRGRDSESWAYPVAPMFSPPSSEPHLGLLMAPVPCLPCCTPAHPWPVCSDKPLLCSLGQSVVEPS

SEQ ID NO: 850908 - protein, 224 aa, Homo sapiens
MREGACKLLAACSQREQALEATKSLLVCNSRILSYMGELQRRKEAQVLGKTSRRPSDSGPPAERSPCRGRVCISDLRIPLMWKDTEYFKNKGDLHRWAVFLLLQLGEHIQDTEMILVDRTLTDISFQSNVLFAEAGPDFELRLELYGACVEEEGALTGGPKRLATKLSSSLGRSSGRRVRASLDSAGGSGSSPILLPTPVVGGPVNTSWVQQINLGSVADGSGN

SEQ ID NO: 850909 - protein, 513 aa, Homo sapiens
MREGACKLLAACSQREQALEATKSLLVCNSRILSYMGELQRRKEAQVLGKTSRRPSDSGPPAERSPCRGRVCISDLRIPLMWKDTEYFKNKGDLHRWAVFLLLQLGEHIQDTEMILVDRTLTDISFQSNVLFAEAGPDFELRLELYGACVEEEGALTGGPKRLATKLSSSLGRSSGRRVRASLDSAGGSGSSPILLPTPVVGGPRYHLLAHTTLTLAAVQDGFRTHDLTLASHEENPAWLPLYGSVCCRLAAQPLCMTQPTASGTLRVQQAGEMQNWAQVHGVLKGTNLFCYRQPEDADTGEEPLLTIAVNKETRVRAGELDQALGRPFTLSISNQYGDDEVTHTLQTESREALQSWMEALWQLFFDMSQWKQCCDEIMKIETPAPRKPPQALAKQGSLYHEMAIEPLDDIAAVTDILTQREGARLETPPPWLAMFTDQPALPNPCSPASVAPAPDWTHPLPWGRPRTFSLDAVPPDHSPRARSVAPLPPQRSPRTRGLCSKGQPRTWLQSPV

SEQ ID NO: 850910 - protein, 458 aa, Homo sapiens
MQDRLHILEDLNMLYIRQMALSLEDTELQRKLDHEIRMREGACKLLAACSQREQALEATKSLLVCNSRILSYMGELQRRKEAQVLGKTSRRPSDSGPPAERSPCRGRVCISDLRIPLMWKDTEYFKNKGDLHRWAVFLLLQLGEHIQDTEMILVDRTLTDISFQSNVLFAEAGPDFELRLELYGACVEEEGALTGGPKRLATKLSSSLGRSSGRRVRASLDSAGGSGSSPILLPTPVVGGPRYHLLAHTTLTLAAVQDGFRTHDLTLASHEENPAWLPLYGSVCCRLAAQPLCMTQPTASGTLRVQVRGPGGVEGSREKAEESWITRNRRANEKSRFGWKKWGMARRGEEWTAGWTKRTGSHGGLRRGILGAVTSPENVESFVQQAGEMQNWAQVHGVLKGTNLFCYRQPEDADTGEEPLLTIAVNKVMGPLVVRPPRAQAQEPLLQAPGGWAHTSER

SEQ ID NO: 850911 - protein, 550 aa, Homo sapiens
MQDRLHILEDLNMLYIRQMALSLEDTELQRKLDHEIRMREGACKLLAACSQREQALEATKSLLVCNSRILSYMGELQRRKEAQVLGKTSRRPSDSGPPAERSPCRGRVCISDLRIPLMWKDTEYFKNKGDLHRWAVFLLLQLGEHIQDTEMILVDRTLTDISFQSNVLFAEAGPDFELRLELYGACVEEEGALTGGPKRLATKLSSSLGRSSGRRVRASLDSAGGSGSSPILLPTPVVGGPRYHLLAHTTLTLAAVQDGFRTHDLTLASHEENPAWLPLYGSVCCRLAAQPLCMTQPTASGTLRVQQAGEMQNWAQVHGVLKGTNLFCYRQPEDADTGEEPLLTIAVNKETRVRAGELDQALGRPFTLSISNQYGDDEVTHTLQTESREALQSWMEALWQLFFDMSQWKQCCDEIMKIETPAPRKPPQALAKQGSLYHEMAIEPLDDIAAVTDILTQREGARLETPPPWLAMFTDQPALPNPCSPASVAPAPDWTHPLPWGRPRTFSLDAVPPDHSPRARSVAPLPPQRSPRTRGLCSKGQPRTWLQSPV

SEQ ID NO: 850912 - protein, 606 aa, Homo sapiens
MQDRLHILEDLNMLYIRQMALSLEDTELQRKLDHEIRMREGACKLLAACSQREQALEATKSLLVCNSRILSYMGELQRRKEAQVLGKTSRRPSDSGPPAERSPCRGRVCISDLRIPLMWKDTEYFKNKGDLHRWAVFLLLQLGEHIQDTEMILVDRTLTDISFQSNVLFAEAGPDFELRLELYGACVEEEGALTGGPKRLATKLSSSLGRSSGRRVRASLDSAGGSGSSPILLPTPVVGGPRYHLLAHTTLTLAAVQDGFRTHDLTLASHEENPAWLPLYGSVCCRLAAQPLCMTQPTASGTLRVQQAGEMQNWAQVHGVLKGTNLFCYRQPEDADTGEEPLLTIAVNKETRVRAGELDQALGRPFTLSISNQYGDDEVTHTLQTESREALQSWMEALWQLFFDMSQWKQCCDEIMKIETPAPRKPPQALAKQGSLYHEMAIEPLDDIAAVTDILTQREGARLETPPPWLAMFTDQPALPNPCSPARLPPSHLSDPHGPEASAAKANLALGSSHQCERERCWHRICPEEKMTHAQLGSGYGAVYSKLASLASCSSAGPGVGCRGGQKPLLNCGCHGTEGLIPGARWDLPKPFLEENWNQLCPTSLH

SEQ ID NO: 850913 - protein, 433 aa, Homo sapiens
MWKDTEYFKNKGDLHRWAVFLLLQLGEHIQDTEMILVDRTLTDISFQSNVLFAEAGPDFELRLELYGACVEEEGALTGGPKRLATKLSSSLGRSSGRRVRASLDSAGGSGSSPILLPTPVVGGPRYHLLAHTTLTLAAVQDGFRTHDLTLASHEENPAWLPLYGSVCCRLAAQPLCMTQPTASGTLRVQQAGEMQNWAQVHGVLKGTNLFCYRQPEDADTGEEPLLTIAVNKETRVRAGELDQALGRPFTLSISNQYGDDEVTHTLQTESREALQSWMEALWQLFFDMSQWKQCCDEIMKIETPAPRKPPQALAKQGSLYHEMAIEPLDDIAAVTDILTQREGARLETPPPWLAMFTDQPALPNPCSPASVAPAPDWTHPLPWGRPRTFSLDAVPPDHSPRARSVAPLPPQRSPRTRGLCSKGQPRTWLQSPV

SEQ ID NO: 850914 - protein, 380 aa, Homo sapiens
MQDRLHILEDLNMLYIRQMALSLEDTELQRKLDHEIRMREGACKLLAACSQREQALEATKSLLVCNSRILSYMGELQRRKEAQVLGKTSRRPSDSGPPAERSPCRGRVCISDLRIPLMWKDTEYFKNKGDLHRWAVFLLLQLGEHIQDTEMILVDRTLTDISFQSNVLFAEAGPDFELRLELYGACVEEEGALTGGPKRLATKLSSSLGRSSGRRVRASLDSAGGSGSSPILLPTPVVGGPRYHLLAHTTLTLAAVQDGFRTHDLTLASHEENPAWLPLYGSVCCRLAAQPLCMTQPTASGTLRVQQAGEMQNWAQVHGVLKGTNLFCYRQPEDADTGEEPLLTIAVNKVMGPLVVRPPRAQAQEPLLQAPGGWAHTSER

SEQ ID NO: 850915 - protein, 547 aa, Homo sapiens
MQDRLHILEDLNMLYIRQMALSLEDTELQRKLDHEIRMREGACKLLAACSQREQALEATKSLLVCNSRILSYMGELQRRKEAQVLGKTSRRPSDSGPPAERSPCRGRVCISDLRIPLMWKDTEYFKNKGDLHRWAVFLLLQLGEHIQDTEMILVDRTLTDISFQSNVLFAEAGPDFELRLELYGACVEEEGALTGGPKRLATKLSSSLGRSSGRRVRASLDSAGGSGSSPILLPTPVVGGPRYHLLAHTTLTLAAVQDGFRTHDLTLASHEENPAWLPLYGSVCCRLAAQPLCMTQPTASGTLRVQQAGEMQNWAQVHGVLKGTNLFCYRQPEDADTGEEPLLTIAVNKETRVRAGELDQALGRPFTLSISNQYGDDEVTHTLQTESREALQSWMEALWQLFFDMSQWKQCCDEIMKIETPAPRKPPQALAKQGSLYHEMAIEPLDDIAAVTDILTQREGARLETPPPWLAMFTDQPALPNPCSPASVAPAPDWTHPLPWGRPRTFSLDAVPPDHSPRARSVAPLPPQRSPRTRGLCSKGTLVSAGR

SEQ ID NO: 850916 - protein, 380 aa, Homo sapiens; identical to SEQ ID NO: 850914

SEQ ID NO: 850917 - protein, 489 aa, Homo sapiens
MQDRLHILEDLNMLYIRQMALSLEDTELQRKLDHEIRMREGACKLLAACSQREQALEATKSLLVCNSRILSYMGELQRRKEAQVLGKTSRRPSDSGPPAERSPCRGRVCISDLRIPLMWKDTEYFKNKGDLHRWAVFLLLQLGEHIQDTEMILVDRTLTDISFQSNVLFAEAGPDFELRLELYGACVEEEGALTGGPKRLATKLSSSLGRSSGRRVRASLDSAGGSGSSPILLPTPVVGGPRYHLLAHTTLTLAAVQDGFRTHDLTLASHEENPAWLPLYGSVCCRLAAQPLCMTQPTASGTLRVQQAGEMQNWAQVHGVLKGTNLFCYRQPEDADTGEEPLLTIAVNKETRVRAGELDQALGRPFTLSISNQYGDDEVTHTLQTESREALQSWMEALWQLFFDMSQWKQCCDEIMKIETPAPRKPPQALAKQGSLYHEMAIEPLDDIAAVTDILTQREGARLETPPPWLAMFTDQPALPNPCSPASPS

SEQ ID NO: 850918 - protein, 239 aa, Homo sapiens
MQDRLHILEDLNMLYIRQMALSLEDTELQRKLDHEIRMREGACKLLAACSQREQALEATKSLLVCNSRILSYMGELQRRKEAQVLGKTSRRPSDSGPPAERSPCRGRVCISDLRIPLMWKDTEYFKNKGDLHRWAVFLLLQLGEHIQDTEMILVDRTLTDISFQSNVLFAEAGPDFELRLELYGACVEEEGALTGGPKRLATKLSSSLGRSSGRRVRASLDSAGGSGSSPILLPTPVVG

SEQ ID NO: 850919 - protein, 153 aa, Homo sapiens
EEVPNGEDHSKTVDTPGSQEFGMSPQTTPLGLARLPPSHLSDPHGPEASAAKANLALGSSHQCERERCWHRICPEEKMTHAQLGSGYGAVYSKLASLASCSSAGPGVGCRGGQKPLLNCGCHGTEGLIPGARWDLPKPFLEENWNQLCPTSLH

SEQ ID NO: 850920 - protein, 105 aa, Homo sapiens [sequence omitted]

SEQ ID NO: 850921 - protein, 563 aa, Homo sapiens
MFSRNHRSRVTVARGSALEMEFKRGRFRLSLFSDLPEDTELQRKLDHEIRMREGACKLLAACSQREQALEATKSLLVCNSRILSYMGELQRRKEAQVLGKTSRRPSDSGPPAERSPCRGRVCISDLRIPLMWKDTEYFKNKGDLHRWAVFLLLQLGEHIQDTEMILVDRTLTDISFQSNVLFAEAGPDFELRLELYGACVEEEGALTGGPKRLATKLSSSLGRSSGRRVRASLDSAGGSGSSPILLPTPVVGGPRYHLLAHTTLTLAAVQDGFRTHDLTLASHEENPAWLPLYGSVCCRLAAQPLCMTQPTASGTLRVQQAGEMQNWAQVHGVLKGTNLFCYRQPEDADTGEEPLLTIAVNKETRVRAGELDQALGRPFTLSISNQYGDDEVTHTLQTESREALQSWMEALWQLFFDMSQWKQCCDEIMKIETPAPRKPPQALAKQGSLYHEMAIEPLDDIAAVTDILTQREGARLETPPPWLAMFTDQPALPNPCSPASVAPAPDWTHPLPWGRPRTFSLDAVPPDHSPRARSVAPLPPQRSPRTRGLCSKGQPRTWLQSPV

SEQ ID NO: 850922 - protein, 550 aa, Homo sapiens; identical to SEQ ID NO: 850911

SEQ ID NO: 850923 - protein, 380 aa, Homo sapiens; identical to SEQ ID NO: 850914

SEQ ID NO: 850924 - protein, 523 aa, Homo sapiens
MQDRLHILEDLNMLYIRQMALSLEDTELQRKLDHEIRMREGACKLLAACSQREQALEATKSLLVCNSRILSYMGELQRRKEAQVLGKTSRRPSDSGPPAERSPCRGRVCISDLRIPLMWKDTEYFKNKGDLHRWAVFLLLQLGEHIQDTEMILVDRTLTDISFQSNVLFAEAGPDFELRLELYGACVEEEGALTGGPKRLATKLSSSLGRSSGRRVRASLDSAGGSGSSPILLPTPVVGGPRYHLLAHTTLTLAAVQDGFRTHDLTLASHEENPAWLPLYGSVCCRLAAQPLCMTQPTASGTLRVQDADTGEEPLLTIAVNKETRVRAGELDQALGRPFTLSISNQYGDDEVTHTLQTESREALQSWMEALWQLFFDMSQWKQCCDEIMKIETPAPRKPPQALAKQGSLYHEMAIEPLDDIAAVTDILTQREGARLETPPPWLAMFTDQPALPNPCSPASVAPAPDWTHPLPWGRPRTFSLDAVPPDHSPRARSVAPLPPQRSPRTRGLCSKGQPRTWLQSPV

SEQ ID NO: 850925 - protein, 550 aa, Homo sapiens; identical to SEQ ID NO: 850911

SEQ ID NO: 850926 - protein, 115 aa, Homo sapiens [sequence omitted]

SEQ ID NO: 850927 - protein, 380 aa, Homo sapiens; identical to SEQ ID NO: 850914

SEQ ID NO: 850928 - protein, 132 aa, Homo sapiens [sequence omitted]

SEQ ID NO: 850929 - protein, 759 aa, Homo sapiens
MSKRLRSSEVCADCSGPDPSWASVNRGTFLCDECCSVHRSLGRHISQVRHLKHTPWPPTLLQMVETLYNNGANSIWEHSLLDPASIMSGRRKANPQDKVHPNKAEFIRAKYQMLAFVHRLPCRDDDSVTAKDLSKQLHSSVRTGNLETCLRLLSLGAQANFFHPEKGNTPLHVASKAGQILQAELLAVYGADPGTQDSSGKTPVDYARQGGHHELAERLVEIQYELTDRLAFYLCGRKPDHKNGQHFIIPQMADSSLDLSELAKAAKKKLQSLSNHLFEELAMDVYDEVDRRETDAVWLATQNHSALVTETTVVPFLPVNPEYSSTRNQGRQKLARFNAHEFATLVIDILSDAKRRQQGSSLSGSKDNVELILKTINNQHSVESQDNDQPDYDSVASDEDTDLETTASKTNRQKSLDSDLSDGPVTVQEFMEVKNALVASEAKIQQLMKVNNNLSDELRIMQKKLQTLQSENSNLRKQATTNVYQVQTGSEYTDTSNHSSLKRRPSARGSRPMSMYETGSGQKPYLPMGEASRPEESRMRLQPFPAHIGRSALVTSSSSLPSFPSTLSWSRDESARRASRLEKQNSTPESDYDNTPNDMEPDGMGSSRKGRQRSMVWPGDGLVPDTAEPHVAPSPTLPSTEDVIRKTEQITKNIQELLRAAQENKHDSYIPCSERIHVAVTEMAALFPKKPKSDMVRTSLRLLTSSAYRLQSECKKTLPGDPGSPTDVQLVTQQVIQCAYDIAKAAKQLVTITTKENNN

SEQ ID NO: 850930 - protein, 759 aa, Homo sapiens; identical to SEQ ID NO: 850929

SEQ ID NO: 850931 - protein, 697 aa, Homo sapiens
MVETLYNNGANSIWEHSLLDPASIMSGRRKANPQDKVHPNKAEFIRAKYQMLAFVHRLPCRDDDSVTAKDLSKQLHSSVRTGNLETCLRLLSLGAQANFFHPEKGNTPLHVASKAGQILQAELLAVYGADPGTQDSSGKTPVDYARQGGHHELAERLVEIQYELTDRLAFYLCGRKPDHKNGQHFIIPQMADSSLDLSELAKAAKKKLQSLSNHLFEELAMDVYDEVDRRETDAVWLATQNHSALVTETTVVPFLPVNPEYSSTRNQGRQKLARFNAHEFATLVIDILSDAKRRQQGSSLSGSKDNVELILKTINNQHSVESQDNDQPDYDSVASDEDTDLETTASKTNRQKSLDSDLSDGPVTVQEFMEVKNALVASEAKIQQLMKVNNNLSDELRIMQKKLQTLQSENSNLRKQATTNVYQVQTGSEYTDTSNHSSLKRRPSARGSRPMSMYETGSGQKPYLPMGEASRPEESRMRLQPFPAHIGRSALVTSSSSLPSFPSTLSWSRDESARRASRLEKQNSTPESDYDNTPNDMEPDGMGSSRKGRQRSMVWPGDGLVPDTAEPHVAPSPTLPSTEDVIRKTEQITKNIQELLRAAQENKHDSYIPCSERIHVAVTEMAALFPKKPKSDMVRTSLRLLTSSAYRLQSECKKTLPGDPGSPTDVQLVTQQVIQCAYDIAKAAKQLVTITTKENNN

SEQ ID NO: 850932 - protein, 508 aa, Homo sapiens [sequence omitted]

SEQ ID NO: 850933 - protein, 477 aa, Homo sapiens
MDVYDEVDRRETDAVWLATQNHSALVTETTVVPFLPVNPEYSSTRNQGRQKLARFNAHEFATLVIDILSDAKRRQQGSSLSGSKDNVELILKTINNQHSVESQDNDQPDYDSVASDEDTDLETTASKTNRQKSLDSDLSDGPVTVQEFMEVKNALVASEAKIQQLMKVNNNLSDELRIMQKKLQTLQSENSNLRKQATTNVYQVQTGSEYTDTSNHSSLKRRPSARGSRPMSMYETGSGQKPYLPMGEASRPEESRMRLQPFPAHIGRSALVTSSSSLPSFPSTLSWSRDESARRASRLEKQNSTPESDYDNTPNDMEPDGMGSSRKGRQRSMVWPGDGLVPDTAEPHVAPSPTLPSTEDVIRKTEQITKNIQELLRAAQENKHDSYIPCSERIHVAVTEMAALFPKKPKSDMVRTSLRLLTSSAYRLQSECKKTLPGDPGSPTDVQLVTQQVIQCAYDIAKAAKQLVTITTKENNN

SEQ ID NO: 850934 - protein, 161 aa, Homo sapiens
MEPDGMGSSRKGRQRSMVWPGDGLVPDTAEPHVAPSPTLPSTEDVIRKTEQITKNIQELLRAAQENKHDSYIPCSERIHVAVTEMAALFPKKPKSDMVRTSLRLLTSSAYRLQSECKKTLPGDPGSPTDVQLVTQQVIQCAYDIAKAAKQLVTITTKENNN

SEQ ID NO: 850935 - protein, 161 aa, Homo sapiens; identical to SEQ ID NO: 850934

SEQ ID NO: 850936 - protein, 245 aa, Homo sapiens [sequence omitted]

SEQ ID NO: 850937 - protein, 759 aa, Homo sapiens; identical to SEQ ID NO: 850929

SEQ ID NO: 850938 - protein, 649 aa, Homo sapiens
MSKRLRSSEVCADCSGPDPSWASVNRGTFLCDECCSVHRSLGRHISQVRHLKHTPWPPTLLQMVETLYNNGANSIWEHSLLDPASIMSGRRKANPQDKVHPNKAEFIRAKYQMLAFVHRLPCRDDDSVTAKDLSKQLHSSVRTGNLETCLRLLSLGAQANFFHPEKGNTPLHVASKAGQILQAELLAVYGADPGTQDSSGKTPVDYARQGGHHELAERLVEIQYELTDRLAFYLCGRKPDHKNGQHFIIPQMADSSLDLSELAKAAKKKLQSLSNHLFEELAMDVYDEVDRRETDAVWLATQNHSALVTETTVVPFLPVNPEYSSTRNQGRQKLARFNAHEFATLVIDILSDAKRRQQGSSLSGSKDNVELILKTINNQHSVESQDNDQPDYDSVASDEDTDLETTASKTNRQKSLDSDLSDGPVTVQEFMEVKNALVASEAKIQQLMKVNNNLSDELRIMQKKLQTLQSENSNLRKQATTNVYQVQTGSEYTDTSNHSSLKRRPSARGSRPMSMYETGSGQKPYLPMGEASRPEESRMRLQPFPAHIGRSALVTSSSSLPSFPSTLSWSRDESARRASRLEKQNSTPESDYDNTPNDMEPDGMGYMHRTSVPGEGLPRARDLAGLGQQKQFTTHTPFLYFQTHKVLKY

SEQ ID NO: 850939 - protein, 406 aa, Homo sapiens
MSKRLRSSEVCADCSGPDPSWASVNRGTFLCDECCSVHRSLGRHISQVRHLKHTPWPPTLLQMVETLYNNGANSIWEHSLLDPASIMSGRRKANPQDKVHPNKAEFIRAKYQMLAFVHRLPCRDDDSVTAKDLSKQLHSSVRTGNLETCLRLLSLGAQANFFHPEKGNTPLHVASKAGQILQAELLAVYGADPGTQDSSGKTPVDYARQGGHHELAERLVEIQYELTDRLAFYLCGRKPDHKNGQHFIIPQMADSSLDLSELAKAAKKKLQSLSNHLFEELAMDVYDEVDRRETDAVWLATQNHSALVTETTVVPFLPVNPEYSSTRNQGIQNLGRLPPRQAFPTRVFYIFMYAQRGGHAGQVLLLGVHIDIVELILPTVHYHHRVLTLDTDQPDYRQPGMKALDS

SEQ ID NO: 850940 - protein, 471 aa, Homo sapiens
MSKRLRSSEVCADCSGPDPSWASVNRGTFLCDECCSVHRSLGRHISQVRHLKHTPWPPTLLQMVETLYNNGANSIWEHSLLDPASIMSGRRKANPQDKVHPNKAEFIRAKYQMLAFVHRLPCRDDDSVTAKDLSKQLHSSVRTGNLETCLRLLSLGAQANFFHPEKGNTPLHVASKAGQILQAELLAVYGADPGTQDSSGKTPVDYARQGGHHELAERLVEIQYELTDRLAFYLCGRKPDHKNGQHFIIPQMADSSLDLSELAKAAKKKLQSLSNHLFEELAMDVYDEVDRRETDAVWLATQNHSALVTETTVVPFLPVNPEYSSTRNQGRQKLARFNAHEFATLVIDILSDAKRRQQGSSLSGSKDNVELILKTINNQHSVESQDNDQPDYDSVASDEDTDLETTASKTNRQKSLDSDLSDGPVTVQEFMEVKNALVASEAKIQQLMKVNNNLSDELRIMQKKLLGKDAN

SEQ ID NO: 850941 - protein, 759 aa, Homo sapiens; identical to SEQ ID NO: 850929

SEQ ID NO: 850942 - protein, 683 aa, Homo sapiens
AAAPNIRMVIMSGRRKANPQDKVHPNKAEFIRAKYQMLAFVHRLPCRDDDSVTAKDLSKQLHSSVRTGNLETCLRLLSLGAQANFFHPEKGNTPLHVASKAGQILQAELLAVYGADPGTQDSSGKTPVDYARQGGHHELAERLVEIQYELTDRLAFYLCGRKPDHKNGQHFIIPQMADSSLDLSELAKAAKKKLQSLSNHLFEELAMDVYDEVDRRETDAVWLATQNHSALVTETTVVPFLPVNPEYSSTRNQGRQKLARFNAHEFATLVIDILSDAKRRQQGSSLSGSKDNVELILKTINNQHSVESQDNDQPDYDSVASDEDTDLETTASKTNRQKSLDSDLSDGPVTVQEFMEVKNALVASEAKIQQLMKVNNNLSDELRIMQKKLQTLQSENSNLRKQATTNVYQVQTGSEYTDTSNHSSLKRRPSARGSRPMSMYETGSGQKPYLPMGEASRPEESRMRLQPFPAHIGRSALVTSSSSLPSFPSTLSWSRDESARRASRLEKQNSTPESDYDNTPNDMEPDGMGSSRKGRQRSMVWPGDGLVPDTAEPHVAPSPTLPSTEDVIRKTEQITKNIQELLRAAQENKHDSYIPCSERIHVAVTEMAALFPKKPKSDMVRTSLRLLTSSAYRLQSECKKTLPGDPGSPTDVQLVTQQVIQCAYDIAKAAKQLVTITTKENNN

SEQ ID NO: 850943 - protein, 508 aa, Homo sapiens [sequence omitted]

SEQ ID NO: 850944 - protein, 277 aa, Homo sapiens
MSKRLRSSEVCADCSGPDPSWASVNRGTFLCDECCSVHRSLGRHISQVRHLKHTPWPPTLLQMVETLYNNGANSIWEHSLLDPASIMSGRRKANPQDKVHPNKAEFIRAKYQMLAFVHRLPCRDDDSVTAKDLSKQLHSSVRTGNLETCLRLLSLGAQANFFHPEKGNTPLHVASKAGQILQAELLAVYGADPGTQDSSGKTPVDYARQGGHHELAERLVEIQYELTDRLAFYLCGRKPDHKNGQHFIIPQMADSSLDLSELAKAAKKKLQSYSFIV

SEQ ID NO: 850945 - protein, 631 aa, Homo sapiens
MSKRLRSSEVCADCSGPDPSWASVNRGTFLCDECCSVHRSLGRHISQVRHLKHTPWPPTLLQMVETLYNNGANSIWEHSLLDPASIMSGRRKANPQDKVHPNKAEFIRAKYQMLAFVHRLPCRDDDSVTAKDLSKQLHSSVRTGNLETCLRLLSLGAQANFFHPEKGNTPLHVASKAGQILQAELLAVYGADPGTQDSSGKTPVDYARQGGHHELAERLVEIQYELTDRLAFYLCGRKPDHKNGQHFIIPQMADSSLDLSELAKAAKKKLQSLSNHLFEELAMDVYDEVDRRETDAVWLATQNHSALVTETTVVPFLPVNPEYSSTRNQGRQKLARFNAHEFATLVIDILSDAKRRQQGSSLSGSKDNVELILKTINNQHSVESQDNDQPDYDSVASDEDTDLETTASKTNRQKSLDSDLSDGPVTVQEFMEVKNALVASEAKIQQLMKASRLEKQNSTPESDYDNTPNDMEPDGMGSSRKGRQRSMVWPGDGLVPDTAEPHVAPSPTLPSTEDVIRKTEQITKNIQELLRAAQENKHDSYIPCSERIHVAVTEMAALFPKKPKSDMVRTSLRLLTSSAYRLQSECKKTLPGDPGSPTDVQLVTQQVIQCAYDIAKAAKQLVTITTKENNN

SEQ ID NO: 850946 - protein, 439 aa, Homo sapiens
MSKRLRSSEVCADCSGPDPSWASVNRGTFLCDECCSVHRSLGRHISQVRHLKHTPWPPTLLQMVETLYNNGANSIWEHSLLDPASIMSGRRKANPQDKVHPNKAEFIRAKYQMLAFVHRLPCRDDDSVTAKDLSKQLHSSVRTGNLETCLRLLSLGAQANFFHPEKGNTPLHVASKAGQILQAELLAVYGADPGTQDSSGKTPVDYARQGGHHELAERLVEIQYELTDRLAFYLCGRKPDHKNGQHFIIPQMADSSLDLSELAKAAKKKLQSLSNHLFEELAMDVYDEVDRRETDAVWLATQNHSALVTETTVVPFLPVNPEYSSTRNQGRQKLARFNAHEFATLVIDILSDAKRRQQGSSLSGSKDNVELILKTINNQHSVESQDNDQPDYDSVASDEDTDLETTASKTNRQKVRGHASHGRASTHQLRASPAKAAVQ

SEQ ID NO: 850947 - protein, 283 aa, Homo sapiens
MSKRLRSSEVCADCSGPDPSWASVNRGTFLCDECCSVHRSLGRHISQVRHLKHTPWPPTLLQMVETLYNNGANSIWEHSLLDPASIMSGRRKANPQDKVHPNKAEFIRAKYQMLAFVHRLPCRDDDSVTAKDLSKQLHSSVRTGNLETCLRLLSLGAQANFFHPEKGNTPLHVASKAGQILQAELLAVYGADPGTQDSSGKTPVDYARQGGHHELAERLVEIQYELTDRLAFYLCGRKPDHKNGQHFIIPQMADSSLDLSELAKAAKKKLQSVSIFLYWFSLV

SEQ ID NO: 850948 - protein, 395 aa, Homo sapiens [sequence omitted]

SEQ ID NO: 850949 - protein, 395 aa, Homo sapiens [sequence omitted]

SEQ ID NO: 850950 - protein, 395 aa, Homo sapiens [sequence omitted]

SEQ ID NO: 850951 - protein, 395 aa, Homo sapiens
MDLGIPDLLDAWLEPPEDIFSTGSVLELGLHCPPPEVPVTRLQEQGLQGWKSGGDRGCGLQESEPEDFLKLFIDPNEVYCSEASPGSDSGISEDPCHPDSPPAPRATSSPMLYEVVYEAGALERMQGETGPNVGLISIQLDQWSPAFMVPDSCMVSELPFDAHAHILPRAGTVAPVPCTTLLPCQTLFLTDEEKRLLGQEGVSLPSHLPLTKAEERVLKKVRRKIRNKQSAQDSRRRKKEYIDGLESRVAACSAQNQELQKKVQELERHNISLVAQLRQLQTLIAQTSNKAAQTSTCVLILLFSLALIILPSFSPFQSRPEAGSEDYQPHGVTSRNILTHKDVTENLETQVVESRLREPPGAKDANGSTRTLLEKMGGKPRPSGRIRSVLHADEM

SEQ ID NO: 850952 - protein, 214 aa, Homo sapiens
MDLGIPDLLDAWLEPPEDIFSTGSVLELGLHCPPPEVPVTRLQEQGLQGWKSGGDRGCGLQESEPEDFLKLFIDPNEVYCSEASPGSDSGISEDSCHPDSPPAPRATSSPMLYEVVYEAGALERMQGETGPNVGLISIQLDQWSPAFMVPDSCMVSELPFDAHAHILPRAGTVAPVPCTTLGLTLSSRLECSGAITAHCILNILGSSNPPASAS

SEQ ID NO: 850953 - protein, 414 aa, Homo sapiens
MDLGIPDLLDAWLEPPEDIFSTGSVLELGLHCPPPEVPGLQESEPEDFLKLFIDPNEVYCSEASPGSDSGISEDSCHPDSPPAPRATSSPMLYEVVYEAGALERMQGETGPNVGLISIQLDQWSPAFMVPDSCMVSELPFDAHAHILPRAGTVAPVPCTTLGLTLSSRLECSGAITAHCILNILGSSNLLPQPPEELGLQLPCQTLFLTDEEKRLLGQEGVSLPSHLPLTKAEERVLKKVRRKIRNKQSAQDSRRRKKEYIDGLESRVAACSAQNQELQKKVQELERHNISLVAQLRQLQTLIAQTSNKAAQTSTCVLILLFSLALIILPSFSPFQSRPEAGSEDYQPHGVTSRNILTHKDVTENLETQVVESRLREPPGAKDANGSTRTLLEKMGGKPRPSGRIRSVLHADEM

SEQ ID NO: 850954 - protein, 395 aa, Homo sapiens [sequence omitted]

SEQ ID NO: 850955 - protein, 375 aa, Homo sapiens [sequence omitted]

SEQ ID NO: 850956 - protein, 375 aa, Homo sapiens [sequence omitted]

SEQ ID NO: 850957 - protein, 427 aa, Homo sapiens
MDLGIPDLLDAWLEPPEDIFSTGSVLELGLHCPPPEVPGLQESEPEDFLKLFIDPNEVYCSEASPGSDSGISEDSCHPDSPPAPRATSSPMLYEVVYEAGALERMQGETGPNVGLISIQLGQCSLWEGGNGPSGLALTMGLRGFTQPVPLPRPCGCQGVPKSPFSQLLFSTPDQWSPAFMVPDSCMVSELPFDAHAHILPRAGTVAPVPCTTLLPCQTLFLTDEEKRLLGQEGVSLPSHLPLTKAEERVLKKVRRKIRNKQSAQDSRRRKKEYIDGLESRVAACSAQNQELQKKVQELERHNISLVAQLRQLQTLIAQTSNKAAQTSTCVLILLFSLALIILPSFSPFQSRPEAGSEDYQPHGVTSRNILTHKDVTENLETQVVESRLREPPGAKDANGSTRTLLEKMGGKPRPSGRIRSVLHADEM

SEQ ID NO: 850958 - protein, 189 aa, Homo sapiens
MDLGIPDLLDAWLEPPEDIFSTGSVLELGLHCPPPEVPVTRLQEQGLQGWKSGGDRGCGLQESEPEDFLKLFIDPNEVYCSEASPGSDSGISEDSCHPDSPPAPRATSSPMLYEVVYEAGALERMQGETGPNVGLISIQLDQWSPAFMVPDSCMVSELPFDAHAHILPRAGTVAPVPCTTLLVCICLHI

SEQ ID NO: 850959 - protein, 1199 aa, Homo sapiens
MPLTGVEPARMNRKKGDKGFESPRPYKLTHQVVCINNINFQRKSVVGFVELTIFPTVANLNRIKLNSKQCRIYRVRINDLEAAFIYNDPTLEVCHSESKQRNLNYFSNAYAAAVSAVDPDAGNGELCIKVPSELWKHVDELKVLKIHINFSLDQPKGGLHFVVPSVEGSMAERGAHVFSCGYQNSTRFWFPCVDSYSELCTWKLEFTVDAAMVAVSNGDLVETVYTHDMRKKTFHYMLTIPTAASNISLAIGPFEILVDPYMHEVTHFCLPQLLPLLKHTTSYLHEVFEFYEEILTCRYPYSCFKTVFIDEAYVEVAAYASMSIFSTNLLHSAMIIDETPLTRRCLAQSLAQQFFGCFISRMSWSDEWVLKGISGYIYGLWMKKTFGVNEYRHWIKEELDKIVAYELKTGGVLLHPIFGGGKEKDNPASHLHFSIKHPHTLSWEYYTMFQCKAHLVMRLIENRISMEFMLQVFNKLLSLASTASSQKFQSHMWSQMLVSTSGFLKSISNVSGKDIQPLIKQWVDQSGVVKFYGSFAFNRKRNVLELEIKQDYTSPGTQKYVGPLKVTVQELDGSFNHTLQIEENSLKHDIPCHSKSRRNKKKKIPLMNGEEVDMDLSAMDADSPLLWIRIDPDMSVLRKVEFEQADFMWQYQLRYERDVVAQQESILALEKFPTPASRLALTDILEQEQCFYRVRMSACFCLAKIANSMVSTWTGPPAMKSLFTRMFCCKSCPNIVKTNNFMSFQSYFLQKTMPVAMALLRDVHNLCPKEVLTFILDLIKYNDNRKNKFSDNYYRAEMIDALANSVTPAVSVNNEVRTLDNLNPDVRLILEEITRFLNMEKLLPSYRHTITVSCLRAIRVLQKNGHVPSDPALFKSYAEYGHFVDIRIAALEAVVDYTKVDRSYEELQWLLNMIQNDPVPYVRHKILNMLTKNPPFTKNMESPLCNEALVDQLWKLMNSGTSHDWRLRCGAVDLYFTLFGLSRPSCLPLPELGLVLNLKEKKAVLNPTIIPESVAGNQEAANNPSSHPQLVGFQNPFSSSQDEEEIDMDTVHDSQAFISHHLNMLERPSTPGLSKYRPASSRSALIPQHSAGCDSTPTTKPQWSLELARKGTGKEQAPLEMSMHPAASAPLSVFTKESTASKHSDHHHHHHHEHKKKKKKHKHKHKHKHKHDSKEKDKEPFTFSSPASGRSIRSPSLSD

SEQ ID NO: 850960 - protein, 752 aa, Homo sapiens
MFQCKAHLVMRLIENRISMEFMLQVFNKLLSLASTASSQKFQSHMWSQMLVSTSGFLKSISNVSGKDIQPLIKQWVDQSGVVKFYGSFAFNRKRNVLELEIKQDYTSPGTQKYVGPLKVTVQELDGSFNHTLQIEENSLKHDIPCHSKSRRNKKKKIPLMNGEEVDMDLSAMDADSPLLWIRIDPDMSVLRKVEFEQADFMWQYQLRYERDVVAQQESILALEKFPTPASRLALTDILEQEQCFYRVRMSACFCLAKIANSMVSTWTGPPAMKSLFTRMFCCKSCPNIVKTNNFMSFQSYFLQKTMPVAMALLRDVHNLCPKEVLTFILDLIKYNDNRKNKFSDNYYRAEMIDALANSVTPAVSVNNEVRTLDNLNPDVRLILEEITRFLNMEKLLPSYRHTITVSCLRAIRVLQKNGHVPSDPALFKSYAEYGHFVDIRIAALEAVVDYTKVDRSYEELQWLLNMIQNDPVPYVRHKILNMLTKNPPFTKNMESPLCNEALVDQLWKLMNSGTSHDWRLRCGAVDLYFTLFGLSRPSCLPLPELGLVLNLKEKKAVLNPTIIPESVAGNQEAANNPSSHPQLVGFQNPFSSSQDEEEIDMDTVHDSQAFISHHLNMLERPSTPGLSKYRPASSRSALIPQHSAGCDSTPTTKPQWSLELARKGTGKEQAPLEMSMHPAASAPLSVFTKESTASKHSDHHHHHHHEHKKKKKKHKHKHKHKHKHDSKEKDKEPFTFSSPASGRSIRSPSLSD

SEQ ID NO: 850961 - protein, 152 aa, Homo sapiens [sequence omitted]

SEQ ID NO: 850962 - protein, 384 aa, Homo sapiens
  misc_feature (381)..(381): Xaa can be any naturally occurring amino acid
MPLTGVEPARMNRKKGDKGFESPRPYKLTHQVVCINNINFQRKSVVGFVELTIFPTVANLNRIKLNSKQCRIYRVRINDLEAAFIYNDPTLEVCHSESKQRNLNYFSNAYAAAVSAVDPDAGNGELCIKVPSELWKHVDELKVLKIHINFSLDQPKGGLHFVVPSVEGSMAERGAHVFSCGYQNSTRFWFPCVDSYSELCTWKLEFTVDAAMVAVSNGDLVETVYTHDMRKKTFHYMLTIPTAASNISLAIGPFEILVDPYMHEVTHFCLPQLLPLLKHTTSYLHEVFEFYEEILTCRYPYSCFKTVFIDEAYVEVAAYASMSIFSTNLLHSAMIIDETPLTRRCLAQSLAQQFFGCFISRMSWSDEWALLEMLTGILYQXRHP

SEQ ID NO: 850963 - protein, 155 aa, Homo sapiens
  misc_feature (152)..(152): Xaa can be any naturally occurring amino acid
MPCCDSSRSGRIPAASNISLAIGPFEILVDPYMHEVTHFCLPQLLPLLKHTTSYLHEVFEFYEEILTCRYPYSCFKTVFIDEAYVEVAAYASMSIFSTNLLHSAMIIDETPLTRRCLAQSLAQQFFGCFISRMSWSDEWALLEMLTGILYQXRHP

SEQ ID NO: 850964 - protein, 1251 aa, Homo sapiens
MPLTGVEPARMNRKKGDKGFESPRPYKLTHQVVCINNINFQRKSVVGFVELTIFPTVANLNRIKLNSKQCRIYRVRINDLEAAFIYNDPTLEVCHSESKQRNLNYFSNAYAAAVSAVDPDAGNGELCIKVPSELWKHVDELKVLKIHINFSLDQPKGGLHFVVPSVEGSMAERGAHVFSCGYQNSTRFWFPCVDSYSELCTWKLEFTVDAAMVAVSNGDLVETVYTHDMRKKTFHYMLTIPTAASNISLAIGPFEILVDPYMHEVTHFCLPQLLPLLKHTTSYLHEVFEFYEEILTCRYPYSCFKTVFIDEAYVEVAAYASMSIFSTNLLHSAMIIDETPLTRRCLAQSLAQQFFGCFISRMSWSDEWVLKGISGYIYGLWMKKTFGVNEYRHWIKEELDKIVAYELKTGGVLLHPIFGGGKEKDNPASHLHFSIKHPHTLSWEYYTMFQCKAHLVMRLIENRISMEFMLQVFNKLLSLASTASSQKFQSHMWSQMLVSTSGFLKSISNVSGKDIQPLIKQWVDQSGVVKFYGSFAFNRKRNVLELEIKQDYTSPGTQKYVGPLKVTVQELDGSFNHTLQIEENSLKHDIPCHSKSRRNKKKKIPLMNGEEVDMDLSAMDADSPLLWIRIDPDMSVLRKVEFEQADFMWQYQLRYERDVVAQQESILALEKFPTPASRLALTDILEQEQCFYRVRMSACFCLAKIANSMVSTWTGPPAMKSLFTRMFCCKSCPNIVKTNNFMSFQSYFLQKTMPVAMALLRDVHNLCPKEVLTFILDLIKYNDNRKNKFSDNYYRAEMIDALANSVTPAVSVNNEVRTLDNLNPDVRLILEEITRFLNMEKLLPSYRHTITVSCLRAIRVLQKNGHVPSDPALFKSYAEYGHFVDIRIAALEAVVDYTKVDRSYEELQWLLNMIQNDPVPYVRHKILNMLTKNPPFTKNMESPLCNEALVDQLWKLMNSGTSHDWRLRCGAVDLYFTLFGLSRPSCLPLPELGLVLNLKEKKAVLNPTIIPESVAGNQEAANNPSSHPQLVGFQNPEDDHLAKEASCNISAHQQGVKRKSDTPLGSPLEPGQILEKNEDSSKVKLKIRFSSSQDEEEIDMDTVHDSQAFISHHLNMLERPSTPGLSKYRPASSRSALIPQHSAGCDSTPTTKPQWSLELARKGTGKEQAPLEMSMHPAASAPLSVFTKESTASKHSDHHHHHHHEHKKKKKKHKHKHKHKHKHDSKEKDKEPFTFSSPASGRSIRSPSLSD

SEQ ID NO: 850965 - protein, 246 aa, Homo sapiens
AAPRRTERKCSLQLPGAGAQRLRPPVPRRPPSRGREGDRGSAVRGAASYRMSEGDSVGESVHGKPSVVYRFFTRLGQIYQSWLDKSTPYTAVRWVVTLGLSFVYMIRVYLLQGWYIVTYALGIYHLNLFIAFLSPKVDPSLMEDSDDGPSLPTKQNEEFRPFIRRLPEFKFWHAATKGILVAMVCTFFDAFNVPVFWPILVMYFIMLFCITMKRQIKHMIKYRYIPFTHGKRRYRGKEDAGKAFAS

SEQ ID NO: 850966 - protein, 246 aa, Homo sapiens; identical to SEQ ID NO: 850965

SEQ ID NO: 850967 - protein, 246 aa, Homo sapiens; identical to SEQ ID NO: 850965

SEQ ID NO: 850968 - protein, 246 aa, Homo sapiens; identical to SEQ ID NO: 850965

SEQ ID NO: 850969 - protein, 232 aa, Homo sapiens
MRSCEVAGPSPEPDKGPLKELHSSRRKLRSKPESYRMSEGDSVGESVHGKPSVVYRFFTRLGQIYQSWLDKSTPYTAVRWVVTLGLSFVYMIRVYLLQGWYIVTYALGIYHLNLFIAFLSPKVDPSLMEDSDDGPSLPTKQNEEFRPFIRRLPEFKFWHAATKGILVAMVCTFFDAFNVPVFWPILVMYFIMLFCITMKRQIKHMIKYRYIPFTHGKRRYRGKEDAGKAFAS

SEQ ID NO: 850970 - protein, 237 aa, Homo sapiens
AAPRRTERKCSLQLPGAGAQRLRPPVPRRPPSRGREGDRGSAVRGAASYRMSEGDSVGESVHGKPSVVYRFFTRLGQIYQSWLDKSTPYTAVRWVVTLGLSFVYMIRVYLLQGWYIVTYALGIYHLNLFIAFLSPKVDPSLMEDSDDGPSLPTKQNEEFRPFIRRLPEFKFWDASVCGDGRCSCKAGGGRQVPGAGCRCGANLLSPLEGMRLPRASLWLWSVLSSTLSTSRCSGRFW

SEQ ID NO: 850971 - protein, 196 aa, Homo sapiens
MSEGDSVGESVHGKPSVVYRFFTRLGQIYQSWLDKSTPYTAVRWVVTLGLSFVYMIRVYLLQGWYIVTYALGIYHLNLFIAFLSPKVDPSLMEDSDDGPSLPTKQNEEFRPFIRRLPEFKFWHAATKGILVAMVCTFFDAFNVPVFWPILVMYFIMLFCITMKRQIKHMIKYRYIPFTHGKRRYRGKEDAGKAFAS

SEQ ID NO: 850972 - protein, 285 aa, Homo sapiens
EVPVLEELGALPAPEVEREGGASAVSPARGGPGFPVQAPEPSPFSFSLRIDVLLLTREERGGGGGAEALVLLTVLNSAPLLGGGHGSYRMSEGDSVGESVHGKPSVVYRFFTRLGQIYQSWLDKSTPYTAVRWVVTLGLSFVYMIRVYLLQGWYIVTYALGIYHLNLFIAFLSPKVDPSLMEDSDDGPSLPTKQNEEFRPFIRRLPEFKFWHAATKGILVAMVCTFFDAFNVPVFWPILVMYFIMLFCITMKRQIKHMIKYRYIPFTHGKRRYRGKEDAGKAFAS

SEQ ID NO: 850973 - protein, 196 aa, Homo sapiens; identical to SEQ ID NO: 850971

SEQ ID NO: 850974 - protein, 196 aa, Homo sapiens; identical to SEQ ID NO: 850971

SEQ ID NO: 850975 - protein, 120 aa, Homo sapiens
MGRDTGPELCLHDSSLPAADDGPSLPTKQNEEFRPFIRRLPEFKFWHAATKGILVAMVCTFFDAFNVPVFWPILVMYFIMLFCITMKRQIKHMIKYRYIPFTHGKRRYRGKEDAGKAFAS

SEQ ID NO: 850976 - protein, 156 aa, Homo sapiens
AAPRRTERKCSLQLPGAGAQRLRPPVPRRPPSRGREGDRGSAVRGAASYRMSEGDSVGESVHGKPSVVYRFFTRLGQIYQSWLDKSTPYTAVRWVVTLGLSFVYMIRVYLLQGWYIVTYALGIYHLNLFIAFLSPKVDPSLMEDSDDGPSGILKTT

SEQ ID NO: 850977 - protein, 107 aa, Homo sapiens
RRRGGRSGSARCSFPEPERSACGRPCPAVLLPAAVRETAARPYAELRVTECLKGTVWENPSMGNLRWCTDFSQDLDRLVGFLVDEYKYLKKKRDSQHFREGSVCWCS

SEQ ID NO: 850978 - protein, 121 aa, Homo sapiens
MSEGDSVGESVHGKPSVVYRFFTRLGQIYQSWLDKSTPYTAVRWVVTLGLSFVYMIRVYLLQGWYIVTYALGIYHRTAVWVWIYQSWLDKSTPYTAVRWVVTLGLSFVYMIRVYQTLQQVN

SEQ ID NO: 850979 - protein, 246 aa, Homo sapiens; identical to SEQ ID NO: 850965

SEQ ID NO: 850980 - protein, 196 aa, Homo sapiens; identical to SEQ ID NO: 850971

SEQ ID NO: 850981 - protein, 246 aa, Homo sapiens; identical to SEQ ID NO: 850965

SEQ ID NO: 850982 - protein, 246 aa, Homo sapiens; identical to SEQ ID NO: 850965

SEQ ID NO: 850983 - protein, 308 aa, Homo sapiens
AAPRRTERKCSLQLPGAGAQRLRPPVPRRPPSRGREGDRGSAVRGAASYRMSEGDSVGESVHGKPSVVYRFFTRLGQIYQSWLDKSTPYTAVRWVVTLGLSFVYMIRVYLLQGWYIVTYALGIYHLNLFIAFLSPKVDPSLMEDSDDGPSLPTKQNEEFRPFIRRLPEFKFWHAATKGILVAMVCTFFDAFNVPVFWPILVMYFIMLFCITMKRQIKHMIKYRYIPFTHGKRSDVQVFLTDGILVSCRREARRVEPMGARASGRSPLCQVGRQEQGLRGRNGPLPASRLPQQPQVVPATPQSPRDDLA

SEQ ID NO: 850984 - protein, 231 aa, Homo sapiens
MDFQVAGPSPEPDKGPLKELHSSRRKLRSKPESYRMSEGDSVGESVHGKPSVVYRFFTRLGQIYQSWLDKSTPYTAVRWVVTLGLSFVYMIRVYLLQGWYIVTYALGIYHLNLFIAFLSPKVDPSLMEDSDDGPSLPTKQNEEFRPFIRRLPEFKFWHAATKGILVAMVCTFFDAFNVPVFWPILVMYFIMLFCITMKRQIKHMIKYRYIPFTHGKRRYRGKEDAGKAFAS

SEQ ID NO: 850985 - protein, 196 aa, Homo sapiens; identical to SEQ ID NO: 850971

SEQ ID NO: 850986 - protein, 196 aa, Homo sapiens; identical to SEQ ID NO: 850971

SEQ ID NO: 850987 - protein, 192 aa, Homo sapiens
NFERRYPGSEESSLQSLSQDVGQIYQSWLDKSTPYTAVRWVVTLGLSFVYMIRVYLLQGWYIVTYALGIYHLNLFIAFLSPKVDPSLMEDSDDGPSLPTKQNEEFRPFIRRLPEFKFWHAATKGILVAMVCTFFDAFNVPVFWPILVMYFIMLFCITMKRQIKHMIKYRYIPFTHGKRRYRGKEDAGKAFAS

SEQ ID NO: 850988 - protein, 237 aa, Homo sapiens; identical to SEQ ID NO: 850970

SEQ ID NO: 850989 - protein, 106 aa, Homo sapiens
MSEGDSVGESVHGKPSVVYRFFTRLGQIYQSWLDKSTPYTAVRWVVTLGLSFVYMIRVYLLQGWYIVTYALGIYHLNLFIAFLSPKVDPSLMEDSDDGPSGILKTT

SEQ ID NO: 850990 - protein, 184 aa, Homo sapiens
KITARYEAGVTEPERSACGRPCPAVLLPAAVRETAARPYAELRGARKGCVARERPGSAASASSGLSRPRAGGAALRAGRGGPSGPGWPRGPCSRPAALRGTGRASGSGPGRGAGGCGGALGPARVGGAGEGPGGGCSPRATRAASRPHPLLGIWGKRAVAAPTALRVGLYSRVMCPVPILRPGQ

SEQ ID NO: 850991 - protein, 276 aa, Homo sapiens
MSFEGGDGAGPAMLATGTARMASGRPEELWEAVVGAAERFRARTGTELVLLTAAPPPPPRPGPCAYAAHGRGALAEAARRCLHDIALAHRAATAARPPAPPPAPQPPSPTPSPPRPTLAREDNEEDEDEPTETETSGEQLGISDNGGLFVMDEDATLQDLPPFCESDPESTDDGSLSEETPAGPPTCSVPPASALPTQQYAKSLPVSVPVWGFKEKRTEARSSDEENGPPSSPDLDRIAASMRALVLREAEDTQVFGDLPRPRLNTSDFQKLKRKY

SEQ ID NO: 850992 - protein, 256 aa, Homo sapiens
MASGRPEELWEAVVGAAERFRARTGTELVLLTAAPPPPPRPGPCAYAAHGRGALAEAARRCLHDIALAHRAATAARPPAPPPAPQPPSPTPSPPRPTLAREDNEEDEDEPTETETSGEQLGISDNGGLFVMDEDATLQDLPPFCESDPESTDDGSLSEETPAGPPTCSVPPASALPTQQYAKSLPVSVPVWGFKEKRTEARSSDEENGPPSSPDLDRIAASMRALVLREAEDTQVFGDLPRPRLNTSDFQKLKRKY

SEQ ID NO: 850993 - protein, 256 aa, Homo sapiens; identical to SEQ ID NO: 850992

SEQ ID NO: 850994 - protein, 369 aa, Homo sapiens
CTISRGSHAPALGEGQSGWSLPSWRRGFGWNLQPPLQEPSAGGRHCPRPSSGPTADRQTKLLQLPPASQTACIPLGAGPSPAPSQRTFSTTRMTPAMRESRSCYFLALVCRARMASGRPEELWEAVVGAAERFRARTGTELVLLTAAPPPPPRPGPCAYAAHGRGALAEAARRCLHDIALAHRAATAARPPAPPPAPQPPSPTPSPPRPTLAREDNEEDEDEPTETETSGEQLGISDNGGLFVMDEDATLQDLPPFCESDPESTDDGSLSEETPAGPPTCSVPPASALPTQQYAKSLPVSVPVWGFKEKRTEARSSDEENGPPSSPDLDRIAASMRALVLREAEDTQVFGDLPRPRLNTSDFQKLKRKY

SEQ ID NO: 850995 - protein, 222 aa, Homo sapiens
MASGAPRRTCAYAAHGRGALAEAARRCLHDIALAHRAATAARPPAPPPAPQPPSPTPSPPRPTLAREDNEEDEDEPTETETSGEQLGISDNGGLFVMDEDATLQDLPPFCESDPESTDDGSLSEETPAGPPTCSVPPASALPTQQYAKSLPVSVPVWGFKEKRTEARSSDEENGPPSSPDLDRIAASMRALVLREAEDTQVFGDLPRPRLNTSDFQKLKRKY

SEQ ID NO: 850996 - protein, 276 aa, Homo sapiens; identical to SEQ ID NO: 850991

SEQ ID NO: 850997 - protein, 263 aa, Homo sapiens [sequence omitted]

SEQ ID NO: 850998 - protein, 258 aa, Homo sapiens
MTQPQHLRLGESLGLSHLSAGRDSWKSRTDKRRGGRGWRRGAPRTCAYAAHGRGALAEAARRCLHDIALAHRAATAARPPAPPPAPQPPSPTPSPPRPTLAREDNEEDEDEPTETETSGEQLGISDNGGLFVMDEDATLQDLPPFCESDPESTDDGSLSEETPAGPPTCSVPPASALPTQQYAKSLPVSVPVWGFKEKRTEARSSDEENGPPSSPDLDRIAASMRALVLREAEDTQVFGDLPRPRLNTSDFQKLKRKY

SEQ ID NO: 850999 - protein, 256 aa, Homo sapiens; identical to SEQ ID NO: 850992

SEQ ID NO: 851000 - protein, 276 aa, Homo sapiens; identical to SEQ ID NO: 850991

SEQ ID NO: 851001 - protein, 276 aa, Homo sapiens; identical to SEQ ID NO: 850991

SEQ ID NO: 851002 - protein, 104 aa, Homo sapiens
MRTPPSRTFPPSVSQTPRVQMVSVPGCSPPDLGAGTRPTQRQGQKLKSTLSFRWQPERGDPRRPPHLLSAPSLSPTHTAVRQVPACVCARLGLQGEEDRGAVIR

SEQ ID NO: 851003 - protein, 374 aa, Homo sapiens
RNQAPKMAAAAEERMAEEGGGGQGDGGSSLASGSTQRQPPPPAPQHPQPGSQALPAPALAPDQLPQNNTLVALPIVAIENILSFMSYDEISQLRLVCKRMDLVCQRMLNQGFLKVERYHNLCQKQVKAQLPRRESERRNHSLARHADILAAVETRLSLLNMTFMKYVDSNLCCFIPGKVIDEIYRVLRYVNSTRAPQRAHEVLQELRDISSMAMEYFDEKIVPILKRKLPGSDVSGRLMGSPPVPGPSAALTTMQLFSKQNPSRQEVTKLQQQVKTNGAGVTVLRREISELRTKVQEQQKQLQDQDQKLLEQTQIIGEQNARLAELERKLREVMESAVGNSSGSGQNEESPRKRKKATEAIDSLRKSKRLRNRK

SEQ ID NO: 851004 - protein, 374 aa, Homo sapiens; identical to SEQ ID NO: 851003

SEQ ID NO: 851005 - protein, 374 aa, Homo sapiens; identical to SEQ ID NO: 851003

SEQ ID NO: 851006 - protein, 180 aa, Homo sapiens
RNQAPKMAAAAEERMAEEGGGGQGDGGSSLASGSTQRQPPPPAPQHPQPGSQALPAPALAPDQLPQNNTLVALPIVAIENILSFMSYDEISQLRLVCKRMDLVCQRMLNQGFLKVERYHNLCQKQVKAQLPRRESERRNHSLARHADILAAVETRLSLLNMTFMKYVDSNLCCFIPGKVK

SEQ ID NO: 851007 - protein, 374 aa, Homo sapiens; identical to SEQ ID NO: 851003

SEQ ID NO: 851008 - protein, 374 aa, Homo sapiens; identical to SEQ ID NO: 851003

SEQ ID NO: 851009 - protein, 68 aa, Homo sapiens
DVGAFAVWCVVVWGVLPFGPLGPGRSPSSPASLYLFSSPVFCWSPSVGFWMSLCGGRVVLFSPPLGGV

SEQ ID NO: 851010 - protein, 717 aa, Homo sapiens
MELRCGGLLFSSRFDSGNLAHVEKVESLSSDGEGVGGGASALTSGIASSPDYEFNVWTRPDCAETEFENGNRSWFYFSVRGGMPGKLIKINIMNMNKQSKLYSQGMAPFVRTLPTRPRWERIRDRPTFEMTETQFVLSFVHRFVEGRGATTFFAFCYPFSYSDCQELLNQLDQRFPENHPTHSSPLDTIYYHRELLCYSLDGLRVDLLTITSCHGLREDREPRLEQLFPDTSTPRPFRFAGKRIFFLSSRVHPGETPSSFVFNGFLDFILRPDDPRAQTLRRLFVFKLIPMLNPDGVVRGHYRTDSRGVNLNRQYLKPDAVLHPAIYGAKAVLLYHHVHSRLNSQSSSEHQPSSCLPPDAPVSDLEKANNLQNEAQCGHSADRHNAEAWKQTEPAEQKLNSVWIMPQQSAGLEESAPDTIPPKESGVAYYVDLHGHASKRGCFMYGNSFSDESTQVENMLYPKLISLNSAHFDFQGCNFSEKNMYARDRRDGQSKEGSGRVAIYKASGIIHSYTLECNYNTGRSVNSIPAACHDNGRASPPPPPAFPSRYTVELFEQVGRAMAIAALDMAECNPWPRIVLSEHSSLTNLRAWMLKHVRNSRGLSSTLNVGVNKKRGLRTPPKSHNGLPVSCSENTLSRARSFSTGTSAGGSSSSQQNSPQMKNSPSFPFHGSRPAGLPGLGSSTQKVTHRVLGPVRGKPVWEPLQHVFGCLGHCWGK

SEQ ID NO: 851011 - protein, 816 aa, Homo sapiens
MELRCGGLLFSSRFDSGNLAHVEKVESLSSDGEGVGGGASALTSGIASSPDYEFNVWTRPDCAETEFENGNRSWFYFSVRGGMPGKLIKINIMNMNKQSKLYSQGMAPFVRTLPTRPRWERIRDRPTFEMTETQFVLSFVHRFVEGRGATTFFAFCYPFSYSDCQELLNQLDQRFPENHPTHSSPLDTIYYHRELLCYSLDGLRVDLLTITSCHGLREDREPRLEQLFPDTSTPRPFRFAGKRIFFLSSRVHPGETPSSFVFNGFLDFILRPDDPRAQTLRRLFVFKLIPMLNPDGVVRGHYRTDSRGVNLNRQYLKPDAVLHPAIYGAKAVLLYHHVHSRLNSQSSSEHQPSSCLPPDAPVSDLEKANNLQNEAQCGHSADRHNAEAWKQTEPAEQKLNSVWIMPQQSAGLEESAPDTIPPKESGVAYYVDLHGHASKRGCFMYGNSFSDESTQVENMLYPKLISLNSAHFDFQGCNFSEKNMYARDRRDGQSKEGSGRVAIYKASGIIHSYTLECNYNTGRSVNSIPAACHDNGRASPPPPPAFPSRYTVELFEQVGRAMAIAALDMAECNPWPRIVLSEHSSLTNLRAWMLKHVRNSRGLSSTLNVGVNKKRGLRTPPKSHNGLPVSCSENTLSRARSFSTGTSAGGSSSSQQNSPQMKNSPSFPFHGSRPAGLPGLGSSTQKVTHRVLGPVREPRSQDRRRQQQPLNHRPAGSLAPSPAPTSSGPASSHKLGSCLLPDSFNIPGSSCSLLSSGDKPEAVMVIGKGLLGTGARMPCIKTRLQTCPRRVSARRGPGFPRLGPGWAGAHRRLAEG

SEQ ID NO: 851012 - protein, 886 aa, Homo sapiens
MELRCGGLLFSSRFDSGNLAHVEKVESLSSDGEGVGGGASALTSGIASSPDYEFNVWTRPDCAETEFENGNRSWFYFSVRGGMPGKLIKINIMNMNKQSKLYSQGMAPFVRTLPTRPRWERIRDRPTFEMTETQFVLSFVHRFVEGRGATTFFAFCYPFSYSDCQELLNQLDQRFPENHPTHSSPLDTIYYHRELLCYSLDGLRVDLLTITSCHGLREDREPRLEQLFPDTSTPRPFRFAGKRIFFLSSRVHPGETPSSFVFNGFLDFILRPDDPRAQTLRRLFVFKLIPMLNPDGVVRGHYRTDSRGVNLNRQYLKPDAVLHPAIYGAKAVLLYHHVHSRLNSQSSSEHQPSSCLPPDAPVSDLEKANNLQNEAQCGHSADRHNAEAWKQTEPAEQKLNSVWIMPQQSAGLEESAPDTIPPKESGVAYYVDLHGHASKRGCFMYGNSFSDESTQVENMLYPKLISLNSAHFDFQGCNFSEKNMYARDRRDGQSKEGSGRVAIYKASGIIHSYTLECNYNTGRSVNSIPAACHDNGRASPPPPPAFPSRYTVELFEQVGRAMAIAALDMAECNPWPRIVLSEHSSLTNLRAWMLKHVRNSRGLSSTLNVGVNKKRGLRTPPKSHNGLPVSCSENTLSRARSFSTGTSAGGSSSSQQNSPQMKNSPSFPFHGSRPAGLPGLGSSTQKVTHRVLGPVREPRSQDRRRQQQPLNHRPAGSLAPSPAPTSSGPASSHKLGSCLLPDSFNIPGSSCSLLSSGDKPEAVMVIGKGLLGTGARMPCIKTRLQARPRLGRGSPPTRRGMKGSSGPTSPTPRTRESSELELGSCSATPGLPQARPPRPRSAPAFSPISCSLSDSPSWNCYSRGPLGQPEVCFVPKSPPLTVSPRV

SEQ ID NO: 851013 - protein, 886 aa, Homo sapiens; identical to SEQ ID NO: 851012

SEQ ID NO: 851014 - protein, 787 aa, Homo sapiens [sequence omitted]

SEQ ID NO: 851015 - protein, 662 aa, Homo sapiens
MELRCGGLLFSSRFDSGNLAHVEKVESLSSDGEGVGGGASALTSGIASSPDYEFNVWTRPDCAETEFENGNRSWFYFSVRGGMPGKLIKINIMNMNKQSKLYSQGMAPFVRTLPTRPRWERIRDRPTFEMTETQFVLSFVHRFVEGRGATTFFAFCYPFSYSDCQELLNQLDQRFPENHPTHSSPLDTIYYHRELLCYSLDGLRVDLLTITSCHGLREDREPRLEQLFPDTSTPRPFRFAGKRIFFLSSRVHPGETPSSFVFNGFLDFILRPDDPRAQTLRRLFVFKLIPMLNPDGVVRGHYRTDSRGVNLNRQYLKPDAVLHPAIYGAKAVLLYHHVHSRLNSQSSSEHQPSSCLPPDAPVSDLEKANNLQNEAQCGHSADRHNAEAWKQTEPAEQKLNSVWIMPQQSAGLEESAPDTIPPKESGVAYYVDLHGHASKRGCFMYGNSFSDESTQVENMLYPKLISLNSAHFDFQGCNFSEKNMYARDRRDGQSKEGSGRVAIYKASGIIHSYTLECNYNTGRSVNSIPAACHDNGRASPPPPPAFPSRYTVELFEQVGRAMAIAALDMAECNPWPRIVLSEHSSLTNLRAWMLKHVRNSRGLSSTLNVGVNKKRGLRTPPKSHNGLPVSCSENTLSRARSFSTGTSAGGSSSSQQNSPQMK

SEQ ID NO: 851016 - protein, 717 aa, Homo sapiens; identical to SEQ ID NO: 851010

SEQ ID NO: 851017 - protein, 605 aa, Homo sapiens
GTRLSKLVRIRDRPTCEMTETQFVLSFVHRFVEGRGATTFFAFCYPFSYSDCQELLNQLDQRFPENHPTHSSPLDTIYYHRELLCYSLDGLRVDLLTITSCHGLREDREPRLEQLFPDTSTPRPFRFAGKRIFFLSSRVHPGETPSSFVFNGFLDFILRPDDPRAQTLRRLFVFKLIPMLNPDGVVRGHYRTDSRGVNLNRQYLKPDAVLHPAIYGAKAVLLYHHVHSRLNSQSSSEHQPSSCLPPDAPVSDLEKANNLQNEAQCGHSADRHNAEAWKQTEPAEQKLNSVWIMPQQSAGLEESAPDTIPPKESGVAYYVDLHGHASKRGCFMYGNSFSDESTQVENMLYPKLISLNSAHFDFQGCNFSEKNMYARDRRDGQSKEGSGRVAIYKASGIIHSYTLECNYNTGRSVNSIPAACHDNGRASPPPPPAFPSRYTVELFEQVGRAMAIAALDMAECNPWPRIVLSEHSSLTNLRAWMLKHVRNSRGLSSTLNVGVNKKRGLRTPPKSHNGLPVSCSENTLSRARSFSTGTSAGGSSSSQQNSPQMKNSPSFPFHGSRPAGLPGLGSSTQKVTHRVLGPVRGKPVWEPLQHVFGCLGHCWGK

SEQ ID NO: 851018 - protein, 123 aa, Homo sapiens
MVIGKGLLGTGARMPCIKTRLQARPRLGRGSPPTRRGMKGSSGPTSPTPRTRESSELELGSCSATPGLPQARPPRPRSAPAFSPISCSLSDSPSWNCYSRGPLGQPEVCFVPKSPPLTVSPRV

SEQ ID NO: 851019 - protein, 115 aa, Homo sapiens
MEESSLLAQTLSTQARPRLGRGSPPTRRGMKGSSGPTSPTPRTRESSELELGSCSATPGLPQARPPRPRSAPAFSPISCSLSDSPSWNCYSRGPLGQPEVCFVPKSPPLTVSPRV

SEQ ID NO: 851020 - protein, 194 aa, Homo sapiens
  misc_feature (1)..(1): Xaa can be any naturally occurring amino acid
  misc_feature (30)..(30): Xaa can be any naturally occurring amino acid
XGDRPWEALKGTPPFYYYAFYELVAKGSAXCLGTPNKCSSAPGTPSQCGEDNGRGILLLVGGASWDSRAGLPCPPPYQVHGLCICPHQSVHTVSAAKTCTRIIHDMQQSLGTPMPAGMNAMLYSAWPYLPQVRPPHIYLSGSASECECHGHVYSCHFDTAVSQSGSPCNMCSVVWGIAGGSKSLKIYCWPRTKG

SEQ ID NO: 851021 - protein, 886 aa, Homo sapiens; identical to SEQ ID NO: 851012

SEQ ID NO: 851022 - protein, 477 aa, Homo sapiens [sequence omitted]

SEQ ID NO: 851023 - protein, 516 aa, Homo sapiens [sequence omitted]

SEQ ID NO: 851024 - protein, 303 aa, Homo sapiens
MELRCGGLLFSSRFDSGNLAHVEKVESLSSDGEGVGGGASALTSGIASSPDYEFNVWTRPDCAETEFENGNRSWFYFSVRGGMPGKLIKINIMNMNKQSKLYSQGMAPFVRTLPTRPRWERIRDRPTFEMTETQFVLSFVHRFVEGRGATTFFAFCYPFSYSDCQELLNQLDQRFPENHPTHSSPLDTIYYHRELLCYSLDGLRVDLLTITSCHGLREDREPRLEQLFPDTSTPRPFRFAGKRIFFLSSRVHPGETPSSFVFNGFLDFILRPDDPRAQTLRRLFVFKLIPMLNPDGVVRGHYR

SEQ ID NO: 851025 - protein, 465 aa, Homo sapiens
MELRCGGLLFSSRFDSGNLAHVEKVESLSSDGEGVGGGASALTSGIASSPDYEFNVWTRPDCAETEFENGNRSWFYFSVRGGMPGKLIKINIMNMNKQSKLYSQGMAPFVRTLPTRPRWERIRDRPTFEMTETQFVLSFVHRFVEGRGATTFFAFCYPFSYSDCQELLNQLDQRFPENHPTHSSPLDTIYYHRELLCYSLDGLRVDLLTITSCHGLREDREPRLEQLFPDTSTPRPFRFAGKRIFFLSSRVHPGETPSSFVFNGFLDFILRPDDPRAQTLRRLFVFKLIPMLNPDGVVRGHYRTDSRGVNLNRQYLKPDAVLHPAIYGAKAVLLYHHVHSRLNSQSSSEHQPSSCLPPDAPVSDLEKANNLQNEAQCGHSADRHNAEAWKQTEPAEQKLNSVWIMPQQSAGLEESAPDTIPPKESGVAYYVDLHGHASKRGCFMYGTYGEKRITQGENIRYTITE

SEQ ID NO: 851026 - protein, 603 aa, Homo sapiens
ICTRSVPGCYVSRGGLEPGLKYPRPSSVTCNGRGATTFFAFCYPFSYSDCQELLNQLDQRFPENHPTHSSPLDTIYYHRELLCYSLDGLRVDLLTITSCHGLREDREPRLEQLFPDTSTPRPFRFAGKRIFFLSSRVHPGETPSSFVFNGFLDFILRPDDPRAQTLRRLFVFKLIPMLNPDGVVRGHYRTDSRGVNLNRQYLKPDAVLHPAIYGAKAVLLYHHVHSRLNSQSSSEHQPSSCLPPDAPVSDLEKANNLQNEAQCGHSADRHNAEAWKQTEPAEQKLNSVWIMPQQSAGLEESAPDTIPPKESGVAYYVDLHGHASKRGCFMYGNSFSDESTQVENMLYPKLISLNSAHFDFQGCNFSEKNMYARDRRDGQSKEGSGRVAIYKASGIIHSYTLECNYNTGRSVNSIPAACHDNGRASPPPPPAFPSRYTVELFEQVGRAMAIAALDMAECNPWPRIVLSEHSSLTNLRAWMLKHVRNSRGLSSTLNVGVNKKRGLRTPPKSHNGLPVSCSENTLSRARSFSTGTSAGGSSSSQQNSPQMKNSPSFPFHGSRPAGLPGLGSSTQKVTHRVLGPVRGKPVWEPLQHVFGCLGHCWGK

SEQ ID NO: 851027 - protein, 102 aa, Homo sapiens
RVNWHLLLCSGLPVSCSENTLSRARSFSTGTSAGGSSSSQQNSPQMKNSPSFPFHGSRPAGLPGLGSSTQKVTHRVLGPVRGKPVWEPLQHVFGCLGHCWGK

SEQ ID NO: 851028 - protein, 626 aa, Homo sapiens; identical to SEQ ID NO: 794046

SEQ ID NO: 851029 - protein, 409 aa, Homo sapiens
MKWHSEDEIRITTWRNRKPPERKMSQNTQDGYTRNWFKVTIPYGIKYDKAWLMNSIQSHCSDRFTPVDFHYVRNRACFFVQDASAASALKDVSYKIYDDENQKICIFVNHSTAPYSVKNKLKPGQMEMLKLTMNKRYNVSQQALDLQNLRFDPDLMGRDIDIILNRRNCMAATLKIIERNFPELLSLNLCNNKLYQLDGLSDITEKAPKVKTLNLSKNKLESAWELGKVKGLKLEELWLEGNPLCSTFSDQSAYVSAIRDCFPKLLRLDGRELSAPVIVDIDSSETMKPCKENFTGSETLKHLVLQFLQQYYSIYDSGDRQGLLGAYHDEACFSLAIPFDPKDSAPSSLCKYFEDSRNMKTLKDPYLKGELLRRTKRDIVDSLSALPKTQHDLSSILVDVWCQTVPSGQ

SEQ ID NO: 851030 - protein, 626 aa, Homo sapiens; identical to SEQ ID NO: 794046

SEQ ID NO: 851031 - protein, 490 aa, Homo sapiens
MCSTLKKCGTYRTEVAECHDHGSTFQGRKKGGSSFRDNFDKRSCHYEHGGYERPPSHCQENDGSVEMRDVHKDQQLRHTPYSIRCERRMKWHSEDEIRITTWRNRKPPERKMSQNTQDGYTRNWFKVTIPYGIKYDKAWLMNSIQSHCSDRFTPVDFHYVRNRACFFVQDASAASALKDVSYKIYDDENQKICIFVNHSTAPYSVKNKLKPGQMEMLKLTMNKRYNVSQQALDLQNLRFDPDLMGRDIDIILNRRNCMAATLKIIERNFPELLSLNLCNNKLYQLDGLSDITEKAPKVKTLNLSKNKLESAWELGKVKGLKLEELWLEGNPLCSTFSDQSAYVSAIRDCFPKLLRLDGRELSAPVIVDIDSSETMKPCKENFTGSETLKHLVLQFLQQYYSIYDSGDRQGLLGAYHDEACFSLAIPFDPKDSAPSSLCKYFEDSRNMKTLKDPYRGQDPRRGLQANLLKGALRCLLCLRSHPLCFLFSPA

SEQ ID NO: 851032 - protein, 345 aa, Homo sapiens
KEFGTSTMEDSGKTFSSEEEEANYWKDLAMTYKQRAENTQEELREFQEGSREYEAELETQLQQIETRNRDLLSENNRLRMELETIKEKFEVQHSEGYRQISALEDDLAQTKAIKDQLQKYIRELEQANDDLERAKRATIMSLEDFEQRLNQAIERNAFLESELDEKENLLESVQRLKDEARDLRQELAVQQKQEKPRTPMPSSVEAERTDTAVQATGSVPSTPIAHRGPSSSLNTPGSFRRGLDDSTGGTPLTPAARISALNIVGDLLRKVGALESKLASCRNLVYDQSPNRTGGPASGRSSKNRDGGERRPSSTSVPLGDKGSVPSNKPLAGGENPPAPGKRHS

SEQ ID NO: 851033 - protein, 386 aa, Homo sapiens
VGQKPGPLREAAVLSARPAWLAGSSVTIASRTRQWHTRGVVDRPVPLVLSIMEDSGKTFSSEEEEANYWKDLAMTYKQRAENTQEELREFQEGSREYEAELETQLQQIETRNRDLLSENNRLRMELETIKEKFEVQHSEGYRQISALEDDLAQTKAIKDQLQKYIRELEQANDDLERAKRATIMSLEDFEQRLNQAIERNAFLESELDEKENLLESVQRLKDEARDLRQELAVQQKQEKPRTPMPSSVEAERTDTAVQATGSVPSTPIAHRGPSSSLNTPGSFRRGLDDSTGGTPLTPAARISALNIVGDLLRKVGALESKLASCRNLVYDQSPNRTGGPASGRSSKNRDGGERRPSSTSVPLGDKGLDTSCRWLSKSTTRSSSSC

SEQ ID NO: 851034 - protein, 384 aa, Homo sapiens
AGAAPPFAAASAAAAALASPPLLGHHATRRVISSPVFTMEDSGKTFSSEEEEANYWKDLAMTYKQRAENTQEELREFQEGSREYEAELETQLQQIETRNRDLLSENNRLRMELETIKEKFEVQHSEGYRQISALEDDLAQTKAIKDQLQKYIRELEQANDDLERAKRATIMSLEDFEQRLNQAIERNAFLESELDEKENLLESVQRLKDEARDLRQELAVQQKQEKPRTPMPSSVEAERTDTAVQATGSVPSTPIAHRGPSSSLNTPGSFRRGLDDSTGGTPLTPAARISALNIVGDLLRKVGALESKLASCRNLVYDQSPNRTGGPASGRSSKNRDGGERRPSSTSVPLGDKGLGKRLEFGKPPSHMSSSPLPSAQGVVKMLL

SEQ ID NO: 851035 - protein, 357 aa, Homo sapiens
AGAAPPFAAASAAAAALASPPLLGHHATRRVISSPVFTMEDSGKTFSSEEEEANYWKDLAMTYKQRAENTQEELREFQEGSREYEAELETQLQQIETRNRDLLSENNRLRMELETIKEKFEVQHSEGYRQISALEDDLAQTKAIKDQLQKYIRELEQANDDLERAKRATIMSLEDFEQRLNQAIERNAFLESELDEKENLLESVQRLKDEARDLRQELAVQQKQEKPRTPMPSSVEAERTDTAVQATGSVPSTPIAHRGPSSSLNTPGSFRRGLDDSTGGTPLTPAARISALNIVGDLLRKVGALESKLASCRNLVYDQSPNRTGGPASGRSSKNRDGGERRPSSTSVPLGDKGREN

SEQ ID NO: 851036 - protein, 400 aa, Homo sapiens
AGAAPPFAAASAAAAALASPPLLGHHATRRVISSPVFTMEDSGKTFSSEEEEANYWKDLAMTYKQRAENTQEELREFQEGSREYEAELETQLQQIETRNRDLLSENNRLRMELETIKVPRRSLNRQCSRWSPLAASSWSLRLNLEKFEVQHSEGYRQISALEDDLAQTKAIKDQLQKYIRELEQANDDLERAKRATIMSLEDFEQRLNQAIERNAFLESELDEKENLLESVQRLKDEARDLRQELAVQQKQEKPRTPMPSSVEAERTDTAVQATGSVPSTPIAHRGPSSSLNTPGSFRRGLDDSTGGTPLTPAARISALNIVGDLLRKVGALESKLASCRNLVYDQSPNRTGGPASGRSSKNRDGGERRPSSTSVPLGDKGLDTSCRWLSKSTTRSSSSC

SEQ ID NO: 851037 - protein, 425 aa, Homo sapiens
AGAAPPFAAASAAAAALASPPLLGHHATRRVISSPVFTMEDSGKTFSSEEEEANYWKDLAMTYKQRAENTQEELREFQEGSREYEAELETQLQQIETRNRDLLSENNRLRMELETIKEKFEVQHSEGYRQISALEDDLAQTKAIKDQLQKYIRELEQANDDLERAKRATIMSLEDFEQRLNQAIERNAFLESELDEKENLLESVQRLKDEARDLRQELAVQQKQEKPRTPMPSSVEAERTDTAVQATGSVPSTPIAHRGPSSSLNTPGSFRRGLDDSTGGTPLTPAARISALNIVGDLLRKVGVGEAPGIWEAAFTHVFIAAAVSPGGSQDVALGKPRKLKVLVLVGHELPLVVQINNQVVQLLLKPVLGLFQFIIRGRLLLVLLGEVLDLLLEPLLPLFQSFHGAGKVLQLLLRVGELQGQRPG

SEQ ID NO: 851038 - protein, 384 aa, Homo sapiens; identical to SEQ ID NO: 851034

SEQ ID NO: 851039 - protein, 384 aa, Homo sapiens; identical to SEQ ID NO: 851034

SEQ ID NO: 851040 - protein, 138 aa, Homo sapiens [sequence omitted]

SEQ ID NO: 851041 - protein, 109 aa, Homo sapiens
MDLRQELAVQQKQEKPRTPMPSSVEAERTDTAVQATGSVPSTPIAHRGPSSSLNTPGSFRRGTGVQTRFLPEPRVRSVPKPNRWPSLWAEQQEQRWRGETAKQHQRAFG

SEQ ID NO: 851042 - protein, 104 aa, Homo sapiens
VGQKPGPLREAAVLSARPAWLAGSSVTIASRTRQWHTRGVVDRPVPLVLSIMEDSGKTFSSEEEEANYWKDLAMTYKQRAENTQEELREFQEGSREYEVNFLYF

SEQ ID NO: 851043 - protein, 105 aa, Homo sapiens
AVTPGGCVLLCLAFSEVLSHSLSVCVVLQEKFEVQHSEGYRQISALEDDLAQTKAIKDQLQKYIRELEQANDDLERAKRYGWKGKARVGDSPLCFLSPAAGYWAL

SEQ ID NO: 851044 - protein, 373 aa, Homo sapiens
AGAAPPFAAASAAAAALASPPLLGHHATRRVISSPVFTMEDSGKTFSSEEEEANYWKDLAMTYKQRAENTQEELREFQEGSREYEAELETQLQQIETRNRDLLSENNRLRMELETIKEKFEVQHSEGYRQISALEDDLAQTKAIKDQLQKYIRELEQANDDLERAKRATIMSLEDFEQRLNQAIERNAFLESELDEKENLLESVQRLKDEARDLRQELAVQQKQEKPRTPMPSSVEAERTDTAVQATGSVPSTPIAHRGPSSSLNTPGSFRRGLDDSTGGTPLTPAARISALNIVGDLLRKVGALESKLASCRNLVYDQSPNRTGGPASGRSSKNRDGGERRPSSTSVPLGDKGLDTSCRWLSKSTTRSSSSC

SEQ ID NO: 851045 - protein, 335 aa, Homo sapiens
MEDSGKTFSSEEEEANYWKDLAMTYKQRAENTQEELREFQEGSREYEAELETQLQQIETRNRDLLSENNRLRMELETIKEKFEVQHSEGYRQISALEDDLAQTKAIKDQLQKYIRELEQANDDLERAKRATIMSLEDFEQRLNQAIERNAFLESELDEKENLLESVQRLKDEARDLRQELAVQQKQEKPRTPMPSSVEAERTDTAVQATGSVPSTPIAHRGPSSSLNTPGSFRRGLDDSTGGTPLTPAARISALNIVGDLLRKVGALESKLASCRNLVYDQSPNRTGGPASGRSSKNRDGGERRPSSTSVPLGDKGLDTSCRWLSKSTTRSSSSC

SEQ ID NO: 851046 - protein, 383 aa, Homo sapiens
AGAAPPFAAASAAAAALASPPLLGHHATRRVISSPVFTMEDSGKTFSSEEEEANYWKDLAMTYKQRAENTQEELREFQEGSREYEAELETQLQQIETRNRDLLSENNRLRMELETIKEKFEVQHSEGYRQISALEDDLAQTKAIKDQLQKYIRELEQANDDLERAKRATIMSLEDFEQRLNQAIERNAFLESELDEKENLLESVQRLKDEARDLRQELAVQQKQEKPRTPMPSSVEAERTDTAVQATGSVPSTPIAHRGPSSSLNTPGSFRRGLDDSTGGTPLTPAARISALNIVGDLLRKVGVGHELPLVVQINNQVVQLLLKPVLGLFQFIIRGRLLLVLLGEVLDLLLEPLLPLFQSFHGAGKVLQLLLRVGELQGQRPG

SEQ ID NO: 851047 - protein, 203 aa, Homo sapiens [sequence omitted]

SEQ ID NO: 851048 - protein, 357 aa, Homo sapiens; identical to SEQ ID NO: 851035

SEQ ID NO: 851049 - protein, 357 aa, Homo sapiens; identical to SEQ ID NO: 851035

SEQ ID NO: 851050 - protein, 111 aa, Homo sapiens
MEDSGKTFSSEEEEANYWKDLAMTYKQRAENTQEELREFQEGSREYEAELETQLQQIETRNRDLLSENNRLRMELETIKEKFEVQHSEGYRQISALEDDLAQTKAIKDQLL

SEQ ID NO: 851051 - protein, 104 aa, Homo sapiens; identical to SEQ ID NO: 851042

SEQ ID NO: 851052 - protein, 70 aa, Homo sapiens
PMPSSVEAERTDTAVQATGSVPSTPIAHRGPSSSLNTPGSFRRGKGSGNCRIFSVHKVFLGKNLGWVLGV

SEQ ID NO: 851053 - protein, 204 aa, Homo sapiens
VCRLREKMAALGEPVRLERDICRAIELLEKLQRSGEVPPQKLQALQRVLQSEFCNAVREVYEHVYETVDISSSPEVRANATAKATVAAFAASEGHSHPRVVELPKTEEGLGFNIMGGKEQNSPIYISRIIPGGIADRHGGLKRGDQLLSVNGVSVEGEHHEKAVELLKAAQGKVKLVVRYTPKVLEEMESRFEKMRSAKRRQQT

SEQ ID NO: 851054 - protein, 204 aa, Homo sapiens; identical to SEQ ID NO: 851053

SEQ ID NO: 851055 - protein, 1480 aa, Homo sapiens
MQRSPLEKASVVSKLFFSWTRPILRKGYRQRLELSDIYQIPSVDSADNLSEKLEREWDRELASKKNPKLINALRRCFFWRFMFYGIFLYLGEVTKAVQPLLLGRIIASYDPDNKEERSIAIYLGIGLCLLFIVRTLLLHPAIFGLHHIGMQMRIAMFSLIYKKTLKLSSRVLDKISIGQLVSLLSNNLNKFDEGLALAHFVWIAPLQVALLMGLIWELLQASAFCGLGFLIVLALFQAGLGRMMMKYRDQRAGKISERLVITSEMIENIQSVKAYCWEEAMEKMIENLRQTELKLTRKAAYVRYFNSSAFFFSGFFVVFLSVLPYALIKGIILRKIFTTISFCIVLRMAVTRQFPWAVQTWYDSLGAINKIQDFLQKQEYKTLEYNLTTTEVVMENVTAFWEEGFGELFEKAKQNNNNRKTSNGDDSLFFSNFSLLGTPVLKDINFKIERGQLLAVAGSTGAGKTSLLMMIMGELEPSEGKIKHSGRISFCSQFSWIMPGTIKENIIFGVSYDEYRYRSVIKACQLEEDISKFAEKDNIVLGEGGITLSGGQRARISLARAVYKDADLYLLDSPFGYLDVLTEKEIFESCVCKLMANKTRILVTSKMEHLKKADKILILNEGSSYFYGTFSELQNLQPDFSSKLMGCDSFDQFSAERRNSILTETLHRFSLEGDAPVSWTETKKQSFKQTGEFGEKRKNSILNPINSIRKFSIVQKTPLQMNGIEEDSDEPLERRLSLVPDSEQGEAILPRISVISTGPTLQARRRQSVLNLMTHSVNQGQNIHRKTTASTRKVSLAPQANLTELDIYSRRLSQETGLEISEEINEEDLKECLFDDMESIPAVTTWNTYLRYITVHKSLIFVLIWCLVIFLAEVAASLVVLWLLGNTPLQDKGNSTHSRNNSYAVIITSTSSYYVFYIYVGVADTLLAMGFFRGLPLVHTLITVSKILHHKMLHSVLQAPMSTLNTLKAGGILNRFSKDIAILDDLLPLTIFDFIQLLLIVIGAIAVVAVLQPYIFVATVPVIVAFIMLRAYFLQTSQQLKQLESEGRSPIFTHLVTSLKGLWTLRAFGRQPYFETLFHKALNLHTANWFLYLSTLRWFQMRIEMIFVIFFIAVTFISILTTGEGEGRVGIILTLAMNIMSTLQWAVNSSIDVDSLMRSVSRVFKFIDMPTEGKPTKSTKPYKNGQLSKVMIIENSHVKKDDIWPSGGQMTVKDLTAKYTEGGNAILENISFSISPGQRVGLLGRTGSGKSTLLSAFLRLLNTEGEIQIDGVSWDSITLQQWRKAFGVIPQKVFIFSGTFRKNLDPYEQWSDQEIWKVADEVGLRSVIEQFPGKLDFVLVDGGCVLSHGHKQLMCLARSVLSKAKILLLDEPSAHLDPVTYQIIRRTLKQAFADCTVILCEHRIEAMLECQQFLVIEENKVRQYDSIQKLLNERSLFRQAISPSDRVKLFPHRNSSKCKSKPQIAALKEETEEEVQDTRL

SEQ ID NO: 851056 - protein, 1432 aa, Homo sapiens
MQRSPLEKASVVSKLFFSWTRPILRKGYRQRLELSDIYQIPSVDSADNLSEKLEREWDRELASKKNPKLINALRRCFFWRFMFYGIFLYLGEVTKAVQPLLLGRIIASYDPDNKEERSIAIYLGIGLCLLFIVRTLLLHPAIFGLHHIGMQMRIAMFSLIYKKTLKLSSRVLDKISIGQLVSLLSNNLNKFDEGLALAHFVWIAPLQVALLMGLIWELLQASAFCGLGFLIVLALFQAGLGRMMMKYRDQRAGKISERLVITSEMIENIQSVKAYCWEEAMEKMIENLRQTELKLTRKAAYVRYFNSSAFFFSGFFVVFLSVLPYALIKGIILRKIFTTISFCIVLRMAVTRQFPWAVQTWYDSLGAINKIQDFLQKQEYKTLEYNLTTTEVVMENVTAFWEEGFGELFEKAKQNNNNRKTSNGDDSLFFSNFSLLGTPVLKDINFKIERGQLLAVAGSTGAGKTSLLMMIMGELEPSEGKIKHSGRISFCSQFSWIMPGTIKENIIFGVSYDEYRYRSVIKACQLEEDISKFAEKDNIVLGEGGITLSGGQRARISLARAVYKDADLYLLDSPFGYLDVLTEKEIFESCVCKLMANKTRILVTSKMEHLKKADKILILNEGSSYFYGTFSELQNLQPDFSSKLMGCDSFDQFSAERRNSILTETLHRFSLEGDAPVSWTETKKQSFKQTGEFGEKRKNSILNPINSIRKFSIVQKTPLQMNGIEEDSDEPLERRLSLVPDSEQGEAILPRISVISTGPTLQARRRQSVLNLMTHSVNQGQNIHRKTTASTLKSVTGPSGKLRYITVHKSLIFVLIWCLVIFLAEVAASLVVLWLLGNTPLQDKGNSTHSRNNSYAVIITSTSSYYVFYIYVGVADTLLAMGFFRGLPLVHTLITVSKILHHKMLHSVLQAPMSTLNTLKAGGILNRFSKDIAILDDLLPLTIFDFIQLLLIVIGAIAVVAVLQPYIFVATVPVIVAFIMLRAYFLQTSQQLKQLESEGRSPIFTHLVTSLKGLWTLRAFGRQPYFETLFHKALNLHTANWFLYLSTLRWFQMRIEMIFVIFFIAVTFISILTTGEGEGRVGIILTLAMNIMSTLQWAVNSSIDVDSLMRSVSRVFKFIDMPTEGKPTKSTKPYKNGQLSKVMIIENSHVKKDDIWPSGGQMTVKDLTAKYTEGGNAILENISFSISPGQRVGLLGRTGSGKSTLLSAFLRLLNTEGEIQIDGVSWDSITLQQWRKAFGVIPQKVFIFSGTFRKNLDPYEQWSDQEIWKVADEVGLRSVIEQFPGKLDFVLVDGGCVLSHGHKQLMCLARSVLSKAKILLLDEPSAHLDPVTYQIIRRTLKQAFADCTVILCEHRIEAMLECQQFLVIEENKVRQYDSIQKLLNERSLFRQAISPSDRVKLFPHRNSSKCKSKPQIAALKEETEEEVQDTRL

SEQ ID NO: 851057 - protein, 1432 aa, Homo sapiens; identical to SEQ ID NO: 851056

SEQ ID NO: 851058 - protein, 1200 aa, Homo sapiens
MQRSPLEKASVVSKLFFSWTRPILRKGYRQRLELSDIYQIPSVDSADNLSEKLEREWDRELASKKNPKLINALRRCFFWRFMFYGIFLYLGEVTKAVQPLLLGRIIASYDPDNKEERSIAIYLGIGLCLLFIVRTLLLHPAIFGLHHIGMQMRIAMFSLIYKKTLKLSSRVLDKISIGQLVSLLSNNLNKFDEGLALAHFVWIAPLQVALLMGLIWELLQASAFCGLGFLIVLALFQAGLGRMMMKYRDQRAGKISERLVITSEMIENIQSVKAYCWEEAMEKMIENLRQTELKLTRKAAYVRYFNSSAFFFSGFFVVFLSVLPYALIKGIILRKIFTTISFCIVLRMAVTRQFPWAVQTWYDSLGAINKIQDFLQKQEYKTLEYNLTTTEVVMENVTAFWEEGFGELFEKAKQNNNNRKTSNGDDSLFFSNFSLLGTPVLKDINFKIERGQLLAVAGSTGAGKTSLLMMIMGELEPSEGKIKHSGRISFCSQFSWIMPGTIKENIIFGVSYDEYRYRSVIKACQLEEDISKFAEKDNIVLGEGGITLSGGQRARISLARAVYKDADLYLLDSPFGYLDVLTEKEIFESCVCKLMANKTRILVTSKMEHLKKADKILILNEGSSYFYGTFSELQNLQPDFSSKLMGCDSFDQFSAERRNSILTETLHRFSLEGDAPVSWTETKKQSFKQTGEFGEKRKNSILNPINSIRKFSIVQKTPLQMNGIEEDSDEPLERRLSLVPDSEQGEAILPRISVISTGPTLQARRRQSVLNLMTHSVNQGQNIHRKTTASTLKSVTGPSGKLRYITVHKSLIFVLIWCLVIFLAEVAASLVVLWLLGNTPLQDKGNSTHSRNNSYAVIITSTSSYYVFYIYVGVADTLLAMGFFRGLPLVHTLITVSKILHHKMLHSVLQAPMSTLNTLKAGGILNRFSKDIAILDDLLPLTIFDFIQLLLIVIGAIAVVAVLQPYIFVATVPVIVAFIMLRAYFLQTSQQLKQLESEGRSPIFTHLVTSLKGLWTLRAFGRQPYFETLFHKALNLHTANWFLYLSTLRWFQMRIEMIFVIFFIAVTFISILTTGEGEGRVGIILTLAMNIMSTLQWAVNSSIDVDSLMRSVSRVFKFIDMPTEGKPTKSTKPYKNGQLSKVMIIENSHVKKDDIWPSGGQMTVKDLTAKYTEGGNAILENISFSISPGQRVRFEHCLLC

SEQ ID NO: 851059 - protein, 1661 aa, Homo sapiens
MDGQTLRKAERSWSCSREKKEGYAKDMVTDFDEKHDEYLILLQQRNRILKHLKSKDPVQLRLEHLEQGFSVYVNGANSELKSSPRKAIHSDFSRSASHTEGTHDYGRRTLFREAEEALRRSSRTAPSKVQRRGWHQKSVQIRTEAGPRLHIEPPVDYSDDFELCGDVTLQANNTSEDRPQDTKSPTSTKPCGFNFSLLNACGHSDPSSSVDKERILLTIQDVMELRRSLELSVNLQRKQKDCSSDEYDSIEEDILSEPEPEDPALVGHPRHDRPPSSGDWTQKDVHGEQETEGRSSPGPDTLVVLEFNPASKSHKRERNLSAKRKDNAEVFVPTKPEPNLTPQAPAVFPDQERMCSRPGSRRERPLSATRKTLCEAEYPEEDASAVLQAIQVENAALQRALLSRKAEQPASPLQDAEGPPAKPWTSLLEEKEETLELLPITTATTTQEPAGAAGGARAINQAMDRIGLLGSRQQQKLLKVLQAVESDSAHLGRVVSPTKEQVSDTEDKQRMRADEIKDAIYVTMEILSNWGNSWWVGLTEVEFFDLNDTKLYVSPHDVDIRNTATPGELGRLVNRNLAGKKDSSPWTCPFHPPLQLFFVIRNTRQLGDFHLAKIKVRNYWTADGDLDIGAKNVKLYVNRNLIFNGKLDKGDREAPADHSILVDQKNEKSEQLEEAMNAHSEESKGTHEMAGASGDKELGLGCSPPAETLADAKLSSQGNVSGKRKNSTNCRKDSLSQLEEYLRLSAVPTSMGDMPSAPATSPPVKCPPVHEEPSLIQQLENLMGRKICEPPGKTPSWLQPSPTGKDRKQGGRKPKPLWLSPEKPLAWKGRLPSDDVIGEGPGETEARDKGLRHEPGWGTSRSVNTKERPQRATTKVHSDDSDIFNQPPNRERPASGRRGSRKDAGSSSHGDDQPASREDTWSSRTPSRSRWRSEQEHTLHESWSSLSAFDRSHRGRISNTELPGDILDELLQQKSSRHSDLPPSKKGEQPGLSRGQDGYSGETDAGGDFKIPVLPYGQRLVIDIKSTWGDRHYVGLNGIEIFSSKGEPVQISNIKADPPDINILPAYGKDPRVVTNLIDGVNRTQDDMHVWLAPFTRGRSHSITIDFTHPCHVALIRIWNYNKSRIHSFRGVKDITMLLDTQCIFEGEIAKASGTLAGAPEHFGDTILFTTDDDILEAIFYSDEMFDLDVGSLDSLQDEEAMRRPSTADGEGDERPFTQAGLGADERIPELELPSSSPVPQVTTPEPGIYHGICLQLNFTASWGDLHYLGLTGLEVVGKEGQALPIHLHQISASPRDLNELPEYSDDSRTLDKLIDGTNITMEDEHMWLIPFSPGLDHVVTIRLDRAESIAGLRFWNYNKSPEDTYRGAKIVHVSLDGLCVSPPEGFLIRKGPGNCHFDFAQEILFVDYLRAQLLPQPARRLDMRSLECASMDYEAPLMPCGFIFQFQLLTSWGDPYYIGLTGLELYDERGEKIPLSENNIAAFPDSVNSLEGVGGDVRTPDKLIDQVNDTSDGRHMWLAPILPGLVNRVYVIFDLPTTVSMIKLWNYAKTPHRGVKEFGLLVDDLLVYNGILAMVSHLVGGILPTCEPTVPYHTILFTEDRDIRHQEKHTTISNQAEDQDVQMMNENQIITNAKRKQSVVDPALRPKTCISEKETRRRRC

SEQ ID NO: 851060 - protein, 1635 aa, Homo sapiens
MTVRLCERPREAGPAHERKRRILKHLKSKDPVQLRLEHLEQGFSVYVNGANSELKSSPRKAIHSDFSRSASHTEGTHDYGRRTLFREAEEALRRSSRTAPSKVQRRGWHQKSVQIRTEAGPRLHIEPPVDYSDDFELCGDVTLQANNTSEDRPQDTKSPTSTKPCGFNFSLLNACGHSDPSSSVDKERILLTIQDVMELRRSLELSVNLQRKQKDCSSDEYDSIEEDILSEPEPEDPALVGHPRHDRPPSSGDWTQKDVHGEQETEGRSSPGPDTLVVLEFNPASKSHKRERNLSAKRKDNAEVFVPTKPEPNLTPQAPAVFPDQERMCSRPGSRRERPLSATRKTLCEAEYPEEDASAVLQAIQVENAALQRALLSRKAEQPASPLQDAEGPPAKPWTSLLEEKEETLELLPITTATTTQEPAGAAGGARAINQAMDRIGLLGSRQQQKLLKVLQAVESDSAHLGRVVSPTKEQVSDTEDKQRMRADEIKDAIYVTMEILSNWGNSWWVGLTEVEFFDLNDTKLYVSPHDVDIRNTATPGELGRLVNRNLAGKKDSSPWTCPFHPPLQLFFVIRNTRQLGDFHLAKIKVRNYWTADGDLDIGAKNVKLYVNRNLIFNGKLDKGDREAPADHSILVDQKNEKSEQLEEAMNAHSEESKGTHEMAGASGDKELGLGCSPPAETLADAKLSSQGNVSGKRKNSTNCRKDSLSQLEEYLRLSAVPTSMGDMPSAPATSPPVKCPPVHEEPSLIQQLENLMGRKICEPPGKTPSWLQPSPTGKDRKQGGRKPKPLWLSPEKPLAWKGRLPSDDVIGEGPGETEARDKGLRHEPGWGTSRSVNTKERPQRATTKVHSDDSDIFNQPPNRERPASGRRGSRKDAGSSSHGDDQPASREDTWSSRTPSRSRWRSEQEHTLHESWSSLSAFDRSHRGRISNTELPGDILDELLQQKSSRHSDLPPSKKGEQPGLSRGQDGYSGETDAGGDFKIPVLPYGQRLVIDIKSTWGDRHYVGLNGIEIFSSKGEPVQISNIKADPPDINILPAYGKDPRVVTNLIDGVNRTQDDMHVWLAPFTRGRSHSITIDFTHPCHVALIRIWNYNKSRIHSFRGVKDITMLLDTQCIFEGEIAKASGTLAGAPEHFGDTILFTTDDDILEAIFYSDEMFDLDVGSLDSLQDEEAMRRPSTADGEGDERPFTQAGLGADERIPELELPSSSPVPQVTTPEPGIYHGICLQLNFTASWGDLHYLGLTGLEVVGKEGQALPIHLHQISASPRDLNELPEYSDDSRTLDKLIDGTNITMEDEHMWLIPFSPGLDHVVTIRLDRAESIAGLRFWNYNKSPEDTYRGAKIVHVSLDGLCVSPPEGFLIRKGPGNCHFDFAQEILFVDYLRAQLLPQPARRLDMRSLECASMDYEAPLMPCGFIFQFQLLTSWGDPYYIGLTGLELYDERGEKIPLSENNIAAFPDSVNSLEGVGGDVRTPDKLIDQVNDTSDGRHMWLAPILPGLVNRVYVIFDLPTTVSMIKLWNYAKTPHRGVKEFGLLVDDLLVYNGILAMVSHLVGGILPTCEPTVPYHTILFTEDRDIRHQEKHTTISNQAEDQDVQMMNENQIITNAKRKQSVVDPALRPKTCISEKETRRRRC

SEQ ID NO: 851061 - protein, 1334 aa, Homo sapiens
AEALPFPSPESSHLVNEVSGSSFLEEVPGQASFLFAIEKLAGMVWKESIPPRPGSRRERPLSATRKTLCEAEYPEEDASAVLQAIQVENAALQRALLSRKAEQPASPLQLLPITTATTTQEPAGAAGGARAINQAMDRIGLLGSRQQQKLLKVLQAVESDSAHLGRVVSPTKEQVSDTEDKQRMRADEIKDAIYVTMEILSNWGNSWWVGLTEVEFFDLNDTKLYVSPHDVDIRNTATPGELGRLVNRNLAGKKDSSPWTCPFHPPLQLFFVIRNTRQLGDFHLAKIKVRNYWTADGDLDIGAKNVKLYVNRNLIFNGKLDKGDREAPADHSILVDQKNEKSEQLEEAMNAHSEESKGTHEMAGASGDKELGLGCSPPAETLADAKLSSQGNVSGKRKNSTNCRKDSLSQLEEYLRLSAVPTSMGDMPSAPATSPPVKCPPVHEEPSLIQQLENLMGRKICEPPGKTPSWLQPSPTGKDRKQGGRKPKPLWLSPEKPLAWKGRLPSDDVIGEGPGETEARDKGLRHEPGWGTSRSVNTKERPQRATTKVHSDDSDIFNQPPNRERPASGRRGSRKDAGSSSHGDDQPASREDTWSSRTPSRSRWRSEQEHTLHESWSSLSAFDRSHRGRISNTELPGDILDELLQQKSSRHSDLPPSKKGEQPGLSRGQDGYSGETDAGGDFKIPVLPYGQRLVIDIKSTWGDRHYVGLNGIEIFSSKGEPVQISNIKADPPDINILPAYGKDPRVVTNLIDGVNRTQDDMHVWLAPFTRGRSHSITIDFTHPCHVALIRIWNYNKSRIHSFRGVKDITMLLDTQCIFEGEIAKASGTLAGAPEHFGDTILFTTDDDILEAIFYSDEMFDLDVGSLDSLQDEEAMRRPSTADGEGDERPFTQAGLGADERIPELELPSSSPVPQVTTPEPGIYHGICLQLNFTASWGDLHYLGLTGLEVVGKEGQALPIHLHQISASPRDLNELPEYSDDSRTLDKLIDGTNITMEDEHMWLIPFSPGLDHVVTIRLDRAESIAGLRFWNYNKSPEDTYRGAKIVHVSLDGLCVSPPEGFLIRKGPGNCHFDFAQEILFVDYLRAQLLPQPARRLDMRSLECASMDYEAPLMPCGFIFQFQLLTSWGDPYYIGLTGLELYDERGEKIPLSENNIAAFPDSVNSLEGVGGDVRTPDKLIDQVNDTSDGRHMWLAPILPGLVNRVYVIFDLPTTVSMIKLWNYAKTPHRGVKEFGLLVDDLLVYNGILAMVSHLVGGILPTCEPTVPYHTILFTEDRDIRHQEKHTTISNQAEDQDVQMMNENQIITNAKRKQSVVDPALRPKTCISEKETRRRRC

SEQ ID NO: 851062 - protein, 442 aa, Homo sapiens
SASPTHVQIPELELPSSSPVPQVTTPEPGIYHGICLQLNFTASWGDLHYLGLTGLEVVGKEGQALPIHLHQISASPRDLNELPEYSDDSRTLDKLIDGTNITMEDEHMWLIPFSPGLDHVVTIRLDRAESIAGLRFWNYNKSPEDTYRGAKIVHVSLDGLCVSPPEGFLIRKGPGNCHFDFAQEILFVDYLRAQLLPQPARRLDMRSLECASMDYEAPLMPCGFIFQFQLLTSWGDPYYIGLTGLELYDERGEKIPLSENNIAAFPDSVNSLEGVGGDVRTPDKLIDQVNDTSDGRHMWLAPILPGLVNRVYVIFDLPTTVSMIKLWNYAKTPHRGVKEFGLLVDDLLVYNGILAMVSHLVGGILPTCEPTVPYHTILFTEDRDIRHQEKHTTISNQAEDQDVQMMNENQIITNAKRKQSVVDPALRPKTCISEKETRRRRC

SEQ ID NO: 851063 - protein, 67 aa, Homo sapiens
LLTSVQTERARWEEGTREDSPGYYQSDRWLWLQGKEIPCSSGLATGSPGHPPSCLCCETQQSRAHDH

SEQ ID NO: 851064 - protein, 1674 aa, Homo sapiens
MDGQTLRKAERSWSCSREKKEGYAKDMVTDFDEKHDEYLILLQQRNRILKHLKSKDPVQLRLEHLEQGFSVYVNGANSELKSSPRKAIHSDFSRSASHTEGTHDYGRRTLFREAEEALRRSSRTAPSKVQRRGWHQKSVQIRTEAGPRLHIEPPVDYSDDFELCGDVTLQANNTSEDRPQDTKSPTSTKPCGFNFSLLNACGHSDPSSSVDKERILLTIQDVMELRRSLELSVNLQRKQKDCSSDEYDSIEEDILSEPEPEDPALVGHPRHDRPPSSGDWTQKDVHGEQETEGRSSPGPDTLVVLEFNPASKSHKRERNLSAKRKDNAEVFVPTKPEPNLTPQAPAVFPDQERMCSRPGSRRERPLSATRKTLCEAEYPEEDASAVLQAIQVENAALQRALLSRKAEQPASPLQDAEGPPAKPWTSLLEEKEETLELLPITTATTTQEPAGAAGGARAINQAMDRIGLLGSRQQQKLLKVLQAVESDSAHLGRVVSPTKEQVSDTEDKQRMRADEIKDAIYVTMEILSNWGNSWWVGLTEVEFFDLNDTKLYVSPHDVDIRNTATPGELGRLVNRNLAGKKDSSPWTCPFHPPLQLFFVIRNTRQLGDFHLAKIKVRNYWTADGDLDIGAKNVKLYVNRNLIFNGKLDKGDREAPADHSILVDQKNEKSEQLEEAMNAHSEESKGTHEMAGASGDKELGLGCSPPAETLADAKLSSQGNVSGKRKNSTNCRKDSLSQLEEYLRLSAVPTSMGDMPSAPATSPPVKCPPVHEEPSLIQQLENLMGRKICEPPGKTPSWLQPSPTGKDRKQGGRKPKPLWLSPEKPLAWKGRLPSDDVIGEGPGETEARDKGLRHEPGWGTSRSVNTKERPQRATTKVHSDDSDIFNQPPNRERPASGRRGSRKDAGSSSHGDDQPASREDTWSSRTPSRSRWRSEQEHTLHESWSSLSAFDRSHRGRISNTELPGDILDELLQQKSSRHSDLPPSKKGEQPGLSRGQDGYSGETDAGGDFKIPVLPYGQRLVIDIKSTWGDRHYVGLNGIEIFSSKGEPVQISNIKADPPDINILPAYGKDPRVVTNLIDGVNRTQDDMHVWLAPFTRGRSHSITIDFTHPCHVALIRIWNYNKSRIHSFRGVKDITMLLDTQCIFEGEIAKASGTLAGAPEHFGDTILFTTDDDILEAIFYSDEMFDLDVGSLDSLQDEEAMRRPSTADGEGDERPFTQAGLGADERIPELELPSSSPVPQVTTPEPGIYHGICLQLNFTASWGDLHYLGLTGLEVVGKEGQALPIHLHQISASPRDLNELPEYSDDSRTLDKLIDGTNITMEDEHMWLIPFSPGLDHVVTIRLDRAESIAGLRFWNYNKSPEDTYRGAKIVHVSLDGLCVSPPEGFLIRKGPGNCHFDFAQEILFVDYLRAQLLPQPARRLDMRSLECASMDYEAPLMPCGFIFQFQLLTSWGDPYYIGLTGLELYDERGEKIPLSENNIAAFPDSVNSLEGVGGDVRTPDKLIDQVNDTSDGRHMWLAPILPGLVNRVYVIFDLPTTVSMIKLWNYAKTPHRGVKEFGLLVDDLLVYNGILAMVSHLVGGILPTCEPTVPYHTILFTEDRDIRHQEKHTTISNQAEDQDVQMMNENQIITNAKRKQSVVDPALRPKTCIEEEEESTEGLARLESRRGWARLA

SEQ ID NO: 851065 - protein, 146 aa, Homo sapiens
MDGQTLRKAERSWSCSREKKEGYAKDMVTDFDEKHDEYLILLQQRNRILKHLKSKDPVQLRLEHLEQGFSVYVNGANSELKSSPRKAIHSDFSRSASHTEGTHDYGRRTLFREAEEALRRSSRTAPSKVQRRGWHQVWRLWPQPTL

SEQ ID NO: 851066 - protein, 1618 aa, Homo sapiens
MDGQTLRKAERSWSCSREKKEGYAKDMVTDFDEKHDEYLILLQQRNRILKHLKSKDPVQLRLEHLEQGFSVYVNGANSELKSSPRKAIHSDFSRSASHTEGTHDYGRRTLFREAEEALRRSSRTAPSKVQRRGWHQKSVQIRTEAGPRLHIEPPVDYSDDFELCGDVTLQANNTSEDRPQELRRSLELSVNLQRKQKDCSSDEYDSIEEDILSEPEPEDPALVGHPRHDRPPSSGDWTQKDVHGEQETEGRSSPGPDTLVVLEFNPASKSHKRERNLSAKRKDNAEVFVPTKPEPNLTPQAPAVFPDQERMCSRPGSRRERPLSATRKTLCEAEYPEEDASAVLQAIQVENAALQRALLSRKAEQPASPLQDAEGPPAKPWTSLLEEKEETLELLPITTATTTQEPAGAAGGARAINQAMDRIGLLGSRQQQKLLKVLQAVESDSAHLGRVVSPTKEQVSDTEDKQRMRADEIKDAIYVTMEILSNWGNSWWVGLTEVEFFDLNDTKLYVSPHDVDIRNTATPGELGRLVNRNLAGKKDSSPWTCPFHPPLQLFFVIRNTRQLGDFHLAKIKVRNYWTADGDLDIGAKNVKLYVNRNLIFNGKLDKGDREAPADHSILVDQKNEKSEQLEEAMNAHSEESKGTHEMAGASGDKELGLGCSPPAETLADAKLSSQGNVSGKRKNSTNCRKDSLSQLEEYLRLSAVPTSMGDMPSAPATSPPVKCPPVHEEPSLIQQLENLMGRKICEPPGKTPSWLQPSPTGKDRKQGGRKPKPLWLSPEKPLAWKGRLPSDDVIGEGPGETEARDKGLRHEPGWGTSRSVNTKERPQRATTKVHSDDSDIFNQPPNRERPASGRRGSRKDAGSSSHGDDQPASREDTWSSRTPSRSRWRSEQEHTLHESWSSLSAFDRSHRGRISNTELPGDILDELLQQKSSRHSDLPPSKKGEQPGLSRGQDGYSGETDAGGDFKIPVLPYGQRLVIDIKSTWGDRHYVGLNGIEIFSSKGEPVQISNIKADPPDINILPAYGKDPRVVTNLIDGVNRTQDDMHVWLAPFTRGRSHSITIDFTHPCHVALIRIWNYNKSRIHSFRGVKDITMLLDTQCIFEGEIAKASGTLAGAPEHFGDTILFTTDDDILEAIFYSDEMFDLDVGSLDSLQDEEAMRRPSTADGEGDERPFTQAGLGADERIPELELPSSSPVPQVTTPEPGIYHGICLQLNFTASWGDLHYLGLTGLEVVGKEGQALPIHLHQISASPRDLNELPEYSDDSRTLDKLIDGTNITMEDEHMWLIPFSPGLDHVVTIRLDRAESIAGLRFWNYNKSPEDTYRGAKIVHVSLDGLCVSPPEGFLIRKGPGNCHFDFAQEILFVDYLRAQLLPQPARRLDMRSLECASMDYEAPLMPCGFIFQFQLLTSWGDPYYIGLTGLELYDERGEKIPLSENNIAAFPDSVNSLEGVGGDVRTPDKLIDQVNDTSDGRHMWLAPILPGLVNRVYVIFDLPTTVSMIKLWNYAKTPHRGVKEFGLLVDDLLVYNGILAMVSHLVGGILPTCEPTVPYHTILFTEDRDIRHQEKHTTISNQAEDQDVQMMNENQIITNAKRKQSVVDPALRPKTCISEKETRRRRC

SEQ ID NO: 851067 - protein, 1526 aa, Homo sapiens
MKSVQIRTEAGPRLHIEPPVDYSDDFELCGDVTLQANNTSEDRPQDTKSPTSTKPCGFNFSLLNACGHSDPSSSVDKERILLTIQDVMELRRSLELSVNLQRKQKDCSSDEYDSIEEDILSEPEPEDPALVGHPRHDRPPSSGDWTQKDVHGEQETEGRSSPGPDTLVVLEFNPASKSHKRERNLSAKRKDNAEVFVPTKPEPNLTPQAPAVFPDQERMCSRPGSRRERPLSATRKTLCEAEYPEEDASAVLQAIQVENAALQRALLSRKAEQPASPLQDAEGPPAKPWTSLLEEKEETLELLPITTATTTQEPAGAAGGARAINQAMDRIGLLGSRQQQKLLKVLQAVESDSAHLGRVVSPTKEQVSDTEDKQRMRADEIKDAIYVTMEILSNWGNSWWVGLTEVEFFDLNDTKLYVSPHDVDIRNTATPGELGRLVNRNLAGKKDSSPWTCPFHPPLQLFFVIRNTRQLGDFHLAKIKVRNYWTADGDLDIGAKNVKLYVNRNLIFNGKLDKGDREAPADHSILVDQKNEKSEQLEEAMNAHSEESKGTHEMAGASGDKELGLGCSPPAETLADAKLSSQGNVSGKRKNSTNCRKDSLSQLEEYLRLSAVPTSMGDMPSAPATSPPVKCPPVHEEPSLIQQLENLMGRKICEPPGKTPSWLQPSPTGKDRKQGGRKPKPLWLSPEKPLAWKGRLPSDDVIGEGPGETEARDKGLRHEPGWGTSRSVNTKERPQRATTKVHSDDSDIFNQPPNRERPASGRRGSRKDAGSSSHGDDQPASREDTWSSRTPSRSRWRSEQEHTLHESWSSLSAFDRSHRGRISNTELPGDILDELLQQKSSRHSDLPPSKKGEQPGLSRGQDGYSGETDAGGDFKIPVLPYGQRLVIDIKSTWGDRHYVGLNGIEIFSSKGEPVQISNIKADPPDINILPAYGKDPRVVTNLIDGVNRTQDDMHVWLAPFTRGRSHSITIDFTHPCHVALIRIWNYNKSRIHSFRGVKDITMLLDTQCIFEGEIAKASGTLAGAPEHFGDTILFTTDDDILEAIFYSDEMFDLDVGSLDSLQDEEAMRRPSTADGEGDERPFTQAGLGADERIPELELPSSSPVPQVTTPEPGIYHGICLQLNFTASWGDLHYLGLTGLEVVGKEGQALPIHLHQISASPRDLNELPEYSDDSRTLDKLIDGTNITMEDEHMWLIPFSPGLDHVVTIRLDRAESIAGLRFWNYNKSPEDTYRGAKIVHVSLDGLCVSPPEGFLIRKGPGNCHFDFAQEILFVDYLRAQLLPQPARRLDMRSLECASMDYEAPLMPCGFIFQFQLLTSWGDPYYIGLTGLELYDERGEKIPLSENNIAAFPDSVNSLEGVGGDVRTPDKLIDQVNDTSDGRHMWLAPILPGLVNRVYVIFDLPTTVSMIKLWNYAKTPHRGVKEFGLLVDDLLVYNGILAMVSHLVGGILPTCEPTVPYHTILFTEDRDIRHQEKHTTISNQAEDQDVQMMNENQIITNAKRKQSVVDPALRPKTCISEKETRRRRC

SEQ ID NO: 851068 - protein, 1199 aa, Homo sapiens
MDRIGLLGSRQQQKLLKVLQAVESDSAHLGRVVSPTKEQVSDTEDKQRMRADEIKDAIYVTMEILSNWGNSWWVGLTEVEFFDLNDTKLYVSPHDVDIRNTATPGELGRLVNRNLAGKKDSSPWTCPFHPPLQLFFVIRNTRQLGDFHLAKIKVRNYWTADGDLDIGAKNVKLYVNRNLIFNGKLDKGDREAPADHSILVDQKNEKSEQLEEAMNAHSEESKGTHEMAGASGDKELGLGCSPPAETLADAKLSSQGNVSGKRKNSTNCRKDSLSQLEEYLRLSAVPTSMGDMPSAPATSPPVKCPPVHEEPSLIQQLENLMGRKICEPPGKTPSWLQPSPTGKDRKQGGRKPKPLWLSPEKPLAWKGRLPSDDVIGEGPGETEARDKGLRHEPGWGTSRSVNTKERPQRATTKVHSDDSDIFNQPPNRERPASGRRGSRKDAGSSSHGDDQPASREDTWSSRTPSRSRWRSEQEHTLHESWSSLSAFDRSHRGRISNTELPGDILDELLQQKSSRHSDLPPSKKGEQPGLSRGQDGYSGETDAGGDFKIPVLPYGQRLVIDIKSTWGDRHYVGLNGIEIFSSKGEPVQISNIKADPPDINILPAYGKDPRVVTNLIDGVNRTQDDMHVWLAPFTRGRSHSITIDFTHPCHVALIRIWNYNKSRIHSFRGVKDITMLLDTQCIFEGEIAKASGTLAGAPEHFGDTILFTTDDDILEAIFYSDEMFDLDVGSLDSLQDEEAMRRPSTADGEGDERPFTQAGLGADERIPELELPSSSPVPQVTTPEPGIYHGICLQLNFTASWGDLHYLGLTGLEVVGKEGQALPIHLHQISASPRDLNELPEYSDDSRTLDKLIDGTNITMEDEHMWLIPFSPGLDHVVTIRLDRAESIAGLRFWNYNKSPEDTYRGAKIVHVSLDGLCVSPPEGFLIRKGPGNCHFDFAQEILFVDYLRAQLLPQPARRLDMRSLECASMDYEAPLMPCGFIFQFQLLTSWGDPYYIGLTGLELYDERGEKIPLSENNIAAFPDSVNSLEGVGGDVRTPDKLIDQVNDTSDGRHMWLAPILPGLVNRVYVIFDLPTTVSMIKLWNYAKTPHRGVKEFGLLVDDLLVYNGILAMVSHLVGGILPTCEPTVPYHTILFTEDRDIRHQEKHTTISNQAEDQDVQMMNENQIITNAKRKQSVVDPALRPKTCISEKETRRRRC

SEQ ID NO: 851069 - protein, 120 aa, Homo sapiens
MIKLWNYAKTPHRGVKEFGLLVDDLLVYNGILAMVSHLVGGILPTCEPTVPYHTILFTEDRDIRHQEKHTTISNQAEDQDVQMMNENQIITNAKRKQSVVDPALRPKTCISEKETRRRRC

SEQ ID NO: 851070 - protein, 633 aa, Homo sapiens
MDGQTLRKAERSWSCSREKKEGYAKDMVTDFDEKHDEYLILLQQRNRILKHLKSKDPVQLRLEHLEQGFSVYVNGANSELKSSPRKAIHSDFSRSASHTEGTHDYGRRTLFREAEEALRRSSRTAPSKVQRRGWHQKSVQIRTEAGPRLHIEPPVDYSDDFELCGDVTLQANNTSEDRPQDTKSPTSTKPCGFNFSLLNACGHSDPSSSVDKERILLTIQDVMELRRSLELSVNLQRKQKDCSSDEYDSIEEDILSEPEPEDPALVGHPRHDRPPSSGDWTQKDVHGEQETEGRSSPGPDTLVVLEFNPASKSHKRERNLSAKRKDNAEVFVPTKPEPNLTPQAPAVFPDQERMCSRPGSRRERPLSATRKTLCEAEYPEEDASAVLQAIQVENAALQRALLSRKAEQPASPLQDAEGPPAKPWTSLLEEKEETLELLPITTATTTQEPAGAAGGARAINQAMDRIGLLGSRQQQKLLKVLQAVESDSAHLGRVVSPTKEQVSDTEDKQRMRADEIKDAIYVTMEILSNWGNSWWVGLTEVEFFDLNDTKLYVSPHDVDIRNTATPGELGRLVNRNLAGKKDSSPWTCPFHPPLQLFFVIRNTRQLGDFHLAKIKVRNYWTADGDLDSWLPST

SEQ ID NO: 851071 - protein, 117 aa, Homo sapiens
AGCPVAALWPPVAVRLPEAVPSGLSLLGRGETVSLPLQQAPSQRPAVLGERPVAIPGLSRQSWVFSGESCFHREARLSVVPASSPAFLETRVIFLDYFCVSRKHFSNSPTLWYLPEM

SEQ ID NO: 851072 - protein, 244 aa, Homo sapiens
SGETPSHGSRFRFGLCIFAKVSDVKRLEMDDIADRMRMDAGEVTLVNHNSVFKTHLLPQTGFPEDQLSLSDQQILSSRQGHLDRSFTCSTRSAAYNPSYYSDDDLIQDFLWMDCCCKIADKYLLAMTFVYFKRAKFTISEHTRINFFIALYLANTVEEDEEETKYEIFPWALGKNWRKLFPNFLKLRDQLWDRIDYRAIVSRRCCEEVMAIAPSHYIWQRERSVHHSGAVRNYNRDEVQLPRGP

SEQ ID NO: 851073 - protein, 668 aa, Homo sapiens
SGRGSRFRFGLCIFAKVSDVKRLEMDDIADRMRMDAGEVTLVNHNSVFKTHLLPQTGFPEDQLSLSDQQILSSRQGHLDRSFTCSTRSAAYNPSYYSDNPSSDSFLGSGDLRTFGQSANGQWRNSTPSSSSSLQKSRNSRSLYLETRKTSSGLSNSFAGKSNHHCHVSAYEKSFPIKPVPSPSWSGSCRRSLLSPKKTQRRHVSTAEETVQEEEREIYRQLLQMVTGKQFTIAKPTTHFPLHLSRCLSSSKNTLKDSLFKNGNSCASQIIGSDTSSSGSASILTNQEQLSHSVYSLSSYTPDVAFGSKDSGTLHHPHHHHSVPHQPDNLAASNTQSEGSDSVILLKVKDSQTPTPSSTFFQAELWIKELTSVYDSRARERLRQIEEQKALALQLQNQRLQEREHSVHDSVELHLRVPLEKEIPVTVVQETQKKGHKLTDSEDEFPEITEEMEKEIKNVFRNGNQDEVLSEAFRLTITRKDIQTLNHLNWLNDEIINFYMNMLMERSKEKGLPSVHAFNTFFFTKLKTAGYQAVKRWTKKVDVFSVDILLVPIHLGVHWCLAVVDFRKKNITYYDSMGGINNEACRILLQYLKQESIDKKRKEFDTNGWQLFSKKSQEIPQQMNGSDCGMFACKYADCITKDRPINFTQQHMPYFRKRMVWEILHRKLL

SEQ ID NO: 851074 - protein, 445 aa, Homo sapiens
MVTGKQFTIAKPTTHFPLHLSRCLSSSKNTLKDSLFKNGNSCASQIIGSDTSSSGSASILTNQEQLSHSVYSLSSYTPDVAFGSKDSGTLHHPHHHHSVPHQPDNLAASNTQSEGSDSVILLKVKDSQTPTPSSTFFQAELWIKELTSVYDSRARERLRQIEEQKALALQLQNQRLQEREHSVHDSVELHLRVPLEKEIPVTVVQETQKKGHKLTDSEDEFPEITEEMEKEIKNVFRNGNQDEVLSEAFRLTITRKDIQTLNHLNWLNDEIINFYMNMLMERSKEKGLPSVHAFNTFFFTKLKTAGYQAVKRWTKKVDVFSVDILLVPIHLGVHWCLAVVDFRKKNITYYDSMGGINNEACRILLQYLKQESIDKKRKEFDTNGWQLFSKKSQEIPQQMNGSDCGMFACKYADCITKDRPINFTQQHMPYFRKRMVWEILHRKLL

SEQ ID NO: 851075 - protein, 117 aa, Homo sapiens; identical to SEQ ID NO: 851071

SEQ ID NO: 851076 - protein, 194 aa, Homo sapiens
MDDIADRMRMDAGEVTLVNHNSVFKTHLLPQTGFPEDQLSLSDQQILSSRQGHLDRSFTCSTRSAAYNPSYYSDNPSSDSFLGSGDLRTFGQSANGQWRNSTPSSSSSLQKSRNSRSLYLETRKTSSGLSNSFAGKSNHHCHVSAYEKSFPIKPVPSPSWSGSCRRSLLSPKKTQRRHVSTAEEEYEVFYKINN

SEQ ID NO: 851077 - protein, 482 aa, Homo sapiens [sequence omitted]

SEQ ID NO: 851078 - protein, 644 aa, Homo sapiens
MDDIADRMRMDAGEVTLVNHNSVFKTHLLPQTGFPEDQLSLSDQQILSSRQGHLDRSFTCSTRSAAYNPSYYSDNPSSDSFLGSGDLRTFGQSANGQWRNSTPSSSSSLQKSRNSRSLYLETRKTSSGLSNSFAGKSNHHCHVSAYEKSFPIKPVPSPSWSGSCRRSLLSPKKTQRRHVSTAEETVQEEEREIYRQLLQMVTGKQFTIAKPTTHFPLHLSRCLSSSKNTLKDSLFKNGNSCASQIIGSDTSSSGSASILTNQEQLSHSVYSLSSYTPDVAFGSKDSGTLHHPHHHHSVPHQPDNLAASNTQSEGSDSVILLKVKDSQTPTPSSTFFQAELWIKELTSVYDSRARERLRQIEEQKALALQLQNQRLQEREHSVHDSVELHLRVPLEKEIPVTVVQETQKKGHKLTDSEDEFPEITEEMEKEIKNVFRNGNQDEVLSEAFRLTITRKDIQTLNHLNWLNDEIINFYMNMLMERSKEKGLPSVHAFNTFFFTKLKTAGYQAVKRWTKKVDVFSVDILLVPIHLGVHWCLAVVDFRKKNITYYDSMGGINNEACRILLQYLKQESIDKKRKEFDTNGWQLFSKKSQEIPQQMNGSDCGMFACKYADCITKDRPINFTQQHMPYFRKRMVWEILHRKLL

SEQ ID NO: 851079 - protein, 445 aa, Homo sapiens; identical to SEQ ID NO: 851074

SEQ ID NO: 851080 - protein, 612 aa, Homo sapiens
PSGNDSLKFPPLHILSSRQGHLDRSFTCSTRSAAYNPSYYSDNPSSDSFLGSGDLRTFGQSANGQWRNSTPSSSSSLQKSRNSRSLYLETRKTSSGLSNSFAGKSNHHCHVSAYEKSFPIKPVPSPSWSGSCRRSLLSPKKTQRRHVSTAEETVQEEEREIYRQLLQMVTGKQFTIAKPTTHFPLHLSRCLSSSKNTLKDSLFKNGNSCASQIIGSDTSSSGSASILTNQEQLSHSVYSLSSYTPDVAFGSKDSGTLHHPHHHHSVPHQPDNLAASNTQSEGSDSVILLKVKDSQTPTPSSTFFQAELWIKELTSVYDSRARERLRQIEEQKALALQLQNQRLQEREHSVHDSVELHLRVPLEKEIPVTVVQETQKKGHKLTDSEDEFPEITEEMEKEIKNVFRNGNQDEVLSEAFRLTITRKDIQTLNHLNWLNDEIINFYMNMLMERSKEKGLPSVHAFNTFFFTKLKTAGYQAVKRWTKKVDVFSVDILLVPIHLGVHWCLAVVDFRKKNITYYDSMGGINNEACRILLQYLKQESIDKKRKEFDTNGWQLFSKKSQEIPQQMNGSDCGMFACKYADCITKDRPINFTQQHMPYFRKRMVWEILHRKLL

SEQ ID NO: 851081 - protein, 162 aa, Homo sapiens
PSGNDSLKFPPLHILSSRQGHLDRSFTCSTRSAAYNPSYYSDNPSSDSFLGSGDLRTFGQSANGQWRNSTPSSSSSLQKSRNSRSLYLETRKTSSGLSNSFAGKSNHHCHVSAYEKSFPIKPVPSPSWSGSCRRSLLSPKKTQRRHVSTAEEEYEVFYKINN

SEQ ID NO: 851082 - protein, 494 aa, Homo sapiens
MITVNPPLPQDTVNLFSPVPPPDKVDGFSRRSLRRARPRRSHSSSQFRYQSNQQELTPLPLLKDVPASELHELLSRKLAQCGVMFDFLDCVADLKGKEVKRAALNELVECVGSTRGVLIEPVYPDIIRMISVNIFRTLPPSENPEFDPEEDEPNLEPSWPHLQLVYEFFLRFLESPDFQPSVAKRYVDQKFVLMLLELFDSEDPREREYLKTILHRVYGKFLGLRAYIRKQCNHIFLRFIYEFEHFNGVAELLEILGSIINGFALPLKTEHKQFLVRVLIPLHSVKSLSVFHAQLAYCVVQFLEKDATLTEHVIRGLLKYWPKTCTQKEVMFLGEMEEILDVIEPSQFVKIQEPLFKQVARCVSSPHFQVAERALYFWNNEYILSLIEDNCHTVLPAVFGTLYQVSKEHWNQTIVSLIYNVLKTFMEMNGKLFDELTASYKLEKQQEQQKAQERQELWQGLEELRLRRLQGTQGAKEAPLQRLTPQVAASGGQS

SEQ ID NO: 851083 - protein, 497 aa, Homo sapiens
METKLPPASTPTSPSSPGLSPVPPPDKVDGFSRRSLRRARPRRSHSSSQFRYQSNQQELTPLPLLKDVPASELHELLSRKLAQCGVMFDFLDCVADLKGKEVKRAALNELVECVGSTRGVLIEPVYPDIIRMISVNIFRTLPPSENPEFDPEEDEPNLEPSWPHLQLVYEFFLRFLESPDFQPSVAKRYVDQKFVLMLLELFDSEDPREREYLKTILHRVYGKFLGLRAYIRKQCNHIFLRFIYEFEHFNGVAELLEILGSIINGFALPLKTEHKQFLVRVLIPLHSVKSLSVFHAQLAYCVVQFLEKDATLTEHVIRGLLKYWPKTCTQKEVMFLGEMEEILDVIEPSQFVKIQEPLFKQVARCVSSPHFQVAERALYFWNNEYILSLIEDNCHTVLPAVFGTLYQVSKEHWNQTIVSLIYNVLKTFMEMNGKLFDELTASYKLEKQQEQQKAQERQELWQGLEELRLRRLQGTQGAKEAPLQRLTPQVAASGGQS

SEQ ID NO: 851084 - protein, 497 aa, Homo sapiens; identical to SEQ ID NO: 851083

SEQ ID NO: 851085 - protein, 411 aa, Homo sapiens
MFDFLDCVADLKGKEVKRAALNELVECVGSTRGVLIEPVYPDIIRMISVNIFRTLPPSENPEFDPEEDEPNLEPSWPHLQLVYEFFLRFLESPDFQPSVAKRYVDQKFVLMLLELFDSEDPREREYLKTILHRVYGKFLGLRAYIRKQCNHIFLRFIYEFEHFNGVAELLEILGSIINGFALPLKTEHKQFLVRVLIPLHSVKSLSVFHAQLAYCVVQFLEKDATLTEHVIRGLLKYWPKTCTQKEVMFLGEMEEILDVIEPSQFVKIQEPLFKQVARCVSSPHFQVAERALYFWNNEYILSLIEDNCHTVLPAVFGTLYQVSKEHWNQTIVSLIYNVLKTFMEMNGKLFDELTASYKLEKQQEQQKAQERQELWQGLEELRLRRLQGTQGAKEAPLQRLTPQVAASGGQS

SEQ ID NO: 851086 - protein, 456 aa, Homo sapiens
METKLPPASTPTSPSSPGLSPVPPPDKVDGFSRRSLRRARPRRSHSSSQFRYQSNQQELTPLPLLKDVPASELHELLSRKLAQCGVMFDFLDCVADLKGKEVKRAALNELVECVGSTRGVLIEPVYPDIIRMISVNIFRTLPPSENPEFDPEEDEPNLEPSWPHLQLVYEFFLRFLESPDFQPSVAKRYVDQKFVLMLLELFDSEDPREREYLKTILHRVYGKFLGLRAYIRKQCNHIFLRFIYEFEHFNGVAELLEILGSIINGFALPLKTEHVIRGLLKYWPKTCTQKEVMFLGEMEEILDVIEPSQFVKIQEPLFKQVARCVSSPHFQVAERALYFWNNEYILSLIEDNCHTVLPAVFGTLYQVSKEHWNQTIVSLIYNVLKTFMEMNGKLFDELTASYKLEKQQEQQKAQERQELWQGLEELRLRRLQGTQGAKEAPLQRLTPQVAASGGQS

SEQ ID NO: 851087 - protein, 109 aa, Homo sapiens
MARSGGAAATPATGDPGGQGGPPPAAYTPGGRQWGSELDSTSEGEKLNPELSVPLSLLLSRGPERNTPTPGLARVASEDSLPSPAFTGGRRGEAMVVLATECSAPRGRT

SEQ ID NO: 851088 - protein, 497 aa, Homo sapiens; identical to SEQ ID NO: 851083

SEQ ID NO: 851089 - protein, 351 aa, Homo sapiens
METKLPPASTPTSPSSPGLSPVPPPDKVDGFSRRSLRRARPRRSHSSSQFRYQSNQQELTPLPLLKDVPASELHELLSRKLAQCGVMFDFLDCVADLKGKEVKRAALNELVECVGSTRGVLIEPVYPDIIRMISVNIFRTLPPSENPEFDPEEDEPNLEPSWPHLQLVYEFFLRFLESPDFQPSVAKRYVDQKFVLMLLELFDSEDPREREYLKTILHRVYGKFLGLRAYIRKQCNHIFLRFIYEFEHFNGVAELLEILGSIINGFALPLKTEHVIRGLLKYWPKTCTQKEVMFLGEMEEILDVIEPSQFVKIQEPLFKQVARCVSSPHFQHCGADSAFPARSTYAKPHLK

SEQ ID NO: 851090 - protein, 185 aa, Homo sapiens
METKLPPASTPTSPSSPGLSPVPPPDKVDGFSRRSLRRARPRRSHSSSQFRYQSNQQELTPLPLLKDVPASELHELLSRKLAQCGVMFDFLDCVADLKGKEVKRAALNELVECVGSTRGVLIEPVYPDIIRMVSTCHPGSEGRPRGRVSPVSCPQDPCVENNPVLIGLASVHDFLPPDLLLPNTH

SEQ ID NO: 851091 - protein, 497 aa, Homo sapiens; identical to SEQ ID NO: 851083

SEQ ID NO: 851092 - protein, 497 aa, Homo sapiens; identical to SEQ ID NO: 851083

SEQ ID NO: 851093 - protein, 479 aa, Homo sapiens
METKLPPASTPTSPSSPGLSPVPPPDKVDGFSRRSLRRARPRRSHSSSQFRYQSNQQELTPLPLLKDVPASELHELLSRKLAQCGVMFDFLDCVADLKGKEVKRAALNELVECVGSTRGVLIEPVYPDIIRMISVNIFRTLPPSENPEFDPEEDEPNLEPSWPHLQLVYEFFLRFLESPDFQPSVAKRYVDREYLKTILHRVYGKFLGLRAYIRKQCNHIFLRFIYEFEHFNGVAELLEILGSIINGFALPLKTEHKQFLVRVLIPLHSVKSLSVFHAQLAYCVVQFLEKDATLTEHVIRGLLKYWPKTCTQKEVMFLGEMEEILDVIEPSQFVKIQEPLFKQVARCVSSPHFQVAERALYFWNNEYILSLIEDNCHTVLPAVFGTLYQVSKEHWNQTIVSLIYNVLKTFMEMNGKLFDELTASYKLEKQQEQQKAQERQELWQGLEELRLRRLQGTQGAKEAPLQRLTPQVAASGGQS

SEQ ID NO: 851094 - protein, 164 aa, Homo sapiens
MNMPAAAGSLGGSDSPCPAQLSLGGDEERQWWSWQQNAQPLVAGLDKGKLDQEAAIRDLPLPRKARLQLQAGSHPLLLALGKGTQRLACPCLGQCEVLPYPHHGVHGLFILAQLTLYTDTVLGAHSSLPSLCTSLSPFYLLGRGRGRAQARRDSQCPGVRGGSQ

SEQ ID NO: 851095 - protein, 247 aa, Homo sapiens
METKLPPASTPTSPSSPGLSPVPPPDKVDGFSRRSLRRARPRRSHSSSQFRYQSNQQELTPLPLLKDVPASELHELLSRKLAQCGVMFDFLDCVADLKGKEVKRAALNELVECVGSTRGVLIEPVYPDIIRMISVNIFRTLPPSENPEFDPEEAGSHPLLLALGKGTQRLACPCLGQCEVLPYPHHGVHGLFILAQLTLYTDTVLGAHSSLPSLCTSLSPFYLLGRGRGRAQARRDSQCPGVRGGSQ

SEQ ID NO: 851096 - protein, 107 aa, Homo sapiens
VETGFHHVGQAGLKLLSSGDPPASASQSAGITGISHYAQPGLGIWMGDNAVREDGKVKQQKRVNGFSWMEENSSSSPLCLESKSQLGNAVIQLHFKETNSTMERLGN

SEQ ID NO: 851097 - protein, 258 aa, Homo sapiens
APGAATVRRCLLLPPPRDLLCPQLGGEEAGAEPRGAPSPSPRGGKSAASRVRWTPRPPRPSPGCPQAPARPGPAPGSERAAAQVSAYEVCKIDCLIQNRKTVITVLLSSQTLPKMEPITFTARKHLLSNEVSVDFGLQLVGSLPVHSLTTMPMLPWVVAEVRRLSRQSTRKEPVTKQVRLCVSPSGLRCEPEPGRSQQWDPLIYSSIFECKPQRVHKLIHNSHDPSYFACLIKEDAVHRQSICYVFKADDQTKCSSSL

SEQ ID NO: 851098 - protein, 1039 aa, Homo sapiens
MSPLFSWVAKVPEIISSIRQAGKIARQEELHCPSEFDDTFSKKFEVLFCGRVTVAHKKAPPALIDECIEKFNHVSGSRGSESPRPNPPHAAPTGSQEPVRRPMRKSFSQPGLRSLAFRKELQDGGLRSSGFFSSFEESDIENHLISGHNIVQPTDIEENRTMLFTIGQSEVYLISPDTKKIALEKNFKEISFCSQGIRHVDHFGFICRESSGGGGFHFVCYVFQCTNEALVDEIMMTLKQAFTVAAVQQTAKAPAQLCEGCPLQSLHKLCERIEGMNSSKTKLELQKHLTTLTNQEQATIFEEVQKLRPRNEQRENELIISFLRCLYEEKQKEHIHIGEMKQTSQMAAENIGSELPPSATRFRLDMLKNKAKRSLTESLESILSRGNKARGLQEHSISVDLDSSLSSTLSNTSKEPSVCEKEALPISESSFKLLGSSEDLSSDSESHLPEEPAPLSPQQAFRRRANTLSHFPIECQEPPQPARGSPGVSQRKLMRYHSVSTETPHERKDFESKANHLGDSGGTPVKTRRHSWRQQIFLRVATPQKACDSSSRYEDYSELGELPPRSPLEPVCEDGPFGPPPEEKKRTSRELRELWQKAILQQILLLRMEKENQKLQASENDLLNKRLKLDYEEITPCLKEVTTVWEKMLSTPGRSKIKFDMEKMHSAVGQGVPRHHRGEIWKFLAEQFHLKHQFPSKQQPKDVPYKELLKQLTSQQHAILIDLGRTFPTHPYFSAQLGAGQLSLYNILKAYSLLDQEVGYCQGLSFVAGILLLHMSEEEAFKMLKFLMFDMGLRKQYRPDMIILQIQMYQLSRLLHDYHRDLYNHLEEHEIGPSLYAAPWFLTMFASQFPLGFVARVFDMIFLQGTEVIFKVALSLLGSHKPLILQHENLETIVDFIKSTLPNLGLVQMEKTINQVFEMDIAKQLQAYEVEYHVLQEELIDSSPLSDNQRMDKLEKTNSSLRKQNLDLLEQLQVANGRIQSLEATIEKLLSSESKLKQAMLTLELERSALLQTVEELRRRSAEPSDREPECTQPEPTGD

SEQ ID NO: 851099 - protein, 1282 aa, Homo sapiens
APGAATVRRCLLLPPPRDLLCPQLGGEEAGAEPRGAPSPSPRGGKSAASRVRWTPRPPRPSPGCPQAPARPGPAPGSERAAAQVSAYEVCKIDCLIQNRKTVITVLLSSQTLPKMEPITFTARKHLLSNEVSVDFGLQLVGSLPVHSLTTMPMLPWVVAEVRRLSRQSTRKEPVTKQVRLCVSPSGLRCEPEPGRSQQWDPLIYSSIFECKPQRVHKLIHNSHDPSYFACLIKEDAVHRQSICYVFKADDQTKVPEIISSIRQAGKIARQEELHCPSEFDDTFSKKFEVLFCGRVTVAHKKAPPALIDECIEKFNHVSGSRGSESPRPNPPHAAPTGSQEPVRRPMRKSFSQPGLRSLAFRKELQDGGLRSSGFFSSFEESDIENHLISGHNIVQPTDIEENRTMLFTIGQSEVYLISPDTKKIALEKNFKEISFCSQGIRHVDHFGFICRESSGGGGFHFVCYVFQCTNEALVDEIMMTLKQAFTVAAVQQTAKAPAQLCEGCPLQSLHKLCERIEGMNSSKTKLELQKHLTTLTNQEQATIFEEVQKLRPRNEQRENELIISFLRCLYEEKQKEHIHIGEMKQTSQMAAENIGSELPPSATRFRLDMLKNKAKRSLTESLESILSRGNKARGLQEHSISVDLDSSLSSTLSNTSKEPSVCEKEALPISESSFKLLGSSEDLSSDSESHLPEEPAPLSPQQAFRRRANTLSHFPIECQEPPQPARGSPGVSQRKLMRYHSVSTETPHERKDFESKANHLGDSGGTPVKTRRHSWRQQIFLRVATPQKACDSSSRYEDYSELGELPPRSPLEPVCEDGPFGPPPEEKKRTSRELRELWQKAILQQILLLRMEKENQKLQASENDLLNKRLKLDYEEITPCLKEVTTVWEKMLSTPGRSKIKFDMEKMHSAVGQGVPRHHRGEIWKFLAEQFHLKHQFPSKQQPKDVPYKELLKQLTSQQHAILIDLGRTFPTHPYFSAQLGAGQLSLYNILKAYSLLDQEVGYCQGLSFVAGILLLHMSEEEAFKMLKFLMFDMGLRKQYRPDMIILQIQMYQLSRLLHDYHRDLYNHLEEHEIGPSLYAAPWFLTMFASQFPLGFVARVFDMIFLQGTEVIFKVALSLLGSHKPLILQHENLETIVDFIKSTLPNLGLVQMEKTINQVFEMDIAKQLQAYEVEYHVLQEELIDSSPLSDNQRMDKLEKTNSSLRKQNLDLLEQLQVANGRIQSLEATIEKLLSSESKLKQAMLTLELERSALLQTVEELRRRSAEPSDREPECTQPEPTGD

SEQ ID NO: 851100 - protein, 847 aa, Homo sapiens
FYRCHSLGPCLDPQNLNPVGRAGWLSYYQTHSSENEALVDEIMMTLKQAFTVAAVQQTAKAPAQLCEGCPLQSLHKLCERIEGMNSSKTKLELQKHLTTLTNQEQATIFEEVQKLRPRNEQRENELIISFLRCLYEEKQKEHIHIGEMKQTSQMAAENIGSELPPSATRFRLDMLKNKAKRSLTESLESILSRGNKARGLQEHSISVDLDSSLSSTLSNTSKEPSVCEKEALPISESSFKLLGSSEDLSSDSESHLPEEPAPLSPQQAFRRRANTLSHFPIECQEPPQPARGSPGVSQRKLMRYHSVSTETPHERKDFESKANHLGDSGGTPVKTRRHSWRQQIFLRVATPQKACDSSSRYEDYSELGELPPRSPLEPVCEDGPFGPPPEEKKRTSRELRELWQKAILQQILLLRMEKENQKLQASENDLLNKRLKLDYEEITPCLKEVTTVWEKMLSTPGRSKIKFDMEKMHSAVGQGVPRHHRGEIWKFLAEQFHLKHQFPSKQQPKDVPYKELLKQLTSQQHAILIDLGRTFPTHPYFSAQLGAGQLSLYNILKAYSLLDQEVGYCQGLSFVAGILLLHMSEEEAFKMLKFLMFDMGLRKQYRPDMIILQIQMYQLSRLLHDYHRDLYNHLEEHEIGPSLYAAPWFLTMFASQFPLGFVARVFDMIFLQGTEVIFKVALSLLGSHKPLILQHENLETIVDFIKSTLPNLGLVQMEKTINQVFEMDIAKQLQAYEVEYHVLQEELIDSSPLSDNQRMDKLEKTNSSLRKQNLDLLEQLQVANGRIQSLEATIEKLLSSESKLKQAMLTLELERSALLQTVEELRRRSAEPSDREPECTQPEPTGD

SEQ ID NO: 851101 - protein, 1376 aa, Homo sapiens
APGAATVRRCLLLPPPRDLLCPQLGGEEAGAEPRGAPSPSPRGGKSAASRVRWTPRPPRPSPGCPQAPARPGPAPGSERAAAQVSAYEVCKIDCLIQNRKTVITVLLSSQTLPKMEPITFTARKHLLSNEVSVDFGLQLVGSLPVHSLTTMPMLPWVVAEVRRLSRQSTRKEPVTKQVRLCVSPSGLRCEPEPGRSQQWDPLIYSSIFECKPQRVHKLIHNSHDPSYFACLIKEDAVHRQSICYVFKADDQTKVPEIISSIRQAGKIARQEELHCPSEFDDTFSKKFEVLFCGRVTVAHKKAPPALIDECIEKFNHVSGSRGSESPRPNPPHAAPTGSQEPVRRPMRKSFSQPGLRSLAFRKELQDGGLRSSGFFSSFEESDIENHLISGHNIVQPTDIEENRTMLFTIGQSEVYLISPDTKKIALEKNFKEISFCSQGIRHVDHFGFICRESSGGGGFHFVCYVFQCTNEALVDEIMMTLKQAFTVAAVQQTAKAPAQLCEGCPLQSLHKLCERIEGMNSSKTKLELQKHLTTLTNQEQATIFEEVQKLRPRNEQRENELIISFLRCLYEEKQKEHIHIGEMKQTSQMAAENIGSELPPSATRFRLDMLKNKAKRSLTESLESILSRGNKARGLQEHSISVDLDSSLSSTLSNTSKEPSVCEKEALPISESSFKLLGSSEDLSSDSESHLPEEPAPLSPQQAFRRRANTLSHFPIECQEPPQPARGSPGVSQRKLMRYHSVSTETPHERKCGSSPVGESKHRPGQSSAPAPPPRLNPSASSPNFFKYLKHNSSGEQSGNAVPKSISYRNALRKKLHSSSSVPNFLKFLAPVDENNTSDFMNTKRDFESKANHLGDSGGTPVKTRRHSWRQQIFLRVATPQKACDSSSRYEDYSELGELPPRSPLEPVCEDGPFGPPPEEKKRTSRELRELWQKAILQQILLLRMEKENQKLQASENDLLNKRLKLDYEEITPCLKEVTTVWEKMLSTPGRSKIKFDMEKMHSAVGQGVPRHHRGEIWKFLAEQFHLKHQFPSKQQPKDVPYKELLKQLTSQQHAILIDLGRTFPTHPYFSAQLGAGQLSLYNILKAYSLLDQEVGYCQGLSFVAGILLLHMSEEEAFKMLKFLMFDMGLRKQYRPDMIILQIQMYQLSRLLHDYHRDLYNHLEEHEIGPSLYAAPWFLTMFASQFPLGFVARVFDMIFLQGTEVIFKVALSLLGSHKPLILQHENLETIVDFIKSTLPNLGLVQMEKTINQVFEMDIAKQLQAYEVEYHVLQEELIDSSPLSDNQRMDKLEKTNSSLRKQNLDLLEQLQVANGRIQSLEATIEKLLSSESKLKQAMLTLELERSALLQTVEELRRRSAEPSDREPECTQPEPTGD

SEQ ID NO: 851102 - protein, 1282 aa, Homo sapiens; identical to SEQ ID NO: 851099

SEQ ID NO: 851103 - protein, 1282 aa, Homo sapiens; identical to SEQ ID NO: 851099

SEQ ID NO: 851104 - protein, 1282 aa, Homo sapiens; identical to SEQ ID NO: 851099

SEQ ID NO: 851105 - protein, 1282 aa, Homo sapiens; identical to SEQ ID NO: 851099

SEQ ID NO: 851106 - protein, 1104 aa, Homo sapiens
APGAATVRRCLLLPPPRDLLCPQLGGEEAGAEPRGAPSPSPRGGKSAASRVRWTPRPPRPSPGCPQAPARPGPAPGSERAAAQVSAYEVCKIDCLIQNRKTVITVLLSSQTLPKMEPITFTARKHLLSNEVSVDFGLQLVGSLPVHSLTTMPMLPWVVAEVRRLSRQSTRKEPVTKQVRLCVSPSGLRCEPEPGRSQQWDPLIYSSIFECKPQRVHKLIHNSHDPSYFACLIKEDAVHRQSICYVFKADDQTKVPEIISSIRQAGKIARQEELHCPSEFDDTFSKKFEVLFCGRVTVAHKKAPPALIDECIEKFNHVSGSRGSESPRPNPPHAAPTGSQEPVRRPMRKSFSQPGLRSLAFRKELQDGGLRSSGFFSSFEESDIENHLISGHNIVQPTDIEENRTMLFTIGQSEVYLISPDTKKIALEKNFKEISFCSQGIRHVDHFGFICRESSGGGGFHFVCYVFQCTNEALVDEIMMTLKQAFTVAAVQQTAKAPAQLCEGCPLQSLHKLCERIEGMNSSKTKLELQKHLTTLTNQEQATIFEEVQKLRPRNEQRENELIISFLRCLYEEKQKEHIHIGEMKQTSQMAAENIGSELPPSATRFRLDMLKNKAKRSLTESLESILSRGNKARGLQEHSISVDLDSSLSSTLSNTSKEPSVCEKEALPISESSFKLLGSSEDLSSDSESHLPEEPAPLSPQQAFRRRANTLSHFPIECQEPPQPARGSPGVSQRKLMRYHSVSTETPHERKDFESKANHLGDSGGTPVKTRRHSWRQQIFLRVATPQKACDSSSRYEDYSELGELPPRSPLEPVCEDGPFGPPPEEKKRTSRELRELWQKAILQQILLLRMEKENQKLQASENDLLNKRLKLDYEEITPCLKEVTTVWEKMLSTPGRSKIKFDMEKMHSAVGQGVPRHHRGEIWKFLAEQFHLKHQFPSKQQPKDVPYKELLKQLTSQQHAILIDLGRTFPTHPYFSAQLGAGQLSLYNILKAYSLLDQEVGYCQGLSFVAGILLLHMSEEEAFKMLKFLMFDMGLRKQYRPDMIILQIQMYQLSRLLHDYHRDLYNHLEEHEIGPSLYAAPWFLTMFASQFPLGFVARVFGEH

SEQ ID NO: 851107 - protein, 1058 aa, Homo sapiens
APGAATVRRCLLLPPPRDLLCPQLGGEEAGAEPRGAPSPSPRGGKSAASRVRWTPRPPRPSPGCPQAPARPGPAPGSERAAAQVSAYEVCKIDCLIQNRKTVITVLLSSQTLPKMEPITFTARKHLLSNEVSVDFGLQLVGSLPVHSLTTMPMLPWVVAEVRRLSRQSTRKEPVTKQVRLCVSPSGLRCEPEPGRSQQWDPLIYSSIFECKPQRVHKLIHNSHDPSYFACLIKEDAVHRQSICYVFKADDQTKVPEIISSIRQAGKIARQEELHCPSEFDDTFSKKFEVLFCGRVTVAHKKAPPALIDECIEKFNHVSGSRGSESPRPNPPHAAPTGSQEPVRRPMRKSFSQPGLRSLAFRKELQDGGLRSSGFFSSFEESDIENHLISGHNIVQPTDIEENRTMLFTIGQSEVYLISPDTKKIALEKNFKEISFCSQGIRHVDHFGFICRESSGGGGFHFVCYVFQCTNEALVDEIMMTLKQAFTVAAVQQTAKAPAQLCEGCPLQSLHKLCERIEGMNSSKTKLELQKHLTTLTNQEQATIFEEVQKLRPRNEQRENELIISFLRCLYEEKQKEHIHIGEMKQTSQMAAENIGSELPPSATRFRLDMLKNKAKRSLTESLESILSRGNKARGLQEHSISVDLDSSLSSTLSNTSKEPSVCEKEALPISESSFKLLGSSEDLSSDSESHLPEEPAPLSPQQAFRRRANTLSHFPIECQEPPQPARGSPGVSQRKLMRYHSVSTETPHERKDFESKANHLGDSGGTPVKTRRHSWRQQIFLRVATPQKACDSSSRYEDYSELGELPPRSPLEPVCEDGPFGPPPEEKKRTSRELRELWQKAILQQILLLRMEKENQKLQASENDLLNKRLKLDYEEITPCLKEVTTVWEKMLSTPGRSKIKFDMEKMHSAVGQGVPRHHRGEIWKFLAEQFHLKHQFPSKQQPKDVPYKELLKQLTSQQHAILIDLGRTFPTHPYFSAQLGAGQLSLYNILKAYSLLDQEVGYCQGLSFVAGILLLHMSEEEAFKMLKFLMFDMGLRKQYRPDMIILQIPTTRGTSRT

SEQ ID NO: 851108 - protein, 131 aa, Homo sapiens
MRFLLTLVFEMDIAKQLQAYEVEYHVLQEELIDSSPLSDNQRMDKLEKTNSSLRKQNLDLLEQLQVANGRIQSLEATIEKLLSSESKLKQAMLTLELERSALLQTVEELRRRSAEPSDREPECTQPEPTGD

SEQ ID NO: 851109 - protein, 892 aa, Homo sapiens
APGAATVRRCLLLPPPRDLLCPQLGGEEAGAEPRGAPSPSPRGGKSAASRVRWTPRPPRPSPGCPQAPARPGPAPGSERAAAQVSAYEVCKIDCLIQNRKTVITVLLSSQTLPKMEPITFTARKHLLSNEVSVDFGLQLVGSLPVHSLTTMPMLPWVVAEVRRLSRQSTRKEPVTKQVRLCVSPSGLRCEPEPGRSQQWDPLIYSSIFECKPQRVHKLIHNSHDPSYFACLIKEDAVHRQSICYVFKADDQTKVPEIISSIRQAGKIARQEELHCPSEFDDTFSKKFEVLFCGRVTVAHKKAPPALIDECIEKFNHVSGSRGSESPRPNPPHAAPTGSQEPVRRPMRKSFSQPGLRSLAFRKELQDGGLRSSGFFSSFEESDIENHLISGHNIVQPTDIEENRTMLFTIGQSEVYLISPDTKKIALEKNFKEISFCSQGIRHVDHFGFICRESSGGGGFHFVCYVFQCTNEALVDEIMMTLKQAFTVAAVQQTAKAPAQLCEGCPLQSLHKLCERIEGMNSSKTKLELQKHLTTLTNQEQATIFEEVQKLRPRNEQRENELIISFLRCLYEEKQKEHIHIGEMKQTSQMAAENIGSELPPSATRFRLDMLKNKAKRSLTESLESILSRGNKARGLQEHSISVDLDSSLSSTLSNTSKEPSVCEKEALPISESSFKLLGSSEDLSSDSESHLPEEPAPLSPQQAFRRRANTLSHFPIECQEPPQPARGSPGVSQRKLMRYHSVSTETPHERKCGSSPVGESKHRPGQSSAPAPPPRLNPSASSPNFFKYLKHNSSGEQSGNAVPKSISYRNALRKKLHSSSSVPNFLKFLAPVDENNTSDFMNTKRDFESKANHLGDSGGTPVKTRRHSWRQQIFLRVATPQKACDSSSRYEV

SEQ ID NO: 851110 - protein, 649 aa, Homo sapiens
APGAATVRRCLLLPPPRDLLCPQLGGEEAGAEPRGAPSPSPRGGKSAASRVRWTPRPPRPSPGCPQAPARPGPAPGSERAAAQVSAYEVCKIDCLIQNRKTVITVLLSSQTLPKMEPITFTARKHLLSNEVSVDFGLQLVGSLPVHSLTTMPMLPWVVAEVRRLSRQSTRKEPVTKQVRLCVSPSGLRCEPEPGRSQQWDPLIYSSIFECKPQRVHKLIHNSHDPSYFACLIKEDAVHRQSICYVFKADDQTKVPEIISSIRQAGKIARQEELHCPSEFDDTFSKKFEVLFCGRVTVAHKKAPPALIDECIEKFNHVSGSRGSESPRPNPPHAAPTGSQEPVRRPMRKSFSQPGLRSLAFRKELQDGGLRSSGFFSSFEESDIENHLISGHNIVQPTDIEENRTMLFTIGQSEVYLISPDTKKIALEKNFKEISFCSQGIRHVDHFGFICRESSGGGGFHFVCYVFQCTNEALVDEIMMTLKQAFTVAAVQQTAKAPAQLCEGCPLQSLHKLCERIEGMNSSKTKLELQKHLTTLTNQEQATIFEEVQKLRPRNEQRENELIISFLRCLYEEKQKEHIHIGEMKQTSQMAAENIGSELPPSATRFRLDMLKNKAKRSLTESLESLLPQLSELTRCPFLVLWWGAKGPIF

SEQ ID NO: 851111 - protein, 490 aa, Homo sapiens
APGAATVRRCLLLPPPRDLLCPQLGGEEAGAEPRGAPSPSPRGGKSAASRVRWTPRPPRPSPGCPQAPARPGPAPGSERAAAQVSAYEVCKIDCLIQNRKTVITVLLSSQTLPKMEPITFTARKHLLSNEVSVDFGLQLVGSLPVHSLTTMPMLPWVVAEVRRLSRQSTRKEPVTKQVRLCVSPSGLRCEPEPGRSQQWDPLIYSSIFECKPQRVHKLIHNSHDPSYFACLIKEDAVHRQSICYVFKADDQTKVPEIISSIRQAGKIARQEELHCPSEFDDTFSKKFEVLFCGRVTVAHKKAPPALIDECIEKFNHVSGSRGSESPRPNPPHAAPTGSQEPVRRPMRKSFSQPGLRSLAFRKELQDGGLRSSGFFSSFEESDIENHLISGHNIVQPTDIEENRTMLFTIGQSEVYLISPDTKKIALEKNFKEISFCSQGIRHVDHFGFICRESSGGGGFHFVCYVFQCTNEALVREDKQFLPWNLLYKEF

SEQ ID NO: 851112 - protein, 1282 aa, Homo sapiens; identical to SEQ ID NO: 851099

SEQ ID NO: 851113 - protein, 1042 aa, Homo sapiens
MAELKKFLDPVFEVPEIISSIRQAGKIARQEELHCPSEFDDTFSKKFEVLFCGRVTVAHKKAPPALIDECIEKFNHVSGSRGSESPRPNPPHAAPTGSQEPVRRPMRKSFSQPGLRSLAFRKELQDGGLRSSGFFSSFEESDIENHLISGHNIVQPTDIEENRTMLFTIGQSEVYLISPDTKKIALEKNFKEISFCSQGIRHVDHFGFICRESSGGGGFHFVCYVFQCTNEALVDEIMMTLKQAFTVAAVQQTAKAPAQLCEGCPLQSLHKLCERIEGMNSSKTKLELQKHLTTLTNQEQATIFEEVQKLRPRNEQRENELIISFLRCLYEEKQKEHIHIGEMKQTSQMAAENIGSELPPSATRFRLDMLKNKAKRSLTESLESILSRGNKARGLQEHSISVDLDSSLSSTLSNTSKEPSVCEKEALPISESSFKLLGSSEDLSSDSESHLPEEPAPLSPQQAFRRRANTLSHFPIECQEPPQPARGSPGVSQRKLMRYHSVSTETPHERKDFESKANHLGDSGGTPVKTRRHSWRQQIFLRVATPQKACDSSSRYEDYSELGELPPRSPLEPVCEDGPFGPPPEEKKRTSRELRELWQKAILQQILLLRMEKENQKLQASENDLLNKRLKLDYEEITPCLKEVTTVWEKMLSTPGRSKIKFDMEKMHSAVGQGVPRHHRGEIWKFLAEQFHLKHQFPSKQQPKDVPYKELLKQLTSQQHAILIDLGRTFPTHPYFSAQLGAGQLSLYNILKAYSLLDQEVGYCQGLSFVAGILLLHMSEEEAFKMLKFLMFDMGLRKQYRPDMIILQIQMYQLSRLLHDYHRDLYNHLEEHEIGPSLYAAPWFLTMFASQFPLGFVARVFDMIFLQGTEVIFKVALSLLGSHKPLILQHENLETIVDFIKSTLPNLGLVQMEKTINQVFEMDIAKQLQAYEVEYHVLQEELIDSSPLSDNQRMDKLEKTNSSLRKQNLDLLEQLQVANGRIQSLEATIEKLLSSESKLKQAMLTLELERSALLQTVEELRRRSAEPSDREPECTQPEPTGD

SEQ ID NO: 851114 - protein, 1295 aa, Homo sapiens
APGAATVRRCLLLPPPRDLLCPQLGGEEAGAEPRGAPSPSPRGGKSAASRVRWTPRPPRPSPGCPQAPARPGPAPGSERAAAQVSAYEVCKIDCLIQNRKTVITVLLSSQTLPKMEPITFTARKHLLSNEVSVDFGLQLVGSLPVHSLTTMPMLPWVVAEVRRLSRQSTRKEPVTKQVRLCVSPSGLRCEPEPGRSQQWDPLIYSSIFECKPQRVHKLIHNSHDPSYFACLIKEDAVHRQSICYVFKADDQTKVPEIISSIRQAGKIARQEELHCPSEFDDTFSKKFEVLFCGRVTVAHKKAPPALIDECIEKFNHVSGSRGSESPRPNPPHAAPTGSQEPVRRPMRKSFSQPGLRSLAFRKELQDGGLRSSGFFSSFEESDIENHLISGHNIVQPTDIEENRTMLFTIGQSEVYLISPDTKKIALEKNFKEISFCSQGIRHVDHFGFICRESSGGGGFHFVCYVFQCTNEALVDEIMMTLKQAFTVAAVQQTAKAPAQLCEGCPLQSLHKLCERIEGMNSSKTKLELQKHLTTLTNQEQATIFEEVQKLRPRNEQRENELIISFLRCLYEEKQKEHIHIGEMKQTSQMAAENIGSELPPSATRFRLDMLKNKAKRSLTESLESILSRGNKARGLQEHSISVDLDSSLSSTLSNTSKEPSVCEKEALPISESSFKLLGSSEDLSSDSESHLPEEPAPLSPQQAFRRRANTLSHFPIECQEPPQPARGSPGVSQRKLMRYHSVSTETPHERKDFESKANHLGDSGGTPVKTRRHSWRQQIFLRVATPQKACDSSSRYEEPHCGSPSLACTEDYSELGELPPRSPLEPVCEDGPFGPPPEEKKRTSRELRELWQKAILQQILLLRMEKENQKLQASENDLLNKRLKLDYEEITPCLKEVTTVWEKMLSTPGRSKIKFDMEKMHSAVGQGVPRHHRGEIWKFLAEQFHLKHQFPSKQQPKDVPYKELLKQLTSQQHAILIDLGRTFPTHPYFSAQLGAGQLSLYNILKAYSLLDQEVGYCQGLSFVAGILLLHMSEEEAFKMLKFLMFDMGLRKQYRPDMIILQIQMYQLSRLLHDYHRDLYNHLEEHEIGPSLYAAPWFLTMFASQFPLGFVARVFDMIFLQGTEVIFKVALSLLGSHKPLILQHENLETIVDFIKSTLPNLGLVQMEKTINQVFEMDIAKQLQAYEVEYHVLQEELIDSSPLSDNQRMDKLEKTNSSLRKQNLDLLEQLQVANGRIQSLEATIEKLLSSESKLKQAMLTLELERSALLQTVEELRRRSAEPSDREPECTQPEPTGD

SEQ ID NO: 851115 - protein, 1282 aa, Homo sapiens; identical to SEQ ID NO: 851099

SEQ ID NO: 851116 - protein, 700 aa, Homo sapiens
MKQTSQMAAENIGSELPPSATRFRLDMLKNKAKRSLTESLESILSRGNKARGLQEHSISVDLDSSLSSTLSNTSKEPSVCEKEALPISESSFKLLGSSEDLSSDSESHLPEEPAPLSPQQAFRRRANTLSHFPIECQEPPQPARGSPGVSQRKLMRYHSVSTETPHERKDFESKANHLGDSGGTPVKTRRHSWRQQIFLRVATPQKACDSSSRYEDYSELGELPPRSPLEPVCEDGPFGPPPEEKKRTSRELRELWQKAILQQILLLRMEKENQKLQASENDLLNKRLKLDYEEITPCLKEVTTVWEKMLSTPGRSKIKFDMEKMHSAVGQGVPRHHRGEIWKFLAEQFHLKHQFPSKQQPKDVPYKELLKQLTSQQHAILIDLGRTFPTHPYFSAQLGAGQLSLYNILKAYSLLDQEVGYCQGLSFVAGILLLHMSEEEAFKMLKFLMFDMGLRKQYRPDMIILQIQMYQLSRLLHDYHRDLYNHLEEHEIGPSLYAAPWFLTMFASQFPLGFVARVFDMIFLQGTEVIFKVALSLLGSHKPLILQHENLETIVDFIKSTLPNLGLVQMEKTINQVFEMDIAKQLQAYEVEYHVLQEELIDSSPLSDNQRMDKLEKTNSSLRKQNLDLLEQLQVANGRIQSLEATIEKLLSSESKLKQAMLTLELERSALLQTVEELRRRSAEPSDREPECTQPEPTGD

SEQ ID NO: 851117 - protein, 647 aa, Homo sapiens
ARPAPTRLGRAGVNSAEGKPAVEPSVCEKEALPISESSFKLLGSSEDLSSDSESHLPEEPAPLSPQQAFRRRANTLSHFPIECQEPPQPARGSPGVSQRKLMRYHSVSTETPHERKDFESKANHLGDSGGTPVKTRRHSWRQQIFLRVATPQKACDSSSRYEDYSELGELPPRSPLEPVCEDGPFGPPPEEKKRTSRELRELWQKAILQQILLLRMEKENQKLQASENDLLNKRLKLDYEEITPCLKEVTTVWEKMLSTPGRSKIKFDMEKMHSAVGQGVPRHHRGEIWKFLAEQFHLKHQFPSKQQPKDVPYKELLKQLTSQQHAILIDLGRTFPTHPYFSAQLGAGQLSLYNILKAYSLLDQEVGYCQGLSFVAGILLLHMSEEEAFKMLKFLMFDMGLRKQYRPDMIILQIQMYQLSRLLHDYHRDLYNHLEEHEIGPSLYAAPWFLTMFASQFPLGFVARVFDMIFLQGTEVIFKVALSLLGSHKPLILQHENLETIVDFIKSTLPNLGLVQMEKTINQVFEMDIAKQLQAYEVEYHVLQEELIDSSPLSDNQRMDKLEKTNSSLRKQNLDLLEQLQVANGRIQSLEATIEKLLSSESKLKQAMLTLELERSALLQTVEELRRRSAEPSDREPECTQPEPTGD

SEQ ID NO: 851118 - protein, 1282 aa, Homo sapiens; identical to SEQ ID NO: 851099

SEQ ID NO: 851119 - protein, 180 aa, Homo sapiens
MIFLQGTEVIFKVALSLLGSHKPLILQHENLETIVDFIKSTLPNLGLVQMEKTINQVFEMDIAKQLQAYEVEYHVLQEELIDSSPLSDNQRMDKLEKTNSSLRKQNLDLLEQLQVANGRIQSLEATIEKLLSSESKLKQAMLTLELERSALLQTVEELRRRSAEPSDREPECTQPEPTGD

SEQ ID NO: 851120 - protein, 908 aa, Homo sapiens
APGAATVRRCLLLPPPRDLLCPQLGGEEAGAEPRGAPSPSPRGGKSAASRVRWTPRPPRPSPGCPQAPARPGPAPGSERAAAQVSAYEVCKIDCLIQNRKTVITVLLSSQTLPKMEPITFTARKHLLSNEVSVDFGLQLVGSLPVHSLTTMPMLPWVVAEVRRLSRQSTRKEPVTKQVRLCVSPSGLRCEPEPGRSQQWDPLIYSSIFECKPQRVHKLIHNSHDPSYFACLIKEDAVHRQSICYVFKADDQTKVPEIISSIRQAGKIARQEELHCPSEFDDTFSKKFEVLFCGRVTVAHKKAPPALIDECIEKFNHVSGSRGSESPRPNPPHAAPTGSQEPVRRPMRKSFSQPGLRSLAFRKELQDGGLRSSGFFSSFEESDIENHLISGHNIVQPTDIEENRTMLFTIGQSEVYLISPDTKKIALEKNFKEISFCSQGIRHVDHFGFICRESSGGGGFHFVCYVFQCTNEALVDEIMMTLKQAFTVAAVQQTAKAPAQLCEGCPLQSLHKLCERIEGMNSSKTKLELQKHLTTLTNQEQATIFEEVQKLRPRNEQRENELIISFLRCLYEEKQKEHIHIGEMKQTSQMAAENIGSELPPSATRFRLDMLKNKAKRSLTESLESILSRGNKARGLQEHSISVDLDSSLSSTLSNTSKEPSVCEKEALPISESSFKLLGSSEDLSSDSESHLPEEPAPLSPQQAFRRRANTLSHFPIECQEPPQPARGSPGVSQRKLMRYHSVSTETPHERKDFESKANHLGDSGGTPVKTRRHSWRQQIFLRVATPQKACDSSSRYEDYSELGELPPRSPLEPVCEDGPFGPPPEEKKRTSRELRELWQKAILQQILLLRMEKENQKLQASENDLLNKRLKLDYEVLLREETGLPASRFLRTPTCNSGGMSQCFFCCF

SEQ ID NO: 851121 - protein, 758 aa, Homo sapiens
APGAATVRRCLLLPPPRDLLCPQLGGEEAGAEPRGAPSPSPRGGKSAASRVRWTPRPPRPSPGCPQAPARPGPAPGSERAAAQVSAYEVCKIDCLIQNRKTVITVLLSSQTLPKMEPITFTARKHLLSNEVSVDFGLQLVGSLPVHSLTTMPMLPWVVAEVRRLSRQSTRKEPVTKQVRLCVSPSGLRCEPEPGRSQQWDPLIYSSIFECKPQRVHKLIHNSHDPSYFACLIKEDAVHRQSICYVFKADDQTKVPEIISSIRQAGKIARQEELHCPSEFDDTFSKKFEVLFCGRVTVAHKKAPPALIDECIEKFNHVSGSRGSESPRPNPPHAAPTGSQEPVRRPMRKSFSQPGLRSLAFRKELQDGGLRSSGFFSSFEESDIENHLISGHNIVQPTDIEENRTMLFTIGQSEVYLISPDTKKIALEKNFKEISFCSQGIRHVDHFGFICRESSGGGGFHFVCYVFQCTNEALVDEIMMTLKQAFTVAAVQQTAKAPAQLCEGCPLQSLHKLCERIEGMNSSKTKLELQKHLTTLTNQEQATIFEEVQKLRPRNEQRENELIISFLRCLYEEKQKEHIHIGEMKQTSQMAAENIGSELPPSATRFRLDMLKNKAKRSLTESLESILSRGNKARGLQEHSISVDLDSSLSSTLSNTSKEPSVCEKEALPISESSFKLLGSSEDLSSDSESHLPEEPAPLSPQQAFRRRANTLSHFPIECQEPPQPARGSPGVSQRKLMRYHSVSTETPHERKCGSFTCG

SEQ ID NO: 851122 - protein, 619 aa, Homo sapiens [sequence omitted]

SEQ ID NO: 851123 - protein, 619 aa, Homo sapiens [sequence omitted]

SEQ ID NO: 851124 - protein, 619 aa, Homo sapiens [sequence omitted]

SEQ ID NO: 851125 - protein, 143 aa, Homo sapiens
MTVLKENVMLQSQKAGSPPSIVLGPAQVQQVLTSNVQTICNGTVSVASSPSFSATAPVVTFSPRSSQLVAHPPGTVITSVIKTQETKTLTQEVEKKESEDHLKENTEKTEQQPQPYVMVVSSSNGFTSQVAMKQNELLEPNSF

SEQ ID NO: 851126 - protein, 419 aa, Homo sapiens
MAAVVQQNDLVFEFASNVMEDERQLGDPAIFPAVIVEHVPGADILNSYAGLACVEEPSDMITESSLDVAEEEIIDDDDDDITLTVEASCHDGDETIETIEAAEALLNMDSPGPMLDEKRINNNIFSSPEDDMVVAPVTHVSVTLDGIPEVMETQQVQEKYADSPGASSPEQPKRKKGRKTKPPRPDSPATTPNISVKKKNKDGKGNTIYLWEFLLALLQDKATCPKYIKWTQREKGIFKLVDSKAVSRLWGKHKNKPDMNYETMGRALRYYYQRGILAKVEGQRLVYQFKEMPKDLIYINDEDPSSSIESSDPSLSSSATSNRNQTSRSRVSSSPGVKGGATTVLKPGNSKAAKPKDPVEVAQPSEVLRTVQPTQSPYPTQLFRTVHVVQPVQAVPEGEAARTSTMQDETLNSSVQSIR

SEQ ID NO: 851127 - protein, 658 aa, Homo sapiens
MAAVVQQNDLVFEFASNVMEDERQLGDPAIFPAVIVEHVPGADILNSYAGLACVEEPSDMITESSLDVAEEEIIDDDDDDITLTVETGFLHVGQSQTPDLKQSACLGFPKCGITGMSHCASQVFEASCHDGDETIETIEAAEALLNMDSPGPMLDEKRINNNIFSSPEDDMVVAPVTHVSVTLDGIPEVMETQQVQEKYADSPGASSPEQPKRKKGRKTKPPRPDSPATTPNISVKKKNKDGKGNTIYLWEFLLALLQDKATCPKYIKWTQREKGIFKLVDSKAVSRLWGKHKNKPDMNYETMGRALRYYYQRGILAKVEGQRLVYQFKEMPKDLIYINDEDPSSSIESSDPSLSSSATSNRNQTSRSRVSSSPGVKGGATTVLKPGNSKAAKPKDPVEVAQPSEVLRTVQPTQSPYPTQLFRTVHVVQPVQAVPEGEAARTSTMQDETLNSSVQSIRTIQAPTQVPVVVSPRNQQLHTVTLQTVPLTTVIASTDPSAGTGSQKFILQAIPSSQPMTVLKENVMLQSQKAGSPPSIVLGPAQVQQVLTSNVQTICNGTVSVASSPSFSATAPVVTFSPRSSQLVAHPPGTVITSVIKTQETKTLTQEVEKKESEDHLKENTEKTEQQPQPYVMVVSSSNGFTSQVAMKQNELLEPNSF

SEQ ID NO: 851128 - protein, 619 aa, Homo sapiens [sequence omitted]

SEQ ID NO: 851129 - protein, 595 aa, Homo sapiens
MAAVVQQNDLVFEFASNVMEDERQLGDPAIFPAVIVEHVPGADILNSYAGLACVEEPSDMITESSLDVAEEEIIDDDDDDITLTVEASCHDGDETIETIEAAEALLNMDSPGPMLDEKRINGIPEVMETQQVQEKYADSPGASSPEQPKRKKGRKTKPPRPDSPATTPNISVKKKNKDGKGNTIYLWEFLLALLQDKATCPKYIKWTQREKGIFKLVDSKAVSRLWGKHKNKPDMNYETMGRALRYYYQRGILAKVEGQRLVYQFKEMPKDLIYINDEDPSSSIESSDPSLSSSATSNRNQTSRSRVSSSPGVKGGATTVLKPGNSKAAKPKDPVEVAQPSEVLRTVQPTQSPYPTQLFRTVHVVQPVQAVPEGEAARTSTMQDETLNSSVQSIRTIQAPTQVPVVVSPRNQQLHTVTLQTVPLTTVIASTDPSAGTGSQKFILQAIPSSQPMTVLKENVMLQSQKAGSPPSIVLGPAQVQQVLTSNVQTICNGTVSVASSPSFSATAPVVTFSPRSSQLVAHPPGTVITSVIKTQETKTLTQEVEKKESEDHLKENTEKTEQQPQPYVMVVSSSNGFTSQVAMKQNELLEPNSF

SEQ ID NO: 851130 - protein, 619 aa, Homo sapiens
MAAVVQQNDLVFEFASNVMEDERQLGDPAIFPAVIVEHVPGADILNSYAGLACVEEPSDMITESSLDVAEEEIIDDDDDDITLTVEASCHDGDETIETIEAAEALLNMDSPGPMLDEKRINNNIFSSPEDDMVVAPVTHVSVTLDGIPEVMETQQVQEKYADSPGASSPEQPKRKKGRKTKPPRPDSPATTPNISVKKKNKDGKGNTIYLWEFLLALLQDKATCPKYIKWTQREKGIFKLVDSKAVSRLWGKHKNKPDMNYETMGRALRYYYQRGILAKVEGQRLVYQFKEMPKDLIYINDEDPSSSIESSDPSLSSSATSNRNQTSRSRVSSSPGVKGGATTVLKPGNSKAAKPKDPVEVAQPSEVLRTVQPTQSPYPTQLFRTVHVVQPVQAVPEGEAARTSTMQDETLNSSVQSIRTIQAPTQVPVVVSPRNQQLHTVTLQTVPLTTVIASTDPSAGTGSQKFILQAIPSSQPMTVLKENVMLQSQKAGSPPSIVLGPAQVQQVLTSNVQTICNGTVSVASSPSFSATAPVVTFSPRSSQLVAHPPGTVITSVIKTQETKTLTQEVEKKESEDHLKENTEKTEQQPQPYVMVVSSSNGFTSQFWSLGSPISMHQQV

SEQ ID NO: 851131 - protein, 531 aa, Homo sapiens
MAPTIQTQAQREDGHRPNSHRTLPERSGVVCRVKYCNSLPDIPFDPKFITYPFDQNRFVQYKATSLEKQHKHDLLTEPDLGVTIDLINPDTYRIDPNVLLDPADEKLLEEEIQAPTSSKRSQQHAKVVPWMRKTEYISTEFNRYGISNEKPEVKIGVSVKQQFTEEEIYKDRDSQITAIEKTFEDAQKSISQHYSKPRVTPVEVMPVFPDFKMWINPCAQVIFDSDPAPKDTSGAAALEMMSQAMIRGMMDEEGNQFVAYFLPVEETLKKRKRDQEEEMDYAPDDVYDYKIAREYNWNVKNKASKGYEENYFFIFREGDGVYYNELETRVRLSKRRAKAGVQSGTNALLVVKHRDMNEKELEAQEARKAQLENHEPEEEEEEEMETEEKEAGGSDEEQEKGSSSEKEGSEDEHSGSESEREEGDRDEASDKSGSGEDESSEDEARAARDKEEIFGSDADSEDDADSDDEDRGQAQGGSDNDSDSGSNGGGQRSRSHSRSASPFPSGSEHSAQEDGSEAAASDSSEADSDSD

SEQ ID NO: 851132 - protein, 531 aa, Homo sapiens; identical to SEQ ID NO: 851131

SEQ ID NO: 851133 - protein, 557 aa, Homo sapiens [sequence omitted]

SEQ ID NO: 851134 - protein, 705 aa, Homo sapiens
MAPTIQTQAQREDGHRPNSHRTLPERSGVVCRVKYCNSLPDIPFDPKFITYPFDQNRFVQYKATSLEKQHKHDLLTEPDLGVTIDLINPDTYRIDPNVLLDPADEKLLEEEIQAPTSSKRSQQHAKVVPWMRKTEYISTEFNRYGISNEKPEVKIGVSVKQQFTEEEIYKDRDSQITAIEKTFEDAQKSISQHYSKPRVTPVEVMPVFPDFKMWINPCAQVIFDSDPAPKDTSGAAALEMMSQAMIRGMMDEEGNQFVAYFLPVEETLKKRKRDQEEEMDYAPDDVYDYKIAREYNWNVKNKASKGYEENYFFIFREGDGVYYNELETRVRLSKRRAKAGVQSGTNALLVVKHRDMNEKELEAQEAPDRPSLENHATGRHGHEATQDHARPTQHKHSRRAPQNSRSQAQPRHAPPLTQGRHADTTEPTSEAQRKSSNGRTEQAEPGAPTGPAEQNQVGPPAPTPTDEAHRTRLDRPSAPAQVAPHPKRPPPSRAPQMASHFPARERIRPKSTHRTGGHTHRTRAPTGSGTPNHSNIHEDRATDAHGQVGHTAGKARRTHQPPASRPTVPTSPARRTHHAAHSSAPRQPNRPAPDQPRKNPIRNTKPETSEHDRKAPPVEATAKGPSPGGLEVEQKTTIHRRTPKATGTSLHKPRNRDRRKPHTHTCPRTPGTTAQPLAQAPTHRPPPALLTRTRAPSNPNTSAQT

SEQ ID NO: 851135 - protein, 502 aa, Homo sapiens
LEPESRVYPPGDLRCFPRDTLSGPFDQEFVQYKATSLEKQHKHDLLTEPDLGVTIDLINPDTYRIDPNVLLDPADEKLLEEEIQAPTSSKRSQQHAKVVPWMRKTEYISTEFNRYGISNEKPEVKIGVSVKQQFTEEEIYKDRDSQITAIEKTFEDAQKSISQHYSKPRVTPVEVMPVFPDFKMWINPCAQVIFDSDPAPKDTSGAAALEMMSQAMIRGMMDEEGNQFVAYFLPVEETLKKRKRDQEEEMDYAPDDVYDYKIAREYNWNVKNKASKGYEENYFFIFREGDGVYYNELETRVRLSKRRAKAGVQSGTNALLVVKHRDMNEKELEAQEARKAQLENHEPEEEEEEEMETEEKEAGGSDEEQEKGSSSEKEGSEDEHSGSESEREEGDRDEASDKSGSGEDESSEDEARAARDKEEIFGSDADSEDDADSDDEDRGQAQGGSDNDSDSGSNGGGQRSRSHSRSASPFPSGSEHSAQEDGSEAAASDSSEADSDSD

SEQ ID NO: 851136 - protein, 466 aa, Homo sapiens
VLEDTRSYDRGRPWGYQSTLSQILTPTASTPIVLLDPADEKLLEEEIQAPTSSKRSQQHAKVVPWMRKTEYISTEFNRYGISNEKPEVKIGVSVKQQFTEEEIYKDRDSQITAIEKTFEDAQKSISQHYSKPRVTPVEVMPVFPDFKMWINPCAQVIFDSDPAPKDTSGAAALEMMSQAMIRGMMDEEGNQFVAYFLPVEETLKKRKRDQEEEMDYAPDDVYDYKIAREYNWNVKNKASKGYEENYFFIFREGDGVYYNELETRVRLSKRRAKAGVQSGTNALLVVKHRDMNEKELEAQEARKAQLENHEPEEEEEEEMETEEKEAGGSDEEQEKGSSSEKEGSEDEHSGSESEREEGDRDEASDKSGSGEDESSEDEARAARDKEEIFGSDADSEDDADSDDEDRGQAQGGSDNDSDSGSNGGGQRSRSHSRSASPFPSGSEHSAQEDGSEAAASDSSEADSDSD

SEQ ID NO: 851137 - protein, 97 aa, Homo sapiens
MEQAVSKSLPTGEPAFRLCHGGHFILSSSPEKLRLWEAGLCGVKLESKHHNRCFPTQVFVQYKATSLEKQHKHDLLTEPDLGVTIDLINPDTYRIDP

SEQ ID NO: 851138 - protein, 161 aa, Homo sapiens
VLEDTRSYDRGRPWGYQSTLSQILTPTASTPIVLLDPADEKLLEEEIQAPTSSKRSQQHAKVVPWMRKTEYISTEFNRYGISNEKPEVKIGVSVKQQFTEEEIYKDRDSQITAIEKTFEDAQKSISQHYSKPRVTPVEVMPVFPDFKMWINPCAQELSRTD

SEQ ID NO: 851139 - protein, 531 aa, Homo sapiens; identical to SEQ ID NO: 851131

SEQ ID NO: 851140 - protein, 558 aa, Homo sapiens
MAPTIQTQAQREDGHRPNSHRTLPERSGVVCRVKYCNSLPDIPFDPKFITYPFDQNRFVQYKATSLEKQHKHDLLTEPDLGVTIDLINPDTYRIDPNVLLDPADEKLLEEEIQAPTSSKRSQQHAKVVPWMRKTEYISTEFNRYGISNEKPEVKIGVSVKQQFTEEEIYKDRDSQITAIEKTFEDAQKSISQHYSKPRVTPVEVMPVFPDFKVRPKVGGRKGQPICACSHLTPVPPSPKMWINPCAQVIFDSDPAPKDTSGAAALEMMSQAMIRGMMDEEGNQFVAYFLPVEETLKKRKRDQEEEMDYAPDDVYDYKIAREYNWNVKNKASKGYEENYFFIFREGDGVYYNELETRVRLSKRRAKAGVQSGTNALLVVKHRDMNEKELEAQEARKAQLENHEPEEEEEEEMETEEKEAGGSDEEQEKGSSSEKEGSEDEHSGSESEREEGDRDEASDKSGSGEDESSEDEARAARDKEEIFGSDADSEDDADSDDEDRGQAQGGSDNDSDSGSNGGGQRSRSHSRSASPFPSGSEHSAQEDGSEAAASDSSEADSDSD

SEQ ID NO: 851141 - protein, 478 aa, Homo sapiens
MATGPIPTGLCLRGLEWSAESSTAIASLISPSTPSSSPTPSTRTVLLDPADEKLLEEEIQAPTSSKRSQQHAKVVPWMRKTEYISTEFNRYGISNEKPEVKIGVSVKQQFTEEEIYKDRDSQITAIEKTFEDAQKSISQHYSKPRVTPVEVMPVFPDFKMWINPCAQVIFDSDPAPKDTSGAAALEMMSQAMIRGMMDEEGNQFVAYFLPVEETLKKRKRDQEEEMDYAPDDVYDYKIAREYNWNVKNKASKGYEENYFFIFREGDGVYYNELETRVRLSKRRAKAGVQSGTNALLVVKHRDMNEKELEAQEARKAQLENHEPEEEEEEEMETEEKEAGGSDEEQEKGSSSEKEGSEDEHSGSESEREEGDRDEASDKSGSGEDESSEDEARAARDKEEIFGSDADSEDDADSDDEDRGQAQGGSDNDSDSGSNGGGQRSRSHSRSASPFPSGSEHSAQEDGSEAAASDSSEADSDSD

SEQ ID NO: 851142 - protein, 306 aa, Homo sapiens
SHYEEVLTQLRHVLERQNNEYQVLLGIYTHLEKEITTYRRLLEGESEGTREEEMDYAPDDVYDYKIAREYNWNVKNKASKGYEENYFFIFREGDGVYYNELETRVRLSKRRAKAGVQSGTNALLVVKHRDMNEKELEAQEARKAQLENHEPEEEEEEEMETEEKEAGGSDEEQEKGSSSEKEGSEDEHSGSESEREEGDRDEASDKSGSGEDESSEDEARAARDKEEIFGSDADSEDDADSDDEDRGQAQGGSDNDSDSGSNGGGQRSRSHSRSASPFPSGSEHSAQEDGSEAAASDSSEADSDSD

SEQ ID NO: 851143 - protein, 1003 aa, Homo sapiens
MANETQKVGAIHFPFPFTPYSIQEDFMAELYRVLEAGKIGIFESPTGTGKSLSLICGALSWLRDFEQKKREEEARLLETGTGPLHDEKDESLCLSSSCEGAAGTPRPAGEPAWVTQFVQKKEERDLVDRLKAEQARRKQREERLQQLQHRVQLKYAAKRLRQEEEERENLLRLSREMLETGPEAERLEQLESGEEELVLAEYESDEEKKVASRAPSDATSSRHPPDASFPAALNFLQRTRPSSVLSEDLLMQRAVAKHPALLPLADVFLSFKAWLRVDEDEDDLEEEHITKIYYCSRTHSQLAQFVHEVKKSPFGKDVRLVSLGSRQNLCVNEDVKSLGSVQLINDRCVDMQRSRHEKKKGAEEEKPKRRRQEKQAACPFYNHEQMGLLRDEALAEVKDMEQLLALGKEARACPYYGSRLAIPAAQLVVLPYQMLLHAATRQAAGIRLQDQVVIIDEAHNLIDTITGMHSVEVSGSQLCQAHSQLLQYVERYGKRLKAKNLMYLKQILYLLEKFVAVLGGNIKQNPNTQSLSQTGTELKTINDFLFQSQIDNINLFKVQRYCEKSMISRKLFGFTERYGAVFSSREQPKLAGFQQFLQSLQPRTTEALAAPADESQASTLRPASPLMHIEGFLAALTTANQDGRVILSRQGSLSQSTLKFLLLNPAVHFAQVVKECRAVVIAGGTMQPVSDFRQQLLACAGVEAERVVEFSCVFGPSLALPGHVIPPDNILPLVICSGISNQPLEFTFQKRELPQMMDEVGRILCNLCGVVPGGVVCFFPSYEYLRQVHAHWEKGGLLGRLAARKKIFQEPKSAHQVEQVLLAYSRCIQACGQERGQVTGALLLSVVGGKMSEGINFSDNLGRCVVMVGMPFPNIRSAELQEKMAYLDQTLPRAPGQAPPGKALVENLCMKAVNQSIGRAIRHQKDFASIVLLDQRYARPPVLAKLPAWIRARVEVKATFGPAIAAVQKVSPTFFFLRASPPRDHISHCLLSAQFHREKSASS

SEQ ID NO: 851144 - protein, 167 aa, Homo sapiens
MGLLRDEALAEVKDMEQLLALGKEARACPYYGSRLAIPAAQLVVLPYQMLLHAATRQAAGIRLQDQVVIIDEAHNLIDTITGMHSVEVSGSQLCQAHSQLLQYVERYGKRLKAKNLMYLKQILYLLEKFVAVLGGESLVPLLTPGLQNSLGCFFLGCPSGHLSSLCF

SEQ ID NO: 851145 - protein, 906 aa, Homo sapiens
MANETQKVGAIHFPFPFTPYSIQEDFMAELYRVLEAGKIGIFESPTGTGKSLSLICGALSWLRDFEQKKREEEARLLETGTGPLHDEKDESLCLSSSCEGAAGTPRPAGEPAWVTQFVQKKEERDLVDRLKAEQARRKQREERLQQLQHRVQLKYAAKRLRQEEEERENLLRLSREMLETGPEAERLEQLESGEEELVLAEYESDEEKKVASRVDEDEDDLEEEHITKIYYCSRTHSQLAQFVHEVKKSPFGKDVRLVSLGSRQNLCVNEDVKSLGSVQLINDRCVDMQRSRHEKKKGAEEEKPKRRRQEKQAACPFYNHEQMGLLRDEALAEVKDMEQLLALGKEARACPYYGSRLAIPAAQLVVLPYQMLLHAATRQAAGIRLQDQVVIIDEAHNLIDTITGMHSVEVSGSQLCQAHSQLLQYVERYGKRLKAKNLMYLKQILYLLEKFVAVLGGNIKQNPNTQSLSQTGTELKTINDFLFQSQIDNINLFKVQRYCEKSMISRKLFGFTERYGAVFSSREQPKLAGFQQFLQSLQPRTTEALAAPADESQASTLRPASPLMHIEGFLAALTTANQDGRVILSRQGSLSQSTLKFLLLNPAVHFAQVVKECRAVVIAGGTMQPVSDFRQQLLACAGVEAERVVEFSCGHVIPPDNILPLVICSGISNQPLEFTFQKRELPQMMDEVGRILCNLCGVVPGGVVCFFPSYEYLRQVHAHWEKGGLLGRLAARKKIFQEPKSAHQVEQVLLAYSRCIQACGQERGQVTGALLLSVVGGKMSEGINFSDNLGRCVVMVGMPFPNIRSAELQEKMAYLDQTLPRAPGQAPPGKALVENLCMKAVNQSIGRAIRHQKDFASIVLLDQRYARPPVLAKLPAWIRARVEVKATFGPAIAAVQKFHREKSASS

SEQ ID NO: 851146 - protein, 509 aa, Homo sapiens
MGLLRDEALAEVKDMEQLLALGKEARACPYYGSRLAIPAAQLVVLPYQMLLHAATRQAAGIRLQDQVVIIDEAHNLIDTITGMHSVEVSGSQLCQAHSQLLQYVERYGKRLKAKNLMYLKQILYLLEKFVAVLGGNIKQNPNTQSLSQTGTELKTINDFLFQSQIDNINLFKVQRYCEKSMISRKLFGFTERYGAVFSSREQPKLAGFQQFLQSLQPRTTEALAAPADESQASTLRPASPLMHIEGFLAALTTANQDGRVILSRQGSLSQSTLKFLLLNPAVHFAQVVKECRAVVIAGGTMQPVSDFRQQLLACAGVEAERVVEFSCGHVIPPDNILPLVICSGISNQPLEFTFQKRELPQMMDEVGRILCNLCGVVPGGVVCFFPSYEYLRQVHAHWEKGGLLGRLAARKKIFQEPKSAHQVEQVLLAYSRCIQACGQERGQVTGALLLSVVGGKMSEGINFSDNLGRCVVMVGMPFPNIRSAELQEKMAYLDQTLAGPSGTRRILPA

SEQ ID NO: 851147 - protein, 509 aa, Homo sapiens; identical to SEQ ID NO: 851146

SEQ ID NO: 851148 - protein, 906 aa, Homo sapiens; identical to SEQ ID NO: 851145

SEQ ID NO: 851149 - protein, 917 aa, Homo sapiens
MANETQKVGAIHFPFPFTPYSIQEDFMAELYRVLEAGKIGIFESPTGTGKSLSLICGALSWLRDFEQKKREEEARLLETGTGPLHDEKDESLCLSSSCEGAAGTPRPAGEPAWVTQFVQKKEERDLVDRLKAEQARRKQREERLQQLQHRVQLKYAAKRLRQEEEERENLLRLSREMLETGPEAERLEQLESGEEELVLAEYESDEEKKVASRVDEDEDDLEEEHITKIYYCSRTHSQLAQFVHEVKKSPFGKDVRLVSLGSRQNLCVNEDVKSLGSVQLINDRCVDMQRSRHEKKKGAEEEKPKRRRQEKQAACPFYNHEQMGLLRDEALAEVKDMEQLLALGKEARACPYYGSRLAIPAAQLVVLPYQMLLHAATRQAAGIRLQDQVVIIDEAHNLIDTITGMHSVEVSGSQLCQAHSQLLQYVERYGKRLKAKNLMYLKQILYLLEKFVAVLGGNIKQNPNTQSLSQTGTELKTINDFLFQSQIDNINLFKVQRYCEKSMISRKLFGFTERYGAVFSSREQPKLAGFQQFLQSLQPRTTEALAAPADESQASTLRPASPLMHIEGFLAALTTANQDGRVILSRQGSLSQSTLKFLLLNPAVHFAQVVKECRAVVIAGGTMQPVSDFRQQLLACAGVEAERVVEFSCGHVIPPDNILPLVICSGISNQPLEFTFQKRELPQMMDEVGRILCNLCGVVPGGVVCFFPSYEYLRQVHAHWEKGGLLGRLAARKKIFQEPKSAHQVEQVLLAYSRCIQACGQERGQVTGALLLSVVGGKMSEGINFSDNLGRQGHQAPEGFCQHSAPGPAICPAPCPGQAAGLDPSPCGGQSYLWPRHCCCAEVSPGEVGLFLMGNHTTAWRRALPLSCPLETVFVVGVVCGDPVTKVKPRRRVWSPECCQDPGTGVSSRRRKWGNPE

SEQ ID NO: 851150 - protein, 1023 aa, Homo sapiens
MANETQKVGAIHFPFPFTPYSIQEDFMAELYRVLEAGKIGIFESPTGTGKSLSLICGALSWLRDFEQKKREEEARLLETGTGPLHDEKDESLCLSSSCEGAAGTPRPAGEPAWVTQFVQKKEERDLVDRLKAEQARRKQREERLQQLQHRVQLKYAAKRLRQEEEERENLLRLSREMLETGPEAERLEQLESGEEELVLAEYESDEEKKVASRVDEDEDDLEEEHITKIYYCSRTHSQLAQFVHEVKKSPFGKDVRLVSLGSRQNLCVNEDVKSLGSVQLINDRCVDMQRSRHEKKKGAEEEKPKRRRQEKQAACPFYNHEQMGLLRDEALAEVKDMEQLLALGKEARACPYYGSRLAIPAAQLVVLPYQMLLHAATRQAAGIRLQDQVVIIDEAHNLIDTITGMHSVEVSGSQLCQAHSQLLQYVERYGKRLKAKNLMYLKQILYLLEKFVAVLGGNIKQNPNTQSLSQTGTELKTINDFLFQSQIDNINLFKVQRYCEKSMISRKLFGFTERYGAVFSSREQPKLAGFQQFLQSLQPRTTEALAAPADESQASTLRPASPLMHIEGFLAALTTANQDGRVILSRQGSLSQSTLKFLLLNPAVHFAQVVKECRAVVIAGGTMQPVSDFRQQLLACAGVEAERVVEFSCGEKLCPGWGRLEVRFWPPFSVGNTSYCDQAQGRRRPRGGSLTLRALAQALLLCSLLPAAQCDWRWWAGERCQSLFLCWMMGQGNALSAVSCSTPASPFSAPPWLLPGHVIPPDNILPLVICSGISNQPLEFTFQKRELPQMMDEVGRILCNLCGVVPGGVVCFFPSYEYLRQVHAHWEKGGLLGRLAARKKIFQEPKSAHQVEQVLLAYSRCIQACGQERGQVTGALLLSVVGGKMSEGINFSDNLGRQGHQAPEGFCQHSAPGPAICPAPCPGQAAGLDPSPCGGQSYLWPRHCCCAEVSPGEVGLFLMGNHTTAWRRALPLSCPLETVFVVGVVCGDPVTKVKPRRRVWSPECCQDPGTGVSSRRRKWGNPE

SEQ ID NO: 851151 - protein, 542 aa, Homo sapiens
MANETQKVGAIHFPFPFTPYSIQEDFMAELYRVLEAGKIGIFESPTGTGKSLSLICGALSWLRDFEQKKREEEARLLETGTGPLHDEKDESLCLSSSCEGAAGTPRPAGEPAWVTQFVQKKEERDLVDRLKAEQARRKQREERLQQLQHRVQLKYAAKRLRQEEEERENLLRLSREMLETGPEAERLEQLESGEEELVLAEYESDEEKKVASRVDEDEDDLEEEHITKIYYCSRTHSQLAQFVHEVKECRAVVIAGGTMQPVSDFRQQLLACAGVEAERVVEFSCGHVIPPDNILPLVICSGISNQPLEFTFQKRELPQMMDEVGRILCNLCGVVPGGVVCFFPSYEYLRQVHAHWEKGGLLGRLAARKKIFQEPKSAHQVEQVLLAYSRCIQACGQERGQVTGALLLSVVGGKMSEGINFSDNLGRCVVMVGMPFPNIRSAELQEKMAYLDQTLPRAPGQAPPGKALVENLCMKAVNQSIGRAIRHQKDFASIVLLDQRYARPPVLAKLPAWIRARVEVKATFGPAIAAVQKFHREKSASS

SEQ ID NO: 851152 - protein, 392 aa, Homo sapiens
MANETQKVGAIHFPFPFTPYSIQEDFMAELYRVLEAGKIGIFESPTGTGKSLSLICGALSWLRDFEQKKREEEARLLETGTGPLHDEKDESLCLSSSCEGAAGTPRPAGEPAWVTQFVQKKEERDLVDRLKVRPGVSGSSGISNQPLEFTFQKRELPQMMDEVGRILCNLCGVVPGGVVCFFPSYEYLRQVHAHWEKGGLLGRLAARKKIFQEPKSAHQVEQVLLAYSRCIQACGQERGQVTGALLLSVVGGKMSEGINFSDNLGRQGHQAPEGFCQHSAPGPAICPAPCPGQAAGLDPSPCGGQSYLWPRHCCCAEVSPGEVGLFLMGNHTTAWRRALPLSCPLETVFVVGVVCGDPVTKVKPRRRVWSPECCQDPGTGVSSRRRKWGNPE

SEQ ID NO: 851153 - protein, 489 aa, Homo sapiens
MANETQKVGAIHFPFPFTPYSIQEDFMAELYRVLEAGKIGIFESPTGTGKSLSLICGALSWLRDFEQKKREEEARLLETGTGPLHDEKDESLCLSSSCEGAAGTPRPAGEPAWVTQFVQKKEERDLVDRLKAEQARRKQREERLQQLQHRVQLKYAAKRLRQEEEERENLLRLSREMLETGPEAERLEQLESGEEELVLAEYESDEEKKVASRVDEDEDDLEEEHITKIYYCSRTHSQLAQFVHEVKKSPFGKDVRLVSLGSRQNLCVNEDVKSLGSVQLINDRCVDMQRSRHEKKKGAEEEKPKRRRQEKQAACPFYNHEQMGLLRDEALAEVKDMEQLLALGKEARACPYYGSRLAIPAAQLVVLPYQMLLHAATRQAAGIRLQDQVVIIDEAHNLIDTITGMHSVEVSGSQLCQAHSQLLQYVERYGKRLKAKNLMYLKQILYLLEKFVAVLGGESLVPLLTPGLQNSLGCFFLGCPSGHLSSLCF

SEQ ID NO: 851154 - protein, 906 aa, Homo sapiens; identical to SEQ ID NO: 851145

SEQ ID NO: 851155 - protein, 856 aa, Homo sapiens
MANETQKVGAIHFPFPFTPYSIQEDFMAELYRVLEAGKIGIFESPTGTGKSLSLICGALSWLRDFEQKKREEEARLLETGTGPLHDEKDESLCLSSSCEGAAGTPRPAGEPAWVTQFVQKKEERDLVDRLKAEQARRKQREERLQQLQHRVQLKYAAKRLRQEEEERENLLRLSREMLETGPEAERLEQLESGEEELVLAEYESDEEKKVASRVDEDEDDLEEEHITKIYYCSRTHSQLAQFVHEVKKSPFGKDVRLVSLGSRQNLCVNEDVKSLGSVQLINDRCVDMQRSRHEKKKGAEEEKPKRRRQEKQAACPFYNHEQMGLLRDEALAEVKDMEQLLALGKEARACPYYGSRLAIPAAQLVVLPYQMLLHAATRQAAGIRLQDQVVIIDEAHNLIDTITGMHSVEVSGSQLCQAHSQLLQYVERYGKRLKAKNLMYLKQILYLLEKFVAVLGGNIKQNPNTQSLSQTGTELKTINDFLFQSQIDNINLFKVQRYCEKSMISRKLFGFTERYGAVFSSREQPKLAGFQQFLQSLQPRTTEALAAPADESQASTLRPASPLMHIEGFLAALTTANQDGRVILSRQGSLSQSTLKFLLLNPAVHFAQVVKECRAVVIAGGTMQPVSDFRQQLLACAGVEAERVVEFSCGHVIPPDNILPLVICSGISNQPLEFTFQKRELPQMIFQEPKSAHQVEQVLLAYSRCIQACGQERGQVTGALLLSVVGGKMSEGINFSDNLGRCVVMVGMPFPNIRSAELQEKMAYLDQTLPRAPGQAPPGKALVENLCMKAVNQSIGRAIRHQKDFASIVLLDQRYARPPVLAKLPAWIRARVEVKATFGPAIAAVQKFHREKSASS

SEQ ID NO: 851156 - protein, 76 aa, Homo sapiens
VGGPENQHCDLFPFSFLGNIKQNPNTQSLSQTGTELKTINDFLFQSQIDNINLFKVQRYCEKSMISRKVTAPILWS

SEQ ID NO: 851157 - protein, 906 aa, Homo sapiens; identical to SEQ ID NO: 851145

SEQ ID NO: 851158 - protein, 509 aa, Homo sapiens; identical to SEQ ID NO: 851146

SEQ ID NO: 851159 - protein, 584 aa, Homo sapiens [sequence omitted]

SEQ ID NO: 851160 - protein, 426 aa, Homo sapiens
RPLYPTITNINLFKVQRYCEKSMISRKLFGFTERYGAVFSSREQPKLAGFQQFLQSLQPRTTEALAAPADESQASTLRPASPLMHIEGFLAALTTANQDGRVILSRQGSLSQSTLKFLLLNPAVHFAQVVKECRAVVIAGGTMQPVSDFRQQLLACAGVEAERVVEFSCGHVIPPDNILPLVICSGISNQPLEFTFQKRELPQMMDEVGRILCNLCGVVPGGVVCFFPSYEYLRQVHAHWEKGGLLGRLAARKKIFQEPKSAHQVEQVLLAYSRCIQACGQERGQVTGALLLSVVGGKMSEGINFSDNLGRCVVMVGMPFPNIRSAELQEKMAYLDQTLPRAPGQAPPGKALVENLCMKAVNQSIGRAIRHQKDFASIVLLDQRYARPPVLAKLPAWIRARVEVKATFGPAIAAVQKFHREKSASS

SEQ ID NO: 851161 - protein, 516 aa, Homo sapiens
MAELYRVLEAGKIGIFESPTGTGKSLSLICGALSWLRDFEQKKREEEARLLETGTGPLHDEKDESLCLSSSCEGAAGTPRPAGEPAWVTQFVQKKEERDLVDRLKAEQARRKQREERLQQLQHRVQLKYAAKRLRQEEEERENLLRLSREMLETGPEAERLEQLESGEEELVLAEYESDEEKKVASRVDEDEDDLEEEHITKIYYCSRTHSQLAQFVHEVKECRAVVIAGGTMQPVSDFRQQLLACAGVEAERVVEFSCGHVIPPDNILPLVICSGISNQPLEFTFQKRELPQMMDEVGRILCNLCGVVPGGVVCFFPSYEYLRQVHAHWEKGGLLGRLAARKKIFQEPKSAHQVEQVLLAYSRCIQACGQERGQVTGALLLSVVGGKMSEGINFSDNLGRCVVMVGMPFPNIRSAELQEKMAYLDQTLPRAPGQAPPGKALVENLCMKAVNQSIGRAIRHQKDFASIVLLDQRYARPPVLAKLPAWIRARVEVKATFGPAIAAVQKFHREKSASS

SEQ ID NO: 851162 - protein, 775 aa, Homo sapiens
MANETQKVGAIHFPFPFTPYSIQEDFMAELYRVLEAGKIGIFESPTGTGKSLSLICGALSWLRDFEQKKREEEARLLETGTGPLHDEKDESLCLSSSCEGAAGTPRPAGEPAWVTQFVQKKEERDLVDRLKAEQARRKQREERLQQLQHRVQLKYAAKRLRQEEEERENLLRLSREMLETGPEAERLEQLESGEEELVLAEYESDEEKKVASRVDEDEDDLEEEHITKIYYCSRTHSQLAQFVHEVKKSPFGKDVRLVSLGSRQNLCVNEDVKSLGSVQLINDRCVDMQRSRHEKKKGAEEEKPKRRRQEKQAACPFYNHEQMGLLRDEALAEVKDMEQLLALGKEARACPYYGSRLAIPAAQLVVLPYQMLLHAATRQAAGIRLQDQVVIIDEAHNLIDTITGMHSVEVSGSQLCQAHSQLLQYVERYGKRLKAKNLMYLKQILYLLEKFVAVLGGNIKQNPNTQSLSQTGTELKTINDFLFQSQIDNINLFKVQRYCEKSMISRKLFGFTERYGAVFSSREQPKLAGFQQFLQSLQPRTTEALAAPADESQASTLRPASPLMHIEGFLAALTTANQDGRVILSRQGSLSQSTLKFLLLNPAVHFAQVVKECRAVVIAGGTMQPVSDFRQQLLACAGVEAERVVEFSCGHVIPPDNILPLVICSGISNQPLEFTFQKRELPQMMDEVGRILCNLCGVVPGGVVCFFPSYEYLRQVHAHWEKGGLLGRLAARKKVSGLSAAFPLVRTVPLSPPGSSRAHRVRTGFWLLIPTAPSP

SEQ ID NO: 851163 - protein, 247 aa, Homo sapiens
METVESQHDGSITASLTESKSAHVQTQTGQNSIPALAQVAAIAETDESAESEGVIDSHKRREILSRRPSYRKILNELSSDVPGVPKIEEERSEEEGTPPSIATMAVPTSIYQTSTGQYIAIAQGGTIQISNPGSDGVQGLQALTMTNSGAPPPGATIVQYAAQSADGTQQFFVPGSQVVVQAATGDMPTYQIRAPTAALPQGVVMAASPGSLHSPQQLAEEATRKRELRLMKNREGVAQGMVTSRTL

SEQ ID NO: 851164 - protein, 81 aa, Homo sapiens
MAVPTSIYQTSTGQYTATGDMPTYQIRAPTAALPQGVVMAASPGSLHSPQQLAEEATRKRELRLMKNREGVAQGMVTSRTL

SEQ ID NO: 851165 - protein, 281 aa, Homo sapiens [sequence omitted]

SEQ ID NO: 851166 - protein, 218 aa, Homo sapiens [sequence omitted]

SEQ ID NO: 851167 - protein, 269 aa, Homo sapiens
MWWHQHNLCFRRPIEEDYSSGDVEEKVAAIAETDESAESEGVIDSHKRREILSRRPSYRKILNELSSDVPGVPKIEEERSEEEGTPPSIATMAVPTSIYQTSTGQYIAIAQGGTIQISNPGSDGVQGLQALTMTNSGAPPPGATIVQYAAQSADGTQQFFVPGSQVVVQAATGDMPTYQIRAPTAALPQGVVMAASPGSLHSPQQLAEEATRKRELRLMKNREAARECRRKKKEYVKCLENRVAVLENQNKTLIEELKALKDLYCHKVE

SEQ ID NO: 851168 - protein, 219 aa, Homo sapiens [sequence omitted]

SEQ ID NO: 851169 - protein, 120 aa, Homo sapiens
MAVTGDDTDEETELAPSHMAAATGDMPTYQIRAPTAALPQGVVMAASPGSLHSPQQLAEEATRKRELRLMKNREAARECRRKKKEYVKCLENRVAVLENQNKTLIEELKALKDLYCHKVE

SEQ ID NO: 851170 - protein, 112 aa, Homo sapiens
MNRTQELSGQLSAATGDMPTYQIRAPTAALPQGVVMAASPGSLHSPQQLAEEATRKRELRLMKNREAARECRRKKKEYVKCLENRVAVLENQNKTLIEELKALKDLYCHKVE

SEQ ID NO: 851171 - protein, 244 aa, Homo sapiens
MVAAIAETDESAESEGVIDSHKRREILSRRPSYRKILNELSSDVPGVPKIEEERSEEEGTPPSIATMAVPTSIYQTSTGQYIAIAQGGTIQISNPGSDGVQGLQALTMTNSGAPPPGATIVQYAAQSADGTQQFFVPGSQVVVQAATGDMPTYQIRAPTAALPQGVVMAASPGSLHSPQQLAEEATRKRELRLMKNREAARECRRKKKEYVKCLENRVAVLENQNKTLIEELKALKDLYCHKVE

SEQ ID NO: 851172 - protein, 348 aa, Homo sapiens
MSKCARKKYIKTNPRQMTMETVESQHDGSITASLTESKSAHVQTQTGQNSIPALAQCSELRSGTRRGSPAVTLVQLPSGQTIHVQGVIQTPQPWVIQSSEIHTVQVAAIAETDESAESEGVIDSHKRREILSRRPSYRKILNELSSDVPGVPKIEEERSEEEGTPPSIATMAVPTSIYQTSTGQYIAIAQGGTIQISNPGSDGVQGLQALTMTNSGAPPPGATIVQYAAQSADGTQQFFVPGSQVVVQAATGDMPTYQIRAPTAALPQGVVMAASPGSLHSPQQLAEEATRKRELRLMKNREAARECRRKKKEYVKCLENRVAVLENQNKTLIEELKALKDLYCHKVE

SEQ ID NO: 851173 - protein, 67 aa, Homo sapiens
LVRSELWDAEPGAVEQQQAPHARFVRSAAPGPACLLANLGRVGKSSLREPCGSGERFNSEKEKESRR

SEQ ID NO: 851174 - protein, 198 aa, Homo sapiens
ISFFFPPTFLRRRRPLVAVAAIAETDESAESEGVIDSHKRREILSRRPSYRKILNELSSDVPGVPKIEEERSEEEGTPPSIATMAVPTSIYQTSTGQYTATGDMPTYQIRAPTAALPQGVVMAASPGSLHSPQQLAEEATRKRELRLMKNREAARECRRKKKEYVKCLENRVAVLENQNKTLIEELKALKDLYCHKVE

SEQ ID NO: 851175 - protein, 219 aa, Homo sapiens [sequence omitted]

SEQ ID NO: 851176 - protein, 138 aa, Homo sapiens
MTNSGAPPPGATIVQYAAQSADGTQQFFVPGSQVVVQAATGDMPTYQIRAPTAALPQGVVMAASPGSLHSPQQLAEEATRKRELRLMKNREAAKECRRRKKEYVKCLESRVAVLEVQNKKLIEELETLKDICSPKTDY

SEQ ID NO: 851177 - protein, 113 aa, Homo sapiens
MNRTQELSGQLSAATGDMPTYQIRAPTAALPQGVVMAASPGSLHSPQQLAEEATRKRELRLMKNREAAKECRRRKKEYVKCLESRVAVLEVQNKKLIEELETLKDICSPKTDY

SEQ ID NO: 851178 - protein, 135 aa, Homo sapiens [sequence omitted]

SEQ ID NO: 851179 - protein, 109 aa, Homo sapiens
MAVTGDDTAATGDMPTYQIRAPTAALPQGVVMAASPGSLHSPQQLAEEATRKRELRLMKNREAAKECRRRKKEYVKCLESRVAVLEVQNKKLIEELETLKDICSPKTDY

SEQ ID NO: 851180 - protein, 348 aa, Homo sapiens; identical to SEQ ID NO: 851172

SEQ ID NO: 851181 - protein, 87 aa, Homo sapiens
RPRPLTRTFPPPLPGSISLLDCGASLLLAAGRGRSSSLDFFPRGLPREAVPAWGRGGRGGRTRFGRLQRYFWSGVGREAAATASQLT

SEQ ID NO: 851182 - protein, 87 aa, Homo sapiens; identical to SEQ ID NO: 851181

SEQ ID NO: 851183 - protein, 348 aa, Homo sapiens; identical to SEQ ID NO: 851172

SEQ ID NO: 851184 - protein, 108 aa, Homo sapiens
MAVTGDDTAATGDMPTYQIRAPTAALPQGVVMAASPGSLHSPQQLAEEATRKRELRLMKNREAARECRRKKKEYVKCLENRVAVLENQNKTLIEELKALKDLYCHKVE

SEQ ID NO: 851185 - protein, 348 aa, Homo sapiens; identical to SEQ ID NO: 851172

SEQ ID NO: 851186 - protein, 282 aa, Homo sapiens
METVESQHDGSITASLTESKSAHVQTQTGQNSIPALAQVAAIAETDESAESEGVIDSHKRREILSRRPSYRKILNELSSDVPGVPKIEEERSEEEGTPPSIATMAVPTSIYQTSTGQYIAIAQGGTIQISNPGSDGVQGLQALTMTNSGAPPPGATIVQYAAQSADGTQQFFVPGSQVVVQAATGDMPTYQIRAPTAALPQGVVMAASPGSLHSPQQLAEEATRKRELRLMKNREAAKECRRRKKEYVKCLESRVAVLEVQNKKLIEELETLKDICSPKTDY

SEQ ID NO: 851187 - protein, 349 aa, Homo sapiens
MSKCARKKYIKTNPRQMTMETVESQHDGSITASLTESKSAHVQTQTGQNSIPALAQCSELRSGTRRGSPAVTLVQLPSGQTIHVQGVIQTPQPWVIQSSEIHTVQVAAIAETDESAESEGVIDSHKRREILSRRPSYRKILNELSSDVPGVPKIEEERSEEEGTPPSIATMAVPTSIYQTSTGQYIAIAQGGTIQISNPGSDGVQGLQALTMTNSGAPPPGATIVQYAAQSADGTQQFFVPGSQVVVQAATGDMPTYQIRAPTAALPQGVVMAASPGSLHSPQQLAEEATRKRELRLMKNREAAKECRRRKKEYVKCLESRVAVLEVQNKKLIEELETLKDICSPKTDY

SEQ ID NO: 851188 - protein, 87 aa, Homo sapiens; identical to SEQ ID NO: 851181

SEQ ID NO: 851189 - protein, 218 aa, Homo sapiens [sequence omitted]

SEQ ID NO: 851190 - protein, 245 aa, Homo sapiens
MVAAIAETDESAESEGVIDSHKRREILSRRPSYRKILNELSSDVPGVPKIEEERSEEEGTPPSIATMAVPTSIYQTSTGQYIAIAQGGTIQISNPGSDGVQGLQALTMTNSGAPPPGATIVQYAAQSADGTQQFFVPGSQVVVQAATGDMPTYQIRAPTAALPQGVVMAASPGSLHSPQQLAEEATRKRELRLMKNREAAKECRRRKKEYVKCLESRVAVLEVQNKKLIEELETLKDICSPKTDY

SEQ ID NO: 851191 - protein, 102 aa, Homo sapiens
MAAATGDMPTYQIRAPTAALPQGVVMAASPGSLHSPQQLAEEATRKRELRLMKNREAARECRRKKKEYVKCLENRVAVLENQNKTLIEELKALKDLYCHKVE

SEQ ID NO: 851192 - protein, 120 aa, Homo sapiens
TVTPHFTDEETELAPSHMAAATGDMPTYQIRAPTAALPQGVVMAASPGSLHSPQQLAEEATRKRELRLMKNREAAKECRRRKKEYVKCLESRVAVLEVQNKKLIEELETLKDICSPKTDY

SEQ ID NO: 851193 - protein, 87 aa, Homo sapiens; identical to SEQ ID NO: 851181

SEQ ID NO: 851194 - protein, 135 aa, Homo sapiens [sequence omitted]

SEQ ID NO: 851195 - protein, 195 aa, Homo sapiens
MSKCARKKYIKTNPRQMTMETVESQHDGSITASLTESKSAHVQTQTGQNSIPALAQVAAIAETDESAESEGVIDSHKRREILSRRPSYRKILNELSSDVPGVPKIEEERSEEEGTPPSIATMAVPTSIYQTSTGQYIAIAQGGTIQISNPGSDGVQGNWARAIFSKTKFGTQKNTFFPRGKAFLVSQTPKGAVPF

SEQ ID NO: 851196 - protein, 215 aa, Homo sapiens
MSSSEEVSWISWFCGLRGNEFFCEVDEDYIQDKFNLTGLNEQVPHYRQALDMILDLEPDEELEDNPNQSDLIEQAAEMLYGLIHARYILTNRGIAQMLEKYQQGDFGYCPRVYCENQPMLPIGLSDIPGEAMVKLYCPKCMDVYTPKSSRHHHTDGAYFGTGFPHMLFMVHPEYRPKRPANQFVPRLYGFKIHPMAYQLQLQAASNFKSPVKTIR

SEQ ID NO: 851197 - protein, 200 aa, Homo sapiens
DAWVDPRVGVDEDYIQDKFNLTGLNEQVPHYRQALDMILDLEPDEELEDNPNQSDLIEQAAEMLYGLIHARYILTNRGIAQMLEKYQQGDFGYCPRVYCENQPMLPIGLSDIPGEAMVKLYCPKCMDVYTPKSSRHHHTDGAYFGTGFPHMLFMVHPEYRPKRPANQFVPRLYGFKIHPMAYQLQLQAASNFKSPVKTIR

SEQ ID NO: 851198 - protein, 209 aa, Homo sapiens
RPTLEETQFGPGNEFFCEVDEDYIQDKFNLTGLNEQVPHYRQALDMILDLEPDEELEDNPNQSDLIEQAAEMLYGLIHARYILTNRGIAQMLEKYQQGDFGYCPRVYCENQPMLPIGLSDIPGEAMVKLYCPKCMDVYTPKSSRHHHTDGAYFGTGFPHMLFMVHPEYRPKRPANQFVPRLYGFKIHPMAYQLQLQAASNFKSPVKTIR

SEQ ID NO: 851199 - protein, 260 aa, Homo sapiens
DAWVDPRVGRGRVRGLRCSGRRRSLEVATSLPHPSPGPRPAADVKMSSSEEVSWISWFCGLRGNEFFCEVDEDYIQDKFNLTGLNEQVPHYRQALDMILDLEPDEELEDNPNQSDLIEQAAEMLYGLIHARYILTNRGIAQMLEKYQQGDFGYCPRVYCENQPMLPIGLSDIPGEAMVKLYCPKCMDVYTPKSSRHHHTDGAYFGTGFPHMLFMVHPEYRPKRPANQFVPRLYGFKIHPMAYQLQLQAASNFKSPVKTIR

SEQ ID NO: 851200 - protein, 215 aa, Homo sapiens; identical to SEQ ID NO: 851196

SEQ ID NO: 851201 - protein, 215 aa, Homo sapiens; identical to SEQ ID NO: 851196

SEQ ID NO: 851202 - protein, 215 aa, Homo sapiens; identical to SEQ ID NO: 851196

SEQ ID NO: 851203 - protein, 215 aa, Homo sapiens; identical to SEQ ID NO: 851196

SEQ ID NO: 851204 - protein, 215 aa, Homo sapiens; identical to SEQ ID NO: 851196

SEQ ID NO: 851205 - protein, 215 aa, Homo sapiens; identical to SEQ ID NO: 851196

SEQ ID NO: 851206 - protein, 215 aa, Homo sapiens; identical to SEQ ID NO: 851196

SEQ ID NO: 851207 - protein, 110 aa, Homo sapiens [sequence omitted]

SEQ ID NO: 851208 - protein, 209 aa, Homo sapiens; identical to SEQ ID NO: 851198

SEQ ID NO: 851209 - protein, 263 aa, Homo sapiens
LRQYEAGVNRPRRGRVRGLRCSGRRRSLEVATSLPHPSPGPRPAADVKMSSSEEVSWISWFCGLRGNEFFCEVDEDYIQDKFNLTGLNEQVPHYRQALDMILDLEPDEELEDNPNQSDLIEQAAEMLYGLIHARYILTNRGIAQMLEKYQQGDFGYCPRVYCENQPMLPIGLSDIPGEAMVKLYCPKCMDVYTPKSSRHHHTDGAYFGTGFPHMLFMVHPEYRPKRPANQFVPRLYGFKIHPMAYQLQLQAASNFKSPVKTIR

SEQ ID NO: 851210 - protein, 132 aa, Homo sapiens
NALRLPQRGPRSKPIFWSQESTLWVRKGPQEAEGNLWNAEKPCNEITSRLPLTITLTRVRRSHLEPKGKWRSAKGRAEWLAPPQVSALGRSSSHTAHPTPPKSLRTEPSRTSPLMRQEPGGNSMPVKGLWRD

SEQ ID NO: 851211 - protein, 215 aa, Homo sapiens; identical to SEQ ID NO: 851196

SEQ ID NO: 851212 - protein, 215 aa, Homo sapiens; identical to SEQ ID NO: 851196

SEQ ID NO: 851213 - protein, 225 aa, Homo sapiens
MAGTTSADVKMSSSEEVSWISWFCGLRGNEFFCEVDEDYIQDKFNLTGLNEQVPHYRQALDMILDLEPDEELEDNPNQSDLIEQAAEMLYGLIHARYILTNRGIAQMLEKYQQGDFGYCPRVYCENQPMLPIGLSDIPGEAMVKLYCPKCMDVYTPKSSRHHHTDGAYFGTGFPHMLFMVHPEYRPKRPANQFVPRLYGFKIHPMAYQLQLQAASNFKSPVKTIR

SEQ ID NO: 851214 - protein, 215 aa, Homo sapiens; identical to SEQ ID NO: 851196

SEQ ID NO: 851215 - protein, 164 aa, Homo sapiens
MILDLEPDEELEDNPNQSDLIEQAAEMLYGLIHARYILTNRGIAQMLEKYQQGDFGYCPRVYCENQPMLPIGLSDIPGEAMVKLYCPKCMDVYTPKSSRHHHTDGAYFGTGFPHMLFMVHPEYRPKRPANQFVPRLYGFKIHPMAYQLQLQAASNFKSPVKTIR

SEQ ID NO: 851216 - protein, 110 aa, Homo sapiens [sequence omitted]

SEQ ID NO: 851217 - protein, 125 aa, Homo sapiens [sequence omitted]

SEQ ID NO: 851218 - protein, 1862 aa, Homo sapiens
MQSFRERCGFHGKQQNYQQTSQETSRLENYRQPSQAGLSCDRQRLLAKDYYNPQPYPSYEGGAGTPSGTAAAVAADKYHRGSKALPTQQGLQGRPAFPGYGVQDSSPYPGRYAGEESLQAWGAPQPPPPQPQPLPAGVAKYDENLMKKTAVPPSRQYAEQGAQVPFRTHSLHVQQPPPPQQPLAYPKLQRQKLQNDIASPLPFPQGWWAGGHSYKSCTAPTAQPHDRPLTASSSLAPGQRVQNLHAYQSGRLSYDQQQQQQQQQQQQQQALQSRHHAQETLHYQNLAKYQHYGQQGQGYCQPDAAVRTPEQYYQTFSPSSSHSPARSVGRSPSYSSTPSPLMPNLENFPYSQQPLSTGAFPAGITDHSHFMPLLNPSPTDATSSPADLTALTSQVENISNTVQQLLLSKAAVPQKKGVKNLVSRTPEQHKSQHCSPEGSGYSAEPAGTPLSEPPSSTPQSTHAEPQEADYLSGSEDPLERSFLYCNQARGSPARVNSNSKAKPESVSTCSVTSPDDMSTKSDDSFQSLHGSLPLDSFSKFVAGERDCPRLLLSALAQEDLASEILGLQEAIGEKADKAWAEAPSLVKDSSKPPFSLENHSACLDSVAKSAWPRPGEPEALPDSLQLDKGGNAKDFSPGLFEDPSVAFATPDPKKTTGPLSFGTKPTLGVPAPDPTTAAFDCFPDTTAASSADSANPFAWPEENLGDACPRWGLHPGELTKGLEQGGKASDGISKGDTHEASACLGFQEEDPPGEKVASLPGDFKQEEVGGVKEEAGGLLQCPEVAKADRWLEDSRHCCSTADFGDLPLLPPTSRKEDLEAEEEYSSLCELLGSPEQRPGMQDPLSPKAPLICTKEEVEEVLDSKAGWGSPCHLSGESVILLGPTVGTESKVQSWFESSLSHMKPGEEGPDGERAPGDSTTSDASLAQKPNKPAVPEAPIAKKEPVPRGKSLRSRRVHRGLPEAEDSPCRAPVLPKDLLLPESCTGPPQGQMEGAGAPGRGASEGLPRMCTRSLTALSEPRTPGPPGLTTTPAPPDKLGGKQRAAFKSGKRVGKPSPKAASSPSNPAALPVASDSSPMGSKTKETDSPSTPGKDQRSMILRSRTKTQEIFHSKRRRPSEGRLPNCRATKKLLDNSHLPATFKVSSSPQKEGRVSQRARVPKPGAGSKLSDRPLHALKRKSAFMAPVPTKKRNLVLRSRSSSSSNASGNGGDGKEERPEGSPTLFKRMSSPKKAKPTKGNGEPATKLPPPETPDACLKLASRAAFQGAMKTKVLPPRKGRGLKLEAIVQKITSPSLKKFACKAPGASPGNPLSPSLSDKDRGLKGAGGSPVGVEEGLVNVGTGQKLPTSGADPLCRNPTNRSLKGKLMNRASGTQGASEDNSGGGGKKPKMEELGLASQPPEGRPCQPQTRAQKQPGHTNYSSYSKRKRLTRGRAKNTTSSPCKGRAKRRRQQQVLPLDPAEPEIRLKYISSCKRLRSDSRTPAFSPFVRVEKRDAFTTICTVVNSPGDAPKPHRKPSSSASSSSSSSSFSLDAAGASLATLPGGSILQPRPSLPLSSTMHLGPVVSKALSTSCLVCCLCQNPANFKDLGDLCGPYYPEHCLPKKKPKLKEKVRPEGTCEEASLPLERTLKGPECAAAATAGKPPRPDGPADPAKQGPLRTSARGLSRRLQSCYCCDGREDGGEEAAPADKGHWVHEACAVWTGGVYLVAGKLFGLQEAMKVAVDMHGGTVALAPGDFSLPGLRFASLFQGPSWCDCPVLATSTPSSWSRCVPAAKKPGPPLGAATKDASTPTTTRVPAMQVRARPGTGGHWSPSKQSRGTLPGHSSPNPGPISLFSFPPLLPQQFFYPSVCLDLCWAMPGTWK

SEQ ID NO: 851219 - protein, 1862 aa, Homo sapiens; identical to SEQ ID NO: 851218

SEQ ID NO: 851220 - protein, 1906 aa, Homo sapiens
MQSFRERCGFHGKQQNYQQTSQETSRLENYRQPSQAGLSCDRQRLLAKDYYNPQPYPSYEGGAGTPSGTAAAVAADKYHRGSKALPTQQGLQGRPAFPGYGVQDSSPYPGRYAGEESLQAWGAPQPPPPQPQPLPAGVAKYDENLMKKTAVPPSRQYAEQGAQVPFRTHSLHVQQPPPPQQPLAYPKLQRQKLQNDIASPLPFPQGTHFPQHSQSFPTSSTYSSSVQGGGQGAHSYKSCTAPTAQPHDRPLTASSSLAPGQRVQNLHAYQSGRLSYDQQQQQQQQQQQQQQALQSRHHAQETLHYQNLAKYQHYGQQGQGYCQPDAAVRTPEQYYQTFSPSSSHSPARSVGRSPSYSSTPSPLMPNLENFPYSQQPLSTGAFPAGITDHSHFMPLLNPSPTDATSSVDTQAGNCKPLQKDKLPENLLSDLSLQSLTALTSQVENISNTVQQLLLSKAAVPQKKGVKNLVSRTPEQHKSQHCSPEGSGYSAEPAGTPLSEPPSSTPQSTHAEPQEADYLSGSEDPLERSFLYCNQARGSPARVNSNSKAKPESVSTCSVTSPDDMSTKSDDSFQSLHGSLPLDSFSKFVAGERDCPRLLLSALAQEDLASEILGLQEAIGEKADKAWAEAPSLVKDSSKPPFSLENHSACLDSVAKSAWPRPGEPEALPDSLQLDKGGNAKDFSPGLFEDPSVAFATPDPKKTTGPLSFGTKPTLGVPAPDPTTAAFDCFPDTTAASSADSANPFAWPEENLGDACPRWGLHPGELTKGLEQGGKASDGISKGDTHEASACLGFQEEDPPGEKVASLPGDFKQEEVGGVKEEAGGLLQCPEVAKADRWLEDSRHCCSTADFGDLPLLPPTSRKEDLEAEEEYSSLCELLGSPEQRPGMQDPLSPKAPLICTKEEVEEVLDSKAGWGSPCHLSGESVILLGPTVGTESKVQSWFESSLSHMKPGEEGPDGERAPGDSTTSDASLAQKPNKPAVPEAPIAKKEPVPRGKSLRSRRVHRGLPEAEDSPCRAPVLPKDLLLPESCTGPPQGQMEGAGAPGRGASEGLPRMCTRSLTALSEPRTPGPPGLTTTPAPPDKLGGKQRAAFKSGKRVGKPSPKAASSPSNPAALPVASDSSPMGSKTKETDSPSTPGKDQRSMILRSRTKTQEIFHSKRRRPSEGRLPNCRATKKLLDNSHLPATFKVSSSPQKEGRVSQRARVPKPGAGSKLSDRPLHALKRKSAFMAPVPTKKRNLVLRSRSSSSSNASGNGGDGKEERPEGSPTLFKRMSSPKKAKPTKGNGEPATKLPPPETPDACLKLASRAAFQGAMKTKVLPPRKGRGLKLEAIVQKITSPSLKKFACKAPGASPGNPLSPSLSDKDRGLKGAGGSPVGVEEGLVNVGTGQKLPTSGADPLCRNPTNRSLKGKLMNSKKLSSTDCFKTEAFTSPEALQPGGTALAPKKRSRKGRAGAHGLSKGPLEKRPYLGPALLLTPRDRASGTQGASEDNSGGGGKKPKMEELGLASQPPEGRPCQPQTRAQKQPGHTNYSSYSKRKRLTRGRAKNTTSSPCKGRAKRRRQQQVLPLDPAEPEIRLKYISSCKRLRSDSRTPAFSPFVRVEKRDAFTTICTVVNSPGDAPKPHRKPSSSASSSSSSSSFSLDAAGASLATLPGGSILQPRPSLPLSSTMHLGPVVSKALSTSCLVCCLCQNPANFKDLGDLCGPYYPEHCLPKKKPKLKEKVRPEGTCEEASLPLERTLKGPECAAAATAGKPPRPDGPADPAKQGPLRTSARGLSRRLQSCYCCDGREDGGEEAAPADKGRKHECSKEAPAEPGGEAQEHWVHEACAVWTGGVYLVAGKLFGLQEAMKVAVDMMCSSCQEAGATIGCCHKGCLHTYHYPCASDAGCIFIEENFSLKCPKHKRLP

SEQ ID NO: 851221 - protein, 1906 aa, Homo sapiens; identical to SEQ ID NO: 851220

SEQ ID NO: 851222 - protein, 131 aa, Homo sapiens
LLSFSPRASPARPSARPLFLCGGDRIPRGTRGHQAGPAGCAAKARSPRPPGAAPARGWAPRDEWESECSEGERRAEQAALPAALAPARGGGAAAHPPSCLAAGRPGRRAPTPMATQASGPRSRSARPKAPE

SEQ ID NO: 851223 - protein, 1656 aa, Homo sapiens
MQSFRERCGFHGKQQNYQQTSQETSRLENYRQPSQAGLSCDRQRLLAKDYYNPQPYPSYEGGAGTPSGTAAAVAADKYHRGSKALPTQQGLQGRPAFPGYGVQDSSPYPGRYAGEESLQAWGAPQPPPPQPQPLPAGVAKYDENLMKKTAVPPSRQYAEQGAQVPFRTHSLHVQQPPPPQQPLAYPKLQRQKLQNDIASPLPFPQGTHFPQHSQSFPTSSTYSSSVQGGGQGAHSYKSCTAPTAQPHDRPLTASSSLAPGQRVQNLHAYQSGRLSYDQQQQQQQQQQQQQQALQSRHHAQETLHYQNLAKYQHYGQQGQGYCQPDAAVRTPEQYYQTFSPSSSHSPARSVGRSPSYSSTPSPLMPNLENFPYSQQPLSTGAFPAGITDHSHFMPLLNPSPTDATSSVDTQAGNCKPLQKDKLPENLLSDLSLQSLTALTSQVENISNTVQQLLLSKAAVPQKKGVKNLVSRTPEQHKSQHCSPEGSGYSAEPAGTPLSEPPSSTPQSTHAEPQEADYLSGSEDPLERSFLYCNQARGSPARVNSNSKAKPESVSTCSVTSPDDMSTKSDDSFQSLHGSLPLDSFSKFVAGERDCPRLLLSALAQEDLASEILGLQEAIGEKADKAWAEAPSLVKDSSKPPFSLENHSACLDSVAKSAWPRPGEPEALPDSLQLDKGGNAKDFSPGLFEDPSVAFATPDPKKTTGPLSFGTKPTLGVPAPDPTTAAFDCFPDTTAASSADSANPFAWPEENLGDACPRWGLHPGELTKGLEQGGKASDGISKGDTHEASACLGFQEEDPPGEKVASLPGDFKQEEVGGVKEEAGGLLQCPEVAKADRWLEDSRHCCSTADFGDLPLLPPTSRKEDLEAEEEYSSLCELLGSPEQRPGMQDPLSPKAPLICTKEEVEEVLDSKAGWGSPCHLSGESVILLGPTVGTESKVQSWFESSLSHMKPGEEGPDGERAPGDSTTSDASLAQKPNKPAVPEAPIAKKEPVPRGKSLRSRRVHRGLPEAEDSPCRAPVLPKDLLLPESCTGPPQGQMEGAGAPGRGASEGLPRMCTRSLTALSEPRTPGPPGLTTTPAPPDKLGGKQRAAFKSGKRVGKPSPKAASSPSNPAALPVASDSSPMGSKTKETDSPSTPGKDQRSMILRSRTKTQEIFHSKRRRPSEGRLPNCRATKKLLDNSHLPATFKVSSSPQKEGRVSQRARVPKPGAGSKLSDRPLHALKRKSAFMAPVPTKKRNLVLRSRSSSSSNASGNGGDGKEERPEGSPTLFKRMSSPKKAKPTKGNGEPATKLPPPETPDACLKLASRAAFQGAMKTKVLPPRKGRGLKLEAIVQKITSPSLKKFACKAPGASPGNPLSPSLSDKDRGLKGAGGSPVGVEEGLVNVGTGQKLPTSGADPLCRNPTNRSLKGKLMNSKKLSSTDCFKTEAFTSPEALQPGGTALAPKKRSRKGRAGAHGLSKGPLEKRPYLGPALLLTPRDRASGTQGASEDNSGGGGKKPKMEELGLASQPPEGRPCQPQTRAQKQPGHTNYSSYSKRKRLTRGRAKNTTSSPCKGRAKRRRQQQVLPLDPAEPEIRLKYISSCKRLRSDSRTPAFSPPGAQPGSAKPKKRPERTSGSGGRATVVHHQGPPRLLCTGAGTALDFVYKTCVPLYIYVT

SEQ ID NO: 851224 - protein, 1862 aa, Homo sapiens; identical to SEQ ID NO: 851218

SEQ ID NO: 851225 - protein, 177 aa, Homo sapiens
MLSKGLRDPRVWAGLGHPLASVCPLSSPPPHPWSPAWERKTQEAARTHLRLRRTRDRCAPPGTAAPTLHGSRDSARFRVQNLCTPLYICYIECIYVGNMLASPVCRRRASCARNRAPTGPLPGKGLPRRHLSTQPPPARASPCQSVRLSVRVLSSVHASIGLTQPPAQGRPSNFLYI

SEQ ID NO: 851226 - protein, 1906 aa, Homo sapiens; identical to SEQ ID NO: 851220

SEQ ID NO: 851227 - protein, 410 aa, Homo sapiens
MAAEIHSRPQSSRPVLLSKIEGHQDAVTAALLIPKEDGVITASEDRTIRVWLKRDSGQYWPSIYHTMASPCSAMAYHHDSRRIFVGQDNGAVMEFHVSEDFNKMNFIKTYPAHQNRVSAIIFSLATEWVISTGHDKCVSWMCTRSGNMLGRHFFTSWASCLQYDFDTQYAFVGDYSGQITLLKLEQNTCSVITTLKGHEGSVACLWWDPIQRLLFSGASDNSIIMWDIGGRKGRTLLLQGHHDKVQSLCYLQLTRQLVSCSSDGGIAVWNMDVSREEAPQWLESDSCQKCEQPFFWNIKQMWDTKTLGLRQHHCRKCGQAVCGKCSSKRSSYPVMGFEFQVRVCDSCYDSIKDEDRTSLATFHEGKHNISHMSMDIARGLMVTCGTDRIVKIWDMTPVVGCSLATGFSPH

SEQ ID NO: 851228 - protein, 392 aa, Homo sapiens
MAAEIHSRPQSSRPVLLSKIEGHQDAVTAALLIPKEDGVITASEDRTIRVWLKRDSGQYWPSIYHTMASPCSAMAYHHDSRRIFVGQDNGAVMVGSFQKIYIIFSLATEWVISTGHDKCVSWMCTRSGNMLGRHFFTSWASCLQYDFDTQYAFVGDYSGQITLLKLEQNTCSVITTLKGHEGSVACLWWDPIQRLLFSGASDNSIIMWDIGGRKGRTLLLQGHHDKVQSLCYLQLTRQLVSCSSDGGIAVWNMDVSREEAPQWLESDSCQKCEQPFFWNIKQMWDTKTLGLRQHHCRKCGQAVCGKCSSKRSSYPVMGFEFQVRVCDSCYDSIKDEDRTSLATFHEGKHNISHMSMDIARGLMVTCGTDRIVKIWDMTPVVGCSLATGFSPH

SEQ ID NO: 851229 - protein, 410 aa, Homo sapiens; identical to SEQ ID NO: 851227

SEQ ID NO: 851230 - protein, 379 aa, Homo sapiens
QLMGCLPRRPQQSPREHGGRNPLQAAEQPPGAAEQDRGAPGRRHGRAAHPQGGRRDHGQRGQEFHVSEDFNKMNFIKTYPAHQNRVSAIIFSLATEWVISTGHDKCVSWMCTRSGNMLGRHFFTSWASCLQYDFDTQYAFVGDYSGQITLLKLEQNTCSVITTLKGHEGSVACLWWDPIQRLLFSGASDNSIIMWDIGGRKGRTLLLQGHHDKVQSLCYLQLTRQLVSCSSDGGIAVWNMDVSREEAPQWLESDSCQKCEQPFFWNIKQMWDTKTLGLRQHHCRKCGQAVCGKCSSKRSSYPVMGFEFQVRVCDSCYDSIKDEDRTSLATFHEGKHNISHMSMDIARGLMVTCGTDRIVKIWDMTPVVGCSLATGFSPH

SEQ ID NO: 851231 - protein, 294 aa, Homo sapiens
MAAEIHSRPQSSRPVLLSKIEGHQDAVTAALLIPKEDGVITASEDRTIRVWLKRDSGQYWPSIYHTMASPCSAMAYHHDSRRIFVGQDNGAVMEFHVSEDFNKMNFIKTYPAHQNRVSAIIFSLATEWVISTGHDKCVSWMCTRSGNMLGRHFFTSWASCLQYDFDTQYAFVGDYSGQITLLKLEQNTCSVITTLKGHEGSVACLWWDPIQRLLFSGASDNSIIMWDIGGRKGRTLLLQGHHDKVQSLCYLQLTRQLVSCSSDGGIAVWNMDVSREEAPQWLESDSCQKCEQPR

SEQ ID NO: 851232 - protein, 410 aa, Homo sapiens; identical to SEQ ID NO: 851227

SEQ ID NO: 851233 - protein, 123 aa, Homo sapiens
MARYEEVSVSGFEEFHRAVEQHNGKTIFAYFTGSKDAGGKSWCPDCVQAEPVVREGLKHISEGCVFIYCQVGEKPYWKDPNNDFRKNLKVTAVPTLLKYGTPQKLVESECLQANLVEMLFSED

SEQ ID NO: 851234 - protein, 123 aa, Homo sapiens; identical to SEQ ID NO: 851233

SEQ ID NO: 851235 - protein, 166 aa, Homo sapiens
MARYEEVSVSGFEEFHRAVEQHNGKTIFAYFTGSKDAGGKSWCPDCVQGEAGIRGLLSNGNGRKVEAYGQKGGLAEAESWFQTSAEQSELSPSLLLLNPTPPCQERSSFYHLTRMILESSSLKLLTPPVPLVSYRIRELVSKYMCFPLLRARWCRGKSGLGFGPYP

SEQ ID NO: 851236 - protein, 123 aa, Homo sapiens; identical to SEQ ID NO: 851233

SEQ ID NO: 851237 - protein, 87 aa, Homo sapiens
ALNYLRIQVLQGAEPVVREGLKHISEGCVFIYCQVGEKPYWKDPNNDFRKNLKVTAVPTLLKYGTPQKLVESECLQANLVEMLFSED

SEQ ID NO: 851238 - protein, 112 aa, Homo sapiens
MARYEEVSVSGFEEFHRAVEQHNGKTIFAYFTGSKDAGGKSWCPDCVQAEPVVREGLKHISEGCVFIYCQVGEKPYWKDPNNDFRKNLKVTAVPTLLKYGTVSIFKYAGPVI

SEQ ID NO: 851239 - protein, 123 aa, Homo sapiens; identical to SEQ ID NO: 851233

SEQ ID NO: 851240 - protein, 166 aa, Homo sapiens; identical to SEQ ID NO: 851235

SEQ ID NO: 851241 - protein, 147 aa, Homo sapiens
MARYEEVSVSGFEEFHRAVEQHNGKTIFAYFTGSKDAGGKSWCPDCVQGEAGIRGLLSNGNGRKVEAYGQKGGLAEAESWFQTSAEQSELSPSLLLLNPTPPCQERSSFYHLTRMILESSSLKLLTPPVPLVSYRIRELLNQSYERG

SEQ ID NO: 851242 - protein, 652 aa, Homo sapiens
MAMDEYLWMVILGFIIAFILAFSVGANDVANSFGTAVGSGVVTLRQACILASIFETTGSVLLGAKVGETIRKGIIDVNLYNETVETLMAGEVSAMVGSAVWQLIASFLRLPISGTHCIVGSTIGFSLVAIGTKGVQWMELVKIVASWFISPLLSGFMSGLLFVLIRIFILKKEDPVPNGLRALPVFYAATIAINVFSIMYTGAPVLGLVLPMWAIALISFGVALLFAFFVWLFVCPWMRRKITGKLQKEGALSRVSDESLSKVQEAESPVFKELPGAKANDDSTIPLTGAAGETLGTSEGTSAGSHPRAAYGRALSMTHGSVKSPISNGTFGFDGHTRSDGHVYHTVHKDSGLYKDLLHKIHIDRGPEEKPAQESNYRLLRRNNSYTCYTAAICGLPVHATFRAADSSAPEDSEKLVGDTVSYSKKRLRYDSYSSYCNAVAEAEIEAEEGGVEMKLASELADPDQPREDPAEEEKEEKDAPEVHLLFHFLQVLTACFGSFAHGGNDVSNAIGPLVALWLIYKQGGVTQEAATPVWLLFYGGVGICTGLWVWGRRVIQTMGKDLTPITPSSGFTIELASAFTVVIASNIGLPVSTTHCKVGSVVAVGWIRSRKAVDWRLFRNIFVAWFVTVPVAGLFSAAVMALLMYGILPYV

SEQ ID NO: 851243 - protein, 652 aa, Homo sapiens; identical to SEQ ID NO: 851242

SEQ ID NO: 851244 - protein, 496 aa, Homo sapiens [sequence omitted]

SEQ ID NO: 851245 - protein, 652 aa, Homo sapiens; identical to SEQ ID NO: 851242

SEQ ID NO: 851246 - protein, 652 aa, Homo sapiens; identical to SEQ ID NO: 851242

SEQ ID NO: 851247 - protein, 836 aa, Homo sapiens
MNQLLLTSLRTLSFLCFLFLRIRLDSRRLILLKRQSKQSYAAISALYLRVCDIYHSLERLKNTQSKFGVEVEEGRKRKVSAIKGLIVNFYEIGLRSESISLNIFSDKRSLKRIKVSVLPLTSFSIVVICSLHSPLSFKTFSELTKQTETGQAQWLTPVIPALWEAELGGSQGQEIETILANMVKPRLYYKIQKKKKISQAWWQAPVVPATREAGAGEFLEPGRPRLQWAEIAPLHSSLGDSETLSQKEKEKKKQRLNLVNTHFIFERLNVSLNINLCHFVINCNSVRMPLTTNPFRFLCGKAHKLCGLTPLDPVVEHCENGAFGKTLYYAVDSHCLIFFLYSSIFYEYGAVLSFNYYNICELLEVDDVSAVFQLKNPYISHSWCLRYEEQPYKEGLIVLKILSAEPALIVRVVVWVILELKEWLRAINGPVIFTIPEQLVKNGRKATIRLLTRNLCRCARSSLCSGTIEMNKVWSFLSGGSQLNREYYYVNDSSTVWQMLKYMCVAAITGELINRESLAGLSDSPLKSQHFGRPRRADHLRSGVRDQPGQHGKTSSLLKNTKKISKAWWRASVIPATGEAEAGESLEPGRWRLQLAEIMPLHSSLGDRVRLSQKQNPKYYTIFIVSHLTLFLVKRSLFSLISLPDVFFSDFCVFHKSILKICNSCSIFDQNVPQVSEAMFKKKHVNIIGVGLRNDYFWEDLSKIYGTEVLEYVRILLSLFIVVIPTLGYIYLIPTCVYFLNNICFGDLDKVNFFAFLKVAVKLTSCISNVEKIWHSDLNFVYGLLSSKIISSLKYGSLACIPSDKLGWVNFSPEKIHSFDPGCLAWKKKITYSLHD

SEQ ID NO: 851248 - protein, 715 aa, Homo sapiens
MVLLDGFVVCLYIEHTSLLCISWVARMNQLLLTSLRTLSFLCFLFLRIRLVFWKTNTTLKTVKTVIRCLSALYLRVCDIYHSLERLKNTQSKFGGGGGEGRKRKVSAIKGLIVNFYEIGLRSESISLNIFSDKRSLKRIKSISTSVNYFSIGSFVVYILLSSFKTFSELTKQTETGQAQWLTPVIPALWEAELGGSQGQEIETILANMVKPRLYYKIQKKKKISQAWWQAPVVPATREAGAGEFLEPGRPRLQWAEIAPLHSSLGDSETLSQKEKKKKKQRLNLVNTHFIFERLNVSLNINLCHFVINCNSVRMPLTTNPFRFLCGKAHKLCGLTPLDPVVEHCENGAFGKTLYYAVDSHCLIFFLYSSIFYEYGAVLSFNYYNICELLEVDDVSAVFQLKNPYISHSWCLRYEEQPYKEGLIVLKILSAEPALIVEGGCLGILELKEWLRAINGPVIFTIPEQLVKNGRKATIRLLTRNLCRCARSSLCSGTIEMNKVWSFLSGGSQLNREYYYVNDSSTVWQMLKYMCVAAITGELINRESLAGLSDSPLKSQHFGRPRRADHLRSGVRDQPGQHGKTSSLLKNTKKISKAWWRASVIPATGEAEAGESLEPGRWRLQLAEIMPLHSSLGDRVRLSQKQNPKYYTIFIVSHLTLFLVKRSLFSLISLPDVFFSDFCVFHKSILKICNSWSIFDQNVPQVSEACSRRSMSTLLE

SEQ ID NO: 851249 - protein, 875 aa, Homo sapiens
MIQPSLSVLCGLGCAFLWATSSFAAVSPPACAPATSPSPVVHLRSTQPGQSCFVLLHRLGLPCVLSSSGSFSSPHLFCFLPVLVSPCALGPVSSFSINRYYYDGFVVCLYIEHTSLLCISWVARMNQLLLTSLRTLSFLCFLFLRIRLDSRRLILLKRQSKQSYAAISALYLRVCDIYHSLERLKNTQSKFGVEVEEGRKRKVSAIKGLIVNFYEIGLRSESISLNIFSDKRSLKRIKVSVLPLTSFSIVVICSLHSPLSFKTFSELTKQTETGQAQWLTPVIPALWEAELGGSQGQEIETILANMVKPRLYYKIQKKKKISQAWWQAPVVPATREAGAGEFLEPGRPRLQWAEIAPLHSSLGDSETLSQKEKEKKKQRLNLVNTHFIFERLNVSLNINLCHFVINCNSVRMPLTTNPFRFLCGKAHKLCGLTPLDPVVEHCENGAFGKTLYYAVDSHCLIFFLYSSIFYEYGAVLSFNYYNICELLEVDDVSAVFQLKNPYISHSWCLRYEEQPYKEGLIVLKILSAEPALIVEGGCLGILELKEWLRAINGPVIFTIPEQLVKNGRKATIRLLTRNLCRCARSSLCSGTIEMNKVWSFLSGGSQLNREYYYVNDSSTVWQMLKYMCVAAITGELINRESLAGLSDSPLKSQHFGRPRRADHLRSGVRDQPGQHGKTSSLLKNTKKISKAWWRASVIPATGEAEAGESLEPGRWRLQLAEIMPLHSSLGDRVRLSQKQNPKYYTIFIVSHLTLFLVKRSLFSLISLPDVFFSDFCVFHKSILKICNSCSIFDQNVPQVSEAMFKKKHVNIIGVGLRNDYFWEDLSKIYGYRSFGVCENITKSFYSCNPNTGLYIFNTNLSIFPEKYLFWRLGQS

SEQ ID NO: 851250 - protein, 144 aa, Homo sapiens
AGETQRRPQCRPRAREWSRAPFPYRAATPARAARAASREPPARLPGSRGWGPGLVGAGGARGGGGLRPPRLLAHVDLAVACRAAPLRKLDGSGRDRALPASAGRLLLRCARLGWDSAGEGSCTLSHQAQCSRAAQRISFLVLRA

SEQ ID NO: 851251 - protein, 144 aa, Homo sapiens; identical to SEQ ID NO: 851250

SEQ ID NO: 851252 - protein, 652 aa, Homo sapiens; identical to SEQ ID NO: 851242

SEQ ID NO: 851253 - protein, 652 aa, Homo sapiens; identical to SEQ ID NO: 851242

SEQ ID NO: 851254 - protein, 144 aa, Homo sapiens; identical to SEQ ID NO: 851250

SEQ ID NO: 851255 - protein, 652 aa, Homo sapiens; identical to SEQ ID NO: 851242

SEQ ID NO: 851256 - protein, 652 aa, Homo sapiens; identical to SEQ ID NO: 851242

SEQ ID NO: 851257 - protein, 697 aa, Homo sapiens
MAMDEYLWMVILGFIIAFILAFSVGANDVANSFGTAVGSGVVTLRQACILASIFETTGSVLLGAKVGETIRKGIIDVNLYNETVETLMAGEVSAMVGRDDDTTDSCCIRVIWLGRRGLERNSTTFCFQQDISSCRKSPAAGGSAVWQLIASFLRLPISGTHCIVGSTIGFSLVAIGTKGVQWMELVKIVASWFISPLLSGFMSGLLFVLIRIFILKKEDPVPNGLRALPVFYAATIAINVFSIMYTGAPVLGLVLPMWAIALISFGVALLFAFFVWLFVCPWMRRKITGKLQKEGALSRVSDESLSKVQEAESPVFKELPGAKANDDSTIPLTGAAGETLGTSEGTSAGSHPRAAYGRALSMTHGSVKSPISNGTFGFDGHTRSDGHVYHTVHKDSGLYKDLLHKIHIDRGPEEKPAQESNYRLLRRNNSYTCYTAAICGLPVHATFRAADSSAPEDSEKLVGDTVSYSKKRLRYDSYSSYCNAVAEAEIEAEEGGVEMKLASELADPDQPREDPAEEEKEEKDAPEVHLLFHFLQVLTACFGSFAHGGNDVSNAIGPLVALWLIYKQGGVTQEAATPVWLLFYGGVGICTGLWVWGRRVIQTMGKDLTPITPSSGFTIELASAFTVVIASNIGLPVSTTHCKVGSVVAVGWIRSRKAVDWRLFRNIFVAWFVTVPVAGLFSAAVMALLMYGILPYV

SEQ ID NO: 851258 - protein, 875 aa, Homo sapiens; identical to SEQ ID NO: 851249

SEQ ID NO: 851259 - protein, 712 aa, Homo sapiens
MDLLSAFYIEHTSLLCISWVARMNQLLLTSLRTLSFLCFLFLRIRLDSRRLILLKRQSKQSYAAISALYLRVCDIYHSLERLKNTQSKFGVEVEEGRKRKVSAIKGLIVNFYEIGLRSESISLNIFSDKRSLKRIKVSVLPLTSFSIVVICSLHSPLSFKTFSELTKQTETGQAQWLTPVIPALWEAELGGSQGQEIETILANMVKPRLYYKYKKKKKLARRGGRHLWSQLLGRLGQENFLSPGGRGCSELRSRHCTPAWVTARLCLKKKKKKKKQRLNLVNTHFIFERLNVSLNINLCHFVIYTVIVSEMPLTTNPFRFLCGKAHKLCGLTPLDPVVVAFENGAFGKTLYYAVDSHCLIFFLYSSIFYEYGAVLSFNYYNICELLEVDDVSAVFQLKNPYISHSWCLRYEEQPYKEGLIVLKILSAEPALIVEGGCLGILELKEWLRAINGPVIFTIPEQLVKNGRKATIRLLTRNLCRCARSSLCSGTIEMNKVWSFLSGGSQLNREYYYVNDSSTVWQMLKYMCVAAITGELINRESLAGLSDSPLKSQHFGRPRRADHLRSGVRDQPGQHGKTSSLLKNTKKISKAWWRASVIPATGEAEAGESLEPGRWRLQLAEIMPLHSSLGDRVRLSQKQNPKYYTIFIVSHLTLFLVKRSLFSLISLPDVFFSDFCVFHKSILKICNSCSIFDQNVPQVSEACSRRSMSTLLE

SEQ ID NO: 851260 - protein, 875 aa, Homo sapiens; identical to SEQ ID NO: 851249

SEQ ID NO: 851261 - protein, 144 aa, Homo sapiens; identical to SEQ ID NO: 851250

SEQ ID NO: 851262 - protein, 144 aa, Homo sapiens; identical to SEQ ID NO: 851250

SEQ ID NO: 851263 - protein, 144 aa, Homo sapiens; identical to SEQ ID NO: 851250

SEQ ID NO: 851264 - protein, 699 aa, Homo sapiens
PKQAWAMAGAPPPASLPPCSLISDCCAGNQRDSVGVGPSEPGCYPCPGPNMNPIALGSRWLAYAENKLIRCHQSRGGACGDNIQSYTATVISAAKTLKSGLTMVGKVVTQLTGTLPSGVTEDDVAIHSNSRRSPLVPGIITVIDTETVGEGQVLVSEDSDSDGIVAHFPAHEKPVCCMAFNTSGMLLVTTDTLGHDFHVFQILTHPWSVLSGVLPTFSPSTLMVASLVFVTHMSPRVVNRMSRFQKSAGLEEIEQELTSKQGGRCSPVPGLSSSPSGSPLHGKLNSQDSYNNFTNNNPGNPRLSPLPSLMVVMPLAQIKQPMTLGTITKRTGKVKPPPQISPSKSMGGEFCVAAIFGTSRSWFANNAGLKREKDQSKQVVVESLYIISCYGTLVEHMMEPRPLSTAPKISDDTPLEMMTSPRASWTLVRTPQWNELQPPFNANHPLLLAADAVQYYQFLLAGLVPPGSPGPITRHGSYDSLASDHSGQEDEEWLSQVEIVTHTGPHRRLWMGPQFQFKTIHPSGQTTVISSSSSVLQSHGPSDTPQPLLDFDTDDLDLNSLRIQPVRSDPVSMPGSSRPVSDRRGVSTVIDAASGTFDRSVTLLEVCGSWPEGFGLRHMSSMEHTEEGLRERLADAMAESPSRDVVGSGTELQREGSIETLSNSSGSTSGSIPRNFDGYRSPLPTNESQPLSLFPTGFP

SEQ ID NO: 851265 - protein, 113 aa, Homo sapiens [sequence omitted]

SEQ ID NO: 851266 - protein, 108 aa, Homo sapiens
LTGGAAGFMNEAMATDSPRRPSRCTGGVVVRPQAVTWSLTLLPRLECSGAVSARCSLHLLLCLPDSSDSPALASQVAGITGERHQAWPNFVFLAKTGFCHLARLVLNS

SEQ ID NO: 851267 - protein, 654 aa, Homo sapiens
MVGKVVTQLTGTLPSGVTEDDVAIHSNSRRSPLVPGIITVIDTETVGEGQVLVSEDSDSDGIVAHFPAHEKPVCCMAFNTSGMLLVTTDTLGHDFHVFQILTHPWSSSQCAVHHLYTLHRGETEAKVQDICFSHDCRWVVVSTLRGTSHVFPINPYGGQPCVRTHMSPRVVNRMSRFQKSAGLEEIEQELTSKQGGRCSPVPGLSSSPSGSPLHGKLNSQDSYNNFTNNNPGNPRLSPLPSLMVVMPLAQIKQPMTLGTITKRTGKVKPPPQISPSKSMGGEFCVAAIFGTSRSWFANNAGLKREKDQSKQVVVESLYIISCYGTLVEHMMEPRPLSTAPKISDDTPLEMMTSPRASWTLVRTPQWNELQPPFNANHPLLLAADAVQYYQFLLAGLVPPGSPGPITRHGSYDSLASDHSGQEDEEWLSQVEIVTHTGPHRRLWMGPQFQFKTIHPSGQTTVISSSSSVLQSHGPSDTPQPLLDFDTDDLDLNSLRIQPVRSDPVSMPGSSRPVSDRRGVSTVIDAASGTFDRSVTLLEVCGSWPEGFGLRHMSSMEHTEEGLRERLADAMAESPSRDVVGSGTDTALDVAVKTFPPERHVAVKCFELQREGSIETLSNSSGSTSGSIPRNFDGYRSPLPTNESQPLSLFPTGFP

SEQ ID NO: 851268 - protein, 842 aa, Homo sapiens
MIGYSDGMQVWSIPISGEAQELFSVRHGPIRAARILPAPQFGAQKCDNFAEKRPLLGVCKSIGSSGTSPPYCCVDLYSLRTGEMVKSIQFKTPIYDLHCNKRILVVVLQEKIAAFDSCTFTKKFFVTSCYPCPGPNMNPIALGSRWLAYAENKLIRCHQSRGGACGDNIQSYTATVISAAKTLKSGLTMVGKVVTQLTGTLPSGVTEDDVAIHSNSRRSPLVPGIITVIDTETVGEGQVLVSEDSDSDGIVAHFPAHEKPVCCMAFNTSGMLLVTTDTLGHDFHVFQILTHPWSSSQCAVHHLYTLHRGETEAKVQDICFSHDCRWVVVSTLRGTSHVFPINPYGGQPCVRTHMSPRVVNRMSRFQKSAGLEEIEQELTSKQGGRCSPVPGLSSSPSGSPLHGKLNSQDSYNNFTNNNPGNPRLSPLPSLMVVMPLAQIKQPMTLGTITKRTGKVKPPPQISPSKSMGGEFCVAAIFGTSRSWFANNAGLKREKDQSKQVVVESLYIISCYGTLVEHMMEPRPLSTAPKISDDTPLEMMTSPRASWTLVRTPQWNELQPPFNANHPLLLAADAVQYYQFLLAGLVPPGSPGPITRHGSYDSLASDHSGQEDEEWLSQVEIVTHTGPHRRLWMGPQFQFKTIHPSGQTTVISSSSSVLQSHGPSDTPQPLLDFDTDDLDLNSLRIQPVRSDPVSMPGSSRPVSDRRGVSTVIDAASGTFDRSVTLLEVCGSWPEGFGLRHMSSMEHTEEGLRERLADAMAESPSRDVVGSGTDTALDVAVKTFPPERHVAVKCFELQREGSIETLSNSSGSTSGSIPRNFDGYRSPLPTNESQPLSLFPTGFP

SEQ ID NO: 851269 - protein, 389 aa, Homo sapiens
AFAVFFSKTSSQIRHLKAPIICKVKPPPQISPSKSMGGEFCVAAIFGTSRSWFANNAGLKREKDQSKQVVVESLYIISCYGTLVEHMMEPRPLSTAPKISDDTPLEMMTSPRASWTLVRTPQWNELQPPFNANHPLLLAADAVQYYQFLLAGLVPPGSPGPITRHGSYDSLASDHSGQEDEEWLSQVEIVTHTGPHRRLWMGPQFQFKTIHPSGQTTVISSSSSVLQSHGPSDTPQPLLDFDTDDLDLNSLRIQPVRSDPVSMPGSSRPVSDRRGVSTVIDAASGTFDRSVTLLEVCGSWPEGFGLRHMSSMEHTEEGLRERLADAMAESPSRDVVGSGTELQREGSIETLSNSSGSTSGSIPRNFDGYRSPLPTNESQPLSLFPTGFP

SEQ ID NO: 851270 - protein, 123 aa, Homo sapiens
MATDLRCPPMRASPSASSRLASRRYQQPASDWPAPSPAGGGEKPRSGPTLQSLLFLHQPPSPSLVTAAAHPTWMEKRPFSKHLSALALCHTCRWRLWPGETVEARSLCMFAYDILHWIRFCIF

SEQ ID NO: 851271 - protein, 123 aa, Homo sapiens; identical to SEQ ID NO: 851270

SEQ ID NO: 851272 - protein, 123 aa, Homo sapiens; identical to SEQ ID NO: 851270

SEQ ID NO: 851273 - protein, 123 aa, Homo sapiens; identical to SEQ ID NO: 851270

SEQ ID NO: 851274 - protein, 140 aa, Homo sapiens
PHDSIISTWSLPGHMGIMGTTSQDEIWVETQPNDISTFDRSVTLLEVCGSWPEGFGLRHMSSMEHTEEGLRERLADAMAESPSRDVVGSGTELQREGSIETLSNSSGSTSGSIPRNFDGYRSPLPTNESQPLSLFPTGFP

SEQ ID NO: 851275 - protein, 684 aa, Homo sapiens
MNPIALGSRWLAYAENKLIRCHQSRGGACGDNIQSYTATVISAAKTLKSGLTMVGKVVTQLTGTLPSGVTEDDVAIHSNSRRSPLVPGIITVIDTETVGEGQVLVSEDSDSDGIVAHFPAHEKPVCCMAFNTSGMLLVTTDTLGHDFHVFQILTHPWSSSQCAVHHLYTLHRGETEAKVQDICFSHDCRWVVVSTLRGTSHVFPINPYGGQPCVRTHMSPRVVNRMSRFQKSAGLEEIEQELTSKQGGRCSPVPGLSSSPSGSPLHGKLNSQDSYNNFTNNNPGNPRLSPLPSLMVVMPLAQIKQPMTLGTITKRTGKVKPPPQISPSKSMGGEFCVAAIFGTSRSWFANNAGLKREKDQSKQVVVESLYIISCYGTLVEHMMEPRPLSTAPKISDDTPLEMMTSPRASWTLVRTPQWNELQPPFNANHPLLLAADAVQYYQFLLAGLVPPGSPGPITRHGSYDSLASDHSGQEDEEWLSQVEIVTHTGPHRRLWMGPQFQFKTIHPSGQTTVISSSSSVLQSHGPSDTPQPLLDFDTDDLDLNSLRIQPVRSDPVSMPGSSRPVSDRRGVSTVIDAASGTFDRSVTLLEVCGSWPEGFGLRHMSSMEHTEEGLRERLADAMAESPSRDVVGSGTELQREGSIETLSNSSGSTSGSIPRNFDGYRSPLPTNESQPLSLFPTGFP

SEQ ID NO: 851276 - protein, 928 aa, Homo sapiens [sequence omitted]

SEQ ID NO: 851277 - protein, 935 aa, Homo sapiens [sequence omitted]

SEQ ID NO: 851278 - protein, 1006 aa, Homo sapiens
MNEAMATDSPRRPSRCTGGVVVRPQAVTEQSYMESVVTFLQDVVPQAYSGTPLTEEKEKIVWVRFENADLNDTSRNLEFHEIHSTGSEPPLLIMIGYSDGMQVWSIPISGEAQELFSVRHGPIRAARILPAPQFGAQKCDNFAEKRPLLGVCKSIGSSGTSPPYCCVDLYSLRTGEMVKSIQFKTPIYDLHCNKRILVVVLQEKIAAFDSCTFTKKFFVTSCYPCPGPNMNPIALGSRWLAYAENKLIRCHQSRGGACGDNIQSYTATVISAAKTLKSGLTMVGKVVTQLTGTLPSGVTEDDVAIHSNSRRSPLVPGIITVIDTETVGEGQVLVSEDSDSDGIVAHFPAHEKPVCCMAFNTSGMLLVTTDTLGHDFHVFQILTHPWSSSQCAVHHLYTLHRGETEAKVQDICFSHDCRWVVVSTLRGTSHVFPINPYGGQPCVRTHMSPRVVNRMSRFQKSAGLEEIEQELTSKQGGRCSPVPGLSSSPSGSPLHGKLNSQDSYNNFTNNNPGNPRLSPLPSLMVVMPLAQIKQPMTLGTITKRTGKVKPPPQISPSKSMGGEFCVAAIFGTSRSWFANNAGLKREKDQSKQVVVESLYIISCYGTLVEHMMEPRPLSTAPKISDDTPLEMMTSPRASWTLVRTPQWNELQPPFNANHPLLLAADAVQYYQFLLAGLVPPGSPGPITRHGSYDSLASDHSGQEDEEWLSQVEIVTHTGPHRRLWMGPQFQFKTIHPSGQTTVISSSSSVLQSHGPSDTPQPLLDFDTDDLDLNSLRIQPVRSDPVSMPGSSRPVSDRRGVSTVIDAASVDSSTALEWGTSRPSHSRSAHHPSVQGARSSAHLKPQGLMETIHSHSRMSQHCMQPAMATGRRVRHGPWSCRLTCPRLSQDRAQDLTEEASQQGTFDRSVTLLEVCGSWPEGFGLRHMSSMEHTEEGLRERLADAMAESPSRDVVGSGTELQREGSIETLSNSSGSTSGSIPRNFDGYRSPLPTNESQPLSLFPTGFP

SEQ ID NO: 851279 - protein, 123 aa, Homo sapiens; identical to SEQ ID NO: 851270

SEQ ID NO: 851280 - protein, 248 aa, Homo sapiens
MAMLPLVLHWFFIEWYSGKKSSSALFQHITALFECSMAAIITLLVSDPVGVLYIRSCRVLMLSDWYTMLYNPSPDYVTTVHCTHEAVYPLYTIVFIYYAFCLVLMMLLRPLLVKKIACGLGKSDRFKSIYAALYFFPILTVLQAVGGGLLYYAFPYIILVLSLVTLAVYMSASEIENCYDLLVRKKRLIVLFSHWLLHAYGIISISRVDKLEQDLPLLALVPTPALFYLFTAKFTEPSRILSEGANGH

SEQ ID NO: 851281 - protein, 248 aa, Homo sapiens; identical to SEQ ID NO: 851280

SEQ ID NO: 851282 - protein, 276 aa, Homo sapiens
MAQLKYMENVGYAQEDRERMHRNIVSLAQNLLNFMIGSILDLWQCFLWFYIGSSLNGTRGKRGSMAAIITLLVSDPVGVLYIRSCRVLMLSDWYTMLYNPSPDYVTTVHCTHEAVYPLYTIVFIYYAFCLVLMMLLRPLLVKKIACGLGKSDRFKSIYAALYFFPILTVLQAVGGGLLYYAFPYIILVLSLVTLAVYMSASEIENCYDLLVRKKRLIVLFSHWLLHAYGIISISRVDKLEQDLPLLALVPTPALFYLFTAKFTEPSRILSEGANGH

SEQ ID NO: 851283 - protein, 244 aa, Homo sapiens
MAQLKYMENVGYAQEDRERMHRNIVSLAQNLLNFMIGSILDLWQCFLWFYIGSSLNGTRGKRVPAHFSNTSLHYLNAAWQLLSPYLYTIVFIYYAFCLVLMMLLRPLLVKKIACGLGKSDRFKSIYAALYFFPILTVLQAVGGGLLYYAFPYIILVLSLVTLAVYMSASEIENCYDLLVRKKRLIVLFSHWLLHAYGIISISRVDKLEQDLPLLALVPTPALFYLFTAKFTEPSRILSEGANGH

SEQ ID NO: 851284 - protein, 159 aa, Homo sapiens
MAQLKYMENVGYAQEDRERMHRNIVSLAQNLLNFMIGSILDLWQCFLWFYIGSSLNGTRGKRGSMAAIITLLVSDPVGVLYIRSCRVLMLSDWYTMLYNPSPDYVTTVHCTHEAVYPLCTIDFILSSSWSLLHLRAQPVLGDKLPWRSGKLLRLTQSFK

SEQ ID NO: 851285 - protein, 305 aa, Homo sapiens
MACLGLYCGKTLLFKNGSTEIYGECGVCPRGQRTNAQKYCQPCTESPELYDWLYLGFMAMLPLVLHWFFIEWYSGKKSSSALFQHITALFECSMAAIITLLVSDPVGVLYIRSCRVLMLSDWYTMLYNPSPDYVTTVHCTHEAVYPLYTIVFIYYAFCLVLMMLLRPLLVKKIACGLGKSDRFKSIYAALYFFPILTVLQAVGGGLLYYAFPYIILVLSLVTLAVYMSASEIENCYDLLVRKKRLIVLFSHWLLHAYGIISISRVDKLEQDLPLLALVPTPALFYLFTAKFTEPSRILSEGANGH

SEQ ID NO: 851286 - protein, 311 aa, Homo sapiens
MAVDIQPACLGLYCGKTLLFKNGSTEIYGECGVCPRGQRTNAQKYCQPCTESPELYDWLYLGFMAMLPLVLHWFFIEWYSGKKSSSALFQHITALFECSMAAIITLLVSDPVGVLYIRSCRVLMLSDWYTMLYNPSPDYVTTVHCTHEAVYPLYTIVFIYYAFCLVLMMLLRPLLVKKIACGLGKSDRFKSIYAALYFFPILTVLQAVGGGLLYYAFPYIILVLSLVTLAVYMSASEIENCYDLLVRKKRLIVLFSHWLLHAYGIISISRVDKLEQDLPLLALVPTPALFYLFTAKFTEPSRILSEGANGH

SEQ ID NO: 851287 - protein, 311 aa, Homo sapiens; identical to SEQ ID NO: 851286

SEQ ID NO: 851288 - protein, 311 aa, Homo sapiens; identical to SEQ ID NO: 851286

SEQ ID NO: 851289 - protein, 324 aa, Homo sapiens
KGEIQQSLGAWVLLTVDIQPACLGLYCGKTLLFKNGSTEIYGECGVCPRGQRTNAQKYCQPCTESPELYDWLYLGFMAMLPLVLHWFFIEWYSGKKSSSALFQHITALFECSMAAIITLLVSDPVGVLYIRSCRVLMLSDWYTMLYNPSPDYVTTVHCTHEAVYPLYTIVFIYYAFCLVLMMLLRPLLVKKIACGLGKSDRFKSIYAALYFFPILTVLQAVGGGLLYYAFPYIILVLSLVTLAVYMSASEIENCYDLLVRKKRLIVLFSHWLLHAYGIISISRVDKLEQDLPLLALVPTPALFYLFTAKFTEPSRILSEGANGH

SEQ ID NO: 851290 - protein, 248 aa, Homo sapiens; identical to SEQ ID NO: 851280

SEQ ID NO: 851291 - protein, 224 aa, Homo sapiens
MAVDIQPACLGLYCGKTLLFKNGSTEIYGECGVCPRGQRTNAQKYCQPCTESPELYDWLYLGFMAMLPLVLHWFFIEWYSGKKSSSALFQHITALFECSMAAIITLLVSDPVGVLYIRSCRVLMLSDWYTMLYNPSPDYVTTVHCTHEAVYPLYTIVFIYYAFCLVLMMLLRPLLVKKIACGLGKSDRFKSIYAALYFFPILTVLQAVGGGLLYLRLSIHLYLV

SEQ ID NO: 851292 - protein, 1446 aa, Homo sapiens
MEALRQIKDTVTMDAGRANKEVEILRKQCKALCQELKEALQEADVAKCRRDWAFQERDKIVAERDSIRTLCDNLRRERDRAVSELAEALRSLDDTRKQKNDVSRELKELKEQMESQLEKEARFRQLMAHSSHDSAIDTDSMEWETEVVEFERETEDIDLKALGFDMAEGVNEPCFPGDCGIFVTKVDKGSIADGRLRVNDWLLRINDVDLINKDKKQAIKALLNGEGAINMVVRRRKSLGGKVVTPLHINLSGQKDSGISLENGVYAAAVLPGSPAAKEGSLAVGDRIVAINGIALDNKSLNECESLLRSCQDSLTLSLLKVFPQSSSWSGQNIFENIKDSDKMLSFRAHGPEVQAHNKRNLIQHNNSTQTDIFYTDRLEDRKEPGPPGGSSSFLHKPFPGGPLQVCPQACPSASERSLSSFRSDASGDRGFGLVDVRGRRPLLPFETEVGPCGVGEASLDKADSEGSNSGGTWPKAMLSSTAVPEKLSVYKKPKQRKSIFDPNTFKRPQTPPKIDYLLPGPGPAHSPQPSKRAGPLTPPKPPRRSDSIKFQHRLETSSESEATLVGSSPSTSPPSALPPDVDPGEPMHASPPRKARVRIASSYYPEGDGDSSHLPAKKSCDEDLTSQKVDELGQKRRRPKSAPSFRPKLAPVVIPAQFLEEQKCVPASGELSPELQEWAPYSPGHSSRHSNPPLYPSRPSVGTVPRSLTPSTTVSSILRNPIYTVRSHRVGPCSSPPAARDAGPQGLHPSVQHQGRLSLDLSHRTCSDYSEMRATHGSNSLPSSARLGSSSNLQFKAERIKIPSTPRYPRSVVGSERGSVSHSECSTPPQSPLNIDTLSSCSQSQTSASTLPRIAVNPASLGERRKDRPYVEEPRHVKVQKGSEPLGISIVSGEKGGIYVSKVTVGSIAHQAGLEYGDQLLEFNGINLRSATEQQARLIIGQQCDTITILAQYNPHVHQLSSHSRSSSHLDPAGTHSTLQGSGTTTPEHPSVIDPLMEQDEGPSTPPAKQSSSRIAGDANKKTLEPRVVFIKKSQLELGVHLCGGNLHGVFVAEVEDDSPAKGPDGLVPGDLILEYGSLDVRNKTVEEVYVEMLKPRDGVRLKVQYRPEEFTKAKGLPGDSFYIRALYDRLADVEQELSFKKDDILYVDDTLPQGTFGSWMAWQLDENAQKIQRGQIPSKYVMDQEFSRRLSMSEVKDDNSATKTLSAAARRSFFRRKHKHKRSGSKDGKDLLALDAFSSDSIPLFEDSVSLAYQRVQKVDCTALRPVLILGPLLDVVKEMLVNEAPGKFCRCPLEVMKASQQAIERGVKDCLFVDYKRRSGHFDVTTVASIKEITEKNRHCLLDIAPHAIERLHHMHIYPIVIFIHYKSAKHIKEQRDPIYLRDKVTQRHSKEQFEAAQKLEQEYSRYFTGVIQGGALSSICTQILAMVNQEQNKVLWIPACPL

SEQ ID NO: 851293 - protein, 674 aa, Homo sapiens
MRATHGSNSLPSSARLGSSSNLQFKAERIKIPSTPRYPRSVVGSERGSVSHSECSTPPQSPLNIDTLSSCSQSQTSASTLPRIAVNPASLGERRKDRPYVEEPRHVKVQKGSEPLGISIVSGEKGGIYVSKVTVGSIAHQAGLEYGDQLLEFNGINLRSATEQQARLIIGQQCDTITILAQYNPHVHQLSSHSRSSSHLDPAGTHSTLQGSGTTTPEHPSVIDPLMEQDEGPSTPPAKQSSSRIAGDANKKTLEPRVVFIKKSQLELGVHLCGGNLHGVFVAEVEDDSPAKGPDGLVPGDLILEYGSLDVRNKTVEEVYVEMLKPRDGVRLKVQYRPEEFTKAKGLPGDSFYIRALYDRLADVEQELSFKKDDILYVDDTLPQGTFGSWMAWQLDENAQKIQRGQIPSKYVMDQEFSRRLSMSEVKDDNSATKTLSAAARRSFFRRKHKHKRSGSKDGKDLLALDAFSSDSIPLFEDSVSLAYQRVQKVDCTALRPVLILGPLLDVVKEMLVNEAPGKFCRCPLEVMKASQQAIERGVKDCLFVDYKRRSGHFDVTTVASIKEITEKNRHCLLDIAPHAIERLHHMHIYPIVIFIHYKSAKHIKEQRDPIYLRDKVTQRHSKEQFEAAQKLEQEYSRYFTGVIQGGALSSICTQILAMVNQEQNKVLWIPACPL

SEQ ID NO: 851294 - protein, 674 aa, Homo sapiens; identical to SEQ ID NO: 851293

SEQ ID NO: 851295 - protein, 1106 aa, Homo sapiens
MEALRQIKDTVTMDAGRANKEVEILRKQCKALCQELKEALQEADVAKCRRDWAFQERDKIVAERDSIRTLCDNLRRERDRAVSELAEALRSLDDTRKQKNDVSRELKELKEQMESQLEKEARFRQLMAHSSHDSAIDTDSMEWETEVVEFERETEDIDLKALGFDMAEGVNEPCFPGDCGIFVTKVDKGSIADGRLRVNDWLLRINDVDLINKDKKQAIKALLNGEGAINMVVRRRKSLGGKVVTPLHINLSGQKDSGISLENGVYAAAVLPGSPAAKEGSLAVGDRIVAINGIALDNKSLNECESLLRSCQDSLTLSLLKEQKCVPASGELSPELQEWAPYSPGHSSRHSNPPLYPSRPSVGTVPRSLTPSTTVSSILRNPIYTVRSHRVGPCSSPPAARDAGPQGLHPSVQHQGRLSLDLSHRTCSDYSEMRATHGSNSLPSSARLGSSSNLQFKAERIKIPSTPRYPRSVVGSERGSVSHSECSTPPQSPLNIDTLSSCSQSQTSASTLPRIAVNPASLGERRKDRPYVEEPRHVKVQKGSEPLGISIVSGEKGGIYVSKVTVGSIAHQAGLEYGDQLLEFNGINLRSATEQQARLIIGQQCDTITILAQYNPHVHQLSSHSRSSSHLDPAGTHSTLQGSGTTTPEHPSVIDPLMEQDEGPSTPPAKQSSSRIAGDANKKTLEPRVVFIKKSQLELGVHLCGGNLHGVFVAEVEDDSPAKGPDGLVPGDLILEYGSLDVRNKTVEEVYVEMLKPRDGVRLKVQYRPEEFTKAKGLPGDSFYIRALYDRLADVEQELSFKKDDILYVDDTLPQGTFGSWMAWQLDENAQKIQRGQIPSKYVMDQEFSRRLSMSEVKDDNSATKTLSAAARRSFFRRKHKHKRSGSKDGKDLLALDAFSSDSIPLFEDSVSLAYQRVQKVDCTALRPVLILGPLLDVVKEMLVNEAPGKFCRCPLEVMKASQQAIERGVKDCLFVDYKRRSGHFDVTTVASIKEITEKNRHCLLDIAPHAIERLHHMHIYPIVIFIHYKSAKHIKEQRDPIYLRDKVTQRHSKEQFEAAQKLEQEYSRYFTGVIQGGALSSICTQILAMVNQEQNKVLWIPACPL

SEQ ID NO: 851296 - protein, 427 aa, Homo sapiens
TQQKSNLELLRISLLLIESWLEPVRFLRSMFPNNLVYDTSDSDDYHLLKDLEEGIQTYGSLDVRNKTVEEVYVEMLKPRDGVRLKVQYRPEEFTKAKGLPGDSFYIRALYDRLADVEQELSFKKDDILYVDDTLPQGTFGSWMAWQLDENAQKIQRGQIPSKYVMDQEFSRRLSMSEVKDDNSATKTLSAAARRSFFRRKHKHKRSGSKDGKDLLALDAFSSDSIPLFEDSVSLAYQRVQKVDCTALRPVLILGPLLDVVKEMLVNEAPGKFCRCPLEVMKASQQAIERGVKDCLFVDYKRRSGHFDVTTVASIKEITEKNRHCLLDIAPHAIERLHHMHIYPIVIFIHYKSAKHIKEQRDPIYLRDKVTQRHSKEQFEAAQKLEQEYSRYFTGVIQGGALSSICTQILAMVNQEQNKVLWIPACPL

SEQ ID NO: 851297 - protein, 241 aa, Homo sapiens
MLNCLVSRSFFRRKHKHKRSGSKDGKDLLALDAFSSDSIPLFEDSVSLAYQRVQKVDCTALRPVLILGPLLDVVKEMLVNEAPGKFCRCPLEVMKASQQAIERGVKDCLFVDYKRRSGHFDVTTVASIKEITEKNRHCLLDIAPHAIERLHHMHIYPIVIFIHYKSAKHIKEQRDPIYLRDKVTQRHSKEQFEAAQKLEQEYSRYFTGVIQGGALSSICTQILAMVNQEQNKVLWIPACPL

SEQ ID NO: 851298 - protein, 471 aa, Homo sapiens
MEALRQIKDTVTMDAGRANKEVEILRKQCKALCQELKEALQEADVAKCRRDWAFQERDKIVAERDSIRTLCDNLRRERDRAVSELAEALRSLDDTRKQKNDVSRELKELKEQMESQLEKEARFRQLMAHSSHDSAIDTDSMEWETEVVEFERETEDIDLKALGFDMAEGVNEPCFPGDCGIFVTKVDKGSIADGRLRVNDWLLRINDVDLINKDKKQAIKALLNGEGAINMVVRRRKSLGGKVVTPLHINLSGQKDSGISLENGVYAAAVLPGSPAAKEGSLAVGDRIVAINGIALDNKSLNECESLLRSCQDSLTLSLLKVFPQSSSWSGQNIFENIKDSDKMLSFRAHGPEVQAHNKRNLIQHNNSTQTDIFYTDRLEDRKEPGPPGGSSSFLHKPFPGGPLQVCPQACPSASERSLKQFEAAQKLEQEYSRYFTGVIQGGALSSICTQILAMVNQEQNKVLWIPACPL

SEQ ID NO: 851299 - protein, 674 aa, Homo sapiens; identical to SEQ ID NO: 851293

SEQ ID NO: 851300 - protein, 1446 aa, Homo sapiens; identical to SEQ ID NO: 851292

SEQ ID NO: 851301 - protein, 1411 aa, Homo sapiens
MEALRQIKDTVTMDAGRANKEVEILRKQCKALCQELKEALQEADVAKCRRDWAFQERDKIVAERDSIRTLCDNLRRERDRAVSELAEALRSLDDTRKQKNDVSRELKELKEQMESQLEKEARFRQLMAHSSHDSAIDTDSMEWETEVVEFERETEDIDLKALGFDMAEGVNEPCFPGDCGIFVTKVDKGSIADGRLRVNDWLLRINDVDLINKDKKQAIKALLNGEGAINMVVRRRKSLGGKVVTPLHINLSGQKDSGISLENGVYAAAVLPGSPAAKEGSLAVGDRIVAINGIALDNKSLNECESLLRSCQDSLTLSLLKVFPQSSSWSGQNIFENIKDSDKMLSFRAHGPEVQAHNKRNLIQHNNSTQTDIFYTDRLEDRKEPGPPGGSSSFLHKPFPGGPLQVCPQACPSASERSLSSFRSDASGDRGFGLVDVRGRRPLLPFETEVGPCGVGEASLDKADSEGSNSGGTWPKAMLSSTAVPEKLSVYKKPKQRKSIFDPNTFKRPQTPPKIDYLLPGPGPAHSPQPSKRAGPLTPPKPPRRSDSIKFQHRLETSSESEATLVGSSPSTSPPSALPPDVDPGEPMHASPPRKARVRIASSYYPEGDGDSSHLPAKKSCDEDLTSQKVDELGQKRRRPKSAPSFRPKLAPVVIPAQFLEEQKCVPASGELSPELQEWAPYSPGHSSRHSNPPLYPSRPSVGTVPRSLTPSTTVSSILRNPIYTVRSHRVGPCSSPPAARDAGPQGLHPSVQHQGRLSLDLSHRTCSDYSEMRATHGSNSLPSSARLGSSSNLQFKAERIKIPSTPRYPRSVVGSERGSVSHSECSTPPQSPLNIDTLSSCSQSQTSASTLPRIAVNPASLGERRKDRPYVEEPRHVKVQKGSEPLGISIVSGEKGGIYVSKVTVGSIAHQAGLEYGDQLLEFNGINLRSATEQQARLIIGQQCDTITILAQYNPHVHQLSSHSRSSSHLDPAGTHSTLQGSGTTTPEHPSVIDPLMEQDEGPSTPPAKQSSSRIAGDANKKTLEPRVVFIKKSQLELGVHLCGGNLHGVFVAEVEDDSPAKGPDGLVPGDLILEYGSLDVRNKTVEEVYVEMLKPRDGVRLKVQYRPEEFTKAKGLPGDSFYIRALYDRLADVEQELSFKKDDILYVDDTLPQGTFGSWMAWQLDENAQKIQRGQIPSKYVMDQEFSRRLSMSEVKDDNSATKTLSAAARRSFFRRKHKHKRSGSKDGKDLLALDAFSSDSIPLFEDSVSLAYQRVQKVDCTALRPVLILGPLLDVVKEMLVNEAPGKFCRCPLEVMKASQQAIERGVKDCLFVDYKRRSGHFDVTTVASIKEITEKNRHCLLDIAPHAIERLHHMHIYPIVIFIHYKSAKHIKEQETPKSKDPKEQRPHKSKDPKRAKTPKEQRPQQG

SEQ ID NO: 851302 - protein, 1197 aa, Homo sapiens
MEALRQIKDTVTMDAGRANKEVEILRKQCKALCQELKEALQEADVAKCRRDWAFQERDKIVAERDSIRTLCDNLRRERDRAVSELAEALRSLDDTRKQKNDVSRELKELKEQMESQLEKEARFRQLMAHSSHDSAIDTDSMEWETEVVEFERETEDIDLKALGFDMAEGVNEPCFPGDCGIFVTKVDKGSIADGRLRVNDWLLRINDVDLINKDKKQAIKALLNGEGAINMVVRRRKSLGGKVVTPLHINLSGQKDSGISLENGVYAAAVLPGSPAAKEGSLAVGDRIVAINGIALDNKSLNECESLLRSCQDSLTLSLLKVFPQSSSWSGQNIFENIKDSDKMLSFRAHGPEVQAHNKRNLIQHNNSTQTDIFYTDRLEDRKEPGPPGGSSSFLHKPFPGGPLQVCPQACPSASERSLSSFRSDASGDRGFGLVDVRGRRPLLPFETEVGPCGVGEASLDKADSEGSNSGGTWPKAMLSSTAVPEKLSVYKKPKQRKSIFDPNTFKRPQTPPKIDYLLPGPGPAHSPQPSKRAGPLTPPKPPRRSDSIKFQHRLETSSESEATLVGSSPSTSPPSALPPDVDPGEPMHASPPRKARVRIASSYYPEGDGDSSHLPAKKSCDEDLTSQKVDELGQKRRRPKSAPSFRPKLAPVVIPAQFLEEQKCVPASGELSPELQEWAPYSPGHSSRHSNPPLYPSRPSVGTVPRSLTPSTTVSSILRNPIYTVRSHRVGPCSSPPAARDAGPQGLHPSVQHQGRLSLDLSHRTCSDYSEMRATHGSNSLPSSARLGSSSNLQFKAERIKIPSTPRYPRSVVGSERGSVSHSECSTPPQSPLNIDTLSSCSQSQTSASTLPRIAVNPASLGERRKDRPYVEEPRHVKVQKGSEPLGISIVSGEKGGIYVSKVTVGSIAHQAGLEYGDQLLEFNGINLRSATEQQARLIIGQQCDTITILAQYNPHVHQLSSHSRSSSHLDPAGTHSTLQGSGTTTPEHPSVIDPLMEQDEGPSTPPAKQSSSRIAGDANKKTLEPRVVFIKKSQLELGVHLCGGNLHGVFVAEVEDDSPAKGPDGLVPGDLILEYGSLDVRNKTVEEVYVEMLKPRDGVRLKVQYRPEEFTKAKGLPGDSFYIRALYDRLADVEQELSFKKDDILYVDDTLPQGTFGSWMAWQLDENAQKIQRGQIPSKYVMDQRIVDAAANLVV

SEQ ID NO: 851303 - protein, 869 aa, Homo sapiens
MEALRQIKDTVTMDAGRANKEVEILRKQCKALCQELKEALQEADVAKCRRDWAFQERDKIVAERDSIRTLCDNLRRERDRAVSELAEALRSLDDTRKQKNDVSRELKELKEQMESQLEKEARFRQLMAHSSHDSAIDTDSMEWETEVVEFERETEDIDLKALGFDMAEGVNEPCFPGDCGIFVTKVDKGSIADGRLRVNDWLLRINDVDLINKDKKQAIKALLNGEGAINMVVRRRKSLGGKVVTPLHINLSGQKDSGISLENGVYAAAVLPGSPAAKEGSLAVGDRIVAINGIALDNKSLNECESLLRSCQDSLTLSLLKVFPQSSSWSGQNIFENIKDSDKMLSFRAHGPEVQAHNKRNLIQHNNSTQTDIFYTDRLEDRKEPGPPGGSSSFLHKPFPGGPLQVCPQACPSASERSLSSFRSDASGDRGFGLVDVRGRRPLLPFETEVGPCGVGEASLDKADSEGSNSGGTWPKAMLSSTAVPEKLSVYKKPKQRKSIFDPNTFKRPQTPPKIDYLLPGPGPAHSPQPSKRAGPLTPPKPPRRSDSIKFQHRLETSSESEATLVGSSPSTSPPSALPPDVDPGEPMHASPPRKARVRIASSYYPEGDGDSSHLPAKKSCDEDLTSQKVDELGQKRRRPKSAPSFRPKLAPVVIPAQFLEEQKCVPASGELSPELQEWAPYSPGHSSRHSNPPLYPSRPSVGTVPRSLTPSTTVSSILRNPIYTVRSHRVGPCSSPPAARDAGPQGLHPSVQHQGRLSLDLSHRTCSDYSEMRATHGSNSLPSSARLGSSSNLQFKAERIKIPSTPRYPRSVVGSERGSVSHSECSTPPQSPLNIDTLSSCSQSQTSASTLPRIAVNPASLGERRKDS

SEQ ID NO: 851304 - protein, 674 aa, Homo sapiens; identical to SEQ ID NO: 851293

SEQ ID NO: 851305 - protein, 1103 aa, Homo sapiens
MLSFRAHGPEVQAHNKRNLIQHNNSTQTDIFYTDRLEDRKEPGPPGGSSSFLHKPFPGGPLQVCPQACPSASERSLSSFRSDASGDRGFGLVDVRGRRPLLPFETEVGPCGVGEASLDKADSEGSNSGGTWPKAMLSSTAVPEKLSVYKKPKQRKSIFDPNTFKRPQTPPKIDYLLPGPGPAHSPQPSKRAGPLTPPKPPRRSDSIKFQHRLETSSESEATLVGSSPSTSPPSALPPDVDPGEPMHASPPRKARVRIASSYYPEGDGDSSHLPAKKSCDEDLTSQKVDELGQKRRRPKSAPSFRPKLAPVVIPAQFLEEQKCVPASGELSPELQEWAPYSPGHSSRHSNPPLYPSRPSVGTVPRSLTPSTTVSSILRNPIYTVRSHRVGPCSSPPAARDAGPQGLHPSVQHQGRLSLDLSHRTCSDYSEMRATHGSNSLPSSARLGSSSNLQFKAERIKIPSTPRYPRSVVGSERGSVSHSECSTPPQSPLNIDTLSSCSQSQTSASTLPRIAVNPASLGERRKDRPYVEEPRHVKVQKGSEPLGISIVSGEKGGIYVSKVTVGSIAHQAGLEYGDQLLEFNGINLRSATEQQARLIIGQQCDTITILAQYNPHVHQLSSHSRSSSHLDPAGTHSTLQGSGTTTPEHPSVIDPLMEQDEGPSTPPAKQSSSRIAGDANKKTLEPRVVFIKKSQLELGVHLCGGNLHGVFVAEVEDDSPAKGPDGLVPGDLILEYGSLDVRNKTVEEVYVEMLKPRDGVRLKVQYRPEEFTKAKGLPGDSFYIRALYDRLADVEQELSFKKDDILYVDDTLPQGTFGSWMAWQLDENAQKIQRGQIPSKYVMDQEFSRRLSMSEVKDDNSATKTLSAAARRSFFRRKHKHKRSGSKDGKDLLALDAFSSDSIPLFEDSVSLAYQRVQKVDCTALRPVLILGPLLDVVKEMLVNEAPGKFCRCPLEVMKASQQAIERGVKDCLFVDYKRRSGHFDVTTVASIKEITEKNRHCLLDIAPHAIERLHHMHIYPIVIFIHYKSAKHIKEQRDPIYLRDKVTQRHSKEQFEAAQKLEQEYSRYFTGVIQGGALSSICTQILAMVNQEQNKVLWIPACPL

SEQ ID NO: 851306 - protein, 947 aa, Homo sapiens
YDLGSLQAPPAGFTPFSCLSLPSSWDYKRMPPRLANFCIFSRDGVSPCWPGWSRSPDLMIRPPRPPKVLGLQVGATAPGPPDVDPGEPMHASPPRKARVRIASSYYPEGDGDSSHLPAKKSCDEDLTSQKVDELGQKRRRPKSAPSFRPKLAPVVIPAQFLEEQKCVPASGELSPELQEWAPYSPGHSSRHSNPPLYPSRPSVGTVPRSLTPSTTVSSILRNPIYTVRSHRVGPCSSPPAARDAGPQGLHPSVQHQGRLSLDLSHRTCSDYSEMRATHGSNSLPSSARLGSSSNLQFKAERIKIPSTPRYPRSVVGSERGSVSHSECSTPPQSPLNIDTLSSCSQSQTSASTLPRIAVNPASLGERRKDRPYVEEPRHVKVQKGSEPLGISIVSGEKGGIYVSKVTVGSIAHQAGLEYGDQLLEFNGINLRSATEQQARLIIGQQCDTITILAQYNPHVHQLSSHSRSSSHLDPAGTHSTLQGSGTTTPEHPSVIDPLMEQDEGPSTPPAKQSSSRIAGDANKKTLEPRVVFIKKSQLELGVHLCGGNLHGVFVAEVEDDSPAKGPDGLVPGDLILEYGSLDVRNKTVEEVYVEMLKPRDGVRLKVQYRPEEFTKAKGLPGDSFYIRALYDRLADVEQELSFKKDDILYVDDTLPQGTFGSWMAWQLDENAQKIQRGQIPSKYVMDQEFSRRLSMSEVKDDNSATKTLSAAARRSFFRRKHKHKRSGSKDGKDLLALDAFSSDSIPLFEDSVSLAYQRVQKVDCTALRPVLILGPLLDVVKEMLVNEAPGKFCRCPLEVMKASQQAIERGVKDCLFVDYKRRSGHFDVTTVASIKEITEKNRHCLLDIAPHAIERLHHMHIYPIVIFIHYKSAKHIKEQRDPIYLRDKVTQRHSKEQFEAAQKLEQEYSRYFTGVIQGGALSSICTQILAMVNQEQNKVLWIPACPL

SEQ ID NO: 851307 - protein, 353 aa, Homo sapiens
MLKPRDGVRLKVQYRPEEFTKAKGLPGDSFYIRALYDRLADVEQELSFKKDDILYVDDTLPQGTFGSWMAWQLDENAQKIQRGQIPSKYVMDQEFSRRLSMSEVKDDNSATKTLSAAARRSFFRRKHKHKRSGSKDGKDLLALDAFSSDSIPLFEDSVSLAYQRVQKVDCTALRPVLILGPLLDVVKEMLVNEAPGKFCRCPLEVMKASQQAIERGVKDCLFVDYKRRSGHFDVTTVASIKEITEKNRHCLLDIAPHAIERLHHMHIYPIVIFIHYKSAKHIKEQRDPIYLRDKVTQRHSKEQFEAAQKLEQEYSRYFTGVIQGGALSSICTQILAMVNQEQNKVLWIPACPL

SEQ ID NO: 851308 - protein, 674 aa, Homo sapiens; identical to SEQ ID NO: 851293

SEQ ID NO: 851309 - protein, 1432 aa, Homo sapiens
MEALRQIKDTVTMDAGRANKEVEILRKQCKALCQELKEALQEADVAKCRRDWAFQERDKIVAERDSIRTLCDNLRRERDRAVSELAEALRSLDDTRKQKNDVSRELKELKEQMESQLEKEARFRQLMAHSSHDSAIDTDSMEWETEVVEFERETEDIDLKALGFDMAEGVNEPCFPGDCGIFVTKVDKGSIADGRLRVNDWLLRINDVDLINKDKKQAIKALLNGEGAINMVVRRRKSLGGKVVTPLHINLSGQKDSGISLENGVYAAAVLPGSPAAKEGSLAVGDRIVAINGIALDNKSLNECESLLRSCQDSLTLSLLKVFPQSSSWSGQNIFENIKDSDKMLSFRAHGPEVQAHNKRNLIQHNNSTQTDIFYTDRLEDRKEPGPPGGSSSFLHKPFPGGPLQVCPQACPSASERSLSSFRSDASGDRGFGLVDVRGRRPLLPFETEVGPCGVGEASLDKADSEGSNSGGTWPKAMLSSTAVPEKLSVYKKPKQRKSIFDPNTFKRPQTPPKIDYLLPGPGPAHSPQPSKRAGPLTPPKPPRRSDSIKFQHRLETSSESEATLVGSSPSTSPPSALPPDVDPGEPMHASPPRKARVRIASSYYPEGDGDSSHLPAKKSCDEDLTSQKVDELGQKRRRPKSAPSFRPKLAPVVIPAQFLEEQKCVPASGELSPELQEWAPYSPGHSSRHSNPPLYPSRPSVGTVPRSLTPSTTVSSILRNPIYTVRSHRVGPCSSPPAARDAGPQGLHPSVQHQGRLSLDLSHRTCSDYSEMRATHGSNSLPSSARLGSSSNLQFKAERIKIPSTPRYPRSVVGSERGSVSHSECSTPPQSPLNIDTLSSCSQSQTSASTLPRIAVNPASLGERRKDRPYVEEPRHVKVQKGSEPLGISIVSGEKGGIYVSKVTVGSIAHQAGLEYGDQLLEFNGINLRSATEQQARLIIGQQCDTITILAQYNPHVHQLSSHSRSSSHLDPAGTHSTLQGSGTTTPEHPSVIDPLMEQDEGPSTPPAKQSSSRIAGDANKKTLEPRVVFIKKSQLELGVHLCGGNLHGVFVAEVEDDSPAKGPDGLVPGDLILEYGSLDVRNKTVEEVYVEMLKPRDGVRLKVQYRPEEFTKAKGLPGDSFYIRALYDRLADVEQELSFKKDDILYVDDTLPQGTFGSWMAWQLDENAQKIQRGQIPSKYVMDQEFSRRLSMSEVKDDNSATKTLSAAARRSFFRRKHKHKRSGSKDGKDLLALDAFSSDSIPLFEDSVSLAYQRVQKVDCTALRPVLILGPLLDVVKEMLVNEAPGKFCRCPLEVMKASQQAIERGVKDCLFVDYKRRSGHFDVTTVASIKEITEKNRHCLLDIAPHAIERLHHMHIYPIVIFIHYKSAKHIKEQRDPIYLRDKVTQRHSKEQFEAAQKLEQEYSRYFTGRCAWAWSGEQAAGKEAEAS

SEQ ID NO: 851310 - protein, 1446 aa, Homo sapiens; identical to SEQ ID NO: 851292

SEQ ID NO: 851311 - protein, 1441 aa, Homo sapiens
MEALRQIKDTVTMDAGRANKEVEILRKQCKALCQELKEALQEADVAKCRRDWAFQERDKIVAERDSIRTLCDNLRRERDRAVSELAEALRSLDDTRKQKNDVSRELKELKEQMESQLEKEARFRQLMAHSSHDSAIDTDSMEWETEVVEFERETEDIDLKALGFDMAEGVNEPCFPGDCGIFVTKVDKGSIADGRLRVNDWLLRINDVDLINKDKKQAIKALLNGEGAINMVVRRRKSLGGKVVTPLHINLSGQKDSGISLENGVYAAAVLPGSPAAKEGSLAVGDRIVAINGIALDNKSLNECESLLRSCQDSLTLSLLKVFPQSSSWSGQNIFENIKDSDKMLSFRAHGPEVQAHNKRNLIQHNNSTQTDIFYTDRLEDRKEPGPPGGSSSFLHKPFPGGPLQVCPQACPSASERSLSSFRSDASGDRGFGLVDVRGRRPLLPFETEVGPCGVGEASLDKADSEGSNSGGTWPKAMLSSTAVPEKLSVYKKPKQRKSIFDPNTFKRPQTPPKIDYLLPGPGPAHSPQPSKRAGPLTPPKPPRRSDSIKFQHRLETSSESEATLVGSSPSTSPPSALPPDVDPGEPMHASPPRKARVRIASSYYPEGDGDSSHLPAKKSCDEDLTSQKVDELGQKRRRPKSAPSFRPKLAPVVIPAQFLEEQKCVPASGELSPELQEWAPYSPGHSSRHSNPPLYPSRPSVGTVPRSLTPSTTVSSILRNPIYTVRSHRVGPCSSPPAARDAGPQGLHPSVQHQGRLSLDLSHRTCSDYSEMRATHGSNSLPSSARLGSSSNLQFKAERIKIPSTPRYPRSVVGSERGSVSHSECSTPPQSPLNIDTLSSCSQSQTSASTLPRIAVNPASLGERRKDRPYVEEPRHVKVQKGSEPLGISIVSGEKGGIYVSKVTVGSIAHQAGLEYGDQLLEFNGINLRSATEQQARLIIGQQCDTITILAQYNPHVHQLSSHSRSSSHLDPAGTHSTLQGSGTTTPEHPSVIDPLMEQDEGPSTPPAKQSSSRIAGDANKKTLEPRVVFIKKSQLELGVHLCGGNLHGVFVAEVEDDSPAKGPDGLVPGDLILEYGSLDVRNKTVEEVYVEMLKPRDGVRLKVQYRPEEFTKAKGLPGDSFYIRALYDRLADVEQELSFKKDDILYVDDTLPQGTFGSWMAWQLDENAQKIQRGQIPSKYVMDQEFSRRLSMSEVKDDNSATKTLSAAARRSFFRRKHKHKRSGSKDGKDLLALDAFSSDSIPLFEDSVSLAYQRVQKVDCTALRPVLILGPLLDVVKEMLVNEAPGKFCRCPLEVMKASQQAIERGVKDCLFVDYKRRSGHFDVTTVASIKEITEKNRHCLLDIAPHAIERLHHMHIYPIVIFIHYKSAKHIKEQRPQKLLGSFFLFLFFWETELGSYTQGGVKGPFSSSKKLQPQGPGDPRAYSLRRSGDNRYRHKA

SEQ ID NO: 851312 - protein, 64 aa, Homo sapiens
GSPAPLRSSTPSWVRDAAALSPSDSVSLAYQRVQKVDCTALRPVLILGPLLDVVKEMLVNEAPG

SEQ ID NO: 851313 - protein, 89 aa, Homo sapiens
SGGLPSHGPNPKSPLPAVVAVGTVLVALSAMGFTSVGIAASSIAAKMMSTAAIANGGGVAAGSLVAILQSVGECSGQDDQSQEMIQPRG

SEQ ID NO: 851314 - protein, 104 aa, Homo sapiens
MGKESGWDSGRAAVAAVVGGVVAVGTVLVALSAMGFTSVGIAASSIAAKMMSTAAIANGGGVAAGSLVAILQSVGAAGLSVTSKVIGGFAGTALGAWLGSPPSS

SEQ ID NO: 851315 - protein, 104 aa, Homo sapiens; identical to SEQ ID NO: 851314

SEQ ID NO: 851316 - protein, 105 aa, Homo sapiens
GRPLWTREPTGPERPTIGTHRPRATRDRNPGSWPQPLSRVGSNPARFGTHRVETPPQLRQSRVKNLRNRRCTSAAAATAVPGRDLHARTRARWGGSPAPMANSAT

SEQ ID NO: 851317 - protein, 104 aa, Homo sapiens; identical to SEQ ID NO: 851314

SEQ ID NO: 851318 - protein, 104 aa, Homo sapiens; identical to SEQ ID NO: 851314

SEQ ID NO: 851319 - protein, 452 aa, Homo sapiens
MRSSSLSLSSAEHKLAEVETTEGLGVLELSGHRRPGHSPGVRTACDLWRDRRGGRFLSWRARWSPGGKARPAGNTGAWAPAEQFFPASNRTREGGGLWPPLPLQSSPAAPTMLDSSAAEQVTRLTLKLLGQKASYVIPGAHRAFAWSHRLCHGLSSSQKLEQERQNVEGGPEGLHLEPGNEDRPDDALQTALKRRRDLLQRLREQHLLDELSRAQAWSGPSRGALGSALPPELPPTGILPTASPSPLAPDPPRIILPTVPQPPATIIQQLPQQPLIAQIPPPQAFPTQRSGSIKEDMVELLLLQNAQVHQLVLQNWMLKALPPALQDPPHVPPRVPRAARQGCLPCTTTTTTTMLCGHLGLPLSSSPPPACGRLAHPECESQRPWPGHPPPPGFLRAVGCGGTMEGSRERPCHHPEWLRECGLQAPPGEAGQARFLVTGPFQGASLAPGPLQ

SEQ ID NO: 851320 - protein, 305 aa, Homo sapiens
MRSSSLSLSSAEHKLAEVETTEGLGVLELSGHRRPGHSPGVRTACDLWRDRRGGRFLSWRARWSPGGKARPAGNTGAWAPAEQFFPASNRTREGGGLWPPLPLQSSPAAPTMLDSSAAEQVTRLTLKLLGQKLEQERQNVEGGPEGLHLEPGNEDRPDDALQTALKRRRDLLQRLREQHLLDELSRAQAWSGPSRGALGSALPPELPPTGILPTASPSPLAPDPPRIILPTVPQPPATIIQQLPQQPLIAQIPPPQAFPTQRSGSIKEDMVELLLLQNAQVHQLVLQNWMLKALPPALQDRFFHS

SEQ ID NO: 851321 - protein, 128 aa, Homo sapiens
MCPSLVSGFLCSPSGPVRAPSLAKGSSWRAVCLFAAVTMPFPSVLEWLLADASSPCSLLSNCNLNAPSGSPGISLRIFFLFLRQSRCDAQAIAQWRDLGSLQPPSGSRGSSTARNFLLLTQATVFCVV

SEQ ID NO: 851322 - protein, 370 aa, Homo sapiens
MAIEYSGWSPGGKARPAGNTGAWAPAEQFFPASNRTREGGGLWPPLPLQSSPAAPTMLDSSAAEQVTRLTLKLLGQKLEQERQNVEGGPEGLHLEPGNEDRPDDALQTALKRRRDLLQRLREQHLLDELSRAQAWSGPSRGALGSALPPELPPTGILPTASPSPLAPDPPRIILPTVPQPPATIIQQLPQQPLIAQIPPPQAFPTQRSGSIKEDMVELLLLQNAQVHQLVLQNWMLKALPPALQDPPHVPPRVPRAARQGCLPCTTTTTTTMLCGHLGLPLSSSPPPACGRLAHPECESQRPWPGHPPPPGFLRAVGCGGTMEGSRERPCHHPEWLRECGLQAPPGEAGQARFLVTGPFQGASLAPGPLQ

SEQ ID NO: 851323 - protein, 314 aa, Homo sapiens
MLDSSAAEQVTRLTLKLLGQKLEQERQNVEGGPEGLHLEPGNEDRPDDALQTALKRRRDLLQRLREQHLLDELSRAQAWSGPSRGALGSALPPELPPTGILPTASPSPLAPDPPRIILPTVPQPPATIIQQLPQQPLIAQIPPPQAFPTQRSGSIKEDMVELLLLQNAQVHQLVLQNWMLKALPPALQDPPHVPPRVPRAARQGCLPCTTTTTTTMLCGHLGLPLSSSPPPACGRLAHPECESQRPWPGHPPPPGFLRAVGCGGTMEGSRERPCHHPEWLRECGLQAPPGEAGQARFLVTGPFQGASLAPGPLQ

SEQ ID NO: 851324 - protein, 425 aa, Homo sapiens
MRSSSLSLSSAEHKLAEVETTEGLGVLELSGHRRPGHSPGVRTACDLWRDRRGGRFLSWRARWSPGGKARPAGNTGAWAPAEQFFPASNRTREGGGLWPPLPLQSSPAAPTMLDSSAAEQVTRLTLKLLGQKLEQERQNVEGGPEGLHLEPGNEDRPDDALQTALKRRRDLLQRLREQHLLDELSRAQAWSGPSRGALGSALPPELPPTGILPTASPSPLAPDPPRIILPTVPQPPATIIQQLPQQPLIAQIPPPQAFPTQRSGSIKEDMVELLLLQNAQVHQLVLQNWMLKALPPALQDPPHVPPRVPRAARQGCLPCTTTTTTTMLCGHLGLPLSSSPPPACGRLAHPECESQRPWPGHPPPPGFLRAVGCGGTMEGSRERPCHHPEWLRECGLQAPPGEAGQARFLVTGPFQGASLAPGPLQ

SEQ ID NO: 851325 - protein, 350 aa, Homo sapiens
MRSSSLSLSSAEHKLAEVETTEGLGVLELSGHRRPGHSPGVRTACDLWRDRRGGRFLSWRARWSPGGKARPAGNTGAWAPAEQFFPASNRTREGGGLWPPLPLQSSPAAPTMLDSSAAEQVTRLTLKLLGQKLEQERQNVEGGPEGLHLEPGNEDRPDDALQTALKRRRDLLQRLREQHLLDELSRAQAWSGPSRGALGSALPPELPPTGILPTASPSPLAPDPPRIILPTVPQPPATIIQQLPQQPLIAQIPPPQAFPTQRSGSIKEDMVELLLLQNAQVHQLVLQNWMLKALPPALQDPPHVPPRVPRAARPRLPAVHHHHHHHHAVWPPGAATVLQPAPSLWTPGPP

SEQ ID NO: 851326 - protein, 215 aa, Homo sapiens
RYWRHFLQGHMQIANHLAVPRSPSLLPPSFSSSLSEPLIAQIPPPQAFPTQRSGSIKEDMVELLLLQNAQVHQLVLQNWMLKALPPALQDPPHVPPRVPRAARQGCLPCTTTTTTTMLCGHLGLPLSSSPPPACGRLAHPECESQRPWPGHPPPPGFLRAVGCGGTMEGSRERPCHHPEWLRECGLQAPPGEAGQARFLVTGPFQGASLAPGPLQ

SEQ ID NO: 851327 - protein, 1097 aa, Homo sapiens
MMDIYVCLKRPSWMVDNKRMRTASNFQWLLSTFILLYLMNQVNSQKKGAPHDLKCVTNNLQVWNCSWKAPSGTGRGTDYEVCIENRSRSCYQLEKTSIKIPALSHGDYEITINSLHDFGSSTSKFTLNEQNVSLIPDTPEILNLSADFSTSTLYLKWNDRGSVFPHRSNVIWEIKVLRKESMELVKLVTHNTTLNGKDTLHHWSWASDMPLECAIHFVEIRCYIDNLHFSGLEEWSDWSPVKNISWIPDSQTKVFPQDKVILVGSDITFCCVSQEKVLSALIGHTNCPLIHLDGENVAIKIRNISVSASSGTNVVFTTEDNIFGTVIFAGYPPDTPQQLNCETHDLKEIICSWNPGRVTALVGPRATSYTLVESFSGKYVRLKRAEAPTNESYQLLFQMLPNQEIYNFTLNAHNPLGRSQSTILVNITEKVYPHTPTSFKVKDINSTAVKLSWHLPGNFAKINFLCEIEIKKSNSVQEQRNVTIKGVENSSYLVALDKLNPYTLYTFRIRCSTETFWKWSKWSNKKQHLTTEASPSKGPDTWREWSSDGKNLIIYWKPLPINEANGKILSYNVSCSSDEETQSLSEIPDPQHKAEIRLDKNDYIISVVAKNSVGSSPPSKIASMEIPNDDLKIEQVVGMGKGILLTWHYDPNMTCDYVIKWCNSSRSEPCLMDWRKVPSNSTETVIESDEFRPGIRYNFFLYGCRNQGYQLLRSMIGYIEELAPIVAPNFTVEDTSADSILVKWEDIPVEELRGFLRGYLFYFGKGERDTSKMRVLESGRSDIKVKNITDISQKTLRIADLQGKTSYHLVLRAYTDGGVGPEKSMYVVTKENSVGLIIAILIPVAVAVIVGVVTSILCYRKREWIKETFYPDIPNPENCKALQFQKSVCEGSSALKTLEMNPCTPNNVEVLETRSAFPKIEDTEIISPVAERPEDRSDAEPENHVVVSYCPPIIEEEIPNPAADEAGGTAQVIYIDVQSMYQPQAKPEEEQENDPVGGAGYKPQMHLPINSTVEDIAAEEDLDKTAGYRPQANVNTWNLVSPDSPRSIDSNSEIVSFGSPCSINSRQFLIPPKDEDSPKSNGGGWSFTNFFQNKPND

SEQ ID NO: 851328 - protein, 626 aa, Homo sapiens
  misc_feature (608)..(608): Xaa can be any naturally occurring amino acid
  misc_feature (613)..(613): Xaa can be any naturally occurring amino acid
  misc_feature (624)..(624): Xaa can be any naturally occurring amino acid
MMDIYVCLKRPSWMVDNKRMRTASNFQWLLSTFILLYLMNQVNSQKKGAPHDLKCVTNNLQVWNCSWKAPSGTGRGTDYEVCIENRSRSCYQLEKTSIKIPALSHGDYEITINSLHDFGSSTSKFTLNEQNVSLIPDTPEILNLSADFSTSTLYLKWNDRGSVFPHRSNVIWEIKVLRKESMELVKLVTHNTTLNGKDTLHHWSWASDMPLECAIHFVEIRCYIDNLHFSGLEEWSDWSPVKNISWIPDSQTKVFPQDKVILVGSDITFCCVSQEKVLSALIGHTNCPLIHLDGENVAIKIRNISVSASSGTNVVFTTEDNIFGTVIFAGYPPDTPQQLNCETHDLKEIICSWNPGRVTALVGPRATSYTLVESFSGKYVRLKRAEAPTNESYQLLFQMLPNQEIYNFTLNAHNPLGRSQSTILVNITEKVYPHTPTSFKVKDINSTAVKLSWHLPGNFAKINFLCEIEIKKSNSVQEQRNVTIKGVENSSYLVALDKLNPYTLYTFRIRCSTETFWKWSKWSNKKQHLTTEASPSKGPDTWREWSSDGKNLIIYWKPLPINEANGKILSYNVSCSSDEETQSLSEIPDPQHKAEIRLDKEMAYLHSXVMGLXKILGGPSINPXFS

SEQ ID NO: 851329 - protein, 1406 aa, Homo sapiens
GTGVVPRSWPRAGGRRRRLPACYGMDEEENHYVSQLREVYSSCDTTGTGFLDRQELTQLCLKLHLEQQLPVLLQTLLGNDHFARVNFEEFKEGFVAVLSSNAGVRPSDEDSSSLESAASSAIPPKYVNGSKWYGRRSRPELCDAATEARRVPEQQTQASLKSHLWRSASLESVESPKSDEEAESTKEAQNELFEAQGQLQTWDSEDFGSPQKSCSPSFDTPESQIRGVWEELGVGSSGHLSEQELAVVCQSVGLQGLEKEELEDLFNKLDQDGDGKVSLEEFQLGLFSHEPALLLESSTRVKPSKAWSHYQVPEESGCHTTTTSSLVSLCSSLRLFSSIDDGSGFAFPDQVLAMWTQEGIQNGREILQSLDFSVDEKVNLLELTWALDNELMTVDSAVQQAALACYHQELSYQQGQVEQLARERDKARQDLERAEKRNLEFVKEMDDCHSTLEQLTEKKIKHLEQGYRERLSLLRSEVEAERELFWEQAHRQRAALEWDVGRLQAEEAGLREKLTLALKENSRLQKEIVEVVEKLSDSERLALKLQKDLEFVLKDKLEPQSAELLAQEERFAAVLKEYELKCRDLQDRNDELQAELEGLWARLPKNRHSPSWSPDGRRRQLPGLGPAGISFLGNSAPVSIETELMMEQVKEHYQDLRTQLETKVNYYEREIAALKRNFEKERKDMEQARRREVSVLEGQKADLEELHEKSQEVIWGLQEQLQDTARGPEPEQMGLAPCCTQALCGLALRHHSHLQQIRREAEAELSGELSGLGALPARRDLTLELEEPPQGPLPRGSQRSEQLELERALKLQPCASEKRAQMCVSLALEEEELELARGKRVDGPSLEAEMQALPKDGLVAGSGQEGTRGLLPLRPGCGERPLAWLAPGDGRESEEAAGAGPRRRQAQDTEATQSPAPAPAPASHGPSERWSRMQPCGVDGDIVPKEPEPFGASAAGLEQPGARELPLLGTERDASQTQPRMWEPPLRPAASCRGQAERLQAIQEERARSWSRGTQEQASEQQARAEGALEPGCHKHSVEVARRGSLPSHLQLADPQGSWQEQLAAPEEGETKIALEREKDDMETKLLHLEDVVRALEKHVDLRENDRLEFHRLSEENTLLKNDLGRVRQELEAAESTHDAQRKEIEVLKKDKEKACSEMEVLNRQNQNYKDQLSQLNVRVLQLGQEASTHQAQNEEHRVTIQMLTQSLEEVVRSGQQQSDQIQKLRVELECLNQEHQSLQLPWSELTQTLEESQDQVQGAHLRLRQAQAQHLQEVRLVPQDRVAELHRLLSLQGEQARRRLDAQREEHEKQLKATEERVEEAEMILKNMEMLLQEKVDKLKEQFEKNTKSDLLLKELYVENAHLVRALQATEEKQRGAEKQSRLLEEKVRALNKLVSRIAPAALSV

SEQ ID NO: 851330 - protein, 173 aa, Homo sapiens
MERVLLCAASQQPHQSCLPFPMQVQGAHLRLRQAQAQHLQEVRLVPQDRVAELHRLLSLQGEQARRRLDAQREEHEKQLKATEERVEEAEMILKNMEMLLQEKVDKLKEQFEKNTKSDLLLKELYVENAHLVRALQATEEKQRGAEKQSRLLEEKVRALNKLVSRIAPAALSV

SEQ ID NO: 851331 - protein, 1295 aa, Homo sapiens
GTGVVPRSWPRAGGRRRRLPACYGMDEEENHYVSQLREVYSSCDTTGTGFLDRQELTQLCLKLHLEQQLPVLLQTLLGNDHFARVNFEEFKEGFVAVLSSNAGVRPSDEDSSSLESAASSAIPPKYVNGSKWYGRRSRPELCDAATEARRVPEQQTQASLKSHLWRSASLESVESPKSDEEAESTKEAQNELFEAQGQLQTWDSEDFGSPQKSCSPSFDTPESQIRGVWEELGVGSSGHLSEQELAVVCQSVGLQGLEKEELEDLFNKLDQDGDGKVSLEEFQLGLFSHEPALLLESSTRVKPSKAWSHYQVPEESGCHTTTTSSLVSLCSSLRLFSSIDDGSGFAFPDQHLEQGYRERLSLLRSEVEAERELFWEQAHRQRAALEWDVGRLQAEEAGLREKLTLALKENSRLQKEIVEVVEKLSDSERLALKLQKDLEFVLKDKLEPQSAELLAQEERFAAVLKEYELKCRDLQDRNDELQAELEGLWARLPKNRHSPSWSPDGRRRQLPGLGPAGISFLGNSAPVSIETELMMEQVKEHYQDLRTQLETKVNYYEREIAALKRNFEKERKDMEQARRREVSVLEGQKADLEELHEKSQEVIWGLQEQLQDTARGPEPEQMGLAPCCTQALCGLALRHHSHLQQIRREAEAELSGELSGLGALPARRDLTLELEEPPQGPLPRGSQRSEQLELERALKLQPCASEKRAQMCVSLALEEEELELARGKRVDGPSLEAEMQALPKDGLVAGSGQEGTRGLLPLRPGCGERPLAWLAPGDGRESEEAAGAGPRRRQAQDTEATQSPAPAPAPASHGPSERWSRMQPCGVDGDIVPKEPEPFGASAAGLEQPGARELPLLGTERDASQTQPRMWEPPLRPAASCRGQAERLQAIQEERARSWSRGTQEQASEQQARAEGALEPGCHKHSVEVARRGSLPSHLQLADPQGSWQEQLAAPEEGETKIALEREKDDMETKLLHLEDVVRALEKHVDLRENDRLEFHRLSEENTLLKNDLGRVRQELEAAESTHDAQRKEIEVLKKDKEKACSEMEVLNRQNQNYKDQLSQLNVRVLQLGQEASTHQAQNEEHRVTIQMLTQSLEEVVRSGQQQSDQIQKLRVELECLNQEHQSLQLPWSELTQTLEESQDQVQGAHLRLRQAQAQHLQEVRLVPQDRVAELHRLLSLQGEQARRRLDAQREEHEKQLKATEERVEEAEMILKNMEMLLQEKVDKLKEQFEKNTKSDLLLKELYVENAHLVRALQATEEKQRGAEKQSRLLEEKVRALNKLVSRIAPAALSV

SEQ ID NO: 851332 - protein, 1068 aa, Homo sapiens
GTGVVPRSWPRAGGRRRRLPACYGMDEEENHYVSQLREVYSSCDTTGTGFLDRQELTQLCLKLHLEQQLPVLLQTLLGNDHFARVNFEEFKEGFVAVLSSNAGVRPSDEDSSSLESAASSAIPPKYVNGSKWYGRRSRPELCDAATEARRVPEQQTQASLKSHLWRSASLESVESPKSDEEAESTKEAQNELFEAQGQLQTWDSEDFGSPQKSCSPSFDTPESQIRGVWEELGVGSSGHLSEQELAVVCQSVGLQGLEKEELEDLFNKLDQDGDGKVSLEEFQLGLFSHEPALLLESSTRVKPSKAWSHYQVPEESGCHTTTTSSLVSLCSSLRLFSSIDDGSGFAFPDQVLAMWTQEGIQNGREILQSLDFSVDEKVNLLELTWALDNELMTVDSAVQQAALACYHQELSYQQGQVEQLARERDKARQDLERAEKRNLEFVKEMDDCHSTLEQLTEKKIKHLEQGYRERLSLLRSEVEAERELFWEQAHRQRAALEWDVGRLQAEEAGLREKLTLALKEPDEPLACVSKENSRLQKEIVEVVEKLSDSERLALKLQKDLEFVLKDKLEPQSAELLAQEERFAAVLKEYELKCRDLQDRNDELQAELEGLWARLPKNRHSPSWSPDGRRRQLPGLGPAGISFLGNSAPVSIETELMMEQVKEHYQDLRTQLETKVNYYEREIAALKRNFEKERKDMEQARRREVSVLEGQKADLEELHEKSQEVIWGLQEQLQDTARGPEPEQMGLAPCCTQALCGLALRHHSHLQQIRLEFHRLSEENTLLKNDLGRVRQELEAAESTHDAQRKEIEVLKKDKEKACSEMEVLNRQNQNYKDQLSQLNVRVLQLGQEASTHQAQNEEHRVTIQMLTQSLEEVVRSGQQQSDQIQKLRVELECLNQEHQSLQLPWSELTQTLEESQDQVQGAHLRLRQAQAQHLQEVRLVPQDRVAELHRLLSLQGEQARRRLDAQREEHEKQLKATEERVEEAEMILKNMEMLLQEKVDKLKEQFEKNTKSDLLLKELYVENAHLVRALQATEEKQRGAEKQSRLLEEKVRALNKLVSRIAPAALSV

SEQ ID NO: 851333 - protein, 268 aa, Homo sapiens
MAQRKEIEVLKKDKEKACSEMEVLNRQNQNYKDQLSQLNVRVLQLGQEASTHQAQNEEHRVTIQMLTQSLEEVVRSGQQQSDQIQKLRVELECLNQEHQSLQLPWSELTQTLEESQDQVQGAHLRLRQAQAQHLQEVRLVPQDRVAELHRLLSLQGEQARRRLDAQREEHEKQLKATEERVEEAEMILKNMEMLLQEKVDKLKEQFEKNTKSDLLLKELYVENAHLVRALQATEEKQRGAEKQSRLLEEKVRALNKLVSRIAPAALSV

SEQ ID NO: 851334 - protein, 636 aa, Homo sapiens
GTGVVPRSWPRAGGRRRRLPACYGMDEEENHYVSQLREVYSSCDTTGTGFLDRQELTQLCLKLHLEQQLPVLLQTLLGNDHFARVNFEEFKEGFVAVLSSNAGVRPSDEDSSSLESAASSAIPPKYVNGSKWYGRRSRPELCDAATEARRVPEQQTQASLKSHLWRSASLESVESPKSDEEAESTKEAQNELFEAQGQLQTWDSEDFGSPQKSCSPSFDTPESQIRGVWEELGVGSSGHLSEQELAVVCQSVGLQGLEKEELEDLFNKLDQDGDGKVSLEEFQLGLFSHEPALLLESSTRVKPSKAWSHYQVPEESGCHTTTTSSLVSLCSSLRLFSSIDDGSGFAFPDQVLAMWTQEGIQNGREILQSLDFSVDEKVNLLELTWALDNELMTVDSAVQQAALACYHQELSYQQGQVEQLARERDKARQDLERAEKRNLEFVKEMDDCHSTLEQLTEKKIKHLEQGYRERLSLLRSEVEAERELFWEQAHRQRAALEWDVGRLQAEEAGLREKLTLALKENSRLQKEIVEVVEKLSDSERLALKLQKDLEFVLKDKLEPQSAELLAQEERFAAVLKEYELKCRDLQDRNDELQAELEGLWARLPKNRHSPSWSPDGRRRQLPGLGPAGRSPSLGGG

SEQ ID NO: 851335 - protein, 484 aa, Homo sapiens
GTGVVPRSWPRAGGRRRRLPACYGMDEEENHYVSQLREVYSSCDTTGTGFLDRQELTQLCLKLHLEQQLPVLLQTLLGNDHFARVNFEEFKEGFVAVLSSNAGVRPSDEDSSSLESAASSAIPPKYVNGSKWYGRRSRPELCDAATEARRVPEQQTQASLKSHLWRSASLESVESPKSDEEAESTKEAQNELFEAQGQLQTWDSEDFGSPQKSCSPSFDTPESQIRGVWEELGVGSSGHLSEQELAVVCQSVGLQGLEKEELEDLFNKLDQDGDGKVSLEEFQLGLFSHEPALLLESSTRVKPSKAWSHYQVPEESGCHTTTTSSLVSLCSSLRLFSSIDDGSGFAFPDQVLAMWTQEGIQNGREILQSLDFSVDEKVNLLELTWALDNELMTVDSAVQQAALACYHQELSYQQGQVEQLARERDKARQDLERAEKRNLEFVKEMDDCHSTLEQLTEKKIKKTVAYRRRLWKWWKSFRIRRGWP

SEQ ID NO: 851336 - protein, 1417 aa, Homo sapiens
GTGVVPRSWPRAGGRRRRLPACYGMDEEENHYVSQLREVYSSCDTTGTGFLDRQELTQLCLKLHLEQQLPVLLQTLLGNDHFARVNFEEFKEGFVAVLSSNAGVRPSDEDSSSLESAASSAIPPKYVNGSKWYGRRSRPELCDAATEARRVPEQQTQASLKSHLWRSASLESVESPKSDEEAESTKEAQNELFEAQGQLQTWDSEDFGSPQKSCSPSFDTPESQIRGVWEELGVGSSGHLSEQELAVVCQSVGLQGLEKEELEDLFNKLDQDGDGKVSLEEFQLGLFSHEPALLLESSTRVKPSKAWSHYQVPEESGCHTTTTSSLVSLCSSLRLFSSIDDGSGFAFPDQVLAMWTQEGIQNGREILQSLDFSVDEKVNLLELTWALDNELMTVDSAVQQAALACYHQELSYQQGQVEQLARERDKARQDLERAEKRNLEFVKEMDDCHSTLEQLTEKKIKHLEQGYRERLSLLRSEVEAERELFWEQAHRQRAALEWDVGRLQAEEAGLREKLTLALKEPDEPLACVSKENSRLQKEIVEVVEKLSDSERLALKLQKDLEFVLKDKLEPQSAELLAQEERFAAVLKEYELKCRDLQDRNDELQAELEGLWARLPKNRHSPSWSPDGRRRQLPGLGPAGISFLGNSAPVSIETELMMEQVKEHYQDLRTQLETKVNYYEREIAALKRNFEKERKDMEQARRREVSVLEGQKADLEELHEKSQEVIWGLQEQLQDTARGPEPEQMGLAPCCTQALCGLALRHHSHLQQIRREAEAELSGELSGLGALPARRDLTLELEEPPQGPLPRGSQRSEQLELERALKLQPCASEKRAQMCVSLALEEEELELARGKRVDGPSLEAEMQALPKDGLVAGSGQEGTRGLLPLRPGCGERPLAWLAPGDGRESEEAAGAGPRRRQAQDTEATQSPAPAPAPASHGPSERWSRMQPCGVDGDIVPKEPEPFGASAAGLEQPGARELPLLGTERDASQTQPRMWEPPLRPAASCRGQAERLQAIQEERARSWSRGTQEQASEQQARAEGALEPGCHKHSVEVARRGSLPSHLQLADPQGSWQEQLAAPEEGETKIALEREKDDMETKLLHLEDVVRALEKHVDLRENDRLEFHRLSEENTLLKNDLGRVRQELEAAESTHDAQRKEIEVLKKDKEKACSEMEVLNRQNQNYKDQLSQLNVRVLQLGQEASTHQAQNEEHRVTIQMLTQSLEEVVRSGQQQSDQIQKLRVELECLNQEHQSLQLPWSELTQTLEESQDQVQGAHLRLRQAQAQHLQEVRLVPQDRVAELHRLLSLQGEQARRRLDAQREEHEKQLKATEERVEEAEMILKNMEMLLQEKVDKLKEQFEKNTKSDLLLKELYVENAHLVRALQATEEKQRGAEKQSRLLEEKVRALNKLVSRIAPAALSV

SEQ ID NO: 851337 - protein, 584 aa, Homo sapiens
MCVSLALEEEELELARGKRVDGPSLEAEMQALPKDGLVAGSGQEGTRGLLPLRPGCGERPLAWLAPGDGRESEEAAGAGPRRRQAQDTEATQSPAPAPAPASHGPSERWSRMQPCGVDGDIVPKEPEPFGASAAGLEQPGARELPLLGTERDASQTQPRMEPPLRPAASCRGQAERLQAIQEERARSWSRGTQEQASEQQARAEGALEPGCHKHSVEVARRGSLPSHLQLADPQGSWQEQLAAPEEGETKIALEREKDDMETKLLHLEDVVRALEKHVDLRENDRLEFHRLSEENTLLKNDLGRVRQELEAAESTHDAQRKEIEVLKKDKEKACSEMEVLNRQNQNYKDQLSQLNVRVLQLGQEASTHQAQNEEHRVTIQMLTQSLEEVVRSGQQQSDQIQKLRVELECLNQEHQSLQLPWSELTQTLEESQDQVQGAHLRLRQAQAQHLQEVRLVPQDRVAELHRLLSLQGEQARRRLDAQREEHEKQLKATEERVEEAEMILKNMEMLLQEKVDKLKEQFEKNTKSDLLLKELYVENAHLVRALQATEEKQRGAEKQSRLLEEKVRALNKLVSRIAPAALSV

SEQ ID NO: 851338 - protein, 210 aa, Homo sapiens
MSGFFNWDRRLLPTRPKRGASCDHSDVNTEPGGGGSQWAAAGLQLPWSELTQTLEESQDQVQGAHLRLRQAQAQHLQEVRLVPQDRVAELHRLLSLQGEQARRRLDAQREEHEKQLKATEERVEEAEMILKNMEMLLQEKVDKLKEQFEKNTKSDLLLKELYVENAHLVRALQATEEKQRGAEKQSRLLEEKVRALNKLVSRIAPAALSV

SEQ ID NO: 851339 - protein, 1399 aa, Homo sapiens
GTGVVPRSWPRAGGRRRRLPACYGMDEEENHYVSQLREVYSSCDTTGTGFLDRQELTQLCLKLHLEQQLPVLLQTLLGNDHFARVNFEEFKEGFVAVLSSNAGVRPSDEDSSSLESAASSAIPPKYVNGSKWYGRRSRPELCDAATEARRVPEQQTQASLKSHLWRSASLESVESPKSDEEAESTKEAQNELFEAQGQLQTWDSEDFGSPQKSCSPSFDTPESQIRGVWEELGVGSSGHLSEQELAVVCQSVGLQGLEKEELEDLFNKLDQDGDGKVSLEEFQLGLFSHEPALLLESSTRVKPSKAWSHYQVPEESGCHTTTTSSLVSLCSSLRLFSSIDDGSGFAFPDQVLAMWTQEGIQNGREILQSLDFSVDEKVNLLELTWALDNELMTVDSAVQQAALACYHQELSYQQGQVEQLARERDKARQDLERAEKRNLEFVKEMDDCHSTLEQLTEKKIKHLEQGYRERLSLLRSEVEAERELFWEQAHRQRAALEWDVGRLQAEEAGLREKLTLALKEPDEPLACVSKENSRLQKEIVEVVEKLSDSERLALKLQKDLEFVLKDKLEPQSAELLAQEERFAAVLKEYELKCRDLQDRNDELQAELEGLWARLPKNRHSPSWSPDGRRRQLPGLGPAGISFLGNSAPVSIETELMMEQVKEHYQDLRTQLETKVNYYEREIAALKRNFEKERKDMEQARRREVSVLEGQKADLEELHEKSQEVIWGLQEQLQDTARGPEPEQMGLAPCCTQALCGLALRHHSHLQQIRREAEAELSGELSGLGALPARRDLTLELEEPPQGPLPRGSQRSEQLELERALKLQPCASEKRAQMCVSLALEEEELELARGKRVDGPSLEAEMQALPKDGLVAGSGQEGTRGLLPLRPGCGERPLAWLAPGDGRESEEAAGAGPRRRQAQDTEATQSPAPAPAPASHGPSERWSRMQPCGVDGDIVPKEPEPFGASAAGLEQPGARELPLLGTERDASQTQPRMWEPPLRPAASCRGQAERLQAIQEERARSWSRGTQEQASEQQARAEGALEPGCHKHSVEVARRGSLPSHLQLADPQGSWQEQLAAPEEGETKIALEREKDDMETKLLHLEDVVRALEKHVDLRENDRLEFHRLSEENTLLKNDLGRVRQELEAAESTHDAQRKEIEVLKKDKEKACSEMEVLNRQNQNYKDQLSQLNVRVLQLGQEASTHQAQNEEHRVTIQMLTQSLEEVVRSGQQQSDQIQKLRVELECLNQEHQSLQLPWSELTQTLEESQDQVQGAHLRLRQAQAQHLQEVRLVPQDRVAELHRLLSLQGEQARRRLDAQREEHEKQLKATEERVEEAEMILKNMEMLLQEKVDKLKEQFEKNTKSDLLLKELYVENAHLVRALQATEEKQRGAEKQSRLLEDV

SEQ ID NO: 851340 - protein, 182 aa, Homo sapiens
MTMDKSELVQKAKLAEQAERYDDMAAAMKAVTEQGHELSNEERNLLSVAYKNVVGARRSSWRVISSIEQKTERNEKKQQMGKEYREKIEAELQDICNDVLELLDKYLIPNATQPESKVFYLNNEHGDYFRYLSEVASGDNKQTTVSNSQQAYQEAFEISKNRNAAYTPNSSWSGTKFLSLLL

SEQ ID NO: 851341 - protein, 124 aa, Homo sapiens
VRVYRCHILLKMAYGDNNKPLCRTPSRLTRKHLKLVRTEMQPTHPIRLGLALNFSVFYYEILNSPEKACSLAKTAFDEAIAELDTLNEESYKDSTLIMQLLRDNLTLWTSENQGDEGDAGEGEN

SEQ ID NO: 851342 - protein, 182 aa, Homo sapiens; identical to SEQ ID NO: 851340

SEQ ID NO: 851343 - protein, 182 aa, Homo sapiens; identical to SEQ ID NO: 851340

SEQ ID NO: 851344 - protein, 182 aa, Homo sapiens; identical to SEQ ID NO: 851340

SEQ ID NO: 851345 - protein, 182 aa, Homo sapiens; identical to SEQ ID NO: 851340

SEQ ID NO: 851346 - protein, 182 aa, Homo sapiens; identical to SEQ ID NO: 851340

SEQ ID NO: 851347 - protein, 247 aa, Homo sapiens
VAAAAAAAAAAAAARVEARGRRARVSCSHCRHRCRRLSSGLRKEEVISLGASLGRVFVPCSPPTGMTMDKSELVQKAKLAEQAERYDDMAAAMKAVTEQGHELSNEERNLLSVAYKNVVGARRSSWRVISSIEQKTERNEKKQQMGKEYREKIEAELQDICNDVLELLDKYLIPNATQPESKVFYLNNEHGDYFRYLSEVASGDNKQTTVSNSQQAYQEAFEISKNRNAAYTPNSSWSGTKFLSLLL

SEQ ID NO: 851348 - protein, 186 aa, Homo sapiens
MAGGMTMDKSELVQKAKLAEQAERYDDMAAAMKAVTEQGHELSNEERNLLSVAYKNVVGARRSSWRVISSIEQKTERNEKKQQMGKEYREKIEAELQDICNDVLELLDKYLIPNATQPESKVFYLNNEHGDYFRYLSEVASGDNKQTTVSNSQQAYQEAFEISKNRNAAYTPNSSWSGTKFLSLLL

SEQ ID NO: 851349 - protein, 182 aa, Homo sapiens; identical to SEQ ID NO: 851340

SEQ ID NO: 851350 - protein, 149 aa, Homo sapiens
MTMDKSELVQKAKLAEQAERYDDMAAAMKAVTEQGHELSNEERNLLSVAYKNVVGARRSSWRVISSIEQKTERNEKKQQMGKEYREKIEAELQDICNDVLFFRMPHSKTTLRKYCSVYEAWTPSELLLLSCWTNILFPMLHNQKVRCST

SEQ ID NO: 851351 - protein, 124 aa, Homo sapiens; identical to SEQ ID NO: 851341

SEQ ID NO: 851352 - protein, 69 aa, Homo sapiens
HEFQESLEFHSKRLYLAKTAFDEAIAELDTLNEESYKDSTLIMQLLRDNLTLWTSENQGDEGDAGEGEN

SEQ ID NO: 851353 - protein, 125 aa, Homo sapiens
MNTEIILGIFLKWHLETTNKPLCRTPSRLTRKHLKLVRTEMQPTHPIRLGLALNFSVFYYEILNSPEKACSLAKTAFDEAIAELDTLNEESYKDSTLIMQLLRDNLTLWTSENQGDEGDAGEGEN

SEQ ID NO: 851354 - protein, 182 aa, Homo sapiens; identical to SEQ ID NO: 851340

SEQ ID NO: 851355 - protein, 182 aa, Homo sapiens; identical to SEQ ID NO: 851340

SEQ ID NO: 851356 - protein, 182 aa, Homo sapiens; identical to SEQ ID NO: 851340

SEQ ID NO: 851357 - protein, 182 aa, Homo sapiens; identical to SEQ ID NO: 851340

SEQ ID NO: 851358 - protein, 182 aa, Homo sapiens; identical to SEQ ID NO: 851340

SEQ ID NO: 851359 - protein, 214 aa, Homo sapiens
  misc_feature (10)..(10): Xaa can be any naturally occurring amino acid
  misc_feature (12)..(12): Xaa can be any naturally occurring amino acid
LFPMLQNIIXDXLQFSLYLLTVLFVPCSPPTGMTMDKSELVQKAKLAEQAERYDDMAAAMKAVTEQGHELSNEERNLLSVAYKNVVGARRSSWRVISSIEQKTERNEKKQQMGKEYREKIEAELQDICNDVLELLDKYLIPNATQPESKVFYLNNEHGDYFRYLSEVASGDNKQTTVSNSQQAYQEAFEISKNRNAAYTPNSSWSGTKFLSLLL

SEQ ID NO: 851360 - protein, 182 aa, Homo sapiens; identical to SEQ ID NO: 851340

SEQ ID NO: 851361 - protein, 183 aa, Homo sapiens
SLCLQLSQHPTIILGDMKGIFEQVLSATTDPFRCSCICSQDYAILIGPPRDGRANFPGLWKLVSPCCAKSGSKTAIPAAVIQREASTLVGQYTEHSREMQPTHPIRLGLALNFSVFYYEILNSPEKACSLAKTAFDEAIAELDTLNEESYKDSTLIMQLLRDNLTLWTSENQGDEGDAGEGEN

SEQ ID NO: 851362 - protein, 85 aa, Homo sapiens
SRKGAREHGAVRCGGRRAGRRGEPPGSIKGLVYSSNFQNVKQLYALVCETQRYSAVLDAVISSAGLLSAKKLQPHLAKGRGGAGK

SEQ ID NO: 851363 - protein, 117 aa, Homo sapiens
MPSRQLEDPGAGTPSPVRLHALAGFQQRALCHALTFPSLQRLVYSMCSLCQEENEDMVPDALQQNPGAFRLAPALPARPHRGLSTFPGAEHCLRASPKTTLSGGFFVAVIERVEMPT

SEQ ID NO: 851364 - protein, 117 aa, Homo sapiens; identical to SEQ ID NO: 851363

SEQ ID NO: 851365 - protein, 117 aa, Homo sapiens; identical to SEQ ID NO: 851363

SEQ ID NO: 851366 - protein, 117 aa, Homo sapiens; identical to SEQ ID NO: 851363

SEQ ID NO: 851367 - protein, 117 aa, Homo sapiens; identical to SEQ ID NO: 851363

SEQ ID NO: 851368 - protein, 141 aa, Homo sapiens
SRKGAREHGAVRCGGRRAGRRGEPPGSIKGLVYSSNFQNVKQLYALVCETQRYSAVLDAVISSAGLLSAKKLQPHLAKASQLPRFVRVNTLKTCSVYVVISRDKVSPIRVGLPGWMECPGAISAHRNLCLLGSSDSPASAF

SEQ ID NO: 851369 - protein, 117 aa, Homo sapiens; identical to SEQ ID NO: 851363

SEQ ID NO: 851370 - protein, 117 aa, Homo sapiens; identical to SEQ ID NO: 851363

SEQ ID NO: 851371 - protein, 85 aa, Homo sapiens; identical to SEQ ID NO: 851362

SEQ ID NO: 851372 - protein, 117 aa, Homo sapiens; identical to SEQ ID NO: 851363

SEQ ID NO: 851373 - protein, 95 aa, Homo sapiens
SRKGAREHGAVRCGGRRAGRRGEPPGSIKGLVYSSNFQNVKQLYALVCETQRYSAVLDAVISSAGLLSAKKLQPHLAKALMTYKPSRGSIFSWTP

SEQ ID NO: 851374 - protein, 85 aa, Homo sapiens; identical to SEQ ID NO: 851362

SEQ ID NO: 851375 - protein, 60 aa, Homo sapiens
MHHRCHSRCIHLSSQTLHLVHPQFNLTDVTVFHPFGQATVNPQATVNPQATVNPQATVNP

SEQ ID NO: 851376 - protein, 117 aa, Homo sapiens; identical to SEQ ID NO: 851363

SEQ ID NO: 851377 - protein, 85 aa, Homo sapiens; identical to SEQ ID NO: 851362

SEQ ID NO: 851378 - protein, 117 aa, Homo sapiens; identical to SEQ ID NO: 851363

SEQ ID NO: 851379 - protein, 82 aa, Homo sapiens
SRKGAREHGAVRCGGRRAGRRGEPPGSIKGLVYSSNFQNVKQLYALVCETQRYSAVLDAVISSAGLLSAKKLQPHLAKGASV

SEQ ID NO: 851380 - protein, 117 aa, Homo sapiens; identical to SEQ ID NO: 851363

SEQ ID NO: 851381 - protein, 117 aa, Homo sapiens; identical to SEQ ID NO: 851363

SEQ ID NO: 851382 - protein, 117 aa, Homo sapiens; identical to SEQ ID NO: 851363

SEQ ID NO: 851383 - protein, 106 aa, Homo sapiens
SRKGAREHGAVRCGGRRAGRRGEPPGSIKGLVYSSNFQNVKQLYALVCETQRYSAVLDAVISSAGLLSAKKLQPHLAKGWMECPGAISAHRNLCLLGSSDSPASAF

SEQ ID NO: 851384 - protein, 85 aa, Homo sapiens; identical to SEQ ID NO: 851362

SEQ ID NO: 851385 - protein, 519 aa, Homo sapiens
MEGVLYKWTNYLSGWQPRWFLLCGGILSYYDSPEDAWKGCKGSIQMAVCEIQVHSVDNTRMDLIIPGEQYFYLKARSVAERQRWLVALGSAKACLTDSRTQKEKEFAENTENLKTKMSELRLYCDLLVQQVDKTKEVTTTGVSNSEEGIDVGTLLKSTCNTFLKTLEECMQIANAAFTSELLYRTPPGSPQLAMLKSSKMKHPIIPIHNSLERQMELSTCENGSLNMEINGEEEILMKNKNSLYLKSAEIDCSISSEENTDDNITVQGEIRKEDGMENLKNHDNNLTQSGSDSSCSPECLWEEGKEVIPTFFSTMNTSFSDIELLEDSGIPTEAFLASCYAVVPVLDKLGPTVFAPVKMDLVGNIKKVNQKYITNKEEFTTLQKIVLHEVEADVAQVRNSATEALLWLKRGLKFLKGFLTEVKNGEKDIQTALNNAYGKTLRQHHGWVVRGVFALALRAAPSYEDFVAALTVKEGDHQKEAFSIGMQRDLSLYLPAMEKQLAILDTLYEVHGLESDEVV

SEQ ID NO: 851386 - protein, 459 aa, Homo sapiens
MEGVLYKWTNYLSGWQPRWFLLCGGILSYYDSPEDAWKGCKGSIQMAVCEIQVHSVDNTRMDLIIPGEQYFYLKARSVAERQRWLVALGSAKACLTDSRTQKEKEFAENTENLKTKMSELRLYCDLLVQQVDKTKEVTTTGVSNSEEGIDVGTLLKSTCNTFLKTLEECMQIANAAFTSELLYRTPPGSPQLAMLKSSKMKHPIIPIHNSLERQMELSTCENGSLNMEINGEEEILMKNKNSLYLKSAEIDCSISSEENTDDNITVQGEIRKEDGMENLKNHDNNLTQSGSDSSCSPECLWEEGKEVIPTFFSTMNTSFSDIELLEDSGIPTEAFLASCYAVVPVLDKLGPTVFAPVKMDLVGNIKKVNQKYITNKEEFTTLQKIVLHEVEADVAQVRNSATEALLWLKRGLKFLKGFLTEVKNGEKDIQTALNNAYGKTLRQHHGWVVRGVFAGHTNV

SEQ ID NO: 851387 - protein, 455 aa, Homo sapiens
MEGVLYKWTNYLSGWQPRWFLLCGGILSYYDSPEDAWKGCKGSIQMAVCEIQVHSVDNTRMDLIIPGEQYFYLKARSVAERQRWLVALGSAKACLTDSRTQKEKEFAENTENLKTKMSELRLYCDLLVQQVDKTKEVTTTGVSNSEEGIDVGTLLKSTCNTFLKTLEECMQIANAAFTSELLYRTPPGSPQLAMLKSSKMKHPIIPIHNSLERQMELSTCENGSLNMEINGEEEILMKNKNSLYLKSAEIDCSISSEENTDDNITVQGEIRKEDGMENLKNHDNNLTQSGSDSSCSPECLWEEGKEVIPTFFSTMNTSFSDIELLEDSGIPTEAFLASCYAVVPVLDKLGPTVFAPVKMDLVGNIKKVNQKYITNKEEFTTLQKIVLHEVEADVAQVRNSATEALLWLKRGLKFLKGFLTEVKNGEKDIQTALNNAYGKTLRQHHGWVVRGVFAV

SEQ ID NO: 851388 - protein, 440 aa, Homo sapiens
MEGVLYKWTNYLSGWQPRWFLLCGGILSYYDSPEDAWKGCKGSIQMAVCEIQVHSVDNTRMDLIIPGEQYFYLKARSVAERQRWLVALGSAKACLTDSRTQKEKEFAENTENLKTKMSELRLYCDLLVQQVDKTKEVTTTGVSNSEEGIDVGTLLKSTCNTFLKTLEECMQIANAAFTSELLYRTPPGSPQLAMLKSSKMKHPIIPIHNSLERQMELSTCENGSLNMEINGEEEILMKNKNSLYLKSAEIDCSISSEENTDDNITVQGEIRKEDGMENLKNHDNNLTQSGSDSSCSPECLWEEGKEVIPTFFSTMNTSFSDIELLEDSGIPTEAFLASCYAVVPVLDKLGPTVFAPVKMDLVGNIKKVNQKYITNKEEFTTLQKIVLHEVEADVAQVRNSATEALLWLKRGLKFLKGFLTEVKNGEKDIQTALRNPTENT

SEQ ID NO: 851389 - protein, 439 aa, Homo sapiens
MEGVLYKWTNYLSGWQPRWFLLCGGILSYYDSPEDAWKGCKGSIQMAVCEIQVHSVDNTRMDLIIPGEQYFYLKARSVAERQRWLVALGSAKACLTDSRTQKEKEFAENTENLKTKMSELRLYCDLLVQQVDKTKEVTTTGVSNSEEGIDVGTLLKSTCNTFLKTLEECMQIANAAFTSELLYRTPPGSPQLAMLKSSKMKHPIIPIHNSLERQMELSTCENGSLNMEINGEEEILMKNKNSLYLKSAEIDCSISSEENTDDNITVQGEIRKEDGMENLKNHDNNLTQSGSDSSCSPECLWEEGKEVIPTFFSTMNTSFSDIELLEDSGIPTEAFLASCYAVVPVLDKLGPTVFAPVKMDLVGNIKKVNQKYITNKEEFTTLQKIVLHEVEADVAQVRNSATEALLWLKRGLKFLKGFLTEVKNGEKDIQTALSVGMWV

SEQ ID NO: 851390 - protein, 101 aa, Homo sapiens
HFHESPLYESVSHMPVTRGNVHTFPRVTPCPGTLSRHCNHKMLFIELAPGLGRGLPYSEQPTQERSSRERPGQGPCPNTNTSSPAQSSGSRPACPFFRKHF

SEQ ID NO: 851391 - protein, 101 aa, Homo sapiens
SAAAEGDANRPGPIRAAVARVPREFGSPGRQGNGLRCGLRAAGARLPRGGAADRRPRHGEAARPQETRGRDREEGKVRILPAPQVWTANLESWFLKFCLRF

SEQ ID NO: 851392 - protein, 101 aa, Homo sapiens; identical to SEQ ID NO: 851391

SEQ ID NO: 851393 - protein, 113 aa, Homo sapiens
MDEKRGAPTNTRARYIKTANESERITNTRNRQETTDNSKNEPARKNQDNHQTEGEKNRERDNKHHTKSRKTARHEKNNNTIERTTEEPQQRDSTEPDQKQNIDTRENRTNTIQ

SEQ ID NO: 851394 - protein, 70 aa, Homo sapiens
SAAAEGDANRPGPIRAAVARVPREFGSPGRQGNGLRCGLRAAGARLPRGGAADRRPRHGEAARPQNSRTD

SEQ ID NO: 851395 - protein, 101 aa, Homo sapiens; identical to SEQ ID NO: 851391

SEQ ID NO: 851396 - protein, 101 aa, Homo sapiens; identical to SEQ ID NO: 851391

SEQ ID NO: 851397 - protein, 101 aa, Homo sapiens; identical to SEQ ID NO: 851391

SEQ ID NO: 851398 - protein, 160 aa, Homo sapiens
MTRFKCHHLKGPVSLPSCALGPWKCGGCWPQERRGLSHPWPGGSIQSPRQPRSHAQGTWPALHSPVAAPKAIASGIPGGCCPGQRCQEASAEGTGLPGSRPGRPGCHTTAGAWSASSSTKRLRPPVLSPHSLVGLGRCRWSVPRGLWSGPGRALTVCLCP

SEQ ID NO: 851399 - protein, 1275 aa, Homo sapiens
MLRSTGFFRAIDCPYWSGAPGGPCRRPYCHFRHRGARGPGAPGDGGEAPPAAVKAAPDASVPALCGSVCGTGSEDSESEGGGVEAAWDGCETALQDLGLSMAPSVTGLGYDPYNPELPKPPAQRENGTLGLGEEPRPDVLELELVNQAIEAVRSEVELEQRRYRELLETTREHRSAEAPALAPRGPNASPTVGPDEDAFPLAFDYSPGSHGLLSPDAGYQPTPLAAPAEPGSKYSLASLDRGQGRGGGGGGALEYVPKAVSQPRRHSRPVPSGKYVVDNSRPPTDLEYDPLSNYSARHLSRASSRDERAAKRPRGSRGSEPYTPAPKKLCDPFGSCDARFSDSEDEAATVPGNEPTTASTPKARADPEIKATGQPPSKEGLEAEGGGLRETKETAVQCDVGDLQPPPAKPASPAQVQSSQDGGCPKEGKPKKKKTGAPPAPSCKDGAQGKDKTKDKGRGRPVEKPRADKKGPQASSPRRKAERPEGTKKKPSSATPVATSGKGRPDRPARRPSPTSGDSRPAAGRGPPRPLQLPDRKSTKAPSGKLVERKARSLDEGASQDAPKLKKRALSHADLFGDESEDEAAGPGVPSVWPSALPSLSSDSDSDSDSSLGFPEAQGPPKRLKASPPPSPAPSSSSSSSSSTSSAGADVDYSALEKEVDFDSDPMEECLRIFNESTSVKTEDRGRLARQPPKEEKSEEKGLSGLTTLFPGQKRRISHLSKQGQEVEPPRRGPAVPPARPPTAQEVCYLRAQQAQRASASLLQAPARLAEKSPSVHISAPGEKRRIAHIPNPRLAAAPTGAKRTLAASGSQSSNGPEPGGQQLKTRTLSGMASKTTTTIIPKRIAHSPSLQSLKKPIIPKEFGGKVPTVIRQRYLNLFIEECLKFCTSNQEAIEKALNEEKVAYDRSPSKNIYLNVAVNTLKKLRGLAPSAVPGLSKTSGRRVVSHEVVLGGRLAAKTSFSLSRPSSPRVEDLKGAALYSRLREYLLTQDQLKENGYPFPHPERPGGAIIFTAEEKRPKDSSCRTCCRCGTEYLVSSSGRCIRDEECYYHWGRLRRNRVAGGWETQYMCCSAAAGSVGCQVAKQHVQDGRKERLEGFVKTFEKELSGDTHPGIYALDCEMSYTTYGLELTRVTVVDTDVHVVYDTFVKPDNEIVDYNTRFSGVTEADLADTSVTLRDVQAVLLSMFSADTILIGHSLESDLLALKVIHSTVVDTSVLFPHRLGLPYKRSLRNLMADYLRQIIQDNVDGHSSSEDAGACMHLVIWKVREDAKTKR

SEQ ID NO: 851400 - protein, 1227 aa, Homo sapiens
MLRSTGFFRAIDCPYWSGAPGGPCRRPYCHFRHRGARGPGAPGDGGEAPPAAGLGYDPYNPELPKPPAQRENGTLGLGEEPRPDVLELELVNQAIEAVRSEVELEQRRYRELLETTREHRSAEAPALAPRGPNASPTVGPDEDAFPLAFDYSPGSHGLLSPDAGYQPTPLAAPAEPGSKYSLASLDRGQGRGGGGGGALEYVPKAVSQPRRHSRPVPSGKYVVDNSRPPTDLEYDPLSNYSARHLSRASSRDERAAKRPRGSRGSEPYTPAPKKLCDPFGSCDARFSDSEDEAATVPGNEPTTASTPKARADPEIKATGQPPSKEGLEAEGGGLRETKETAVQCDVGDLQPPPAKPASPAQVQSSQDGGCPKEGKPKKKKTGAPPAPSCKDGAQGKDKTKDKGRGRPVEKPRADKKGPQASSPRRKAERPEGTKKKPSSATPVATSGKGRPDRPARRPSPTSGDSRPAAGRGPPRPLQLPDRKSTKAPSGKLVERKARSLDEGASQDAPKLKKRALSHADLFGDESEDEAAGPGVPSVWPSALPSLSSDSDSDSDSSLGFPEAQGPPKRLKASPPPSPAPSSSSSSSSSTSSAGADVDYSALEKEVDFDSDPMEECLRIFNESTSVKTEDRGRLARQPPKEEKSEEKGLSGLTTLFPGQKRRISHLSKQGQEVEPPRRGPAVPPARPPTAQEVCYLRAQQAQRASASLLQAPARLAEKSPSVHISAPGEKRRIAHIPNPRLAAAPTGAKRTLAASGSQSSNGPEPGGQQLKTRTLSGMASKTTTTIIPKRIAHSPSLQLLPSLQSLKKPIIPKEFGGKVPTVIRQRYLNLFIEECLKFCTSNQEAIEKALNEEKVAYDRSPSKNIYLNVAVNTLKKLRGLAPSAVPGLSKTSGRRVVSHEVVLGGRLAAKTSFSLSRPSSPRVEDLKGAALYSRLREYLLTQDQLKENGYPFPHPERPGGAIIFTAEEKRPKDSSCRTCCRCGTEYLVSSSGRCIRDEECYYHWGRLRRNRVAGGWETQYMCCSAAAGSVGCQVAKQHVQDGRKERLEGFVKTFEKELSGDTHPGIYALDCEMSYTTYGLELTRVTVVDTDVHVVYDTFVKPDNEIVDYNTRFSGVTEADLADTSVTLRDVQAVLLSMFSADTILIGHSLESDLLALKVIHSTVVDTSVLFPHRLGLPYKRSLRNLMADYLRQIIQDNVDGHSSSEDAGACMHLVIWKVREDAKTKR

SEQ ID NO: 851401 - protein, 1401 aa, Homo sapiens
MLRSTGFFRAIDCPYWSGAPGGPCRRPYCHFRHRGARGPGAPGDGGEAPPAAGLGYDPYNPELPKPPAQRENGTLGLGEEPRPDVLELELVNQAIEAVRSEVELEQRRYRELLETTREHRSAEAPALAPRGPNASPTVGPDEDAFPLAFDYSPGSHGLLSPDAGYQPTPLAAPAEPGSKYSLASLDRGQGRGGGGGGALEYVPKAVSQPRRHSRPVPSGKYVVDNSRPPTDLEYDPLSNYSARHLSRASSRDERAAKRPRGSRGSEPYTPAPKKLCDPFGSCDARFSDSEDEAATVPGNEPTTASTPKARADPEIKATGQPPSKEGLEAEGGGLRETKETAVQCDVGDLQPPPAKPASPAQVQSSQDGGCPKEGKPKKKKTGAPPAPSCKDGAQGKDKTKDKGRGRPVEKPRADKKGPQASSPRRKAERPEGTKKKPSSATPVATSGKGRPDRPARRPSPTSGDSRPAAGRGPPRPLQLPDRKSTKAPSGKLVERKARSLDEGASQDAPKLKKRALSHADLFGDESEDEAAGPGVPSVWPSALPSLSSDSDSDSDSSLGFPEAQGPPKRLKASPPPSPAPSSSSSSSSSTSSAGADVDYSALEKEVDFDSDPMEECLRIFNESTSVKTEDRGRLARQPPKEEKSEEKGLSGLTTLFPGQKRRISHLSKQGQEVEPPRRGPAVPPARPPTAQEVCYLRAQQAQRASASLLQAPARLAEKSPSVHISAPGEKRRIAHIPNPRLAAAPTGAKRTLAASGSQSSNGPEPGGQQLKTRTLSGMASKTTTTIIPKRIAHSPSLQSLKKPIIPKEFGGKVPTVIRQRYLNLFIEECLKFCTSNQEAIEKALNEEKVAYDRSPSKNIYLNVAVNTLKKLRGLAPSAVPGLSKTSGRRVVSHEVVLGGRLAAKTSFSLSRPSSPRVEDLKGAALYSRLREYLLTQDQLKENGYPFPHPERPGGAIIFTAEEKRPKDSSCRTCCRCGTEYLVSSSGRCIRDEECYYHWGRLRRNRVAGGWETQYMCCSAAAGSVGCQVAKQHVQDGRKERLEGFVKTFEKELSGDTHPGIYALDCEMSYTTYGLELTRVTVVDTDVHVVYDTFVKPDNEIVDYNTRFSGVTEADLADTSVTLRDVQAVLLSMFSADTILIGHSLESDLLALKVPCRPGPARFSSRTCAGPTCADLCRCPQVIHSTVVDTSVLFPHRLGLPYKRSLRNLMADYLRQIIQDNGECRCLPWGRPCAGAGCSPHLPRSGWAQLQRGRRRLHAPGDLEGSRRRQDQAMTPARLPPASPAVPLVLSPMPLPKQCNKSPVTRPPGRGSPEQRDELAARERPAQPTPAHVLPHPSAGPHPLPPSPLASLETAADGDQDRARPHPARSPSCPSCQALPPGWWPAPLLLTWVAGRACPRFV

SEQ ID NO: 851402 - protein, 1249 aa, Homo sapiens
MLRSTGFFRAIDCPYWSGAPGGPCRRPYCHFRHRGARGPGAPGDGGEAPPAAGLGYDPYNPELPKPPAQRENGTLGLGEEPRPDVLELELVNQAIEAVRSEVELEQRRYRELLETTREHRSAEAPALAPRGPNASPTVGPDEDAFPLAFDYSPGSHGLLSPDAGYQPTPLAAPAEPGSKYSLASLDRGQGRGGGGGGALEYVPKAVSQPRRHSRPVPSGKYVVDNSRPPTDLEYDPLSNYSARHLSRASSRDERAAKRPRGSRGSEPYTPAPKKLCDPFGSCDARFSDSEDEAATVPGNEPTTASTPKARADPEIKATGQPPSKEGLEAEGGGLRETKETAVQCDVGDLQPPPAKPASPAQVQSSQDGGCPKEGKPKKKKTGAPPAPSCKDGAQGKDKTKDKGRGRPVEKPRADKKGPQASSPRRKAERPEGTKKKPSSATPVATSGKGRPDRPARRPSPTSGDSRPAAGRGPPRPLQLPDRKSTKAPSGKLVERKARSLDEGASQDAPKLKKRALSHADLFGDESEDEAAGPGVPSVWPSALPSLSSDSDSDSDSSLGFPEAQGPPKRLKASPPPSPAPSSSSSSSSSTSSAGADVDYSALEKEVDFDSDPMEECLRIFNESTSVKTEDRGRLARQPPKEEKSEEKGLSGLTTLFPGQKRRISHLSKQGQEVEPPRRGPAVPPARPPTAQEVCYLRAQQAQRASASLLQAPARLAEKSPSVHISAPGEKRRIAHIPNPRLAAAPTGAKRTLAASGSQSSNGPEPGGQQLKTRTLSGMASKTTTTIIPKRIAHSPSLQSLKKPIIPKEFGGKVPTVIRQRYLNLFIEECLKFCTSNQEAIEKALNEEKVAYDRSPSKNIYLNVAVNTLKKLRGLAPSAVPGLSKTSGRRVVSHEVVLGGRLAAKTSFSLSRPSSPRVEDLKGAALYSRLREYLLTQDQLKENGYPFPHPERPGGAIIFTAEEKRPKDSSCRTCCRCGTEYLVSSSGRCIRDEECYYHWGRLRRNRVAGGWETQYMCCSAAAGSVGCQVAKQHVQDGRKERLEGFVKTFEKELSGDTHPGIYALDCEMSYTTYGLELTRVTVVDTDVHVVYDTFVKPDNEIVDYNTRFSGVTEADLADTSVTLRDVQAVLLSMFSADTILIGHSLESDLLALKVPCRPGPARFSSRTCAGPTCADLCRCPQVIHSTVVDTSVLFPHRLGLPYKRSLRNLMADYLRQIIQDNVDGHSSSEDAGACMHLVIWKVREDAKTKR

SEQ ID NO: 851403 - protein, 1221 aa, Homo sapiens
MLRSTGFFRAIDCPYWSGAPGGPCRRPYCHFRHRGARGPGAPGDGGEAPPAAGLGYDPYNPELPKPPAQRENGTLGLGEEPRPDVLELELVNQAIEAVRSEVELEQRRYRELLETTREHRSAEAPALAPRGPNASPTVGPDEDAFPLAFDYSPGSHGLLSPDAGYQPTPLAAPAEPGSKYSLASLDRGQGRGGGGGGALEYVPKAVSQPRRHSRPVPSGKYVVDNSRPPTDLEYDPLSNYSARHLSRASSRDERAAKRPRGSRGSEPYTPAPKKLCDPFGSCDARFSDSEDEAATVPGNEPTTASTPKARADPEIKATGQPPSKEGLEAEGGGLRETKETAVQCDVGDLQPPPAKPASPAQVQSSQDGGCPKEGKPKKKKTGAPPAPSCKDGAQGKDKTKDKGRGRPVEKPRADKKGPQASSPRRKAERPEGTKKKPSSATPVATSGKGRPDRPARRPSPTSGDSRPAAGRGPPRPLQLPDRKSTKAPSGKLVERKARSLDEGASQDAPKLKKRALSHADLFGDESEDEAAGPGVPSVWPSALPSLSSDSDSDSDSSLGFPEAQGPPKRLKASPPPSPAPSSSSSSSSSTSSAGADVDYSALEKEVDFDSDPMEECLRIFNESTSVKTEDRGRLARQPPKEEKSEEKGLSGLTTLFPGQKRRISHLSKQGQEVEPPRRGPAVPPARPPTAQEVCYLRAQQAQRASASLLQAPARLAEKSPSVHISAPGEKRRIAHIPNPRLAAAPTGAKRTLAASGSQSSNGPEPGGQQLKTRTLSGMASKTTTTIIPKRIAHSPSLQSLKKPIIPKEFGGKVPTVIRQRYLNLFIEECLKFCTSNQEAIEKALNEEKVAYDRSPSKNIYLNVAVNTLKKLRGLAPSAVPGLSKTSGRRVVSHEVVLGGRLAAKTSFSLSRPSSPRVEDLKGAALYSRLREYLLTQDQLKENGYPFPHPERPGGAIIFTAEEKRPKDSSCRTCCRCGTEYLVSSSGRCIRDEECYYHWGRLRRNRVAGGWETQYMCCSAAAGSVGCQVAKQHVQDGRKERLEGFVKTFEKELSGDTHPGIYALDCEMSYTTYGLELTRVTVVDTDVHVVYDTFVKPDNEIVDYNTRFSGVTEADLADTSVTLRDVQAVLLSMFSADTILIGHSLESDLLALKVIHSTVVDTSVLFPHRLGLPYKRSLRNLMADYLRQIIQDNVDGHSSSEDAGACMHLVIWKVREDAKTKR

SEQ ID NO: 851404 - protein, 1080 aa, Homo sapiens
MLRSTGFFRAIDCPYWSGAPGGPCRRPYCHFRHRGARGPGAPGDGGEAPPAAGLGYDPYNPELPKPPAQRENGTLGLGEEPRPDVLELELVNQAIEAVRSEVELEQRRYRELLETTREHRSAEAPALAPRGPNASPTVGPDEDAFPLAFDYSPGSHGLLSPDAGYQPTPLAAPAEPGSKYSLASLDRGQGRGGGGGGALEYVPKAVSQPRRHSRPVPSGKYVVDNSRPPTDLEYDPLSNYSARHLSRASSRDERAAKRPRGSRGSEPYTPAPKKLCDPFGSCDARFSDSEDEAATVPGNEPTTASTPKARADPEIKATGQPPSKEGLEAEGGGLRETKETAVQCDVGDLQPPPAKPASPAQVQSSQDGGCPKEGKPKKKKTGAPPAPSCKDGAQGKDKTKDKGRGRPVEKPRADKKGPQASSPRRKAERPEGTKKKPSSATPVATSGKGRPDRPARRPSPTSGDSRPAAGRGPPRPLQLPDRKSTKAPSGKLVERKARSLDEGASQDAPKLKKRALSHADLFGDESEDEAAGPGVPSVWPSALPSLSSDSDSDSDSSLGFPEAQGPPKRLKASPPPSPAPSSSSSSSSSTSSAGADVDYSALEKEVDFDSDPMEECLRIFNESTSVKTEDRGRLARQPPKEEKSEEKGLSGLTTLFPGQKRRISHLSKQGQEVEPPRRGPAVPPARPPTAQEVCYLRAQQAQRASASLLQAPARLAEKSPSVHISAPGEKRRIAHIPNPRLAAAPTGAKRTLAASGSQSSNGPEPGGQQLKTRTLSGMASKTTTTIIPKRIAHSPSLQSLKKPIIPKEFGGKVPTVIRQRYLNLFIEECLKFCTSNQEAIEKALNEEKVAYDRSPSKNIYLNVAVNTLKKLRGLAPSAVPGLSKTSGRRVVSHEVVLGGRLAAKTSFSLSRPSSPRVEDLKGAALYSRLREYLLTQDQLKENGYPFPHPERPGGAIIFTAEEKRPKDSSCRTCCRCGTEYLVSSSGRCIRDEECYYHWGRLRRNRVAGGWETQYMCCSAAAGSVGCQVAKQHVQDGRKERLEGFVKTFEKELSGDTHPGIYALDCEMVRLFSAQRRVQDW

SEQ ID NO: 851405 - protein, 97 aa, Homo sapiens
GRGCLVLRHVVMGSHSPCAHTPCAPPAPTGAKRTLAASGSQSSNGPEPGGQQLKTRTLSGMASKTTTTIIPKRIAHSPSLQVAPPISARTTTPKTTP

SEQ ID NO: 851406 - protein, 1221 aa, Homo sapiens; identical to SEQ ID NO: 851403

SEQ ID NO: 851407 - protein, 97 aa, Homo sapiens
  misc_feature (11)..(11): Xaa can be any naturally occurring amino acid
RIGGAPGRRAXWRDLQSHCYGEEEGQGMLHTLTFEKQLHKPSEIRFQQRRTGSEDSESEGGGVEAAWDGCETALQDLGLSMAPSVTGKGDFTPSRAP

SEQ ID NO: 851408 - protein, 424 aa, Homo sapiens
MSLKKPIIPKEFGGKVPTVIRQRYLNLFIEECLKFCTSNQEAIEKALNEEKVAYDRSPSKNIYLNVAVNTLKKLRGLAPSAVPGLSKTSGRRVVSHEVVLGGRLAAKTSFSLSRPSSPRVEDLKGAALYSRLREYLLTQDQLKENGYPFPHPERPGGAIIFTAEEKRPKDSSCRTCCRCGTEYLVSSSGRCIRDEECYYHWGRLRRNRVAGGWETQYMCCSAAAGSVGCQVAKQHVQDGRKERLEGFVKTFEKELSGDTHPGIYALDCEMSYTTYGLELTRVTVVDTDVHVVYDTFVKPDNEIVDYNTRFSGVTEADLADTSVTLRDVQAVLLSMFSADTILIGHSLESDLLALKVIHSTVVDTSVLFPHRLGLPYKRSLRNLMADYLRQIIQDNVDGHSSSEDAGACMHLVIWKVREDAKTKR

SEQ ID NO: 851409 - protein, 1221 aa, Homo sapiens; identical to SEQ ID NO: 851403

SEQ ID NO: 851410 - protein, 559 aa, Homo sapiens
MTLVPLPSVSPAAPVLPWRVCPYCSQADLSQRTSLLPPAMGTASSRLRSPLEALWRPSPMAAFAFPLEFKETHYPQRVWGQSPHRHPPALSQPVHRGVSQVLYLQPGGHREGEVLEFLSGRSGGDYGVQGGPQTSPGLSAAAVTRSCLGEMQVPDPMATPPLGLPGTRQAWPQLGTAFPQALNEEKVAYDRSPSKNIYLNVAVNTLKKLRGLAPSAVPGLSKTSGRRVVSHEVVLGGRLAAKTSFSLSRPSSPRVEDLKGAALYSRLREYLLTQDQLKENGYPFPHPERPGGAIIFTAEEKRPKDSSCRTCCRCGTEYLVSSSGRCIRDEECYYHWGRLRRNRVAGGWETQYMCCSAAAGSVGCQVAKQHVQDGRKERLEGFVKTFEKELSGDTHPGIYALDCEMSYTTYGLELTRVTVVDTDVHVVYDTFVKPDNEIVDYNTRFSGVTEADLADTSVTLRDVQAVLLSMFSADTILIGHSLESDLLALKVIHSTVVDTSVLFPHRLGLPYKRSLRNLMADYLRQIIQDNVDGHSSSEDAGACMHLVIWKVREDAKTKR

SEQ ID NO: 851411 - protein, 1034 aa, Homo sapiens
MLRSTGFFRAIDCPYWSGAPGGPCRRPYCHFRHRGARGPGAPGDGGEAPPAAGLGYDPYNPELPKPPAQRENGTLGLGEEPRPDVLELELVNQAIEAVRSEVELEQRRYRELLETTREHRSAEAPALAPRGPNASPTVGPDEDAFPLAFDYSPGSHGLLSPDAGYQPTPLAAPAEPGSKYSLASLDRGQGRGGGGGGALEYVPKAVSQPRRHSRPVPSGKYVVDNSRPPTDLEYDPLSNYSARHLSRASSRDERAAKRPRGSRGSEPYTPAPKKLCDPFGSCDARFSDSEDEAATVPGNEPTTASTPKARADPEIKATGQPPSKEGLEAEGGGLRETKETAVQCDVGDLQPPPAKPASPAQVQSSQDGGCPKEGKPKKKKTGAPPAPSCKDGAQGKDKTKDKGRGRPVEKPRADKKGPQASSPRRKAERPEGTKKKPSSATPVATSGKGRPDRPARRPSPTSGDSRPAAGRGPPRPLQLPDRKSTKAPSGKLVERKARSLDEGASQDAPKLKKRALSHADLFGDESEDEAAGPGVPSVWPSALPSLSSDSDSDSDSSLGFPEAQGPPKRLKASPPPSPAPSSSSSSSSSTSSAGADVDYSALEKEVDFDSDPMEECLRIFNESTSVKTEDRGRLARQPPKEEKSEEKGLSGLTTLFPGQKRRISHLSKQGQEVEPPRRGPAVPPARPPTAQEVCYLRAQQAQRASASLLQAPARLAEKSPSVHISAPGEKRRIAHIPNPRLAAAPTGAKRTLAASGSQSSNGPEPGGQQLKTRTLSGMASKTTTTIIPKRIAHSPSLQSLKKPIIPKEFGGKVPTVIRQRYLNLFIEECLKFCTSNQEAIEKALNEEKVAYDRSPSKNIYLNVAVNTLKKLRGLAPSAVPGLSKTSGRRVVSHEVVLGGRLAAKTSFSLSRPSSPRVEDLKGAALYSRLREYLLTQDQLKENGYPFPHPERPGGAIIFTAEEKRPKDSSCRTCCRCGTEYLVSSSGRCIRDEECYYHWGRLRRNRVAGGWETQYMCCSAAAGSVGCQVAKGPNQ

SEQ ID NO: 851412 - protein, 121 aa, Homo sapiens
RARLQGGDMQAIFIISLHNPAVFTRGAAAQESCLTGALCFVVDMKTMETAEKLARFVAQVGPEIEQFSIENSTDNPDLCAWPKIYIFFRDKVLLCHPGAVARACNPSLAGLRQEDRLSPGA

SEQ ID NO: 851413 - protein, 1138 aa, Homo sapiens
AAVRRGAAETVGSFACPRLARRRRRVRSLRRRRGWLRARWSRGQNNMAARRITQETFDAVLQEKAKRYHMDASGEAVSETLQFKAQDLLRAVPRSRAEMYDDVHSDGRYSLSGSVAHSRDAGREGLRSDVFPGPSFRSSNPSISDDSYFRKECGRDLEFSHSDSRDQVIGHRKLGHFRSQDWKFALRGSWEQDFGHPVSQESSWSQEYSFGPSAVLGDFGSSRLIEKECLEKESRDYDVDHPGEADSVLRGSSQVQARGRALNIVDQEGSLLGKGETQGLLTAKGGVGKLVTLRNVSTKKIPTVNRITPKTQGTNQIQKNTPSPDVTLGTNPGTEDIQFPIQKIPLGLDLKNLRLPRRKMSFDIIDKSDVFSRFGIEIIKWAGFHTIKDDIKFSQLFQTLFELETETCAKMLASFKCSLKPEHRDFCFFTIKFLKHSALKTPRVDNEFLNMLLDKGAVKTKNCFFEIIKPFDKYIMRLQDRLLKSVTPLLMACNAYELSVKMKTLSNPLDLALALETTNSLCRKSLALLGQTFSLASSFRQEKILEAVGLQDIAPSPAAFPNFEDSTLFGREYIDHLKAWLVSSGCPLQVKKAEPEPMREEEKMIPPTKPEIQAKAPSSLSDAVPQRADHRVVGTIDQLVKRVIEGSLSPKERTLLKEDPAYWFLSDENSLEYKYYKLKLAEMQRMSENLRGADQKPTSADCAVRAMLYSRAVRNLKKKLLPWQRRGLLRAQGLRGWKARRATTGTQTLLSSGTRLKHHGRQAPGLSQAKPSLPDRNDAAKDCPPDPVGPSPQDPSLEASGPSPKPAGVDISEAPQTSSPCPSADIDMKTMETAEKLARFVAQVGPEIEQFSIENSTDNPDLWFLHDQNSSAFKFYRKKVFELCPSICFTSSPHNLHTGGGDTTGSQESPVDLMEGEAEFEDEPPPREAELESPEVMPEEEDEDDEDGGEEAPAPGGAGKSEGSTPADGLPGEAAEDDLAGAPALSQASSGTCFPRKRISSKSLKVGMIPAPKRVCLIQEPKVHEPVRIAYDRPRGRPMSKKKKPKDLDFAQQKLTDKNLGFQMLQKMGWKEGHGLGSLGKGIREPVSVYAAGSLGWEWVGPQSFHLQPAAWLLHSQDGLQLAVDFCFLNRRHLQMRS

SEQ ID NO: 851414 - protein, 1094 aa, Homo sapiens
AAVRRGAAETVGSFACPRLARRRRRVRSLRRRRGWLRARWSRDLLRAVPRSRAEMYDDVHSDGRYSLSGSVAHSRDAGREGLRSDVFPGPSFRSSNPSISDDSYFRKECGRDLEFSHSDSRDQVIGHRKLGHFRSQDWKFALRGSWEQDFGHPVSQESSWSQEYSFGPSAVLGDFGSSRLIEKECLEKESRDYDVDHPGEADSVLRGSSQVQARGRALNIVDQEGSLLGKGETQGLLTAKGGVGKLVTLRNVSTKKIPTVNRITPKTQGTNQIQKNTPSPDVTLGTNPGTEDIQFPIQKIPLGLDLKNLRLPRRKMSFDIIDKSDVFSRFGIEIIKWAGFHTIKDDIKFSQLFQTLFELETETCAKMLASFKCSLKPEHRDFCFFTIKFLKHSALKTPRVDNEFLNMLLDKGAVKTKNCFFEIIKPFDKYIMRLQDRLLKSVTPLLMACNAYELSVKMKTLSNPLDLALALETTNSLCRKSLALLGQTFSLASSFRQEKILEAVGLQDIAPSPAAFPNFEDSTLFGREYIDHLKAWLVSSGCPLQVKKAEPEPMREEEKMIPPTKPEIQAKAPSSLSDAVPQRADHRVVGTIDQLVKRVIEGSLSPKERTLLKEDPAYWFLSDENSLEYKYYKLKLAEMQRMSENLRGADQKPTSADCAVRAMLYSRAVRNLKKKLLPWQRRGLLRAQGLRGWKARRATTGTQTLLSSGTRLKHHGRQAPGLSQAKPSLPDRNDAAKDCPPDPVGPSPQDPSLEASGPSPKPAGVDISEAPQTSSPCPSADIDMKTMETAEKLARFVAQVGPEIEQFSIENSTDNPDLWFLHDQNSSAFKFYRKKVFELCPSICFTSSPHNLHTGGGDTTGSQESPVDLMEGEAEFEDEPPPREAELESPEVMPEEEDEDDEDGGEEAPAPGGAGKSEGSTPADGLPGEAAEDDLAGAPALSQASSGTCFPRKRISSKSLKVGMIPAPKRVCLIQEPKVHEPVRIAYDRPRGRPMSKKKKPKDLDFAQQKLTDKNLGFQMLQKMGWKEGHGLGSLGKGIREPVSVYAAGSLGWEWVGPQSFHLQPAAWLLHSQDGLQLAVDFCFLNRRHLQMRS

SEQ ID NO: 851415 - protein, 1121 aa, Homo sapiens
SGCAARRCGDRWFICMSPPRAAAAAGQNNMAARRITQETFDAVLQEKAKRYHMDASGEAVSETLQFKAQDLLRAVPRSRAEMYDDVHSDGRYSLSGSVAHSRDAGREGLRSDVFPGPSFRSSNPSISDDSYFRKECGRDLEFSHSDSRDQVIGHRKLGHFRSQDWKFALRGSWEQDFGHPVSQESSWSQEYSFGPSAVLGDFGSSRLIEKECLEKESRDYDVDHPGEADSVLRGSSQVQARGRALNIVDQEGSLLGKGETQGLLTAKGGVGKLVTLRNVSTKKIPTVNRITPKTQGTNQIQKNTPSPDVTLGTNPGTEDIQFPIQKIPLGLDLKNLRLPRRKMSFDIIDKSDVFSRFGIEIIKWAGFHTIKDDIKFSQLFQTLFELETETCAKMLASFKCSLKPEHRDFCFFTIKFLKHSALKTPRVDNEFLNMLLDKGAVKTKNCFFEIIKPFDKYIMRLQDRLLKSVTPLLMACNAYELSVKMKTLSNPLDLALALETTNSLCRKSLALLGQTFSLASSFRQEKILEAVGLQDIAPSPAAFPNFEDSTLFGREYIDHLKAWLVSSGCPLQVKKAEPEPMREEEKMIPPTKPEIQAKAPSSLSDAVPQRADHRVVGTIDQLVKRVIEGSLSPKERTLLKEDPAYWFLSDENSLEYKYYKLKLAEMQRMSENLRGADQKPTSADCAVRAMLYSRAVRNLKKKLLPWQRRGLLRAQGLRGWKARRATTGTQTLLSSGTRLKHHGRQAPGLSQAKPSLPDRNDAAKDCPPDPVGPSPQDPSLEASGPSPKPAGVDISEAPQTSSPCPSADIDMKTMETAEKLARFVAQVGPEIEQFSIENSTDNPDLWFLHDQNSSAFKFYRKKVFELCPSICFTSSPHNLHTGGGDTTGSQESPVDLMEGEAEFEDEPPPREAELESPEVMPEEEDEDDEDGGEEAPAPGGAGKSEGSTPADGLPGEAAEDDLAGAPALSQASSGTCFPRKRISSKSLKVGMIPAPKRVCLIQEPKVHEPVRIAYDRPRGRPMSKKKKPKDLDFAQQKLTDKNLGFQMLQKMGWKEGHGLGSLGKGIREPVSVYAAGSLGWEWVGPQSFHLQPAAWLLHSQDGLQLAVDFCFLNRRHLQMRS

SEQ ID NO: 851416 - protein, 1138 aa, Homo sapiens; identical to SEQ ID NO: 851413

SEQ ID NO: 851417 - protein, 1166 aa, Homo sapiens
AAVRRGAAETVGSFACPRLARRRRRVRSLRRRRGWLRARWSRGQNNMAARRITQETFDAVLQEKAKRYHMDASGEAVSETLQFKAQDLLRAVPRSRAEMYDDVHSDGRYSLSGSVAHSRDAGREGLRSDVFPGPSFRSSNPSISDDSYFRKECGRDLEFSHSDSRDQVIGHRKLGHFRSQDWKFALRGSWEQDFGHPVSQESSWSQEYSFGPSAVLGDFGSSRLIEKECLEKESRDYDVDHPGEADSVLRGSSQVQARGRALNIVDQEGSLLGKGETQGLLTAKGGVGKLVTLRNVSTKKIPTVNRITPKTQGTNQIQKNTPSPDVTLGTNPGTEDIQFPIQKIPLGLDLKNLRLPRRKMSFDIIDKSDVFSRFGIEIIKWAGFHTIKDDIKFSQLFQTLFELETETCAKMLASFKCSLKPEHRDFCFFTIKFLKHSALKTPRVDNEFLNMLLDKGAVKTKNCFFEIIKPFDKYIMRLQDRLLKSVTPLLMACNAYELSVKMKTLSNPLDLALALETTNSLCRKSLALLGQTFSLASSFRQEKILEAVGLQDIAPSPAAFPNFEDSTLFGREYIDHLKAWLVSSGCPLQVKKAEPEPMREEEKMIPPTKPEIQAKAPSSLSDAVPQRADHRVVGTIDQLVKRVIEGSLSPKERTLLKEDPAYWFLSDENSLEYKYYKLKLAEMQRMSENLRGADQKPTSADCAVRAMLYSRAVRNLKKKLLPWQRRGLLRAQGLRGWKARRATTGTQTLLSSGTRLKHHGRQAPGLSQAKPSLPDRNDAAKDCPPDPVGPSPQDPSLEASGPSPKPAGVDISEAPQTSSPCPSADIDMKTMETAEKLARFVAQVGPEIEQFSIENSTDNPDLWFLHDQNSSAFKFYRKKVFELCPSICFTSSPHNLHTGGGDTTGSQESPVDLMEGEAEFEDEPPPREAELESPEVMPEEEDEDDEDGGEEAPAPGGAGKSEGSTPADGLPGEAAEDDLAGAPALSQASSGTCFPRKRISSKSLKVGMIPAPKRVCLIQEPKEARTHQYSRAEACSQNGSLVPLQSPARFSNHVTVFQAPVHEPVRIAYDRPRGRPMSKKKKPKDLDFAQQKLTDKNLGFQMLQKMGWKEGHGLGSLGKGIREPVSVGTPSEGEGLGADGQEHKEDTFDVFRQRMMQMYRHKRANK

SEQ ID NO: 851418 - protein, 1138 aa, Homo sapiens; identical to SEQ ID NO: 851413

SEQ ID NO: 851419 - protein, 779 aa, Homo sapiens
MSFDIIDKSDVFSRFGIEIIKWAGFHTIKDDIKFSQLFQTLFELETETCAKMLASFKCSLKPEHRDFCFFTIKFLKHSALKTPRVDNEFLNMLLDKGAVKTKNCFFEIIKPFDKYIMRLQDRLLKSVTPLLMACNAYELSVKMKTLSNPLDLALALETTNSLCRKSLALLGQTFSLASSFRQEKILEAVGLQDIAPSPAAFPNFEDSTLFGREYIDHLKAWLVSSGCPLQVKKAEPEPMREEEKMIPPTKPEIQAKAPSSLSDAVPQRADHRVVGTIDQLVKRVIEGSLSPKERTLLKEDPAYWFLSDENSLEYKYYKLKLAEMQRMSENLRGADQKPTSADCAVRAMLYSRAVRNLKKKLLPWQRRGLLRAQGLRGWKARRATTGTQTLLSSGTRLKHHGRQAPGLSQAKPSLPDRNDAAKDCPPDPVGPSPQDPSLEASGPSPKPAGVDISEAPQTSSPCPSADIDMKTMETAEKLARFVAQVGPEIEQFSIENSTDNPDLWFLHDQNSSAFKFYRKKVFELCPSICFTSSPHNLHTGGGDTTGSQESPVDLMEGEAEFEDEPPPREAELESPEVMPEEEDEDDEDGGEEAPAPGGAGKSEGSTPADGLPGEAAEDDLAGAPALSQASSGTCFPRKRISSKSLKVGMIPAPKRVCLIQEPKVHEPVRIAYDRPRGRPMSKKKKPKDLDFAQQKLTDKNLGFQMLQKMGWKEGHGLGSLGKGIREPVSVYAAGSLGWEWVGPQSFHLQPAAWLLHSQDGLQLAVDFCFLNRRHLQMRS

SEQ ID NO: 851420 - protein, 1138 aa, Homo sapiens; identical to SEQ ID NO: 851413

SEQ ID NO: 851421 - protein, 292 aa, Homo sapiens
MLRDSIWLPNVFPLCPRFLHDQNSSAFKFYRKKVFELCPSICFTSSPHNLHTGGGDTTGSQESPVDLMEGEAEFEDEPPPREAELESPEVMPEEEDEDDEDGGEEAPAPGGAGKSEGSTPADGLPGEAAEDDLAGAPALSQASSGTCFPRKRISSKSLKVGMIPAPKRVCLIQEPKVHEPVRIAYDRPRGRPMSKKKKPKDLDFAQQKLTDKNLGFQMLQKMGWKEGHGLGSLGKGIREPVSVYAAGSLGWEWVGPQSFHLQPAAWLLHSQDGLQLAVDFCFLNRRHLQMRS

SEQ ID NO: 851422 - protein, 1138 aa, Homo sapiens; identical to SEQ ID NO: 851413

SEQ ID NO: 851423 - protein, 1138 aa, Homo sapiens; identical to SEQ ID NO: 851413

SEQ ID NO: 851424 - protein, 1138 aa, Homo sapiens; identical to SEQ ID NO: 851413

SEQ ID NO: 851425 - protein, 1138 aa, Homo sapiens; identical to SEQ ID NO: 851413

SEQ ID NO: 851426 - protein, 321 aa, Homo sapiens
AAVRRGAAETVGSFACPRLARRRRRVRSLRRRRGWLRARWSRGQNNMAARRITQETFDAVLQEKAKRYHMDASGEAVSETLQFKAQDLLRAVPRSRAEMYDDVHSDGRYSLSGSVAHSRDAGREGLRSDVFPGPSFRSSNPSISDDSYFRKECGRDLEFSHSDSRDQVIGHRKLGHFRSQDWKFALRGSWEQDFGHPVSQESSWSQEYSFGPSAVLGDFGSSRLIEKECLEKESRDYDVDHPGEADSVLRGSSQVQARGRALNIVDQEGSLLGKGETQGDSFHVGHGSGEWMELQAGLSPLTRARRTHLQRGSSALSPASP

SEQ ID NO: 851427 - protein, 709 aa, Homo sapiens
AAVRRGAAETVGSFACPRLARRRRRVRSLRRRRGWLRARWSRGQNNMAARRITQETFDAVLQEKAKRYHMDASGEAVSETLQFKAQDLLRAVPRSRAEMYDDVHSDGRYSLSGSVAHSRDAGREGLRSDVFPGPSFRSSNPSISDDSYFRKECGRDLEFSHSDSRDQVIGHRKLGHFRSQDWKFALRGSWEQDFGHPVSQESSWSQEYSFGPSAVLGDFGSSRLIEKECLEKESRDYDVDHPGEADSVLRGSSQVQARGRALNIVDQEGSLLGKGETQGLLTAKGGVGKLVTLRNVSTKKIPTVNRITPKTQGTNQIQKNTPSPDVTLGTNPGTEDIQFPIQKIPLGLDLKNLRLPRRKMSFDIIDKSDVFSRFGIEIIKWAGFHTIKDDIKFSQLFQTLFELETETCAKMLASFKCSLKPEHRDFCFFTIKFLKHSALKTPRVDNEFLNMLLDKGAVKTKNCFFEIIKPFDKYIMRLQDRLLKSVTPLLMACNAYELSVKMKTLSNPLDLALALETTNSLCRKSLALLGQTFSLASSFRQEKILEAVGLQDIAPSPAAFPNFEDSTLFGREYIDHLKAWLVSSGCPLQVKKAEPEPMREEEKMIPPTKPEIQAKAPSSLSDAVPQRADHRVVGTIDQLVKRVIEGSLSPKERTLLKEDPAYWFLSDENSLEYKYYKLKLAEMPLWVLYCLWLVSITGNHLENCSVFGP

SEQ ID NO: 851428 - protein, 102 aa, Homo sapiens
IDAPYLTMSLCDDPPEKKPKDLDFAQQKLTDKNLGFQMLQKMGWKEGHGLGSLGKGIREPVSVGTPSEGEGLGADGQEHKEDTFDVFRQRMMQMYRHKRANK

SEQ ID NO: 851429 - protein, 1092 aa, Homo sapiens
MAARRITQETFDAVLQEKAKRYHMDASGEAVSETLQFKAQDLLRAVPRSRAEMYDDVHSDGRYSLSGSVAHSRDAGREGLRSDVFPGPSFRSSNPSISDDSYFRKECGRDLEFSHSDSRDQVIGHRKLGHFRSQDWKFALRGSWEQDFGHPVSQESSWSQEYSFGPSAVLGDFGSSRLIEKECLEKESRDYDVDHPGEADSVLRGSSQVQARGRALNIVDQEGSLLGKGETQGLLTAKGGVGKLVTLRNVSTKKIPTVNRITPKTQGTNQIQKNTPSPDVTLGTNPGTEDIQFPIQKIPLGLDLKNLRLPRRKMSFDIIDKSDVFSRFGIEIIKWAGFHTIKDDIKFSQLFQTLFELETETCAKMLASFKCSLKPEHRDFCFFTIKFLKHSALKTPRVDNEFLNMLLDKGAVKTKNCFFEIIKPFDKYIMRLQDRLLKSVTPLLMACNAYELSVKMKTLSNPLDLALALETTNSLCRKSLALLGQTFSLASSFRQEKILEAVGLQDIAPSPAAFPNFEDSTLFGREYIDHLKAWLVSSGCPLQVKKAEPEPMREEEKMIPPTKPEIQAKAPSSLSDAVPQRADHRVVGTIDQLVKRVIEGSLSPKERTLLKEDPAYWFLSDENSLEYKYYKLKLAEMQRMSENLRGADQKPTSADCAVRAMLYSRAVRNLKKKLLPWQRRGLLRAQGLRGWKARRATTGTQTLLSSGTRLKHHGRQAPGLSQAKPSLPDRNDAAKDCPPDPVGPSPQDPSLEASGPSPKPAGVDISEAPQTSSPCPSADIDMKTMETAEKLARFVAQVGPEIEQFSIENSTDNPDLWFLHDQNSSAFKFYRKKVFELCPSICFTSSPHNLHTGGGDTTGSQESPVDLMEGEAEFEDEPPPREAELESPEVMPEEEDEDDEDGGEEAPAPGGAGKSEGSTPADGLPGEAAEDDLAGAPALSQASSGTCFPRKRISSKSLKVGMIPAPKRVCLIQEPKVHEPVRIAYDRPRGRPMSKKKKPKDLDFAQQKLTDKNLGFQMLQKMGWKEGHGLGSLGKGIREPVSVYAAGSLGWEWVGPQSFHLQPAAWLLHSQDGLQLAVDFCFLNRRHLQMRS

SEQ ID NO: 851430 - protein, 1092 aa, Homo sapiens; identical to SEQ ID NO: 851429

SEQ ID NO: 851431 - protein, 1128 aa, Homo sapiens
AAVRRGAAETVGSFACPRLARRRRRVRSLRRRRGWLRARWSRGQNNMAARRITQETFDAVLQEKAKRYHMDASGEAVSETLQFKAQDLLRAVPRSRAEMYDDVHSDGRYSLSGSVAHSRDAGREGLRSDVFPGPSFRSSNPSISDDSYFRKECGRDLEFSHSDSRDQVIGHRKLGHFRSQDWKFALRGSWEQDFGHPVSQESSWSQEYSFGPSAVLGDFGSSRLIEKECLEKESRDYDVDHPGEADSVLRGSSQVQARGRALNIVDQEGSLLGKGETQGLLTAKGGVGKLVTLRNVSTKKIPTVNRITPKTQGTNQIQKNTPSPDVTLGTNPGTEDIQFPIQKIPLGLDLKNLRLPRRKMSFDIIDKSDVFSRFGIEIIKWAGFHTIKDDIKFSQLFQTLFELETETCAKMLASFKCSLKPEHRDFCFFTIKFLKHSALKTPRVDNEFLNMLLDKGAVKTKNCFFEIIKPFDKYIMRLQDRLLKSVTPLLMACNAYELSVKMKTLSNPLDLALALETTNSLCRKSLALLGQTFSLASSFRQEKILEAVGLQDIAPSPAAFPNFEDSTLFGREYIDHLKAWLVSSGCPLQVKKAEPEPMREEEKMIPPTKPEIQAKAPSSLSDAVPQRADHRVVGTIDQLVKRVIEGSLSPKERTLLKEDPAYWFLSDENSLEYKYYKLKLAEMQRMSENLRGADQKPTSADCAVRAMLYSRAVRNLKKKLLPWQRRGLLRAQGLRGWKARRATTGTQTLLSSGTRLKHHGRQAPGLSQAKPSLPDRNDAAKDCPPDPVGPSPQDPSLEASGPSPKPAGVDISEAPQTSSPCPSADIDMKTMETAEKLARFVAQVGPEIEQFSIENSTDNPDLWFLHDQNSSAFKFYRKKVFELCPSICFTSSPHNLHTGGGDTTGSQESPVDLMEGEAEFEDEPPPREAELESPEVMPEEEDEDDEDGGEEAPAPGGAGKSEGSTPADGLPGEAAEDDLAGAPALSQASSGTCFPRKRISSKSLKVGMIPAPKRVCLIQEPKVHEPVRIAYDRPRGRPMSKKKKPKDLDFAQQKLTDKNLGFQMLQKMGWKEGHGLGSLGKGIREPVSVGTPSEGEGLGADGQEHKEDTFDVFRQRMMQMYRHKRANK

SEQ ID NO: 851432 - protein, 1138 aa, Homo sapiens; identical to SEQ ID NO: 851413

SEQ ID NO: 851433 - protein, 1138 aa, Homo sapiens; identical to SEQ ID NO: 851413

SEQ ID NO: 851434 - protein, 386 aa, Homo sapiens
NLGPQQLKELYLAGRQLLRFSPAGNDAAKDCPPDPVGPSPQDPSLEASGPSPKPAGVDISEAPQTSSPCPSADIDMKTMETAEKLARFVAQVGPEIEQFSIENSTDNPDLWFLHDQNSSAFKFYRKKVFELCPSICFTSSPHNLHTGGGDTTGSQESPVDLMEGEAEFEDEPPPREAELESPEVMPEEEDEDDEDGGEEAPAPGGAGKSEGSTPADGLPGEAAEDDLAGAPALSQASSGTCFPRKRISSKSLKVGMIPAPKRVCLIQEPKVHEPVRIAYDRPRGRPMSKKKKPKDLDFAQQKLTDKNLGFQMLQKMGWKEGHGLGSLGKGIREPVSVYAAGSLGWEWVGPQSFHLQPAAWLLHSQDGLQLAVDFCFLNRRHLQMRS

SEQ ID NO: 851435 - protein, 1128 aa, Homo sapiens; identical to SEQ ID NO: 851431

SEQ ID NO: 851436 - protein, 1128 aa, Homo sapiens; identical to SEQ ID NO: 851431

SEQ ID NO: 851437 - protein, 1138 aa, Homo sapiens; identical to SEQ ID NO: 851413

SEQ ID NO: 851438 - protein, 1053 aa, Homo sapiens
AAVRRGAAETVGSFACPRLARRRRRVRSLRRRRGWLRARWSRGQNNMAARRITQETFDAVLQEKAKRYHMDASGEAVSETLQFKAQDLLRAVPRSRAEMYDDVHSDGRYSLSGSVAHSRDAGREGLRSDVFPGPSFRSSNPSISDDSYFRKECGRDLEFSHSDSRDQVIGHRKLGHFRSQDWKFALRGSWEQDFGHPVSQESSWSQEYSFGPSAVLGDFGSSRLIEKECLEKESRDYDVDHPGEADSVLRGSSQVQARGRALNIVDQEGSLLGKGETQGLLTAKGGVGKLVTLRNVSTKKIPTVNRITPKTQGTNQIQKNTPSPDVTLGTNPGTEDIQFPIQKIPLGLDLKNLRLPRRKMSFDIIDKSDVFSRFGIEIIKWAGFHTIKDDIKFSQLFQTLFELETETCAKMLASFKCSLKPEHRDFCFFTIKFLKHSALKTPRVDNEFLNMLLDKGAVKTKNCFFEIIKPFDKYIMRLQDRLLKSVTPLLMACNAYELSVKMKTLSNPLDLALALETTNSLCRKSLALLGQTFSLASSFRQEKILEAVGLQDIAPSPAAFPNFEDSTLFGREYIDHLKAWLVSSGCPLQVKKAEPEPMREEEKMIPPTKPEIQAKAPSSLSDAVPQRADHRVVGTIDQLVKRVIEGSLSPKERTLLKEDPAYWFLSDENSLEYKYYKLKLAEMQRMSENLRGADQKPTSADCAVRAMLYSRAVRNLKKKLLPWQRRGLLRAQGLRGWKARRATTGTQTLLSSGTRLKHHGRQAPGLSQAKPSLPDRNDAAKDCPPDPVGPSPQDPSLEASGPSPKPAGVDISEAPQTSSPCPSADIDMKTMETAEKLARFVAQVGPEIEQFSIENSTDNPDLWFLHDQNSSAFKFYRKKVFELCPSICFTSSPHNLHTGGGDTTGSQESPVDLMEGEAEFEDEPPPREAELESPEVMPEEEDEDDEDGGEEAPAPGGAGKSEGSTPADGLPGEAAEDDLAGAPALSQASSGTCFPRKRISSKSLKVGMIPAPKRVCLIQEPKEARTHQYSRAEACSQNGSLVPLQSPARFSNH

SEQ ID NO: 851439 - protein, 253 aa, Homo sapiens
MAAARATTPADGEEPAPEAEALAAARERSSRFLSGLELVKQGAEARVFRGRFQGRAAVIKHRFPKGYRHPALEARLGRRRTVQEARALLRCRRAGISAPVVFFVDYASNCLYMEEIEGSVTVRDYIQSTMETEKTPQGLSNLAKTIGQVLARMHDEDLIHGDLTTSNMLLKPPLEQLNIVLIDFGLSFISALPEDKGVDLYVLEKAFLSTHPNTETVFEAFLKSYSTSSKKARPVLKKLDEVRLRGRKRSMVG

SEQ ID NO: 851440 - protein, 253 aa, Homo sapiens; identical to SEQ ID NO: 851439

SEQ ID NO: 851441 - protein, 191 aa, Homo sapiens
NRSYENRCPLLAAASVVELVQEARALLRCRRAGISAPVVFFVDYASNCLYMEEIEGSVTVRDYIQSTMETEKTPQGLSNLAKTIGQVLARMHDEDLIHGDLTTSNMLLKPPLEQLNIVLIDFGLSFISALPEDKGVDLYVLEKAFLSTHPNTETVFEAFLKSYSTSSKKARPVLKKLDEVRLRGRKRSMVG

SEQ ID NO: 851442 - protein, 253 aa, Homo sapiens; identical to SEQ ID NO: 851439

SEQ ID NO: 851443 - protein, 253 aa, Homo sapiens; identical to SEQ ID NO: 851439

SEQ ID NO: 851444 - protein, 235 aa, Homo sapiens
MAAARATTPADGEEPAPEAEALAAARERSSRFLSGLELVKQGAEARVFRGRFQGRAAVIKHRFPKGYRHPALEARLGRRRTVQEARALLRCRRAGISAPVVFFVDYASNCLYMEEIEGSVTVRDYIQSTMETERMHDEDLIHGDLTTSNMLLKPPLEQLNIVLIDFGLSFISALPEDKGVDLYVLEKAFLSTHPNTETVFEAFLKSYSTSSKKARPVLKKLDEVRLRGRKRSMVG

SEQ ID NO: 851445 - protein, 277 aa, Homo sapiens
MSSCSRVALVTGANRGIGLAIARELCRQFSGDVVLTARDVARGQAAVQQLQAEGLSPRFHQLDIDDLQSIRALRDFLRKEYGGLNVLVNNAAVAFKSDDPMPFDIKAEMTLKTNFFATRNMCNELLPIMKPHGRVVNISSLQCLRAFENCSEDLQERFHSETLTEGDLVDLMKKFVEDTKNEVHEREGWPNSPYGVSKLGVTVLSRILARRLDEKRKADRILVNACCPGPVKTDMDGKDSIRTVEEGAETPVYLALLPPDATEPQGQLVHDKVVQNW

SEQ ID NO: 851446 - protein, 277 aa, Homo sapiens; identical to SEQ ID NO: 851445

SEQ ID NO: 851447 - protein, 147 aa, Homo sapiens
MSSCSRVALVTGANRGIGLAIARELCRQFSGDVVLTARDVARGQAAVQQLQAEGLSPRFHQLDIDDLQSIRALRDFLRKEYGGLNVLVNNAAVAFKSDDPMPFDIKAEMTLKTNFFATRNMCNELLPIMKPHGKPNVWTVGLHPSVR

SEQ ID NO: 851448 - protein, 918 aa, Homo sapiens
MLTLQTWLVQALFIFLTTESTGELLDPCGYISPESPVVQLHSNFTAVCVLKEKCMDYFHVNANYIVWKTNHFTIPKEQYTIINRTASSVTFTDIASLNIQLTCNILTFGQLEQNVYGITIISGLPPEKPKNLSCIVNEGKKMRCEWDGGRETHLETNFTLKSEWATHKFADCKAKRDTPTSCTVDYSTVYFVNIEVWVEAENALGKVTSDHINFDPVYKVKPNPPHNLSVINSEELSSILKLTWTNPSIKSVIILKYNIQYRTKDASTWSQIPPEDTASTRSSFTVQDLKPFTEYVFRIRCMKEDGKGYWSDWSEEASGITYEDRPSKAPSFWYKIDPSHTQGYRTVQLVWKTLPPFEANGKILDYEVTLTRWKSHLQNYTVNATKLTVNLTNDRYLATLTVRNLVGKSDAAVLTIPACDFQATHPVMDLKAFPKDNMLWVEWTTPRESVKKYILEWCVLSDKAPCITDWQQEDGTVHRTYLRGNLAESKCYLITVTPVYADGPGSPESIKAYLKQAPPSKGPTVRTKKVGKNEAVLEWDQLPVDVQNGFIRNYTIFYRTIIGNETAVNVDSSHTEYTLSSLTSDTLYMVRMAAYTDEGGKDGPEFTFTTPKFAQGEIEAIVVPVCLAFLLTTLLGVLFCFNKRDLIKKHIWPNVPDPSKSHIAQWSPHTPPRHNFNSKDQMYSDGNFTDVSVVEIEANDKKPFPEDLKSLDLFKKEKINTEGHSSGIGGSSCMSSSRPSISSSDENESSQNTSSTVQYSTVVHSGYRHQVPSVQVFSRSESTQPLLDSEERPEDLQLVDHVDGGDGILPRQQYFKQNCSQHESSPDISHFERSKQVSSVNEEDFVRLKQQISDHISQSCGSGQMKMFQEVSAADAFGPGTEGQVERFETVGMEAATDEGMPKSYLPQTVRQGGYMPQ

SEQ ID NO: 851449 - protein, 890 aa, Homo sapiens
MLTLQTWLVQALFIFLTTESTGELLDPCGYISPESPVVQLHSNFTAVCVLKEKCMDYFHVNANYIVWKTNHFTIPKEQYTIINRTASSVTFTDIASLNIQLTCNILTFGQLEQNVYGITIISGLPPEKPKNLSCIVNEGKKMRCEWDGGRETHLETNFTLKSEWATHKFADCKAKRDTPTSCTVDYSTVYFVNIEVWVEAENALGKVTSDHINFDPVYKVKPNPPHNLSVINSEELSSILKLTWTNPSIKSVIILKYNIQYRTKDASTWSQIPPEDTASTRSSFTVQDLKPFTEYVFRIRCMKEDGKGYWSDWSEEASGITYEDNIASFEANGKILDYEVTLTRWKSHLQNYTVNATKLTVNLTNDRYLATLTVRNLVGKSDAAVLTIPACDFQATHPVMDLKAFPKDNMLWVEWTTPRESVKKYILEWCVLSDKAPCITDWQQEDGTVHRTYLRGNLAESKCYLITVTPVYADGPGSPESIKAYLKQAPPSKGPTVRTKKVGKNEAVLEWDQLPVDVQNGFIRNYTIFYRTIIGNETAVNVDSSHTEYTLSSLTSDTLYMVRMAAYTDEGGKDGPEFTFTTPKFAQGEIEAIVVPVCLAFLLTTLLGVLFCFNKRDLIKKHIWPNVPDPSKSHIAQWSPHTPPRHNFNSKDQMYSDGNFTDVSVVEIEANDKKPFPEDLKSLDLFKKEKINTEGHSSGIGGSSCMSSSRPSISSSDENESSQNTSSTVQYSTVVHSGYRHQVPSVQVFSRSESTQPLLDSEERPEDLQLVDHVDGGDGILPRQQYFKQNCSQHESSPDISHFERSKQVSSVNEEDFVRLKQQISDHISQSCGSGQMKMFQEVSAADAFGPGTEGQVERFETVGMEAATDEGMPKSYLPQTVRQGGYMPQ

SEQ ID NO: 851450 - protein, 872 aa, Homo sapiens
MLTLQTWLVQALFIFLTTESTGELLDPCGYISPESPVVQLHSNFTAVCVLKEKCMDYFHVNANYIVWKTNHFTIPKEQYTIINRTASSVTFTDIASLNIQLTCNILTFGQLEQNVYGITIISGLPPEKPKNLSCIVNEGKKMRCEWDGGRETHLETNFTLKSEWATHKFADCKAKRDTPTSCTVDYSTVYFVNIEVWVEAENALGKVTSDHINFDPVYKVKPNPPHNLSVINSEELSSILKLTWTNPSIKSVIILKYNIQYRTKDASTWSQIPPEDTASTRSSFTVQDLKPFTEYVFRIRCMRKMVRDTGVTGVKKQVGSPMKITLPPFEANGKILDYEVTLTRWKSHLQNYTVNATKLTVNLTNDRYLATLTVRNLVGKSDAAVLTIPACDFQATHPVMDLKAFPKDNMLWVEWTTPRESVKKYILEWCVLSDKAPCITDWQQEDGTVHRTYLRGNLAESKCYLITVTPVYADGPGSPESIKAYLKQAPPSKGPTVRTKKVGKNEAVLEWDQLPVDVQNGFIRNYTIFYRTIIGNETAVNVDSSHTEYTLSSLTSDTLYMVRMAAYTDEGGKDGPEFTFTTPKFAQGEIEAIVVPVCLAFLLTTLLGVLFCFNKRDLIKKHIWPNVPDPSKSHIAQWSPHTPPRHNFNSKDQMYSDGNFTDVSVVEIEANDKKPFPEDLKSLDLFKKEKINTEGHSSGIGGSSCMSSSRPSISSSDENESSHQVPSVQVFSRSESTQPLLDSEERPEDLQLVDHVDGGDGILPRQQYFKQNCSQHESSPDISHFERSKQVSSVNEEDFVRLKQQISDHISQSCGSGQMKMFQEVSAADAFGPGTEGQVERFETVGMEAATDEGMPKSYLPQTVRQGGYMPQ

SEQ ID NO: 851451 - protein, 617 aa, Homo sapiens
MKEDGKGYWSDWSEEASGITYEDRPSKAPSFWYKIDPSHTQGYRTVQLVWKTLPPFEANGKILDYEVTLTRWKSHLQNYTVNATKLTVNLTNDRYLATLTVRNLVGKSDAAVLTIPACDFQATHPVMDLKAFPKDNMLWVEWTTPRESVKKYILEWCVLSDKAPCITDWQQEDGTVHRTYLRGNLAESKCYLITVTPVYADGPGSPESIKAYLKQAPPSKGPTVRTKKVGKNEAVLEWDQLPVDVQNGFIRNYTIFYRTIIGNETAVNVDSSHTEYTLSSLTSDTLYMVRMAAYTDEGGKDGPEFTFTTPKFAQGEIEAIVVPVCLAFLLTTLLGVLFCFNKRDLIKKHIWPNVPDPSKSHIAQWSPHTPPRHNFNSKDQMYSDGNFTDVSVVEIEANDKKPFPEDLKSLDLFKKEKINTEGHSSGIGGSSCMSSSRPSISSSDENESSQNTSSTVQYSTVVHSGYRHQVPSVQVFSRSESTQPLLDSEERPEDLQLVDHVDGGDGILPRQQYFKQNCSQHESSPDISHFERSKQVSSVNEEDFVRLKQQISDHISQSCGSGQMKMFQEVSAADAFGPGTEGQVERFETVGMEAATDEGMPKSYLPQTVRQGGYMPQ

SEQ ID NO: 851452 - protein, 946 aa, Homo sapiens
MLTLQTWLVQALFIFLTTESTGELLDPCGYISPESPVVQLHSNFTAVCVLKEKCMDYFHVNANYIVWKTNHFTIPKEQYTIINRTASSVTFTDIASLNIQLTCNILTFGQLEQNVYGITIISGLPPEKPKNLSCIVNEGKKMRCEWDGGRETHLETNFTLKSEWATHKFADCKAKRDTPTSCTVDYSTVYFVNIEVWVEAENALGKVTSDHINFDPVYKVKPNPPHNLSVINSEELSSILKLTWTNPSIKSVIILKYNIQYRTKDASTWSQIPPEDTASTRSSFTVQDLKPFTEYVFRIRCMKEDGKGYWSDWSEEASGITYEDRPSKAPSFWYKIDPSHTQGYRTVQLVWKTLPPFEANGKILDYEVTLTRWKSHLQNYTVNATKLTVNLTNDRYLATLTVRNLVGKSDAAVLTIPACDFQATHPVMDLKAFPKDNMLWVEWTTPRESVKKYILEWCVLSDKAPCITDWQQEDGTVHRTYLRGNLAESKCYLITVTPVYADGPGSPESIKAYLKQAPPSKGPTVRTKKVGKNEAVLEWDQLPVDVQNGFIRNYTIFYRTIIGNETAVNVDSSHTEYTLSSLTSDTLYMVRMAAYTDEGGKDGPEFTFTTPKFVSWIHYGFFTWLESCQRGPYSLVEEILQTQGEIEAIVVPVCLAFLLTTLLGVLFCFNKRDLIKKHIWPNVPDPSKSHIAQWSPHTPPRHNFNSKDQMYSDGNFTDVSVVEIEANDKKPFPEDLKSLDLFKKEKINTEGHSSGIGGSSCMSSSRPSISSSDENESSQNTSSTVQYSTVVHSGYRHQVPSVQVFSRSESTQPLLDSEERPEDLQLVDHVDGGDGILPRQQYFKQNCSQHESSPDISHFERSKQVSSVNEEDFVRLKQQISDHISQSCGSGQMKMFQEVSAADAFGPGTEGQVERFETVGMEAATDEGMPKSYLPQTVRQGGYMPQ

SEQ ID NO: 851453 - protein, 237 aa, Homo sapiens [sequence omitted]

SEQ ID NO: 851454 - protein, 918 aa, Homo sapiens; identical to SEQ ID NO: 851448

SEQ ID NO: 851455 - protein, 918 aa, Homo sapiens; identical to SEQ ID NO: 851448

SEQ ID NO: 851456 - protein, 918 aa, Homo sapiens; identical to SEQ ID NO: 851448

SEQ ID NO: 851457 - protein, 890 aa, Homo sapiens
MLTLQTWLVQALFIFLTTESTGELLDPCGYISPESPVVQLHSNFTAVCVLKEKCMDYFHVNANYIVWKTNHFTIPKEQYTIINRTASSVTFTDIASLNIQLTCNILTFGQLEQNVYGITIISGLPPEKPKNLSCIVNEGKKMRCEWDGGRETHLETNFTLKSEWATHKFADCKAKRDTPTSCTVDYSTVYFVNIEVWVEAENALGKVTSDHINFDPVYKVKPNPPHNLSVINSEELSSILKLTWTNPSIKSVIILKYNIQYRTKDASTWSQIPPEDTASTRSSFTVQDLKPFTEYVFRIRCMRKMVRDTGVTGVKKQVGSPMKITLPPFEANGKILDYEVTLTRWKSHLQNYTVNATKLTVNLTNDRYLATLTVRNLVGKSDAAVLTIPACDFQATHPVMDLKAFPKDNMLWVEWTTPRESVKKYILEWCVLSDKAPCITDWQQEDGTVHRTYLRGNLAESKCYLITVTPVYADGPGSPESIKAYLKQAPPSKGPTVRTKKVGKNEAVLEWDQLPVDVQNGFIRNYTIFYRTIIGNETAVNVDSSHTEYTLSSLTSDTLYMVRMAAYTDEGGKDGPEFTFTTPKFAQGEIEAIVVPVCLAFLLTTLLGVLFCFNKRDLIKKHIWPNVPDPSKSHIAQWSPHTPPRHNFNSKDQMYSDGNFTDVSVVEIEANDKKPFPEDLKSLDLFKKEKINTEGHSSGIGGSSCMSSSRPSISSSDENESSQNTSSTVQYSTVVHSGYRHQVPSVQVFSRSESTQPLLDSEERPEDLQLVDHVDGGDGILPRQQYFKQNCSQHESSPDISHFERSKQVSSVNEEDFVRLKQQISDHISQSCGSGQMKMFQEVSAADAFGPGTEGQVERFETVGMEAATDEGMPKSYLPQTVRQGGYMPQ

SEQ ID NO: 851458 - protein, 918 aa, Homo sapiens; identical to SEQ ID NO: 851448

SEQ ID NO: 851459 - protein, 740 aa, Homo sapiens
  misc_feature (1)..(1): Xaa can be any naturally occurring amino acid
  misc_feature (7)..(7): Xaa can be any naturally occurring amino acid
  misc_feature (12)..(12): Xaa can be any naturally occurring amino acid
  misc_feature (19)..(19): Xaa can be any naturally occurring amino acid
XINDSLXHLVSXNFKILDXSSELITDKLCGGLGFNFDPVYKVKPNPPHNLSVINSEELSSILKLTWTNPSIKSVIILKYNIQYRTKDASTWSQIPPEDTASTRSSFTVQDLKPFTEYVFRIRCMKEDGKGYWSDWSEEASGITYEDRPSKAPSFWYKIDPSHTQGYRTVQLVWKTLPPFEANGKILDYEVTLTRWKSHLQNYTVNATKLTVNLTNDRYLATLTVRNLVGKSDAAVLTIPACDFQATHPVMDLKAFPKDNMLWVEWTTPRESVKKYILEWCVLSDKAPCITDWQQEDGTVHRTYLRGNLAESKCYLITVTPVYADGPGSPESIKAYLKQAPPSKGPTVRTKKVGKNEAVLEWDQLPVDVQNGFIRNYTIFYRTIIGNETAVNVDSSHTEYTLSSLTSDTLYMVRMAAYTDEGGKDGPEFTFTTPKFAQGEIEAIVVPVCLAFLLTTLLGVLFCFNKRDLIKKHIWPNVPDPSKSHIAQWSPHTPPRHNFNSKDQMYSDGNFTDVSVVEIEANDKKPFPEDLKSLDLFKKEKINTEGHSSGIGGSSCMSSSRPSISSSDENESSQNTSSTVQYSTVVHSGYRHQVPSVQVFSRSESTQPLLDSEERPEDLQLVDHVDGGDGILPRQQYFKQNCSQHESSPDISHFERSKQVSSVNEEDFVRLKQQISDHISQSCGSGQMKMFQEVSAADAFGPGTEGQVERFETVGMEAATDEGMPKSYLPQTVRQGGYMPQ

SEQ ID NO: 851460 - protein, 918 aa, Homo sapiens; identical to SEQ ID NO: 851448

SEQ ID NO: 851461 - protein, 918 aa, Homo sapiens; identical to SEQ ID NO: 851448

SEQ ID NO: 851462 - protein, 918 aa, Homo sapiens; identical to SEQ ID NO: 851448

SEQ ID NO: 851463 - protein, 918 aa, Homo sapiens; identical to SEQ ID NO: 851448

SEQ ID NO: 851464 - protein, 241 aa, Homo sapiens
MAPVRRSAKWRPGGIEARGEGVSTVGYRNKNVRQKTWRPNHPQAFVGSVREGQGFAFRRKLKIQQSYKKLLRKEKKAQTSLESQFTDRYPDNLKHLYLAEEERHRKQARKVDHPLSEQVHQPLLEEQCSIDEPLFEDQCSFDQPQPEEQCIKTVNSFTIPKKNKKKTSNQKAQEEYEQIQAKRAAKKQEFERRKQEREEAQRQYKKKKMEVFKILNKKTKKGQPNLNVQMEYLLQKIQEKC

SEQ ID NO: 851465 - protein, 164 aa, Homo sapiens
MAPVRRSAKWRPGGIEARGEGVSTVGYRNKNVRQKTWRPNHPQAFVGSVREGQGFAFRRKLKIQQSYKKLLRKEKKAQTSLESQFTDRYPDNLKHLYLAEEERHRKQARKVDHPLSEQVHQPLLEEQCSIDEPLFEDQCSFDQPQPEEQCIKTVKYVFSSFEIL

SEQ ID NO: 851466 - protein, 208 aa, Homo sapiens
MAPVRRSAKWRPGGIEARGEGVSTVGYRNKNVRQKTWRPNHPQAFVGSVREGQGFAFRRKLKIQQSYKKLLRKEKKAQTSLESQFTDRYPDNLKHLYLAEEERHRKQARKVDHPLSEQVHQPLLEEQCSIDEPLFEDQCSFDQPQPEEQCIKTVNSFTIPKKNKKKTSNQKAQEEYEQIQAKRAAKKQIRVFKAGPSRLDTAQRNKSK

SEQ ID NO: 851467 - protein, 241 aa, Homo sapiens; identical to SEQ ID NO: 851464

SEQ ID NO: 851468 - protein, 241 aa, Homo sapiens; identical to SEQ ID NO: 851464

SEQ ID NO: 851469 - protein, 404 aa, Homo sapiens
MVGKTFTYLLGSDAAALLFNSKNEDLNAEDVYSRLTTPVFGKGVAYDVPNPVFLEQKKMLKSGLNIAHFKQHVSIIEKETKEYFESWGESGEKNVFEALSELIILTASHCLHGKEIRSQLNEKVAQLYADLDGGFSHAAWLLPGWLPLPSFRRRDRAHREIKDIFYKAIQKRRQSQEKIDDILQTLLDATYKDGRPLTDDEVAGMLIGLLLAGQHTSSTTSAWMGFFLARDKTLQKKCYLEQKTVCGENLPPLTYDQLKDLNLLDRCIKETLRLRPPIMIMMRMARTPQTVAGYTIPPGHQVCVSPTVNQRLKDSWVERLDFNPDRYLQDNPASGEKFAYVPFGAGRHRCIGENFAYVQIKTIWSTMLRLYEFDLIDGYFPTVNYTTMIHTPENPVIRYKRRSK

SEQ ID NO: 851470 - protein, 346 aa, Homo sapiens
MLKSGLNIAHFKQHVSIIEKETKEYFESWGESGEKNVFEALSELIILTASHCLHGKEIRSQLNEKVAQLYADLDGGFSHAAWLLPGWLPLPSFRRRDRAHREIKDIFYKAIQKRRQSQEKIDDILQTLLDATYKDGRPLTDDEVAGMLIGLLLAGQHTSSTTSAWMGFFLARDKTLQKKCYLEQKTVCGENLPPLTYDQLKDLNLLDRCIKETLRLRPPIMIMMRMARTPQTVAGYTIPPGHQVCVSPTVNQRLKDSWVERLDFNPDRYLQDNPASGEKFAYVPFGAGRHRCIGENFAYVQIKTIWSTMLRLYEFDLIDGYFPTVNYTTMIHTPENPVIRYKRRSK

SEQ ID NO: 851471 - protein, 127 aa, Homo sapiens
DSRVSPGKNHTQTVAGYTIPPGHQVCVSPTVNQRLKDSWVERLDFNPDRYLQDNPASGEKFAYVPFGAGRHRCIGENFAYVQIKTIWSTMLRLYEFDLIDGYFPTVNYTTMIHTPENPVIRYKRRSK

SEQ ID NO: 851472 - protein, 509 aa, Homo sapiens
MAAAAGMLLLGLLQAGGSVLGQAMEKVTGGNLLSMLLIACAFTLSLVYLIRLAAGHLVQLPAGVKSPPYIFSPIPFLGHAIAFGKSPIEFLENAYEKYGPVFSFTMVGKTFTYLLGSDAAALLFNSKNEDLNAEDVYSRLTTPVFGKGVAYDVPNPVFLEQKKMLKSGLNIAHFKQHVSIIEKETKEYFESWGESGEKNVFEALSELIILTASHCLHGKEIRSQLNEKVAQLYADLDGGFSHAAWLLPGWLPLPSFRRRDRAHREIKDIFYKAIQKRRQSQEKIDDILQTLLDATYKDGRPLTDDEVAGMLIGLLLAGQHTSSTTSAWMGFFLARDKTLQKKCYLEQKTVCGENLPPLTYDQLKDLNLLDRCIKETLRLRPPIMIMMRMARTPQTVAGYTIPPGHQVCVSPTVNQRLKDSWVERLDFNPDRYLQDNPASGEKFAYVPFGAGRHRCIGENFAYVQIKTIWSTMLRLYEFDLIDGYFPTVNYTTMIHTPENPVIRYKRRSK

SEQ ID NO: 851473 - protein, 509 aa, Homo sapiens; identical to SEQ ID NO: 851472

SEQ ID NO: 851474 - protein, 490 aa, Homo sapiens
  misc_feature (235)..(235): Xaa can be any naturally occurring amino acid
MAAAAGMLLLGLLQAGGSVLGQAMEKVTGGNLLSMLLIACAFTLSLVYLIRLAAGHLVQLPAGVKSPPYIFSPIPFLGHAIAFGKSPIEFLENAYEKYGPVFSFTMVGKTFTYLLGSDAAALLFNSKNEDLNAEDVYSRLTTPVFGKGVAYDVPNPVFLEQKKMLKSGLNIAHFKQHVSIIEKETKEYFESWGESGEKNVFEALSELIILTASHCLHGKEIRSQLNVALTSLLAXPGSRRDRAHREIKDIFYKAIQKRRQSQEKIDDILQTLLDATYKDGRPLTDDEVAGMLIGLLLAGQHTSSTTSAWMGFFLARDKTLQKKCYLEQKTVCGENLPPLTYDQLKDLNLLDRCIKETLRLRPPIMIMMRMARTPQTVAGYTIPPGHQVCVSPTVNQRLKDSWVERLDFNPDRYLQDNPASGEKFAYVPFGAGRHRCIGENFAYVQIKTIWSTMLRLYEFDLIDGYFPTVNYTTMIHTPENPVIRYKRRSK

SEQ ID NO: 851475 - protein, 481 aa, Homo sapiens
MAAAAGMLLLGLLQAGGSVLGQAMEKVTGGNLLSMLLIACAFTLSLVYLIRLAAGHLVQLPAGVKSPPYIFSPIPFLGHAIAFGKSPIEFLENAYEKYGPVFSFTMVGKTFTYLLGSDAAALLFNSKNEDLNAEDVYSRLTTPVFGKGVAYDVPNPVFLEQKKMLKSGLNIAHFKQHVSIIEKETKEYFESWGESGEKNVFEALSELIILTASHCLHGKEIRSQLNEKVAQLYADLDGGFSHAAWLLPGWLPLPSFRRRDRAHREIKDIFYKAIQKRRQSQEKIDDILQTLLDATYKDGRPLTDDEVAGMLIGLLLAGQHTSSTTSAWMGFFLARDKTLQKKCYLEQKTVCGENLPPLTYDQLKDLNLLDRCIKETLRLRPPIMIMMRMARTPQTVAGYTIPPGHQDNPASGEKFAYVPFGAGRHRCIGENFAYVQIKTIWSTMLRLYEFDLIDGYFPTVNYTTMIHTPENPVIRYKRRSK

SEQ ID NO: 851476 - protein, 306 aa, Homo sapiens
MAAAAGMLLLGLLQAGGSVLGQAMEKVTGGNLLSMLLIACAFTLSLVYLIRLAAGHLVQLPAGVKSPPYIFSPIPFLGHAIAFGKSPIEFLENAYEKYGPVFSFTMVGKTFTYLLGSDAAALLFNSKNEDLNAEDVYSRLTTPVFGKGVAYDVPNPVFLEQKKMLKSGLNIAHFKQHVSIIEKETKEYFESWGESGEKNVFEALSELIILTASHCLHGKEIRSQLNEKVAQLYADLDGGFSHAAWLLPGWLPLPSFRRRDRAHREIKDIFYKAIQKRRQSQEKIDDILQTLLDATYKDGRPLTDDE

SEQ ID NO: 851477 - protein, 385 aa, Homo sapiens
MAAAAGMLLLGLLQAGGSVLGQAMEKVTGGNLLSMLLIACAFTLSLVYLIRLAAGHLVQLPAGVKSPPYIFSPIPFLGHAIAFGKSPIEFLENAYEKYGPVFSFTMVGKTFTYLLGSDAAALLFNSKNEDLNAEDVYSRLTTPVFGKGVAYDVPNPVFLEQKKMLKSGLNIAHFKQHVSIIEKETKEYFESWGESGEKNVFEALSELIILTASHCLHGKEIRSQLNEKVAQLYADLDGGFSHAAWLLPGWLPLPSFRRRDRAHREIKDIFYKAIQKRRQSQEKIDDILQTLLDATYKDGRPLTDDEVAGMLIGLLLAGQHTSSTTSAWMGFFLARDKTLQKKCYLEQKTVCGENLPPLTYDQLKDLNLLDRCITPQTVAGYTIPP

SEQ ID NO: 851478 - protein, 666 aa, Homo sapiens
MADMEDLFGSDADSEAERKDSDSGSDSDSDQENAASGSNASGSESDQDERGDSGQPSNKELFGDDSEDEGASHHSGSDNHSERSDNRSEASERSDHEDNDPSDVDQHSGSEAPNDDEDEGHRSDGGSHHSEAEGSEKAHSDDEKWGREDKSDQSDDEKIQNSDDEERAQGSDEDKLQNSDDDEKMQNTDDEERPQLSDDERQQLSEEEKANSDDERPVASDNDDEKQNSDDEEQPQLSDEEKMQNSDDERPQASDEEHRHSDDEEEQDHKSESARGSDSEDEVLRMKRKNAIASDSEADSDTEVPKDNSGTMDLFGGADDISSGSDGEDKPPTPGQPVDENGLPQDQQEEEPIPETRIEVEIPKVNTDLGNDLYFVKLPNFLSVEPRPFDPQYYEDEFEDEEMLDEEGRTRLKLKVENTIRWRIRRDEEGNEIKESNARIVKWSDGSMSLHLGNEVFDVYKAPLQGDHNHLFIRQGTGLQGQAVFKTKLTFRPHSTDSATHRKMTLSLADRCSKTQKIRILPMAGRDPECQRTEMIKKEEERLRASIRRESQQRRMREKQHQRGLSASYLEPDRYDEEEEGEESISLAAIKNRYKGGIREERARIYSSDSDEGSEEDKAQRLLKAKKLTSDEEGEPSGKRKAEDDDKANKKHKKYVISDEEEEDDD

SEQ ID NO: 851479 - protein, 364 aa, Homo sapiens [sequence omitted]

SEQ ID NO: 851480 - protein, 368 aa, Homo sapiens [sequence omitted]

SEQ ID NO: 851481 - protein, 364 aa, Homo sapiens
VFFICGLWPFIIRILHFLFIRQLWLFFIIRILCLIIIIRSYRPFIIRIKPIPETRIEVEIPKVNTDLGNDLYFVKLPNFLSVEPRPFDPQYYEDEFEDEEMLDEEGRTRLKLKVENTIRWRIRRDEEGNEIKESNARIVKWSDGSMSLHLGNEVFDVYKAPLQGDHNHLFIRQGTGLQGQAVFKTKLTFRPHSTDSATHRKMTLSLADRCSKTQKIRILPMAGRDPECQRTEMIKKEEERLRASIRRESQQRRMREKQHQRGLSASYLEPDRYDEEEEGEESISLAAIKNRYKGGIREERARIYSSDSDEGSEEDKAQRLLKAKKLTSDEEGEPSGKRKAEDDDKANKKHKKYVISDEEEEDDD

SEQ ID NO: 851482 - protein, 745 aa, Homo sapiens
MADMEDLFGSDADSEAERKDSDSGSDSDSDQENAASGSNASGSESDQDERGDSGQPSNKELFGDDSEDEGASHHSGSDNHSERSDNRSEASERSDHEDNDPSDVDQHSGSEAPNDDEDEGHRSDGGSHHSEAEGSEKAHSDDEKWGREDKSDQSDDEKIQNSDDEERAQGSDEDKLQNSDDDEKMQNTDDEERPQLSDDERQQLSEEEKANSDDERPVASDNDDEKQNSDDEEQPQLSDEEKMQNSDDERPQASDEEHRHSDDEEEQDHKSESARGSDSEDEVLRMKRKNAIASDSEADSDTEVPKDNSGTMDLFGGADDISSGSDGEDKPPTPGQPVDENGLPQDQQEEEPIPETRIEVEIPKVNTDLGNDLYFVKLPNFLSVEPRPFDPQYYEDEFEDEEMLDEEGRTRLKLKVENTIRWRIRRDEEGNEIKESNARIVKWSDGSMSLHLGNEVFDVYKAPLQGDHNHLFIRQGTGLQGQAVFKTKLTFRPHSTDSATHRKMTLSLADRCSKTQKIRILPMAGRDPECQRTEMIKKEEERLRASIRRESQQRRMREKQHQRGLSASYLEPDRYDEEEEGEESISLAAIKNRYKGGIREERARIYSSDSDEGSEEDKAQRLLKAKKLTSDEEGDLPEEKRRDADTHIQAYEVCDHKQTKQTKTRRAAWQRSIRPPVGRAHRMPVQRVPRPRDQVGPQKTRDRGTHVTSQGNKQPEKATVERTTYQTSQNRDTIGKKKEITDTPT

SEQ ID NO: 851483 - protein, 332 aa, Homo sapiens
MLAVHFDKPGGPENLYVKEVAKPSPGEGEVLLKVAASALNRADLMQRQGQYDPPPGASNILGLEASGHVAELGPGCQGHWKIGDTAMALLPGGGQAQYVTVPEGLLMPIPEGLTLTQAAAIPEAWLTAFQLLHLVGNVQAGDYVLIHAGLSGVGTAAIQLTRMAGAIPLVTAGSQKKLQMAEKLGAAAGFNYKKEDFSEATLKFTKGAGVNLILDCIGGSYWEKNVNCLALDGRWVLYGLMGGGDINGPLFSKLLFKRGSLITSLLRSRDNKYKQMLVNAFTEQILPHFSTEGPQRLLPVLDRIYPVTEIQEAHKYMEANKNIGKIVLELPQ

SEQ ID NO: 851484 - protein, 332 aa, Homo sapiens; identical to SEQ ID NO: 851483

SEQ ID NO: 851485 - protein, 332 aa, Homo sapiens; identical to SEQ ID NO: 851483

SEQ ID NO: 851486 - protein, 319 aa, Homo sapiens
MLAVHFDKPGGPENLYVKEVAKPSPGEGEVLLKVAASALNRADLMQRQGQYDPPPGASNILGLEASGHVAELGPGCQGHWKIGDTAMALLPGGGQAQYVTVPEGLLMPIPEGLTLTQAAAIPEAWLTAFQLLHLVGLSGVGTAAIQLTRMAGAIPLVTAGSQKKLQMAEKLGAAAGFNYKKEDFSEATLKFTKGAGVNLILDCIGGSYWEKNVNCLALDGRWVLYGLMGGGDINGPLFSKLLFKRGSLITSLLRSRDNKYKQMLVNAFTEQILPHFSTEGPQRLLPVLDRIYPVTEIQEAHKYMEANKNIGKIVLELPQ

SEQ ID NO: 851487 - protein, 248 aa, Homo sapiens
MLAVHFDKPGGPENLYVKEVAKPSPGEGEVLLKVAASALNRADLMQRQGQYDPPPGASNILGLEASGHVAELGPGCQGHWKIGDTAMALLPGGGQAQYVTVPEGLLMPIPEGLTLTQAAAIPEAWLTAFQLLHLVGNVQAGDYVLIHAGLSGVGTAAIQLTRMAGAIPLVTAGSQKKLQMAEKLGAAAGFNYKKEDFSEATLKFTKVQANAGECFHGANSASLLHGGPPTSAAGSGQNLPSDRNPGGP

SEQ ID NO: 851488 - protein, 221 aa, Homo sapiens [sequence omitted]

SEQ ID NO: 851489 - protein, 332 aa, Homo sapiens; identical to SEQ ID NO: 851483

SEQ ID NO: 851490 - protein, 410 aa, Homo sapiens
MCQKPGHAWKMDQSARQEVGSRSLERRKFPLLEVQPSIPVEAEAVLGLWGSGFVTGTRRSQNHSAPPGAWEGSRARNNMLAVHFDKPGGPENLYVKEVAKPSPGEGEVLLKVAASALNRADLMQRQGQYDPPPGASNILGLEASGHVAELGPGCQGHWKIGDTAMALLPGGGQAQYVTVPEGLLMPIPEGLTLTQAAAIPEAWLTAFQLLHLVGNVQAGDYVLIHAGLSGVGTAAIQLTRMAGAIPLVTAGSQKKLQMAEKLGAAAGFNYKKEDFSEATLKFTKGAGVNLILDCIGGSYWEKNVNCLALDGRWVLYGLMGGGDINGPLFSKLLFKRGSLITSLLRSRDNKYKQMLVNAFTEQILPHFSTEGPQRLLPVLDRIYPVTEIQEAHKYMEANKNIGKIVLELPQ

SEQ ID NO: 851491 - protein, 261 aa, Homo sapiens
MLAVHFDKPGGPENLYVKEVAKPSPGEGEVLLKVAASALNRADLMQRQGQYDPPPGASNILGLEASGHVAELGPGCQGHWKIGDTAMALLPGGGQAQYVTVPEGLLMPIPEGLTLTQAAAIPEAWLTAFQLLHLVGAGVNLILDCIGGSYWEKNVNCLALDGRWVLYGLMGGGDINGPLFSKLLFKRGSLITSLLRSRDNKYKQMLVNAFTEQILPHFSTEGPQRLLPVLDRIYPVTEIQEAHKYMEANKNIGKIVLELPQ

SEQ ID NO: 851492 - protein, 221 aa, Homo sapiens [sequence omitted]

SEQ ID NO: 851493 - protein, 45 aa, Homo sapiens
MLVNAFTEQILPHFSTEGPQRLLPVLDRIYPVTEIQEAHKYMEAN

SEQ ID NO: 851494 - protein, 704 aa, Homo sapiens
MESKPSRIPRRISVQPSSSLSARMMSGSRGSSLNDTYHSRDSSFRLDSEYQSTSASASASPFQSAWYSESEITQGARSRSQNQQRDHDSKRPKLSCTNCTTSAGRNVGNGLNTLSDSSWRHSQVPRSSSMVLGSFGTDLMRERRDLERRTDSSISNLMDYSHRSGDFTTSSYVQDRVPSYSQGARPKENSMSTLQLNTSSTNHQLPSEHQTILSSRDSRNSLRSNFSSRESESSRSNTQPGFSYSSSRDEAPIISNSERVVSSQRPFQESSDNEGRRTTRRLLSRIASSMSSTFFSRRSSQDSLNTRSLNSENSYVSPRILTASQSRSNVPSASEVPDNRASEASQGFRFLRRRWGLSSLSHNHSSESDSENFNQESEGRNTGPWLSSSLRNRCTPLFSRRRREGRDESSRIPTSDTSSRSHIFRRESNEVVHLEAQNDPLGAAANRPQASAASSSATTGGSTSDSAQGGRNTGISGILPGSLFRFAVPPALGSNLTDNVMITVDIIPSGWNSADGKSDKTKSAPSRDPERLQKIKESLLLEDSEEEEGDLCRICQMAAASSSNLLIEPCKCTGSLQYVHQDCMKKWLQAKINSGSSLEAVTTCELCKEKLELNLEDFDIHELHRAHANEQAEYEFISSGLYLVVLLHLCEQSFSDMMGNTNEPSTRVRFINLARTLQAHMEDLETSEDDSEEDGDHNRTFDIA

SEQ ID NO: 851495 - protein, 704 aa, Homo sapiens; identical to SEQ ID NO: 851494

SEQ ID NO: 851496 - protein, 777 aa, Homo sapiens
AKWGEEEQGGALNGGGWFCAGSGRGAGAIVLRCRLHFLSHGPRTPRRKAAVRVAASGTRTGRCRLRSREKSLRMESKPSRIPRRISVQPSSSLSARMMSGSRGSSLNDTYHSRDSSFRLDSEYQSTSASASASPFQSAWYSESEITQGARSRSQNQQRDHDSKRPKLSCTNCTTSAGRNVGNGLNTLSDSSWRHSQVPRSSSMVLGSFGTDLMRERRDLERRTDSSISNLMDYSHRSGDFTTSSYVQDRVPSYSQGARPKENSMSTLQLNTSSTNHQLPSEHQTILSSRDSRNSLRSNFSSRESESSRSNTQPGFSYSSSRDEAPIISNSERVVSSQRPFQESSDNEGRRTTRRLLSRIASSMSSTFFSRRSSQDSLNTRSLNSENSYVSPRILTASQSRSNVPSASEVPDNRASEASQGFRFLRRRWGLSSLSHNHSSESDSENFNQESEGRNTGPWLSSSLRNRCTPLFSRRRREGRDESSRIPTSDTSSRSHIFRRESNEVVHLEAQNDPLGAAANRPQASAASSSATTGGSTSDSAQGGRNTGISGILPGSLFRFAVPPALGSNLTDNVMITVDIIPSGWNSADGKSDKTKSAPSRDPERLQKIKESLLLEDSEEEEGDLCRICQMAAASSSNLLIEPCKCTGSLQYVHQDCMKKWLQAKINSGSSLEAVTTCELCKEKLELNLEDFDIHELHRAHANEQAEYEFISSGLYLVVLLHLCEQSFSDMMGNTNEPSTRVRFINLARTLQAHMEDLETSEDDSEEDGDHNRTFDIA

SEQ ID NO: 851497 - protein, 204 aa, Homo sapiens
MAKVQVNNVVVLDNPSPFYNPFQFEITFECIEDLSEDLEWKIIYVGSAESEEYDQVLDSVLVGPVPAGRHMFVFQADAPNPGLIPDADAVGVTVVLITCTYRGQEFIRVGYYVNNEYTETELRENPPVKPDFSKLQRNILASNPRVTRFHINWEDNTEKLEDAESSNPNLQSLLSTDALPSASKGWSTSENSLNVMLESHMDCM

SEQ ID NO: 851498 - protein, 204 aa, Homo sapiens; identical to SEQ ID NO: 851497

SEQ ID NO: 851499 - protein, 204 aa, Homo sapiens; identical to SEQ ID NO: 851497

SEQ ID NO: 851500 - protein, 195 aa, Homo sapiens
MAKVQVNNVVVLDNPSPFYNPFQFEITFECIEDLSEDLEWKIIYVGSAESEEYDQVLDSVLVGPVPAGRHMFVFQADAPNPGLIPDADAVGVTVVLITCTYRGQEFIRVGYYVNNEYTETELRENPPVKPDFSKLQRNILASNPRVTRFHINWEDNTECITFSIKGMVHIRKLTKCHVRIPHGLHVTTYHPFSTN

SEQ ID NO: 851501 - protein, 1270 aa, Homo sapiens
RARGSRNSVEELKETVKEEFMPWVSQYLVMKRVSIEPNFHSLYSNFLDTLKNPEFNKMVLNETYRNIKVLLTSDKAAANFSDRSLLKNLGHWLGMITLAKNKPILHTDLDVKSLLLEAYVKGQQELLYVVPFVAKVLESSIRSVVFRPPNPWTMAIMNVLAELHQEHDLKLNLKFEIEVLCKNLALDINELKPGNLLKDKDRLKNLDEQLSAPKKDVKQPEELPPITTTTTSTTPATNTTCTATVPPQPQYSYHDINVYSLAGLAPHITLNPTIPLFQAHPQLKQCVRQAIERAVQELVHPVVDRSIKIAMTTCEQIVRKDFALDSEESRMRIAAHHMMRNLTAGMAMITCREPLLMSISTNLKNSFASALRTASPQQREMMDQAAAQLAQDNCELACCFIQKTAVEKAGPEMDKRLATEFELRKHARQEGRRYCDPVVLTYQAERMPEQIRLKVGGVDPKQLAVYEEFARNVPGFLPTNDLSQPTGFLAQPMKQAWATDDVAQIYDKCITELEQHLHAIPPTLAMNPQAQALRSLLEVVVLSRNSRDAIAALGLLQKAVEGLLDATSGADADLLLRYRECHLLVLKALQDGRAYGSPWCNKQITRCLIECRDEYKYNVEAVELLIRNHLVNMQQYDLHLAQSMENGLNYMAVAFAMQLVKILLVDERSVAHVTEADLFHTIETLMRINAHSRGNAPEGLPQLMEVVRSNYEAMIDRAHGGPNFMMHSGISQASEYDDPPGLREKAEYLLREWVNLYHSAAAGRDSTKAFSAFVGQMHQQGILKTDDLITRFFRLCTEMCVEISYRAQAEQQHNPAANPTMIRAKCYHNLDAFVRLIALLVKHSGEATNTVTKINLLNKVLGIVVGVLLQDHDVRQSEFQQLPYHRIFIMLLLELNAPEHVLETINFQTLTAFCNTFHILRPTKAPGFVYAWLELISHRIFIARMLAHTPQQKGWPMYAQLLIDLFKYLAPFLRNVELTKPMQILYKGTLRVLLVLLHDFPEFLCDYHYGFCDVIPPNCIQLRNLILSAFPRNMRLPDPFTPNLKVDMLSEINIAPRILTNFTGVMPPQFKKDLDSYLKTRSPVTFLSDLRSNLQVSNEPGNRYNLQLINALVLYVGTQAIAHIHNKGSTPSMSTITHSAHMDIFQNLAVDLDTEGRYLFLNAIANQLRYPNSHTHYFSCTMLYLFAEANTEAIQEQITRVLLERLIVNRPHPWGLLITFIELIKNPAFKFWNHEFVHCAPEIEKLFQSVAQCCMGQKQAQQVMEGTGAS

SEQ ID NO: 851502 - protein, 1729 aa, Homo sapiens
GAVGCLQACAVSVSQELSETILTMVANCSNVMNKARQPPPGVMPKGRPPSASSLDAISPVQIDPLAGMTSLSIGGSAAPHTQSMQGFPPNLGSAFSTPQSPAKAFPPLSTPNQTTAFSGIGGLSSQLPVGGLGTGSLTGIGTGALGLPAVNNDPFVQRKLGTSGLNQPTFQQTDLSQVWPEANQHFSKEIDDEANSYFQRIYNHPPHPTMSVDEVLEMLQRFKDSTIKREREVFNCMLRNLFEEYRFFPQYPDKELHITACLFGGIIEKGLVTYMALGLALRYVLEALRKPFGSKMYYFGIAALDRFKNRLKDYPQYCQHLASISHFMQFPHHLQEYIEYGQQSRDPPVKMQGSITTPGSIALAQAQAQAQVPAKAPLAGQVSTMVTTSTTTTVAKTVTVTRPTGVSFKKDVPPSINTTNIDTLLVATDQTERIVEPPENIQEKIAFIFNNLSQSNMTQKVEELKETVKEEFMPWVSQYLVMKRVSIEPNFHSLYSNFLDTLKNPEFNKMVLNETYRNIKVLLTSDKAAANFSDRSLLKNLGHWLGMITLAKNKPILHTDLDVKSLLLEAYVKGQQELLYVVPFVAKVLESSIRSVVFRPPNPWTMAIMNVLAELHQEHDLKLNLKFEIEVLCKNLALDINELKPGNLLKDKDRLKNLDEQLSAPKKDVKQPEELPPITTTTTSTTPATNTTCTATVPPQPQYSYHDINVYSLAGLAPHITLNPTIPLFQAHPQLKQCVRQAIERAVQELVHPVVDRSIKIAMTTCEQIVRKDFALDSEESRMRIAAHHMMRNLTAGMAMITCREPLLMSISTNLKNSFASALRTASPQQREMMDQAAAQLAQDNCELACCFIQKTAVEKAGPEMDKRLATEFELRKHARQEGRRYCDPVVLTYQAERMPEQIRLKVGGVDPKQLAVYEEFARNVPGFLPTNDLSQPTGFLAQPMKQAWATDDVAQIYDKCITELEQHLHAIPPTLAMNPQAQALRSLLEVVVLSRNSRDAIAALGLLQKAVEGLLDATSGADADLLLRYRECHLLVLKALQDGRAYGSPWCNKQITRCLIECRDEYKYNVEAVELLIRNHLVNMQQYDLHLAQSMENGLNYMAVAFAMQLVKILLVDERSVAHVTEADLFHTIETLMRINAHSRGNAPEGLPQLMEVVRSNYEAMIDRAHGGPNFMMHSGISQASEYDDPPGLREKAEYLLREWVNLYHSAAAGRDSTKAFSAFVGQVELLERKMHQQGILKTDDLITRFFRLCTEMCVEISYRAQAEQQHNPAANPTMIRAKCYHNLDAFVRLIALLVKHSGEATNTVTKINLLNKVLGIVVGVLLQDHDVRQSEFQQLPYHRIFIMLLLELNAPEHVLETINFQTLTAFCNTFHILRPTKAPGFVYAWLELISHRIFIARMLAHTPQQKGWPMYAQLLIDLFKYLAPFLRNVELTKPMQILYKGTLRVLLVLLHDFPEFLCDYHYGFCDVIPPNCIQLRNLILSAFPRNMRLPDPFTPNLKVDMLSEINIAPRILTNFTGVMPPQFKKDLDSYLKTRSPVTFLSDLRSNLQVSNEPGNRYNLQLINALVLYVGTQAIAHIHNKGSTPSMSTITHSAHMDIFQNLAVDLDTEGRYLFLNAIANQLRYPNSHTHYFSCTMLYLFAEANTEAIQEQITRVLLERLIVNRPHPWGLLITFIELIKNPAFKFWNHEFVHCAPEIEKLFQSVAQCCMGQKQAQQVMEGTGAS

SEQ ID NO: 851503 - protein, 1722 aa, Homo sapiens
GAVGCLQACAVSVSQELSETILTMVANCSNVMNKARQPPPGVMPKGRPPSASSLDAISPVQIDPLAGMTSLSIGGSAAPHTQSMQGFPPNLGSAFSTPQSPAKAFPPLSTPNQTTAFSGIGGLSSQLPVGGLGTGSLTGIGTGALGLPAVNNDPFVQRKLGTSGLNQPTFQQTDLSQVWPEANQHFSKEIDDEANSYFQRIYNHPPHPTMSVDEVLEMLQRFKDSTIKREREVFNCMLRNLFEEYRFFPQYPDKELHITACLFGGIIEKGLVTYMALGLALRYVLEALRKPFGSKMYYFGIAALDRFKNRLKDYPQYCQHLASISHFMQFPHHLQEYIEYGQQSRDPPVKMQGSITTPGSIALAQAQAQAQVPAKAPLAGQVSTMVTTSTTTTVAKTVTVTRPTGVSFKKDVPPSINTTNIDTLLVATDQTERIVEPPENIQEKIAFIFNNLSQSNMTQKVEELKETVKEEFMPWVSQYLVMKRVSIEPNFHSLYSNFLDTLKNPEFNKMVLNETYRNIKVLLTSDKAAANFSDRSLLKNLGHWLGMITLAKNKPILHTDLDVKSLLLEAYVKGQQELLYVVPFVAKVLESSIRSVVFRPPNPWTMAIMNVLAELHQEHDLKLNLKFEIEVLCKNLALDINELKPGNLLKDKDRLKNLDEQLSAPKKDVKQPEELPPITTTTTSTTPATNTTCTATVPPQPQYSYHDINVYSLAGLAPHITLNPTIPLFQAHPQLKQCVRQAIERAVQELVHPVVDRSIKIAMTTCEQIVRKDFALDSEESRMRIAAHHMMRNLTAGMAMITCREPLLMSISTNLKNSFASALRTASPQQREMMDQAAAQLAQDNCELACCFIQKTAVEKAGPEMDKRLATEFELRKHARQEGRRYCDPVVLTYQAERMPEQIRLKVGGVDPKQLAVYEEFARNVPGFLPTNDLSQPTGFLAQPMKQAWATDDVAQIYDKCITELEQHLHAIPPTLAMNPQAQALRSLLEVVVLSRNSRDAIAALGLLQKAVEGLLDATSGADADLLLRYRECHLLVLKALQDGRAYGSPWCNKQITRCLIECRDEYKYNVEAVELLIRNHLVNMQQYDLHLAQSMENGLNYMAVAFAMQLVKILLVDERSVAHVTEADLFHTIETLMRINAHSRGNAPEGLPQLMEVVRSNYEAMIDRAHGGPNFMMHSGISQASEYDDPPGLREKAEYLLREWVNLYHSAAAGRDSTKAFSAFVGQMHQQGILKTDDLITRFFRLCTEMCVEISYRAQAEQQHNPAANPTMIRAKCYHNLDAFVRLIALLVKHSGEATNTVTKINLLNKVLGIVVGVLLQDHDVRQSEFQQLPYHRIFIMLLLELNAPEHVLETINFQTLTAFCNTFHILRPTKAPGFVYAWLELISHRIFIARMLAHTPQQKGWPMYAQLLIDLFKYLAPFLRNVELTKPMQILYKGTLRVLLVLLHDFPEFLCDYHYGFCDVIPPNCIQLRNLILSAFPRNMRLPDPFTPNLKVDMLSEINIAPRILTNFTGVMPPQFKKDLDSYLKTRSPVTFLSDLRSNLQVSNEPGNRYNLQLINALVLYVGTQAIAHIHNKGSTPSMSTITHSAHMDIFQNLAVDLDTEGRYLFLNAIANQLRYPNSHTHYFSCTMLYLFAEANTEAIQEQITRVLLERLIVNRPHPWGLLITFIELIKNPAFKFWNHEFVHCAPEIEKLFQSVAQCCMGQKQAQQVMEGTGAS

SEQ ID NO: 851504 - protein, 1722 aa, Homo sapiens; identical to SEQ ID NO: 851503

SEQ ID NO: 851505 - protein, 1716 aa, Homo sapiens
GAVGCLQACAVSVSQELSETILTMVANCSNVMNKARQPPPGVMPKGRPPSASSLDAISPVQIDPLAGMTSLSIGGSAAPHTQSMQGFPPNLGSAFSTPQSPAKAFPPLSTPNQTTAFSGIGGLSSQLPVGGLGTGSLTGIGTGALGLPAVNNDPFVQRKLGTSGLNQPTFQQTDLSQVWPEANQHFSKEIDDEANSYFQRIYNHPPHPTMSVDEVLEMLQRFKDSTIKREREVFNCMLRNLFEEYRFFPQYPDKELHITACLFGGIIEKGLVTYMALGLALRYVLEALRKPFGSKMYYFGIAALDRFKNRLKDYPQYCQHLASISHFMQFPHHLQEYIEYGQQSRDPPVKMQGSITTPGSIALAQAQAQAQVPAKAPLAGQVSTMVTTSTTTTVAKTVTVTRPTGVSFKKDVPPSINTTNIDTLLVATDQTERIVEPPENIQEKIAFIFNNLSQSNMTQKVEELKETVKEEFMPWVSQYLVMKRVSIEPNFHSLYSNFLDTLKNPEFNKMVLNETYRNIKVLLTSDKAAANFSDRSLLKNLGHWLGMITLAKNKPILHTDLDVKSLLLEAYVKGQQELLYVVPFVAKVLESSIRSVVFRPPNPWTMAIMNVLAELHQEHDLKLNLKFEIEVLCKNLALDINELKPGNLLKDKDRLKNLDEQLSAPKKDVKQPEELPPITTTTTSTTPATNTTCTATVPPQPQYSYHDINVYSLAGLAPHITLNPTIPLFQAHPQLKQCVRQAIERAVQELVHPVVDRSIKIAMTTCEQIVRKDFALDSEESRMRIAAHHMMRNLTAGMAMITCREPLLMSISTNLKNSFASALRTASPQQREMMDQAAAQLAQDNCELACCFIQKTAVEKAGPEMDKRLATEFELRKHARQEGRRYCDPVVLTYQAERMPEQIRLKVGGVDPKQLAVYEEFARNVPGFLPTNDLSQPTGFLAQPMKQAWATDDVAQIYDKCITELEQHLHAIPPTLAMNPQAQALRSLLEVVVLSRNSRDAIAALGLLQKAVEGLLDATSGADADLLLRYRECHLLVLKALQDGRAYGSPWCNKQITRCLIECRDEYKYNVEAVELLIRNHLVNMQQYDLHLAQSMENGLNYMAVAFAMQLVKILLVDERSVAHVTEADLFHTIETLMRINAHSRGNAPEGLPQLMEVVRSNYEAMIDRAHGGPNFMMHSGISQASEYDDPPGLREKAEYLLREWVNLYHSAAAGRDSTKAFSAFVGQMHQQGILKTDDLITRFFRLCTEMCVEISYRAQAEQQHNPAANPTMIRAKCYHNLDAFVRLIALLVKHSGEATNTVTKINLLNKVLGIVVGVLLQDHDVRQSEFQQLPYHRIFIMLLLELNAPEHVLETINFQTLTAFCNTFHILRPTKAPGFVYAWLELISHRIFIARMLAHTPQQKGWPMYAQLLIDLFKYLAPFLRNVELTKPMQILYKGTLRVLLVLLHDFPEFLCDYHYGFCDVIPPNCIQLRNLILSAFPRNMRLPDPFTPNLKVDMLSEINIAPRILTNFTGVMPPQFKKDLDSYLKTRSPVTFLSDLRSNLQVSNEPGNRYNLQLINALVLYVGTQAIAHIHNKGSTPSMSTITHSAHMDIFQNLAVDLDTEGRYLFLNAIANQLRYPNSHTHYFSCTMLYLFAEANTEAIQEQITRVLLERLIVNRPHPWGLLITFIELIKNPAFKFWNHEFVHCAPEIENNGRDRCQLDETASLLYVSV

SEQ ID NO: 851506 - protein, 3344 aa, Homo sapiens
GAVGCLQACAVSVSQELSETILTMVANCSNVMNKARQPPPGVMPKGRPPSASSLDAISPVQIDPLAGMTSLSIGGSAAPHTQSMQGFPPNLGSAFSTPQSPAKAFPPLSTPNQTTAFSGIGGLSSQLPVGGLGTGSLTGIGTGALGLPAVNNDPFVQRKLGTSGLNQPTFQQTDLSQVWPEANQHFSKEIDDEANSYFQRIYNHPPHPTMSVDEVLEMLQRFKDSTIKREREVFNCMLRNLFEEYRFFPQYPDKELHITACLFGGIIEKGLVTYMALGLALRYVLEALRKPFGSKMYYFGIAALDRFKNRLKDYPQYCQHLASISHFMQFPHHLQEYIEYGQQSRDPPVKMQGSITTPGSIALAQAQAQAQVPAKAPLAGQVSTMVTTSTTTTVAKTVTVTRPTGVSFKKDVPPSINTTNIDTLLVATDQTERIVEPPENIQEKIAFIFNNLSQSNMTQKVEELKETVKEEFMPWVSQYLVMKRVSIEPNFHSLYSNFLDTLKNPEFNKMVLNETYRNIKVLLTSDKAAANFSDRSLLKNLGHWLGMITLAKNKPILHTDLDVKSLLLEAYVKGQQELLYVVPFVAKVLESSIRSVVFRPPNPWTMAIMNVLAELHQEHDLKLNLKFEIEVLCKNLALDINELKPGNLLKDKDRLKNLDEQLSAPKKDVKQPEELPPITTTTTSTTPATNTTCTATVPPQPQYSYHDINVYSLAGLAPHITLNPTIPLFQAHPQLKQCVRQAIERAVQELVHPVVDRSIKIAMTTCEQIVRKDFALDSEESRMRIAAHHMMRNLTAGMAMITCREPLLMSISTNLKNSFASALRTASPQQREMMDQAAAQLAQDNCELACCFIQKTAVEKAGPEMDKRLATEFELRKHARQEGRRYCDPVVLTYQAERMPEQIRLKVGGVDPKQLAVYEEFARNVPGFLPTNDLSQPTGFLAQPMKQAWATDDVAQIYDKCITELEQHLHAIPPTLAMNPQAQALRSLLEVVVLSRNSRDAIAALGLLQKAVEGLLDATSGADADLLLRYRECHLLVLKALQDGRAYGSPWCNKQITRCLIECRDEYKYNVEAVELLIRNHLVNMQQYDLHLAQSMENGLNYMAVAFAMQLVKILLVDERSVAHVTEADLFHTIETLMRINAHSRGNAPEGLPQLMEVVRSNYEAMIDRAHGGPNFMMHSGISQASEYDDPPGLREKAEYLLREWVNLYHSAAAGRDSTKAFSAFVGQMHQQGILKTDDLITRFFRLCTEMCVEISYRAQAEQQHNPAANPTMIRAKCYHNLDAFVRLIALLVKHSGEATNTVTKINLLNKVLGIVVGVLLQDHDVRQSEFQQLPYHRIFIMLLLELNAPEHVLETINFQTLTAFCNTFHILRPTKAPGFVYAWLELISHRIFIARMLAHTPQQKGWPMYAQLLIDLFKYLAPFLRNVELTKPMQILYKGTLRVLLVLLHDFPEFLCDYHYGFCDVIPPNCIQLRNLILSAFPRNMRLPDPFTPNLKVDMLSEINIAPRILTNFTGVMPPQFKKDLDSYLKTRSPVFQTVPCKHHIFQMEKLPTGPEVHTANVLFIETIFSKYKYMALRFRTYYRPDNQVLIFLEEGLKSNKFPVTMFLQINLIIRGFIFLHVFVFSILVFKTRLEVSSIPQKANGFSLQYEIIHKNNLFPKLIPNNQSVLKMYLFLYNVNGNLGKMYPGTLKLVIEKDLTSFIIEVLKHKYLQLDLLFDNDCRSLEFNIYNVHSCTQNTYHYHTTYSSCLKRRIFRFFKSLASQSMPCSNNFELKLHSQIFNKLSTHTLLMLFLIFHVVLPNLKPASKRSSDFEKMKYKVVISKRSMGGQNSRFPNGIIFYFTAMNDCFSKKNPLLDSFTLFGNWPKNLKNVLEYMRFFIQSALIGTPGSCNSFEASPIERGYHTDSQDTHQFVEIPEKVMILKNLDCTCFTSLFHCIGKLQLVYQHSYYLSYPRFARNSYGFPISQVIFYKLEGIIISPNSRFVVSKYHFTVLFIVKYPYEHQPSMRKGSPQTFNTLQLGISCTKTHEKKKLMVGISDKNLFDMQPSGLFIAKSKLIAVNLLHPFEINKLYEIQILAIDIRCKNKINRLNLHISFAHKLAHTIILQNRQLQQKKKKTALLQTSLKASLQRRQKINMHIYMYKVLLFNTNAISRKNLTAEAKKHKQKPKEKKNVQHLKPLKHQNKKHTKITVFMTINITQIKNIDQNSGSKYLELIDCLLLGEFFFNLNVFSSLKKNLKVLTLYKAGKFFKYFAIKYSQFFIDLNKKRRINKVKQEDKTWRKKGQVVAGQSNKMLLYHLSLLISIKHISYQIPAGLVHSLRFTKIYTTINRYTEKVLRKRMPLKNQHQILIKAILKGCLLSKMNIKCNIPYKLRTETLFKVSLLLPLSCFFKIEHINQMAIEVFAVIFSLSERTITEDTNKISLSRFDCQGFLCIFSAKILVELAEPHAIQNHHYPLTCCHLGHFLHGCGCLHLHQFPETHFAAIVAGGDASAVLDTASRSSTAEGGSIGETGSSTVEFIPVRFSLVFDQCPFSFHKLYCQSDVYHLKFHPLAYSSFVQRMKYEVDSLILAARPGRLSSASSAPTFRRGASLFPSPVLSNFWSPDASSLKFSFGSGGDGGERSSVLTLSFRSQLSLTGTKPTSIRTCSFRALSLCMLDFSFLSFRRGGFLEIGSMEGEALWEEVAPSEQAPSEPPPWEETTPSEQAPSGPPLWEETALSYQVPSGPPPWEETALSEQAPSGPPPWEETAPSEQAPSGPPAWEQILPGQPPSEQVPWEQAPFGQPPSEQSPWEEAAPCEQVQFGHPPSEQAPREAAAPSEQAPPEPPPSEQARQEQAVSGHPPSEHAPWEVAAPPERAPSEPPLWEQAPSEEGPSEQIPSQQVPSEEAYCFSYLIYFSEFSSLYFFSCKYFAFYSPPLCCHPLALPDYYFVDLLSTFFFFFVEDSSSFTGPCKEWLSTSSFLLLFLVLLNFSELLPVCTSISFTSVTDFRVLVVTWITDTLLEGFFSFETSLFSALTDFSFFFPATSPFIFVCSISVFSLVILSGKSASRFLVFFSFTFETSIVLLGQVGCLDLKDTVDYTSWKLHVTYRAIELPWVHMWLYMFFEVASICCFVITVWAIKRFRPIVNLSCMAGYFMLIRGHITALITFKWLLTMNEYAYVKLDESSENLSKDKVHIYMGVLLYEFYHAEHNCFFCLKNSCIFHMCILSLENGFLNVSSSDTAHCCVCANDTLVDSLIIPSSGVVFQVCCIVIISISIVAAAVTANGALEKSPSSAVEERFPAFACFSALSSNKKFLSTVNSDVMHKLFFRFCFILAWLTAKGFGLRALAFVLRSRCFRGKIFI

SEQ ID NO: 851507 - protein, 1652 aa, Homo sapiens
GAVGCLQACAVSVSQELSETILTMVANCSNVMNKARQPPPGVMPKGRPPSASSLDAISPVQIDPLAGMTSLSIGGSAAPHTQSMQGFPPNLGSAFSTPQSPAKAFPPLSTPNQTTAFSGIGGLSSQLPVGGLGTGSLTGIGTGALGLPAVNNDPFVQRKLGTSGLNQPTFQQTDLSQVWPEANQHFSKEIDDEANSYFQRIYNHPPHPTMSVDEVLEMLQRFKDSTIKREREVFNCMLRNLFEEYRFFPQYPDKELHITACLFGGIIEKGLVTYMALGLALRYVLEALRKPFGSKMYYFGIAALDRFKNRLKDYPQYCQHLASISHFMQFPHHLQEYIEYGQQSRDPPVKMQGSITTPGSIALAQAQAQAQVPAKAPLAGQVSTMVTTSTTTTVAKTVTVTRPTGVSFKKDVPPSINTTNIDTLLVATDQTERIVEPPENIQEKIAFIFNNLSQSNMTQKVEELKETVKEEFMPWVSQYLVMKRVSIEPNFHSLYSNFLDTLKNPEFNKMVLNETYRNIKVLLTSDKAAANFSDRSLLKNLGHWLGMITLAKNKPILHTDLDVKSLLLEAYVKGQQELLYVVPFVAKVLESSIRSVVFRPPNPWTMAIMNVLAELHQEHDLKLNLKFEIEVLCKNLALDINELKPGNLLKDKDRLKNLDEQLSAPKKDVKQPEELPPITTTTTSTTPATNTTCTATVPPQPQYSYHDINVYSLAGLAPHITLNPTIPLFQAHPQLKQCVRQAIERAVQELVHPVVDRSIKIAMTTCEQIVRKDFALDSEESRMRIAAHHMMRNLTAGMAMITCREPLLMSISTNLKNSFASALRTASPQQREMMDQAAAQLAQDNCELACCFIQKTAVEKAGPEMDKRLATEFELRKHARQEGRRYCDPVVLTYQAERMPEQIRLKVGGVDPKQLAVYEEFARNVPGFLPTNDLSQPTGFLAQPMKQAWATDDVAQIYDKCITELEQHLHAIPPTLAMNPQAQALRSLLEVVVLSRNSRDAIAALGLLQKAVEGLLDATSGADADLLLRYRECHLLVLKALQDGRAYGSPWCNKQITRCLIECRDEYKYNVEAVELLIRNHLVNMQQYDLHLAQSMENGLNYMAVAFAMQLVKILLVDERSVAHVTEADLFHTIETLMRINAHSRGNAPEGLPQLMEVVRSNYEAMIDRAHGGPNFMMHSGISQASEYDDPPGLREKAEYLLREWVNLYHSAAAGRDSTKAFSAFVGQMHQQGILKTDDLITRFFRLCTEMCVEISYRAQAEQQHNPAANPTMIRAKCYHNLDAFVRLIALLVKHSGEATNTVTKINLLNKVLGIVVGVLLQDHDVRQSEFQQLPYHRIFIMLLLELNAPEHVLETINFQTLTAFCNTFHILRPTKAPGFVYAWLELISHRIFIARMLAHTPQQKGWPMYAQLLIDLFKYLAPFLRNVELTKPMQILYKGTLRVLLVLLHDFPEFLCDYHYGFCDVIPPNCIQLRNLILSAFPRNMRLPDPFTPNLKVDMLSEINIAPRILTNFTGVMPPQFKKDLDSYLKTRSPVTFLSDLRSNLQVSNEPGNRYNLQLINALVLYVGTQAIAHIHNKGSTPSMSTITHSAHMDIFQNLAVDLDTEGRYLFLNAIANQLRYPNSHTHYFSCTMLYLFAEANTEAIQEQITR

SEQ ID NO: 851508 - protein, 1528 aa, Homo sapiens
GAVGCLQACAVSVSQELSETILTMVANCSNVMNKARQPPPGVMPKGRPPSASSLDAISPVQIDPLAGMTSLSIGGSAAPHTQSMQGFPPNLGSAFSTPQSPAKAFPPLSTPNQTTAFSGIGGLSSQLPVGGLGTGSLTGIGTGALGLPAVNNDPFVQRKLGTSGLNQPTFQQTDLSQVWPEANQHFSKEIDDEANSYFQRIYNHPPHPTMSVDEVLEMLQRFKDSTIKREREVFNCMLRNLFEEYRFFPQYPDKELHITACLFGGIIEKGLVTYMALGLALRYVLEALRKPFGSKMYYFGIAALDRFKNRLKDYPQYCQHLASISHFMQFPHHLQEYIEYGQQSRDPPVKMQGSITTPGSIALAQAQAQAQVPAKAPLAGQVSTMVTTSTTTTVAKTVTVTRPTGVSFKKDVPPSINTTNIDTLLVATDQTERIVEPPENIQEKIAFIFNNLSQSNMTQKVEELKETVKEEFMPWVSQYLVMKRVSIEPNFHSLYSNFLDTLKNPEFNKMVLNETYRNIKVLLTSDKAAANFSDRSLLKNLGHWLGMITLAKNKPILHTDLDVKSLLLEAYVKGQQELLYVVPFVAKVLESSIRSVVFRPPNPWTMAIMNVLAELHQEHDLKLNLKFEIEVLCKNLALDINELKPGNLLKDKDRLKNLDEQLSAPKKDVKQPEELPPITTTTTSTTPATNTTCTATVPPQPQYSYHDINVYSLAGLAPHITLNPTIPLFQAHPQLKQCVRQAIERAVQELVHPVVDRSIKIAMTTCEQIVRKDFALDSEESRMRIAAHHMMRNLTAGMAMITCREPLLMSISTNLKNSFASALRTASPQQREMMDQAAAQLAQDNCELACCFIQKTAVEKAGPEMDKRLATEFELRKHARQEGRRYCDPVVLTYQAERMPEQIRLKVGGVDPKQLAVYEEFARNVPGFLPTNDLSQPTGFLAQPMKQAWATDDVAQIYDKCITELEQHLHAIPPTLAMNPQAQALRSLLEVVVLSRNSRDAIAALGLLQKAVEGLLDATSGADADLLLRYRECHLLVLKALQDGRAYGSPWCNKQITRCLIECRDEYKYNVEAVELLIRNHLVNMQQYDLHLAQSMENGLNYMAVAFAMQLVKILLVDERSVAHVTEADLFHTIETLMRINAHSRGNAPEGLPQLMEVVRSNYEAMIDRAHGGPNFMMHSGISQASEYDDPPGLREKAEYLLREWVNLYHSAAAGRDSTKAFSAFVGQMHQQGILKTDDLITRFFRLCTEMCVEISYRAQAEQQHNPAANPTMIRAKCYHNLDAFVRLIALLVKHSGEATNTVTKINLLNKVLGIVVGVLLQDHDVRQSEFQQLPYHRIFIMLLLELNAPEHVLETINFQTLTAFCNTFHILRPTKAPGFVYAWLELISHRIFIARMLAHTPQQKGWPMYAQLLIDLFKYLAPFLRNVELTKPMQILYKGTLRVLLVLLHDFPEFLCDYHYGFCDVIPPNCIQLRNLILSAFPRNMRLPDHDRVSDERKKFESAEERTTKKAITITISETENETQISR

SEQ ID NO: 851509 - protein, 897 aa, Homo sapiens
GAVGCLQACAVSVSQELSETILTMVANCSNVMNKARQPPPGVMPKGRPPSASSLDAISPVQIDPLAGMTSLSIGGSAAPHTQSMQGFPPNLGSAFSTPQSPAKAFPPLSTPNQTTAFSGIGGLSSQLPVGGLGTGSLTGIGTGALGLPAVNNDPFVQRKLGTSGLNQPTFQQTDLSQVWPEANQHFSKEIDDEANSYFQRIYNHPPHPTMSVDEVLEMLQRFKDSTIKREREVFNCMLRNLFEEYRFFPQYPDKELHITACLFGGIIEKGLVTYMALGLALRYVLEALRKPFGSKMYYFGIAALDRFKNRLKDYPQYCQHLASISHFMQFPHHLQEYIEYGQQSRDPPVKMQGSITTPGSIALAQAQAQAQVPAKAPLAGQVSTMVTTSTTTTVAKTVTVTRPTGVSFKKDVPPSINTTNIDTLLVATDQTERIVEPPENIQEKIAFIFNNLSQSNMTQKVEELKETVKEEFMPWVSQYLVMKRVSIEPNFHSLYSNFLDTLKNPEFNKMVLNETYRNIKVLLTSDKAAANFSDRSLLKNLGHWLGMITLAKNKPILHTDLDVKSLLLEAYVKGQQELLYVVPFVAKVLESSIRSVVFRPPNPWTMAIMNVLAELHQEHDLKLNLKFEIEVLCKNLALDINELKPGNLLKDKDRLKNLDEQLSAPKKDVKQPEELPPITTTTTSTTPATNTTCTATVPPQPQYSYHDINVYSLAGLAPHITLNPTIPLFQAHPQLKQCVRQAIERAVQELVHPVVDRSIKIAMTTCEQIVRKDFALDSEESRMRIAAHHMMRNLTAGMAMITCREPLLMSISTNLKNSFASALRVSWLFPWYRYKTYYCLSVIIFFFVYIWHWALPLILNNHHICLMSSIILDCNSVRQSIMSVCFFFFLLYSQPDV

SEQ ID NO: 851510 - protein, 1722 aa, Homo sapiens; identical to SEQ ID NO: 851503

SEQ ID NO: 851511 - protein, 1722 aa, Homo sapiens; identical to SEQ ID NO: 851503

SEQ ID NO: 851512 - protein, 1749 aa, Homo sapiens
GAVGCLQACAVSVSQELSETILTMVANCSNVMNKARQPPPGVMPKGRPPSASSLDAISPVQIDPLAGMTSLSIGGSAAPHTQSMQGFPPNLGSAFSTPQSPAKAFPPLSTPNQTTAFSGIGGLSSQLPVGGLGTGSLTGIGTGALGLPAVNNDPFVQRKLGTSGLNQPTFQQTDLSQVWPEANQHFSKEIDDEANSYFQRIYNHPPHPTMSVDEVLEMLQRFKDSTIKREREVFNCMLRNLFEEYRFFPQYPDKELHITACLFGGIIEKGLVTYMALGLALRYVLEALRKPFGSKMYYFGIAALDRFKNRLKDYPQYCQHLASISHFMQFPHHLQEYIEYGQQSRDPPVKMQGSITTPGSIALAQAQAQAQVPAKAPLAGQVSTMVTTSTTTTVAKTVTVTRPTGVSFKKDVPPSINTTNIDTLLVATDQTERIVEPPENIQEKIAFIFNNLSQSNMTQKVEELKETVKEEFMPWVSQYLVMKRVSIEPNFHSLYSNFLDTLKNPEFNKMVLNETYRNIKVLLTSDKAAANFSDRSLLKNLGHWLGMITLAKNKPILHTDLDVKSLLLEAYVKGQQELLYVVPFVAKVLESSIRSVVFRPPNPWTMAIMNVLAELHQEHDLKLNLKFEIEVLCKNLALDINELKPGNLLKDKDRLKNLDEQLSAPKKDVKQPEELPPITTTTTSTTPATNTTCTATVPPQPQYSYHDINVYSLAGLAPHITLNPTIPLFQAHPQLKQCVRQAIERAVQELVHPVVDRSIKIAMTTCEQIVRKDFALDSEESRMRIAAHHMMRNLTAGMAMITCREPLLMSISTNLKNSFASALRTASPQQREMMDQAAAQLAQDNCELACCFIQKTAVEKAGPEMDKRLATEFELRKHARQEGRRYCDPVVLTYQAERMPEQIRLKVGGVDPKQLAVYEEFARNVPGFLPTNDLSQPTGFLAQPMKQAWATDDVAQIYDKCITELEQHLHAIPPTLAMNPQAQALRSLLEVVVLSRNSRDAIAALGLLQKAVEGLLDATSGADADLLLRYRECHLLVLKALQDGRAYGSPWCNKQITRCLIECRDEYKYNVEAVELLIRNHLVNMQQYDLHLAQSMENGLNYMAVAFAMQLVKILLVDERSVAHVTEADLFHTIETLMRINAHSRGNAPEGLPQLMEVVRSNYEAMIDRAHGGPNFMMHSGISQASEYDDPPGLREKAEYLLREWVNLYHSAAAGRDSTKAFSAFVGQMHQQGILKTDDLITRFFRLCTEMCVEISYRAQAEQQHNPAANPTMIRAKCYHNLDAFVRLIALLVKHSGEATNTVTKINLLNKVLGIVVGVLLQDHDVRQSEFQQLPYHRIFIMLLLELNAPEHVLETINFQTLTAFCNTFHILRPTKAPGFVYAWLELISHRIFIARMLAHTPQQKYCRKYHSLAPQIRRNVTAMYGVNLTKKGWPMYAQLLIDLFKYLAPFLRNVELTKPMQILYKGTLRVLLVLLHDFPEFLCDYHYGFCDVIPPNCIQLRNLILSAFPRNMRLPDPFTPNLKVDMLSEINIAPRILTNFTGVMPPQFKKDLDSYLKTRSPVTFLSDLRSNLQVSNEPGNRYNLQLINALVLYVGTQAIAHIHNKGSTPSMSTITHSAHMDIFQNLAVDLDTEGRYLFLNAIANQLRYPNSHTHYFSCTMLYLFAEANTEAIQEQITRVLLERLIVNRPHPWGLLITFIELIKNPAFKFWNHEFVHCAPEIEKLFQSVAQCCMGQKQAQQVMEGTGAS

SEQ ID NO: 851513 - protein, 1697 aa, Homo sapiens
GAVGCLQACAVSVSQELSETILTMVANCSNVMNKARQPPPGVMPKGRPPSASSLDAISPVQIDPLAGMTSLSIGGSAAPHTQSMQGFPPNLGSAFSTPQSPAKAFPPLSTPNQTTAFSGIGGLSSQLPVGGLGTGSLTGIGTGALGLPAVNNDPFVQRKLGTSGLNQPTFQQTDLSQVWPEANQHFSKEIDDEANSYFQRIYNHPPHPTMSVDEVLEMLQRFKDSTIKREREVFNCMLRNLFEEYRFFPQYPDKELHITACLFGGIIEKGLVTYMALGLALRYVLEALRKPFGSKMYYFGIAALDRFKNRLKDYPQYCQHLASISHFMQFPHHLQEYIEYGQQSRDPPVKMQGSITTPGSIALAQAQAQAQVPAKAPLAGQVSTMVTTSTTTTVAKTVTVTRPTGVSFKKDVPPSINTTNIDTLLVATDQTERIVEPPENIQEKIAFIFNNLSQSNMTQKVEELKETVKEEFMPWVSQYLVMKRVSIEPNFHSLYSNFLDTLKNPEFNKMVLNETYRNIKVLLTSDKAAANFSDRSLLKNLGHWLGMITLAKNKPILHTDLDVKSLLLEAYVKGQQELLYVVPFVAKVLESSIRSVVFRPPNPWTMAIMNVLAELHQEHDLKLNLKFEIEVLCKNLALDINELKPGNLLKDKDRLKNLDEQLSAPKKDVKQPEELPPITTTTTSTTPATNTTCTATVPPQPQYSYHDINVYSLAGLAPHITLNPTIPLFQAHPQLKQCVRQAIERAVQELVHPVVDRSIKIAMTTCEQIVRKDFALDSEESRMRIAAHHMMRNLTAGMAMITCREPLLMSISTNLKNSFASALRTASPQQREMMDQAAAQLAQDNCELACCFIQKTAVEKAGPEMDKRLATEFELRKHARQEGRRYCDPVVLTYQAERMPEQIRLKVGGVDPKQLAVYEEFARNVPGFLPTNDLSQPTGFLAQPMKQAWATDDVAQIYDKCITELEQHLHAIPPTLAMNPQAQALRSLLEVVVLSRNSRDAIAALGLLQKAVEGLLDATSGADADLLLRYRECHLLVLKALQDGRAYGSPWCNKQITRCLIECRDEYKYNVEAVELLIRNHLVNMQQYDLHLAQSMENGLNYMAVAFAMQLVKILLVDERSVAHVTEADLFHTIETLMRINAHSRGNAPEGLPQLMEVVRSNYEAMIDRAHGGPNFMMHSGISQASEYDDPPGLREKAEYLLREWVNLYHSAAAGRDSTKAFSAFVGQMHQQGILKTDDLITRFFRLCTEMCVEISYRAQAEQQHNPAANPTMIRAKCYHNLDAFVRLIALLVKHSGEATNTVTKINLLNKVLGIVVGVLLQDHDVRQSEFQQLPYHRIFIMLLLELNAPEHVLETINFQTLTAFCNTFHILRPTKAPGFVYAWLELISHRIFIARMLAHTPQQKGWPMYAQLLIDLFKYLAPFLRNVELTKPMQILYKGTLRVLLVLLHDFPEFLCDYHYGFCDVIPPNCIQLRNLILSAFPRNMRLPDPFTPNLKVDMLSEINIAPRILTNFTGVMPPQFKKDLDSYLKTRSPVTFLSDLRSNLQVSNEPGNRYNLQLINALVLYVGTQAIAHIHNKGSTPSMSTITHSAHMDIFQNLAVDLDTEGRYLFLNAIANQLRYPNSHTHYFSCTMLYLFAEANTEAIQEQITRVLLERLIVNRPHPWGLLITFIELIKNPAFKFWNHEFVHCAPEIEK

SEQ ID NO: 851514 - protein, 1722 aa, Homo sapiens; identical to SEQ ID NO: 851503

SEQ ID NO: 851515 - protein, 1704 aa, Homo sapiens
GAVGCLQACAVSVSQELSETILTMVANCSNVMNKARQPPPGVMPKGRPPSASSLDAISPVQIDPLAGMTSLSIGGSAAPHTQSMQGFPPNLGSAFSTPQSPAKAFPPLSTPNQTTAFSGIGGLSSQLPVGGLGTGSLTGIGTGALGLPAVNNDPFVQRKLGTSGLNQPTFQQTDLSQVWPEANQHFSKEIDDEANSYFQRIYNHPPHPTMSVDEVLEMLQRFKDSTIKREREVFNCMLRNLFEEYRFFPQYPDKELHITACLFGGIIEKGLVTYMALGLALRYVLEALRKPFGSKMYYFGIAALDRFKNRLKDYPQYCQHLASISHFMQFPHHLQEYIEYGQQSRDPPVKMQGSITTPGSIALAQAQAQAQVPAKAPLAGQVSTMVTTSTTTTVAKTVTVTRPTGVSFKKDVPPSINTTNIDTLLVATDQTERIVEPPENIQEKIAFIFNNLSQSNMTQKVEELKETVKEEFMPWVSQYLVMKRVSIEPNFHSLYSNFLDTLKNPEFNKMVLNETYRNIKVLLTSDKAAANFSDRSLLKNLGHWLGMITLAKNKPILHTDLDVKSLLLEAYVKGQQELLYVVPFVAKVLESSIRSVVFRPPNPWTMAIMNVLAELHQEHDLKLNLKFEIEVLCKNLALDINELKPGNLLKDKDRLKNLDEQLSAPKKDVKQPEELPPITTTTTSTTPATNTTCTATVPPQPQYSYHDINVYSLAGLAPHITLNPTIPLFQAHPQLKQCVRQAIERAVQELVHPVVDRSIKIAMTTCEQIVRKDFALDSEESRMRIAAHHMMRNLTAGMAMITCREPLLMSISTNLKNSFASALRTASPQQREMMDQAAAQLAQDNCELACCFIQKTAVEKAGPEMDKRLATEFELRKHARQEGRRYCDPVVLTYQAERMPEQIRLKVGGVDPKQLAVYEEFARNVPGFLPTNDLSQPTGFLAQPMKQAWATDDVAQIYDKCITELEQHLHAIPPTLAMNPQAQALRSLLEVVVLSRNSRDAIAALGLLQKAVEGLLDATSGADADLLLRYRECHLLVLKALQDGRAYGSPWCNKQITRCLIECRDEYKYNVEAVELLIRNHLVNMQQYDLHLAQSMENGLNYMAVAFAMQLVKILLVDERSVAHVTEADLFHTIETLMRINAHSRGNAPEGLPQLMEVVRSNYEAMIDRAHGGPNFMMHSGISQASEYDDPPGLREKAEYLLREWVNLYHSAAAGRDSTKAFSAFVGQMHQQGILKTDDLITRFFRLCTEMCVEISYRAQAEQQHNPAANPTMIRAKCYHNLDAFVRLIALLVKHSGEATNTVTKINLLNKVLGIVVGVLLQDHDVRQSEFQQLPYHRIFIMLLLELNAPEHVLETINFQTLTAFCNTFHILRPTKAPGFVYAWLELISHRIFIARMLAHTPQQKGWPMYAQLLIDLFKYLAPFLRNVELTKPMQILYKGTLRVLLVLLHDFPEFLCDYHYGFCDVIPPNCIQLRNLILSAFPRNMRLPDPFTPNLKVDMLSEINIAPRILTNFTGVMPPQFKKDLDSYVSNEPGNRYNLQLINALVLYVGTQAIAHIHNKGSTPSMSTITHSAHMDIFQNLAVDLDTEGRYLFLNAIANQLRYPNSHTHYFSCTMLYLFAEANTEAIQEQITRVLLERLIVNRPHPWGLLITFIELIKNPAFKFWNHEFVHCAPEIEKLFQSVAQCCMGQKQAQQVMEGTGAS

SEQ ID NO: 851516 - protein, 1722 aa, Homo sapiens; identical to SEQ ID NO: 851503

SEQ ID NO: 851517 - protein, 391 aa, Homo sapiens
GDVTSMIHCTRRTERRLCEPLVSTDLVIAMLDVLALEIYRSSRDLLIIIKGLTTSMRRAWTIVSAFSGSRMDQSYARLVEDDVSISNTVGNSPYIYCDMSSNSMAQLIMEWRSMDILLHDFPEFLCDYHYGFCDVIPPNCIQLRNLILSAFPRNMRLPDPFTPNLKVDMLSEINIAPRILTNFTGVMPPQFKKDLDSYLKTRSPVTFLSDLRSNLQVSNEPGNRYNLQLINALVLYVGTQAIAHIHNKGSTPSMSTITHSAHMDIFQNLAVDLDTEGRYLFLNAIANQLRYPNSHTHYFSCTMLYLFAEANTEAIQEQITRVLLERLIVNRPHPWGLLITFIELIKNPAFKFWNHEFVHCAPEIEKLFQSVAQCCMGQKQAQQVMEGTGAS

SEQ ID NO: 851518 - protein, 157 aa, Homo sapiens
FCFAHFKVSNEPGNRYNLQLINALVLYVGTQAIAHIHNKGSTPSMSTITHSAHMDIFQNLAVDLDTEGRYLFLNAIANQLRYPNSHTHYFSCTMLYLFAEANTEAIQEQITRVLLERLIVNRPHPWGLLITFIELIKNPAFKFWNHEFVHCAPEIEK

SEQ ID NO: 851519 - protein, 110 aa, Homo sapiens
MSGNKPEAAILHLFSSNQDREGIIISIHNIYLERQRETPVFPFVWNFLALCKLCPRQVHKLVPCNEEAADAMHLSEGIAPCLLTFLVSQRIAKSQFEYYVTYFFNVDRGP

SEQ ID NO: 851520 - protein, 1535 aa, Homo sapiens
GAVGCLQACAVSVSQELSETILTMVANCSNVMNKARQPPPGVMPKGRPPSASSLDAISPVQIDPLAGMTSLSIGGSAAPHTQSMQGFPPNLGSAFSTPQSPAKAFPPLSTPNQTTAFSGIGGLSSQLPVGGLGTGSLTGIGTGALGLPAVNNDPFVQRKLGTSGLNQPTFQQTDLSQVWPEANQHFSKEIDDEANSYFQRIYNHPPHPTMSVDEVLEMLQRFKDSTIKREREVFNCMLRNLFEEYRFFPQYPDKELHITACLFGGIIEKGLVTYMALGLALRYVLEALRKPFGSKMYYFGIAALDRFKNRLKDYPQYCQHLASISHFMQFPHHLQEYIEYGQQSRDPPVKMQGSITTPGSIALAQAQAQAQVPAKAPLAGQVSTMVTTSTTTTVAKTVTVTRPTGVSFKKDVPPSINTTNIDTLLVATDQTERIVEPPENIQEKIAFIFNNLSQSNMTQKVEELKETVKEEFMPWVSQYLVMKRVSIEPNFHSLYSNFLDTLKNPEFNKMVLNETYRNIKVLLTSDKAAANFSDRSLLKNLGHWLGMITLAKNKPILHTDLDVKSLLLEAYVKGQQELLYVVPFVAKVLESSIRSVVFRPPNPWTMAIMNVLAELHQEHDLKLNLKFEIEVLCKNLALDINELKPGNLLKDKDRLKNLDEQLSAPKKDVKQPEELPPITTTTTSTTPATNTTCTATVPPQPQYSYHDINVYSLAGLAPHITLNPTIPLFQAHPQLKQCVRQAIERAVQELVHPVVDRSIKIAMTTCEQIVRKDFALDSEESRMRIAAHHMMRNLTAGMAMITCREPLLMSISTNLKNSFASALRTASPQQREMMDQAAAQLAQDNCELACCFIQKTAVEKAGPEMDKRLATEFELRKHARQEGRRYCDPVVLTYQAERMPEQIRLKVGGVDPKQLAVYEEFARNVPGFLPTNDLSQPTGFLAQPMKQAWATDDVAQIYDKCITELEQHLHAIPPTLAMNPQAQALRSLLEVVVLSRNSRDAIAALGLLQKAVEGLLDATSGADADLLLRYRECHLLVLKALQDGRAYGSPWCNKQITRCLIECRDEYKYNVEAVELLIRNHLVNMQQYDLHLAQSMENGLNYMAVAFAMQLVKILLVDERSVAHVTEADLFHTIETLMRINAHSRGNAPEGLPQLMEVVRSNYEAMIDRAHGGPNFMMHSGISQASEYDDPPGLREKAEYLLREWVNLYHSAAAGRDSTKAFSAFVGQVELLERKMHQQGILKTDDLITRFFRLCTEMCVEISYRAQAEQQHNPAANPTMIRAKCYHNLDAFVRLIALLVKHSGEATNTVTKINLLNKVLGIVVGVLLQDHDVRQSEFQQLPYHRIFIMLLLELNAPEHVLETINFQTLTAFCNTFHILRPTKAPGFVYAWLELISHRIFIARMLAHTPQQKGWPMYAQLLIDLFKYLAPFLRNVELTKPMQILYKGTLRVLLVLLHDFPEFLCDYHYGFCDVIPPNCIQLRNLILSAFPRNMRLPDHDRVSDERKKFESAEERTTKKAITITISETENETQISR

SEQ ID NO: 851521 - protein, 96 aa, Homo sapiens
GRNAPRGADETAGLERPSRPRPPPEAACSGLSWRYEVPVQVSDFGLVRWWRRSRAGLVRMITDVQLAIFANMLGVSLFLLVVLYHYVAVNNPKKQE

SEQ ID NO: 851522 - protein, 78 aa, Homo sapiens
VAGPWGEDGFLRGRGVRQPAAQPLSSPQDDHGRAARHLRQHAGRVALLACRSLSLRGRQQSQEAGMKVALSPPQGSRT

SEQ ID NO: 851523 - protein, 96 aa, Homo sapiens; identical to SEQ ID NO: 851521

SEQ ID NO: 851524 - protein, 96 aa, Homo sapiens; identical to SEQ ID NO: 851521

SEQ ID NO: 851525 - protein, 69 aa, Homo sapiens
VNNPKKQEGKWRFLRPRVPGHSLRQDGGYEEAFTLHFIPSTHHNMLGVSLFLLVVLYHYVAVNNPKKQE

SEQ ID NO: 851526 - protein, 96 aa, Homo sapiens; identical to SEQ ID NO: 851521

SEQ ID NO: 851527 - protein, 96 aa, Homo sapiens; identical to SEQ ID NO: 851521

SEQ ID NO: 851528 - protein, 96 aa, Homo sapiens; identical to SEQ ID NO: 851521

SEQ ID NO: 851529 - protein, 96 aa, Homo sapiens; identical to SEQ ID NO: 851521

SEQ ID NO: 851530 - protein, 502 aa, Homo sapiens
MSGRRFHLSTTDRVIKAVPFPPTQRLTFKEVFENGKPKVDVLKNHLVKEGRLEEEVALKIINDGAAILRQEKTMIEVDAPITVCGDIHGQFFDLMKLFEVGGSPSNTRYLFLGDYVDRGYFSIECVLYLWSLKINHPKTLFLLRGNHECRHLTDYFTFKQECRIKYSEQVYDACMETFDCLPLAALLNQQFLCVHGGMSPEITSLDDIRKLDRFTEPPAFGPVCDLLWSDPSEDYGNEKTLEHYTHNTVRGCSYFYSYPAVCEFLQNNNLLSIIRAHEAQDAGYRMYRKSQATGFPSLITIFSAPNYLDVYNNKAAVLKYENNVMNIRQFNCSPHPYWLPNFMDVFTWSLPFVGEKVTEMLVNVLNICSDDELISDDEAEGSTTVRKEIIRNKIRAIGKMARVFSILRQESESVLTLKGLTPTGTLPLGVLSGGKQTIETAIRGFSLQHKIRSFEEARGLDRINERMPPRKDSIHAGGPMKSVTSAHSHAAHRSDQGKKAHS

SEQ ID NO: 851531 - protein, 512 aa, Homo sapiens
MSGRRFHLSTTDRVIKAVPFPPTQRLTFKEVFENGKPKVDVLKNHLVKEGRLEEEVALKIINDGAAILRQEKTMIEVDAPITVCGDIHGQFFDLMKLFEVGGSPSNTRYLFLGDYVDRGYFSIECVLYLWSLKINHPKTLFLLRGNHECRHLTDYFTFKQECRIKYSEQVYDACMETFDCLPLAALLNQQFLCVHGGMSPEITSLDDIRKLDRFTEPPAFGPVCDLLWSDPSEDYGNEKTLEHYTHNTVRGCSYFYSYPAVCEFLQNNNLLSIIRAHEAQDAGYRMYRKSQATGFPSLITIFSAPNYLDVYNNKAAVLKYENNVMNIRQFNCSPHPYWLPNFMDVFTWSLPFVGEKVTEMLVNVLNICSDDELISDDEAEGSTTVRKEIIRNKIRAIGKMARVFSILRQESESVLTLKGLTPTGTLPLGVLSGGKQTIETATVEAVEAREAIRGFSLQHKIRSFEEARGLDRINERMPPRKDSIHAGGPMKSVTSAHSHAAHRSDQGKKAHS

SEQ ID NO: 851532 - protein, 168 aa, Homo sapiens
MSGRRFHLSTTDRVIKAVPFPPTQRLTFKEVFENGKPKVDVLKNHLVKEGRLEEEVALKIINDGAAILRQEKTMIEVDAPITVCGDIHGQFFDLMKLFEVGGSPSNTRYLFLGDYVDRGYFSIERWGPAMLPRLECSGYTQVRSFRTSASNSWIQAILLPQLPEYMEL

SEQ ID NO: 851533 - protein, 502 aa, Homo sapiens; identical to SEQ ID NO: 851530

SEQ ID NO: 851534 - protein, 521 aa, Homo sapiens
MSGRRFHLSTTDRVIKAVPFPPTQRLTFKEVFENGKPKVDVLKNHLVKEGRLEEEVALKIINDGAAILRQEKTMIEVDAPITVCGDIHGQFFDLMKLFEVGGSPSNTRYLFLGDYVDRGYFSIECVLYLWSLKINHPKTLFLLRGNHECRHLTDYFTFKQECRIKYSEQVYDACMETFDCLPLAALLNQQFLCVHGGMSPEITSLDDIRKLDRFTEPPAFGPVCDLLWSDPSEDYGNEKTLEHYTHNTVRGCSYFYSYPAVCEFLQNNNLLSIIRAHEAQDAGYRMYRKSQATGFPSLITIFSAPNYLDVYNNKAAVLKYENNVMNIRQFNCSPHPYWLPNFMDVFTWSLPFVGEKVTEMLVNVLNICSDDELISDDEAEDHYIPSYQKGSTTVRKEIIRNKIRAIGKMARVFSILRQESESVLTLKGLTPTGTLPLGVLSGGKQTIETATVEAVEAREAIRGFSLQHKIRSFEEARGLDRINERMPPRKDSIHAGGPMKSVTSAHSHAAHRSDQGKKAHS

SEQ ID NO: 851535 - protein, 512 aa, Homo sapiens; identical to SEQ ID NO: 851531

SEQ ID NO: 851536 - protein, 495 aa, Homo sapiens
MSGRRFHLSTTDRVIKAVPFPPTQRLTFKEVFENGKPKVDVLKNHLVKEGRLEEEVALKIINDGAAILRQEKTMIEVDAPITVCGDIHGQFFDLMKLFEVGGSPSNTRYLFLGDYVDRGYFSIECVLYLWSLKINHPKTLFLLRGNHECRHLTDYFTFKQECRIKYSEQVYDACMETFDCLPLAALLNQQFLCVHGGMSPEITSLDDIRKLDRFTEPPAFGPVCDLLWSDPSEDYGNEKTLEHYTHNTVRGCSYFYSYPAVCEFLQNNNLLSIIRAHEAQDAGYRMYRKSQATGFPSLITIFSAPNYLDVYNNKAAVLKYENNVMNIRQFNCSPHPYWLPNFMDVFTWSLPFVGEKVTEMLVNVLNICSDDELISDDEAEGSTTVRKEIIRNKIRAIGKMARVFSILRQESESVLTLKGLTPTGTLPLGVLSGGKQTIETATVEAVEAREALMQRQKLKQLVMRGQVVYFCIPSMYKRHPFDSQESQIGQPLQRF

SEQ ID NO: 851537 - protein, 358 aa, Homo sapiens
CCSEDPDDVEQRLFQYRGRIKYSEQVYDACMETFDCLPLAALLNQQFLCVHGGMSPEITSLDDIRKLDRFTEPPAFGPVCDLLWSDPSEDYGNEKTLEHYTHNTVRGCSYFYSYPAVCEFLQNNNLLSIIRAHEAQDAGYRMYRKSQATGFPSLITIFSAPNYLDVYNNKAAVLKYENNVMNIRQFNCSPHPYWLPNFMDVFTWSLPFVGEKVTEMLVNVLNICSDDELISDDEAEGSTTVRKEIIRNKIRAIGKMARVFSILRQESESVLTLKGLTPTGTLPLGVLSGGKQTIETAIRGFSLQHKIRSFEEARGLDRINERMPPRKDSIHAGGPMKSVTSAHSHAAHRSDQGKKAHS

SEQ ID NO: 851538 - protein, 78 aa, Homo sapiens
KGLTPTGTLPLGVLSGGKQTIETGEYESAPPWKVCSRYLTVSTHLQMGAFLRKCHESSWLYHKRGNESSPLLPSIQKT

SEQ ID NO: 851539 - protein, 141 aa, Homo sapiens
MSGRRFHLSTTDRVIKAVPFPPTQRLTFKEVFENGKPKVDVLKNHLVKEGRLEEEVALKIINDGAAILRQEKTMIEVDAPITVCGDIHGQFFDLMKLFEVGGSPSNTRYLFLGDYVDRGYFSIEVKIKLDMLGLLYCLSKK

SEQ ID NO: 851540 - protein, 325 aa, Homo sapiens
MSGRRFHLSTTDRVIKAVPFPPTQRLTFKEVFENGKPKVDVLKNHLVKEGRLEEEVALKIINDGAAILRQEKTMIEVDAPITVCGDIHGQFFDLMKLFEVGGSPSNTRYLFLGDYVDRGYFSIECVLYLWSLKINHPKTLFLLRGNHECRHLTDYFTFKQECRIKYSEQVYDACMETFDCLPLAALLNQQFLCVHGGMSPEITSLDDIRKLDRFTEPPAFGPVCDLLWSDPSEDYGNEKTLEHYTHNTVRGCSYFYSYPAVCEFLQNNNLLSIIRAHEAQDAGYRMYRKSQATGFPSLITIFSAPNYLDVYNNKESATHSFDYPQ

SEQ ID NO: 851541 - protein, 395 aa, Homo sapiens
MSGRRFHLSTTDRVIKAVPFPPTQRLTFKEVFENGKPKVDVLKNHLVKEGRLEEEVALKIINDGAAILRQEKTMIEVDAPITVCGDIHGQFFDLMKLFEVGGSPSNTRYLFLGDYVDRGYFSIECVLYLWSLKINHPKTLFLLRGNHECRHLTDYFTFKQECRIKYSEQVYDACMETFDCLPLAALLNQQFLCVHGGMSPEITSLDDIRKLDRFTEPPAFGPVCDLLWSDPSEDYGNEKTLEHYTHNTVRGCSYFYSYPAVCEFLQNNNLLSIIRAHEAQDAGYRMYRKSQATGFPSLITIFSAPNYLDVYNNKAAVLKYENNVMNIRQFNCSPHPYWLPNFMDVFTWSLPFVGEKVTEMLVNVLNICSDDELISDDEAEEGTYSFVREVLRGLG

SEQ ID NO: 851542 - protein, 109 aa, Homo sapiens
MTFTRRVLHSHLSVCFSRRLLCAKKLFLSLLLCCLIELSPPASCFSVAIRGFSLQHKIRSFEEARGLDRINERMPPRKDSIHAGGPMKSVTSAHSHAAHRSDQGKKAHS

SEQ ID NO: 851543 - protein, 100 aa, Homo sapiens
GPPPPPGRGRARQPPPARRLPLGSWEPRRYGPAEHSGGRRAGWAPAQWPSLDRKAEAASGPRPGVSGCVTLAKMLKLFSWLPNGADRLTCCLRNLRDQIK

SEQ ID NO: 851544 - protein, 72 aa, Homo sapiens
AQEKQGLREESNCDIEKSLSSPFPVVALGPRPGFQKMGQLYSGVKANYCLAARVSPGRRILAFCLWKFLLHP

SEQ ID NO: 851545 - protein, 410 aa, Homo sapiens
RRFRSLQRVVGWVVRVGAGAAERVLGFRYQDLRQKIRPVAKELQFNYIPVDAEIVSIDTFNKSPPKRGLVVGITFIKDSGDKGSPFLNIYCDYEPGSEYNLDSIAQSCLNLELQFTPFQLCHAEVQVGDQLETVFLLSGNDPAIHLYKENEGLHQFEEQPVENLFPELTNLTSSVLWLDVHNFPGTSRRLSALGCQSGYVRVAHVDQRSREVLQMWSVLQDGPISRVIVFSLSAAKETKDRPLQDEYSVLVASMLEPAVVYRDLLNRGLEDQLLLPGSDQFDSVLCSLVTDVDLDGRPEVLVATYGQELLCYKYRGPESGLPEAQHGFHLLWQRSFSSPLLAMAHVDLTGDGLQELAVVSLKGVHILQHSLIQASELVLTRLRHQVEQRRRRLQGLEDGAGAGPAENAAS

SEQ ID NO: 851546 - protein, 390 aa, Homo sapiens
LGGGGLERGVEKASEALSEPGHRAGRMGSVDAEIVSIDTFNKSPPKRGLVVGITFIKDSGDKGSPFLNIYCDYEPGSEYNLDSIAQSCLNLELQFTPFQLCHAEVQVGDQLETVFLLSGNDPAIHLYKENEGLHQFEEQPVENLFPELTNLTSSVLWLDVHNFPGTSRRLSALGCQSGYVRVAHVDQRSREVLQMWSVLQDGPISRVIVFSLSAAKETKDRPLQDEYSVLVASMLEPAVVYRDLLNRGLEDQLLLPGSDQFDSVLCSLVTDVDLDGRPEVLVATYGQELLCYKYRGPESGLPEAQHGFHLLWQRSFSSPLLAMAHVDLTGDGLQELAVVSLKGVHILQHSLIQASELVLTRLRHQVEQRRRRLQGLEDGAGAGPAENAAS

SEQ ID NO: 851547 - protein, 435 aa, Homo sapiens [sequence omitted]

SEQ ID NO: 851548 - protein, 379 aa, Homo sapiens
MGEAAVAAGPCPLREDSFTRFSSQSNVYGLAGGAGGRGELLAATLKGKVLGFRYQDLRQKIRPVAKELQFNYIPESCLNLELQFTPFQLCHAEVQVGDQLETVFLLSGNDPAIHLYKENEGLHQFEEQPVENLFPELTNLTSSVLWLDVHNFPGTSRRLSALGCQSGYVRVAHVDQRSREVLQMWSVLQDGPISRVIVFSLSAAKETKDRPLQDEYSVLVASMLEPAVVYRDLLNRGLEDQLLLPGSDQFDSVLCSLVTDVDLDGRPEVLVATYGQELLCYKYRGPESGLPEAQHGFHLLWQRSFSSPLLAMAHVDLTGDGLQELAVVSLKGVHILQHSLIQASELVLTRLRHQVEQRRRRLQGLEDGAGAGPAENAAS

SEQ ID NO: 851549 - protein, 384 aa, Homo sapiens
MGEAAVAAGPCPLREDSFTRFSSQSNVYGLAGGAGGRGELLAATLKGKVLGFRYQDLRQKIRPVAKELQFNYIPVDAEIVSIDTFNKSPPKRGLVVGITFIKDSGDKGSPFLNIYCDYEPGSEYNLDSIAQSCLNLELQFTPFQLCHAEVQVGDQLETVFLLSGNDPAIHLYKENEGLHQFEEQPVENLFPELTNLTSSVLWLDVHNFPGTSRRLSALGCQSGYVRVAHVDQRSREVLQMWSVLQDGPISRVIVFSLSAAKETKDRPLQDEYSVLVASMLEPAVVYRDLLNRGLEDQLLLPGSDQFDSVLCSLVTDVDLDGRPEVLVATYGQELLCYKYRGPESGLPEAQHGFHLLWQRSFSSPLDGCKPGGPRPRNFGTPMGH

SEQ ID NO: 851550 - protein, 134 aa, Homo sapiens
MLIFLSSIENILGIFLAEILGILIKCLYFHSTTSVSEEDVSSRYSRTDRSGFPRYNRDANVSGTLVSSSTLEKKIEDLEKEVVRERQENLRLVRLMQDKEEMIGKLKEEIDLLNRDLDDIEMLIETSKLGEPAR

SEQ ID NO: 851551 - protein, 340 aa, Homo sapiens
MATGGYRTSSGLGGSTTDFLEEWKAKREKMRAKQNPPGPAPPGGGSSDAAGKPPAGALGTPAAAAANELNNNLPGGAPAAPAVPGPGGVNCAVGSAMLTRAAPGPRRSEDEPPAASASAAPPPQRDEEEPDGVPEKGKSSGPSARKGKGQIEKRKLREKRRSTGVVNIPAAECLDEYEDDEAGQKERKREDAITQQNTIQNEAVNLLDPGSSYLLQEPPRTVSGRYKSTTSVSEEDVSSRYSRTDRSGFPRYNRDANVSGTLVSSSTLEKKIEDLEKEVVRERQENLRLVRLMQDKEEMIGKLKEEIDLLNRDLDDIEDENEQLKQENKTLLKVVGQLTR

SEQ ID NO: 851552 - protein, 340 aa, Homo sapiens; identical to SEQ ID NO: 851551

SEQ ID NO: 851553 - protein, 340 aa, Homo sapiens; identical to SEQ ID NO: 851551

SEQ ID NO: 851554 - protein, 175 aa, Homo sapiens
KERKREDAITQQNTMQNEAVNLLDPGSSYLLQCLDEYEDDEAGQKERKREDAITQQNTIQNEAVNLLDPGSSYLLQEPPRTVSGRYKSTTSVSEEDVSSRYSRTDRSGFPRYNRDANVSGTLVSSSTLEKKIEDLEKEVVRERQENLRLVRLMQDKEEMIGKLKEEIDLLNRGPR

SEQ ID NO: 851555 - protein, 118 aa, Homo sapiens
MLIFLSSIENILGIFLAEILGILIKCLYFHSTTSVSEEDVSSRYSRTDRSGFPRYNRDANVSGTLVSSSTLEKKIEDLEKEVVRERQENLRLVRLMQDKEEMIGKLKEEIDLLNRGPR

SEQ ID NO: 851556 - protein, 162 aa, Homo sapiens [sequence omitted]

SEQ ID NO: 851557 - protein, 162 aa, Homo sapiens [sequence omitted]

SEQ ID NO: 851558 - protein, 227 aa, Homo sapiens
MGRPLLLPLLLLLQPPAFLQPGGSTGSGPSYLYGVTQPKHLSASMGGSVEIPFSFYYPWELAIVPNVRISWRRGHFHGQSFYSTRPPSIHKDYVNRLFLNWTEGQESGFLRISNLRKEDQSVYFCRVELDTRRSGRQQLQSIKGTKLTITQAVTTTTTWRPSSTTTIAGLRVTESKGHSESWHLSLDTAIRVALAVAVLKTVILGLLCLLLLWWRRRKGSRAPSSDF

SEQ ID NO: 851559 - protein, 271 aa, Homo sapiens
MGRASYGGSPVGHQSSSDHPRAKTCRSPVRDGPRTLCGVPTVALSLHFLREASSGSRTCGRRTSLCTSAKSSWTYRSGRLSWQSIKGTHLTITQALRQPLHRAPLLPGQLCWSPRPLEKNKAMGRPLLLPLLLLLQPPAFLQPGLCEPALSELDRGSGERLPQDLKPAEGGPVCVFLPSRAGHPEIREAAVAVHQGDQTHHHPGCHNHHHLEAQQHNHHSRPQGHRKQRALRIMAPKSGHCHQGCIGCRCAQNCHFGTAVPPPPVVEEKER

SEQ ID NO: 851560 - protein, 162 aa, Homo sapiens [sequence omitted]

SEQ ID NO: 851561 - protein, 227 aa, Homo sapiens; identical to SEQ ID NO: 851558

SEQ ID NO: 851562 - protein, 227 aa, Homo sapiens; identical to SEQ ID NO: 851558

SEQ ID NO: 851563 - protein, 162 aa, Homo sapiens [sequence omitted]

SEQ ID NO: 851564 - protein, 227 aa, Homo sapiens; identical to SEQ ID NO: 851558

SEQ ID NO: 851565 - protein, 162 aa, Homo sapiens [sequence omitted]

SEQ ID NO: 851566 - protein, 227 aa, Homo sapiens; identical to SEQ ID NO: 851558

SEQ ID NO: 851567 - protein, 162 aa, Homo sapiens [sequence omitted]

SEQ ID NO: 851568 - protein, 162 aa, Homo sapiens [sequence omitted]

SEQ ID NO: 851569 - protein, 162 aa, Homo sapiens [sequence omitted]

SEQ ID NO: 851570 - protein, 145 aa, Homo sapiens
CSGLGTESTSMGTQPGLPGCSPRPLCHYQHQLLPSYFGHSSPPTGGRPGGHHSPPTPHTGPRALLPGPPHPSLHMAALSLLRMDSTLRLGRGLPALVLASLFSLTLGAQGHGGTLRSSMRETMRPLGFPLPRPPGCHPLTLFLGL

SEQ ID NO: 851571 - protein, 145 aa, Homo sapiens; identical to SEQ ID NO: 851570

SEQ ID NO: 851572 - protein, 162 aa, Homo sapiens [sequence omitted]

SEQ ID NO: 851573 - protein, 162 aa, Homo sapiens [sequence omitted]

SEQ ID NO: 851574 - protein, 227 aa, Homo sapiens; identical to SEQ ID NO: 851558

SEQ ID NO: 851575 - protein, 349 aa, Homo sapiens
MGRASYGGSPVGHQSSSDHPRAKTCRSPVRDGPRTLCGVPTVALSLHFLREASSGSRTCGRRTSLCTSAKSSWTYRSGRLSWQSIKGTHLTITQALRQPLHRAPLLPGQLCWSPRPLEKNKAMGRPLLLPLLLLLQPPAFLQPGGSTGSGPSYLYGVTQPKHLSASMGGSVEIPFSFYYPWELAIVPNVRISWRRGHFHGQSFYSTRPPSIHKDYVNRLFLNWTEGQESGFLRISNLRKEDQSVYFCRVELDTRRSGRQQLQSIKGTKLTITQAVTTTTTWRPSSTTTIAGLRVTESKGHSESWHLSLDTAIRVALAVAVLKTVILGLLCLLLLWWRRRKGSRAPSSDF

SEQ ID NO: 851576 - protein, 162 aa, Homo sapiens [sequence omitted]

SEQ ID NO: 851577 - protein, 227 aa, Homo sapiens; identical to SEQ ID NO: 851558

SEQ ID NO: 851578 - protein, 162 aa, Homo sapiens [sequence omitted]

SEQ ID NO: 851579 - protein, 162 aa, Homo sapiens [sequence omitted]

SEQ ID NO: 851580 - protein, 162 aa, Homo sapiens [sequence omitted]

SEQ ID NO: 851581 - protein, 162 aa, Homo sapiens [sequence omitted]

SEQ ID NO: 851582 - protein, 162 aa, Homo sapiens [sequence omitted]

SEQ ID NO: 851583 - protein, 85 aa, Homo sapiens
MAPKSGHCHQGCIGCRCAQNCHFGTAVPPPPVVEEKERVSAQNALSPQASQLGVSLSPPAAKGLQKYADPAGSPQAHQGRLWPVL

SEQ ID NO: 851584 - protein, 181 aa, Homo sapiens
MAAAAWLQVLPVILLLLGAHPSPLSFFSAGPATVAAADRSKWHIPIPSGKNYFSFGKILFRNTTIFLKFDGEPCDLSLNITWYLKSADCYNEIYNFKAEEVELYLEKLKEKRGLSGKYQTSSKLFQNCSELFKTQTFSGDFMHRLPLLGEKQEAKENGTNLTFIGDKTIQMPFLKKHFLDC

SEQ ID NO: 851585 - protein, 173 aa, Homo sapiens
MAAAAWLQVLPVILLLLGAHPSPLSFFSAGPATVAAADRSKWHIPIPSGKNYFSFGKILFRNTTIFLKFDGEPCDLSLNITWYLKSADCYNEIYNFKAEEVELYLEKLKEKRGLSGKYQTSSKLFQNCSELFKTQTFSGDFMHRLPLLGEKQEAKENGTNLTFYRRPEINHYS

SEQ ID NO: 851586 - protein, 555 aa, Homo sapiens
MAAAAWLQVLPVILLLLGAHPSPLSFFSAGPATVAAADRSKWHIPIPSGKNYFSFGKILFRNTTIFLKFDGEPCDLSLNITWYLKSADCYNEIYNFKAEEVELYLEKLKEKRGLSGKYQTSSKLFQNCSELFKTQTFSGDFMHRLPLLGEKQEAKENGTNLTFIGDKTAMHEPLQTWQDAPYIFIVHIGISSSKESSKENSLSNLFTMTVEVKGPYEYLTLEDYPLMIFFMVMCIVYVLFGVLWLAWSACYWRDLLRIQFWIGAVIFLGMLEKAVFYAEFQNIRYKGESVQGALILAELLSAVKRSLARTLVIIVSLGYGIVKPRLGVTLHKVVVAGALYLLFSGMEGVLRVTGAQTDLASLAFIPLAFLDTALCWWIFISLTQTMKLLKLRRNIVKLSLYRHFTNTLILAVAASIVFIIWTTMKFRIVTCQSDWRELWVDDAIWRLLFSMILFVIMVLWRPSANNQRFAFSPLSEEEEEDEQKEPMLKESFEGMKMRSTKQEPNGNSKVNKAQEDDLKWVEENVPSSVTDVALPALLDSDEERMITHFERSKME

SEQ ID NO: 851587 - protein, 529 aa, Homo sapiens
RPGDLEDPHAARRSNGYIPIPSGKNYFSFGKILFRNTTIFLKFDGEPCDLSLNITWYLKSADCYNEIYNFKAEEVELYLEKLKEKRGLSGKYQTSSKLFQNCSELFKTQTFSGDFMHRLPLLGEKQEAKENGTNLTFIGDKTAMHEPLQTWQDAPYIFIVHIGISSSKESSKENSLSNLFTMTVEVKGPYEYLTLEDYPLMIFFMVMCIVYVLFGVLWLAWSACYWRDLLRIQFWIGAVIFLGMLEKAVFYAEFQNIRYKGESVQGALILAELLSAVKRSLARTLVIIVSLGYGIVKPRLGVTLHKVVVAGALYLLFSGMEGVLRVTGAQTDLASLAFIPLAFLDTALCWWIFISLTQTMKLLKLRRNIVKLSLYRHFTNTLILAVAASIVFIIWTTMKFRIVTCQSDWRELWVDDAIWRLLFSMILFVIMVLWRPSANNQRFAFSPLSEEEEEDEQKEPMLKESFEGMKMRSTKQEPNGNSKVNKAQEDDLKWVEENVPSSVTDVALPALLDSDEERMITHFERSKME

SEQ ID NO: 851588 - protein, 494 aa, Homo sapiens
MAHSDTVVDGEPCDLSLNITWYLKSADCYNEIYNFKAEEVELYLEKLKEKRGLSGKYQTSSKLFQNCSELFKTQTFSGDFMHRLPLLGEKQEAKENGTNLTFIGDKTAMHEPLQTWQDAPYIFIVHIGISSSKESSKENSLSNLFTMTVEVKGPYEYLTLEDYPLMIFFMVMCIVYVLFGVLWLAWSACYWRDLLRIQFWIGAVIFLGMLEKAVFYAEFQNIRYKGESVQGALILAELLSAVKRSLARTLVIIVSLGYGIVKPRLGVTLHKVVVAGALYLLFSGMEGVLRVTGAQTDLASLAFIPLAFLDTALCWWIFISLTQTMKLLKLRRNIVKLSLYRHFTNTLILAVAASIVFIIWTTMKFRIVTCQSDWRELWVDDAIWRLLFSMILFVIMVLWRPSANNQRFAFSPLSEEEEEDEQKEPMLKESFEGMKMRSTKQEPNGNSKVNKAQEDDLKWVEENVPSSVTDVALPALLDSDEERMITHFERSKME

SEQ ID NO: 851589 - protein, 414 aa, Homo sapiens
MHRLPLLGEKQEAKENGTNLTFIGDKTAMHEPLQTWQDAPYIFIVHIGISSSKESSKENSLSNLFTMTVEVKGPYEYLTLEDYPLMIFFMVMCIVYVLFGVLWLAWSACYWRDLLRIQFWIGAVIFLGMLEKAVFYAEFQNIRYKGESVQGALILAELLSAVKRSLARTLVIIVSLGYGIVKPRLGVTLHKVVVAGALYLLFSGMEGVLRVTGAQTDLASLAFIPLAFLDTALCWWIFISLTQTMKLLKLRRNIVKLSLYRHFTNTLILAVAASIVFIIWTTMKFRIVTCQSDWRELWVDDAIWRLLFSMILFVIMVLWRPSANNQRFAFSPLSEEEEEDEQKEPMLKESFEGMKMRSTKQEPNGNSKVNKAQEDDLKWVEENVPSSVTDVALPALLDSDEERMITHFERSKME

SEQ ID NO: 851590 - protein, 555 aa, Homo sapiens; identical to SEQ ID NO: 851586

SEQ ID NO: 851591 - protein, 210 aa, Homo sapiens
MEGVLRVTGAQTDLASLAFIPLAFLDTALCWWIFISLTQTMKLLKLRRNIVKLSLYRHFTNTLILAVAASIVFIIWTTMKFRIVTCQSDWRELWVDDAIWRLLFSMILFVIMVLWRPSANNQRFAFSPLSEEEEEDEQKEPMLKESFEGMKMRSTKQEPNGNSKVNKAQEDDLKWVEENVPSSVTDVALPALLDSDEERMITHFERSKME

SEQ ID NO: 851592 - protein, 555 aa, Homo sapiens; identical to SEQ ID NO: 851586

SEQ ID NO: 851593 - protein, 555 aa, Homo sapiens; identical to SEQ ID NO: 851586

SEQ ID NO: 851594 - protein, 555 aa, Homo sapiens; identical to SEQ ID NO: 851586

SEQ ID NO: 851595 - protein, 480 aa, Homo sapiens
MAAAAWLQVLPVILLLLGAHPSPLSFFSAGPATVAAADRSKWHIPIPSGKNYFSFGKILFRNTTIFLKFDGEPCDLSLNITWYLKSADCYNEIYNFKAEEVELYLEKLKEKRGLSGKYQTSSKLFQNCSELFKTQTFSGDFMHRLPLLGEKQEAKENGTNLTFIGDKTAMHEPLQTWQDAPYIFIVHIGISSSKESSKENSLSNLFTMTVEVKGPYEYLTLEDYPLMIFFMVMCIVYVLFGVLWLAWSACYWRDLLRIQFWIGAVIFLGMLEKAVFYAEFQNIRYKGESVQGALILAELLSAVKRSLARTLVIIVSLGYGIVKPRLGVTLHKVVVAGALYLLFSGMEGVLRVTGAQTDLASLAFIPLAFLDTALCWWIFISLTQTMKLLKLRRNIVKLSLYRHFTNTLILAVAASIVFIIWTTMKFRIVTCQSDWRELWVDDAIWRLLFSMILFVIMVLWRPSANNQRFLDSSVYSANMR

SEQ ID NO: 851596 - protein, 181 aa, Homo sapiens; identical to SEQ ID NO: 851584

SEQ ID NO: 851597 - protein, 181 aa, Homo sapiens; identical to SEQ ID NO: 851584

SEQ ID NO: 851598 - protein, 150 aa, Homo sapiens
MLGILPAYSALSWGSGCSELMLASPNFHFDFSNFQPGPFVFSSRTQARQKTVSRAGSRKVRMLDVHSSHFLPSAKRSWELRVSSLSCGTVLGPWEGKNYGKRVPQVFLPTLIQLVSCFPIVQKTLNWFLDFPQREFFHVLLNQCVCRGKE

SEQ ID NO: 851599 - protein, 540 aa, Homo sapiens
MAAAAWLQVLPVILLLLGAHPSPLSFFSAGPATVAAADRSKWHIPIPSGKNYFSFGKILFRNTTIFLKFDGEPCDLSLNITWYLKSADCYNEIYNFKAEEVELYLEKLKEKRGLSGKYQTSSKLFQNCSELFKTQTFSGDFMHRLPLLGEKQEAKENGTNLTFIGDKTAMHEPLQTWQDAPYIFIVHIGISSSKESSKENSLSNLFTMTVEVKGPYEYLTLEDYPLMIWLAWSACYWRDLLRIQFWIGAVIFLGMLEKAVFYAEFQNIRYKGESVQGALILAELLSAVKRSLARTLVIIVSLGYGIVKPRLGVTLHKVVVAGALYLLFSGMEGVLRVTGAQTDLASLAFIPLAFLDTALCWWIFISLTQTMKLLKLRRNIVKLSLYRHFTNTLILAVAASIVFIIWTTMKFRIVTCQSDWRELWVDDAIWRLLFSMILFVIMVLWRPSANNQRFAFSPLSEEEEEDEQKEPMLKESFEGMKMRSTKQEPNGNSKVNKAQEDDLKWVEENVPSSVTDVALPALLDSDEERMITHFERSKME

SEQ ID NO: 851600 - protein, 414 aa, Homo sapiens; identical to SEQ ID NO: 851589

SEQ ID NO: 851601 - protein, 517 aa, Homo sapiens
MAAAAWLQVLPVILLLLGAHPSPLSFFSAGPATVAAADRSKWHIPIPSGKNYFSFGKILFRNTTIFLKFDGEPCDLSLNITWYLKSADCYNEIYNFKTFSGDFMHRLPLLGEKQEAKENGTNLTFIGDKTAMHEPLQTWQDAPYIFIVHIGISSSKESSKENSLSNLFTMTVEVKGPYEYLTLEDYPLMIFFMVMCIVYVLFGVLWLAWSACYWRDLLRIQFWIGAVIFLGMLEKAVFYAEFQNIRYKGESVQGALILAELLSAVKRSLARTLVIIVSLGYGIVKPRLGVTLHKVVVAGALYLLFSGMEGVLRVTGAQTDLASLAFIPLAFLDTALCWWIFISLTQTMKLLKLRRNIVKLSLYRHFTNTLILAVAASIVFIIWTTMKFRIVTCQSDWRELWVDDAIWRLLFSMILFVIMVLWRPSANNQRFAFSPLSEEEEEDEQKEPMLKESFEGMKMRSTKQEPNGNSKVNKAQEDDLKWVEENVPSSVTDVALPALLDSDEERMITHFERSKME

SEQ ID NO: 851602 - protein, 555 aa, Homo sapiens; identical to SEQ ID NO: 851586

SEQ ID NO: 851603 - protein, 203 aa, Homo sapiens
MYFLFPLTLIVNLALSAVDACVILWIFISLTQTMKLLKLRRNIVKLSLYRHFTNTLILAVAASIVFIIWTTMKFRIVTCQSDWRELWVDDAIWRLLFSMILFVIMVLWRPSANNQRFAFSPLSEEEEEDEQKEPMLKESFEGMKMRSTKQEPNGNSKVNKAQEDDLKWVEENVPSSVTDVALPALLDSDEERMITHFERSKME

SEQ ID NO: 851604 - protein, 555 aa, Homo sapiens; identical to SEQ ID NO: 851586

SEQ ID NO: 851605 - protein, 505 aa, Homo sapiens
MAAAAWLQVLPVILLLLGAHPSPLSFFSAGPATVAAADRSKWHIPIPSGKNYFSFGKILFRNTTIFLKFDGEPCDLSLNITWYLKSADCYNEIYNFKAEEVELYLEKLKEKRGLSGKYQTSSKLFQNCSELFKTQTFSGDFMHRLPLLGEKQEAKENGTNLTFIGDKTAMHEPLQTWQDAPYIFIVHIGISSSKESSKENSLSNLFTMTVEVKGPYEYLTLEDYPLMIFFMVMCIVYVLFGVLWLAWSACYWRDLLRIQFWIGAVIFLGMLEKAVFYAEFQNIRYKGESVQGALILAELLSAVKRSLARTLVIIVSLGYGIVKPRLGVTLHKVVVAGALYLLFSGMEGVLRVTGAQTDLASLAFIPLAFLDTALCWWIFISLTQTMKLLKLRRNIVKLSLYRHFTNTLILAVAASIVFIIWTTMKFRIVTCQSDWRELWVDDAIWRLLFSMILFVIMVLWRPSANNQSCFPMSEERRRLTTGAMWKKLEDEMGVHTEQWIVVTRQ

SEQ ID NO: 851606 - protein, 398 aa, Homo sapiens [sequence omitted]

SEQ ID NO: 851607 - protein, 120 aa, Homo sapiens
MAHSDTVVDGEPCDLSLNITWYLKSADCYNEIYNFKAEEVELYLEKLKEKRGLSGKYQTSSKLFQNCSELFKTQTFSGDFMHRLPLLGEKQEAKENGTNLTFIGDKTIQMPFLKKHFLDC

SEQ ID NO: 851608 - protein, 129 aa, Homo sapiens
HHNTHTNPHNRLGTGLVCSRRIWPPPYRSKPSPQPWHAPWNPRPLASLVAIFHKYSGREGDKHTLSKKELKELIQKELTIGSKLQDAEIARLMEDLDRNKDQEVNFQEYVTFLGALALIYNDSPQGLEK

SEQ ID NO: 851609 - protein, 118 aa, Homo sapiens
RPRVARGVGRIWPPPYRSKPSPQPWHAPWNPRPLASLVAIFHKYSGREGDKHTLSKKELKELIQKELTIGSKLQDAEIARLMEDLDRNKDQEVNFQEYVTFLGALALIYNDSPQGLEK

SEQ ID NO: 851610 - protein, 150 aa, Homo sapiens
RKLSKLSCADEGRLVTRRAVGTAGLPHPVLTRNSPGQEAWKVEGVNRECSKPSPQPWHAPWNPRPLASLVAIFHKYSGREGDKHTLSKKELKELIQKELTIGSKLQDAEIARLMEDLDRNKDQEVNFQEYVTFLGALALIYNDSPQGLEK

SEQ ID NO: 851611 - protein, 116 aa, Homo sapiens
SCRIRHERIWPPPYRSKPSPQPWHAPWNPRPLASLVAIFHKYSGREGDKHTLSKKELKELIQKELTIGSKLQDAEIARLMEDLDRNKDQEVNFQEYVTFLGALALIYNDSPQGLEK

SEQ ID NO: 851612 - protein, 128 aa, Homo sapiens
VLRTSDDFGAKAGAVATKVDMRAPPYRSKPSPQPWHAPWNPRPLASLVAIFHKYSGREGDKHTLSKKELKELIQKELTIGSKLQDAEIARLMEDLDRNKDQEVNFQEYVTFLGALALIYNDSPQGLEK

SEQ ID NO: 851613 - protein, 206 aa, Homo sapiens
RKLSKLSCADEGRLVTRRAVGTAGLPHPVLTRNSPGQEAWKVEGVNRECALCKPRRRVGRGRDLGGRGGLGRAGLRGTDRYKASRTATQPIPSTARVAFGRLPTGSKPSPQPWHAPWNPRPLASLVAIFHKYSGREGDKHTLSKKELKELIQKELTIGSKLQDAEIARLMEDLDRNKDQEVNFQEYVTFLGALALIYNDSPQGLEK

SEQ ID NO: 851614 - protein, 206 aa, Homo sapiens; identical to SEQ ID NO: 851613

SEQ ID NO: 851615 - protein, 99 aa, Homo sapiens
GRLLLLNSRPRRRPLASLVAIFHKYSGREGDKHTLSKKELKELIQKELTIGSKLQDAEIARLMEDLDRNKDQEVNFQEYVTFLGALALIYNDSPQGLEK

SEQ ID NO: 851616 - protein, 125 aa, Homo sapiens
MSNPLLCSDPPSTARVAFGRLPTGSKPSPQPWHAPWNPRPLASLVAIFHKYSGREGDKHTLSKKELKELIQKELTIGSKLQDAEIARLMEDLDRNKDQEVNFQEYVTFLGALALIYNDSPQGLEK

SEQ ID NO: 851617 - protein, 136 aa, Homo sapiens
KEKARYEAGGNRHRGDCDTAHPLDRSRRIWPPPYRSKPSPQPWHAPWNPRPLASLVAIFHKYSGREGDKHTLSKKELKELIQKELTIGSKLQDAEIARLMEDLDRNKDQEVNFQEYVTFLGALALIYNDSPQGLEK

SEQ ID NO: 851618 - protein, 116 aa, Homo sapiens; identical to SEQ ID NO: 851611

SEQ ID NO: 851619 - protein, 128 aa, Homo sapiens; identical to SEQ ID NO: 851612

SEQ ID NO: 851620 - protein, 132 aa, Homo sapiens
MEGLYWTVQVGAVDGTPSVDRSRRIWPPPYRSKPSPQPWHAPWNPRPLASLVAIFHKYSGREGDKHTLSKKELKELIQKELTIGSKLQDAEIARLMEDLDRNKDQEVNFQEYVTFLGALALIYNDSPQGLEK

SEQ ID NO: 851621 - protein, 311 aa, Homo sapiens
  misc_feature (129)..(129): Xaa can be any naturally occurring amino acid
  misc_feature (156)..(156): Xaa can be any naturally occurring amino acid
KEKARYEAGGNRHRGDCDTAHPLDRSRRIWPPPYRSKPSPQPWHAPWNPRPLASLVAIFHKYSGREGDKHTLSKKELKELIQKELTIGSKLQDAEIARLMEDLDRNYMDLECESSMEYVILPGGPLALXLQVKALNGLKHNSEGYMADSPLAGPLXSQKSMWLALIVASRHLLCFVSRVVTDNHNINIDDSSTLKHTNQRQEDIQCGAGDPETGAPPEARANFDRAMQPGFVCEAIEVGRAPTHEGSGASLKITGERADRSAPEHAKHSIGRGVGKIRRRQEERAYGRGKGTDGGGPGGGDPLLGRKNHPP

SEQ ID NO: 851622 - protein, 111 aa, Homo sapiens
MALTRPSAASSKPSPQPWHAPWNPRPLASLVAIFHKYSGREGDKHTLSKKELKELIQKELTIGSKLQDAEIARLMEDLDRNKDQEVNFQEYVTFLGALALIYNDSPQGLEK

SEQ ID NO: 851623 - protein, 181 aa, Homo sapiens
NTLCLTHSYVLTHPRPLASHLAASLPVSSLQEPWVLSRASCPHAGGPAIPCPVQPLDPDWGHLWRSPAGGIVRSSSAVPGSKPSPQPWHAPWNPRPLASLVAIFHKYSGREGDKHTLSKKELKELIQKELTIGSKLQDAEIARLMEDLDRNKDQEVNFQEYVTFLGALALIYNDSPQGLEK

SEQ ID NO: 851624 - protein, 111 aa, Homo sapiens; identical to SEQ ID NO: 851622

SEQ ID NO: 851625 - protein, 132 aa, Homo sapiens; identical to SEQ ID NO: 851620

SEQ ID NO: 851626 - protein, 206 aa, Homo sapiens; identical to SEQ ID NO: 851613

SEQ ID NO: 851627 - protein, 206 aa, Homo sapiens; identical to SEQ ID NO: 851613

SEQ ID NO: 851628 - protein, 206 aa, Homo sapiens; identical to SEQ ID NO: 851613

SEQ ID NO: 851629 - protein, 206 aa, Homo sapiens; identical to SEQ ID NO: 851613

SEQ ID NO: 851630 - protein, 206 aa, Homo sapiens; identical to SEQ ID NO: 851613

SEQ ID NO: 851631 - protein, 206 aa, Homo sapiens; identical to SEQ ID NO: 851613

SEQ ID NO: 851632 - protein, 111 aa, Homo sapiens; identical to SEQ ID NO: 851622

SEQ ID NO: 851633 - protein, 79 aa, Homo sapiens
YTTLYHRTIPPKHTLSKKELKELIQKELTIGSKLQDAEIARLMEDLDRNKDQEVNFQEYVTFLGALALIYNDSPQGLEK

SEQ ID NO: 851634 - protein, 81 aa, Homo sapiens
RPPTTTKFAAASTKHTLSKKELKELIQKELTIGSKLQDAEIARLMEDLDRNKDQEVNFQEYVTFLGALALIYNDSPQGLEK

SEQ ID NO: 851635 - protein, 122 aa, Homo sapiens
RPPTTTKFAAASTAFGRLPYRSKPSPQPWHAPWNPRPLASLVAIFHKYSGREGDKHTLSKKELKELIQKELTIGSKLQDAEIARLMEDLDRNKDQEVNFQEYVTFLGALALIYNDSPQGLEK

SEQ ID NO: 851636 - protein, 306 aa, Homo sapiens
RKLSKLSCADEGRLVTRRAVGTAGLPHPVLTRNSPGQEAWKVEGVNRECALCKPRRRVGRGRDLGGRGGLGRAGLRGTDRYKASRTATQPIPSTARVAFGRLPTGSKPSPQPWHAPWNPRPLASLVAIFHKYSGREGDKHTLSKKELKELIQKELTIGSKLQDAEIARLMEDLDRNNTANGIALLWAPRPFNLRSGRTRRALDIPLVKNWYREHCPAGQPVKVRVSYQKLLKYYVLNALKHRPPKAQKKRYLFRSFKATKFFQSTKLDWVEVGLQVCRQGYNMLNLLIHRKNLNYLHLDYNFNLNL

SEQ ID NO: 851637 - protein, 206 aa, Homo sapiens; identical to SEQ ID NO: 851613

SEQ ID NO: 851638 - protein, 120 aa, Homo sapiens
AAAYYYYYCSNSASNDVRGSKPSPQPWHAPWNPRPLASLVAIFHKYSGREGDKHTLSKKELKELIQKELTIGSKLQDAEIARLMEDLDRNKDQEVNFQEYVTFLGALALIYNDSPQGLEK

SEQ ID NO: 851639 - protein, 106 aa, Homo sapiens
  misc_feature (14)..(14): Xaa can be any naturally occurring amino acid
MVSPLPRPDSATWXWPPGYRPLASLVAIFHKYSGREGDKHTLSKKELKELIQKELTIGSKLQDAEIARLMEDLDRNKDQEVNFQEYVTFLGALALIYNDSPQGLEK

SEQ ID NO: 851640 - protein, 118 aa, Homo sapiens; identical to SEQ ID NO: 851609

SEQ ID NO: 851641 - protein, 129 aa, Homo sapiens; identical to SEQ ID NO: 851608

SEQ ID NO: 851642 - protein, 132 aa, Homo sapiens; identical to SEQ ID NO: 851620

SEQ ID NO: 851643 - protein, 144 aa, Homo sapiens
MASCPHAGGPAIPCPVQPLDPDWGHLWRSPAGGIVRSSSAVPGSKPSPQPWHAPWNPRPLASLVAIFHKYSGREGDKHTLSKKELKELIQKELTIGSKLQDAEIARLMEDLDRNKDQEVNFQEYVTFLGALALIYNDSPQGLEK

SEQ ID NO: 851644 - protein, 118 aa, Homo sapiens
MSEYTRRSRRIWPPPYRSKPSPQPWHAPWNPRPLASLVAIFHKYSGREGDKHTLSKKELKELIQKELTIGSKLQDAEIARLMEDLDRNKDQEVNFQEYVTFLGALALIYNDSPQGLEK

SEQ ID NO: 851645 - protein, 122 aa, Homo sapiens; identical to SEQ ID NO: 851635

SEQ ID NO: 851646 - protein, 206 aa, Homo sapiens; identical to SEQ ID NO: 851613

SEQ ID NO: 851647 - protein, 206 aa, Homo sapiens; identical to SEQ ID NO: 851613

SEQ ID NO: 851648 - protein, 206 aa, Homo sapiens; identical to SEQ ID NO: 851613

SEQ ID NO: 851649 - protein, 206 aa, Homo sapiens; identical to SEQ ID NO: 851613

SEQ ID NO: 851650 - protein, 206 aa, Homo sapiens; identical to SEQ ID NO: 851613

SEQ ID NO: 851651 - protein, 85 aa, Homo sapiens
LADSEQDPSLYSGREGDKHTLSKKELKELIQKELTIGSKLQDAEIARLMEDLDRNKDQEVNFQEYVTFLGALALIYNDSPQGLEK

SEQ ID NO: 851652 - protein, 144 aa, Homo sapiens; identical to SEQ ID NO: 851643

SEQ ID NO: 851653 - protein, 150 aa, Homo sapiens; identical to SEQ ID NO: 851610

SEQ ID NO: 851654 - protein, 162 aa, Homo sapiens
RKLSKLSCADEGRLVTRRAVGTAGLPHPVLTRNSPGQEAWKVEGVNRECALCKPRRRVGRGRDLGGRGGLGRAGLRGTDRYKASRTATQPIPSTARVAFGRLPTGEFSPGALGTFQGQLPSRWGSSHPLPSSAAGSRLGPSVALPRWRDSQEQQCCARQALG

SEQ ID NO: 851655 - protein, 175 aa, Homo sapiens
SWYARVRDDNPGVPGNAGPPSHIIGDEEIPENCLEQLEMGFPRGAQPAPLLCSVLKASGSLQQLSLDSATFASPQDFGLVLQTLKEYNLALKRLSFHDMNLADCQSEVLFLLQNLTLQEITFSFCRLFEKRPAQFLPEMVAAMKGNSTLKGLRLPGNRLGGGQTLGRERGKELGL

SEQ ID NO: 851656 - protein, 731 aa, Homo sapiens [sequence omitted]

SEQ ID NO: 851657 - protein, 817 aa, Homo sapiens
AHLPKMAAPEAWRARSCWFCEVAAATTMEATSREAAPAKSSASGPNAPPALFELCGRAVSAHMGVLESGVWALPGPILQSILPLLNIYYLERIEETALKKGLSTQAIWRRLWDELMKTRPSSLESVTCWRAKFMEAFFSHVLRGTIDVSSDRRLCDQRFSPLLHSSRHVRQLTICNMLQGATELVAEPNRRVLETLASSLHTLKFRHLLFSDVAAQQSLRQLLHQLIHHGAVSQVSLYSWPVPESALFILILTMSAGFWQPGPGGPPCRLCGEASRGRAPSRDEGSLLLGSRRPRRDAAERCAAALMASRRKSEAKQMPRAAPATRVTRRSTQESLTAGGTDLKRELHPPATSHEAPGTKRSPSAPAATSSASSSTSSYKRAPASSAPQPKPLKRFKRAAGKKGARTRQGPGAESEDLYDFVFIVAGEKEDGEEMEIGEVACGALDGSDPSCLGLPALEASQRFRSISTLELFTVPLSTEAALTLCHLLSSWVSLESLTLSYNGLGSNIFRLLDSLRALSGQAGCRLRALHLSDLFSPLPILELTRAIVRALPLLRVLSIRVDHPSQRDNPGVPGNAGPPSHIIGDEEIPENCLEQLEMGFPRGAQPAPLLCSVLKASGSLQQLSLDSATFASPQDFGLVLQTLKEYNLALKRLSFHDMNLADCQSEVLFLLQNLTLQEITFSFCRLFEKRPAQFLPEMVAAMKGNSTLKGLRLPGNRLGNAGLLALADVFSEDSSSSLCQLDISSNCIKPDGLLEFAKRLERWGRGAFGHLRLFQNWLDQDAVTAREAIRRLRATCHVVSDSWDSSQAFADYVSTM

SEQ ID NO: 851658 - protein, 817 aa, Homo sapiens; identical to SEQ ID NO: 851657

SEQ ID NO: 851659 - protein, 811 aa, Homo sapiens
AHLPKMAAPEAWRARSCWFCEVAAATTMEATSREAAPAKSSASGPNAPPALFELCGRAVSAHMGVLESGVWALPGPILQSILPLLNIYYLERIEETALKKGLSTQAIWRRLWDELMKTRPSSLESVTCWRAKFMEAFFSHVLRGTIDVSSDRRLCDQRFSPLLHSSRHVRQLTICNMLQGATELVAEPNRRVLETLASSLHTLKFRHLLFSDVAAQQSLRQLLHQLIHHGAVSQVSLYSWPVPESALFILILTMSAGFWQPGPGGPPCRLCGEASRDEGSLLLGSRRPRRDAAERCAAALMASRRKSEAKQMPRAAPATRVTRRSTQESLTAGGTDLKRELHPPATSHEAPGTKRSPSAPAATSSASSSTSSYKRAPASSAPQPKPLKRFKRAAGKKGARTRQGPGAESEDLYDFVFIVAGEKEDGEEMEIGEVACGALDGSDPSCLGLPALEASQRFRSISTLELFTVPLSTEAALTLCHLLSSWVSLESLTLSYNGLGSNIFRLLDSLRALSGQAGCRLRALHLSDLFSPLPILELTRAIVRALPLLRVLSIRVDHPSQRDNPGVPGNAGPPSHIIGDEEIPENCLEQLEMGFPRGAQPAPLLCSVLKASGSLQQLSLDSATFASPQDFGLVLQTLKEYNLALKRLSFHDMNLADCQSEVLFLLQNLTLQEITFSFCRLFEKRPAQFLPEMVAAMKGNSTLKGLRLPGNRLGNAGLLALADVFSEDSSSSLCQLDISSNCIKPDGLLEFAKRLERWGRGAFGHLRLFQNWLDQDAVTAREAIRRLRATCHVVSDSWDSSQAFADYVSTM

SEQ ID NO: 851660 - protein, 530 aa, Homo sapiens
PQMGPLFLNCHHCTDKATWVAGTLWSVRGQRGEGLHTKTALSSRRGKAAAEENPVGLAVLDEEKEGVVGAEAGDESGTPHHHDGSCGGCSLRAFLIDLHKRLVHDLGQRQVCLGHSREVCLAQLEGISHAQVAQDTLHVVAFLYFKPREGHFHLLFIHHVQPRPFYELLVSEFFLHRSQVSGLVRKHDDHIQFLANIWKHQDLGKYFSYIGLLKSRLLKHHLHRFLLILADFKQSLLGVLLVKLFIPVSSEIDSIALTRAIVRALPLLRVLSIRVDHPSQRDNPGVPGNAGPPSHIIGDEEIPENCLEQLEMGFPRGAQPAPLLCSVLKASGSLQQLSLDSATFASPQDFGLVLQTLKEYNLALKRLSFHDMNLADCQSEVLFLLQNLTLQEITFSFCRLFEKRPAQFLPEMVAAMKGNSTLKGLRLPGNRLGNAGLLALADVFSEDSSSSLCQLDISSNCIKPDGLLEFAKRLERWGRGAFGHLRLFQNWLDQDAVTAREAIRRLRATCHVVSDSWDSSQAFADYVSTM

SEQ ID NO: 851661 - protein, 548 aa, Homo sapiens
AHLPKMAAPEAWRARSCWFCEVAAATTMEATSREAAPAKSSASGPNAPPALFELCGRAVSAHMGVLESGVWALPGPILQSILPLLNIYYLERIEETALKKGLSTQAIWRRLWDELMKTRPSSLESVTCWRAKFMEAFFSHVLRGTIDVSSDRRLCDQRFSPLLHSSRHVRQLTICNMLQGATELVAEPNRRVLETLASSLHTLKFRHLLFSDVAAQQSLRQLLHQLIHHGAVSQVSLYSWPVPESALFILILTMSAGFWQPGPGGPPCRLCGEASRGRAPSRDEGSLLLGSRRPRRDAAERCAAALMASRRKSEAKQMPRAAPATRVTRRSTQESLTAGGTDLKRELHPPATSHEAPGTKRSPSAPAATSSASSSTSSYKRAPASSAPQPKPLKRFKRAAGKKGARTRQGPGAESEDLYDFVFIVAGEKEDGEEMEIGEVACGALDGSDPSCLGLPALEASQRFRSISTLELFTVPLSTEAALTLCHLLSSWVSLESLTLSYNGEHPGVAGIGLRLPSSTSCVPNSREVGGANWGYDQEVREEGLYAS

SEQ ID NO: 851662 - protein, 548 aa, Homo sapiens; identical to SEQ ID NO: 851661

SEQ ID NO: 851663 - protein, 114 aa, Homo sapiens
  misc_feature (3)..(3): Xaa can be any naturally occurring amino acid
  misc_feature (7)..(7): Xaa can be any naturally occurring amino acid
  misc_feature (13)..(13): Xaa can be any naturally occurring amino acid
  misc_feature (32)..(32): Xaa can be any naturally occurring amino acid
PGXQREXGFGENXWPWLGLWKNVFFKRNSSLXLLMSRWEHQVSNCIKPDGLLEFAKRLERWGRGAFGHLRLFQNWLDQDAVTAREAIRRLRATCHVVSDSWDSSQAFADYVSTM

SEQ ID NO: 851664 - protein, 817 aa, Homo sapiens; identical to SEQ ID NO: 851657

SEQ ID NO: 851665 - protein, 707 aa, Homo sapiens
MDISWLSGMFSAFQSVTCWRAKFMEAFFSHVLRGTIDVSSDRRLCDQRFSPLLHSSRHVRQLTICNMLQGATELVAEPNRRVLETLASSLHTLKFRHLLFSDVAAQQSLRQLLHQLIHHGAVSQVSLYSWPVPESALFILILTMSAGFWQPGPGGPPCRLCGEASRGRAPSRDEGSLLLGSRRPRRDAAERCAAALMASRRKSEAKQMPRAAPATRVTRRSTQESLTAGGTDLKRELHPPATSHEAPGTKRSPSAPAATSSASSSTSSYKRAPASSAPQPKPLKRFKRAAGKKGARTRQGPGAESEDLYDFVFIVAGEKEDGEEMEIGEVACGALDGSDPSCLGLPALEASQRFRSISTLELFTVPLSTEAALTLCHLLSSWVSLESLTLSYNGLGSNIFRLLDSLRALSGQAGCRLRALHLSDLFSPLPILELTRAIVRALPLLRVLSIRVDHPSQRDNPGVPGNAGPPSHIIGDEEIPENCLEQLEMGFPRGAQPAPLLCSVLKASGSLQQLSLDSATFASPQDFGLVLQTLKEYNLALKRLSFHDMNLADCQSEVLFLLQNLTLQEITFSFCRLFEKRPAQFLPEMVAAMKGNSTLKGLRLPGNRLGNAGLLALADVFSEDSSSSLCQLDISSNCIKPDGLLEFAKRLERWGRGAFGHLRLFQNWLDQDAVTAREAIRRLRATCHVVSDSWDSSQAFADYVSTM

SEQ ID NO: 851666 - protein, 701 aa, Homo sapiens
RDLRPRLESVTCWRAKFMEAFFSHVLRGTIDVSSDRRLCDQRFSPLLHSSRHVRQLTICNMLQGATELVAEPNRRVLETLASSLHTLKFRHLLFSDVAAQQSLRQLLHQLIHHGAVSQVSLYSWPVPESALFILILTMSAGFWQPGPGGPPCRLCGEASRGRAPSRDEGSLLLGSRRPRRDAAERCAAALMASRRKSEAKQMPRAAPATRVTRRSTQESLTAGGTDLKRELHPPATSHEAPGTKRSPSAPAATSSASSSTSSYKRAPASSAPQPKPLKRFKRAAGKKGARTRQGPGAESEDLYDFVFIVAGEKEDGEEMEIGEVACGALDGSDPSCLGLPALEASQRFRSISTLELFTVPLSTEAALTLCHLLSSWVSLESLTLSYNGLGSNIFRLLDSLRALSGQAGCRLRALHLSDLFSPLPILELTRAIVRALPLLRVLSIRVDHPSQRDNPGVPGNAGPPSHIIGDEEIPENCLEQLEMGFPRGAQPAPLLCSVLKASGSLQQLSLDSATFASPQDFGLVLQTLKEYNLALKRLSFHDMNLADCQSEVLFLLQNLTLQEITFSFCRLFEKRPAQFLPEMVAAMKGNSTLKGLRLPGNRLGNAGLLALADVFSEDSSSSLCQLDISSNCIKPDGLLEFAKRLERWGRGAFGHLRLFQNWLDQDAVTAREAIRRLRATCHVVSDSWDSSQAFADYVSTM

SEQ ID NO: 851667 - protein, 817 aa, Homo sapiens; identical to SEQ ID NO: 851657

SEQ ID NO: 851668 - protein, 697 aa, Homo sapiens
AHLPKMAAPEAWRARSCWFCEVAAATTMEATSREAAPAKSSASGPNAPPALFELCGRAVSAHMGVLESGVWALPGPILQSILPLLNIYYLERIEETALKKGLSTQAIWRRLWDELMKTRPSSLESVTCWRAKFMEAFFSHVLRGTIDVSSDRRLCDQRFSPLLHSSRHVRQLTICNMLQGATELVAEPNRRVLETLASSLHTLKFRHLLFSDVAAQQSLRQLLHQLIHHGAVSQVSLYSWPVPESALFILILTMSAGFWQPGPGGPPCRLCGEASRGRAPSRDEGSLLLGSRRPRRDAAERCAAALMASRRKSEAKQMPRAAPATRVTRRSTQESLTAGGTDLKRELHPPATSHEAPGTKRSPSAPAATSSASSSTSSYKRAPASSAPQPKPLKRFKRAAGKKGARTRQGPGAESEDLYDFVFIVAGEKEDGEEMEIGEVACGALDGSDPSCLGLPALEASQRFRSISTLELFTVPLSTEAALTLCHLLSSWVSLESLTLSYNGLGSNIFRLLDSLRALSGQAGCRLRALHLSDLFSPLPILELTRAIVRALPLLRVLSIRVDHPSQRDNPGVPGNAGPPSHIIGDEEIPENCLEQLEMGFPRGAQPAPLLCSVLKASGSLQQLSLDSATFASPQDFGLVLQTLKEYNLALKRLSFHDMNLADCQSEVLFLLQNLTLQGKFLIQNLDISWVFTMVLP

SEQ ID NO: 851669 - protein, 799 aa, Homo sapiens
AHLPKMAAPEAWRARSCWFCEVAAATTMEATSREAAPAKSSASGPNAPPALFELCGRAVSAHMGVLESGVWALPGPILQSILPLLNIYYLERIEETALKKGLSTQAIWRRLWDELMKTRPSSLESVTCWRAKFMEAFFSHVLRGTIDVSSDRRLCDQRFSPLLHSSRHVRQLTICNMLQGATELVAEPNRRVLETLASSLHTLKFRHLLFSDVAAQQSLRQLLHQLIHHGAVSQVSLYSWPVPESALFILILTMSAGFWQPGPGGPPCRLCGEASRGRAPSRDEGSLLLGSRRPRRDAAERCAAALMASRRKSEAKQMPRAAPATRVTRRSTQESLTAGGTDLKRELHPPATSHEAPGTKRSPSAPAATSSASSSTSSYKRAPASSAPQPKPLKRFKRAAGKKGARTRQGPGAESEDLYDFVFIVAGEKEDGEEMEIGEVACGALDGSDPSCLGLPALEASQRFRSISTLELFTVPLSTEAALTLCHLLSSWVSLESLTLSYNGLGSNIFRLLDSLRALSGQAGCRLRALHLSDLFSPLPILELTRAIVRALPLLRVLSIRVDHPSQRDNPGVPGNAGPPSHIIGDEEIPENCLEQLEMGFPRGAQPAPLLCSVLKASGSLQQLSLDSATFASPQDFGLVLQTLKEYNLALKRLSFHDMNLADCQSEVLFLLQNLTLQEITFSFCRLFEKRPAQFLPEMVAAMKGNSTLKGLRLPGNRLGNAGLLALADVFSEDSSSSLCQLDISSNCIKPDGLLEFAKRLERWGRGAFGHLRLFRATCHVVSDSWDSSQAFADYVSTM

SEQ ID NO: 851670 - protein, 817 aa, Homo sapiens; identical to SEQ ID NO: 851657

SEQ ID NO: 851671 - protein, 679 aa, Homo sapiens
AHLPKMAAPEAWRARSCWFCEVAAATTMEATSREAAPAKSSASGPNAPPALFELCGRAVSAHMGVLESGVWALPGPILQSILPLLNIYYLERIEETALKKGLSTQAIWRRLWDELMKTRPSSLESVTCWRAKFMEAFFSHVLRGTIDVSSDRRLCDQRFSPLLHSSRHVRQLTICNMLQGATELVAEPNRRVLETLASSLHTLKFRHLLFSDVAAQQSLRQLLHQLIHHGAVSQVSLYSWPVPESALFILILTMSAGFWQPGPGGPPCRLCGEASRGRAPSRDEGSLLLGSRRPRRDAAERCAAALMASRRKSEAKQMPRAAPATRVTRRSTQESLTAGGTDLKRELHPPATSHEAPGTKRSPSAPAATSSASSSTSSYKRAPASSAPQPKPLKRFKRAAGKKGARTRQGPGAESEDLYDFVFIVAGEKEDGEEMEIGEVACGALDGSDPSCLGLPALEASQRFRSISTLELFTVPLSTEAALTLCHLLSSWVSLESLTLSYNGLGSNIFRLLDSLRALSGQAGCRLRALHLSDLFSPLPILELTRAIVRALPLLRVLSIRVDHPSQRDNPGVPGNAGPPSHIIGDEEIPENCLEQLEMGFPRGAQPAPLLCSVLKASGSLQQLSLDSATFASPQDFGPLLSILGTLGQEVTVVIIIAEEIPSPAPGFLPSLLKQAPRL

SEQ ID NO: 851672 - protein, 680 aa, Homo sapiens
AHLPKMAAPEAWRARSCWFCEVAAATTMEATSREAAPAKSSASGPNAPPALFELCGRAVSAHMGVLESGVWALPGPILQSILPLLNIYYLERIEETALKKGLSTQAIWRRLWDELMKTRPSSLESVTCWRAKFMEAFFSHVLRGTIDVSSDRRLCDQRFSPLLHSSRHVRQLTICNMLQGATELVAEPNRRVLETLASSLHTLKFRHLLFSDVAAQQSLRQLLHQLIHHGAVSQVSLYSWPVPESALFILILTMSAGFWQPGPGGPPCRLCGEASRGRAPSRDEGSLLLGSRRPRRDAAERCAAALMASRRKSEAKQMPRAAPATRVTRRSTQESLTAGGTDLKRELHPPATSHEAPGTKRSPSAPAATSSASSSTSSYKRAPASSAPQPKPLKRFKRAAGKKGARTRQGPGAESEDLYDFVFIVAGEKEDGEEMEIGEVACGALDGSDPSCLGLPALEASQRFRSISTLELFTVPLSTEAALTLCHLLSSWVSLESLTLSYNGLGSNIFRLLDSLRALSGQAGCRLRALHLSDLFSPLPILELTRAIVRALPLLRVLSIRVDHPSQRDNPGVPGNAGPPSHIIGDEEIPEYNLALKRLSFHDMNLADCQSEVLFLLQNLTLQEITFSFCRLFEKRPAQFLPEMVAAMKGNSTLKGLRLPGNRLGGGQTLGRERGKELGL

SEQ ID NO: 851673 - protein, 270 aa, Homo sapiens
AHLPKMAAPEAWRARSCWFCEVAAATTMEATSREAAPAKSSASGPNAPPALFELCGRAVSAHMGVLESGVWALPGPILQSILPLLNIYYLERIEETALKKGLSTQAIWRRLWDELMKTRPSSLESVTCWRAKFMEAFFSHVLRGTIDVSSDRRLCDQRFSPLLHSSRHVRQLTICNMLQGATELVAEPNRRVLETLASSLHTLKFRHLLFSDVAAQQSLRQLLHQLIHHGAVSQVSLYSWPVPESALFILILTTSLYAILINCYLLFFTN

SEQ ID NO: 851674 - protein, 452 aa, Homo sapiens
MSTAVLENPGLGRKLSDFGQETSYIEDNCNQNGAISLIFSLKEEVGALAKVLRLFEENDVNLTHIESRPSRLKKDEYEFFTHLDKRSLPALTNIIKILRHDIGATVHELSRDKKKDTVPWFPRTIQELDRFANQILSYGAELDADHPGFKDPVYRARRKQFADIAYNYRHGQPIPRVEYMEEEKKTWGTVFKTLKSLYKTHACYEYNHIFPLLEKYCGFHEDNIPQLEDVSQFLQTCTGFRLRPVAGLLSSRDFLGGLAFRVFHCTQYIRHGSKPMYTPEPDICHELLGHVPLFSDRSFAQFSQEIGLASLGAPDEYIEKLATIYWFTVEFGLCKQGDSIKAYGAGLLSSFGELQYCLSEKPKLLPLELEKTAIQNYTVTEFQPLYYVAESFNDAKEKVRNFAATIPRPFSVRYDPYTQRIEVLDNTQQLKILADSINSEIGILCSALQKIK

SEQ ID NO: 851675 - protein, 80 aa, Homo sapiens
GRRGCGRGKETGCGRQEGLLGLRLGLLAGAAALHLGRAFHAQRRPRSRGIRAIRDARCGAREGDTERTWVQEQRGKEKEI

SEQ ID NO: 851676 - protein, 430 aa, Homo sapiens
MSTAVLENPGLGRKLSDFGQETSYIEDNCNQNGAISLIFSLKEEVGALAKVLRLFEENDVNLTHIESRPSRLKKDEYEFFTHLDKRSLPALTNIIKILRHDIGATVHELSRDKKKDTVPWFPRTIQELDRFANQILSYGAELDADHPGFKDPVYRARRKQFADIAYNYRHGQPIPRVEYMEEEKKTWGTVFKTLKSLYKTHACYEYNHIFPLLACTGFRLRPVAGLLSSRDFLGGLAFRVFHCTQYIRHGSKPMYTPEPDICHELLGHVPLFSDRSFAQFSQEIGLASLGAPDEYIEKLATIYWFTVEFGLCKQGDSIKAYGAGLLSSFGELQYCLSEKPKLLPLELEKTAIQNYTVTEFQPLYYVAESFNDAKEKVRNFAATIPRPFSVRYDPYTQRIEVLDNTQQLKILADSINSEIGILCSALQKIK

SEQ ID NO: 851677 - protein, 439 aa, Homo sapiens
MSTAVLENPGLGRKLSDFGQETSYIEDNCNQNGAISLIFSLKEEVGALAKVLRLFEENDVNLTHIESRPSRLKKDEYEFFTHLDKRSLPALTNIIKILRHDIGATVHELSRDKKKDTVPWFPRTIQELDRFANQILSYGAELDADHPGFKDPVYRARRKQFADIAYNYRHGQPIPRVEYMEEEKKTWGTVFKTLKSLYKTHACYEYNHIFPLLEKYCGFHEDNIPQLEDVSQFLQTCTGFRLRPVAGLLSSRDFLGGLAFRVFHCTQYIRHGSKPMYTPEPDICHELLGHVPLFSDRSFAQFSQEIGLASLGAPDEYIEKLATGDSIKAYGAGLLSSFGELQYCLSEKPKLLPLELEKTAIQNYTVTEFQPLYYVAESFNDAKEKVRNFAATIPRPFSVRYDPYTQRIEVLDNTQQLKILADSINSEIGILCSALQKIK

SEQ ID NO: 851678 - protein, 434 aa, Homo sapiens
MSTAVLENPGLGRKLSDFGQETSYIEDNCNPKVLRLFEENDVNLTHIESRPSRLKKDEYEFFTHLDKRSLPALTNIIKILRHDIGATVHELSRDKKKDTVPWFPRTIQELDRFANQILSYGAELDADHPGFKDPVYRARRKQFADIAYNYRHGQPIPRVEYMEEEKKTWGTVFKTLKSLYKTHACYEYNHIFPLLEKYCGFHEDNIPQLEDVSQFLQTCTGFRLRPVAGLLSSRDFLGGLAFRVFHCTQYIRHGSKPMYTPEPDICHELLGHVPLFSDRSFAQFSQEIGLASLGAPDEYIEKLATIYWFTVEFGLCKQGDSIKAYGAGLLSSFGELQYCLSEKPKLLPLELEKTAIQNYTVTEFQPLYYVAESFNDAKEKVRNFAATIPRPFSVRYDPYTQRIEVLDNTQQLKILADSINSEIGILCSALQKIK

SEQ ID NO: 851679 - protein, 229 aa, Homo sapiens
MSTAVLENPGLGRKLSDFGQETSYIEDNCNQNGAISLIFSLKEEVGALAKVLRLFEENDVNLTHIESRPSRLKKDEYEFFTHLDKRSLPALTNIIKILRHDIGATVHELSRDKKKDTVPWFPRTIQELDRFANQILSYGAELDADHPGFKDPVYRARRKQFADIAYNYRHGQPIPRVEYMEEEKKTWGTVFKTLKSLYKSTVASMKITFPSWKTFLSSCRLALVSASDL

SEQ ID NO: 851680 - protein, 452 aa, Homo sapiens; identical to SEQ ID NO: 851674

SEQ ID NO: 851681 - protein, 344 aa, Homo sapiens
MTLVPLSMSFHEIRRTIQELDRFANQILSYGAELDADHPGFKDPVYRARRKQFADIAYNYRHGQPIPRVEYMEEEKKTWGTVFKTLKSLYKTHACYEYNHIFPLLEKYCGFHEDNIPQLEDVSQFLQTCTGFRLRPVAGLLSSRDFLGGLAFRVFHCTQYIRHGSKPMYTPEPDICHELLGHVPLFSDRSFAQFSQEIGLASLGAPDEYIEKLATIYWFTVEFGLCKQGDSIKAYGAGLLSSFGELQYCLSEKPKLLPLELEKTAIQNYTVTEFQPLYYVAESFNDAKEKVRNFAATIPRPFSVRYDPYTQRIEVLDNTQQLKILADSINSEIGILCSALQKIK

SEQ ID NO: 851682 - protein, 177 aa, Homo sapiens [sequence omitted]

SEQ ID NO: 851683 - protein, 452 aa, Homo sapiens; identical to SEQ ID NO: 851674

SEQ ID NO: 851684 - protein, 452 aa, Homo sapiens; identical to SEQ ID NO: 851674

SEQ ID NO: 851685 - protein, 199 aa, Homo sapiens
MGRKDLITHSGSMWAVLKASGHPSPFYGQVLGWFCGSNYRNRTGSIFPQLQEIGLASLGAPDEYIEKLATIYWFTVEFGLCKQGDSIKAYGAGLLSSFGELQYCLSEKPKLLPLELEKTAIQNYTVTEFQPLYYVAESFNDAKEKVRNFAATIPRPFSVRYDPYTQRIEVLDNTQQLKILADSINSEIGILCSALQKIK

SEQ ID NO: 851686 - protein, 199 aa, Homo sapiens; identical to SEQ ID NO: 851685

SEQ ID NO: 851687 - protein, 267 aa, Homo sapiens [sequence omitted]

SEQ ID NO: 851688 - protein, 136 aa, Homo sapiens
MSTAVLENPGLGRKLSDFGQETSYIEDNCNPKVLRLFEENDVNLTHIESRPSRLKKDEYEFFTHLDKRSLPALTNIIKILRHDIGATVHELSRDKKKDTVPWFPRTIQELDRFANQILSYGAELDADHPVSPWPVG

SEQ ID NO: 851689 - protein, 452 aa, Homo sapiens; identical to SEQ ID NO: 851674

SEQ ID NO: 851690 - protein, 105 aa, Homo sapiens
MQLLPHHPNTPAAVDAWHGQRICVLRTHPGRKKKNPNNLEGRAPPPWEEHLGRGMSPEQGTRSKEHPEGGEPSPGGSRGAHTNSGRGHQKIFGVSSPRHKGARDL

SEQ ID NO: 851691 - protein, 452 aa, Homo sapiens; identical to SEQ ID NO: 851674

SEQ ID NO: 851692 - protein, 452 aa, Homo sapiens; identical to SEQ ID NO: 851674

SEQ ID NO: 851693 - protein, 434 aa, Homo sapiens
MSTAVLENPGLGRKLSDFGQETSYIEDNCNQNGAISLIFSLKEEVGALAKVLRLFEENDVNLTHIESRPSRLKKDEYEFFTHLDKRSLPALTNIIKILRHDIGATVHELSRDKKKDTVPWFPRTIQELDRFANQILSYGAELDADHPGFKDPVYRARRKQFADIAYNYRHGQPIPRVEYMEEEKKTWGTVFKTLKSLYKTHACYEYNHIFPLLEKYCGFHEDNIPQLEDVSQFLQTCTGFRLRPVAGLLSSRDFLGGLAFRVFHCTQYIRHGSKPMYTPEPDICHELLGHVPLFSDRSFAQFSQEIGLASLGAPDEYIEKLATIYWFTVEFGLCKQGDSIKAYGAGLLSSFGELQYCLSEKPKLLPLELEKTAIHDAKEKVRNFAATIPRPFSVRYDPYTQRIEVLDNTQQLKILADSINSEIGILCSALQKIK

SEQ ID NO: 851694 - protein, 452 aa, Homo sapiens; identical to SEQ ID NO: 851674

SEQ ID NO: 851695 - protein, 471 aa, Homo sapiens
GCRIRHELKSQRPHSRGASMSTAVLENPGLGRKLSDFGQETSYIEDNCNQNGAISLIFSLKEEVGALAKVLRLFEENDVNLTHIESRPSRLKKDEYEFFTHLDKRSLPALTNIIKILRHDIGATVHELSRDKKKDTVPWFPRTIQELDRFANQILSYGAELDADHPGFKDPVYRARRKQFADIAYNYRHGQPIPRVEYMEEEKKTWGTVFKTLKSLYKTHACYEYNHIFPLLEKYCGFHEDNIPQLEDVSQFLQTCTGFRLRPVAGLLSSRDFLGGLAFRVFHCTQYIRHGSKPMYTPEPDICHELLGHVPLFSDRSFAQFSQEIGLASLGAPDEYIEKLATIYWFTVEFGLCKQGDSIKAYGAGLLSSFGELQYCLSEKPKLLPLELEKTAIQNYTVTEFQPLYYVAESFNDAKEKVRNFAATIPRPFSVRYDPYTQRIEVLDNTQQLKILADSINSEIGILCSALQKIK

SEQ ID NO: 851696 - protein, 452 aa, Homo sapiens; identical to SEQ ID NO: 851674

SEQ ID NO: 851697 - protein, 412 aa, Homo sapiens
MSTAVLENPGLGRKLSDFGQETSYIEDNCNQNGAISLIFSLKEEVGALAKVLRLFEENDVNLTHIESRPSRLKKDEYEFFTHLDKRSLPALTNIIKILRHDIGATVHELSRDKKKDTVPWFPRTIQELDRFANQILSYGAELDADHPGFKDPVYRARRKQFADIAYNYRHGQPIPRVEYMEEEKKTWGTVFKTLKSLYKTHACYEYNHIFPLLACTGFRLRPVAGLLSSRDFLGGLAFRVFHCTQYIRHGSKPMYTPEPDICHELLGHVPLFSDRSFAQFSQEIGLASLGAPDEYIEKLATIYWFTVEFGLCKQGDSIKAYGAGLLSSFGELQYCLSEKPKLLPLELEKTAIHDAKEKVRNFAATIPRPFSVRYDPYTQRIEVLDNTQQLKILADSINSEIGILCSALQKIK

SEQ ID NO: 851698 - protein, 452 aa, Homo sapiens; identical to SEQ ID NO: 851674

SEQ ID NO: 851699 - protein, 281 aa, Homo sapiens
MSTAVLENPGLGRKLSDFGQETSYIEDNCNQNGAISLIFSLKEEVGALAKVLRLFEENDVNLTHIESRPSRLKKDEYEFFTHLDKRSLPALTNIIKILRHDIGATVHELSRDKKKDTVPWFPRTIQELDRFANQILSYGAELDADHPGFKDPVYRARRKQFADIAYNYRHGQPIPRVEYMEEEKKTWGTVFKTLKSLYKTHACYEYNHIFPLLEKYCGFHEDNIPQLEDVSQFLQTCTGFRLRPVAGLLSSRDFLGGLAFRVFHCTQYIRHGSKPMYTPEP

SEQ ID NO: 851700 - protein, 154 aa, Homo sapiens
MSTAVLENPGLGRKLSDFGQETSYIEDNCNQNGAISLIFSLKEEVGALAKVLRLFEENDVNLTHIESRPSRLKKDEYEFFTHLDKRSLPALTNIIKILRHDIGATVHELSRDKKKDTVPWFPRTIQELDRFANQILSYGAELDADHPVSPWPVG

SEQ ID NO: 851701 - protein, 293 aa, Homo sapiens
MNPFWSMSTSSVRKRSEGEEKTLTGDVKTSPPRTAPKKQLPSIPKNALPITKPTSPAPAAQSTNGTHASYGPFYLEYSLLAEFTLVVKQKLPGVYVQPSYRSALMWFGVIFIRHGLYQDGVFKFTVYIPDNYPDGDCPRLVFDIPVFHPLVDPTSGELDVKRAFAKWRRNHNHIWQVLMYARRVFYKIDTASPLNPEAAVLYEKDIQLFKSKVVDSVKVCTARLFDQPKIEDPYAISFSPWNPSVHDEAREKMLTQKKKPEEQHNKSVHVAGLSWVKPGSVQPFSKEEKTVAT

SEQ ID NO: 851702 - protein, 205 aa, Homo sapiens
MNPFWSMSTSSVRKRSEGEEKTLTGDVKTSPPRTAPKKQLPSIPKNALPITKPTSPAPAAQSTNGTHASYGPFYLEYSLLAEFTLVVKQKLPGVYVQPSYRSALMWFGVIFIRHGLYQDGVFKFTVYIPDNYPDGDCPRLVFDIPVFHPLVDPTSGELDVKRAFAKWRGGTIDHIWRVLCLPRGSYRVRYEAPEPKLSLVERFPF

SEQ ID NO: 851703 - protein, 293 aa, Homo sapiens; identical to SEQ ID NO: 851701

SEQ ID NO: 851704 - protein, 293 aa, Homo sapiens; identical to SEQ ID NO: 851701

SEQ ID NO: 851705 - protein, 293 aa, Homo sapiens; identical to SEQ ID NO: 851701

SEQ ID NO: 851706 - protein, 293 aa, Homo sapiens; identical to SEQ ID NO: 851701

SEQ ID NO: 851707 - protein, 332 aa, Homo sapiens
MNPFWSMSTSSVRKRSEGEEKTLTGDVKTSPPRTAPKKQLPSIPKNALPITKPTSPAPAAQSTNGTHASYGPFYLEYSLLAEFTLVVKQKLPGVYVQPSYRSALMWFGVIFIRHGLYQDGVFKFTVYIPDNYPDGDCPLSRGTSVLCSSFRHAIRALFLCSGSAREAGCLPSCSTHQRLVFDIPVFHPLVDPTSGELDVKRAFAKWRRNHNHIWQVLMYARRVFYKIDTASPLNPEAAVLYEKDIQLFKSKVVDSVKVCTARLFDQPKIEDPYAISFSPWNPSVHDEAREKMLTQKKKPEEQHNKSVHVAGLSWVKPGSVQPFSKEEKTVAT

SEQ ID NO: 851708 - protein, 260 aa, Homo sapiens
MNPFWSMSTSSVRKRSEGEEKTLTGDVKTSPPRTAPKKQLPSIPKNALPITKPTSPAPAAQSTNGTHASYGPFYLEYSLLAEFTLVVKQKLPGVYVQPSYRSALMWFGVIFIRHGLYQDGVFKFTVYIPDNYPDGDCPRLVFDIPVFHPLVDPTSGELDVKRAFAKWRYEKDIQLFKSKVVDSVKVCTARLFDQPKIEDPYAISFSPWNPSVHDEAREKMLTQKKKPEEQHNKSVHVAGLSWVKPGSVQPFSKEEKTVAT

SEQ ID NO: 851709 - protein, 171 aa, Homo sapiens
MNPFWSMSTSSVRKRSEGEEKTLTGDVKTSPPRTAPKKQLPSIPKNALPITKPTSPAPAAQSTNGTHASYGPFYLEYSLLAEFTLVVKQKLPGVYVQPSYRSALMWFGVIFIRHGLYQDGVFKFTVYIPDNYPDGDCPRLVFDIPVFHPLVDPTSGELDVKRAFAKWRVSK

SEQ ID NO: 851710 - protein, 293 aa, Homo sapiens; identical to SEQ ID NO: 851701

SEQ ID NO: 851711 - protein, 122 aa, Homo sapiens
RPQWDTEAGPGTCARLQAPAALAASQPGTAAGDCGWSWAGPARGRGGPSWLAPARARPPRPGPDPELWLRGRRRAPEPPHWRGPRLPGQHRASCEARTGPPPCITSRQVCPDSLSAQRRVSA

SEQ ID NO: 851712 - protein, 105 aa, Homo sapiens
MFLGVPRLIGIRLTLPPPKVVDRWNEKRAMFGVYDNIGILGNFEKHPKELIRGPIWLRGWKGNELQRCIRKRKMVGSRMFADDLHNLNKRIRYLYKHFNRHGKFR

SEQ ID NO: 851713 - protein, 128 aa, Homo sapiens
MAGNLLSGAGRRLWDWVPLACRSFSLGVPRLIGIRLTLPPPKVVDRWNEKRAMFGVYDNIGILGNFEKHPKELIRGPIWLRGWKGNELQRCIRKRKMVGSRMFADDLHNLNKRIRYLYKHFNRHGKFR

SEQ ID NO: 851714 - protein, 128 aa, Homo sapiens; identical to SEQ ID NO: 851713

SEQ ID NO: 851715 - protein, 128 aa, Homo sapiens; identical to SEQ ID NO: 851713

SEQ ID NO: 851716 - protein, 128 aa, Homo sapiens; identical to SEQ ID NO: 851713

SEQ ID NO: 851717 - protein, 115 aa, Homo sapiens
MAAQINSLPSPSPGVPRLIGIRLTLPPPKVVDRWNEKRAMFGVYDNIGILGNFEKHPKELIRGPIWLRGWKGNELQRCIRKRKMVGSRMFADDLHNLNKRIRYLYKHFNRHGKFR

SEQ ID NO: 851718 - protein, 151 aa, Homo sapiens
DLTRGSDSGSQAEMKRKKHALHNTHQLARQFSSRRRIRPIPGRQRQRAASESGNARAKPQIPSSNLNGCRTANRDARRSGRPITAPPGGGPRLRLRPPLPPPARLRIPPWPQGPPLPSRRGGGRISAGQRRRVPGWAFSHPQERRQVHAGS

SEQ ID NO: 851719 - protein, 246 aa, Homo sapiens
DLTRGSDSGSQAEMKKEKTRVHNTHQLARQFSSRRRIRPIPGRQRQRAASESGNARAKPQIPSSNLNGCRTANRDARRSGRPITAPPGAGQGSGSGPRSHPRPACESLLGRKVPLCPVGGEEAVFLLARDVASLAGHSVTPRKGGVPRLIGIRLTLPPPKVVDRWNEKRAMFGVYDNIGILGNFEKHPKELIRGPIWLRGWKGNELQRCIRKRKMVGSRMFADDLHNLNKRIRYLYKHFNRHGKFR

SEQ ID NO: 851720 - protein, 128 aa, Homo sapiens; identical to SEQ ID NO: 851713

SEQ ID NO: 851721 - protein, 128 aa, Homo sapiens; identical to SEQ ID NO: 851713

SEQ ID NO: 851722 - protein, 149 aa, Homo sapiens
MSPFAQSAGRRPYFCWPETSRPWLGIQSPPGKEASPRWELEGIASNPGVPRLIGIRLTLPPPKVVDRWNEKRAMFGVYDNIGILGNFEKHPKELIRGPIWLRGWKGNELQRCIRKRKMVGSRMFADDLHNLNKRIRYLYKHFNRHGKFR

SEQ ID NO: 851723 - protein, 105 aa, Homo sapiens
QKPIERTTPRVSPHVNYGLWVSIACQHRLISCNQYATLVGDVGNRGGCTYVGAGIFGKSLYLCLKFSIKPKLLQKKSSKNKKFWFIKAIMFSPPISPLSHFLPLG

SEQ ID NO: 851724 - protein, 70 aa, Homo sapiens
NRLGTRLGVNRPRQQPQGLREMAGWHPPCGHCACPRCGWGLVAEFPFHFKLTGKSPAFLPFGPVLTYVAM

SEQ ID NO: 851725 - protein, 214 aa, Homo sapiens
WVGVEGVMWWSSTQNAGTEGEAGPPGLPGPPGPKGAPGKPGKPGEAGLPGLPGVDGLTGRDGPPGPKGAPGERGSLGPPGPPGLGGKGLPGPPGEAGVSGPPGGIGLRGPPGPSGLPGLPGPPGPPGPPGHPGVLPEGATDLQCPSICPPGPPGPPGMPGFKGPTGYKGEQGEVGKDGEKVTLAPPGPRLRAEWGCRAPGDYRGRPGHSGPWDR

SEQ ID NO: 851726 - protein, 701 aa, Homo sapiens
ALGLTEESGGRRRPRSRSGPGRRGRRVRPTGAPALLNEFSPFQRVGLPGPPGPPGPPGKPGQDGIDGEAGPPGLPGPPGPKGAPGKPGKPGEAGLPGLPGVDGLTGRDGPPGPKGAPGERGSLGPPGPPGLGGKGLPGPPGEAGVSGPPGGIGLRGPPGPSGLPGLPGPPGPPGPPGHPGVLPEGATDLQCPSICPPGPPGPPGMPGFKGPTGYKGEQGEVGKDGEKGDPGPPGPAGLPGSVGLQGPRGLRGLPGPLGPPGDRGPIGFRGPPGIPGAPGKAGDRGERGPEGFRGPKGDLGRPGPKGTPGVAGPSGEPGMPGKDGQNGVPGLDGQKGEAGRNGAPGEKGPNGLPGLPGRAGSKGEKGERGRAGELGEAGPSGEPGVPGDAGMPGERGEAGHRGSAGALGPQGPPGAPGVRGFQGQKGSMGDPGLPGPQGLRGDVGDRGPGGAAGPKGDQGIAGSDGLPGDKGELGPSGLVGPKGESGSRGELGPKGTQGPNGTSGVQGVPGPPGPLGLQGVPGVPGITGKPGVPGKEASEQRIRELCGGMISEQIAQLAAHLRKPLAPGSIGRPGPAGPPGPPGPPGSIGHPGARGPPGYRGPTGELGDPGPRGNQGDRGDKGAAGAGLDGPEGDQGPQGPQGVPGTSKDGQDGAPGEPGPPGDPGLPGAIGAQGTPGICDTSACQGAVLGGVGEKSGSRSS

SEQ ID NO: 851727 - protein, 580 aa, Homo sapiens
PPRLRPYARYGLGLLPWTPGEAGVSGPPGGIGLRGPPGPSGLPGLPGPPGPPGPPGHPGVLPEGATDLQCPSICPPGPPGPPGMPGFKGPTGYKGEQGEVGKDGEKGDPGPPGPAGLPGSVGLQGPRGLRGLPGPLGPPGDRGPIGFRGPPGIPGAPGKAGDRGERGPEGFRGPKGDLGRPGPKGTPGVAGPSGEPGMPGKDGQNGVPGLDGQKGEAGRNGAPGEKGPNGLPGLPGRAGSKGEKGERGRAGELGEAGPSGEPGVPGDAGMPGERGEAGHRGSAGALGPQGPPGAPGVRGFQGQKGSMGDPGLPGPQGLRGDVGDRGPGGAAGPKGDQGIAGSDGLPGDKGELGPSGLVGPKGESGSRGELGPKGTQGPNGTSGVQGVPGPPGPLGLQGVPGVPGITGKPGVPGKEASEQRIRELCGGMISEQIAQLAAHLRKPLAPGSIGRPGPAGPPGPPGPPGSIGHPGARGPPGYRGPTGELGDPGPRGNQGDRGDKGAAGAGLDGPEGDQGPQGPQGVPGTSKDGQDGAPGEPGPPGDPGLPGAIGAQGTPGICDTSACQGAVLGGVGEKSGSRSS

SEQ ID NO: 851728 - protein, 541 aa, Homo sapiens
KYYESSPGCNFITGPGYPVVSADWRYMTFQCPSICPPGPPGPPGMPGFKGPTGYKGEQGEVGKDGEKGDPGPPGPAGLPGSVGLQGPRGLRGLPGPLGPPGDRGPIGFRGPPGIPGAPGKAGDRGERGPEGFRGPKGDLGRPGPKGTPGVAGPSGEPGMPGKDGQNGVPGLDGQKGEAGRNGAPGEKGPNGLPGLPGRAGSKGEKGERGRAGELGEAGPSGEPGVPGDAGMPGERGEAGHRGSAGALGPQGPPGAPGVRGFQGQKGSMGDPGLPGPQGLRGDVGDRGPGGAAGPKGDQGIAGSDGLPGDKGELGPSGLVGPKGESGSRGELGPKGTQGPNGTSGVQGVPGPPGPLGLQGVPGVPGITGKPGVPGKEASEQRIRELCGGMISEQIAQLAAHLRKPLAPGSIGRPGPAGPPGPPGPPGSIGHPGARGPPGYRGPTGELGDPGPRGNQGDRGDKGAAGAGLDGPEGDQGPQGPQGVPGTSKDGQDGAPGEPGPPGDPGLPGAIGAQGTPGICDTSACQGAVLGGVGEKSGSRSS

SEQ ID NO: 851729 - protein, 751 aa, Homo sapiens
MAGPRACAPLLLLLLLGELLAAAGAQRVGLPGPPGPPGPPGKPGQDGIDGEAGPPGLPGPPGPKGAPGKPGKPGEAGLPGLPGVDGLTGRDGPPGPKGAPGERGSLGPPGPPGLGGKGLPGPPGEAGVSGPPGGIGLRGPPGPSGLPGLPGPPGPPGPPGHPGVLPEGATDLQCPSICPPGPPGPPGMPGFKGPTGYKGEQGEVGKDGEKAGGPGLGCPLRGWSDQMRRPQVHIRGVPAWPRGGAWTGLKGLVGTVTTDPARQGEATETRGTALELWGDPGPPGPAGLPGSVGLQGPRGLRGLPGPLGPPGDRGPIGFRGPPGIPGAPGKAGDRGERGPEGFRGPKGDLGRPGPKGTPGVAGPSGEPGMPGKDGQNGVPGLDGQKGEAGRNGAPGEKGPNGLPGLPGRAGSKGEKGERGRAGELGEAGPSGEPGVPGDAGMPGERGEAGHRGSAGALGPQGPPGAPGVRGFQGQKGSMGDPGLPGPQGLRGDVGDRGPGGAAGPKGDQGIAGSDGLPGDKGELGPSGLVGPKGESGSRGELGPKGTQGPNGTSGVQGVPGPPGPLGLQGVPGVPGITGKPGVPGKEASEQRIRELCGGMISEQIAQLAAHLRKPLAPGSIGRPGPAGPPGPPGPPGSIGHPGARGPPGYRGPTGELGDPGPRGNQGDRGDKGAAGAGLDGPEGDQGPQGPQGVPGTSKDGQDGAPGEPGPPGDPGLPGAIGAQGTPGICDTSACQGAVLGGVGEKSGSRSS

SEQ ID NO: 851730 - protein, 572 aa, Homo sapiens
MAGPRACAPLLLLLLLGELLAAAGAQRVGLPGPPGPPGPPGKPGQDGIDGEAGPPGLPGPPGPKGAPGKPGKPGEAGLPGLPGVDGLTGRDGPPGPKGAPGERGSLGPPGPPGLGGKGLPGPPGEAGVSGPPGGIGLRGPPGPSGLPGLPGPPGPPGPPGHPGVLPEGATDLQCPSICPPGPPGPPGMPGFKGPTGYKGEQGEVGKDGEKGDPGPPGPAGLPGSVGLQGPRGLRGLPGPLGPPGDRGPIGFRGPPGIPGAPGKAGDRGERGPEGFRGPKGDLGRPGPKGTPGVAGPSGEPGMPGKDGQNGVPGLDGQKGEAGRNGAPGEKGPNGLPGLPGRAGSKGEKGERGRAGELGEAGPSGEPGVPGDAGMPGERGEAGHRGSAGALGPQGPPGAPGVRGFQGQKGSMGDPGLPGPQGLRGDVGDRGPGGAAGPKGDQGIAGSDGLPGDKGELGPSGLVGPKGESGSRGELGPKGTQGPNGTSGVQGVPGPPGPLGLQGVPGVPGITGKPGVPGKEASEQRIRELCGGMISGKSATCTGCSGAHPRLGVPCLGLHRKPSCHCFPAKVSP

SEQ ID NO: 851731 - protein, 586 aa, Homo sapiens
MAGPRACAPLLLLLLLGELLAAAGAQRVGLPGPPGPPGPPGKPGQDGIDGEAGPPGLPGPPGPKGAPGKPGKPGEAGLPGLPGVDGLTGRDGPPGPKGAPGERGSLGPPGPPGLGGKGLPGPPGEAGVSGPPGGIGLRGPPGPSGLPGLPGPPGPPGPPGHPGVLPEGATDLQCPSICPPGPPGPPGMPGFKGPTGYKGEQGEVGKDGEKGDPGPPGPAGLPGSVGLQGPRGLRGLPGPLGPPGDRGPIGFRGPPGIPGAPGKAGDRGERGPEGFRGPKGDLGRPGPKGTPGVAGPSGEPGMPGKDGQNGVPGLDGQKGEAGRNGAPGEKGPNGLPGLPGRAGSKGEKGERGRAGELGEAGPSGEPGVPGDAGMPGERGEAGHRGSAGALGPQGPPGAPGVRGFQGQKGSMGDPGLPGPQGLRGDVGDRGPGGAAGPKGDQGIAGSDGLPGDKGELGPSGLVGPKGESGSRGELGPKGTQGPNGTSGVQGVPGPPGPLGLQGVPGVPGITGKPGVPGKEASEQRIRELCGGMISEQIAQLAAHLRKPLAPGSIGRPGPGTPGICDTSACQGAVLGGVGEKSGSRSS

SEQ ID NO: 851732 - protein, 572 aa, Homo sapiens; identical to SEQ ID NO: 851730

SEQ ID NO: 851733 - protein, 242 aa, Homo sapiens
LAGYRGLNWDKGELGPSGLVGPKGESGSRGELGPKGTQGPNGTSGVQGVPGPPGPLGLQGVPGVPGITGKPGVPGKEASEQRIRELCGGMISEQIAQLAAHLRKPLAPGSIGRPGPAGPPGPPGPPGSIGHPGARGPPGYRGPTGELGDPGPRGNQGDRGDKGAAGAGLDGPEGDQGPQGPQGVPGTSKDGQDGAPGEPGPPGDPGLPGAIGAQGTPGICDTSACQGAVLGGVGEKSGSRSS

SEQ ID NO: 851734 - protein, 153 aa, Homo sapiens
MISEQIAQLAAHLRKPLAPGSIGRPGPAGPPGPPGPPGSIGHPGARGPPGYRGPTGELGDPGPRGNQGDRGDKGAAGAGLDGPEGDQGPQGPQGVPGTSKDGQDGAPGEPGPPGDPGLPGAIGAQGTPGICDTSACQGAVLGGVGEKSGSRSS

SEQ ID NO: 851735 - protein, 213 aa, Homo sapiens
MARYWAKVPGPNGTSGVQGVPGPPGPLGLQGVPGVPGITGKPGVPGKEASEQRIRELCGGMISEQIAQLAAHLRKPLAPGSIGRPGPAGPPGPPGPPGSIGHPGARGPPGYRGPTGELGDPGPRGNQGDRGDKGAAGAGLDGPEGDQGPQGPQGVPGTSKDGQDGAPGEPGPPGDPGLPGAIGAQGTPGICDTSACQGAVLGGVGEKSGSRSS

SEQ ID NO: 851736 - protein, 206 aa, Homo sapiens
KKYGLRVRRPPVGLNSCTNGVDAHDVRPMLTNVWGEFQGKEASEQRIRELCGGMISEQIAQLAAHLRKPLAPGSIGRPGPAGPPGPPGPPGSIGHPGARGPPGYRGPTGELGDPGPRGNQGDRGDKGAAGAGLDGPEGDQGPQGPQGVPGTSKDGQDGAPGEPGPPGDPGLPGAIGAQGTPGICDTSACQGAVLGGVGEKSGSRSS

SEQ ID NO: 851737 - protein, 180 aa, Homo sapiens
NRLGTRLGVNRPRPWPGRARAPRSCSCSCSGSFWRPPGRREWDSPAPPAPQGRPGSPARTALTELCGGMISEQIAQLAAHLRKPLAPGSIGRPGPAGPPGPPGPPGLDGPEGDQGPQGPQGVPGTSKDGQDGAPGEPGPPGDPGLPGAIGAQGTPGICDTSACQGAVLGGVGEKSGSRSS

SEQ ID NO: 851738 - protein, 677 aa, Homo sapiens
MAGPRACAPLLLLLLLGELLAAAGAQRVGLPGPPGPPGPPGKPGQDGIDGEAGPPGLPGPPGPKGAPGKPGKPGEAGLPGLPGVDGLTGRDGPPGPKGAPGERGSLGPPGPPGLGGKGLPGPPGEAGVSGPPGGIGLRGPPGPSGLPGLPGPPGPPGPPGHPGVLPEGATDLQCPSICPPGPPGPPGMPGFKGPTGYKGEQGEVGKDGEKGDPGPPGPAGLPGSVGLQGPRGLRGLPGPLGPPGDRGPIGFRGPPGIPGAPGKAGDRGERGPEGFRGPKGDLGRPGPKGTPGVAGPSGEPGMPGKDGQNGVPGLDGQKGEAGRNGAPGEKGPNGLPGLPGRAGSKGEKGERGRAGELGEAGPSGEPGVPGDAGMPGERGEAGHRGSAGALGPQGPPGAPGVRGFQGQKGSMGDPGLPGPQGLRGDVGDRGPGGAAGPKGDQGIAGSDGLPGDKGELGPSGLVGPKGESGSRGELGPKGTQGPNGTSGVQGVPGPPGPLGLQGVPGVPGITGKPGVPGKEASEQRIRELCGGMISEQIAQLAAHLRKPLAPGSIGRPGPAGPPGPPGPPGSIGHPGARGPPGYRGPTGELGDPGPRGNQGDRGDKGAAGAGLDGPEGDQGPQGPQGVPGTSKDGQDGAPGEPGPPGDPGLPGAIGAQGEPTGGILAKTFKPLAQRGTA

SEQ ID NO: 851739 - protein, 264 aa, Homo sapiens
GLSRAWVLNKAEGKLEGREKGDPGPPGPAGLPGSVGLQGPRGLRGLPGPLGPPGDRGPIGFRGPPGIPGAPGKAGDRGERGPEGFRGPKGDLGRPGPKGTPGVAGPSGEPGMPGKDGQNGVPGLDGQKGEAGRNGAPGEKGPNGLPGLPGRAGSKGEKGERGRAGELGEAGPSGEPGVPGDAGMPGERGEAGHRGSAGALGPQGPPGAPGVRGFQAKKGSMGDPASRPSLEVRGTGREARPRNRLSRGLEKDWPGVAGGGEAAW

SEQ ID NO: 851740 - protein, 684 aa, Homo sapiens
MAGPRACAPLLLLLLLGELLAAAGAQRVGLPGPPGPPGPPGKPGQDGIDGEAGPPGLPGPPGPKGAPGKPGKPGEAGLPGLPGVDGLTGRDGPPGPKGAPGERGSLGPPGPPGLGGKGLPGPPGEAGVSGPPGGIGLRGPPGPSGLPGLPGPPGPPGPPGHPGVLPEGATDLQCPSICPPGPPGPPGMPGFKGPTGYKGEQGEVGKDGEKGDPGPPGPAGLPGSVGLQGPRGLRGLPGPLGPPGDRGPIGFRGPPGIPGAPGKAGDRGERGPEGFRGPKGDLGRPGPKGTPGVAGPSGEPGMPGKDGQNGVPGLDGQKGEAGRNGAPGEKGPNGLPGLPGRAGSKGEKGERGRAGELGEAGPSGEPGVPGDAGMPGERGEAGHRGSAGALGPQGPPGAPGVRGFQGQKGSMGDPGLPGPQGLRGDVGDRGPGGAAGPKGDQGIAGSDGLPGDKGELGPSGLVGPKGESGSRGELGPKGTQGPNGTSGVQGVPGPPGPLGLQGVPGVPGITGKPGVPGKEASEQRIRELCGGMISEQIAQLAAHLRKPLAPGSIGRPGPAGPPGPPGPPGSIGHPGARGPPGYRGPTGELGDPGPRGNQGDRGDKGAAGAGLDGPEGDQGPQGPQGVPGTSKDGQDGAPGEPGPPGDPGLPGAIGAQGTPGICDTSACQGAVLGGVGEKSGSRSS

SEQ ID NO: 851741 - protein, 684 aa, Homo sapiens; identical to SEQ ID NO: 851740

SEQ ID NO: 851742 - protein, 563 aa, Homo sapiens
NRLGTRLGVNRPRDRLRGPPGPSGLPGLPGPPGPPGPPGHPGVLPEGATDLQCPSICPPGPPGPPGMPGFKGPTGYKGEQGEVGKDGEKGDPGPPGPAGLPGSVGLQGPRGLRGLPGPLGPPGDRGPIGFRGPPGIPGAPGKAGDRGERGPEGFRGPKGDLGRPGPKGTPGVAGPSGEPGMPGKDGQNGVPGLDGQKGEAGRNGAPGEKGPNGLPGLPGRAGSKGEKGERGRAGELGEAGPSGEPGVPGDAGMPGERGEAGHRGSAGALGPQGPPGAPGVRGFQGQKGSMGDPGLPGPQGLRGDVGDRGPGGAAGPKGDQGIAGSDGLPGDKGELGPSGLVGPKGESGSRGELGPKGTQGPNGTSGVQGVPGPPGPLGLQGVPGVPGITGKPGVPGKEASEQRIRELCGGMISEQIAQLAAHLRKPLAPGSIGRPGPAGPPGPPGPPGSIGHPGARGPPGYRGPTGELGDPGPRGNQGDRGDKGAAGAGLDGPEGDQGPQGPQGVPGTSKDGQDGAPGEPGPPGDPGLPGAIGAQGTPGICDTSACQGAVLGGVGEKSGSRSS

SEQ ID NO: 851743 - protein, 684 aa, Homo sapiens; identical to SEQ ID NO: 851740

SEQ ID NO: 851744 - protein, 383 aa, Homo sapiens [sequence omitted]

SEQ ID NO: 851745 - protein, 732 aa, Homo sapiens
MAGPRACAPLLLLLLLGELLAAAGAQRVGLPGPPGPPGPPGKPGQDGIDGEAGPPGLPGPPGPKGAPGKPGKPGEAGLPGLPGVDGLTGRDGPPGPKGAPGERGSLGPPGPPGLGGKGLPGPPGEAGVSGPPGGIGLRGPPGPSGLPGLPGPPGPPGPPGHPGVLPEGATDLQCPSICPPGPPGPPGMPGFKGPTGYKGEQGEVGKDGEKGDPGPPGPAGLPGSVGLQGPRGLRGLPGPLGPPGDRGPIGFRGPPGIPGAPGKAGDRGERGPEGFRGPKGDLGRPGPKGTPGVAGPSGEPGMPGKDGQNGVPGLDGQKGEAGRNGAPGEKGPNGLPGLPGRAGSKGEKGERGRAGELGEAGPSGEPGVPGDAGMPGERGEAGHRGSAGALGPQGPPGAPGVRGFQGQKGSMGDPGLPGPQGLRGDVGDRGPGGAAGPKGDQGIAGSDGLPGDKGELGPSGLVGPKGESGSRGELGPKGTQGPNGTSGVQGVPGPPGPLGLQGVPGVPGITGKPGVPVRRFSGFSSFHRVEIVFFPEGSYFAGRRWECLTEAAAPMLTNVWGEFQGKEASEQRIRELCGGMISEQIAQLAAHLRKPLAPGSIGRPGPAGPPGPPGPPGSIGHPGARGPPGYRGPTGELGDPGPRGNQGDRGDKGAAGAGLDGPEGDQGPQGPQGVPGTSKDGQDGAPGEPGPPGDPGLPGAIGAQGTPGICDTSACQGAVLGGVGEKSGSRSS

SEQ ID NO: 851746 - protein, 365 aa, Homo sapiens
GTRVHRCLGEKGPNGLPGLPGRAGSKGEKGERGRAGELGEAGPSGEPGVPGDAGMPGERGEAGHRGSAGALGPQGPPGAPGVRGFQGQKGSMGDPGLPGPQGLRGDVGDRGPGGAAGPKGDQGIAGSDGLPGDKGELGPSGLVGPKGESGSRGELGPKGTQGPNGTSGVQGVPGPPGPLGLQGVPGVPGITGKPGVPGKEASEQRIRELCGGMISEQIAQLAAHLRKPLAPGSIGRPGPAGPPGPPGPPGSIGHPGARGPPGYRGPTGELGDPGPRGNQGDRGDKGAAGAGLDGPEGDQGPQGPQGVPGTSKDGQDGAPGEPGPPGDPGLPGAIGAQGTPGICDTSACQGAVLGGVGEKSGSRSS

SEQ ID NO: 851747 - protein, 153 aa, Homo sapiens; identical to SEQ ID NO: 851734

SEQ ID NO: 851748 - protein, 153 aa, Homo sapiens; identical to SEQ ID NO: 851734

SEQ ID NO: 851749 - protein, 248 aa, Homo sapiens
MQWVQEQRSVPLWLAGQVPKHPQGHFLHLPTQASQAPRGWGSFLAPAFITPKQLNHFPSIRRKTCFWKTAPCRYFMLYVTILLMILSRVNACTLVFPEEQIAQLAAHLRKPLAPGSIGRPGPAGPPGPPGPPGSIGHPGARGPPGYRGPTGELGDPGPRGNQGDRGDKGAAGAGLDGPEGDQGPQGPQGVPGTSKDGQDGAPGEPGPPGDPGLPGAIGAQGTPGICDTSACQGAVLGGVGEKSGSRSS

SEQ ID NO: 851750 - protein, 135 aa, Homo sapiens
  misc_feature (16)..(17): Xaa can be any naturally occurring amino acid
  misc_feature (22)..(22): Xaa can be any naturally occurring amino acid
ASGARTCKDGQDGAPXXSGKGXPPPWASRRSWASRCHWGPGDTGDLRHLSLPRSRVRRGRGEIRLSKLIKFNVRKQVTRTPEAQWTVMKERRCRRRVTSRRGSAPGCPSAADWTRGPCQRAPSSGCRLTAYLKRP

SEQ ID NO: 851751 - protein, 441 aa, Homo sapiens
MAGPRACAPLLLLLLLGELLAAAGAQRVGLPGPPGPPGPPGKPGQDGIDGEAGPPGLPGPPGPKGAPGKPGKPGEAGLPGLPGVDGLTGRDGPPGPKGAPGERGSLGPPGPPGLGGKGLPGPPGEAGVSGPPGGIGLRGPPGPSGLPGLPGPPGPPGPPGHPGVLPEGATDLQCPSICPPGPPGPPGMPGFKGPTGYKGEQGEVGKDGEKGDPGPPGPAGLPGSVGLQGPRGLRGLPGPLGPPGDRGPIGFRGPPGIPGAPGKAGDRGERGPEGFRGPKGDLGRPGPKGTPGVAGPSGEPGMPGKDGQNGVPGLDGQKGEAGRNGAPGEKGPNGLPGLPGRAGSKGEKGERGQSWVSWVRPDPLENQERHTWRNADGTMPMGEKTDGMKDMGTHNRVDNQKGERSTKQGTPTKGAHTAEKTTHGLVTRKDTRGARKCDKTM

SEQ ID NO: 851752 - protein, 220 aa, Homo sapiens
MPLLPAPSPFPSPFSSPRPPYYPPEYTCSSETDAQSITYNGSMDSPVPLYPTDCPPSYEAVMGLRGDSQATLFDPQLHDGSCICERVASIVDVSMDSGSLVLSAIGDLPGGSSPSEDSCLLELQGSVRSVDYVLFRSIQRSRAGYCLSLDCGLRGLGEACEGPKGGRPFWLPLVTHVATVAFGRLGCPGGCPMAGLFSARPDGVKSSGIFRDRKTGEDLQ

SEQ ID NO: 851753 - protein, 668 aa, Homo sapiens; identical to SEQ ID NO: 739009

SEQ ID NO: 851754 - protein, 578 aa, Homo sapiens
MMPSPSDSSRSLTSRPSTRGLTHLRLHRPWLQALLTLGLVQVLLGILVVTFSMVASSVTTTESIKRSCPSWAGFSLAFSGVVGIVSWKRPFTLVISFFSLLSVLCVMLSMAGSVLSCKNAQLARDFQQCSLEGKVCVCCPSVPLLRPCPESGQELKVAPNSTCDEARGALKNLLFSVCGLTICAAIICTLSAIVCCIQIFSLDLVHTLAPERSVSGPLGPLGCTSPPPAPLLHTMLDLEEFVPPVPPPPYYPPEYTCSSETDAQSITYNGSMDSPVPLYPTDCPPSYEAVMGLRGDSQATLFDPQLHDGSCICERVASIVDVSMDSGSLVLSAIGDLPGGSSPSEDSCLLELQGSVRSVDYVLFRSIQRSRAGYCLSLDCGLRGPFEESPLPRRPPRAARSYSCSAPEAPPPLGAPTAARSCHRLEGWPPWVGPCFPELRRRVPRGGGRPAAAPPTRAPTRRFSDSSGSLTPPGHRPPHPASPPPLLLPRSHSDPGITTSSDTADFRDLYTKVLEEEAASVSSADTGLCSEACLFRLARCPSPKMRVALSDLQGHYGQGKGMAQVFKYRVTCAYAMGW

SEQ ID NO: 851755 - protein, 415 aa, Homo sapiens
PGGEFGTRDAQSITYNGSMDSPVPLYPTDCPPSYEAVMGLRGDSQATLFDPQLHDGSCICERVASIVDVSMDSGSLVLSAIGDLPGGSSPSEDSCLLELQGSVRSVDYVLFRSIQRSRAGYCLSLDCGLRGPFEESPLPRRPPRAARSYSCSAPEAPPPLGAPTAARSCHRLEGWPPWVGPCFPELRRRVPRGGGRPAAAPPTRAPTRRFSDSSGSLTPPGHRPPHPASPPPLLLPRSHSDPGITTSSDTADFRDLYTKVLEEEAASVSSADTGLCSEACLFRLARCPSPKLLRARSAEKRRPVPTFQKVPLPSGPAPAHSLGDLKGSWPGRGLVTRFLQISRKAPDPSGTGAHGHKQVPRSLWGRPGRESLHLRSCGDLSSSSSLRRLLSGRRLERGTRPHSLSLNGGSRETGL

SEQ ID NO: 851756 - protein, 176 aa, Homo sapiens
RPLPPTVSMDSGSLVLSAIGDLPGGSSPSEDSCLLELQGSVRSVDYVLFRSIQRSRAGYCLSLDCGLRGPFEESPLPRRPPRAARSYSCSAPEAPPPLGAPTAARSCHRLEGWPPWVGPCFPELRRRVPRGGGRPAAAPPTRAPTRRFSDSSGSLTPPGHRPPHPASPPPLLLPRS

SEQ ID NO: 851757 - protein, 668 aa, Homo sapiens; identical to SEQ ID NO: 739009

SEQ ID NO: 851758 - protein, 439 aa, Homo sapiens
MPLLPAPSPFPSPFSSPRPPYYPPEYTCSSETDAQSITYNGSMDSPVPLYPTDCPPSYEAVMGLRGDSQATLFDPQLHDGSCICERVASIVDVSMDSGSLVLSAIGDLPGGSSPSEDSCLLELQGSVRSVDYVLFRSIQRSRAGYCLSLDCGLRGPFEESPLPRRPPRAARSYSCSAPEAPPPLGAPTAARSCHRLEGWPPWVGPCFPELRRRVPRGGGRPAAAPPTRAPTRRFSDSSGSLTPPGHRPPHPASPPPLLLPRSHSDPGITTSSDTADFRDLYTKVLEEEAASVSSADTGLCSEACLFRLARCPSPKLLRARSAEKRRPVPTFQKVPLPSGPAPAHSLGDLKGSWPGRGLVTRFLQISRKAPDPSGTGAHGHKQVPRSLWGRPGRESLHLRSCGDLSSSSSLRRLLSGRRLERGTRPHSLSLNGGSRETGL

SEQ ID NO: 851759 - protein, 265 aa, Homo sapiens
RLQVEAGFNRAEATAARSCHRLEGWPPWVGPCFPELRRRVPRGGGRPAAAPPTRAPTRRFSDSSGSLTPPGHRPPHPASPPPLLLPRSHSDPGITTSSDTADFRDLYTKVLEEEAASVSSADTGLCSEACLFRLARCPSPKLLRARSAEKRRPVPTFQKVPLPSGPAPAHSLGDLKGSWPGRGLVTRFLQISRKAPDPSGTGAHGHKQVPRSLWGRPGRESLHLRSCGDLSSSSSLRRLLSGRRLERGTRPHSLSLNGGSRETGL

SEQ ID NO: 851760 - protein, 387 aa, Homo sapiens
MGEEGTGGTVHLLCLAASSGVPLFCRSSRGGAPARQQLPFSVIGSLNGVHMFGQNLEVQLSSARTENTTVVWKSFHDSITLIVLSSEVGISELRLERLLQMVFGAMVLLVGLEELTNIRNVERLKKDLRASYCLIDSFLGDSELIGDLTQCVDCVIPPEGSLLQEALSGFAEAAGTTFVSLVVSGRVVAATEGWWRLGTPEAVLLPWLVGSLPPQTARDYPVYLPHGSPTVPHRLLTLTLLPSLELCLLCGPSPPLSQLYPQLLERWWQPLLDPLRACLPLGPRALPSGFPLHTDILGLLLLHLELKRCLFTVEPLGDKEPSPEQRRRLLRNFYTLVTSTHFPPEPGPPEKTEDEVYQAQLPRACYLAVGDGHRHGAVSVSLFIRSQ

SEQ ID NO: 851761 - protein, 268 aa, Homo sapiens
  misc_feature (264)..(264): Xaa can be any naturally occurring amino acid
MGEEGTGGTVHLLCLAASSGVPLFCRSSRGGAPARQQLPFSVIGSLNGVHMFGQNLEVQLSSARTENTTVVLLVGLEELTNIRNVERLKKDLRASYCLIDSFLGDSELIGDLTQCVDCVIPPEGSLLQSGGVRPGGGSNRGLVAAGDARGRAAPLAGGVPAAADRSRLPGVPAAREPHGPTPAPDPDSAAEPGAVSTLRAEPTPQPVVSTASGALVAATAGPVAGLSAVGTPGAAQWLPPSHRHPRGAVPPLNEGRPSPGPGVXASKK

SEQ ID NO: 851762 - protein, 418 aa, Homo sapiens
MGEEGTGGTVHLLCLAASSGVPLFCRSSRGGAPARQQLPFSVIGSLNGVHMFGQNLEVQLSSARTENTTVVWKSFHDSITLIVLSSEVGISELRLERLLQMVFGAMVLLVGLEELTNIRNVERLKKDLRASYCLIDSFLGDSELIGDLTQCVDCVIPPEGSLLQEALSGFAEAAGTTFVSLVVSGRVVAATEGWWRLGTPEAVLLPWLVGSLPPQTARDYPVYLPHGSPTVPHRLLTLTLLPSLELCLLCGPSPPLSQLYPQLLERWWQPLLDPLRACLPLGPRALPSGFPLHTDILGLLLLHLELKRCLFTVEPLGDKEPSPEQRRRLLRNFYTLVTSTHFPPEPGPPEKTEDEVYQAQLPRACYLVLGTEEPGTGVRLVALQLGLRRLLLLLSPQSPTHGLRSLATHTLHALTPLL

SEQ ID NO: 851763 - protein, 318 aa, Homo sapiens
MVFGAMVLLVGLEELTNIRNVERLKKDLRASYCLIDSFLGDSELIGDLTQCVDCVIPPEGSLLQEALSGFAEAAGTTFVSLVVSGRVVAATEGWWRLGTPEAVLLPWLVGSLPPQTARDYPVYLPHGSPTVPHRLLTLTLLPSLELCLLCGPSPPLSQLYPQLLERWWQPLLDPLRACLPLGPRALPSGFPLHTDILGLLLLHLELKRCLFTVEPLGDKEPSPEQRRRLLRNFYTLVTSTHFPPEPGPPEKTEDEVYQAQLPRACYLVLGTEEPGTGVRLVALQLGLRRLLLLLSPQSPTHGLRSLATHTLHALTPLL

SEQ ID NO: 851764 - protein, 426 aa, Homo sapiens
MGEEGTGGTVHLLCLAASSGVPLFCRSSRGGAPARQQLPFSVIGSLNGVHMFGQNLEVQLSSARTENTTVVWKSFHDSITLIVLSSEVGISELRLERLLQMVFGAMVLLVGLEELTNIRNVERLKKDLRAGPFFLSKASYCLIDSFLGDSELIGDLTQCVDCVIPPEGSLLQEALSGFAEAAGTTFVSLVVSGRVVAATEGWWRLGTPEAVLLPWLVGSLPPQTARDYPVYLPHGSPTVPHRLLTLTLLPSLELCLLCGPSPPLSQLYPQLLERWWQPLLDPLRACLPLGPRALPSGFPLHTDILGLLLLHLELKRCLFTVEPLGDKEPSPEQRRRLLRNFYTLVTSTHFPPEPGPPEKTEDEVYQAQLPRACYLVLGTEEPGTGVRLVALQLGLRRLLLLLSPQSPTHGLRSLATHTLHALTPLL

SEQ ID NO: 851765 - protein, 361 aa, Homo sapiens
MGSLASQLPSLIPDVLYKKGSITLIVLSSEVGISELRLERLLQMVFGAMVLLVGLEELTNIRNVERLKKDLRASYCLIDSFLGDSELIGDLTQCVDCVIPPEGSLLQEALSGFAEAAGTTFVSLVVSGRVVAATEGWWRLGTPEAVLLPWLVGSLPPQTARDYPVYLPHGSPTVPHRLLTLTLLPSLELCLLCGPSPPLSQLYPQLLERWWQPLLDPLRACLPLGPRALPSGFPLHTDILGLLLLHLELKRCLFTVEPLGDKEPSPEQRRRLLRNFYTLVTSTHFPPEPGPPEKTEDEVYQAQLPRACYLVLGTEEPGTGVRLVALQLGLRRLLLLLSPQSPTHGLRSLATHTLHALTPLL

SEQ ID NO: 851766 - protein, 376 aa, Homo sapiens
MFGQNLEVQLSSARTENTTVVWKSFHDSITLIVLSSEVGISELRLERLLQMVFGAMVLLVGLEELTNIRNVERLKKDLRAGPFFLSKASYCLIDSFLGDSELIGDLTQCVDCVIPPEGSLLQEALSGFAEAAGTTFVSLVVSGRVVAATEGWWRLGTPEAVLLPWLVGSLPPQTARDYPVYLPHGSPTVPHRLLTLTLLPSLELCLLCGPSPPLSQLYPQLLERWWQPLLDPLRACLPLGPRALPSGFPLHTDILGLLLLHLELKRCLFTVEPLGDKEPSPEQRRRLLRNFYTLVTSTHFPPEPGPPEKTEDEVYQAQLPRACYLVLGTEEPGTGVRLVALQLGLRRLLLLLSPQSPTHGLRSLATHTLHALTPLL

SEQ ID NO: 851767 - protein, 266 aa, Homo sapiens
MFGQNLEVQLSSARTENTTVVWKSFHDSITLIVLSSEVGISELRLERLLQMVFGAMVLLVGLEELTNIRNVERLKKDLRASYCLIDSFLGDSELIGDLTQCVDCVIPPEGSLLQEALSGFAEAAGTTFVSLVVSGRVVAATEGWWRLGTPEAVLLPWLVGSLPPQTARDYPVYLPHGSPTVPHRLLTLTLLPSLELCLLCGPSPPLSQLYPQFWSAGEHVDRWGLLAWARRARFPYRIPGGSGGGFRLGKATAAQYGSHRRKFALG

SEQ ID NO: 851768 - protein, 382 aa, Homo sapiens
MGEEGTGGTVHLLCLAASSGVPLFCRSSRGGAPARQQLPFSVIGSLNGVHMFGQNLEVQLSSARTENTTVVLLVGLEELTNIRNVERLKKDLRASYCLIDSFLGDSELIGDLTQCVDCVIPPEGSLLQEALSGFAEAAGTTFVSLVVSGRVVAATEGWWRLGTPEAVLLPWLVGSLPPQTARDYPVYLPHGSPTVPHRLLTLTLLPSLELCLLCGPSPPLSQLYPQLLERWWQPLLDPLRACLPLGPRALPSGFPLHTDILGLLLLHLELKRCLFTVEPLGDKEPSPEQRRRLLRNFYTLVTSTHFPPEPGPPEKTEDEVYQAQLPRACYLVLGTEEPGTGVRLVALQLGLRRLLLLLSPQSPTHGLRSLATHTLHALTPLL

SEQ ID NO: 851769 - protein, 368 aa, Homo sapiens
MFGQNLEVQLSSARTENTTVVWKSFHDSITLIVLSSEVGISELRLERLLQMVFGAMVLLVGLEELTNIRNVERLKKDLRASYCLIDSFLGDSELIGDLTQCVDCVIPPEGSLLQEALSGFAEAAGTTFVSLVVSGRVVAATEGWWRLGTPEAVLLPWLVGSLPPQTARDYPVYLPHGSPTVPHRLLTLTLLPSLELCLLCGPSPPLSQLYPQLLERWWQPLLDPLRACLPLGPRALPSGFPLHTDILGLLLLHLELKRCLFTVEPLGDKEPSPEQRRRLLRNFYTLVTSTHFPPEPGPPEKTEDEVYQAQLPRACYLVLGTEEPGTGVRLVALQLGLRRLLLLLSPQSPTHGLRSLATHTLHALTPLL

SEQ ID NO: 851770 - protein, 361 aa, Homo sapiens; identical to SEQ ID NO: 851765

SEQ ID NO: 851771 - protein, 276 aa, Homo sapiens
RLGTRLGGCVDCVIPPEGSLLQEALSGFAEAAGTTFVSLVVSGRVVAATEGWWRLGTPEAVLLPWLVGSLPPQTARDYPVYLPHGSPTVPHRLLTLTLLPSLELCLLCGPSPPLSQLYPQLLERWWQPLLDPLRACLPLGPRALPSGFPLHTDILGLLLLHLELKRCLFTVEPLGDKEPSPEQRRRLLRNFYTLVTSTHFPPEPGPPEKTEDEVYQAQLPRACYLVLGTEEPGTGVRLVALQLGLRRLLLLLSPQSPTHGLRSLATHTLHALTPLL

SEQ ID NO: 851772 - protein, 260 aa, Homo sapiens
MASTRLVLIGTEAEAAGTTFVSLVVSGRVVAATEGWWRLGTPEAVLLPWLVGSLPPQTARDYPVYLPHGSPTVPHRLLTLTLLPSLELCLLCGPSPPLSQLYPQLLERWWQPLLDPLRACLPLGPRALPSGFPLHTDILGLLLLHLELKRCLFTVEPLGDKEPSPEQRRRLLRNFYTLVTSTHFPPEPGPPEKTEDEVYQAQLPRACYLVLGTEEPGTGVRLVALQLGLRRLLLLLSPQSPTHGLRSLATHTLHALTPLL

SEQ ID NO: 851773 - protein, 2052 aa, Homo sapiens
PRIRHEGLLHSAFFGDQTLQELKMASSVAPYEQLVRQVEALKAENSHLRQELRDNSSHLSKLETETSGMKEVLKHLQGKLEQEARVLVSSGQTEVLEQLKALQMDITSLYNLKFQPPTLGPEPAARTPEGSPVHGSGPSKDSFGELSRATIRLLEELDRERCFLLNEIEKEEKEKLWYYSQLQGLSKRLDELLQVDYEMHKMTRDPLNLALRRYAGMTLTNLTFGDVANKATLCARRGCMEAIVAQLASDSEELHQVVSSILRNLSWRADINSKKVLREAGSVTALVQCVLRATKESTLKSVLSALWNLSAHSTENKAAICQVDGALGFLVSTLTYKCQSNSLAIIESGGGILRNVSSLVATREDYRQVLRDHNCLQTLLQHLTSHSLTIVSNACGTLWNLSARSARDQELLWDLGAVGMLRNLVHSKHKMIAMGSAAALRNLLAHRPAKHQAAATAVSPGSCVPSLYVRKQRALEAELDARHLAQALEHLEKQGPPAAEAATKKPLPPLRHLDGLAQDYASDSGCFDDDDAPSSLAAAAATGEPASPAALSLFLGSPFLQGQALARTPPTRRGGKEAEKDTSGEAAVAAKAKAKLALAVARIDQLVEDISALHTSSDDSFSLSSGDPGQEAPREGRAQSCSPCRGPEGGRREAGSRAHPLLRLKAAHASLSNDSLNSGSASDGYCPREHMLPCPLAALASRREDPRCGQPRPSRLDLDLPGCQAEPPAREATSADARVRTIKLSPTYQHVPLLEGASRAGAEPLAGPGISPGARKQAWLPADHLSKVPEKLAAAPLSVASKALQKLAAQEGPLSLSRCSSLSSLSSAGRPGPSEGGDLDDSDSSLEGLEEAGPSEAELDSTWRAPGATSLPVAIPAPRRNRGRGLGVEDATPSSSSENYVQETPLVLSRCSSVSSLGSFESPSIASSIPSEPCSGQGSGTISPSELPDSPGQTMPPSRSKTPPLAPAPQGPPEATQFSLQWESYVKRFLDIADCRERCRLPSELDAGSVRFTVEKPDENFSCASSLSALALHEHYVQQDVELRLLPSACPERGGGAGGAGLHFAGHRRREEGPAPTGSRPRGAADQELELLRECLGAAVPARLRKVASALVPGRRALPVPVYMLVPAPAPAQEDDSCTDSAEGTPVNFSSAASLSDETLQGPPRDQPGGPAGRQRPTGRPTSARQAMGHRHKAGGAGRSAEQSRGAGKNRAGLELPLGRPPSAPADKDGSKPGRTRGDGALQSLCLTTPTEEAVYCFYGNDSDEEPPAAAPTPTHRRTSAIPRAFTRERPQGRKEAPAPSKAAPAAPPPARTQPSLIADETPPCYSLSSSASSLSEPEPSEPPAVHPRGREPAVTKDPGPGGGRDSSPSPRAAEELLQRCISSALPRRRPPVSGLRRRKPRATRLDERPAEGSRERGEEAAGSDRASDLDSVEWRAIQEGANSIVTWLHQAAAATREASSESDSILSFVSGLSVGSTLQPPKHRKGRQAEGEMGSARRPEKRGAASVKTSGSPRSPAGPEKPRGTQKTTPGVPAVLRGRTVIYVPSPAPRAQPKGTPGPRATPRKVAPPCLAQPAAPAKVPSPGQQRSRSLHRPAKTSELATLSQPPRSATPPARLAKTPSSSSSQTSPASQPLPRKRPPVTQAAGALPGPGASPVPKTPARTLLAKQHKTQRSPVRIPFMQRPARRGPPPLARAVPEPGPRGRAGTEAGPGARGGRLGLVRVASALSSGSESSDRSGFRRQLTFIKESPGLRRRRSELSSAESAASAPQGASPRRGRPALPAVFLCSSRCEELRAAPRQGPAPARQRPPAARPSPGERPARRTTSESPSRLPVRAPAARPETVKRYASLPHISVARRPDGAVPAAPASADAARRSSDGEPRPLPRVAAPGTTWRRIRDEDVPHILRSTLPATALPLRGSTPEDAPAGPPPRKTSDAVVQTEEVAAPKTNSSTSPSLETREPPGAPAGGQLSLLGSDVDGPSLAKAPISAPFVHEGLGVAVGGFPASRHGSPSRSARVPPFNYVPSPMVVAATTDSAAEKAPATASATLLE

SEQ ID NO: 851774 - protein, 2052 aa, Homo sapiens; identical to SEQ ID NO: 851773

SEQ ID NO: 851775 - protein, 1633 aa, Homo sapiens
MLRNLVHSKHKMIAMGSAAALRNLLAHRPAKHQAAATAVSPGSCVPSLYVRKQRALEAELDARHLAQALEHLEKQGPPAAEAATKKPLPPLRHLDGLAQDYASDSGCFDDDDAPSSLAAAAATGEPASPAALSLFLGSPFLQGQALARTPPTRRGGKEAEKDTSGEAAVAAKAKAKLALAVARIDQLVEDISALHTSSDDSFSLSSGDPGQEAPREGRAQSCSPCRGPEGGRREAGSRAHPLLRLKAAHASLSNDSLNSGSASDGYCPREHMLPCPLAALASRREDPRCGQPRPSRLDLDLPGCQAEPPAREATSADARVRTIKLSPTYQHVPLLEGASRAGAEPLAGPGISPGARKQAWLPADHLSKVPEKLAAAPLSVASKALQKLAAQEGPLSLSRCSSLSSLSSAGRPGPSEGGDLDDSDSSLEGLEEAGPSEAELDSTWRAPGATSLPVAIPAPRRNRGRGLGVEDATPSSSSENYVQETPLVLSRCSSVSSLGSFESPSIASSIPSEPCSGQGSGTISPSELPDSPGQTMPPSRSKTPPLAPAPQGPPEATQFSLQWESYVKRFLDIADCRERCRLPSELDAGSVRFTVEKPDENFSCASSLSALALHEHYVQQDVELRLLPSACPERGGGAGGAGLHFAGHRRREEGPAPTGSRPRGAADQELELLRECLGAAVPARLRKVASALVPGRRALPVPVYMLVPAPAPAQEDDSCTDSAEGTPVNFSSAASLSDETLQGPPRDQPGGPAGRQRPTGRPTSARQAMGHRHKAGGAGRSAEQSRGAGKNRAGLELPLGRPPSAPADKDGSKPGRTRGDGALQSLCLTTPTEEAVYCFYGNDSDEEPPAAAPTPTHRRTSAIPRAFTRERPQGRKEAPAPSKAAPAAPPPARTQPSLIADETPPCYSLSSSASSLSEPEPSEPPAVHPRGREPAVTKDPGPGGGRDSSPSPRAAEELLQRCISSALPRRRPPVSGLRRRKPRATRLDERPAEGSRERGEEAAGSDRASDLDSVEWRAIQEGANSIVTWLHQAAAATREASSESDSILSFVSGLSVGSTLQPPKHRKGRQAEGEMGSARRPEKRGAASVKTSGSPRSPAGPEKPRGTQKTTPGVPAVLRGRTVIYVPSPAPRAQPKGTPGPRATPRKVAPPCLAQPAAPAKVPSPGQQRSRSLHRPAKTSELATLSQPPRSATPPARLAKTPSSSSSQTSPASQPLPRKRPPVTQAAGALPGPGASPVPKTPARTLLAKQHKTQRSPVRIPFMQRPARRGPPPLARAVPEPGPRGRAGTEAGPGARGGRLGLVRVASALSSGSESSDRSGFRRQLTFIKESPGLRRRRSELSSAESAASAPQGASPRRGRPALPAVFLCSSRCEELRAAPRQGPAPARQRPPAARPSPGERPARRTTSESPSRLPVRAPAARPETVKRYASLPHISVARRPDGAVPAAPASADAARRSSDGEPRPLPRVAAPGTTWRRIRDEDVPHILRSTLPATALPLRGSTPEDAPAGPPPRKTSDAVVQTEEVAAPKTNSSTSPSLETREPPGAPAGGQLSLLGSDVDGPSLAKAPISAPFVHEGLGVAVGGFPASRHGSPSRSARVPPFNYVPSPMVVAATTDSAAEKAPATASATLLE

SEQ ID NO: 851776 - protein, 2385 aa, Homo sapiens
MGKEQRGKGGVKGVPAGGPSRGRRRRPAGQREEARPEPEDGQRHKEASALAESRDGAEAAGASRDQLKAAQGVRATQTLQELKMASSVAPYEQLVRQVEALKAENSHLRQELRDNSSHLSKLETETSGMKEVLKHLQGKLEQEARVLVSSGQTEVLEQLKALQMDITSLYNLKFQPPTLGPEPAARTPEGSPVHGSGPSKDSFGELSRATIRLLEELDRERCFLLNEIEKEEKEKLWYYSQLQGLSKRLDELPHVETFSMQMDLIRQQLEFEAQHIRSLMEERFGTSDEMVQRAQIRASRLEQIDKELLEAQDRVQQTEPQALLAVKSVPVDEDPETEVPTHPEDGTPQPGNSKVEVVFWLLSMLATRDQEDTARTLLAMSSSPESCVAMRRSGCLPLLLQILHGTEAAAGGRAGAPGAPGAKDARMRANAALHNIVFSQPDQGLARKEMRVLHVLEQIRAYCETCWDWLQARDGGPEGGGAGSAPIPIEPQICQATCAVMKLSFDEEYRRAMNELGGLQAVAELLQVDYEMHKMTRDPLNLALRRYAGMTLTNLTFGDVANKATLCARRGCMEAIVAQLASDSEELHQVVSSILRNLSWRADINSKKVLREAGSVTALVQCVLRATKESTLKSVLSALWNLSAHSTENKAAICQVDGALGFLVSTLTYKCQSNSLAIIESGGGILRNVSSLVATREDYRQVLRDHNCLQTLLQHLTSHSLTIVSNACGTLWNLSARSARDQELLWDLGAVGMLRNLVHSKHKMIAMGSAAALRNLLAHRPAKHQAAATAVSPGSCVPSLYVRKQRALEAELDARHLAQALEHLEKQGPPAAEAATKKPLPPLRHLDGLAQDYASDSGCFDDDDAPSSLAAAAATGEPASPAALSLFLGSPFLQGQALARTPPTRRGGKEAEKDTSGEAAVAAKAKAKLALAVARIDQLVEDISALHTSSDDSFSLSSGDPGQEAPREGRAQSCSPCRGPEGGRREAGSRAHPLLRLKAAHASLSNDSLNSGSASDGYCPREHMLPCPLAALASRREDPRCGQPRPSRLDLDLPGCQAEPPAREATSADARVRTIKLSPTYQHVPLLEGASRAGAEPLAGPGISPGARKQAWLPADHLSKVPEKLAAAPLSVASKALQKLAAQEGPLSLSRCSSLSSLSSAGRPGPSEGGDLDDSDSSLEGLEEAGPSEAELDSTWRAPGATSLPVAIPAPRRNRGRGLGVEDATPSSSSENYVQETPLVLSRCSSVSSLGSFESPSIASSIPSEPCSGQGSGTISPSELPDSPGQTMPPSRSKTPPLAPAPQGPPEATQFSLQWESYVKRFLDIADCRERCRLPSELDAGSVRFTVEKPDENFSCASSLSALALHEHYVQQDVELRLLPSACPERGGGAGGAGLHFAGHRRREEGPAPTGSRPRGAADQELELLRECLGAAVPARLRKVASALVPGRRALPVPVYMLVPAPAPAQEDDSCTDSAEGTPVNFSSAASLSDETLQGPPRDQPGGPAGRQRPTGRPTSARQAMGHRHKAGGAGRSAEQSRGAGKNRAGLELPLGRPPSAPADKDGSKPGRTRGDGALQSLCLTTPTEEAVYCFYGNDSDEEPPAAAPTPTHRRTSAIPRAFTRERPQGRKEAPAPSKAAPAAPPPARTQPSLIADETPPCYSLSSSASSLSEPEPSEPPAVHPRGREPAVTKDPGPGGGRDSSPSPRAAEELLQRCISSALPRRRPPVSGLRRRKPRATRLDERPAEGSRERGEEAAGSDRASDLDSVEWRAIQEGANSIVTWLHQAAAATREASSESDSILSFVSGLSVGSTLQPPKHRKGRQAEGEMGSARRPEKRGAASVKTSGSPRSPAGPEKPRGTQKTTPGVPAVLRGRTVIYVPSPAPRAQPKGTPGPRATPRKVAPPCLAQPAAPAKVPSPGQQRSRSLHRPAKTSELATLSQPPRSATPPARLAKTPSSSSSQTSPASQPLPRKRPPVTQAAGALPGPGASPVPKTPARTLLAKQHKTQRSPVRIPFMQRPARRGPPPLARAVPEPGPRGRAGTEAGPGARGGRLGLVRVASALSSGSESSDRSGFRRQLTFIKESPGLRRRRSELSSAESAASAPQGASPRRGRPALPAVFLCSSRCEELRAAPRQGPAPARQRPPAARPSPGERPARRTTSESPSRLPVRAPAARPETVKRYASLPHISVARRPDGAVPAAPASADAARRSSDGEPRPLPRVAAPGTTWRRIRDEDVPHILRSTLPATALPLRGSTPEDAPAGPPPRKTSDAVVQTEEVAAPKTNSSTSPSLETREPPGAPAGGQLSLLGSDVDGPSLAKAPISAPFVHEGLGVAVGGFPASRHGSPSRSARVPPFNYVPSPMVVAATTDSAAEKAPATASATLLE

SEQ ID NO: 851777 - protein, 2322 aa, Homo sapiens
GFLSLLHSAFFGDQTLQELKMASSVAPYEQLVRQVEALKAENSHLRQELRDNSSHLSKLETETSGMKEVLKHLQGKLEQEARVLVSSGQTEVLEQLKALQMDITSLYNLKFQPPTLGPEPAARTPEGSPVHGSGPSKDSFGELSRATIRLLEELDRERCFLLNEIEKEEKEKLWYYSQLQGLSKRLDELPHVETFSMQMDLIRQQLEFEAQHIRSLMEERFGTSDEMVQRAQIRASRLEQIDKELLEAQDRVQQTEPQALLAVKSVPVDEDPETEVPTHPEDGTPQPGNSKVEVVFWLLSMLATRDQEDTARTLLAMSSSPESCVAMRRSGCLPLLLQILHGTEAAAGGRAGAPGAPGAKDARMRANAALHNIVFSQPDQGLARKEMRVLHVLEQIRAYCETCWDWLQARDGGPEGGGAGSAPIPIEPQICQATCAVMKLSFDEEYRRAMNELGGLQAVAELLQVDYEMHKMTRDPLNLALRRYAGMTLTNLTFGDVANKATLCARRGCMEAIVAQLASDSEELHQVVSSILRNLSWRADINSKKVLREAGSVTALVQCVLRATKESTLKSVLSALWNLSAHSTENKAAICQVDGALGFLVSTLTYKCQSNSLAIIESGGGILRNVSSLVATREDYRQVLRDHNCLQTLLQHLTSHSLTIVSNACGTLWNLSARSARDQELLWDLGAVGMLRNLVHSKHKMIAMGSAAALRNLLAHRPAKHQAAATAVSPGSCVPSLYVRKQRALEAELDARHLAQALEHLEKQGPPAAEAATKKPLPPLRHLDGLAQDYASDSGCFDDDDAPSSLAAAAATGEPASPAALSLFLGSPFLQGQALARTPPTRRGGKEAEKDTSGEAAVAAKAKAKLALAVARIDQLVEDISALHTSSDDSFSLSSGDPGQEAPREGRAQSCSPCRGPEGGRREAGSRAHPLLRLKAAHASLSNDSLNSGSASDGYCPREHMLPCPLAALASRREDPRCGQPRPSRLDLDLPGCQAEPPAREATSADARVRTIKLSPTYQHVPLLEGASRAGAEPLAGPGISPGARKQAWLPADHLSKVPEKLAAAPLSVASKALQKLAAQEGPLSLSRCSSLSSLSSAGRPGPSEGGDLDDSDSSLEGLEEAGPSEAELDSTWRAPGATSLPVAIPAPRRNRGRGLGVEDATPSSSSENYVQETPLVLSRCSSVSSLGSFESPSIASSIPSEPCSGQGSGTISPSELPDSPGQTMPPSRSKTPPLAPAPQGPPEATQFSLQWESYVKRFLDIADCRERCRLPSELDAGSVRFTVEKPDENFSCASSLSALALHEHYVQQDVELRLLPSACPERGGGAGGAGLHFAGHRRREEGPAPTGSRPRGAADQELELLRECLGAAVPARLRKVASALVPGRRALPVPVYMLVPAPAPAQEDDSCTDSAEGTPVNFSSAASLSDETLQGPPRDQPGGPAGRQRPTGRPTSARQAMGHRHKAGGAGRSAEQSRGAGKNRAGLELPLGRPPSAPADKDGSKPGRTRGDGALQSLCLTTPTEEAVYCFYGNDSDEEPPAAAPTPTHRRTSAIPRAFTRERPQGRKEAPAPSKAAPAAPPPARTQPSLIADETPPCYSLSSSASSLSEPEPSEPPAVHPRGREPAVTKDPGPGGGRDSSPSPRAAEELLQRCISSALPRRRPPVSGLRRRKPRATRLDERPAEGSRERGEEAAGSDRASDLDSVEWRAIQEGANSIVTWLHQAAAATREASSESDSILSFVSGLSVGSTLQPPKHRKGRQAEGEMGSARRPEKRGAASVKTSGSPRSPAGPEKPRGTQKTTPGVPAVLRGRTVIYVPSPAPRAQPKGTPGPRATPRKVAPPCLAQPAAPAKVPSPGQQRSRSLHRPAKTSELATLSQPPRSATPPARLAKTPSSSSSQTSPASQPLPRKRPPVTQAAGALPGPGASPVPKTPARTLLAKQHKTQRSPVRIPFMQRPARRGPPPLARAVPEPGPRGRAGTEAGPGARGGRLGLVRVASALSSGSESSDRSGFRRQLTFIKESPGLRRRRSELSSAESAASAPQGASPRRGRPALPAVFLCSSRCEELRAAPRQGPAPARQRPPAARPSPGERPARRTTSESPSRLPVRAPAARPETVKRYASLPHISVARRPDGAVPAAPASADAARRSSDGEPRPLPRVAAPGTTWRRIRDEDVPHILRSTLPATALPLRGSTPEDAPAGPPPRKTSDAVVQTEEVAAPKTNSSTSPSLETREPPGAPAGGQLSLLGSDVDGPSLAKAPISAPFVHEGLGVAVGGFPASRHGSPSRSARVPPFNYVPSPMVVAATTDSAAEKAPATASATLLE

SEQ ID NO: 851778 - protein, 154 aa, Homo sapiens
AADGAPGTGWGRARDQGWCRPRQNGAPRVLPAPAHIITGEQTGCSGTVPPTLVLSLQALLAVKSVPVDEDPETEVPTHPEDGTPQPGNSKVRGRVKRGLAQLSGLEGGSGLHPRQWWCPPMPPSSTPSGVGRPLWRAAHAEAAGLARWMGKYVP

SEQ ID NO: 851779 - protein, 2302 aa, Homo sapiens
MASSVAPYEQLVRQVEALKAENSHLRQELRDNSSHLSKLETETSGMKEVLKHLQGKLEQEARVLVSSGQTEVLEQLKALQMDITSLYNLKFQPPTLGPEPAARTPEGSPVHGSGPSKDSFGELSRATIRLLEELDRERCFLLNEIEKEEKEKLWYYSQLQGLSKRLDELPHVETFSMQMDLIRQQLEFEAQHIRSLMEERFGTSDEMVQRAQIRASRLEQIDKELLEAQDRVQQTEPQALLAVKSVPVDEDPETEVPTHPEDGTPQPGNSKVEVVFWLLSMLATRDQEDTARTLLAMSSSPESCVAMRRSGCLPLLLQILHGTEAAAGGRAGAPGAPGAKDARMRANAALHNIVFSQPDQGLARKEMRVLHVLEQIRAYCETCWDWLQARDGGPEGGGAGSAPIPIEPQICQATCAVMKLSFDEEYRRAMNELGGLQAVAELLQVDYEMHKMTRDPLNLALRRYAGMTLTNLTFGDVANKATLCARRGCMEAIVAQLASDSEELHQVVSSILRNLSWRADINSKKVLREAGSVTALVQCVLRATKESTLKSVLSALWNLSAHSTENKAAICQVDGALGFLVSTLTYKCQSNSLAIIESGGGILRNVSSLVATREDYRQVLRDHNCLQTLLQHLTSHSLTIVSNACGTLWNLSARSARDQELLWDLGAVGMLRNLVHSKHKMIAMGSAAALRNLLAHRPAKHQAAATAVSPGSCVPSLYVRKQRALEAELDARHLAQALEHLEKQGPPAAEAATKKPLPPLRHLDGLAQDYASDSGCFDDDDAPSSLAAAAATGEPASPAALSLFLGSPFLQGQALARTPPTRRGGKEAEKDTSGEAAVAAKAKAKLALAVARIDQLVEDISALHTSSDDSFSLSSGDPGQEAPREGRAQSCSPCRGPEGGRREAGSRAHPLLRLKAAHASLSNDSLNSGSASDGYCPREHMLPCPLAALASRREDPRCGQPRPSRLDLDLPGCQAEPPAREATSADARVRTIKLSPTYQHVPLLEGASRAGAEPLAGPGISPGARKQAWLPADHLSKVPEKLAAAPLSVASKALQKLAAQEGPLSLSRCSSLSSLSSAGRPGPSEGGDLDDSDSSLEGLEEAGPSEAELDSTWRAPGATSLPVAIPAPRRNRGRGLGVEDATPSSSSENYVQETPLVLSRCSSVSSLGSFESPSIASSIPSEPCSGQGSGTISPSELPDSPGQTMPPSRSKTPPLAPAPQGPPEATQFSLQWESYVKRFLDIADCRERCRLPSELDAGSVRFTVEKPDENFSCASSLSALALHEHYVQQDVELRLLPSACPERGGGAGGAGLHFAGHRRREEGPAPTGSRPRGAADQELELLRECLGAAVPARLRKVASALVPGRRALPVPVYMLVPAPAPAQEDDSCTDSAEGTPVNFSSAASLSDETLQGPPRDQPGGPAGRQRPTGRPTSARQAMGHRHKAGGAGRSAEQSRGAGKNRAGLELPLGRPPSAPADKDGSKPGRTRGDGALQSLCLTTPTEEAVYCFYGNDSDEEPPAAAPTPTHRRTSAIPRAFTRERPQGRKEAPAPSKAAPAAPPPARTQPSLIADETPPCYSLSSSASSLSEPEPSEPPAVHPRGREPAVTKDPGPGGGRDSSPSPRAAEELLQRCISSALPRRRPPVSGLRRRKPRATRLDERPAEGSRERGEEAAGSDRASDLDSVEWRAIQEGANSIVTWLHQAAAATREASSESDSILSFVSGLSVGSTLQPPKHRKGRQAEGEMGSARRPEKRGAASVKTSGSPRSPAGPEKPRGTQKTTPGVPAVLRGRTVIYVPSPAPRAQPKGTPGPRATPRKVAPPCLAQPAAPAKVPSPGQQRSRSLHRPAKTSELATLSQPPRSATPPARLAKTPSSSSSQTSPASQPLPRKRPPVTQAAGALPGPGASPVPKTPARTLLAKQHKTQRSPVRIPFMQRPARRGPPPLARAVPEPGPRGRAGTEAGPGARGGRLGLVRVASALSSGSESSDRSGFRRQLTFIKESPGLRRRRSELSSAESAASAPQGASPRRGRPALPAVFLCSSRCEELRAAPRQGPAPARQRPPAARPSPGERPARRTTSESPSRLPVRAPAARPETVKRYASLPHISVARRPDGAVPAAPASADAARRSSDGEPRPLPRVAAPGTTWRRIRDEDVPHILRSTLPATALPLRGSTPEDAPAGPPPRKTSDAVVQTEEVAAPKTNSSTSPSLETREPPGAPAGGQLSLLGSDVDGPSLAKAPISAPFVHEGLGVAVGGFPASRHGSPSRSARVPPFNYVPSPMVVAATTDSAAEKAPATASATLLE

SEQ ID NO: 851780 - protein, 2371 aa, Homo sapiens
QRRLPRPGPGFVRPGAPARAAETPEPARSEATPGRDFRWGPRSRAEGGGPRPRRPASPAARKRTLQELKMASSVAPYEQLVRQVEALKAENSHLRQELRDNSSHLSKLETETSGMKEVLKHLQGKLEQEARVLVSSGQTEVLEQLKALQMDITSLYNLKFQPPTLGPEPAARTPEGSPVHGSGPSKDSFGELSRATIRLLEELDRERCFLLNEIEKEEKEKLWYYSQLQGLSKRLDELPHVETFSMQMDLIRQQLEFEAQHIRSLMEERFGTSDEMVQRAQIRASRLEQIDKELLEAQDRVQQTEPQALLAVKSVPVDEDPETEVPTHPEDGTPQPGNSKVEVVFWLLSMLATRDQEDTARTLLAMSSSPESCVAMRRSGCLPLLLQILHGTEAAAGGRAGAPGAPGAKDARMRANAALHNIVFSQPDQGLARKEMRVLHVLEQIRAYCETCWDWLQARDGGPEGGGAGSAPIPIEPQICQATCAVMKLSFDEEYRRAMNELGGLQAVAELLQVDYEMHKMTRDPLNLALRRYAGMTLTNLTFGDVANKATLCARRGCMEAIVAQLASDSEELHQVVSSILRNLSWRADINSKKVLREAGSVTALVQCVLRATKESTLKSVLSALWNLSAHSTENKAAICQVDGALGFLVSTLTYKCQSNSLAIIESGGGILRNVSSLVATREDYRQVLRDHNCLQTLLQHLTSHSLTIVSNACGTLWNLSARSARDQELLWDLGAVGMLRNLVHSKHKMIAMGSAAALRNLLAHRPAKHQAAATAVSPGSCVPSLYVRKQRALEAELDARHLAQALEHLEKQGPPAAEAATKKPLPPLRHLDGLAQDYASDSGCFDDDDAPSSLAAAAATGEPASPAALSLFLGSPFLQGQALARTPPTRRGGKEAEKDTSGEAAVAAKAKAKLALAVARIDQLVEDISALHTSSDDSFSLSSGDPGQEAPREGRAQSCSPCRGPEGGRREAGSRAHPLLRLKAAHASLSNDSLNSGSASDGYCPREHMLPCPLAALASRREDPRCGQPRPSRLDLDLPGCQAEPPAREATSADARVRTIKLSPTYQHVPLLEGASRAGAEPLAGPGISPGARKQAWLPADHLSKVPEKLAAAPLSVASKALQKLAAQEGPLSLSRCSSLSSLSSAGRPGPSEGGDLDDSDSSLEGLEEAGPSEAELDSTWRAPGATSLPVAIPAPRRNRGRGLGVEDATPSSSSENYVQETPLVLSRCSSVSSLGSFESPSIASSIPSEPCSGQGSGTISPSELPDSPGQTMPPSRSKTPPLAPAPQGPPEATQFSLQWESYVKRFLDIADCRERCRLPSELDAGSVRFTVEKPDENFSCASSLSALALHEHYVQQDVELRLLPSACPERGGGAGGAGLHFAGHRRREEGPAPTGSRPRGAADQELELLRECLGAAVPARLRKVASALVPGRRALPVPVYMLVPAPAPAQEDDSCTDSAEGTPVNFSSAASLSDETLQGPPRDQPGGPAGRQRPTGRPTSARQAMGHRHKAGGAGRSAEQSRGAGKNRAGLELPLGRPPSAPADKDGSKPGRTRGDGALQSLCLTTPTEEAVYCFYGNDSDEEPPAAAPTPTHRRTSAIPRAFTRERPQGRKEAPAPSKAAPAAPPPARTQPSLIADETPPCYSLSSSASSLSEPEPSEPPAVHPRGREPAVTKDPGPGGGRDSSPSPRAAEELLQRCISSALPRRRPPVSGLRRRKPRATRLDERPAEGSRERGEEAAGSDRASDLDSVEWRAIQEGANSIVTWLHQAAAATREASSESDSILSFVSGLSVGSTLQPPKHRKGRQAEGEMGSARRPEKRGAASVKTSGSPRSPAGPEKPRGTQKTTPGVPAVLRGRTVIYVPSPAPRAQPKGTPGPRATPRKVAPPCLAQPAAPAKVPSPGQQRSRSLHRPAKTSELATLSQPPRSATPPARLAKTPSSSSSQTSPASQPLPRKRPPVTQAAGALPGPGASPVPKTPARTLLAKQHKTQRSPVRIPFMQRPARRGPPPLARAVPEPGPRGRAGTEAGPGARGGRLGLVRVASALSSGSESSDRSGFRRQLTFIKESPGLRRRRSELSSAESAASAPQGASPRRGRPALPAVFLCSSRCEELRAAPRQGPAPARQRPPAARPSPGERPARRTTSESPSRLPVRAPAARPETVKRYASLPHISVARRPDGAVPAAPASADAARRSSDGEPRPLPRVAAPGTTWRRIRDEDVPHILRSTLPATALPLRGSTPEDAPAGPPPRKTSDAVVQTEEVAAPKTNSSTSPSLETREPPGAPAGGQLSLLGSDVDGPSLAKAPISAPFVHEGLGVAVGGFPASRHGSPSRSARVPPFNYVPSPMVVAATTDSAAEKAPATASATLLE

SEQ ID NO: 851781 - protein, 1885 aa, Homo sapiens
MKLSFDEEYRRAMNELGGLQAVAELLQVDYEMHKMTRDPLNLALRRYAGMTLTNLTFGDVANKATLCARRGCMEAIVAQLASDSEELHQVVSSILRNLSWRADINSKKVLREAGSVTALVQCVLRATKESTLKSVLSALWNLSAHSTENKAAICQVDGALGFLVSTLTYKCQSNSLAIIESGGGILRNVSSLVATREDYRQVLRDHNCLQTLLQHLTSHSLTIVSNACGTLWNLSARSARDQELLWDLGAVGMLRNLVHSKHKMIAMGSAAALRNLLAHRPAKHQAAATAVSPGSCVPSLYVRKQRALEAELDARHLAQALEHLEKQGPPAAEAATKKPLPPLRHLDGLAQDYASDSGCFDDDDAPSSLAAAAATGEPASPAALSLFLGSPFLQGQALARTPPTRRGGKEAEKDTSGEAAVAAKAKAKLALAVARIDQLVEDISALHTSSDDSFSLSSGDPGQEAPREGRAQSCSPCRGPEGGRREAGSRAHPLLRLKAAHASLSNDSLNSGSASDGYCPREHMLPCPLAALASRREDPRCGQPRPSRLDLDLPGCQAEPPAREATSADARVRTIKLSPTYQHVPLLEGASRAGAEPLAGPGISPGARKQAWLPADHLSKVPEKLAAAPLSVASKALQKLAAQEGPLSLSRCSSLSSLSSAGRPGPSEGGDLDDSDSSLEGLEEAGPSEAELDSTWRAPGATSLPVAIPAPRRNRGRGLGVEDATPSSSSENYVQETPLVLSRCSSVSSLGSFESPSIASSIPSEPCSGQGSGTISPSELPDSPGQTMPPSRSKTPPLAPAPQGPPEATQFSLQWESYVKRFLDIADCRERCRLPSELDAGSVRFTVEKPDENFSCASSLSALALHEHYVQQDVELRLLPSACPERGGGAGGAGLHFAGHRRREEGPAPTGSRPRGAADQELELLRECLGAAVPARLRKVASALVPGRRALPVPVYMLVPAPAPAQEDDSCTDSAEGTPVNFSSAASLSDETLQGPPRDQPGGPAGRQRPTGRPTSARQAMGHRHKAGGAGRSAEQSRGAGKNRAGLELPLGRPPSAPADKDGSKPGRTRGDGALQSLCLTTPTEEAVYCFYGNDSDEEPPAAAPTPTHRRTSAIPRAFTRERPQGRKEAPAPSKAAPAAPPPARTQPSLIADETPPCYSLSSSASSLSEPEPSEPPAVHPRGREPAVTKDPGPGGGRDSSPSPRAAEELLQRCISSALPRRRPPVSGLRRRKPRATRLDERPAEGSRERGEEAAGSDRASDLDSVEWRAIQEGANSIVTWLHQAAAATREASSESDSILSFVSGLSVGSTLQPPKHRKGRQAEGEMGSARRPEKRGAASVKTSGSPRSPAGPEKPRGTQKTTPGVPAVLRGRTVIYVPSPAPRAQPKGTPGPRATPRKVAPPCLAQPAAPAKVPSPGQQRSRSLHRPAKTSELATLSQPPRSATPPARLAKTPSSSSSQTSPASQPLPRKRPPVTQAAGALPGPGASPVPKTPARTLLAKQHKTQRSPVRIPFMQRPARRGPPPLARAVPEPGPRGRAGTEAGPGARGGRLGLVRVASALSSGSESSDRSGFRRQLTFIKESPGLRRRRSELSSAESAASAPQGASPRRGRPALPAVFLCSSRCEELRAAPRQGPAPARQRPPAARPSPGERPARRTTSESPSRLPVRAPAARPETVKRYASLPHISVARRPDGAVPAAPASADAARRSSDGEPRPLPRVAAPGTTWRRIRDEDVPHILRSTLPATALPLRGSTPEDAPAGPPPRKTSDAVVQTEEVAAPKTNSSTSPSLETREPPGAPAGGQLSLLGSDVDGPSLAKAPISAPFVHEGLGVAVGGFPASRHGSPSRSARVPPFNYVPSPMVVAATTDSAAEKAPATASATLLE

SEQ ID NO: 851782 - protein, 1854 aa, Homo sapiens
MHKMTRDPLNLALRRYAGMTLTNLTFGDVANKATLCARRGCMEAIVAQLASDSEELHQVVSSILRNLSWRADINSKKVLREAGSVTALVQCVLRATKESTLKSVLSALWNLSAHSTENKAAICQVDGALGFLVSTLTYKCQSNSLAIIESGGGILRNVSSLVATREDYRQVLRDHNCLQTLLQHLTSHSLTIVSNACGTLWNLSARSARDQELLWDLGAVGMLRNLVHSKHKMIAMGSAAALRNLLAHRPAKHQAAATAVSPGSCVPSLYVRKQRALEAELDARHLAQALEHLEKQGPPAAEAATKKPLPPLRHLDGLAQDYASDSGCFDDDDAPSSLAAAAATGEPASPAALSLFLGSPFLQGQALARTPPTRRGGKEAEKDTSGEAAVAAKAKAKLALAVARIDQLVEDISALHTSSDDSFSLSSGDPGQEAPREGRAQSCSPCRGPEGGRREAGSRAHPLLRLKAAHASLSNDSLNSGSASDGYCPREHMLPCPLAALASRREDPRCGQPRPSRLDLDLPGCQAEPPAREATSADARVRTIKLSPTYQHVPLLEGASRAGAEPLAGPGISPGARKQAWLPADHLSKVPEKLAAAPLSVASKALQKLAAQEGPLSLSRCSSLSSLSSAGRPGPSEGGDLDDSDSSLEGLEEAGPSEAELDSTWRAPGATSLPVAIPAPRRNRGRGLGVEDATPSSSSENYVQETPLVLSRCSSVSSLGSFESPSIASSIPSEPCSGQGSGTISPSELPDSPGQTMPPSRSKTPPLAPAPQGPPEATQFSLQWESYVKRFLDIADCRERCRLPSELDAGSVRFTVEKPDENFSCASSLSALALHEHYVQQDVELRLLPSACPERGGGAGGAGLHFAGHRRREEGPAPTGSRPRGAADQELELLRECLGAAVPARLRKVASALVPGRRALPVPVYMLVPAPAPAQEDDSCTDSAEGTPVNFSSAASLSDETLQGPPRDQPGGPAGRQRPTGRPTSARQAMGHRHKAGGAGRSAEQSRGAGKNRAGLELPLGRPPSAPADKDGSKPGRTRGDGALQSLCLTTPTEEAVYCFYGNDSDEEPPAAAPTPTHRRTSAIPRAFTRERPQGRKEAPAPSKAAPAAPPPARTQPSLIADETPPCYSLSSSASSLSEPEPSEPPAVHPRGREPAVTKDPGPGGGRDSSPSPRAAEELLQRCISSALPRRRPPVSGLRRRKPRATRLDERPAEGSRERGEEAAGSDRASDLDSVEWRAIQEGANSIVTWLHQAAAATREASSESDSILSFVSGLSVGSTLQPPKHRKGRQAEGEMGSARRPEKRGAASVKTSGSPRSPAGPEKPRGTQKTTPGVPAVLRGRTVIYVPSPAPRAQPKGTPGPRATPRKVAPPCLAQPAAPAKVPSPGQQRSRSLHRPAKTSELATLSQPPRSATPPARLAKTPSSSSSQTSPASQPLPRKRPPVTQAAGALPGPGASPVPKTPARTLLAKQHKTQRSPVRIPFMQRPARRGPPPLARAVPEPGPRGRAGTEAGPGARGGRLGLVRVASALSSGSESSDRSGFRRQLTFIKESPGLRRRRSELSSAESAASAPQGASPRRGRPALPAVFLCSSRCEELRAAPRQGPAPARQRPPAARPSPGERPARRTTSESPSRLPVRAPAARPETVKRYASLPHISVARRPDGAVPAAPASADAARRSSDGEPRPLPRVAAPGTTWRRIRDEDVPHILRSTLPATALPLRGSTPEDAPAGPPPRKTSDAVVQTEEVAAPKTNSSTSPSLETREPPGAPAGGQLSLLGSDVDGPSLAKAPISAPFVHEGLGVAVGGFPASRHGSPSRSARVPPFNYVPSPMVVAATTDSAAEKAPATASATLLE

SEQ ID NO: 851783 - protein, 676 aa, Homo sapiens
APSGLNVAAASANGRRGKRMASARKASRPMRDVFGDFSDVSLEDSTMEEIRNFQISRNLTKIAPGHSRFLKRNQTLDEKHLLLKENPVLGSGPRLASCRPPTTASRIRANAALMKLAQLETRIMNRKLQRNLSDTESDSMTADAGLPKRADRILSGGALELASQNTDKTSQNQARELPVTENNAQNAKVSRFLKKKQAPVENISPEAPAGKERTLQTPKQKEPARTFDSPDSDEEEMKVLLGSLMDSSREKNTNQGFSSANVSEEEERKLFSVPSQLRAFTVPSVELSSAKPSQTSHLPTSLAADRTLHSTRSRADYPQSHVSSDTASHTPSVSITGAFSNSVSLKMGHVKLVSSPGRSEAETVDEPVSEGADDSLDEFRINILSLDGLAPAVSENSDLEQEEESAQRQKTAGKIFRAEASTGQDAPRQAQARSWASQGKAASAEGDESEVSEHLSASSASAIQQDSTSSMQPPSEAPMVNTVSSAYSEDFENSPSLTASEPTAHSKESLDRTLDALSESSSSVKTDLPQTAESRKKSGRHVTRVLVKDTAVQTPDPAFTYEWTKVASMAAMGPALGGAYVDPTPIANHVISADAIEALTAYSPAVLALHDVLKQQLSLTQQFIQASRHLHASLLRSLDADSFHYHTLEEAKEYIRCHRPAPLTMEDALEEVNKEL

SEQ ID NO: 851784 - protein, 676 aa, Homo sapiens; identical to SEQ ID NO: 851783

SEQ ID NO: 851785 - protein, 676 aa, Homo sapiens; identical to SEQ ID NO: 851783

SEQ ID NO: 851786 - protein, 644 aa, Homo sapiens
APSGLNVAAASANGRRGKRMASARKASRPMRDVFGDFSDVSLEDSTMEEIRNFQISRNLTKIAPGHSRFLKRNQTLDEKHLLLKENPVLGSGPRLASCRPPTTASRIRANAALMKLAQLETRIMNRKLQRNLSDTESDSMTADAGLPKRADRILSGGALELASQNTDKTSQNQARELPVTENNAQNAKVSRFLKKKQAPVENISPEAPAGKERTLQTPKQKEPARTFDSPDSDEEEMKVLLGSLMDSSREKNTNQGFSSANVSEEEERKLFSVPSQLRAFTVPSVELSSAKPSQTSHLPTSLAADRTLHSTRSRADYPQSHVSSDTASHTPSVSITGAFSNSVSLKMGHVKLVSSPGRSEAETVDEPVSEGADDSLDEFRINILSLDGLAPAVSENSDLEQEEESAQRQKTAGKIFRAEASTGQDAPRQAQARSWASQGKAASAEGDESEVSEHLSASSASAIQQDSTSSMQPPSEAPMVNTVSSAYSEDFENSPSLTASEPTAHSKESLDRTLDALSESSSSVKTDLPQTAESRKKSGRHVTRVLVKDTAVQTPDPAFTYEWTKALTAYSPAVLALHDVLKQQLSLTQQFIQASRHLHASLLRSLDADSFHYHTLEEAKEYIRCHRPAPLTMEDALEEVNKEL

SEQ ID NO: 851787 - protein, 1341 aa, Homo sapiens
MWRRKHPRTSGGTRGVLSGNRGVEYGSGRGHLGTFEGRWRKLPKMPEAVGTDPSTSRKMAELEEVTLDGKPLQALRVTDLKAALEQRGLAKSGQKSALVKRLKGALMLENLQKHSTPHAAFQPNSQIGEEMSQNSFIKQYLEKQQELLRQRLEREAREAAELEEASAESEDEMIHPEGVASLLPPDFQSSLERPELELSRHSPRKSSSISEEKGDSDDEKPRKGERRSSRVRQARAAKLSEGSQPAEEEEDQETPSRNLRVRADRNLKTEEEEEEEEEEEEDDEEEEGDDEGQKSREAPILKEFKEEGEEIPRVKPEEMMDERPKTRSQEQEVLERGGRFTRSQEEARKSHLARQQQEKEMKTTSPLEEEEREIKSSQGLKEKSKSPSPPRLTEDRKKASLVALPEQTASEEETPPPLLTKEASSPPPHPQLHSEEEIEPMEGPAPPVLIQLSPPNTDADTRELLVSQHTVQLVGGLSPLSSPSDTKAESPAEKVPEESVLPLVQKSTLADYSAQKDLEPESDRSAQPLPLKIEELALAKGITEECLKQPSLEQKEGRRASHTLLPSHRLKQSADSSSSRSSSSSSSSSRSRSRSPDSSGSRSHSPLRSKQRDVAQARTHANPRGRPKMGSRSTSESRSRSRSRSRSASSNSRKSLSPGVSRDSSTSYTETKDPSSGQEVATPPVPQLQVCEPKERTSTSSSSVQARRLSQPESAEKHVTQRLQPERGSPKKCEAEEAEPPAATQPQTSETQTSHLPESERIHHTVEEKEEVTMDTSENRPENDVPEPPMPIADQVSNDDRPEGSVEDEEKKESSLPKSFKRKISVVSATKGVPAGNSDTEGGQPGRKRRWGASTATTQKKPSISITTESLKSLIPDIKPLAGQEAVVDLHADDSRISEDETERNGDDGTHDKGLKICRTVTQVVPAEGQENGQREEEEEEKEPEAEPPVPPQVSVEVALPPPAEHEVKKVTLGDTLTRRSISQQKSGVSITIDDPVRTAQVPSPPRGKISNIVHISNLVRPFTLGQLKELLGRTGTLVEEAFWIDKIKSHCFVTYSTVEEAVATRTALHGVKWPQSNPKFLCADYAEQDELDYHRGLLVDRPSETKTEEQGIPRPLHPPPPPPVQPPQHPRAEQREQERAVREQWAEREREMERRERTRSEREWDRDKVREGPRSRSRSRDRRRKERAKSKEKKSEKKEKAQEEPPAKLLDDLFRKTKAAPCIYWLPLTDSQIVQKEAERAERAKEREKRRKEQEEEEQKEREKEAERERNRQLEREKRREHSRERDRERERERERDRGDRDRDRERDRERGRERDRRDTKRHSRSRSRSTPVRDRGGRR

SEQ ID NO: 851788 - protein, 119 aa, Homo sapiens
MWRRKHPRTSGGTRGVLSGNRGVEYGSGRGHLGTFEGRWRKLPKMPEAVGTDPSTSRKMAELEEVTLDGKPLQALRVTDLKAALEQRGLAKSGQKSALVKRLKGVRSRRCWGVGGERTR

SEQ ID NO: 851789 - protein, 792 aa, Homo sapiens
MWRRKHPRTSGGTRGVLSGNRGVEYGSGRGHLGTFEGRWRKLPKMPEAVGTDPSTSRKMAELEEVTLDGKPLQALRVTDLKAALEQRGLAKSGQKSALVKRLKGALMLENLQKHSTPHAAFQPNSQIGEEMSQNSFIKQYLEKQQELLRQRLEREAREAAELEGKSSSISEEKGDSDDEKPRKGERRSSRVRQARAAKLSEGSQPAEEEEDQETPSRNLRVRADRNLKTEEEEEEEEEEEEDDEEEEGDDEGQKSREAPILKEFKEEGEEIPRVKPEEMMDERPKTRSQEQEVLERGGRFTRSQEEARKSHLARQQQEKEMKTTSPLEEEEREIKSSQGLKEKSKSPSPPRLTEDRKKASLVALPEQTASEEETPPPLLTKEASSPPPHPQLHSEEEIEPMEGPAPPVLIQLSPPNTDADTRELLVSQHTVQLVGGLSPLSSPSDTKAESPAEKVPEESVLPLVQKSTLADYSAQKDLEPESDRSAQPLPLKIEELALAKGITEECLKQPSLEQKEGRRASHTLLPSHRLKQSADSSSSRSSSSSSSSSRSRSRSPDSSGSRSHSPLRSKQRDVAQARTHANPRGRPKMGSRSTSESRSRSRSRSRSASSNSRKSLSPGVSRDSSTSYTETKDPSSGQEVATPPVPQLQVCEPKERTSTSSSSVQARRLSQPESAEKHVTQRLQPERGSPKKCEAEEAEPPAATQPQTSETQTSHLPESERIHHTVEEKEEVTMDTSENRPENDVPEPPMPIADQVSNDDRPEGSVEDEEKKEYLMYGNPPVKYNPAQLANR

SEQ ID NO: 851790 - protein, 583 aa, Homo sapiens
MLSESKEGEEKEEVTMDTSENRPENDVPEPPMPIADQVSNDDRPEGSVEDEEKKESSLPKSFKRKISVVSATKGVPAGNSDTEGGQPGRKRRWGASTATTQKKPSISITTESLKSLIPDIKPLAGQEAVVDLHADDSRISEDETERNGDDGTHDKGLKICRTVTQVVPAEGQENGQREEEEEEKEPEAEPPVPPQVSVEVALPPPAEHEVKKVTLGDTLTRRSISQQKSGVSITIDDPVRTAQVPSPPRGKISNIVHISNLVRPFTLGQLKELLGRTGTLVEEAFWIDKIKSHCFVTYSTVEEAVATRTALHGVKWPQSNPKFLCADYAEQDELDYHRGLLVDRPSETKTEEQGIPRPLHPPPPPPVQPPQHPRAEQREQERAVREQWAEREREMERRERTRSEREWDRDKVREGPRSRSRSRDRRRKERAKSKEKKSEKKEKAQEEPPAKLLDDLFRKTKAAPCIYWLPLTDSQIVQKEAERAERAKEREKRRKEQEEEEQKEREKEAERERNRQLEREKRREHSRERDRERERERERDRGDRDRDRERDRERGRERDRRDTKRHSRSRSRSTPVRDRGGRR

SEQ ID NO: 851791 - protein, 614 aa, Homo sapiens
MSPADRCRSANTIEPATTSSLALFLLLQRDQSSRTRGLPEEKEEVTMDTSENRPENDVPEPPMPIADQVSNDDRPEGSVEDEEKKESSLPKSFKRKISVVSATKGVPAGNSDTEGGQPGRKRRWGASTATTQKKPSISITTESLKSLIPDIKPLAGQEAVVDLHADDSRISEDETERNGDDGTHDKGLKICRTVTQVVPAEGQENGQREEEEEEKEPEAEPPVPPQVSVEVALPPPAEHEVKKVTLGDTLTRRSISQQKSGVSITIDDPVRTAQVPSPPRGKISNIVHISNLVRPFTLGQLKELLGRTGTLVEEAFWIDKIKSHCFVTYSTVEEAVATRTALHGVKWPQSNPKFLCADYAEQDELDYHRGLLVDRPSETKTEEQGIPRPLHPPPPPPVQPPQHPRAEQREQERAVREQWAEREREMERRERTRSEREWDRDKVREGPRSRSRSRDRRRKERAKSKEKKSEKKEKAQEEPPAKLLDDLFRKTKAAPCIYWLPLTDSQIVQKEAERAERAKEREKRRKEQEEEEQKEREKEAERERNRQLEREKRREHSRERDRERERERERDRGDRDRDRERDRERGRERDRRDTKRHSRSRSRSTPVRDRGGRR

SEQ ID NO: 851792 - protein, 800 aa, Homo sapiens
MSSGLWQSPYGLSPGWRGNSKTLLELPAVAGKSKDLLGDNLPFIKTFLIKDTFEFFLLALAQEPHLQWVWCCPFPQCGGGLGSLDMTVCCPSISKPLSVGISLAIEERRVTLLKLPSKVGFPCFLELARKDLGGLDDPVWGTVCLAWCPLDSDGERGGMTNIFEGAERLLNSSSSLFLVKLIHRCDTEYMTFPCSDDLVLFFSLTCIDSASFLPFAASVLVSVCLCVSLCLSLSLYAVSLEAKLRLPHLTSFPPLCGVSLFLFFFPFFFFIQSSLPKSFKRKISVVSATKGVPAGNSDTEGGQPGRKRRWGASTATTQKKPSISITTESLKSLIPDIKPLAGQEAVVDLHADDSRISEDETERNGDDGTHDKGLKICRTVTQVVPAEGQENGQREEEEEEKEPEAEPPVPPQVSVEVALPPPAEHEVKKVTLGDTLTRRSISQQKSGVSITIDDPVRTAQVPSPPRGKISNIVHISNLVRPFTLGQLKELLGRTGTLVEEAFWIDKIKSHCFVTYSTVEEAVATRTALHGVKWPQSNPKFLCADYAEQDELDYHRGLLVDRPSETKTEEQGIPRPLHPPPPPPVQPPQHPRAEQREQERAVREQWAEREREMERRERTRSEREWDRDKVREGPRSRSRSRDRRRKERAKSKEKKSEKKEKAQEEPPAKLLDDLFRKTKAAPCIYWLPLTDSQIVQKEAERAERAKEREKRRKEQEEEEQKEREKEAERERNRQLEREKRREHSRERDRERERERERDRGDRDRDRERDRERGRERDRRDTKRHSRSRSRSTPVRDRGGRR

SEQ ID NO: 851793 - protein, 844 aa, Homo sapiens
MWRRKHPRTSGGTRGVLSGNRGVEYGSGRGHLGTFEGRWRKLPKMPEAVGTDPSTSRKMAELEEVTLDGKPLQALRVTDLKAALEQRGLAKSGQKSALVKRLKGALMLENLQKHSTPHAAFQPNSQIGEEMSQNSFIKQYLEKQQELLRQRLEREAREAAELEEASAESEDEMIHPEGVASLLPPDFQSSLERPELELSRHSPRKSSSISEEKGDSDDEKPRKGERRSSRVRQARAAKLSEGSQPAEEEEDQETPSRNLRVRADRNLKTEEEEEEEEEEEEDDEEEEGDDEGQKSREAPILKEFKEEGEEIPRVKPEEMMDERPKTRSQEQEVLERGGRFTRSQEEARKSHLARQQQEKEMKTTSPLEEEEREIKSSQGLKEKSKSPSPPRLTEDRKKASLVALPEQTASEEETPPPLLTKEASSPPPHPQLHSEEEIEPMEGPAPPVLIQLSPPNTDADTRELLVSQHTVQLVGGLSPLSSPSDTKAESPAEKVPEESVLPLVQKSTLADYSAQKDLEPESDRSAQPLPLKIEELALAKGITEECLKQPSLEQKEGRRASHTLLPSHRLKQSADSSSSRSSSSSSSSSRSRSRSPDSSGSRSHSPLRSKQRDVAQARTHANPRGRPKMGSRSTSESRSRSRSRSRSASSNSRKSLSPGVSRDSSTSYTETKDPSSGQEVATPPVPQLQVCEPKERTSTSSSSVQARRLSQPESAEKHVTQRLQPERGSPKKCEAEEAEPPAATQPQTSETQTSHLPESERIHHTVEEKEEVTMDTSENRPENDVPEPPMPIADQVSNDDRPEGSVEDEEKKEVNIQATYWGGWAGMDLGERVEHSSDPSYTVG

SEQ ID NO: 851794 - protein, 543 aa, Homo sapiens
MSLFLFFFPFFFFIQSSLPKSFKRKISVVSATKGVPAGNSDTEGGQPGRKRRWGASTATTQKKPSISITTESLKSLIPDIKPLAGQEAVVDLHADDSRISEDETERNGDDGTHDKGLKICRTVTQVVPAEGQENGQREEEEEEKEPEAEPPVPPQVSVEVALPPPAEHEVKKVTLGDTLTRRSISQQKSGVSITIDDPVRTAQVPSPPRGKISNIVHISNLVRPFTLGQLKELLGRTGTLVEEAFWIDKIKSHCFVTYSTVEEAVATRTALHGVKWPQSNPKFLCADYAEQDELDYHRGLLVDRPSETKTEEQGIPRPLHPPPPPPVQPPQHPRAEQREQERAVREQWAEREREMERRERTRSEREWDRDKVREGPRSRSRSRDRRRKERAKSKEKKSEKKEKAQEEPPAKLLDDLFRKTKAAPCIYWLPLTDSQIVQKEAERAERAKEREKRRKEQEEEEQKEREKEAERERNRQLEREKRREHSRERDRERERERERDRGDRDRDRERDRERGRERDRRDTKRHSRSRSRSTPVRDRGGRR

SEQ ID NO: 851795 - protein, 517 aa, Homo sapiens
MGTAATKGVPAGNSDTEGGQPGRKRRWGASTATTQKKPSISITTESLKSLIPDIKPLAGQEAVVDLHADDSRISEDETERNGDDGTHDKGLKICRTVTQVVPAEGQENGQREEEEEEKEPEAEPPVPPQVSVEVALPPPAEHEVKKVTLGDTLTRRSISQQKSGVSITIDDPVRTAQVPSPPRGKISNIVHISNLVRPFTLGQLKELLGRTGTLVEEAFWIDKIKSHCFVTYSTVEEAVATRTALHGVKWPQSNPKFLCADYAEQDELDYHRGLLVDRPSETKTEEQGIPRPLHPPPPPPVQPPQHPRAEQREQERAVREQWAEREREMERRERTRSEREWDRDKVREGPRSRSRSRDRRRKERAKSKEKKSEKKEKAQEEPPAKLLDDLFRKTKAAPCIYWLPLTDSQIVQKEAERAERAKEREKRRKEQEEEEQKEREKEAERERNRQLEREKRREHSRERDRERERERERDRGDRDRDRERDRERGRERDRRDTKRHSRSRSRSTPVRDRGGRR

SEQ ID NO: 851796 - protein, 505 aa, Homo sapiens
MGTAATKGVPAGNSDTEGGQPGRKRRWGASTATTQKKPSISITTESLKEAVVDLHADDSRISEDETERNGDDGTHDKGLKICRTVTQVVPAEGQENGQREEEEEEKEPEAEPPVPPQVSVEVALPPPAEHEVKKVTLGDTLTRRSISQQKSGVSITIDDPVRTAQVPSPPRGKISNIVHISNLVRPFTLGQLKELLGRTGTLVEEAFWIDKIKSHCFVTYSTVEEAVATRTALHGVKWPQSNPKFLCADYAEQDELDYHRGLLVDRPSETKTEEQGIPRPLHPPPPPPVQPPQHPRAEQREQERAVREQWAEREREMERRERTRSEREWDRDKVREGPRSRSRSRDRRRKERAKSKEKKSEKKEKAQEEPPAKLLDDLFRKTKAAPCIYWLPLTDSQIVQKEAERAERAKEREKRRKEQEEEEQKEREKEAERERNRQLEREKRREHSRERDRERERERERDRGDRDRDRERDRERGRERDRRDTKRHSRSRSRSTPVRDRGGRR

SEQ ID NO: 851797 - protein, 483 aa, Homo sapiens
MGPVYTGWGVSVSQSLIPDIKPLAGQEAVVDLHADDSRISEDETERNGDDGTHDKGLKICRTVTQVVPAEGQENGQREEEEEEKEPEAEPPVPPQVSVEVALPPPAEHEVKKVTLGDTLTRRSISQQKSGVSITIDDPVRTAQVPSPPRGKISNIVHISNLVRPFTLGQLKELLGRTGTLVEEAFWIDKIKSHCFVTYSTVEEAVATRTALHGVKWPQSNPKFLCADYAEQDELDYHRGLLVDRPSETKTEEQGIPRPLHPPPPPPVQPPQHPRAEQREQERAVREQWAEREREMERRERTRSEREWDRDKVREGPRSRSRSRDRRRKERAKSKEKKSEKKEKAQEEPPAKLLDDLFRKTKAAPCIYWLPLTDSQIVQKEAERAERAKEREKRRKEQEEEEQKEREKEAERERNRQLEREKRREHSRERDRERERERERDRGDRDRDRERDRERGRERDRRDTKRHSRSRSRSTPVRDRGGRR

SEQ ID NO: 851798 - protein, 2498 aa, Homo sapiens
MWRRKHPRTSGGTRGVLSGNRGVEYGSGRGHLGTFEGRWRKLPKMPEAVGTDPSTSRKMAELEEVTLDGKPLQALRVTDLKAALEQRGLAKSGQKSALVKRLKGALMLENLQKHSTPHAAFQPNSQIGEEMSQNSFIKQYLEKQQELLRQRLEREAREAAELEEASAESEDEMIHPEGVASLLPPDFQSSLERPELELSRHSPRKSSSISEEKGDSDDEKPRKGERRSSRVRQARAAKLSEGSQPAEEEEDQETPSRNLRVRADRNLKTEEEEEEEEEEEEDDEEEEGDDEGQKSREAPILKEFKEEGEEIPRVKPEEMMDERPKTRSQEQEVLERGGRFTRSQEEARKSHLARQQQEKEMKTTSPLEEEEREIKSSQGLKEKSKSPSPPRLTEDRKKASLVALPEQTASEEETPPPLLTKEASSPPPHPQLHSEEEIEPMEGPAPPVLIQLSPPNTDADTRELLVSQHTVQLVGGLSPLSSPSDTKAESPAEKVPEESVLPLVQKSTLADYSAQKDLEPESDRSAQPLPLKIEELALAKGITEECLKQPSLEQKEGRRASHTLLPSHRLKQSADSSSSRSSSSSSSSSRSRSRSPDSSGSRSHSPLRSKQRDVAQARTHANPRGRPKMGSRSTSESRSRSRSRSRSASSNSRKSLSPGVSRDSSTSYTETKDPSSGQEVATPPVPQLQVCEPKERTSTSSSSVQARRLSQPESAEKHVTQRLQPERGSPKKCEAEEAEPPAATQPQTSETQTSHLPESERIHHTVEEKEEVTMDTSENRPENDVPEPPMPIADQVSNDDRPEGSVEDEEKKEVNIQATYWGGWAGMDLGERVEHSSDPSYTVGELKGGMRQGLGSERAKGEFAGLARETPCDGDRAHSFSFPCWGSSAQTLDVCNYTGKSDNGPLSKIYVQLFLLSSQASPGGNSFSFPSFLKADGAQRHLVDIGGSHQTSHAEKFLFLLCPPVVWLQRCSYLEASTCDPEGPFSVTCDPSTSFFGICYLVSCTHFRGLPPSEPAKSSWLLKKLRKNELGLGEGEQGGRDCCVCSLFLVCVAGVGAGESDLMLQNIIYYKVLLPRKTLSKYLMYGNPPVKYNPAQLANRWCRLFLWTHPLLLSCPIRAKSAIQVSWPEGGMYMGSCDGPPFASLSCLHQGAKKNTVLERLVLSKQKTFGKGWTCIISLLGTPQEELVPVLGRLPTCPCPFEDCGLPCLLQTVGIPIYGHQDLLKFVIAVPCCKTLSGTLYLSCDDYGTVQRSLGSEPLGIYADDSPAHVSPLAHQMDFPLVPVVHGEGQHVGCSNFSSIPGGRDSFHPPDWNHCLSWSSLRRCQPQLSEEKYSDLAAECLPGPGVFTYPQATFIRGSMIPLGERTPSPVTGRGERDSGVITWIPSIGWCYCCSLPLVDIGSCLPLTIKGKDHSCYSQPSHQGLQDDVPSGPGLMSLPLSPLYPSLSLATASELSVTSWKLGSVPPHVSLPPPLRPWEDSGSAVLTTTPCAHLFCQPNPPPIAQRLAGRAHSDLDRRLTRYSPHSEVRLAELKIPGVDGTWNICHIPSLFSSLFSSSFFNILFYFFSISLFFLISFIYLFGHVFPVLIKTFFFVLFFSLTYPSRAAQLGVRLALNRDQGDLVRRHKRGCGWGWMGKGFHHEVSALPFRRVESGLSFSRNKHLHLKILYSLFLSHFSPPPPIVFRHSPTECLGYRLVPKMSSGLWQSPYGLSPGWRGNSKTLLELPAVAGKSKDLLGDNLPFIKTFLYQRTFEFFLLALAQEPHLQWVWCCPFPQCGGGLGSLDMTVCCPSISKPLSVGISLAIEERRVTLLKLPSKVGFPCFLELARKDLGGLDDPVWGTVCLAWCPLDSDGERGGMTNIFEGAERLLNSSSSLFLVKLIHRCDTEYMTFPCSDDLVLFFSLTCIDVCFVFAVCRFCFGLCLSLCLSLSLSLTLSVSLEAKLRLPHLTSFPPLCGVSLFLFFFPFFFFIQSSLPKSFKRKISVVSATKGVPAGNSDTEGGQPGRKRRWGASTATTQKKPSISITTESLKSLIPDIKPLAGQEAVVDLHADDSRISEDETERNGDDGTHDKGLKICRTVTQVVPAEGQENGQREEEEEEKEPEAEPPVPPQVSVEVALPPPAEHEVKKVTLGDTLTRRSISQQKSGVSITIDDPVRTAQVPSPPRGKISNIVHISNLVRPFTLGQLKELLGRTGTLVEEAFWIDKIKSHCFVTYSTVEEAVATRTALHGVKWPQSNPKFLCADYAEQDELDYHRGLLVDRPSETKTEEQGIPRPLHPPPPPPVQPPQHPRAEQREQERAVREQWAEREREMERRERTRSEREWDRDKVREGPRSRSRSRDRRRKERAKSKEKKSEKKEKAQEEPPAKLLDDLFRKTKAAPCIYWLPLTDSQIVQKEAERAERAKEREKRRKEQEEEEQKEREKEAERERNRQLEREKRREHSRERDRERERERERDRGDRDRDRERDRERGRERDRRDTKRHSRSRSRSTPVRDRGGRR

SEQ ID NO: 851799 - protein, 189 aa, Homo sapiens
MERRERTRSEREWDRDKVREGPRSRSRSRDRRRKERAKSKEKKSEKKEKAQEEPPAKLLDDLFRKTKAAPCIYWLPLTDSQIVQKEAERAERAKEREKRRKEQEEEEQKEREKEAERERNRQLEREKRREHSRERDRERERERERDRGDRDRDRERDRERGRERDRRDTKRHSRSRSRSTPVRDRGGRR

SEQ ID NO: 851800 - protein, 189 aa, Homo sapiens; identical to SEQ ID NO: 851799

SEQ ID NO: 851801 - protein, 132 aa, Homo sapiens
MLDDLFRKTKAAPCIYWLPLTDSQIVQKEAERAERAKEREKRRKEQEEEEQKEREKEAERERNRQLEREKRREHSRERDRERERERERDRGDRDRDRERDRERGRERDRRDTKRHSRSRSRSTPVRDRGGRR

SEQ ID NO: 851802 - protein, 844 aa, Homo sapiens; identical to SEQ ID NO: 851793

SEQ ID NO: 851803 - protein, 766 aa, Homo sapiens
MWRRKHPRTSGGTRGVLSGNRGVEYGSGRGHLGTFEGRWRKLPKMPEAVGTDPSTSRKMAELEEVTLDGKPLQALRVTDLKAALEQRGLAKSGQKSALVKRLKGALMLENLQKHSTPHAAFQPNSQIGEEMSQNSFIKQYLEKQQELLRQRLEREAREAAELEEASAESEDEMIHPEGVASLLPPDFQSSLERPELELSRHSPRKSSSISEEKGDSDDEKPRKGERRSSRVRQARAAKLSEGSQPAEEEEDQETPSRNLRVRADRNLKTEEEEEEEEEEEEDDEEEEGDDEGQKSREAPILKEFKEEGEEIPRVKPEEMMDERPKTRSQEQEVLERGGRFTRSQEEARKSHLARQQQEKEMKTTSPLEEEEREIKSSQGLKEKSKSPSPPRLTEDRKKASLVALPEQTASEEETPPPLLTKEASSPPPHPQLHSEEEIEPMEGPAPPVLIQLSPPNTDADTRELLVSQHTVQLVGGLSPLSSPSDTKAESPAEKVPEESVLPLVQKSTLADYSAQKDLEPESDRSAQPLPLKIEELALAKGITEECLKQPSLEQKEGRRASHTLLPSHRLKQSADSSSSRSSSSSSSSSRSRSRSPDSSGSRSHSPLRSKQRDVAQARTHANPRGRPKMGSRSTSESRSRSRSRSRSASSNSRKSLSPGVSRDSSTSYTETKDPSSGQEVATPPVPQLQVCEPKERTSTSSSSVQARRLSQPESAEKHVTQRLQPERGSPKKCEAEEAEPPAATQPQTSETQTSHLPESERIHHTV

SEQ ID NO: 851804 - protein, 722 aa, Homo sapiens
MWRRKHPRTSGGTRGVLSGNRGVEYGSGRGHLGTFEGRWRKLPKMPEAVGTDPSTSRKMAELEEVTLDGKPLQALRVTDLKAALEQRGLAKSGQKSALVKRLKGALMLENLQKHSTPHAAFQPNSQIGEEMSQNSFIKQYLEKQQELLRQRLEREAREAAELEEASAESEDEMIHPEGVASLLPPDFQSSLERPELELSRHSPRKSSSISEEKGDSDDEKPRKGERRSSRVRQARAAKLSEGSQPAEEEEDQETPSRNLRVRADRNLKTEEEEEEEEEEEEDDEEEEGDDEGQKSREAPILKEFKEEGEEIPRVKPEEMMDERPKTRSQEQEVLERGGRFTRSQEEARKSHLARQQQEKEMKTTSPLEEEEREIKSSQGLKEKSKSPSPPRLTEDRKKASLVALPEQTASEEETPPPLLTKEASSPPPHPQLHSEEEIEPMEGPAPPVLIQLSPPNTDADTRELLVSQHTVQLVGGLSPLSSPSDTKAESPAEKVPEESVLPLVQKSTLADYSAQKDLEPESDRSAQPLPLKIEELALAKGITEECLKQPSLEQKEGRRASHTLLPSHRLKQSADSSSSRSSSSSSSSSRSRSRSPDSSGSRSHSPLRSKQRDVAQARTHANPRGRPKMGSRSTSESRSRSRSRSRSASSNSRKSLSPGVSRDSSTSYTETKEKAGRRPKSSSVYILVFSFSCPRGYTEGTLSPPKHIGAGLLWPGAWHSCS

SEQ ID NO: 851805 - protein, 832 aa, Homo sapiens
MWRRKHPRTSGGTRGVLSGNRGVEYGSGRGHLGTFEGRWRKLPKMPEAVGTDPSTSRKMAELEEVTLDGKPLQALRVTDLKAALEQRGLAKSGQKSALVKRLKGALMLENLQKHSTPHAAFQPNSQIGEEMSQNSFIKQYLEKQQELLRQRLEREAREAAELEEASAESEDEMIHPEGVASLLPPDFQSSLERPELELSRHSPRKSSSISEEKGDSDDEKPRKGERRSSRVRQARAAKLSEGSQPAEEEEDQETPSRNLRVRADRNLKTEEEEEEEEEEEEDDEEEEGDDEGQKSREAPILKEFKEEGEEIPRVKPEEMMDERPKTRSQEQEVLERGGRFTRSQEEARKSHLARQQQEKEMKTTSPLEEEEREIKSSQGLKEKSKSPSPPRLTEDRKKASLVALPEQTASEEETPPPLLTKEASSPPPHPQLHSEEEIEPMEGPAPPVLIQLSPPNTDADTRELLVSQHTVQLVGGLSPLSSPSDTKAESPAEKVPEESVLPLVQKSTLADYSAQKDLEPESDRSAQPLPLKIEELALAKGITEECLKQPSLEQKEGRRASHTLLPSHRLKQSADSSSSRSSSSSSSSSRSRSRSPDSSGSRSHSPLRSKQRDVAQARTHANPRGRPKMGSRSTSESRSRSRSRSRSASSNSRKSLSPGVSRDSSTSYTETKDPSSGQEVATPPVPQLQVCEPKERTSTSSSSVQARRLSQPESAEKHVTQRLQPERGSPKKCEAEEAEPPAATQPQTSETQTSHLPESERIHHTVEEKEEVTMDTSENRPENDVPEPPMPIADQVSNDDRPEGSVEDEEKKEYLMYGNPPVKYNPAQLANR

SEQ ID NO: 851806 - protein, 2498 aa, Homo sapiens; identical to SEQ ID NO: 851798

SEQ ID NO: 851807 - protein, 2531 aa, Homo sapiens
MWRRKHPRTSGGTRGVLSGNRGVEYGSGRGHLGTFEGRWRKLPKMPEAVGTDPSTSRKMAELEEVTLDGKPLQALRVTDLKAALEQRGLAKSGQKSALVKRLKGALMLENLQKHSTPHAAFQPNSQIGEEMSQNSFIKQYLEKQQELLRQRLEREAREAAELEEASAESEDEMIHPEGVASLLPPDFQSSLERPELELSRHSPRKSSSISEEKGDSDDEKPRKGERRSSRVRQARAAKLSEGSQPAEEEEDQETPSRNLRVRADRNLKTEEEEEEEEEEEEDDEEEEGDDEGQKSREAPILKEFKEEGEEIPRVKPEEMMDERPKTRSQEQEVLERGGRFTRSQEEARKSHLARQQQEKEMKTTSPLEEEEREIKSSQGLKEKSKSPSPPRLTEDRKKASLVALPEQTASEEETPPPLLTKEASSPPPHPQLHSEEEIEPMEGPAPPVLIQLSPPNTDADTRELLVSQHTVQLVGGLSPLSSPSDTKAESPAEKVPEESVLPLVQKSTLADYSAQKDLEPESDRSAQPLPLKIEELALAKGITEECLKQPSLEQKEGRRASHTLLPSHRLKQSADSSSSRSSSSSSSSSRSRSRSPDSSGSRSHSPLRSKQRDVAQARTHANPRGRPKMGSRSTSESRSRSRSRSRSASSNSRKSLSPGVSRDSSTSYTETKDPSSGQEVATPPVPQLQVCEPKERTSTSSSSVQARRLSQPESAEKHVTQRLQPERGSPKKCEAEEAEPPAATQPQTSETQTSHLPESERIHHTVEEKEEVTMDTSENRPENDVPEPPMPIADQVSNDDRPEGSVEDEEKKEVNIQATYWGGWAGMDLGERVEHSSDPSYTVGELKGGMRQGLGSERAKGEFAGLARETPCDGDRAHSFSFPCWGSSAQTLDVCNYTGKSDNGPLSKIYVQLFLLSSQASPGGNSFSFPSFLKADGAQRHLVDIGGSHQTSHAEKFLFLLCPPVVWLQRCSYLEASTCDPEGPFSVTCDPSTSFFGICYLVSCTHFRGLPPSEPAKSSWLLKKLRKNELGLGEGEQGGRDCCVCSLFLVCVAGVGAGESDLMLQNIIYYKVLLPRKTLSKYLMYGNPPVKYNPAQLANRWCRLFLWTHPLLLSCPIRAKSAIQVSWPEGGMYMGSCDGPPFASLSCLHQGAKKNTVLERLVLSKQKTFGKGWTCIISLLGTPQEELVPVLGRLPTCPCPFEDCGLPCLLQTVGIPIYGHQDLLKFVIAVPCCKTLSGTLYLSCDDYGTVQRSLGSEPLGIYADDSPAHVSPLAHQMDFPLVPVVHGEGQHVGCSNFSSIPGGRDSFHPPDWNHCLSWSSLRRCQPQLSEEKYSDLAAECLPGPGVFTYPQATFIRGSMIPLGERTPSPVTGRGERDSGVITWIPSIGWCYCCSLPLVDIGSCLPLTIKGKDHSCYSQPSHQGLQDDVPSGPGLMSLPLSPLYPSLSLATASELSVTSWKLGSVPPHVSLPPPLRPWEDSGSAVLTTTPCAHLFCQPNPPPIAQRLAGRAHSDLDRRLTRYSPHSEVRLAELKIPGVDGTWNICHIPSLFSSLFSSSFFNILFYFFSISLFFLISFIYLFGHVFPVLIKTFFFVLFFSLTYPSRAAQLGVRLALNRDQGDLVRRHKRGCGWGWMGKGFHHEVSALPFRRVESGLSFSRNKHLHLKILYSLFLSHFSPPPPIVFRHSPTECLGYRLVPKMSSGLWQSPYGLSPGWRGNSKTLLELPAVAGKSKDLLGDNLPFIKTFLYQRTFEFFLLALAQEPHLQWVWCCPFPQCGGGLGSLDMTVCCPSISKPLSVGISLAIEERRVTLLKLPSKVGFPCFLELARKDLGGLDDPVWGTVCLAWCPLDSDGERGGMTNIFEGAERLLNSSSSLFLVKLIHRCDTEYMTFPCSDDLVLFFSLTCIDVCFVFAVCRFCFGLCLSLCLSLSLSLTLSVSLEAKLRLPHLTSFPPLCGVSLFLFFFPFFFFIQSSLPKSFKRKISVVSATKGVPAGNSDTEGGQPGRKRRWGASTATTQKKPSISITTESLKVRWEEPGKGEMRPVKVGVDMGPVYTGWGVSVSQSLIPDIKPLAGQEAVVDLHADDSRISEDETERNGDDGTHDKGLKICRTVTQVVPAEGQENGQREEEEEEKEPEAEPPVPPQVSVEVALPPPAEHEVKKVTLGDTLTRRSISQQKSGVSITIDDPVRTAQVPSPPRGKISNIVHISNLVRPFTLGQLKELLGRTGTLVEEAFWIDKIKSHCFVTYSTVEEAVATRTALHGVKWPQSNPKFLCADYAEQDELDYHRGLLVDRPSETKTEEQGIPRPLHPPPPPPVQPPQHPRAEQREQERAVREQWAEREREMERRERTRSEREWDRDKVREGPRSRSRSRDRRRKERAKSKEKKSEKKEKAQEEPPAKLLDDLFRKTKAAPCIYWLPLTDSQIVQKEAERAERAKEREKRRKEQEEEEQKEREKEAERERNRQLEREKRREHSRERDRERERERERDRGDRDRDRERDRERGRERDRRDTKRHSRSRSRSTPVRDRGGRR

SEQ ID NO: 851808 - protein, 2633 aa, Homo sapiens
MWRRKHPRTSGGTRGVLSGNRGVEYGSGRGHLGTFEGRWRKLPKMPEAVGTDPSTSRKMAELEEVTLDGKPLQALRVTDLKAALEQRGLAKSGQKSALVKRLKGALMLENLQKHSTPHAAFQPNSQIGEEMSQNSFIKQYLEKQQELLRQRLEREAREAAELEEASAESEDEMIHPEGVASLLPPDFQSSLERPELELSRHSPRKSSSISEEKGDSDDEKPRKGERRSSRVRQARAAKLSEGSQPAEEEEDQETPSRNLRVRADRNLKTEEEEEEEEEEEEDDEEEEGDDEGQKSREAPILKEFKEEGEEIPRVKPEEMMDERPKTRSQEQEVLERGGRFTRSQEEARKSHLARQQQEKEMKTTSPLEEEEREIKSSQGLKEKSKSPSPPRLTEDRKKASLVALPEQTASEEETPPPLLTKEASSPPPHPQLHSEEEIEPMEGPAPPVLIQLSPPNTDADTRELLVSQHTVQLVGGLSPLSSPSDTKAESPAEKVPEESVLPLVQKSTLADYSAQKDLEPESDRSAQPLPLKIEELALAKGITEECLKQPSLEQKEGRRASHTLLPSHRLKQSADSSSSRSSSSSSSSSRSRSRSPDSSGSRSHSPLRSKQRDVAQARTHANPRGRPKMGSRSTSESRSRSRSRSRSASSNSRKSLSPGVSRDSSTSYTETKDPSSGQEVATPPVPQLQVCEPKERTSTSSSSVQARRLSQPESAEKHVTQRLQPERGSPKKCEAEEAEPPAATQPQTSETQTSHLPESERIHHTVEEKEEVTMDTSENRPENDVPEPPMPIADQVSNDDRPEGSVEDEEKKEVNIQATYWGGWAGMDLGERVEHSSDPSYTVGELKGGMRQGLGSERAKGEFAGLARETPCDGDRAHSFSFPCWGSSAQTLDVCNYTGKSDNGPLSKIYVQLFLLSSQASPGGNSFSFPSFLKADGAQRHLVDIGGSHQTSHAEKFLFLLCPPVVWLQRCSYLEASTCDPEGPFSVTCDPSTSFFGICYLVSCTHFRGLPPSEPAKSSWLLKKLRKNELGLGEGEQGGRDCCVCSLFLVCVAGVGAGESDLMLQNIIYYKVLLPRKTLSKYLMYGNPPVKYNPAQLANRWCRLFLWTHPLLLSCPIRAKSAIQVSWPEGGMYMGSCDGPPFASLSCLHQGAKKNTVLERLVLSKQKTFGKGWTCIISLLGTPQEELVPVLGRLPTCPCPFEDCGLPCLLQTVGIPIYGHQDLLKFVIAVPCCKTLSGTLYLSCDDYGTVQRSLGSEPLGIYADDSPAHVSPLAHQMDFPLVPVVHGEGQHVGCSNFSSIPGGRDSFHPPDWNHCLSWSSLRRCQPQLSEEKYSDLAAECLPGPGVFTYPQATFIRGSMIPLGERTPSPVTGRGERDSGVITWIPSIGWCYCCSLPLVDIGSCLPLTIKGKDHSCYSQPSHQGLQDDVPSGPGLMSLPLSPLYPSLSLATASELSVTSWKLGSVPPHVSLPPPLRPWEDSGSAVLTTTPCAHLFCQPNPPPIAQRLAGRAHSDLDRRLTRYSPHSEVRLAELKIPGVDGTWNICHIPSLFSSLFSSSFFNILFYFFSISLFFLISFIYLFGHVFPVLIKTFFFVLFFSLTYPSRAAQLGVRLALNRDQGDLVRRHKRGCGWGWMGKGFHHEVSALPFRRVESGLSFSRNKHLHLKILYSLFLSHFSPPPPIVFRHSPTECLGYRLVPKMSSGLWQSPYGLSPGWRGNSKTLLELPAVAGKSKDLLGDNLPFIKTFLYQRTFEFFLLALAQEPHLQWVWCCPFPQCGGGLGSLDMTVCCPSISKPLSVGISLAIEERRVTLLKLPSKVGFPCFLELARKDLGGLDDPVWGTVCLAWCPLDSDGERGGMTNIFEGAERLLNSSSSLFLVKLIHRCDTEYMTFPCSDDLVLFFSLTCIDVCFVFAVCRFCFGLCLSLCLSLSLSLTLSVSLEAKLRLPHLTSFPPLCGVSLFLFFFPFFFFIQSSLPKSFKRKISVVSATKGVPAGNSDTEGGQPGRKRRWGASTATTQKKPSISITTESLKSLIPDIKPLAGQEAVVDLHADDSRISEDETERNGDDGTHDKGLKICRTVTQVVPAEGQENGQREEEEEEKEPEAEPPVPPQVSVEVALPPPAEHEVKKVTLGDTLTRRSISQQKSGVSITIDDPVRTAQVPSPPRGKISNIVHISNLVSHCFSPSQLAEWLSLSFRLMPPRFHSELNWSTNRLSYSLILSELLNIFTHLKMRGKSCCPAGLFRGLAEGLTYNVSISAGKHHQLFSHSYCKVPKLSALPQTLKLYSCDSSSGNLKIGWWSCLLLDLKVYFHWQVRPFTLGQLKELLGRTGTLVEEAFWIDKIKSHCFVTYSTVEEAVATRTALHGVKWPQSNPKFLCADYAEQDELDYHRGLLVDRPSETKTEEQGIPRPLHPPPPPPVQPPQHPRAEQREQERAVREQWAEREREMERRERTRSEREWDRDKVREGPRSRSRSRDRRRKERAKSKEKKSEKKEKAQEEPPAKLLDDLFRKTKAAPCIYWLPLTDSQIVQKEAERAERAKEREKRRKEQEEEEQKEREKEAERERNRQLEREKRREHSRERDRERERERERDRGDRDRDRERDRERGRERDRRDTKRHSRSRSRSTPVRDRGGRR

SEQ ID NO: 851809 - protein, 2619 aa, Homo sapiens
MWRRKHPRTSGGTRGVLSGNRGVEYGSGRGHLGTFEGRWRKLPKMPEAVGTDPSTSRKMAELEEVTLDGKPLQALRVTDLKAALEQRGLAKSGQKSALVKRLKGALMLENLQKHSTPHAAFQPNSQIGEEMSQNSFIKQYLEKQQELLRQRLEREAREAAELEEASAESEDEMIHPEGVASLLPPDFQSSLERPELELSRHSPRKSSSISEEKGDSDDEKPRKGERRSSRVRQARAAKLSEGSQPAEEEEDQETPSRNLRVRADRNLKTEEEEEEEEEEEEDDEEEEGDDEGQKSREAPILKEFKEEGEEIPRVKPEEMMDERPKTRSQEQEVLERGGRFTRSQEEARKSHLARQQQEKEMKTTSPLEEEEREIKSSQGLKEKSKSPSPPRLTEDRKKASLVALPEQTASEEETPPPLLTKEASSPPPHPQLHSEEEIEPMEGPAPPVLIQLSPPNTDADTRELLVSQHTVQLVGGLSPLSSPSDTKAESPAEKVPEESVLPLVQKSTLADYSAQKDLEPESDRSAQPLPLKIEELALAKGITEECLKQPSLEQKEGRRASHTLLPSHRLKQSADSSSSRSSSSSSSSSRSRSRSPDSSGSRSHSPLRSKQRDVAQARTHANPRGRPKMGSRSTSESRSRSRSRSRSASSNSRKSLSPGVSRDSSTSYTETKDPSSGQEVATPPVPQLQVCEPKERTSTSSSSVQARRLSQPESAEKHVTQRLQPERGSPKKCEAEEAEPPAATQPQTSETQTSHLPESERIHHTVEEKEEVTMDTSENRPENDVPEPPMPIADQVSNDDRPEGSVEDEEKKEVNIQATYWGGWAGMDLGERVEHSSDPSYTVGELKGGMRQGLGSERAKGEFAGLARETPCDGDRAHSFSFPCWGSSAQTLDVCNYTGKSDNGPLSKIYVQLFLLSSQASPGGNSFSFPSFLKADGAQRHLVDIGGSHQTSHAEKFLFLLCPPVVWLQRCSYLEASTCDPEGPFSVTCDPSTSFFGICYLVSCTHFRGLPPSEPAKSSWLLKKLRKNELGLGEGEQGGRDCCVCSLFLVCVAGVGAGESDLMLQNIIYYKVLLPRKTLSKYLMYGNPPVKYNPAQLANRWCRLFLWTHPLLLSCPIRAKSAIQVSWPEGGMYMGSCDGPPFASLSCLHQGAKKNTVLERLVLSKQKTFGKGWTCIISLLGTPQEELVPVLGRLPTCPCPFEDCGLPCLLQTVGIPIYGHQDLLKFVIAVPCCKTLSGTLYLSCDDYGTVQRSLGSEPLGIYADDSPAHVSPLAHQMDFPLVPVVHGEGQHVGCSNFSSIPGGRDSFHPPDWNHCLSWSSLRRCQPQLSEEKYSDLAAECLPGPGVFTYPQATFIRGSMIPLGERTPSPVTGRGERDSGVITWIPSIGWCYCCSLPLVDIGSCLPLTIKGKDHSCYSQPSHQGLQDDVPSGPGLMSLPLSPLYPSLSLATASELSVTSWKLGSVPPHVSLPPPLRPWEDSGSAVLTTTPCAHLFCQPNPPPIAQRLAGRAHSDLDRRLTRYSPHSEVRLAELKIPGVDGTWNICHIPSLFSSLFSSSFFNILFYFFSISLFFLISFIYLFGHVFPVLIKTFFFVLFFSLTYPSRAAQLGVRLALNRDQGDLVRRHKRGCGWGWMGKGFHHEVSALPFRRVESGLSFSRNKHLHLKILYSLFLSHFSPPPPIVFRHSPTECLGYRLVPKMSSGLWQSPYGLSPGWRGNSKTLLELPAVAGKSKDLLGDNLPFIKTFLYQRTFEFFLLALAQEPHLQWVWCCPFPQCGGGLGSLDMTVCCPSISKPLSVGISLAIEERRVTLLKLPSKVGFPCFLELARKDLGGLDDPVWGTVCLAWCPLDSDGERGGMTNIFEGAERLLNSSSSLFLVKLIHRCDTEYMTFPCSDDLVLFFSLTCIDVCFVFAVCRFCFGLCLSLCLSLSLSLTLSVSLEAKLRLPHLTSFPPLCGVSLFLFFFPFFFFIQSSLPKSFKRKISVVSATKGVPAGNSDTEGGQPGRKRRWGASTATTQKKPSISITTESLKSLIPDIKPLAGQEAVVDLHADDSRISEDETERNGDDGTHDKGLKICRTVTQVVPAEGQENGQREEEEEEKEPEAEPPVPPQVSVEVALPPPAEHEVKKGEVTYCERNVMRLPEFSEHLIWIAESFECFLPFIIFFRISYLSPTYEVSYLRARFDSVESLNLHDEEVSLAQYFADYEVLCTFRLRSGCLVEKKGNRESYIEGEKSQYCFLPKAVLVVFLIVTLGDTLTRRSISQQKSGVSITIDDPVRTAQVPSPPRGKISNIVHISNLVRPFTLGQLKELLGRTGTLVEEAFWIDKIKSHCFVTYSTVEEAVATRTALHGVKWPQSNPKFLCADYAEQDELDYHRGLLVDRPSETKTEEQGIPRPLHPPPPPPVQPPQHPRAEQREQERAVREQWAEREREMERRERTRSEREWDRDKVREGPRSRSRSRDRRRKERAKSKEKKSEKKEKAQEEPPAKLLDDLFRKTKAAPCIYWLPLTDSQIVQKEAERAERAKEREKRRKEQEEEEQKEREKEAERERNRQLEREKRREHSRERDRERERERERDRGDRDRDRERDRERGRERDRRDTKRHSRSRSRSTPVRDRGGRR

SEQ ID NO: 851810 - protein, 583 aa, Homo sapiens; identical to SEQ ID NO: 851790

SEQ ID NO: 851811 - protein, 613 aa, Homo sapiens
PPLLQQGPPPSAHTGCWKGINSTSRGRKKIMLSESKEGEEKEEVTMDTSENRPENDVPEPPMPIADQVSNDDRPEGSVEDEEKKESSLPKSFKRKISVVSATKGVPAGNSDTEGGQPGRKRRWGASTATTQKKPSISITTESLKSLIPDIKPLAGQEAVVDLHADDSRISEDETERNGDDGTHDKGLKICRTVTQVVPAEGQENGQREEEEEEKEPEAEPPVPPQVSVEVALPPPAEHEVKKVTLGDTLTRRSISQQKSGVSITIDDPVRTAQVPSPPRGKISNIVHISNLVRPFTLGQLKELLGRTGTLVEEAFWIDKIKSHCFVTYSTVEEAVATRTALHGVKWPQSNPKFLCADYAEQDELDYHRGLLVDRPSETKTEEQGIPRPLHPPPPPPVQPPQHPRAEQREQERAVREQWAEREREMERRERTRSEREWDRDKVREGPRSRSRSRDRRRKERAKSKEKKSEKKEKAQEEPPAKLLDDLFRKTKAAPCIYWLPLTDSQIVQKEAERAERAKEREKRRKEQEEEEQKEREKEAERERNRQLEREKRREHSRERDRERERERERDRGDRDRDRERDRERGRERDRRDTKRHSRSRSRSTPVRDRGGRR

SEQ ID NO: 851812 - protein, 596 aa, Homo sapiens
LVLDRELELVLPESERIHHTVEEKEEVTMDTSENRPENDVPEPPMPIADQVSNDDRPEGSVEDEEKKESSLPKSFKRKISVVSATKGVPAGNSDTEGGQPGRKRRWGASTATTQKKPSISITTESLKSLIPDIKPLAGQEAVVDLHADDSRISEDETERNGDDGTHDKGLKICRTVTQVVPAEGQENGQREEEEEEKEPEAEPPVPPQVSVEVALPPPAEHEVKKVTLGDTLTRRSISQQKSGVSITIDDPVRTAQVPSPPRGKISNIVHISNLVRPFTLGQLKELLGRTGTLVEEAFWIDKIKSHCFVTYSTVEEAVATRTALHGVKWPQSNPKFLCADYAEQDELDYHRGLLVDRPSETKTEEQGIPRPLHPPPPPPVQPPQHPRAEQREQERAVREQWAEREREMERRERTRSEREWDRDKVREGPRSRSRSRDRRRKERAKSKEKKSEKKEKAQEEPPAKLLDDLFRKTKAAPCIYWLPLTDSQIVQKEAERAERAKEREKRRKEQEEEEQKEREKEAERERNRQLEREKRREHSRERDRERERERERDRGDRDRDRERDRERGRERDRRDTKRHSRSRSRSTPVRDRGGRR

SEQ ID NO: 851813 - protein, 537 aa, Homo sapiens
MSPADRCRSANTIEPATTSSLALFLLLQRDQSSRTRGLPVRTYRLSLKTSTATTQKKPSISITTESLKSLIPDIKPLAGQEAVVDLHADDSRISEDETERNGDDGTHDKGLKICRTVTQVVPAEGQENGQREEEEEEKEPEAEPPVPPQVSVEVALPPPAEHEVKKVTLGDTLTRRSISQQKSGVSITIDDPVRTAQVPSPPRGKISNIVHISNLVRPFTLGQLKELLGRTGTLVEEAFWIDKIKSHCFVTYSTVEEAVATRTALHGVKWPQSNPKFLCADYAEQDELDYHRGLLVDRPSETKTEEQGIPRPLHPPPPPPVQPPQHPRAEQREQERAVREQWAEREREMERRERTRSEREWDRDKVREGPRSRSRSRDRRRKERAKSKEKKSEKKEKAQEEPPAKLLDDLFRKTKAAPCIYWLPLTDSQIVQKEAERAERAKEREKRRKEQEEEEQKEREKEAERERNRQLEREKRREHSRERDRERERERERDRGDRDRDRERDRERGRERDRRDTKRHSRSRSRSTPVRDRGGRR

SEQ ID NO: 851814 - protein, 343 aa, Homo sapiens
PNNQLRTPSVRSDSYICMRITVRPFTLGQLKELLGRTGTLVEEAFWIDKIKSHCFVTYSTVEEAVATRTALHGVKWPQSNPKFLCADYAEQDELDYHRGLLVDRPSETKTEEQGIPRPLHPPPPPPVQPPQHPRAEQREQERAVREQWAEREREMERRERTRSEREWDRDKVREGPRSRSRSRDRRRKERAKSKEKKSEKKEKAQEEPPAKLLDDLFRKTKAAPCIYWLPLTDSQIVQKEAERAERAKEREKRRKEQEEEEQKEREKEAERERNRQLEREKRREHSRERDRERERERERDRGDRDRDRERDRERGRERDRRDTKRHSRSRSRSTPVRDRGGRR

SEQ ID NO: 851815 - protein, 189 aa, Homo sapiens; identical to SEQ ID NO: 851799

SEQ ID NO: 851816 - protein, 2498 aa, Homo sapiens; identical to SEQ ID NO: 851798

SEQ ID NO: 851817 - protein, 844 aa, Homo sapiens; identical to SEQ ID NO: 851793

SEQ ID NO: 851818 - protein, 765 aa, Homo sapiens
MWRRKHPRTSGGTRGVLSGNRGVEYGSGRGHLGTFEGRWRKLPKMPEAVGTDPSTSRKMAELEEVTLDGKPLQALRVTDLKAALEQRGLAKSGQKSALVKRLKGALMLENLQKHSTPHAAFQPNSQIGEEMSQNSFIKQYLEKQQELLRQRLEREAREAAELEEASAESEDEMIHPEGVASLLPPDFQSSLERPELELSRHSPRKSSSISEEKGDSDDEKPRKGERRSSRVRQARAAKLSEGSQPAEEEEDQETPSRNLRVRADRNLKTEEEEEEEEEEEEDDEEEEGDDEGQKSREAPILKEFKEEGEEIPRVKPEEMMDERPKTRSQEQEVLERGGRFTRSQEEARKSHLARQQQEKEMKTTSPLEEEEREIKSSQGLKEKSKSPSPPRLTEDRKKASLVALPEQTASEEETPPPLLTKEASSPPPHPQLHSEEEIEPMEGPAPPVLIQLSPPNTDADTRELLVSQHTVQLVGGLSPLSSPSDTKAESPAEKVPEESVLPLVQKSTLADYSAQKDLEPESDRSAQPLPLKIEELALAKGITEECLKQPSLEQKEGRRASHTLLPSHRLKQSADSSSSRSSSSSSSSSRSRSRSPDSSGSRSHSPLRSKQRDVAQARTHANPRGRPKMGSRSTSESRSRSRSRSRSASSNSRKSLSPGVSRDSSTSYTETKDPSSGQEVATPPVPQLQVCEPKERTSTSSSSVQARRLSQPESAEKHVTQRLQPERGSPKKCEAEEAEPPAATQPQTSETQTLDSSARFLVVTA

SEQ ID NO: 851819 - protein, 391 aa, Homo sapiens
LSCIMVRSVAWAGFMVLLMIPWGSAAKLVCYFTNWAQYRQGEARFLPKDLDPSLCTHLIYAFAGMTNHQLSTTEWNDETLYQEFNGLKKMNPKLKTLLAIGGWNFGTQKFTDMVATANNRQTFVNSAIRFLRKYSFDGLDLDWEYPGSQGSPAVDKERFTTLVQDLANAFQQEAQTSGKERLLLSAAVPAGQTYVDAGYEVDKIAQNLDFVNLMAYDFHGSWEKVTGHNSPLYKRQEESGAAASLNVDAAVQQWLQKGTPASKLILGMPTYGRSFTLASSSDTRVGAPATGSGTPGPFTKEGGMLAYYEVCSWKGATKQRIQDQKVPYIFRDNQWVGFDDVESFKTKVSYLKQKGLGGAMVWALDLDDFAGFSCNQGRYPLIQTLRQELNG

SEQ ID NO: 851820 - protein, 451 aa, Homo sapiens
LSCIMVRSVAWAGFMVLLMIPWGSAAKLVCYFTNWAQYRQGEARFLPKDLDPSLCTHLIYAFAGMTNHQLSTTEWNDETLYQEFNGLKKMFTDMVATANNRQTFVNSAIRFLRKYSFDGLDLDWEYPGSQGSPAVDKERFTTLVQDLANAFQQEAQTSGKERLLLSAAVPAGQTYVDAGYEVDKIAQNLDFVNLMAYDFHGSWEKVTGHNSPLYKRQEESGAAASLNVDAAVQQWLQKGTPASKLILGMPTYGRSFTLASSSDTRVGAPATGSGTPGPFTKEGGMLAYYEVCSWKGATKQRIQDQKVPYIFRDNQWVGFDDVESFKTKVSYLKQKGLGGAMVWALDLDDFAGFSCNQGRYPLIQTLRQELSLPYLPSGTPELEVPKPGQPSEPEHGPSPGQDTFCQGKADGLYPNPRERSSFYSCAAGRLFQQSCPTGLVFSNSCKCCTWN

SEQ ID NO: 851821 - protein, 470 aa, Homo sapiens
LSCIMVRSVAWAGFMVLLMIPWGSAAKLVCYFTNWAQYRQGEARFLPKDLDPSLCTHLIYAFAGMTNHQLSTTEWNDETLYQEFNGLKKMNPKLKTLLAIGGWNFGTQKFTDMVATANNRQTFVNSAIRFLRKYSFDGLDLDWEYPGSQGSPAVDKERFTTLVQDLANAFQQEAQTSGKERLLLSAAVPAGQTYVDAGYEVDKIAQNLDFVNLMAYDFHGSWEKVTGHNSPLYKRQEESGAAASLNVDAAVQQWLQKGTPASKLILGMPTYGRSFTLASSSDTRVGAPATGSGTPGPFTKEGGMLAYYEVCSWKGATKQRIQDQKVPYIFRDNQWVGFDDVESFKTKVSYLKQKGLGGAMVWALDLDDFAGFSCNQGRYPLIQTLRQELSLPYLPSGTPELEVPKPGQPSEPEHGPSPGQDTFCQGKADGLYPNPRERSSFYSCAAGRLFQQSCPTGLVFSNSCKCCTWN

SEQ ID NO: 851822 - protein, 99 aa, Homo sapiens
RLPAQGCLQNLQPLTGLRLLEQKGPCPEEVARLWGGRVRLPRAPPLHPLPAQVSYLKQKGLGGAMVWALDLDDFAGFSCNQGRYPLIQTLRQELSAEIT

SEQ ID NO: 851823 - protein, 446 aa, Homo sapiens
LSCIMVRSVAWAGFMVLLMIPWGSAAKLVCYFTNWAQYRQGEARFLPKDLDPSLCTHLIYAFAGMTNHQLSTTEWNDETLYQEFNGLKKMNPKLKTLLAIGGWNFGTQKFTDMVATANNRQTFVNSAIRFLRKYSFDGLDLDWEYPGSQGSPAVDKERFTTLVQDLANAFQQEAQTSGKERLLLSAAVPAGQTYVDAGYEVDKIAQNLDFVNLMAYDFHGSWEKVTGHNSPLYKRQEESGAAASLNVDAAVQQWLQKGTPASKLILGMPTYGRSFTLASSSDTRVGAPATGSGTPGPFTKEGGMLAYYEVCSWKGATKQRIQDQKVPYIFRDNQWVGFDDVESFKTKVSYLKQKGLGGAMVWALDLDDFAGFSCNQGRYPLIQTLRQELSWSAEARSQLTAALTSWAQLILPPQPPRCRNHLEDFQTEVLFHDKSTTLPSPSIEYH

SEQ ID NO: 851824 - protein, 1403 aa, Homo sapiens
MATQQKASDERISQFDHNLLPELSALLGLDAVQLAKELEEEEQKERAKMQKGYNSQMRSEAKRLKTFVTYEPYSSWIPQEMAAAGFYFTGVKSGIQCFCCSLILFGAGLTRLPIEDHKRFHPDCGFLLNKDVGNIAKYDIRVKNLKSRLRGGKMRYQEEEARLASFRNWPFYVQGISPCVLSEAGFVFTGKQDTVQCFSCGGCLGNWEEGDDPWKEHAKWFPKCEFLRSKKSSEEITQYIQSYKGFVDITGEHFVNSWVQRELPMASAYCNDSIFAYEELRLDSFKDWPRESAVGVAALAKAGLFYTGIKDIVQCFSCGGCLEKWQEGDDPLDDHTRCFPNCPFLQNMKSSAEVTPDLQSRGELCELLETTSESNLEDSIAVGPIVPEMAQGEAQWFQEAKNLNEQLRAAYTSASFRHMSLLDISSDLATDHLLGCDLSIASKHISKPVQEPLVLPEVFGNLNSVMCVEGEAGSGKTVLLKKIAFLWASGCCPLLNRFQLVFYLSLSSTRPDEGLASIICDQLLEKEGSVTEMCMRNIIQQLKNQVLFLLDDYKEICSIPQVIGKLIQKNHLSRTCLLIAVRTNRARDIRRYLETILEIKAFPFYNTVCILRKLFSHNMTRLRKFMVYFGKNQSLQKIQKTPLFVAAICAHWFQYPFDPSFDDVAVFKSYMERLSLRNKATAEILKATVSSCGELALKGFFSCCFEFNDDDLAEAGVDEDEDLTMCLMSKFTAQRLRPFYRFLSPAFQEFLAGMRLIELLDSDRQEHQDLGLYHLKQINSPMMTVSAYNNFLNYVSSLPSTKAGPKIVSHLLHLVDNKESLENISENDDYLKHQPEISLQMQLLRGLWQICPQAYFSMVSEHLLVLALKTAYQSNTVAACSPFVLQFLQGRTLTLGALNLQYFFDHPESLSLLRSIHFPIRGNKTSPRAHFSVLETCFDKSQVPTIDQDYASAFEPMNEWERNLAEKEDNVKSYMDMQRRASPDLSTGYWKLSPKQYKIPCLEVDVNDIDVVGQDMLEILMTVFSASQRIELHLNHSRGFIESIRPALELSKASVTKCSISKLELSAAEQELLLTLPSLESLEVSGTIQSQDQIFPNLDKFLCLKELSVDLEGNINVFSVIPEEFPNFHHMEKLLIQISAEYDPSKLVKLIQNSPNLHVFHLKCNFFSDFGSLMTMLVSCKKLTEIKFSDSFFQAVPFVASLPNFISLKILNLEGQQFPDEETSEKFAYILGSLSNLEELILPTGDGIYRVAKLIIQQCQQLHCLRVLSFFKTLNDDSVVEIAKVAISGGFQKLENLKLSINHKITEEGYRNFFQALDNMPNLQELDISRHFTECIKAQATTVKSLSQCVLRLPRLIRLNMLSWLLDADDIALLNVMKERHPQSKYLTILQKWILPFSPIIQK

SEQ ID NO: 851825 - protein, 1207 aa, Homo sapiens
PPGKKLCPGFEISEGAPAFFFPLKPGHKNKTFPPKKKKKKKSQIINNLNFNFPQGEHFVNSWVQRELPMASAYCNDSIFAYEELRLDSFKDWPRESAVGVAALAKAGLFYTGIKDIVQCFSCGGCLEKWQEGDDPLDDHTRCFPNCPFLQNMKSSAEVTPDLQSRGELCELLETTSESNLEDSIAVGPIVPEMAQGEAQWFQEAKNLNEQLRAAYTSASFRHMSLLDISSDLATDHLLGCDLSIASKHISKPVQEPLVLPEVFGNLNSVMCVEGEAGSGKTVLLKKIAFLWASGCCPLLNRFQLVFYLSLSSTRPDEGLASIICDQLLEKEGSVTEMCMRNIIQQLKNQVLFLLDDYKEICSIPQVIGKLIQKNHLSRTCLLIAVRTNRARDIRRYLETILEIKAFPFYNTVCILRKLFSHNMTRLRKFMVYFGKNQSLQKIQKTPLFVAAICAHWFQYPFDPSFDDVAVFKSYMERLSLRNKATAEILKATVSSCGELALKGFFSCCFEFNDDDLAEAGVDEDEDLTMCLMSKFTAQRLRPFYRFLSPAFQEFLAGMRLIELLDSDRQEHQDLGLYHLKQINSPMMTVSAYNNFLNYVSSLPSTKAGPKIVSHLLHLVDNKESLENISENDDYLKHQPEISLQMQLLRGLWQICPQAYFSMVSEHLLVLALKTAYQSNTVAACSPFVLQFLQGRTLTLGALNLQYFFDHPESLSLLRSIHFPIRGNKTSPRAHFSVLETCFDKSQVPTIDQDYASAFEPMNEWERNLAEKEDNVKSYMDMQRRASPDLSTGYWKLSPKQYKIPCLEVDVNDIDVVGQDMLEILMTVFSASQRIELHLNHSRGFIESIRPALELSKASVTKCSISKLELSAAEQELLLTLPSLESLEVSGTIQSQDQIFPNLDKFLCLKELSVDLEGNINVFSVIPEEFPNFHHMEKLLIQISAEYDPSKLVKLIQNSPNLHVFHLKCNFFSDFGSLMTMLVSCKKLTEIKFSDSFFQAVPFVASLPNFISLKILNLEGQQFPDEETSEKFAYILGSLSNLEELILPTGDGIYRVAKLIIQQCQQLHCLRVLSFFKTLNDDSVVEIAKVAISGGFQKLENLKLSINHKITEEGYRNFFQALDNMPNLQELDISRHFTECIKAQATTVKSLSQCVLRLPRLIRLNMLSWLLDADDIALLNVMKERHPQSKYLTILQKWILPFSPIIQK

SEQ ID NO: 851826 - protein, 1191 aa, Homo sapiens
ENLPLHFSLGNRVRLCLKKKKKKKKSQIINNLNFNFPQGEHFVNSWVQRELPMASAYCNDSIFAYEELRLDSFKDWPRESAVGVAALAKAGLFYTGIKDIVQCFSCGGCLEKWQEGDDPLDDHTRCFPNCPFLQNMKSSAEVTPDLQSRGELCELLETTSESNLEDSIAVGPIVPEMAQGEAQWFQEAKNLNEQLRAAYTSASFRHMSLLDISSDLATDHLLGCDLSIASKHISKPVQEPLVLPEVFGNLNSVMCVEGEAGSGKTVLLKKIAFLWASGCCPLLNRFQLVFYLSLSSTRPDEGLASIICDQLLEKEGSVTEMCMRNIIQQLKNQVLFLLDDYKEICSIPQVIGKLIQKNHLSRTCLLIAVRTNRARDIRRYLETILEIKAFPFYNTVCILRKLFSHNMTRLRKFMVYFGKNQSLQKIQKTPLFVAAICAHWFQYPFDPSFDDVAVFKSYMERLSLRNKATAEILKATVSSCGELALKGFFSCCFEFNDDDLAEAGVDEDEDLTMCLMSKFTAQRLRPFYRFLSPAFQEFLAGMRLIELLDSDRQEHQDLGLYHLKQINSPMMTVSAYNNFLNYVSSLPSTKAGPKIVSHLLHLVDNKESLENISENDDYLKHQPEISLQMQLLRGLWQICPQAYFSMVSEHLLVLALKTAYQSNTVAACSPFVLQFLQGRTLTLGALNLQYFFDHPESLSLLRSIHFPIRGNKTSPRAHFSVLETCFDKSQVPTIDQDYASAFEPMNEWERNLAEKEDNVKSYMDMQRRASPDLSTGYWKLSPKQYKIPCLEVDVNDIDVVGQDMLEILMTVFSASQRIELHLNHSRGFIESIRPALELSKASVTKCSISKLELSAAEQELLLTLPSLESLEVSGTIQSQDQIFPNLDKFLCLKELSVDLEGNINVFSVIPEEFPNFHHMEKLLIQISAEYDPSKLVKLIQNSPNLHVFHLKCNFFSDFGSLMTMLVSCKKLTEIKFSDSFFQAVPFVASLPNFISLKILNLEGQQFPDEETSEKFAYILGSLSNLEELILPTGDGIYRVAKLIIQQCQQLHCLRVLSFFKTLNDDSVVEIAKVAISGGFQKLENLKLSINHKITEEGYRNFFQALDNMPNLQELDISRHFTECIKAQATTVKSLSQCVLRLPRLIRLNMLSWLLDADDIALLNVMKERHPQSKYLTILQKWILPFSPIIQK

SEQ ID NO: 851827 - protein, 1077 aa, Homo sapiens
MASAYCNDSIFAYEELRLDSFKDWPRESAVGVAALAKAGLFYTGIKDIVQCFSCGGCLEKWQEGDDPLDDHTRCFPNCPFLQNMKSSAEVTPDLQSRGELCELLETTSESNLEDSIAVGPIVPEMAQGEAQWFQEAKNLNEQLRAAYTSASFRHMSLLDISSDLATDHLLGCDLSIASKHISKPVQEPLVLPEVFGNLNSVMCVEGEAGSGKTVLLKKIAFLWASGCCPLLNRFQLVFYLSLSSTRPDEGLASIICDQLLEKEGSVTEMCMRNIIQQLKNQVLFLLDDYKEICSIPQVIGKLIQKNHLSRTCLLIAVRTNRARDIRRYLETILEIKAFPFYNTVCILRKLFSHNMTRLRKFMVYFGKNQSLQKIQKTPLFVAAICAHWFQYPFDPSFDDVAVFKSYMERLSLRNKATAEILKATVSSCGELALKGFFSCCFEFNDDDLAEAGVDEDEDLTMCLMSKFTAQRLRPFYRFLSPAFQEFLAGMRLIELLDSDRQEHQDLGLYHLKQINSPMMTVSAYNNFLNYVSSLPSTKAGPKIVSHLLHLVDNKESLENISENDDYLKHQPEISLQMQLLRGLWQICPQAYFSMVSEHLLVLALKTAYQSNTVAACSPFVLQFLQGRTLTLGALNLQYFFDHPESLSLLRSIHFPIRGNKTSPRAHFSVLETCFDKSQVPTIDQDYASAFEPMNEWERNLAEKEDNVKSYMDMQRRASPDLSTGYWKLSPKQYKIPCLEVDVNDIDVVGQDMLEILMTVFSASQRIELHLNHSRGFIESIRPALELSKASVTKCSISKLELSAAEQELLLTLPSLESLEVSGTIQSQDQIFPNLDKFLCLKELSVDLEGNINVFSVIPEEFPNFHHMEKLLIQISAEYDPSKLVKLIQNSPNLHVFHLKCNFFSDFGSLMTMLVSCKKLTEIKFSDSFFQAVPFVASLPNFISLKILNLEGQQFPDEETSEKFAYILGSLSNLEELILPTGDGIYRVAKLIIQQCQQLHCLRVLSFFKTLNDDSVVEIAFNQSQDYRGRIQKFLSSTGQHAKLAGVGHLQAFHRVYQSSGHNSQVFESMCVTTTKAH

SEQ ID NO: 851828 - protein, 273 aa, Homo sapiens
MEKLLIQISAEYDPSKLVKLIQNSPNLHVFHLKCNFFSDFGSLMTMLVSCKKLTEIKFSDSFFQAVPFVASLPNFISLKILNLEGQQFPDEETSEKFAYILGSLSNLEELILPTGDGIYRVAKLIIQQCQQLHCLRVLSFFKTLNDDSVVEIAKVAISGGFQKLENLKLSINHKITEEGYRNFFQALDNMPNLQELDISRHFTECIKAQATTVKSLSQCVLRLPRLIRLNMLSWLLDADDIALLNVMKERHPQSKYLTILQKWILPFSPIIQK

SEQ ID NO: 851829 - protein, 228 aa, Homo sapiens [sequence omitted]

SEQ ID NO: 851830 - protein, 840 aa, Homo sapiens
MASAYCNDSIFAYEELRLDSFKDWPRESAVGVAALAKAGLFYTGIKDIVQCFSCGGCLEKWQEGDDPLDDHTRCFPNCPFLQNMKSSAEVTPDLQSRGELCELLETTSESNLEDSIAVGPIVPEMAQGEAQWFQEAKNLNEQLRAAYTSASFRHMSLLDISSDLATDHLLGCDLSIASKHISKPVQEPLVLPEVFGNLNSVMCVEGEAGSGKTVLLKKIAFLWASGCCPLLNRFQLVFYLSLSSTRPDEGLASIICDQLLEKEGSVTEMCMRNIIQQLKNQVLFLLDDYKEICSIPQVIGKLIQKNHLSRTCLLIAVRTNRARDIRRYLETILEIKAFPFYNTVCILRKLFSHNMTRLRKFMVYFGKNQSLQKIQKTPLFVAAICAHWFQYPFDPSFDDVAVFKSYMERLSLRNKATAEILKATVSSCGELALKGFFSCCFEFNDDDLAEAGVDEDEDLTMCLMSKFTAQRLRPFYRFLSPAFQEFLAGMRLIELLDSDRQEHQDLGLYHLKQINSPMMTVSAYNNFLNYVSSLPSTKAGPKIVSHLLHLVDNKESLENISENDDYLKHQPEISLQMQLLRGLWQICPQAYFSMVSEHLLVLALKTAYQSNTVAACSPFVLQFLQGRTLTLGALNLQYFFDHPESLSLLRSIHFPIRGNKTSPRAHFSVLETCFDKSQVPTIDQDYASAFEPMNEWERNLAEKEDNVKSYMDMQRRASPDLSTGYWKLSPKQYKIPCLEVDVNDIDVVGQDMLEILMTVFSASQRIELHLNHSRGFIESIRPALELSKASVTKCSISKLELSAAEQELLLTLPSLESLEVSGTIQSQGIPVYILDDYSDV

SEQ ID NO: 851831 - protein, 268 aa, Homo sapiens
MATQQKASDERISQFDHNLLPELSALLGLDAVQLAKELEEEEQKERAKMQKGYNSQMRSEAKRLKTFVTYEPYSSWIPQEMAAAGFYFTGVKSGIQCFCCSLILFGAGLTRLPIEDHKRFHPDCGFLLNKDVGNIAKYDIRVKNLKSRLRGGKMRYQEEEARLASFRNWPFYVQGISPCVLSEAGFVFTGKQDTVQCFSCGGCLGNWEEGDDPWKEHAKWFPKCEFLRSKKSSEEITQYIQSYKGFVDITGWLLTGSACLPDSLPLYE

SEQ ID NO: 851832 - protein, 243 aa, Homo sapiens
MPLHIGDFVWDSKVHSLQSSLNIFSLLPTKGRTEHLFFSHILSFHWPAFSSIRLELWINLRCEFLRSKKSSEEITQYIQSYKGFVDITGEHFVNSWVQRELPMASAYCNDSIFAYEELRLDSFKDWPRESAVGVAALAKAGLFYTGIKDIVQCFSCGGCLEKWQEGDDPLDDHTRCFPKRSLALSPRLECSGMISAHCRLCLPGSSNSSCLSIPSSWDYRHAPLCLANFCIFNRDGVLPRWPG

SEQ ID NO: 851833 - protein, 1139 aa, Homo sapiens
MASAYCNDSIFAYEELRLDSFKDWPRESAVGVAALAKAGLFYTGIKDIVQCFSCGGCLEKWQEGDDPLDDHTRCFPNCPFLQNMKSSAEVTPDLQSRGELCELLETTSESNLEDSIAVGPIVPEMAQGEAQWFQEAKNLNEQLRAAYTSASFRHMSLLDISSDLATDHLLGCDLSIASKHISKPVQEPLVLPEVFGNLNSVMCVEGEAGSGKTVLLKKIAFLWASGCCPLLNRFQLVFYLSLSSTRPDEGLASIICDQLLEKEGSVTEMCMRNIIQQLKNQVLFLLDDYKEICSIPQVIGKLIQKNHLSRTCLLIAVRTNRARDIRRYLETILEIKAFPFYNTVCILRKLFSHNMTRLRKFMVYFGKNQSLQKIQKTPLFVAAICAHWFQYPFDPSFDDVAVFKSYMERLSLRNKATAEILKATVSSCGELALKGFFSCCFEFNDDDLAEAGVDEDEDLTMCLMSKFTAQRLRPFYRFLSPAFQEFLAGMRLIELLDSDRQEHQDLGLYHLKQINSPMMTVSAYNNFLNYVSSLPSTKAGPKIVSHLLHLVDNKESLENISENDDYLKHQPEISLQMQLLRGLWQICPQAYFSMVSEHLLVLALKTAYQSNTVAACSPFVLQFLQGRTLTLGALNLQYFFDHPESLSLLRSIHFPIRGNKTSPRAHFSVLETCFDKSQVPTIDQDYASAFEPMNEWERNLAEKEDNVKSYMDMQRRASPDLSTGYWKLSPKQYKIPCLEVDVNDIDVVGQDMLEILMTVFSASQRIELHLNHSRGFIESIRPALELSKASVTKCSISKLELSAAEQELLLTLPSLESLEVSGTIQSQDQIFPNLDKFLCLKELSVDLEGNINVFSVIPEEFPNFHHMEKLLIQISAEYDPSKLVKLIQNSPNLHVFHLKCNFFSDFGSLMTMLVSCKKLTEIKFSDSFFQAVPFVASLPNFISLKILNLEGQQFPDEETSEKFAYILGSLSNLEELILPTGDGIYRVAKLIIQQCQQLHCLRVLSFFKTLNDDSVVEIAKVAISGGFQKLENLKLSINHKITEEGYRNFFQALDNMPNLQELDISRHFTECIKAQATTVKSLSQCVLRLPRLIRLNMLSWLLDADDIALLNVMKERHPQSKYLTILQKWILPFSPIIQK

SEQ ID NO: 851834 - protein, 1403 aa, Homo sapiens; identical to SEQ ID NO: 851824

SEQ ID NO: 851835 - protein, 1139 aa, Homo sapiens; identical to SEQ ID NO: 851833

SEQ ID NO: 851836 - protein, 67 aa, Homo sapiens
CMKTKGPVLTWDPSGRCPVYLFDCLFIYDEPRVLTPDNNATSYWGLRLGFQGAFIAKFLKYFLTASY

SEQ ID NO: 851837 - protein, 231 aa, Homo sapiens
MPLHIGDFVWDSKVHSLQSSLNIFSLLPTKGRTEHLFFSHILSFHWPAFSSIRLELWINLRCEFLRSKKSSEEITQYIQSYKGFVDITGEHFVNSWVQRELPMASAYCNDSIFAYEELRLDSFKDWPRESAVGVAALAKAGLFYTGIKDIVQCFSCGGCLEKWQEGDDPLDDHTRCFPKFSLLPRLECSGAIMAHCSLDLSGSSNLPRSASQVAGTTGTCLHTQLIFFFFF

SEQ ID NO: 851838 - protein, 78 aa, Homo sapiens
AWKHEWLERRNRRGPVVVKPIPVKGDGSEMNHLAAESPGEVQASAASPASKGRRSPSPGNSPKFTFTMKLYLLCDYDS

SEQ ID NO: 851839 - protein, 252 aa, Homo sapiens
QDVGTGTLMAVKQVTYVRNTSSEQEEVVEALREEIRMMSHLNHPNIIRMLGATCEKSNYNLFIEWMAGGSVAHLLSKYGAFKESVVINYTEQLLRGLSYLHENQIIHRDVKGANLLIDSTGQRLRIADFGAAARLASKGTGAGEFQGQLLGTIAFMAPEVLRGQQYGRSCDVWSVGCAIIEMACAKPPWNAEKHSNHLALIFKIASATTAPSIPSHLSPGLRDVALRCLELQPQDRPPSRELLKHPVFRTTW

SEQ ID NO: 851840 - protein, 1454 aa, Homo sapiens
MNKEVSPGVKFFNMSGLGDSSSDPANPDSHKRKGSPCDTLASSTEKRRREQENKYLEELAELLSANISDIDSLSVKPDKCKILKKTVDQIQLMKRMEQEKSTTDDDVQKSDISSSSQGVIEKESLGPLLLEALDGFFFVVNCEGRIVFVSENVTSYLGYNQEELMNTSVYSILHVGDHAEFVKNLLPKSLVNGVPWPQEATRRNSHTFNCRMLIHPPDEPGTENQEACQRYEVMQCFTVSQPKSIQEDGEDFQSCLICIARRLPRPPAITGVESFMTKQDTTGKIISIDTSSLRAAGRTGWEDLVRKCIYAFFQPQGREPSYARQLFQEVMTRGTASSPSYRFILNDGTMLSAHTKCKLCYPQSPDMQPFIMGIHIIDREHSGLSPQDDTNSGMSIPRVNPSVNPSISPAHGVARSSTLPPSNSNMVSTRINRQQSSDLHSSSHSNSSNSQGSFGCSPGSQIVANVALNQGQASSQSSNPSLNLNNSPMEGTGISLAQFMSPRRQVTSGLATRPRMPNNSFPPNISTLSSPVGMTSSACNNNNRSYSNIPVTSLQGMNEGPNNSVGFSASSPVLRQMSSQNSPSRLNIQPAKAESKDNKEIASILNEMIQSDNSSSDGKPLDSGLLHNNDRLSDGDSKYSQTSHKLVQLLTTTAEQQLRHADIDTSCKDVLSCTGTSNSASANSSGGSCPSSHSSLTERHKILHRLLQEGSPSDITTLSVEPDKKDSASTSVSVTGQVQGNSSIKLELDASKKKESKDHQLLRYLLDKDEKDLRSTPNLSLDDVKVKVEKKEQMDPCNTNPTPMTKPTPEEIKLEAQSQFTADLDQFDQLLPTLEKAAQLPGLCETDRMDGAVTSVTIKSEILPASLQSATARPTSRLNRLPELELEAIDNQFGQPGTGDQIPWTNNTVTAINQSKSEDQCISSQLDELLCPPTTVEGRNDEKALLEQLVSFLSGKDETELAELDRALGIDKLVQGGGLDVLSERFPPQQATPPLIMEERPNLYSQPYSSPSPTANLPSPFQGMVRQKPSLGTMPVQVTPPRGAFSPGMGMQPRQTLNRPPAAPNQLRLQLQQRLQGQQQLIHQNRQAILNQFAATAPVGINMRSGMQQQITPQPPLNAQMLAQRQRELYSQQHRQRQLIQQQRAMLMRQQSFGNNLPPSSGLPVQMGNPRLPQGAPQQFPYPPNYGTNPGTPPASTSPFSQLAANPEASLANRNSMVSRGMTGNIGGQFGTGINPQMQQNVFQYPGAGMVPQGEANFAPSLSPGSSMVPMPIPPPQSSLLQQTPPASGYQSPDMKAWQQGAIGNNNVFSQAVQNQPTPAQPGVYNNMSITVSMAGGNTNVQNMNPMMAQMQMSSLQMPGMNTVCPEQINDPALRHTGLYCNQLSSTDLLKTEADGTQQVQQVQVFADVQCTVNLVGGDPYLNQPGPLGTQKPTSGPQTPQAQQKSLLQQLLTE

SEQ ID NO: 851841 - protein, 1454 aa, Homo sapiens; identical to SEQ ID NO: 851840

SEQ ID NO: 851842 - protein, 1412 aa, Homo sapiens
MNKEVSPGVKFFNMSGLGDSSSDPANPDSHKRKGSPCDTLASSTEKRRREQENKYLEELAELLSANISDIDSLSVKPDKCKILKKTVDQIQLMKRMEQEKSTTDDDVQKSDISSSSQGVIEKESLGPLLLEALDGFFFVVNCEGRIVFVSENVTSYLGYNQEELMNTSVYSILHVGDHAEFVKNLLPKSLVNGVPWPQEATRRNSHTFNCRMLIHPPDEPGTENQEACQRYEVMQCFTVSQPKSIQEDGEDFQSCLICIARRLPRPPAITGVESFMTKQDTTGKIISIDTSSLRAAGRTGWEDLVRKCIYAFFQPQGREPSYARQLFQEVMTRGTASSPSYRFILNDGTMLSAHTKCKLCYPQSPDMQPFIMGIHIIDREHSGLSPQDDTNSGMSIPRVNPSVNPSISPAHGVARSSTLPPSNSNMVSTRINRQQSSDLHSSSHSNSSNSQGSFGCSPGSQIVANVALNQGQASSQSSNPSLNLNNSPMEGTGISLAQFMSPRRQVTSGLATRPRMPNNSFPPNISTLSSPVGMTSSACNNNNRSYSNIPVTSLQGMNEGPNNSVGFSASSPVLRQMSSQNSPSRLNIQPAKAESKDNKEIASILNEMIQSDNSSSDGKPLDSGLLHNNDRLSDGDSKYSQTSHKLVQLLTTTAEQQLRHADIDTSCKDVLSCTGTSNSASANSSGGSCPSSHSSLTERHKILHRLLQEGSPSDITTLSVEPDKKDSASTSVSVTGQVQGNSSIKLELDASKKKESKDHQLLRYLLDKDEKDLRSTPNLSLDDVKVKVEKKEQMDPCNTNPTPMTKPTPEEIKLEAQSQFTADLDQFDQLLPTLEKAAQLPGLCETDRMDGAVTSVTIKSEILPASLQSATARPTSRLNRLPELELEAIDNQFGQPGTGDQIPWTNNTVTAINQSKSEDQCISSQLDELLCPPTTVEGRNDEKALLEQLVSFLSGKDETELAELDRALGIDKLVQGGGLDVLSERFPPQQATPPLIMEERPNLYSQPYSSPSPTANLPSPFQGMVRQKPSLGTMPVQVTPPRGAFSPGMGMQPRQTLNRPPAAPNQLRLQLQQRLQGQQQLIHQNRQAILNQFAATAPVGINMRSGMQQQITPQPPLNAQMLAQRQRELYSQQHRQRQLIQQQRAMLMRQQSFGNNLPPSSGLPVQMGNPRLPQGAPQQFPYPPNYGTNPGTPPASTSPFSQLAANPEASLANRNSMVSRGMTGNIGGQFGTGINPQMQQNVFQYPGAGMVPQGEANFAPSLSPGSSMVPMPIPPPQSSLLQQTPPASGYQSPDMKAWQQGAIGNNNVFSQAVQNQPTPAQPGVYNNMSITVSMAGGNTNVQNMNPMMAQMQMSSLQMPGMNTVCPEQINDPALRHTGLYCNQLSSTDLLKTEADGTQDKKTEEFFSVVTTD

SEQ ID NO: 851843 - protein, 897 aa, Homo sapiens [sequence omitted]

SEQ ID NO: 851844 - protein, 610 aa, Homo sapiens
KPSLNLLKEIKLEAQSQFTADLDQFDQLLPTLEKAAQLPGLCETDRMDGAVTSVTIKSEILPASLQSATARPTSRLNRLPELELEAIDNQFGQPGTGDQIPWTNNTVTAINQSKSEDQCISSQLDELLCPPTTVEGRNDEKALLEQLVSFLSGKDETELAELDRALGIDKLVQGGGLDVLSERFPPQQATPPLIMEERPNLYSQPYSSPSPTANLPSPFQGMVRQKPSLGTMPVQVTPPRGAFSPGMGMQPRQTLNRPPAAPNQLRLQLQQRLQGQQQLIHQNRQAILNQFAATAPVGINMRSGMQQQITPQPPLNAQMLAQRQRELYSQQHRQRQLIQQQRAMLMRQQSFGNNLPPSSGLPVQMGNPRLPQGAPQQFPYPPNYGTNPGTPPASTSPFSQLAANPEASLANRNSMVSRGMTGNIGGQFGTGINPQMQQNVFQYPGAGMVPQGEANFAPSLSPGSSMVPMPIPPPQSSLLQQTPPASGYQSPDMKAWQQGAIGNNNVFSQAVQNQPTPAQPGVYNNMSITVSMAGGNTNVQNMNPMMAQMQMSSLQMPGMNTVCPEQINDPALRHTGLYCNQLSSTDLLKTEADGTQDKKTEEFFSVVTTD

SEQ ID NO: 851845 - protein, 1290 aa, Homo sapiens
MKRMEQEKSTTDDDVQKSDISSSSQGVIEKESLGPLLLEALDGFFFVVNCEGRIVFVSENVTSYLGYNQEELMNTSVYSILHVGDHAEFVKNLLPKSLVNGVPWPQEATRRNSHTFNCRMLIHPPDEPGTENQEACQRYEVMQCFTVSQPKSIQEDGEDFQSCLICIARRLPRPPAITGVESFMTKQDTTGKIISIDTSSLRAAGRTGWEDLVRKCIYAFFQPQGREPSYARQLFQEVMTRGTASSPSYRFILNDGTMLSAHTKCKLCYPQSPDMQPFIMGIHIIDREHSGLSPQDDTNSGMSIPRVNPSVNPSISPAHGVARSSTLPPSNSNMVSTRINRQQSSDLHSSSHSNSSNSQGSFGCSPGSQIVANVALNQGQASSQSSNPSLNLNNSPMEGTGISLAQFMSPRRQVTSGLATRPRMPNNSFPPNISTLSSPVGMTSSACNNNNRSYSNIPVTSLQGMNEGPNNSVGFSASSPVLRQMSSQNSPSRLNIQPAKAESKDNKEIASILNEMIQSDNSSSDGKPLDSGLLHNNDRLSDGDSKYSQTSHKLVQLLTTTAEQQLRHADIDTSCKDVLSCTGTSNSASANSSGGSCPSSHSSLTERHKILHRLLQEGSPSDITTLSVEPDKKDSASTSVSVTGQVQGNSSIKLELDASKKKESKDHQLLRYLLDKDEKDLRSTPNLSLDDVKVKVEKKEQMDPCNTNPTPMTKPTPEEIKLEAQSQFTADLDQFDQLLPTLEKAAQLPGLCETDRMDGAVTSVTIKSEILPASLQSATARPTSRLNRLPELELEAIDNQFGQPGTGDQIPWTNNTVTAINQSKSEDQCISSQLDELLCPPTTVEGRNDEKALLEQLVSFLSGKDETELAELDRALGIDKLVQGGGLDVLSERFPPQQATPPLIMEERPNLYSQPYSSPSPTANLPSPFQGMVRQKPSLGTMPVQVTPPRGAFSPGMGMQPRQTLNRPPAAPNQLRLQLQQRLQGQQQLIHQNRQAILNQFAATAPVGINMRSGMQQQITPQPPLNAQMLAQRQRELYSQQHRQRQLIQQQRAMLMRQQSFGNNLPPSSGLPVQMGNPRLPQGAPQQFPYPPNYGTNPGTPPASTSPFSQLAANPEASLANRNSMVSRGMTGNIGGQFGTGINPQMQQNVFQYPGAGMVPQGEANFAPSLSPGSSMVPMPIPPPQSSLLQQTPPASGYQSPDMKAWQQGAIGNNNVFSQAVQNQPTPAQPGVYNNMSITVSMAGGNTNVQNMNPMMAQMQMSSLQMPGMNTVCPEQDKKTEEFFSVVTTD

SEQ ID NO: 851846 - protein, 1332 aa, Homo sapiens
MKRMEQEKSTTDDDVQKSDISSSSQGVIEKESLGPLLLEALDGFFFVVNCEGRIVFVSENVTSYLGYNQEELMNTSVYSILHVGDHAEFVKNLLPKSLVNGVPWPQEATRRNSHTFNCRMLIHPPDEPGTENQEACQRYEVMQCFTVSQPKSIQEDGEDFQSCLICIARRLPRPPAITGVESFMTKQDTTGKIISIDTSSLRAAGRTGWEDLVRKCIYAFFQPQGREPSYARQLFQEVMTRGTASSPSYRFILNDGTMLSAHTKCKLCYPQSPDMQPFIMGIHIIDREHSGLSPQDDTNSGMSIPRVNPSVNPSISPAHGVARSSTLPPSNSNMVSTRINRQQSSDLHSSSHSNSSNSQGSFGCSPGSQIVANVALNQGQASSQSSNPSLNLNNSPMEGTGISLAQFMSPRRQVTSGLATRPRMPNNSFPPNISTLSSPVGMTSSACNNNNRSYSNIPVTSLQGMNEGPNNSVGFSASSPVLRQMSSQNSPSRLNIQPAKAESKDNKEIASILNEMIQSDNSSSDGKPLDSGLLHNNDRLSDGDSKYSQTSHKLVQLLTTTAEQQLRHADIDTSCKDVLSCTGTSNSASANSSGGSCPSSHSSLTERHKILHRLLQEGSPSDITTLSVEPDKKDSASTSVSVTGQVQGNSSIKLELDASKKKESKDHQLLRYLLDKDEKDLRSTPNLSLDDVKVKVEKKEQMDPCNTNPTPMTKPTPEEIKLEAQSQFTADLDQFDQLLPTLEKAAQLPGLCETDRMDGAVTSVTIKSEILPASLQSATARPTSRLNRLPELELEAIDNQFGQPGTGDQIPWTNNTVTAINQSKSEDQCISSQLDELLCPPTTVEGRNDEKALLEQLVSFLSGKDETELAELDRALGIDKLVQGGGLDVLSERFPPQQATPPLIMEERPNLYSQPYSSPSPTANLPSPFQGMVRQKPSLGTMPVQVTPPRGAFSPGMGMQPRQTLNRPPAAPNQLRLQLQQRLQGQQQLIHQNRQAILNQFAATAPVGINMRSGMQQQITPQPPLNAQMLAQRQRELYSQQHRQRQLIQQQRAMLMRQQSFGNNLPPSSGLPVQMGNPRLPQGAPQQFPYPPNYGTNPGTPPASTSPFSQLAANPEASLANRNSMVSRGMTGNIGGQFGTGINPQMQQNVFQYPGAGMVPQGEANFAPSLSPGSSMVPMPIPPPQSSLLQQTPPASGYQSPDMKAWQQGAIGNNNVFSQAVQNQPTPAQPGVYNNMSITVSMAGGNTNVQNMNPMMAQMQMSSLQMPGMNTVCPEQQVQQVQVFADVQCTVNLVGGDPYLNQPGPLGTQKPTSGPQTPQAQQKSLLQQLLTE

SEQ ID NO: 851847 - protein, 416 aa, Homo sapiens
MEERPNLYSQPYSSPSPTANLPSPFQGMVRQKPSLGTMPVQVTPPRGAFSPGMGMQPRQTLNRPPAAPNQLRLQLQQRLQGQQQLIHQNRQAILNQFAATAPVGINMRSGMQQQITPQPPLNAQMLAQRQRELYSQQHRQRQLIQQQRAMLMRQQSFGNNLPPSSGLPVQMGNPRLPQGAPQQFPYPPNYGTNPGTPPASTSPFSQLAANPEASLANRNSMVSRGMTGNIGGQFGTGINPQMQQNVFQYPGAGMVPQGEANFAPSLSPGSSMVPMPIPPPQSSLLQQTPPASGYQSPDMKAWQQGAIGNNNVFSQAVQNQPTPAQPGVYNNMSITVSMAGGNTNVQNMNPMMAQMQMSSLQMPGMNTVCPEQINDPALRHTGLYCNQLSSTDLLKTEADGTQDKKTEEFFSVVTTD

SEQ ID NO: 851848 - protein, 1454 aa, Homo sapiens; identical to SEQ ID NO: 851840

SEQ ID NO: 851849 - protein, 1454 aa, Homo sapiens; identical to SEQ ID NO: 851840

SEQ ID NO: 851850 - protein, 1362 aa, Homo sapiens
MKRMEQEKSTTDDDVQKSDISSSSQGVIEKESLGPLLLEALDGFFFVVNCEGRIVFVSENVTSYLGYNQEELMNTSVYSILHVGDHAEFVKNLLPKSLVNGVPWPQEATRRNSHTFNCRMLIHPPDEPGTENQEACQRYEVMQCFTVSQPKSIQEDGEDFQSCLICIARRLPRPPAITGVESFMTKQDTTGKIISIDTSSLRAAGRTGWEDLVRKCIYAFFQPQGREPSYARQLFQEVMTRGTASSPSYRFILNDGTMLSAHTKCKLCYPQSPDMQPFIMGIHIIDREHSGLSPQDDTNSGMSIPRVNPSVNPSISPAHGVARSSTLPPSNSNMVSTRINRQQSSDLHSSSHSNSSNSQGSFGCSPGSQIVANVALNQGQASSQSSNPSLNLNNSPMEGTGISLAQFMSPRRQVTSGLATRPRMPNNSFPPNISTLSSPVGMTSSACNNNNRSYSNIPVTSLQGMNEGPNNSVGFSASSPVLRQMSSQNSPSRLNIQPAKAESKDNKEIASILNEMIQSDNSSSDGKPLDSGLLHNNDRLSDGDSKYSQTSHKLVQLLTTTAEQQLRHADIDTSCKDVLSCTGTSNSASANSSGGSCPSSHSSLTERHKILHRLLQEGSPSDITTLSVEPDKKDSASTSVSVTGQVQGNSSIKLELDASKKKESKDHQLLRYLLDKDEKDLRSTPNLSLDDVKVKVEKKEQMDPCNTNPTPMTKPTPEEIKLEAQSQFTADLDQFDQLLPTLEKAAQLPGLCETDRMDGAVTSVTIKSEILPASLQSATARPTSRLNRLPELELEAIDNQFGQPGTGDQIPWTNNTVTAINQSKSEDQCISSQLDELLCPPTTVEGRNDEKALLEQLVSFLSGKDETELAELDRALGIDKLVQGGGLDVLSERFPPQQATPPLIMEERPNLYSQPYSSPSPTANLPSPFQGMVRQKPSLGTMPVQVTPPRGAFSPGMGMQPRQTLNRPPAAPNQLRLQLQQRLQGQQQLIHQNRQAILNQFAATAPVGINMRSGMQQQITPQPPLNAQMLAQRQRELYSQQHRQRQLIQQQRAMLMRQQSFGNNLPPSSGLPVQMGNPRLPQGAPQQFPYPPNYGTNPGTPPASTSPFSQLAANPEASLANRNSMVSRGMTGNIGGQFGTGINPQMQQNVFQYPGAGMVPQGEANFAPSLSPGSSMVPMPIPPPQSSLLQQTPPASGYQSPDMKAWQQGAIGNNNVFSQAVQNQPTPAQPGVYNNMSITVSMAGGNTNVQNMNPMMAQMQMSSLQMPGMNTVCPEQINDPALRHTGLYCNQLSSTDLLKTEADGTQQVQQVQVFADVQCTVNLVGGDPYLNQPGPLGTQKPTSGPQTPQAQQKSLLQQLLTE

SEQ ID NO: 851851 - protein, 748 aa, Homo sapiens
MQDFEENSRSGTSNSASANSSGGSCPSSHSSLTERHKILHRLLQEGSPSDITTLSVEPDKKDSASTSVSVTGQVQGNSSIKLELDASKKKESKDHQLLRYLLDKDEKDLRSTPNLSLDDVKVKVEKKEQMDPCNTNPTPMTKPTPEEIKLEAQSQFTADLDQFDQLLPTLEKAAQLPGLCETDRMDGAVTSVTIKSEILPASLQSATARPTSRLNRLPELELEAIDNQFGQPGTGDQIPWTNNTVTAINQSKSEDQCISSQLDELLCPPTTVEGRNDEKALLEQLVSFLSGKDETELAELDRALGIDKLVQGGGLDVLSERFPPQQATPPLIMEERPNLYSQPYSSPSPTANLPSPFQGMVRQKPSLGTMPVQVTPPRGAFSPGMGMQPRQTLNRPPAAPNQLRLQLQQRLQGQQQLIHQNRQAILNQFAATAPVGINMRSGMQQQITPQPPLNAQMLAQRQRELYSQQHRQRQLIQQQRAMLMRQQSFGNNLPPSSGLPVQMGNPRLPQGAPQQFPYPPNYGTNPGTPPASTSPFSQLAANPEASLANRNSMVSRGMTGNIGGQFGTGINPQMQQNVFQYPGAGMVPQGEANFAPSLSPGSSMVPMPIPPPQSSLLQQTPPASGYQSPDMKAWQQGAIGNNNVFSQAVQNQPTPAQPGVYNNMSITVSMAGGNTNVQNMNPMMAQMQMSSLQMPGMNTVCPEQINDPALRHTGLYCNQLSSTDLLKTEADGTQDKKTEEFFSVVTTD

SEQ ID NO: 851852 - protein, 601 aa, Homo sapiens
RPLQHQNGNCAAFSSVGSELIKLEKAAQLPGLCETDRMDGAVTSVTIKSEILPASLQSATARPTSRLNRLPELELEAIDNQFGQPGTGDQIPWTNNTVTAINQSKSEDQCISSQLDELLCPPTTVEGRNDEKALLEQLVSFLSGKDETELAELDRALGIDKLVQGGGLDVLSERFPPQQATPPLIMEERPNLYSQPYSSPSPTANLPSPFQGMVRQKPSLGTMPVQVTPPRGAFSPGMGMQPRQTLNRPPAAPNQLRLQLQQRLQGQQQLIHQNRQAILNQFAATAPVGINMRSGMQQQITPQPPLNAQMLAQRQRELYSQQHRQRQLIQQQRAMLMRQQSFGNNLPPSSGLPVQMGNPRLPQGAPQQFPYPPNYGTNPGTPPASTSPFSQLAANPEASLANRNSMVSRGMTGNIGGQFGTGINPQMQQNVFQYPGAGMVPQGEANFAPSLSPGSSMVPMPIPPPQSSLLQQTPPASGYQSPDMKAWQQGAIGNNNVFSQAVQNQPTPAQPGVYNNMSITVSMAGGNTNVQNMNPMMAQMQMSSLQMPGMNTVCPEQINDPALRHTGLYCNQLSSTDLLKTEADGTQDKKTEEFFSVVTTD

SEQ ID NO: 851853 - protein, 1320 aa, Homo sapiens
MKRMEQEKSTTDDDVQKSDISSSSQGVIEKESLGPLLLEALDGFFFVVNCEGRIVFVSENVTSYLGYNQEELMNTSVYSILHVGDHAEFVKNLLPKSLVNGVPWPQEATRRNSHTFNCRMLIHPPDEPGTENQEACQRYEVMQCFTVSQPKSIQEDGEDFQSCLICIARRLPRPPAITGVESFMTKQDTTGKIISIDTSSLRAAGRTGWEDLVRKCIYAFFQPQGREPSYARQLFQEVMTRGTASSPSYRFILNDGTMLSAHTKCKLCYPQSPDMQPFIMGIHIIDREHSGLSPQDDTNSGMSIPRVNPSVNPSISPAHGVARSSTLPPSNSNMVSTRINRQQSSDLHSSSHSNSSNSQGSFGCSPGSQIVANVALNQGQASSQSSNPSLNLNNSPMEGTGISLAQFMSPRRQVTSGLATRPRMPNNSFPPNISTLSSPVGMTSSACNNNNRSYSNIPVTSLQGMNEGPNNSVGFSASSPVLRQMSSQNSPSRLNIQPAKAESKDNKEIASILNEMIQSDNSSSDGKPLDSGLLHNNDRLSDGDSKYSQTSHKLVQLLTTTAEQQLRHADIDTSCKDVLSCTGTSNSASANSSGGSCPSSHSSLTERHKILHRLLQEGSPSDITTLSVEPDKKDSASTSVSVTGQVQGNSSIKLELDASKKKESKDHQLLRYLLDKDEKDLRSTPNLSLDDVKVKVEKKEQMDPCNTNPTPMTKPTPEEIKLEAQSQFTADLDQFDQLLPTLEKAAQLPGLCETDRMDGAVTSVTIKSEILPASLQSATARPTSRLNRLPELELEAIDNQFGQPGTGDQIPWTNNTVTAINQSKSEDQCISSQLDELLCPPTTVEGRNDEKALLEQLVSFLSGKDETELAELDRALGIDKLVQGGGLDVLSERFPPQQATPPLIMEERPNLYSQPYSSPSPTANLPSPFQGMVRQKPSLGTMPVQVTPPRGAFSPGMGMQPRQTLNRPPAAPNQLRLQLQQRLQGQQQLIHQNRQAILNQFAATAPVGINMRSGMQQQITPQPPLNAQMLAQRQRELYSQQHRQRQLIQQQRAMLMRQQSFGNNLPPSSGLPVQMGNPRLPQGAPQQFPYPPNYGTNPGTPPASTSPFSQLAANPEASLANRNSMVSRGMTGNIGGQFGTGINPQMQQNVFQYPGAGMVPQGEANFAPSLSPGSSMVPMPIPPPQSSLLQQTPPASGYQSPDMKAWQQGAIGNNNVFSQAVQNQPTPAQPGVYNNMSITVSMAGGNTNVQNMNPMMAQMQMSSLQMPGMNTVCPEQINDPALRHTGLYCNQLSSTDLLKTEADGTQDKKTEEFFSVVTTD

SEQ ID NO: 851854 - protein, 799 aa, Homo sapiens
MKRMEQEKSTTDDDVQKSDISSSSQGVIEKESLGPLLLEALDGFFFVVNCEGRIVFVSENVTSYLGYNQEELMNTSVYSILHVGDHAEFVKNLLPKSLVNGVPWPQEATRRNSHTFNCRMLIHPPDEPGTENQEACQRYEVMQCFTVSQPKSIQEDGEDFQSCLICIARRLPRPPAITGVESFMTKQDTTGKIISIDTSSLRAAGRTGWEDLVRKCIYAFFQPQGREPSYARQLFQEVMTRGTASSPSYRFILNDGTMLSAHTKCKLCYPQSPDMQPFIMGIHIIDREHSGLSPQDDTNSGMSIPRVNPSVNPSISPAHGVARSSTLPPSNSNMVSTRINRQQSSDLHSSSHSNSSNSQGSFGCSPGSQIVANVALNQGQASSQSSNPSLNLNNSPMEGTGISLAQFMSPRRQVTSGLATRPRMPNNSFPPNISTLSSPVGMTSSACNNNNRSYSNIPVTSLQGMNEGPNNSVGFSASSPVLRQMSSQNSPSRLNIQPAKAESKDNKEIASILNEMIQSDNSSSDGKPLDSGLLHNNDRLSDGDSKYSQTSHKLVQLLTTTAEQQLRHADIDTSCKDVLSCTGTSNSASANSSGGSCPSSHSSLTERHKILHRLLQEGSPSDITTLSVEPDKKDSASTSVSVTGQVQGNSSIKLELDASKKKESKDHQLLRYLLDKDEKDLRSTPNLSLDDVKVKVEKKEQMDPCNTNPTPMTKPTPEEIKLEAQSQFTADLDQFDQLLPTLEKAAQLPGLCETDRMDGAVTSVTIKSEILPASLQSATARPTSRLNSMFWGQHLILNV

SEQ ID NO: 851855 - protein, 111 aa, Homo sapiens
FDSLLDKKITSVAPAAGKAACRCPHRSCTEETTWQVAARPAESLVAQCLLPCMFYSKQAAFRNNHVEWPLNDTWSENFMESNVHPPFFSHCFFLFDVALRKLTLSHNRRQW

SEQ ID NO: 851856 - protein, 106 aa, Homo sapiens
MVNVPKTRRTFCKKCGKHQPHKVTQYKKGKDSLYAQGRRRYDRKQSGYGGQTKPIFRKKAKTTKKIVLRLECVEPNCRSKRMLAIKRCKHFELGGDKKRKGQVIQF

SEQ ID NO: 851857 - protein, 106 aa, Homo sapiens; identical to SEQ ID NO: 851856

SEQ ID NO: 851858 - protein, 106 aa, Homo sapiens; identical to SEQ ID NO: 851856

SEQ ID NO: 851859 - protein, 133 aa, Homo sapiens
LVLDRERPGVGRCFSFSSYRQNSPAAKMVNVPKTRRTFCKKCGKHQPHKVTQYKKGKDSLYAQGRRRYDRKQSGYGGQTKPIFRKKAKTTKKIVLRLECVEPNCRSKRMLAIKRCKHFELGGDKKRKGQVIQF

SEQ ID NO: 851860 - protein, 106 aa, Homo sapiens; identical to SEQ ID NO: 851856

SEQ ID NO: 851861 - protein, 106 aa, Homo sapiens; identical to SEQ ID NO: 851856

SEQ ID NO: 851862 - protein, 106 aa, Homo sapiens; identical to SEQ ID NO: 851856

SEQ ID NO: 851863 - protein, 106 aa, Homo sapiens; identical to SEQ ID NO: 851856

SEQ ID NO: 851864 - protein, 106 aa, Homo sapiens; identical to SEQ ID NO: 851856

SEQ ID NO: 851865 - protein, 133 aa, Homo sapiens; identical to SEQ ID NO: 851859

SEQ ID NO: 851866 - protein, 106 aa, Homo sapiens; identical to SEQ ID NO: 851856

SEQ ID NO: 851867 - protein, 31 aa, Homo sapiens
MALAGLSSRAGFSLQEKGLRHGGYRIAGRAG

SEQ ID NO: 851868 - protein, 142 aa, Homo sapiens
MEMDGDPYNLPAQGQGNIIITKYEQGHRAGAAVDLGHEQVDVRKYTNNLGIVHEMELPRVSALEVKQRRKESKRTNKWQKMLADWTKYRSTKKLSQRVYKVIPLAVRGRAWSLLLDIDRIKSQNPGKYKVSPSHTQLGVQTS

SEQ ID NO: 851869 - protein, 541 aa, Homo sapiens
METDLAEMPEKGALSSQDSPHFQEKSTEEGEVAALRLTARSQETVTFKDVAMDFTPEEWGKLDPAQRDVMLENYRNLVSLWLPVSKPESYNLENGKEPLKLERKAPKSSYSELPFCCSTENEGNLHFQCLSDMETRPQSKDSTSVQDFSKAESCKVAIIDRLTRNSVYDSNLEAALECENWLENQQGNQERHLREMFTHMNSLSEETDHKHDVYWKSFNQKSVLITEDRVPKGSYAFHTLEKSLKQKSNLMKKQRTYKEKKPHKCNDCGELFTYHSVLIRHQRVHTGEKPYTCNECGKSFSHRANLTKHQRTHTRILFECSECKKTFTESSSLATHQRIHVGERPYECNECGKGFNRSTHLVQHQLIHTGVKPYECNECDKAFIHSSALIKHQRTHTGEKPYKCQECGKAFSHCSSLTKHQRVHTGEKPYECSECGKTFSQSTHLVQHQRIHTGEKPYECNECGKTFSRSSNFAKHQRIHIGKKPYKCSECGKAFIHSSALIQHQRTHTGEKPFRCNECGKSFKCSSSLIRHQRVHTEEQP

SEQ ID NO: 851870 - protein, 120 aa, Homo sapiens [sequence omitted]

SEQ ID NO: 851871 - protein, 475 aa, Homo sapiens
MEMDGDPYNLPAQGQGNIIITKYEQGHRAGAAVDLGHEQVDVRKYTNNLGIVHEMELPRVSALEVKQRRKESKRTNKWQKMLADWTKYRSTKKLSQRVYKVIPLAVRGRAWSLLLDIDRIKSQNPGKYKVMKEKGKRSSRIIHCIQLDVSHTLQKHMMFIQRFGVKQQELCDILVAYSAYNPEVGYHRDLSRITAILLLCLPEEDAFWALTQLLAGERHSLWYSTAQILPGSRGSYRIQEQVLHKSFPKIMRHLGKEGLCIEGSMLTRLLRCFLDGKSFGLTLRLWDVFILEGARVLTAMVHASFKIHRKHLMKLSWSTVWEFQERLSQSWALEDNAVLRNLQTSMKELTKKHWDLPPPGSLLQNAHCYTIAWGLQSKAGKDSCTSRASGDFHAHPSQKALLNPGCHLPAQKRRNEGQPAADQSQKEMKCECMAFLTPRQNFGHKARLQLWPLTWTRDAPMQAGVPWLLLTPSGS

SEQ ID NO: 851872 - protein, 345 aa, Homo sapiens
MKEKGKRSSRIIHCIQLDVSHTLQKHMMFIQRFGVKQQELCDILVAYSAYNPEVGYHRDLSRITAILLLCLPEEDAFWALTQLLAGERHSLWYSTAQILPGSRGSYRIQEQVLHKSFPKIMRHLGKEGLCIEGSMLTRLLRCFLDGKSFGLTLRLWDVFILEGARVLTAMVHASFKIHRKHLMKLSWSTVWEFQERLSQSWALEDNAVLRNLQTSMKELTKKHWDLPPPGSLLQNAHCYTIAWGLQSKAGKDSCTSRASGDFHAHPSQKALLNPGCHLPAQKRRNEGQPAADQSQKEMKCECMAFLTPRQNFGHKARLQLWPLTWTRDAPMQAGVPWLLLTPSGS

SEQ ID NO: 851873 - protein, 87 aa, Homo sapiens
LAKEVRPLCEARDGRCPVPPGTASSGRDRHLRTQPQGCCPRASRLQRRRTEADSTLCLPRILPISKRRAQKREKWLLCASRPDPRKQ

SEQ ID NO: 851874 - protein, 92 aa, Homo sapiens
LAKEVRPLCEARDGRCPVPPGTASSGRDRHLRTQPQGCCPRASRLQRRRTEADSTVRKRPDLTQAFHQSPGGKAGSGTTRPGGLLTRLAREI

SEQ ID NO: 851875 - protein, 523 aa, Homo sapiens
WPKKFVPFVRPGMGALSSQDSPHFQEKSTEEGEVAALRLTARSQETVTFKDVAMDFTPEEWGKLDPAQRDVMLENYRNLVSLWLPVSKPESYNLENGKEPLKLERKAPKSSYSDMETRPQSKDSTSVQDFSKAESCKVAIIDRLTRNSVYDSNLEAALECENWLENQQGNQERHLREMFTHMNSLSEETDHKHDVYWKSFNQKSVLITEDRVPKGSYAFHTLEKSLKQKSNLMKKQRTYKEKKPHKCNDCGELFTYHSVLIRHQRVHTGEKPYTCNECGKSFSHRANLTKHQRTHTRILFECSECKKTFTESSSLATHQRIHVGERPYECNECGKGFNRSTHLVQHQLIHTGVKPYECNECDKAFIHSSALIKHQRTHTGEKPYKCQECGKAFSHCSSLTKHQRVHTGEKPYECSECGKTFSQSTHLVQHQRIHTGEKPYECNECGKTFSRSSNFAKHQRIHIGKKPYKCSECGKAFIHSSALIQHQRTHTGEKPFRCNECGKSFKCSSSLIRHQRVHTEEQP

SEQ ID NO: 851876 - protein, 521 aa, Homo sapiens
METDLAEMPEKGALSSQDSPHFQEKSTEEGEVAALRLTARSQETVTFKDVAMDFTPEEWGKLDPAQRDVMLENYRNLVSLWLPVSKPESYNLENGKEPLKLERKAPKSSYSDMETRPQSKDSTSVQDFSKAESCKVAIIDRLTRNSVYDSNLEAALECENWLENQQGNQERHLREMFTHMNSLSEETDHKHDVYWKSFNQKSVLITEDRVPKGSYAFHTLEKSLKQKSNLMKKQRTYKEKKPHKCNDCGELFTYHSVLIRHQRVHTGEKPYTCNECGKSFSHRANLTKHQRTHTRILFECSECKKTFTESSSLATHQRIHVGERPYECNECGKGFNRSTHLVQHQLIHTGVKPYECNECDKAFIHSSALIKHQRTHTGEKPYKCQECGKAFSHCSSLTKHQRVHTGEKPYECSECGKTFSQSTHLVQHQRIHTGEKPYECNECGKTFSRSSNFAKHQRIHIGKKPYKCSECGKAFIHSSALIQHQRTHTGEKPFRCNECGKSFKCSSSLIRHQRVHTEEQP

SEQ ID NO: 851877 - protein, 521 aa, Homo sapiens; identical to SEQ ID NO: 851876

SEQ ID NO: 851878 - protein, 521 aa, Homo sapiens; identical to SEQ ID NO: 851876

SEQ ID NO: 851879 - protein, 345 aa, Homo sapiens; identical to SEQ ID NO: 851872

SEQ ID NO: 851880 - protein, 232 aa, Homo sapiens
WPWPAEARTAPQAMTATLGSRGAAPGGSANSHGPSDPRVPLFRISLTSEDAGAGLAGALAASSRQPRKLGRCRQDPRRRTRRLLRLPSEAGAGGGASPSSRDSGDPSGGCDPCDAKGSSPMAARKQGRERDPPPSSRASKHNTRLPHACAADGRRPRGRGSAHRPKCGPSPAAPDPGGGQRDPPHLVTGTQPLGTLTECSPLTYPENTRTSSMSFQPYQTLRKLRKLSLVSR

SEQ ID NO: 851881 - protein, 232 aa, Homo sapiens; identical to SEQ ID NO: 851880

SEQ ID NO: 851882 - protein, 121 aa, Homo sapiens
MAGGQGPRSRDTAPQLRAEEASDSAARSEWAGARARLKDGCWRLAATAWEVTVRPAAPASSRGLLPPPYHEASKSSHAGLDLFSVAACHRFNLLGLHHLCFDGVCKTTAKEEIPRQNLWDE

SEQ ID NO: 851883 - protein, 232 aa, Homo sapiens; identical to SEQ ID NO: 851880

SEQ ID NO: 851884 - protein, 356 aa, Homo sapiens
MTLVLSMNRFCEPIVSEGAAEIAGYQTLWEADSYGGPSPPGPAQAPLQGDRGAGPPLAGSHYRGISNPITTSKITYFKRKYVEEEDFHPPLSSCSHKTISIFEERAHILYMSLEKLKFIDDPEVYLRRSVLINNLMKRIHGEIIMQNNWCFPACSFNGTSAQEWFMAQDCPYRKRPRMAKEECEKFHACCFYQECGGHYLNLPLSVNANVGSASTAASSPSASSSSSSSSSSPPLPLPSCSRQVDFDVGSASIYKSDGQIPANEIFVTNVRSLGVQEKAKLNDEKANDDTNRDGGPLSHEPVGNDLAFECKGQFYDYFETGYNERNNVNESWKKSLRKKEASPPSNKLCCSKGSKI

SEQ ID NO: 851885 - protein, 138 aa, Homo sapiens
MTLVLSMNRFCEPIVSEGAAEIAGYQTLWEADSYGGPSPPGPAQAPLQGDRGAGPPLAGSHYRGISNPITTSKITYFKRKYVEEEDFHPPLSSCSHKSRGQLVEDMTIKRHQLRNKYKTRIQGFLCDAARFLYPSNKW

SEQ ID NO: 851886 - protein, 121 aa, Homo sapiens
MTLVLSMNRFCEPIVSEGAAEIAGYQTLWEADSYGGPSPPGPAQAPLQGDRGAGPPLAAPLGDFLSVYQEQSRGQLVEDMTIKRHQLRNKYKTRIQGFLCDAARFLYPSNKCICDRLKNDD

SEQ ID NO: 851887 - protein, 147 aa, Homo sapiens
MTLVLSMNRFCEPIVSEGAAEIAGYQTLWEADSYGGPSPPGPAQAPLQGDRGAGPPLAGSHYRGISNPITTSKITYFKRKYVEEEDFHPPLSSCSHKSRGQLVEDMTIKRHQLRNKYKTRIQGFLCDAARFLYPSNKCICDRLKNDD

SEQ ID NO: 851888 - protein, 193 aa, Homo sapiens
LAQGRCLQVTAVQIQGSWKVTGVQPQKTGLYEYKVFGVLEDCSPTLLADIYMDSDYRKQWDQYVKELYEQECNGETVVYWEVKYPFPMSNRDYVYLRQRRDLDMEGRKIHVILARSTSMPQLGERSGVIRVKQYKQSLAIESDGKKGSKVFMYYFDNPGGQIPSWLINWAAKNGVPNFLKDMARACQNYLKKT

SEQ ID NO: 851889 - protein, 245 aa, Homo sapiens
QFPANDAGAAGAAGAARSPRPQAHTKGVRGLPSRRRSPDCGRMELAAGSFSEEQFWEACAELQQPALAGADWQLLVETSGISIYRLLDKKTGLYEYKVFGVLEDCSPTLLADIYMDSDYRKQWDQYVKELYEQECNGETVVYWEVKYPFPMSNRDYVYLRQRRDLDMEGRKIHVILARSTSMPQLGERSGVIRVKQYKQSLAIESDGKKGSKVFMYYFDNPGGQIPSWLINWAAKGGNCSGSLYH

SEQ ID NO: 851890 - protein, 256 aa, Homo sapiens
QFPANDAGAAGAAGAARSPRPQAHTKGVRGLPSRRRSPDCGRMELAAGSFSEEQFWEACAELQQPALAGADWQLLVETSGISIYRLLDKKTGLYEYKVFGVLEDCSPTLLADIYMDSDYRKQWDQYVKELYEQECNGETVVYWEVKYPFPMSNRDYVYLRQRRDLDMEGRKIHVILARSTSMPQLGERSGVIRVKQYKQSLAIESDGKKGSKVFMYYFDNPGGQIPSWLINWAAKNGVPNFLKDMARACQNYLKKT

SEQ ID NO: 851891 - protein, 305 aa, Homo sapiens
QFPANDAGAAGAAGAARSPRPQAHTKGVRGLPSRRRSPDCGRMELAAGSFSEEQFWEACAELQQPALAGADWQLLVETSGISIYRLLDKKTGLYEYKVFGVLEDCSPTLLADIYMDSDYRKQWDQYVKELYEQECNGETVVYWEVKYPFPMSNRDYVYLRQRRDLDMEGRKIHVILARSTSMPQLGERSGVIRVKQYKQSLAIESDGKKGSKVFMYYFDNPGGQIPSWLINWAAKAGLELLTSSNPLASASQSAGITGMSHHTRPIRAEPSGKLRIRETSSSFWQTQTFCNRLSGRKRKDIKIKT

SEQ ID NO: 851892 - protein, 261 aa, Homo sapiens
QFPANDAGAAGAAGAARSPRPQAHTKGVRGLPSRRRSPDCGRMELAAGSFSEEQFWEACAELQQPALAGADWQLLVETSGISIYRLLDKKTGLYEYKVFGVLEDCSPTLLADIYMDSDYRKQWDQYVKELYEQECNGETVVYWEVKYPFPMSNRDYVYLRQRRDLDMEGRKIHVILARSTSMPQLGERSGVIRVKQYKQSLAIESDGKKGSKVFMYYFDNPGGQIPSWLINWAAKNQSRTKREAQNQRDLIKFLANPNILQ

SEQ ID NO: 851893 - protein, 159 aa, Homo sapiens
VVVVHVNRDYVYLRQRRDLDMEGRKIHVILARSTSMPQLGERSGVIRVKQYKQSLAIESDGKKGSKVFMYYFDNPGGQIPSWLINWAAKAGLELLTSSNPLASASQSAGITGMSHHTRPIRAEPSGKLRIRETSSSFWQTQTFCNRLSGRKRKDIKIKT

SEQ ID NO: 851894 - protein, 256 aa, Homo sapiens; identical to SEQ ID NO: 851890

SEQ ID NO: 851895 - protein, 256 aa, Homo sapiens; identical to SEQ ID NO: 851890

SEQ ID NO: 851896 - protein, 261 aa, Homo sapiens; identical to SEQ ID NO: 851892

SEQ ID NO: 851897 - protein, 261 aa, Homo sapiens; identical to SEQ ID NO: 851892

SEQ ID NO: 851898 - protein, 107 aa, Homo sapiens
LSLPILRTIPSSEKTPLYFLLLFNPLCTPWEPKCKLPKMPESSPLPKWPSVFIAEPVKLVVAMFSGSPKHSPPSLPWKSRSGHQARQIFPLSLVLLVPRQSNILESI

SEQ ID NO: 851899 - protein, 370 aa, Homo sapiens
MVGKLKQNLLLACLVISSVTVFYLGQHAMECHHRIEERSQPVKLESTRTTVRTGLDLKANKTFAYHKDMPLIFIGGVPRSGTTLMRAMLDAHPDIRCGEETRVIPRILALKQMWSRSSKEKIRLDEAGVTDEVLDSAMQAFLLEIIVKHGEPAPYLCNKDPFALKSLTYLSRLFPNAKFLLMVRDGRASVHSMISRKVTIAGFDLNSYRDCLTKWNRAIETMYNQCMEVGYKKCMLVHYEQLVLHPERWMRTLLKFLQIPWNHSVLHHEEMIGKAGGVSLSKVERSTDQVIKPVNVGALSKWVGKIPPDVLQDMAVIAPMLAKLGYDPYANPPNYGKPDPKIIENTRRVYKGEFQLPDFLKEKPQTEQVE

SEQ ID NO: 851900 - protein, 360 aa, Homo sapiens
MVGKLKQNLLLACLVISSVTVFYLGQHAMECHHRIEERSQPVKLESTRTTVRTGLDLKANKTFAYHKDMPLIFIGGVPRSGTTLMRAMLDAHPDIRCGEETRVIPRILALKQMWSRSSKEKIRLDEAGVTDEVLDSAMQAFLLEIIVKHGEPAPYLCNKDPFALKSLTYLSRLFPNAKFLLMVRDGRASVHSMISRKVTIAGFDLNSYRDCLTKWNRAIETMYNQCMEVGYKKCMLVHYEQLVLHPERWMRTLLKFLQIPWNHSVLHHEEMIGKAGGVSLSKVERSTDQVIKPVNVGALSKWVGKIPPDVLQDMAVIAPMLAKLGYDPYANPPNYGKPDPKIIENTRRERLLPFQQKGNS

SEQ ID NO: 851901 - protein, 296 aa, Homo sapiens
MVGKLKQNLLLACLVISSVTVFYLGQHAMECHHRIEERSQPVKLESTRTTVRTGLDLKANKTFAYHKDMPLIFIGGVPRSGTTLMRAMLDAHPDIRCGEETRVIPRILALKQMWSRSSKEKIRLDEAGVTDEVLDSAMQAFLLEIIVKHGEPAPYLCNKDPFALKSLTYLSRLFPNAKFLLMVRDGRASVHSMISRKVTIAGFDLNSYRDCLTKWNRAIETMYNQCMEVGYKKCMLVHYEQLVLHPERWMRTLLKFLQIPWNHSVLHHEEMIGKAGGVSLSKLSKWSSRTRSLFHT

SEQ ID NO: 851902 - protein, 399 aa, Homo sapiens
MPSRRRGGSSLIPDVGYLSEVDCPWPEHFPKIILSQNLLLACLVISSVTVFYLGQHAMECHHRIEERSQPVKLESTRTTVRTGLDLKANKTFAYHKDMPLIFIGGVPRSGTTLMRAMLDAHPDIRCGEETRVIPRILALKQMWSRSSKEKIRLDEAGVTDEVLDSAMQAFLLEIIVKHGEPAPYLCNKDPFALKSLTYLSRLFPNAKFLLMVRDGRASVHSMISRKVTIAGFDLNSYRDCLTKWNRAIETMYNQCMEVGYKKCMLVHYEQLVLHPERWMRTLLKFLQIPWNHSVLHHEEMIGKAGGVSLSKVERSTDQVIKPVNVGALSKWVGKIPPDVLQDMAVIAPMLAKLGYDPYANPPNYGKPDPKIIENTRRVYKGEFQLPDFLKEKPQTEQVE

SEQ ID NO: 851903 - protein, 370 aa, Homo sapiens; identical to SEQ ID NO: 851899

SEQ ID NO: 851904 - protein, 214 aa, Homo sapiens
MVGKLKQNLLLACLVISSVTVFYLGQHAMECHHRIEERSQPVKLESTRTTVRTGLDLKANKTFAYHKDMPLIFIGGVPRSGTTLMRAMLDAHPDIRCGEETRVIPRILALKQMWSRSSKEKIRLDEAGVTDEVLDSAMQAFLLEIIVKHGEPAPYLCNKDPFALKSLTYLSRLFPNAVQRRGGSSLIPDVGYLSEVDCPWPEHFPKIILSKISV

SEQ ID NO: 851905 - protein, 370 aa, Homo sapiens; identical to SEQ ID NO: 851899

SEQ ID NO: 851906 - protein, 313 aa, Homo sapiens
MVGKLKQNLLLACLVISSVTVFYLGQHAMECHHRIEERSQPVKLESTRTTVRTGLDLKANKTFAYHKDMPLIFIGGVPRSGTTLMRAMLDAHPDIRCGEETRVIPRILALKQMWSRSSKEKIRLDEAGVTDEVLDSAMQAFLLEIIVKHGEPAPYLCNKDPFALKSLTYLSRLFPNAKFLLMVRDGRASVHSMISRKVTIAGFDLNSYRDCLTKWNRAIETMYNQCMEVGYKKCMLVHYEQLVLHPERWMRTLLKFLQIPWNHSVLHHEEMIGKAGGVSLSKSIRENSNYLTFLKKNHRLSKWSSRTRSLFHT

SEQ ID NO: 851907 - protein, 369 aa, Homo sapiens [sequence omitted]

SEQ ID NO: 851908 - protein, 84 aa, Homo sapiens
  misc_feature (1)..(1): Xaa can be any naturally occurring amino acid
XVSPPRTLNVGALSKWVGKIPPDVLQDMAVIAPMLAKLGYDPYANPPNYGKPDPKIIENTRRVYKGEFQLPDFLKEKPQTEQVE

SEQ ID NO: 851909 - protein, 71 aa, Homo sapiens
TAYNAADCINAADCIQRRCLHPTPLTASNAADCIQTPLTASNAADCIQRRLCICQFPPTERMEVSAQLWAS

SEQ ID NO: 851910 - protein, 929 aa, Homo sapiens
MTKKRKRQHDFQKVKLKVGKKKPKLQNATPTNFKTKTIHLPEQLKEDGTLPTNNRKLNIKDLLSQMHHYNAGVKQSALLGLKDLLSQYPFIIDAHLSNILSEVTAVFTDKDANVRLAAVQLLQFLAPKIRAEQISPFFPLVSAHLSSAMTHITEGIQEDSLKVLDILLEQYPALITGRSSILLKNFVELISHQQLSKGLINRDRSQSWILSVNPNRRLTSQQWRLKVLVRLSKFLQALADGSSRLRESEGLQEQKENPHATSNSIFINWKEHANDQQHIQVYENGGSQPNVSSQFRLRYLVGGLSGVDEGLSSTENLKGFIEIIIPLLIECWVEAVPPQLATPVGNGIEREPLQVMQQVLNIISLLWKLSKQQDETHKLESWLRKNYLIDFKHHFMSRFPYVLKEITKHKRKEPNKSIKHCTVLSNNIDHLLLNLTLSDIMVSLANASTLQKDCSWIEMIRKFVTETLEDGSRLNSKQLNRLLGVSWRLMQIQPNREDTETLIKAVYTLYQQRGLILPVRTLLLKFFSKIYQTEELRSCRFRYRSKVLSRWLAGLPLQLAHLGSRNPELSTQLIDIIHTAAARANKELLKSLQATALRIYDPQEGAVVVLPADSQQRLVQLVYFLPSLPADLLSRLSRCCIMGRLSSSLAAMLIGILHMRSSFSGWKYSAKDWLMSDVDYFSFLFSTLTGFSKEELTWLQSLRGVPHVIQTQLSPVLLYLTDLDQFLHHWDVTEAVFHSLLVIPARSQNFDILQSAISKHLVGLTVIPDSTAGCVFGVICKLLDHTCVVSETLLPFLASCCYSLLYFLLTIEKGEAEHLRKRDKLWGVCVSILALLPRVLRLMLQSLRVNRVGPEELPVVGQLLRLLLQHAPLRTHMLTNAILVQQIIKNITTLKSGSVQEQWLTDLHYCFNVYITGHPQGPSALATVY

SEQ ID NO: 851911 - protein, 929 aa, Homo sapiens; identical to SEQ ID NO: 851910

SEQ ID NO: 851912 - protein, 911 aa, Homo sapiens
MTKKRKRQHDFQKVKLKVGKKKPKLQNATPTNFKTKTIHLPEQLKEDGTLPTNNRKLNIKDLLSQMHHYNAGVKQSALLGLKDLLSQYPFIIDAHLSNILSEVTAVFTDKDANVRLAAVQLLQFLAPKIRAEQISPFFPLVSAHLSSAMTHITEGIQEDSLKVLDILLEQYPALITGRSSILLKNFVELISHQQLSKGLINRDRSQSWILSVNPNRRLTSQQWRLKVLVRLSKFLQALADGSSRLRESEGLQEQKENPHATSNSIFINWKEHANDQQHIQVYENGGSQPNVSSQFRLRYLVGGLSGVDEGLSSTENLKGFIEIIIPLLIECWVEAVPPQLATPVGNGIEREPLQVMQQVLNIISLLWKLSKQQDETHKLESWLRKNYLIDFKHHFMSRFPYVLKEITKHKRKEPNKSIKHCTVLSNNIDHLLLNLTLSDIMVSLANASTLQKDCSWIEMIRKFVTETLEDGSRLNSKQLNRLLGVSWRLMQIQPNREDTETLIKAVYTLYQQRGLILPVRTLLLKFFSKIYQTEELRSCRFRYRSKVLSRWLAGLPLQLAHLGSRNPELSTQLIDIIHTAAARANKELLVVLPADSQQRLVQLVYFLPSLPADLLSRLSRCCIMGRLSSSLAAMLIGILHMRSSFSGWKYSAKDWLMSDVDYFSFLFSTLTGFSKEELTWLQSLRGVPHVIQTQLSPVLLYLTDLDQFLHHWDVTEAVFHSLLVIPARSQNFDILQSAISKHLVGLTVIPDSTAGCVFGVICKLLDHTCVVSETLLPFLASCCYSLLYFLLTIEKGEAEHLRKRDKLWGVCVSILALLPRVLRLMLQSLRVNRVGPEELPVVGQLLRLLLQHAPLRTHMLTNAILVQQIIKNITTLKSGSVQEQWLTDLHYCFNVYITGHPQGPSALATVY

SEQ ID NO: 851913 - protein, 459 aa, Homo sapiens
MPTTSNTSRFMKMGVHSQMSVHSSGYEDTETLIKAVYTLYQQRGLILPVRTLLLKFFSKIYQTEELRSCRFRYRSKVLSRWLAGLPLQLAHLGSRNPELSTQLIDIIHTAAARANKELLKSLQATALRIYDPQEGAVVVLPADSQQRLVQLVYFLPSLPADLLSRLSRCCIMGRLSSSLAAMLIGILHMRSSFSGWKYSAKDWLMSDVDYFSFLFSTLTGFSKEELTWLQSLRGVPHVIQTQLSPVLLYLTDLDQFLHHWDVTEAVFHSLLVIPARSQNFDILQSAISKHLVGLTVIPDSTAGCVFGVICKLLDHTCVVSETLLPFLASCCYSLLYFLLTIEKGEAEHLRKRDKLWGVCVSILALLPRVLRLMLQSLRVNRVGPEELPVVGQLLRLLLQHAPLRTHMLTNAILVQQIIKNITTLKSGSVQEQWLTDLHYCFNVYITGHPQGPSALATVY

SEQ ID NO: 851914 - protein, 574 aa, Homo sapiens
MQQVLNIISLLWKLSKQQDETHKLESWLRKNYLIDFKHHFMSRFPYVLKEITKHKRKEPNKSIKHCTVLSNNIDHLLLNLTLSDIMVSLANASTLQKDCSWIEMIRKFVTETLEDGSRLNSKQLNRLLGVSWRLMQIQPNREDTETLIKAVYTLYQQRGLILPVRTLLLKFFSKIYQTEELRSCRFRYRSKVLSRWLAGLPLQLAHLGSRNPELSTQLIDIIHTAAARANKELLKSLQATALRIYDPQEGAVVVLPADSQQRLVQLVYFLPSLPADLLSRLSRCCIMGRLSSSLAAMLIGILHMRSSFSGWKYSAKDWLMSDVDYFSFLFSTLTGFSKEELTWLQSLRGVPHVIQTQLSPVLLYLTDLDQFLHHWDVTEAVFHSLLVIPARSQNFDILQSAISKHLVGLTVIPDSTAGCVFGVICKLLDHTCVVSETLLPFLASCCYSLLYFLLTIEKGEAEHLRKRDKLWGVCVSILALLPRVLRLMLQSLRVNRVGPEELPVVGQLLRLLLQHAPLRTHMLTNAILVQQIIKNITTLKSGSVQEQWLTDLHYCFNVYITGHPQGPSALATVY

SEQ ID NO: 851915 - protein, 793 aa, Homo sapiens
MTKKRKRQHDFQKVKLKVGKKKPKLQNATPTNFKTKTIHLPEQLKEDGTLPTNNRKLNIKDLLSQMHHYNAGVKQSALLGLKDLLSQYPFIIDAHLSNILSEVTAVFTDKDANVRLAAVQLLQFLAPKIRAEQISPFFPLVSAHLSSAMTHITEGIQEDSLKVLDILLEQYPALITGRSSILLKNFVELISHQQLSKGLINRDRSQSWILSVNPNRRLTSQQWRLKVLVRLSKFLQALADGSSRLRESEGLQEQKENPHATSNSIFINWKEHANDQQHIQVYENGGSQPNVSSQFRLRYLVGGLSGVDEGLSSTENLKGFIEIIIPLLIECWVEAVPPQLATPVGNGIEREPLQVMQQVLNIISLLWKLSKQQDETHKLESWLRKNYLIDFKHHFMSRFPYVLKEITKHKRKEPNKSIKHCTVLSNNIDHLLLNLTLSDIMVSLANASTLQKDCSWIEMIRKFVTETLEDGSRLNSKQLNRLLGVSWRLMQIQPNREDTETLIKAVYTLYQQRGLILPVRTLLLKFFSKIYQTEELRSCRFRYRSKVLSRWLAGLPLQLAHLGSRNPELSTQLIDIIHTAAARANKELLKSLQATALRIYDPQEGAVVVLPADSQQRLVQLVYFLPSLPADLLSRLSRCCIMGRLSSSLAAMLIGILHMRSSFSGWKYSAKDWLMSDVDYFSFLFSTLTGFSKEELTWLQSLRGVPHVIQTQLSPVLLYLTDLDQFLHHWDVTEAVFHSLLVIPARSQNFDILQSAISKHLGQAVGGLCLHPGSLASSPQVDAAEPAGEQSWA

SEQ ID NO: 851916 - protein, 927 aa, Homo sapiens
MTKKRKRQHDFQKVKLKVGKKKPKLQNATPTNFKTKTIHLPEQLKEDGTLPTNNRKLNIKDLLSQMHHYNAGVKQSALLGLKDLLSQYPFIIDAHLSNILSEVTAVFTDKDANVRLAAVQLLQFLAPKIRAEQISPFFPLVSAHLSSAMTHITEGIQEDSLKVLDILLEQYPALITGRSSILLKNFVELISHQQLSKGLINRDRSQSWILSVNPNRRLTSQQWRLKVLVRLSKFLQALADGSSRLRESEGLQEQKENPHATSNSIFINWKEHANDQQHIQVYENGGSQPNVSSQFRLRYLVGGLSGVDEGLSSTENLKGFIEIIIPLLIECWVEAVPPQLATPVGNGIEREPLQVMQQVLNIISLLWKLSKQQDETHKLESWLRKNYLIDFKHHFMSRFPYVLKEITKHKRKEPNKSIKHCTVLSNNIDHLLLNLTLSDIMVSLANASTLQKDCSWIEMIRKFVTETLEDGSRLNSKQLNRLLGVSWRLMQIQPNREDTETLIKAVYTLYQQRGLILPVRTLLLKFFSKIYQTEELRSCRFRYRSKVLSRWLAGLPLQLAHLGSRNPELSTQLIDIIHTAAARANKELLKSLQATALRIYDPQEGAVVVLPADSQQRLVQLVYFLPSLPADLLSRLSRCCIMGRLSSSLAAMLIGILHMRSSFSGWKYSAKDWLMSDVDYFSFLFSTLTGFSKEELTWLQSLRGVPHVIQTQLSPVLLYLTDLDQFLHHWDVTEAVFHSLLVIPARSQNFDILQSAISKHLVGLTVIPDSTAGCVFGVICKLLDHTCVVSETLLPFLASCCYSLLYFLLTIEKGEAEHLRKRDKLWGVCVSILALLPRVLRLMLQSLRVNRACCGPAASTAASACTPQDSYVDQCDLGAADHQEYHDIEEWKCSGTVAHRLTLLLQRVYHWASPRAQCTGYSVLKRP

SEQ ID NO: 851917 - protein, 844 aa, Homo sapiens
MTKKRKRQHDFQKVKLKVGKKKPKLQNATPTNFKTKTIHLPEQLKEDGTLPTNNRKLNIKDLLSQMHHYNAGVKQSALLGLKDLLSQYPFIIDAHLSNILSEVTAVFTDKDANVRLAAVQLLQFLAPKIRAEQISPFFPLVSAHLSSAMTHITEGIQEDSLKVLDILLEQYPALITGRSSILLKNFVELISHQQLSKGLINRDRSQSWILSVNPNRRLTSQQWRLKVLVRLSKFLQALADGSSRLRESEGLQEQKENPHATSNSIFINWKEHANDQQHIQVYENGGSQPNVSSQFRLRYLVGGLSGVDEGLSSTENLKGFIEIIIPLLIECWVEAVPPQLATPVGNGIEREPLQVMQQVLNIISLLWKLSKQQDETHKLESWLRKNYLIDFKHHFMSRFPYVLKEITKHKRKEPNKSIKHCTVLSNNIDHLLLNLTLSDIMVSLANASTLQKDCSWIEMIRKFVTETLEDGSRLNSKQLNRLLGVSWRLMQIQPNREDTETLIKAVYTLYQQRGLILPVRTLLLKFFSKIYQTEELRSCRFRYRSKVLSRWLAGLPLQLAHLGSRNPELSTQLIDIIHTAAARANKELLKSLQATALRIYDPQEGAVVVLPADSQQRLVQLVYFLPSLPADLLSRLSRCCIMGRLSSSLAAMLIGILHMRSSFSGWKYSAKDWLMSDVDYFSFLFSTLTGFSKEELTWLQSLRGVPHVIQTQLSPVLLYLTDLDQFLHHWDVTEAVFHSLLVIPARSQNFDILQSAISKHLVGLTVIPDSTAGCVFGVICKLLDHTCVVSETLLPFLASCCYSLLYFLLTIEKGEAEHLRKRTSCCWSVSPSSLSVLMVTGVCW

SEQ ID NO: 851918 - protein, 277 aa, Homo sapiens
RTRGSTHASSFSGWKYSAKDWLMSDVDYFSFLFSTLTGFSKEELTWLQSLRGVPHVIQTQLSPVLLYLTDLDQFLHHWDVTEAVFHSLLVIPARSQNFDILQSAISKHLVGLTVIPDSTAGCVFGVICKLLDHTCVVSETLLPFLASCCYSLLYFLLTIEKGEAEHLRKRDKLWGVCVSILALLPRVLRLMLQSLRVNRVGPEELPVVGQLLRLLLQHAPLRTHMLTNAILVQQIIKNITTLKSGSVQEQWLTDLHYCFNVYITGHPQGPSALATVY

SEQ ID NO: 851919 - protein, 429 aa, Homo sapiens
MTKKRKRQHDFQKVKLKVGKKKPKLQNATPTNFKTKTIHLPEQLKEDGTLPTNNRKLNIKDLLSQMHHYNAGVKQSALLGLKDLLSQYPFIIDAHLSNILSEVTAVFTDKDANVRLAAVQLLQFLAPKIRAEQISPFFPLVSAHLSSAMTHITEGIQEDSLKVLDILLEQYPALITGRSSILLKNFVELISHQQLSKGLINRDRSQSWILSVNPNRRLTSQQWRLKVLVRLSKFLQALADGSSRLRESEGLQEQKENPHATSNSIFINWKEHANDQQHIQVYENGGSQPNVSSQFRLRYLVGGLSGVDEGLSSTENLKGFIEIIIPLLIECWVEAVPPQLATPVGNGIEREPLQVMQQVLNIISLLWKLSKQQDETHKLESWLRKNYLIDFKHHFMSRFPYVLKEITKHKRKEPNKRYYDSFSLYNLEK

SEQ ID NO: 851920 - protein, 929 aa, Homo sapiens; identical to SEQ ID NO: 851910

SEQ ID NO: 851921 - protein, 903 aa, Homo sapiens [sequence omitted]

SEQ ID NO: 851922 - protein, 899 aa, Homo sapiens
MTKKRKRQHDFQKVKLKVGKKKPKLQNATPTNFKTKTIHLPEQLKEDGTLPTNNRKLNIKDLLSQMHHYNAGVKQSALLGLKDLLSQYPFIIDAHLSNILSEVTAVFTDKDANVRLAAVQLLQFLAPKIRAEQISPFFPLVSAHLSSAMTHITEGIQEDSLKVLDILLEQYPALITGRSSILLKNFVELISHQQLSKGLINRDRSQSWILSVNPNRRLTSQQWRLKVLVRLSKFLQALADGSSRLRESEGLQEQKENPHATSNSIFINWKEHANDQQHIQVYENGGSQPNVSSQFRLRYLVGGLSGVDEGLSSTENLKGFIEIIIPLLIECWVEAVPPQLATPVGNGIEREPLQVMQQVLNIISLLWKLSKQQDETHKLESWLRKNYLIDFKHHFMSRFPYVLKEITKHKRKEPNKSIKHCTVLSNNIDHLLLNLTLSDIMVSLANASTLQKDCSWIEMIRKFVTETLEDGSRLNSKQLNRLLGVSWRLMQIQPNREDTETLIKAVYTLYQQRGLILPVRTLLLKFFSKIYQTEELRSCRFRYRSKVLSRWLAGLPLQLAHLGSRNPELSTQLIDIIHTAAARANKELLKSLQATALRIYDPQEGAVVVLPADSQQRLVQLVYFLPSLPADLLSRLSRCCIMGRLSSSLAAMLIGILHMRSSFSGWKYSAKDWLMSDVDYFSFLFSTLTGFSKEELTWLQSLRGVPHVIQTQLSPVLLYLTDLDQFLHHWDVTEAVFHSLLVIPARSQNFDILQSAISKHLVGLTVIPDSTAGCVFGVICKLLDHTCVVSETLLPFLASCCYSLLYFLLTIEKGEAEHLRKRDKLWGVCVSILALLPRVLRLMLQSLRVNRACCGPAASTAASACTPQDSYVDQCDLGAADHQEYHGKKHGTGGFAVLA

SEQ ID NO: 851923 - protein, 903 aa, Homo sapiens [sequence omitted]

SEQ ID NO: 851924 - protein, 395 aa, Homo sapiens
ETFYGKERYRSKVLSRWLAGLPLQLAHLGSRNPELSTQLIDIIHTAAARANKELLKSLQATALRIYDPQEGAVVVLPADSQQRLVQLVYFLPSLPADLLSRLSRCCIMGRLSSSLAAMLIGILHMRSSFSGWKYSAKDWLMSDVDYFSFLFSTLTGFSKEELTWLQSLRGVPHVIQTQLSPVLLYLTDLDQFLHHWDVTEAVFHSLLVIPARSQNFDILQSAISKHLVGLTVIPDSTAGCVFGVICKLLDHTCVVSETLLPFLASCCYSLLYFLLTIEKGEAEHLRKRDKLWGVCVSILALLPRVLRLMLQSLRVNRVGPEELPVVGQLLRLLLQHAPLRTHMLTNAILVQQIIKNITTLKSGSVQEQWLTDLHYCFNVYITGHPQGPSALATVY

SEQ ID NO: 851925 - protein, 477 aa, Homo sapiens
MTKKRKRQHDFQKVKLKVGKKKPKLQNATPTNFKTKTIHLPEQLKEDGTLPTNNRKLNIKDLLSQMHHYNAGVKQSALLGLKDLLSQYPFIIDAHLSNILSEVTAVFTDKDANVRLAAVQLLQFLAPKIRAEQISPFFPLVSAHLSSAMTHITEGIQEDSLKVLDILLEQYPALITGRSSILLKNFVELISHQQLSKGLINRDRSQSWILSVNPNRRLTSQQWRLKVLVRLSKFLQALADGSSRLRESEGLQEQKENPHATSNSIFINWKEHANDQQHIQVYENGGSQPNVSSQFRLRYLVGGLSGVDEGLSSTENLKGFIEIIIPLLIECWVEAVPPQLATPVGNGIEREPLQVMQQVLNIISLLWKLSKQQDETHKLESWLRKNYLIDFKHHFMSRFPYVLKEITKHKRKEPNKSIKHCTVLSNNIDHLLLNLTLSDIMVSLANASTLQKDCSWIEMIRKFVTETPFENRVLGLK

SEQ ID NO: 851926 - protein, 1503 aa, Homo sapiens
MARLAAVLWNLCVTAVLVTSATQGLSRAGLPFGLMRRELACEGYPIELRCPGSDVIMVENANYGRTDDKICDADPFQMENVQCYLPDAFKIMSQRCNNRTQCVVVAGSDAFPDPCPGTYKYLEVQYDCVPYKVEQKGIGGVGRGPPPFCHQRCLGPSSRAGDGRRVFVCPGTLQKVLEPTSTHESEHQSGAWCKDPLQAGDRIYVMPWIPYRTDTLTEYASWEDYVAARHTTTYRLPNRVDGTGFVVYDGAVFYNKERTRNIVKYDLRTRIKSGETVINTANYHDTSPYRWGGKTDIDLAVDENGLWVIYATEGNNGRLVVSQLNPYTLRFEGTWETGYDKRSASNAFMVCGVLYVLRSVYVDDDSEAAGNRVDYAFNTNANREEPVSLTFPNPYQFISSVDYNPRDNQLYVWNNYFVVRYSLEFGPPDPSAGPATSPPLSTTTTARPTPLTSTASPAATTPLRRAPLTTHPVGAINQLGPDLPPATAPVPSTRRPPAPNLHVSPELFCEPREVRRVQWPATQQGMLVERPCPKGTRGIASFQCLPALGLWNPRGPDLSNCTSPWVNQVAQKIKSGENAANIASELARHTRGSIYAGDVSSSVKLMEQLLDILDAQLQALRPIERESAGKNYNKMHKRERTCKDYIKAVVETVDNLLRPEALESWKDMNATEQVHTATMLLDVLEEGAFLLADNVREPARFLAAKENVVLEVTVLNTEGQVQELVFPQEEYPRKNSIQLSAKTIKQNSRNGVVKVVFILYNNLGLFLSTENATVKLAGEAGPGGPGGASLVVNSQVIAASINKESSRVFLMDPVIFTVAHLEDKNHFNANCSFWNYSERSMLGYWSTQGCRLVESNKTHTTCACSHLTNFAVLMAHREIYQGRINELLLSVITWVGIVISLVCLAICISTFCFLRGLQTDRNTIHKNLCINLFLAELLFLVGIDKTQYEIACPIFAGLLHYFFLAAFSWLCLEGVHLYLLLVEVFESEYSRTKYYYLGGYCFPALVVGIAAAIDYRSYGTEKACWLRVDNYFIWSFIGPVSFVIVVNLVFLMVTLHKMIRSSSVLKPDSSRLDNIKSWALGAIALLFLLGLTWAFGLLFINKESVVMAYLFTTFNAFQGVFIFVFHCALQKKVHKEYSKCLRHSYCCIRSPPGGTHGSLKTSAMRSNTRYYTGTQSRIRRMWNDTVRKQTESSFMAGDINSTPTLNRGTMGNHLLTNPVLQPRGGTSPYNTLIAESVGFNPSSPPVFNSPGSYREPKHPLGGREACGMDTLPLNGNFNNSYSLRSGDFPPGDGGPEPPRGRNLADAAAFEKMIISELVHNNLRGSSSAAKGPPPPEPPVPPVPGGGGEEEAGGPGGADRAEIELLYKALEEPLLLPRAQSVLYQSDLDESESCTAEDGATSRPLSSPPGRDSLYASGANLRDSPSYPDSSPEGPSEALPPPPPAPPGPPEIYYTSRPPALVARNPLQGYYQVRRPSHEGYLAAPGLEGPGPDGDGQMQLVTSL

SEQ ID NO: 851927 - protein, 1460 aa, Homo sapiens
MARLAAVLWNLCVTAVLVTSATQGLSRAGLPFGLMRRELACEGYPIELRCPGSDVIMVENANYGRTDDKICDADPFQMENVQCYLPDAFKIMSQRCNNRTQCVVVAGSDAFPDPCPGTYKYLEVQYDCVPYKVEQKGIGGVGRGPPPFCHQRCLGPSSRAGDGRRVFVCPGTLQKVLEPTSTHESEHQSGAWCKDPLQAGDRIYVMPWIPYRTDTLTEYASWEDYVAARHTTTYRLPNRVDGTGFVVYDGAVFYNKERTRNIVKYDLRTRIKSGETVINTANYHDTSPYRWGGKTDIDLAVDENGLWVIYATEGNNGRLVVSQLNPYTLRFEGTWETGYDKRSASNAFMVCGVLYVLRSVYVDDDSEAAGNRVDYAFNTNANREEPVSLTFPNPYQFISSVDYNPRDNQLYVWNNYFVVRYSLEFGPPDPSAGPATSPPLSTTTTARPTPLTSTASPAATTPLRRAPLTTHPVGAINQLGPDLPPATAPVPSTRRPPAPNLHVSPELFCEPREVRRVQWPATQQGMLVERPCPKGTRGIASFQCLPALGLWNPRGPDLSNCTSPWVNQVAQKIKSGENAANIASELARHTRGSIYAGDVSSSVKLMEQLLDILDAQLQALRPIERESAGKNYNKMHKRERTCKDYIKAVVETVDNLLRPEALESWKDMNATEQVHTATMLLDVLEEGAFLLADNVREPARFLAAKENVVLEVTVLNTEGQVQELVFPQEEYPRKNSIQLSAKTIKQNSRNGVVKVVFILYNNLGLFLSTENATVKLAGEAGPGGPGGASLVVNSQVIAASINKESSRVFLMDPVIFTVAHLEDKNHFNANCSFWNYSERSMLGYWSTQGCRLVESNKTHTTCACSHLTNFAVLMAHREIYQGRINELLLSVITWVGIVISLVCLAICISTFCFLRGLQTDRNTIHKNLCINLFLAELLFLVGIDKTQYEIACPIFAGLLHYFFLAAFSWLCLEGVHLYLLLVEVFESEYSRTKYYYLGGYCFPALVVGIAAAIDYRSYGTEKACWLRVDNYFIWSFIGPVSFVIVVNLVFLMVTLHKMIRSSSVLKPDSSRLDNIKSWALGAIALLFLLGLTWAFGLLFINKESVVMAYLFTTFNAFQGVFIFVFHCALQKKVHKEYSKCLRHSYCCIRSPPGGTHGSLKTSAMRSNTRYYTGTQSRIRRMWNDTVRKQTESSFMAGDINSTPTLNRGTMGNHLLTNPVLQPRGGTSPYNTLIAESVGFNPSSPPVFNSPGSYREPKHPLGGREACGMDTLPLNGNFNNSYSLRSGDFPPPPEPPVPPVPGGGGEEEAGGPGGADRAEIELLYKALEEPLLLPRAQSVLYQSDLDESESCTAEDGATSRPLSSPPGRDSLYASGANLRDSPSYPDSSPEGPSEALPPPPPAPPGPPEIYYTSRPPALVARNPLQGYYQVRRPSHEGYLAAPGLEGPGPDGDGQMQLVTSL

SEQ ID NO: 851928 - protein, 1526 aa, Homo sapiens
MARLAAVLWNLCVTAVLVTSATQGLSRAGLPFGLMRRELACEGYPIELRCPGSDVIMVENANYGRTDDKICDADPFQMENVQCYLPDAFKIMSQRCNNRTQCVVVAGSDAFPDPCPGTYKYLEVQYDCVPYKVEQKGIGGVGRGPPPFCHQRCLGPSSRAGDGRRVFVCPGTLQKVLEPTSTHESEHQSGAWCKDPLQAGDRIYVMPWIPYRTDTLTEYASWEDYVAARHTTTYRLPNRVDGTGFVVYDGAVFYNKERTRNIVKYDLRTRIKSGETVINTANYHDTSPYRWGGKTDIDLAVDENGLWVIYATEGNNGRLVVSQLNPYTLRFEGTWETGYDKRSASNAFMVCGVLYVLRSVYVDDDSEAAGNRVDYAFNTNANREEPVSLTFPNPYQFISSVDYNPRDNQLYVWNNYFVVRYSLEFGPPDPSAGPATSPPLSTTTTARPTPLTSTASPAATTPLRRAPLTTHPVGAINQLGPDLPPATAPVPSTRRPPAPNLHVSPELFCEPREVRRVQWPATQQGMLVERPCPKGTRGIASFQCLPALGLWNPRGPDLSNCTSPWVNQVAQKIKSGENAANIASELARHTRGSIYAGDVSSSVKLMEQLLDILDAQLQALRPIERESAGKNYNKMHKRERTCKDYIKAVVETVDNLLRPEALESWKDMNATEQVHTATMLLDVLEEGAFLLADNVREPARFLAAKENVVLEVTVLNTEGQVQELVFPQEEYPRKNSIQLSAKTIKQNSRNGVVKVVFILYNNLGLFLSTENATVKLAGEAGPGGPGGASLVVNSQVIAASINKESSRVFLMDPVIFTVAHLEDKNHFNANCSFWNYSERSMLGYWSTQGCRLVESNKTHTTCACSHLTNFAVLMAHREIYQGRINELLLSVITWVGIVISLVCLAICISTFCFLRGLQTDRNTIHKNLCINLFLAELLFLVGIDKTQYEIACPIFAGLLHYFFLAAFSWLCLEGVHLYLLLVEVFESEYSRTKYYYLGGYCFPALVVGIAAAIDYRSYGTEKACWLRVDNYFIWSFIGPVSFVIVVNLVFLMVTLHKMIRSSSVLKPDSSRLDNIKSWALGAIALLFLLGLTWAFGLLFINKESVVMAYLFTTFNAFQGVFIFVFHCALQKKVHKEYSKCLRHSYCCIRSPPGGTHGSLKTSAMRSNTRYYTGTQSRIRRMWNDTVRKQTESSFMAGDINSTPTLNRGTMGNHLLTNPVLQPRGGTSPYNTLIAESVGFNPSSPPVFNSPNWSLDLHFELILAFSLLSSGCHLQGATGNPHPLGGREACGMDTLPLNGNFNNSYSLRSGDFPPGDGGPEPPRGRNLADAAAFEKMIISELVHNNLRGSSSAAKGPPPPEPPVPPVPGGGGEEEAGGPGGADRAEIELLYKALEEPLLLPRAQSVLYQSDLDESESCTAEDGATSRPLSSPPGRDSLYASGANLRDSPSYPDSSPEGPSEALPPPPPAPPGPPEIYYTSRPPALVARNPLQGYYQVRRPSHEGYLAAPGLEGPGPDGDGQMQLVTSL

SEQ ID NO: 851929 - protein, 1483 aa, Homo sapiens
MARLAAVLWNLCVTAVLVTSATQGLSRAGLPFGLMRRELACEGYPIELRCPGSDVIMVENANYGRTDDKICDADPFQMENVQCYLPDAFKIMSQRCNNRTQCVVVAGSDAFPDPCPGTYKYLEVQYDCVPYKVEQKGIGGVGRGPPPFCHQRCLGPSSRAGDGRRVFVCPGTLQKVLEPTSTHESEHQSGAWCKDPLQAGDRIYVMPWIPYRTDTLTEYASWEDYVAARHTTTYRLPNRVDGTGFVVYDGAVFYNKERTRNIVKYDLRTRIKSGETVINTANYHDTSPYRWGGKTDIDLAVDENGLWVIYATEGNNGRLVVSQLNPYTLRFEGTWETGYDKRSASNAFMVCGVLYVLRSVYVDDDSEAAGNRVDYAFNTNANREEPVSLTFPNPYQFISSVDYNPRDNQLYVWNNYFVVRYSLEFGPPDPSAGPATSPPLSTTTTARPTPLTSTASPAATTPLRRAPLTTHPVGAINQLGPDLPPATAPVPSTRRPPAPNLHVSPELFCEPREVRRVQWPATQQGMLVERPCPKGTRGIASFQCLPALGLWNPRGPDLSNCTSPWVNQVAQKIKSGENAANIASELARHTRGSIYAGDVSSSVKLMEQLLDILDAQLQALRPIERESAGKNYNKMHKRERTCKDYIKAVVETVDNLLRPEALESWKDMNATEQVHTATMLLDVLEEGAFLLADNVREPARFLAAKENVVLEVTVLNTEGQVQELVFPQEEYPRKNSIQLSAKTIKQNSRNGVVKVVFILYNNLGLFLSTENATVKLAGEAGPGGPGGASLVVNSQVIAASINKESSRVFLMDPVIFTVAHLEDKNHFNANCSFWNYSERSMLGYWSTQGCRLVESNKTHTTCACSHLTNFAVLMAHREIYQGRINELLLSVITWVGIVISLVCLAICISTFCFLRGLQTDRNTIHKNLCINLFLAELLFLVGIDKTQYEIACPIFAGLLHYFFLAAFSWLCLEGVHLYLLLVEVFESEYSRTKYYYLGGYCFPALVVGIAAAIDYRSYGTEKACWLRVDNYFIWSFIGPVSFVIVVNLVFLMVTLHKMIRSSSVLKPDSSRLDNIKSWALGAIALLFLLGLTWAFGLLFINKESVVMAYLFTTFNAFQGVFIFVFHCALQKKVHKEYSKCLRHSYCCIRSPPGGTHGSLKTSAMRSNTRYYTGTQSRIRRMWNDTVRKQTESSFMAGDINSTPTLNRGTMGNHLLTNPVLQPRGGTSPYNTLIAESVGFNPSSPPVFNSPNWSLDLHFELILAFSLLSSGCHLQGATGNPHPLGGREACGMDTLPLNGNFNNSYSLRSGDFPPPPEPPVPPVPGGGGEEEAGGPGGADRAEIELLYKALEEPLLLPRAQSVLYQSDLDESESCTAEDGATSRPLSSPPGRDSLYASGANLRDSPSYPDSSPEGPSEALPPPPPAPPGPPEIYYTSRPPALVARNPLQGYYQVRRPSHEGYLAAPGLEGPGPDGDGQMQLVTSL

SEQ ID NO: 851930 - protein, 1267 aa, Homo sapiens
MARLAAVLWNLCVTAVLVTSATQGLSRAGLPFGLMRRELACEGYPIELRCPGSDVIMVENANYGRTDDKICDADPFQMENVQCYLPDAFKIMSQRCNNRTQCVVVAGSDAFPDPCPGTYKYLEVQYDCVPYKVEQKGIGGVGRGPPPFCHQRCLGPSSRAGDGRRVFVCPGTLQKVLEPTSTHESEHQSGAWCKDPLQAGDRIYVMPWIPYRTDTLTEYASWEDYVAARHTTTYRLPNRVDGTGFVVYDGAVFYNKERTRNIVKYDLRTRIKSGETVINTANYHDTSPYRWGGKTDIDLAVDENGLWVIYATEGNNGRLVVSQLNPYTLRFEGTWETGYDKRSASNAFMVCGVLYVLRSVYVDDDSEAAGNRVDYAFNTNANREEPVSLTFPNPYQFISSVDYNPRDNQLYVWNNYFVVRYSLEFGPPDPSAGPATSPPLSTTTTARPTPLTSTASPAATTPLRRAPLTTHPVGAINQLGPDLPPATAPVPSTRRPPAPNLHVSPELFCEPREVRRVQWPATQQGMLVERPCPKGTRGIASFQCLPALGLWNPRGPDLSNCTSPWVNQVAQKIKSGENAANIASELARHTRGSIYAGDVSSSVKLMEQLLDILDAQLQALRPIERESAGKNYNKMHKRERTCKDYIKAVVETVDNLLRPEALESWKDMNATEQVHTATMLLDVLEEGAFLLADNVREPARFLAAKENVVLEVTVLNTEGQVQELVFPQEEYPRKNSIQLSAKTIKQNSRNGVVKVVFILYNNLGLFLSTENATVKLAGEAGPGGPGGASLVVNSQVIAASINKESSRVFLMDPVIFTVAHLEDKNHFNANCSFWNYSERSMLGYWSTQGCRLVESNKTHTTCACSHLTNFAVLMAHREIYQGRINELLLSVITWVGIVISLVCLAICISTFCFLRGLQTDRNTIHKNLCINLFLAELLFLVGIDKTQYEIACPIFAGLLHYFFLAAFSWLCLEGVHLYLLLVEVFESEYSRTKYYYLGGYCFPALVVGIAAAIDYRSYGTEKACWLRVDNYFIWSFIGPVSFVIVVNLVFLMVTLHKMIRSSSVLKPDSSRLDNIKSWALGAIALLFLLGLTWAFGLLFINKESVVMAYLFTTFNAFQGVFIFVFHCALQKKVHKEYSKCLRHSYCCIRSPPGGTHGSLKTSAMRSNTRYYTGTQSLYASGANLRDSPSYPDSSPEGPSEALPPPPPAPPGPPEIYYTSRPPALVARNPLQGYYQVRRPSHEGYLAAPGLEGPGPDGDGQMQLVTSL

SEQ ID NO: 851931 - protein, 397 aa, Homo sapiens
MAYLFTTFNAFQGVFIFVFHCALQKKVHKEYSKCLRHSYCCIRSPPGGTHGSLKTSAMRSNTRYYTGTQSRIRRMWNDTVRKQTESSFMAGDINSTPTLNRGTMGNHLLTNPVLQPRGGTSPYNTLIAESVGFNPSSPPVFNSPGSYREPKHPLGGREACGMDTLPLNGNFNNSYSLRSGDFPPGDGGPEPPRGRNLADAAAFEKMIISELVHNNLRGSSSAAKGPPPPEPPVPPVPGGGGEEEAGGPGGADRAEIELLYKALEEPLLLPRAQSVLYQSDLDESESCTAEDGATSRPLSSPPGRDSLYASGANLRDSPSYPDSSPEGPSEALPPPPPAPPGPPEIYYTSRPPALVARNPLQGYYQVRRPSHEGYLAAPGLEGPGPDGDGQMQLVTSL

SEQ ID NO: 851932 - protein, 1481 aa, Homo sapiens
MARLAAVLWNLCVTAVLVTSATQGLSRAGLPFGLMRRELACEGYPIELRCPGSDVIMVENANYGRTDDKICDADPFQMENVQCYLPDAFKIMSQRCNNRTQCVVVAGSDAFPDPCPGTYKYLEVQYDCVPYKVEQKGIGGVGRGPPPFCHQRCLGPSSRAGDGRRVFVCPGTLQKVLEPTSTHESEHQSGAWCKDPLQAGDRIYVMPWIPYRTDTLTEYASWEDYVAARHTTTYRLPNRVDGTGFVVYDGAVFYNKERTRNIVKYDLRTRIKSGETVINTANYHDTSPYRWGGKTDIDLAVDENGLWVIYATEGNNGRLVVSQLNPYTLRFEGTWETGYDKRSASNAFMVCGVLYVLRSVYVDDDSEAAGNRVDYAFNTNANREEPVSLTFPNPYQFISSVDYNPRDNQLYVWNNYFVVRYSLEFGPPDPSAGPATSPPLSTTTTARPTPLTSTASPAATTPLRRAPLTTHPVGAINQLGPDLPPATAPVPSTRRPPAPNLHVSPELFCEPREVRRVQWPATQQGMLVERPCPKGTRGIASFQCLPALGLWNPRGPDLSNCTSPWVNQVAQKIKSGENAANIASELARHTRGSIYAGDVSSSVKLMEQLLDILDAQLQALRPIERESAGKNYNKMHKRERTCKDYIKAVVETVDNLLRPEALESWKDMNATEQVHTATMLLDVLEEGAFLLADNVREPARFLAAKENVVLEVTVLNTEGQVQELVFPQEEYPRKNSIQLSAKTIKQNSRNGVVKVVFILYNNLGLFLSTENATVKLAGEAGPGGPGGASLVVNSQVIAASINKESSRVFLMDPVIFTVAHLEDKNHFNANCSFWNYSERSMLGYWSTQGCRLVESNKTHTTCACSHLTNFAVLMAHREIYQGRINELLLSVITWVGIVISLVCLAICISTFCFLRGLQTDRNTIHKNLCINLFLAELLFLVGIDKTQYEIACPIFAGLLHYFFLAAFSWLCLEGVHLYLLLVEVFESEYSRTKYYYLGGYCFPALVVGIAAAIDYRSYGTEKACWLRVDNYFIWSFIGPVSFVIVVNLVFLMVTLHKMIRSSSVLKPDSSRLDNIKSWALGAIALLFLLGLTWAFGLLFINKESVVMAYLFTTFNAFQGVFIFVFHCALQKKVHKEYSKCLRHSYCCIRSPPGGTHGSLKTSAMRSNTRYYTGTQSRIRRMWNDTVRKQTESSFMAGDINSTPTLNRGTMGNHLLTNPVLQPRGGTSPYNTLIAESVGFNPSSPPVFNSPGSYREPKHPLGGREACGMDTLPLNGNFNNSYSLRSGDFPPGDGGPEPPRGRNLADAAAFEKMIISELVHNNLRGSSSAAKGPPPPEPPVPPVPGGGGEEEAGGPGGADRAEIELLYKALEEPLLLPRAQSVLYQSDLDESESCTAEDGATSRPLSSPPGRDSLYASGANLRDSPSYPDSSPEGPSEALPREREERGKGRRAKSKNRKKKKKKKKKRRRKKDTKEERLKQKR

SEQ ID NO: 851933 - protein, 150 aa, Homo sapiens
MARLAAVLWNLCVTAVLVTSATQGLSRAGLPFGLMRRELACEGYPIELRCPGSDVIMVENANYGRTDDKICDADPFQMENVQCYLPDAFKIMSQRCNNRTQCVVVAGSDAFPDPCPGTYKYLEVQYDCVPYKVEQHLVPCADAGPSRMSE

SEQ ID NO: 851934 - protein, 146 aa, Homo sapiens
MFTIPRPLTQYLSLRPRLRWRCPGQATAPKAHSARSGLCRQCPGPPKGPRCRLQGRPGLRPSPPAGTLTPLSPHSQILGAGGHRAAVPAGPHLGFRPPLHQQGVGGHGLSLHHLQRLPGGLHLRLSLRLTEEGEVEAGSWVTASLG

SEQ ID NO: 851935 - protein, 1473 aa, Homo sapiens
MARLAAVLWNLCVTAVLVTSATQGLSRAGLPFGLMRRELACEGYPIELRCPGSDVIMVENANYGRTDDKICDADPFQMENVQCYLPDAFKIMSQRCNNRTQCVVVAGSDAFPDPCPGTYKYLEVQYDCVPYKVERVFVCPGTLQKVLEPTSTHESEHQSGAWCKDPLQAGDRIYVMPWIPYRTDTLTEYASWEDYVAARHTTTYRLPNRVDGTGFVVYDGAVFYNKERTRNIVKYDLRTRIKSGETVINTANYHDTSPYRWGGKTDIDLAVDENGLWVIYATEGNNGRLVVSQLNPYTLRFEGTWETGYDKRSASNAFMVCGVLYVLRSVYVDDDSEAAGNRVDYAFNTNANREEPVSLTFPNPYQFISSVDYNPRDNQLYVWNNYFVVRYSLEFGPPDPSAGPATSPPLSTTTTARPTPLTSTASPAATTPLRRAPLTTHPVGAINQLGPDLPPATAPVPSTRRPPAPNLHVSPELFCEPREVRRVQWPATQQGMLVERPCPKGTRGIASFQCLPALGLWNPRGPDLSNCTSPWVNQVAQKIKSGENAANIASELARHTRGSIYAGDVSSSVKLMEQLLDILDAQLQALRPIERESAGKNYNKMHKRERTCKDYIKAVVETVDNLLRPEALESWKDMNATEQVHTATMLLDVLEEGAFLLADNVREPARFLAAKENVVLEVTVLNTEGQVQELVFPQEEYPRKNSIQLSAKTIKQNSRNGVVKVVFILYNNLGLFLSTENATVKLAGEAGPGGPGGASLVVNSQVIAASINKESSRVFLMDPVIFTVAHLEDKNHFNANCSFWNYSERSMLGYWSTQGCRLVESNKTHTTCACSHLTNFAVLMAHREIYQGRINELLLSVITWVGIVISLVCLAICISTFCFLRGLQTDRNTIHKNLCINLFLAELLFLVGIDKTQYEIACPIFAGLLHYFFLAAFSWLCLEGVHLYLLLVEVFESEYSRTKYYYLGGYCFPALVVGIAAAIDYRSYGTEKACWLRVDNYFIWSFIGPVSFVIVVNLVFLMVTLHKMIRSSSVLKPDSSRLDNIKSWALGAIALLFLLGLTWAFGLLFINKESVVMAYLFTTFNAFQGVFIFVFHCALQKKVHKEYSKCLRHSYCCIRSPPGGTHGSLKTSAMRSNTRYYTGTQSRIRRMWNDTVRKQTESSFMAGDINSTPTLNRGTMGNHLLTNPVLQPRGGTSPYNTLIAESVGFNPSSPPVFNSPGSYREPKHPLGGREACGMDTLPLNGNFNNSYSLRSGDFPPGDGGPEPPRGRNLADAAAFEKMIISELVHNNLRGSSSAAKGPPPPEPPVPPVPGGGGEEEAGGPGGADRAEIELLYKALEEPLLLPRAQSVLYQSDLDESESCTAEDGATSRPLSSPPGRDSLYASGANLRDSPSYPDSSPEGPSEALPPPPPAPPGPPEIYYTSRPPALVARNPLQGYYQVRRPSHEGYLAAPGLEGPGPDGDGQMQLVTSL

SEQ ID NO: 851936 - protein, 1468 aa, Homo sapiens
MARLAAVLWNLCVTAVLVTSATQGLSRAGLPFGLMRRELACEGYPIELRCPGSDVIMVENANYGRTDDKICDADPFQMENVQCYLPDAFKIMSQRCNNRTQCVVVAGSDAFPDPCPGTYKYLEVQYDCVPYKVEQKGIGGVGRGPPPFCHQRCLGPSSRAGDGRRVFVCPGTLQKVLEPTSTHESEHQSGAWCKDPLQAGDRIYVMPWIPYRTDTLTEYASWEDYVAARHTTTYRLPNRVDGTGFVVYDGAVFYNKERTRNIVKYDLRTRIKSGETVINTANYHDTSPYRWGGKTDIDLAVDENGLWVIYATEGNNGRLVVSQLNPYTLRFEGTWETGYDKRSASNAFMVCGVLYVLRSVYVDDDSEAAGNRVDYAFNTNANREEPVSLTFPNPYQFISSVDYNPRDNQLYVWNNYFVVRYSLEFGPPDPSAGPATSPPLSTTTTARPTPLTSTASPAATTPLRRAPLTTHPVGAINQLGPDLPPATAPVPSTRRPPAPNLHVSPELFCEPREVRRVQWPATQQGMLVERPCPKGTRDQEWGERGNIASELARHTRGSIYAGDVSSSVKLMEQLLDILDAQLQALRPIERESAGKNYNKMHKRERTCKDYIKAVVETVDNLLRPEALESWKDMNATEQVHTATMLLDVLEEGAFLLADNVREPARFLAAKENVVLEVTVLNTEGQVQELVFPQEEYPRKNSIQLSAKTIKQNSRNGVVKVVFILYNNLGLFLSTENATVKLAGEAGPGGPGGASLVVNSQVIAASINKESSRVFLMDPVIFTVAHLEDKNHFNANCSFWNYSERSMLGYWSTQGCRLVESNKTHTTCACSHLTNFAVLMAHREIYQGRINELLLSVITWVGIVISLVCLAICISTFCFLRGLQTDRNTIHKNLCINLFLAELLFLVGIDKTQYEIACPIFAGLLHYFFLAAFSWLCLEGVHLYLLLVEVFESEYSRTKYYYLGGYCFPALVVGIAAAIDYRSYGTEKACWLRVDNYFIWSFIGPVSFVIVVNLVFLMVTLHKMIRSSSVLKPDSSRLDNIKSWALGAIALLFLLGLTWAFGLLFINKESVVMAYLFTTFNAFQGVFIFVFHCALQKKVHKEYSKCLRHSYCCIRSPPGGTHGSLKTSAMRSNTRYYTGTQSRIRRMWNDTVRKQTESSFMAGDINSTPTLNRGTMGNHLLTNPVLQPRGGTSPYNTLIAESVGFNPSSPPVFNSPGSYREPKHPLGGREACGMDTLPLNGNFNNSYSLRSGDFPPGDGGPEPPRGRNLADAAAFEKMIISELVHNNLRGSSSAAKGPPPPEPPVPPVPGGGGEEEAGGPGGADRAEIELLYKALEEPLLLPRAQSVLYQSDLDESESCTAEDGATSRPLSSPPGRDSLYASGANLRDSPSYPDSSPEGPSEALPPPPPAPPGPPEIYYTSRPPALVARNPLQGYYQVRRPSHEGYLAAPGLEGPGPDGDGQMQLVTSL

SEQ ID NO: 851937 - protein, 1496 aa, Homo sapiens
MARLAAVLWNLCVTAVLVTSATQGLSRAGLPFGLMRRELACEGYPIELRCPGSDVIMVENANYGRTDDKICDADPFQMENVQCYLPDAFKIMSQRCNNRTQCVVVAGSDAFPDPCPGTYKYLEVQYDCVPYKVEQKGIGGVGRGPPPFCHQRCLGPSSRAGDGRRVFVCPGTLQKVLEPTSTHESEHQSGAWCKDPLQAGDRIYVMPWIPYRTDTLTEYASWEDYVAARHTTTYRLPNRVDGTGFVVYDGAVFYNKERTRNIVKYDLRTRIKSGETVINTANYHDTSPYRWGGKTDIDLAVDENGLWVIYATEGNNGRLVVSQLNPYTLRFEGTWETGYDKRSASNAFMVCGVLYVLRSVYVDDDSEAAGNRVDYAFNTNANREEPVSLTFPNPYQFISSVDYNPRDNQLYVWNNYFVVRYSLEFGPPDPSAGPATSPPLSTTTTARPTPLTSTASPAATTPLRRAPLTTHPVGAINQLGPDLPPATAPVPSTRRPPAPNLHVSPELFCEPREVRRVQWPATQQGMLVERPCPKGTRGIASFQCLPALGLWNPRGPDLSNCTSPWVNQVAQKIKSGENAANIASELARHTRGSIYAGDVSSSVKLMEQLLDILDAQLQALRPIERESAGKNYNKMHKRERTCKDYIKAVVETVDNLLRPEALESWKDMNATEQVHTATMLLDVLEEGAFLLADNVREPARFLAAKENVVLEVTVLNTEGQVQELVFPQEEYPRKNSIQLSAKTIKQNSRNGVVKVVFILYNNLGLFLSTENATVKLAGEAGPGGPGGASLVVNSQVIAASINKESSRVFLMDPVIFTVAHLEDKNHFNANCSFWNYSERSMLGYWSTQGCRLVESNKTHTTCACSHLTNFAVLMAHREIYQGRINELLLSVITWVGIVISLVCLAICISTFCFLRGLQTDRNTIHKNLCINLFLAELLFLVGIDKTQYEIACPIFAGLLHYFFLAAFSWLCLEGVHLYLLLVEVFESEYSRTKYYYLGGYCFPALVVGIAAAIDYRSYGTEKACWLRVDNYFIWSFIGPVSFVIVVNLVFLMVTLHKMIRSSSVLKPDSSRLDNIKSWALGAIALLFLLGLTWAFGLLFINKESVVMAYLFTTFNAFQGVFIFVFHCALQKKVHKEYSKCLRHSYCCIRSPPGGTHGSLKTSAMRSNTRYYTGTQSRIRRMWNDTVRKQTESSFMAGDINSTPTLNRGTMGNHLLTNPVLQPRGGTSPYNTLIAESVGFNPSSPPVFNSPHPLGGREACGMDTLPLNGNFNNSYSLRSGDFPPGDGGPEPPRGRNLADAAAFEKMIISELVHNNLRGSSSAAKGPPPPEPPVPPVPGGGGEEEAGGPGGADRAEIELLYKALEEPLLLPRAQSVLYQSDLDESESCTAEDGATSRPLSSPPGRDSLYASGANLRDSPSYPDSSPEGPSEALPPPPPAPPGPPEIYYTSRPPALVARNPLQGYYQVRRPSHEGYLAAPGLEGPGPDGDGQMQLVTSL

SEQ ID NO: 851938 - protein, 1226 aa, Homo sapiens
MARLAAVLWNLCVTAVLVTSATQGLSRAGLPFGLMRRELACEGYPIELRCPGSDVIMVENANYGRTDDKICDADPFQMENVQCYLPDAFKIMSQRCNNRTQCVVVAGSDAFPDPCPGTYKYLEVQYDCVPYKVEQKGIGGVGRGPPPFCHQRCLGPSSRAGDGRRVFVCPGTLQKVLEPTSTHESEHQSGAWCKDPLQAGDRIYVMPWIPYRTDTLTEYASWEDYVAARHTTTYRLPNRVDGTGFVVYDGAVFYNKERTRNIVKYDLRTRIKSGETVINTANYHDTSPYRWGGKTDIDLAVDENGLWVIYATEGNNGRLVVSQLNPYTLRFEGTWETGYDKRSASNAFMVCGVLYVLRSVYVDDDSEAAGNRVDYAFNTNANREEPVSLTFPNPYQFISSVDYNPRDNQLYVWNNYFVVRYSLEFGPPDPSAGPATSPPLSTTTTARPTPLTSTASPAATTPLRRAPLTTHPVGAINQLGPDLPPATAPVPSTRRPPAPNLHVSPELFCEPREVRRVQWPATQQGMLVERPCPKGTRGIASFQCLPALGLWNPRGPDLSNCTSPWVNQVAQKIKSGENAANIASELARHTRGSIYAGDVSSSVKLMEQLLDILDAQLQALRPIERESAGKNYNKMHKRERTCKDYIKAVVETVDNLLRPEALESWKDMNATEQVHTATMLLDVLEEGAFLLADNVREPARFLAAKENVVLEVTVLNTEGQVQELVFPQEEYPRKNSIQLSAKTIKQNSRNGVVKVVFILYNNLGLFLSTENATVKLAGEAGPGGPGGASLVVNSQVIAASINKESSRVFLMDPVIFTVAHLEDKNHFNANCSFWNYSERSMLGYWSTQGCRLVESNKTHTTCACSHLTNFAVLMAHREIYQGRINELLLSVITWVGIVISLVCLAICISTFCFLRGLQTDRNTIHKNLCINLFLAELLFLVGIDKTQYEIACPIFAGLLHYFFLAAFSWLCLEGVHLYLLLVEVFESEYSRTKYYYLGGYCFPALVVGIAAAIDYRSYGTEKACWLRVDNYFIWSFIGPVSFVIVVNLVFLMVTLHKMIRSSSVLKPDSSRLDNIKSWALGAIALLFLLGLTWAFGLLFINKESVVMAYLFTTFNAFQGVFIFVFHCALQKKVHKEYSKCLRHSYCCIRSPPGGTHGSLKTSAMRSNTRYYTGTQYTSRPPALVARNPLQGYYQVRRPSHEGYLAAPGLEGPGPDGDGQMQLVTSL

SEQ ID NO: 851939 - protein, 1503 aa, Homo sapiens; identical to SEQ ID NO: 851926

SEQ ID NO: 851940 - protein, 464 aa, Homo sapiens
MARLAAVLWNLCVTAVLVTSATQGLSRAGLPFGLMRRELACEGYPIELRCPGSDVIMVENANYGRTDDKICDADPFQMENVQCYLPDAFKIMSQRCNNRTQCVVVAGSDAFPDPCPGTYKYLEVQYDCVPYKVEQKGIGGVGRGPPPFCHQRCLGPSSRAGDGRRVFVCPGTLQKVLEPTSTHESEHQSGAWCKDPLQAGDRIYVMPWIPYRTDTLTEYASWEDYVAARHTTTYRLPNRVDGTGFVVYDGAVFYNKERTRNIVKYDLRTRIKSGETVINTANYHDTSPYRWGGKTDIDLAVDENGLWVIYATEGNNGRLVVSQLNPYTLRFEGTWETGYDKRSASNAFMVCGVLYVLRSVYVDDDSEAAGNRVDYAFNTNANREEPVSLTFPNPYQFISSVDYNPRDNQLYVWNNYFVVRYSLEFGPPDPSAGEDDSLPGMEPACLCPLHPHPPLGPRVGSPIL

SEQ ID NO: 851941 - protein, 692 aa, Homo sapiens
MDQGYGGYGAWSAGPANTQGAYGTGVASWQGYENYNYYGAQNTSVTTGATYSYGPASWEAAKANDGGLAAGAPAMHMASYGPEPCTDNSDSLIAKINQRLDMMSKEGGRGGSGGGGEGIQDRESSFRFQPFESYDSRPCLPEHNPYRPSYSYDYEFDLGSDRNGSFGGQYSECRDPARERGSLDGFMRGRGQGRFQDRSNPGTFMRSDPFVPPAASSEPLSTPWNELNYVGGRGLGGPSPSRPPPSLFSQSMAPDYGVMGMQGAGGYDSTMPYGCGRSQPRMRDRDRPKRRGFDRFGPDGTGRKRKQFQLYEEPDTKLARVDSEGDFSENDDAAGDFRSGDEEFKGEDELCDSGRQRGEKEDEDEDVKKRREKQRRRDRTRDRAADRIQFACSVCKFRSFDDEEIQKHLQSKFHKETLRFISTKLPDKTVEFLQEYIVNRNKKIEKRRQELMEKETAKPKPDPFKGIGQEHFFKKIEAAHCLACDMLIPAQPQLLQRHLHSVDHNHNRRLAAEQFKKTSLHVAKSVLNNRHIVKMLEKYLKGEDPFTSETVDPEMEGDDNLGGEDKKETPEEVAADVLAEVITAAVRAVDGEGAPAPESSGEPAEDEGPTDTAEAGSDPQAEQLLEEQVPCGTAHEKGVPKARSEAAEAGNGAETMAAEAESAQTRVAPAPAAADAEVEQTDAESKDAVPTE

SEQ ID NO: 851942 - protein, 692 aa, Homo sapiens; identical to SEQ ID NO: 851941

SEQ ID NO: 851943 - protein, 178 aa, Homo sapiens
WGRAEVVTCAPGLPVVDGGGALNACVLWSPSKRGCWWAASKTWTRATEVCVGCWVRSGEGRLCAGDAAAAQTAAGRAFVPSVVAPAGPSGEAARARARRSLGFGAVAPGALRADWPPGPEEAGGTRGWGRRRGGLRGGVLDSVGRFCPSPSAESFRPPATPGFALPASSSEDATKWRR

SEQ ID NO: 851944 - protein, 437 aa, Homo sapiens
MDQGYGGYGAWSAGPANTQGAYGTGVASWQGYENYNYYGAQNTSVTTGATYSYGPASWEAAKANDGGLAAGAPAMHMASYGPEPCTDNSDSLIAKINQRLDMMSKEGGRGGSGGGGEGIQDRESSFRFQPFESYDSRPCLPEHNPYRPSYSYDYEFDLGSDRNGSFGGQYSECRDPARERGSLDGFMRGRGQGRFQDRSNPGTFMRSDPFVPPAASSEPLSTPWNELNYVGGRGLGGPSPSRPPPSLFSQSMAPDYGVMGMQGAGGYDSTMPYGCGRSQPRMRDRDRPKRRGFDRFGPDGTGRKRKQFQLYEEPDTKLARVDSEGDFSENDDAAGDFRSGDEEFKGEDELCDSGRQRGEKEDEDEDVKKRREKQRRRDRTRDRAADRIQFACSVCKFRSFDDEEIQKHLQSKFHKETLRFISTKLPDKTVEFLQDTL

SEQ ID NO: 851945 - protein, 605 aa, Homo sapiens
MKASSRFKAHQDALPRLPVPPLQQSLDHYLKALQPIVSEEEWAHTKQLVDEFQASGGVGERLQKGLERRARKTENWLSEWWLKTAYLQYRQPVVIYSSPGVMLPKQDFVDLQGQLRFAAKLIEGVLDFKVMIDNETLPVEYLGGKPLCMNQYYQILSSCRVPGPKQDTVSNFSKTKKPPTHITVVHNYQFFELDVYHSDGTPLTADQIFVQLEKIWNSSLQTNKEPVGILTSNHRNSWAKAYNTLIKDKVNRDSVRSIQKSIFTVCLDATMPRVSEDVYRSHVAGQMLHGGGSRLNSGNRWFDKTLQFIVAEDGSCGLVYEHAAAEGPPIVTLLDYVIEYTKKPELVRSPMVPLPMPKKLRFNITPEIKSDIEKAKQNLSIMIQDLDITVMVFHHFGKDFPKSEKLSPDAFIQMALQLAYYRIYGQACATYESASLRMFHLGRTDTIRSASMDSLTFVKAMDDSSVTEHQKVELLRKAVQAHRGYTDRAIRGEAFDRHLLGLKLQAIEDLVSMPDIFMDTSYAIAMHFHLSTSQVPAKTDCVMFFGPVVPDGYGVCYNPMEAHINFSLSAYNSCAETNAARLAHYLEKALLDMRALLQSHPRAKL

SEQ ID NO: 851946 - protein, 626 aa, Homo sapiens
MLAFAARTVVKPLGFLKPFSLMKASSRFKAHQDALPRLPVPPLQQSLDHYLKALQPIVSEEEWAHTKQLVDEFQASGGVGERLQKGLERRARKTENWLSEWWLKTAYLQYRQPVVIYSSPGVMLPKQDFVDLQGQLRFAAKLIEGVLDFKVMIDNETLPVEYLGGKPLCMNQYYQILSSCRVPGPKQDTVSNFSKTKKPPTHITVVHNYQFFELDVYHSDGTPLTADQIFVQLEKIWNSSLQTNKEPVGILTSNHRNSWAKAYNTLIKDKVNRDSVRSIQKSIFTVCLDATMPRVSEDVYRSHVAGQMLHGGGSRLNSGNRWFDKTLQFIVAEDGSCGLVYEHAAAEGPPIVTLLDYVIEYTKKPELVRSPMVPLPMPKKLRFNITPEIKSDIEKAKQNLSIMIQDLDITVMVFHHFGKDFPKSEKLSPDAFIQMALQLAYYRIYGQACATYESASLRMFHLGRTDTIRSASMDSLTFVKAMDDSSVTEHQKVELLRKAVQAHRGYTDRAIRGEAFDRHLLGLKLQAIEDLVSMPDIFMDTSYAIAMHFHLSTSQVPAKTDCVMFFGPVVPDGYGVCYNPMEAHINFSLSAYNSCAETNAARLAHYLEKALLDMRALLQSHPRAKL

SEQ ID NO: 851947 - protein, 605 aa, Homo sapiens; identical to SEQ ID NO: 851945

SEQ ID NO: 851948 - protein, 605 aa, Homo sapiens; identical to SEQ ID NO: 851945

SEQ ID NO: 851949 - protein, 475 aa, Homo sapiens [sequence omitted]

SEQ ID NO: 851950 - protein, 602 aa, Homo sapiens
MLAFAARTVVKPLGFLKPFSLMKASSRFKAHQDALPRLPVPPLQQSLDHYLKALQPIVSEEEWAHTKQLVDEFQASGGVGERLQKGLERRARKTENWLSEWWLKTAYLQYRQPVVIYSSPGVMLPKQDFVDLQGQLRFAAKLIEGVLDFKVMIDNETLPVEYLGGKPLCMNQYYQILSSCRVPGPKQDTVSNFSKTKKPPTHITVVHNYQFFELDVYHSDGTPLTADQIFVQLEKIWNSSLQTNKEPVGILTSNHRNSWAKAYNTLIKDKVNRDSVRSIQKSIFTVCLDATMPRVSEDVYRSHVAGQMLHGGGSRLNSGNRWFDKTLQFIVAEDGSCGLVYEHAAAEGPPIVTLLDYVIEYTKKPELVRSPMVPLPMPKKLRFNITPEIKSDIEKAKQNLSIMIQDLDITVMVFHHFGKDFPKSEKLSPDAFIQMALQLAYYRIYGQACATYESASLRMFHLGRTDTIRSASMDSLTFVKAMDDSSVTEHQKVELLRKAVQAHRGYTDRAIRGEAFDRHLLGLKLQAIEDLVPAKTDCVMFFGPVVPDGYGVCYNPMEAHINFSLSAYNSCAETNAARLAHYLEKALLDMRALLQSHPRAKL

SEQ ID NO: 851951 - protein, 299 aa, Homo sapiens
MLAFAARTVVKPLGFLKPFSLMKASSRFKAHQDALPRLPVPPLQQSLDHYLKALQPIVSEEEWAHTKQLVDEFQASGGVGERLQKGLERRARKTENWLSEWWLKTAYLQYRQPVVIYSSPGVMLPKQDFVDLQGQLRFAAKLIEGVLDFKVMIDNETLPVEYLGGKPLCMNQYYQILSSCRVPGPKQDTVSNFSKTKKPPTHITVVHNYQFFELDVYHSDGTPLTADQIFVQLEKIWNSSLQTNKEPVGILTSNHRNSWAKAYNTLIKGASWGPCWGCTPRPLPLLGTSLNSTCRVPEV

SEQ ID NO: 851952 - protein, 626 aa, Homo sapiens; identical to SEQ ID NO: 851946

SEQ ID NO: 851953 - protein, 544 aa, Homo sapiens
MLAFAARTVVKPLGFLKPFSLMKASSRFKAHQDALPRLPVPPLQQSLDHYLKALQPIVSEEEWAHTKQLVDEFQASGGVGERLQKGLERRARKTENWLSEWWLKTAYLQYRQPVVIYSSPGVMLPKQDFVDLQGQLRFAAKLIEGVLDFKVMIDNETLPVEYLGGKPLCMNQYYQILSSCRVPGPKQDTVSNFSKTKKPPTHITVVHNYQFFELDVYHSDGTPLTADQIFVQLEKIWNSSLQTNKEPVGILTSNHRNSWAKAYNTLIKDKVNRDSVRSIQKKPELVRSPMVPLPMPKKLRFNITPEIKSDIEKAKQNLSIMIQDLDITVMVFHHFGKDFPKSEKLSPDAFIQMALQLAYYRIYGQACATYESASLRMFHLGRTDTIRSASMDSLTFVKAMDDSSVTEHQKVELLRKAVQAHRGYTDRAIRGEAFDRHLLGLKLQAIEDLVSMPDIFMDTSYAIAMHFHLSTSQVPAKTDCVMFFGPVVPDGYGVCYNPMEAHINFSLSAYNSCAETNAARLAHYLEKALLDMRALLQSHPRAKL

SEQ ID NO: 851954 - protein, 633 aa, Homo sapiens
GSRAGEGMNRMFCYLQVKPLGFLKPFSLMKASSRFKAHQDALPRLPVPPLQQSLDHYLKALQPIVSEEEWAHTKQLVDEFQASGGVGERLQKGLERRARKTENWLSEWWLKTAYLQYRQPVVIYSSPGVMLPKQDFVDLQGQLRFAAKLIEGVLDFKVMIDNETLPVEYLGGKPLCMNQYYQILSSCRVPGPKQDTVSNFSKTKKPPTHITVVHNYQFFELDVYHSDGTPLTADQIFVQLEKIWNSSLQTNKEPVGILTSNHRNSWAKAYNTLIKDKVNRDSVRSIQKSIFTVCLDATMPRVSEDVYRSHVAGQMLHGGGSRLNSGNRWFDKTLQFIVAEDGSCGLVYEHAAAEGPPIVTLLDYVIEYTKKPELVRSPMVPLPMPKKLRFNITPEIKSDIEKAKQNLSIMIQDLDITVMVFHHFGKDFPKSEKLSPDAFIQMALQLAYYRIYGQACATYESASLRMFHLGRTDTIRSASMDSLTFVKAMDDSSVTEHQKVELLRKAVQAHRGYTDRAIRGEAFDRHLLGLKLQAIEDLVSMPDIFMDTSYAIAMHFHLSTSQVPAKTDCVMFFGPVVPDGYGVCYNPMEAHINFSLSAYNSCAETNAARLAHYLEKALLDMRALLQSHPRAKL

SEQ ID NO: 851955 - protein, 626 aa, Homo sapiens; identical to SEQ ID NO: 851946

SEQ ID NO: 851956 - protein, 477 aa, Homo sapiens
MSCSGALTPKSDHLCGFPGCHTSSHVTPGLRFPVSKVGQVLGPASRSAVGLQGPVEFEALNPHPALGECPGGPARWGVSSSQRVQMGQKSPGQEAAEGLVHLSHTMRPHFASPRPMPPADKVNRDSVRSIQKSIFTVCLDATMPRVSEDVYRSHVAGQMLHGGGSRLNSGNRWFDKTLQFIVAEDGSCGLVYEHAAAEGPPIVTLLDYVIEYTKKPELVRSPMVPLPMPKKLRFNITPEIKSDIEKAKQNLSIMIQDLDITVMVFHHFGKDFPKSEKLSPDAFIQMALQLAYYRIYGQACATYESASLRMFHLGRTDTIRSASMDSLTFVKAMDDSSVTEHQKVELLRKAVQAHRGYTDRAIRGEAFDRHLLGLKLQAIEDLVSMPDIFMDTSYAIAMHFHLSTSQVPAKTDCVMFFGPVVPDGYGVCYNPMEAHINFSLSAYNSCAETNAARLAHYLEKALLDMRALLQSHPRAKL

SEQ ID NO: 851957 - protein, 408 aa, Homo sapiens
MLAFAARTVVKPLGFLKPFSLMKASSRFKAHQDALPRLPVPPLQQSLDHYLKALQPIVSEEEWAHTKQLVDEFQASGGVGERLQKGLERRARKTENWLSEWWLKTAYLQYRQPVVIYSSPGVMLPKQDFVDLQGQLRFAAKLIEGVLDFKVMIDNETLPVEYLGGKPLCMNQYYQILSSCRVPGPKQDTVSNFSKTKKPPTHITVVHNYQFFELDVYHSDGTPLTADQIFVQLEKIWNSSLQTNKEPVGILTSNHRNSWAKAYNTLIKDKVNRDSVRSIQKSIFTVCLDATMPRVSEDVYRSHVAGQMLHGGGSRLNSGNRWFDKTLQFIVAEDGSCGLVYEHAAAEGPPIVTLLDYVIEYTKKPELVRSPMVPLPMPKKLRFNITPRCLPCVALLHVRSSVCSHFPL

SEQ ID NO: 851958 - protein, 140 aa, Homo sapiens
MKASSRFKAHQDALPRLPVPPLQQSLDHYLKALQPIVSEEEWAHTKQLVDEFQASGGVGERLQKGLERRARKTENWVSEGILTVTCCWLHMHSSPVPTALARPFVCCPEFREHILCVWHLAGCWVIKKDTVTSSLELTFK

SEQ ID NO: 851959 - protein, 262 aa, Homo sapiens
MGAGNFLTALEVPVAALAGAASDRRASCERVSPPPPLPHFRLPSLFLVPGSQGPSVPSRPEPGAPLLGCWLQWGAPSPGPLCLLFRLCSCTCFAPLPAGADMDPNPRAALERQQLRLRERQKFFEDILQPETEFVFPLSHLHLESQRPPIGSISSMEVNVDTLEQVELIDLGDPDAADVFLPCEDPPPTPQSSGVDNHLEELSLPVPTSDRTTSRTSSSSSSDSSTNLHSPNPSDDGADTPLAQSDEEEERGDGGAEPGACS

SEQ ID NO: 851960 - protein, 174 aa, Homo sapiens
MCSVRYPAGLVPGSGGSGRGCTHYACATSAPPLRCFPRKRFFPFFPTQPLLPPWSLELCLSRPAAPLLHGPVCQRCFGSPPVRPGHAQTLRSSSLSLGMAGQFRSYVWDPLLILSQIVLMQTVYYGSLGLWLALVDGLVRSSPSLDQMFDAEILGFSTPPGRLSMMSFILNALT

SEQ ID NO: 851961 - protein, 125 aa, Homo sapiens
MDPNPRAALERQQLRLRERHHLHLESQRPPIGSISSMEVNVDTLEQVELIDLGDPDAADVFLPCEDPPPTPQSSGVDNHLEELSLPVPTSDRTTSRTDDGADTPLAQSDEEEERGDGGAEPGACS

SEQ ID NO: 851962 - protein, 161 aa, Homo sapiens [sequence omitted]

SEQ ID NO: 851963 - protein, 254 aa, Homo sapiens
MCSVRYPAGLVPGSGGSGRGCTHYACATSAPPLRCFPRKRFFPFFPTQPLLPPWSLELCLSRPAAPLLHGPVCQRCFGSPPVRPGHAQTLRSSSLSLGMAGQFRSYVWDPLLILSQIVLMQTVYYGSLGLWLALVDGLVRSSPSLDQMFDAEILGFSTPPGRLSMMSFILNALTCALGLLYFIRRGKQCLDFTVTVHFFHLLGCWFYSSRFPSALTWWLVQAVCIALMAVIGEYLCMRTELKEIPLNSAPKSNV

SEQ ID NO: 851964 - protein, 263 aa, Homo sapiens [sequence omitted]

SEQ ID NO: 851965 - protein, 156 aa, Homo sapiens
MAGQFRSYVWDPLLILSQIVLMQTVYYGSLGLWLALVDGLVRSSPSLDQMFDAEILGFSTPPGRLSMMSFILNALTCALGLLYFIRRGKQCLDFTVTVHFFHLLGCWFYSSRFPSALTWWLVQAVCIALMAVIGEYLCMRTELKEIPLNSAPKSNV

SEQ ID NO: 851966 - protein, 161 aa, Homo sapiens [sequence omitted]

SEQ ID NO: 851967 - protein, 161 aa, Homo sapiens [sequence omitted]

SEQ ID NO: 851968 - protein, 161 aa, Homo sapiens [sequence omitted]

SEQ ID NO: 851969 - protein, 263 aa, Homo sapiens [sequence omitted]

SEQ ID NO: 851970 - protein, 107 aa, Homo sapiens [sequence omitted]

SEQ ID NO: 851971 - protein, 214 aa, Homo sapiens
MESWALAVFPEYRVSLLWCLELASPLWSLGQAPPLHETWFVGHTWFQGRGKRSPRAEVSRPEPGAPLLGCWLQWGAPSPGPLCLLFRLCSCTCFAPLPAGADMDPNPRAALERQQLRLRERQKFFEDILQPETEFVFPLSHLHLESQRPPIGSISSMEVNVDTLEQVELIDLGDPDAADVFLPCEDPPPTPQSSGMPLCFGDFSASQPEPDVRL

SEQ ID NO: 851972 - protein, 112 aa, Homo sapiens
MDPNPRAALERQQLRLRERQKFFEDILQPETEFVFPLSHLHLESQRPPIGSISSMEVNVDTLEQVELIDLGDPDAADVFLPCEDPPPTPQSSGMPLCFGDFSASQPEPDVRL

SEQ ID NO: 851973 - protein, 81 aa, Homo sapiens
PVCGLTSFSLWAGVDNHLEELSLPVPTSDRTTSRTSSSSSSDSSTNLHSPNPSDDGADTPLAQSDEEEERGDGGAEPGACS

SEQ ID NO: 851974 - protein, 178 aa, Homo sapiens
RAGRRCHGDRPLAEARLVSLQGMAGQFRSYVWDPLLILSQIVLMQTVYYGSLGLWLALVDGLVRSSPSLDQMFDAEILGFSTPPGRLSMMSFILNALTCALGLLYFIRRGKQCLDFTVTVHFFHLLGCWFYSSRFPSALTWWLVQAVCIALMAVIGEYLCMRTELKEIPLNSAPKSNV

SEQ ID NO: 851975 - protein, 235 aa, Homo sapiens
MCSVRYPAGLVPGSGGSGRGCTHYACATSAPPLRCFPRKRFFPFFPTQPLLPPWSLELCLSRPAAPLLHGPVCQRCFGSPPVRPGHAQTLRSSSLSLIVLMQTVYYGSLGLWLALVDGLVRSSPSLDQMFDAEILGFSTPPGRLSMMSFILNALTCALGLLYFIRRGKQCLDFTVTVHFFHLLGCWFYSSRFPSALTWWLVQAVCIALMAVIGEYLCMRTELKEIPLNSAPKSNV

SEQ ID NO: 851976 - protein, 126 aa, Homo sapiens
WGNRSYENRCPLLAAASVVEFDAEILGFSTPPGRLSMMSFILNALTCALGLLYFIRRGKQCLDFTVTVHFFHLLGCWFYSSRFPSALTWWLVQAVCIALMAVIGEYLCMRTELKEIPLNSAPKSNV

SEQ ID NO: 851977 - protein, 156 aa, Homo sapiens; identical to SEQ ID NO: 851965

SEQ ID NO: 851978 - protein, 248 aa, Homo sapiens
MCSVRYPAGLVPGSGGSGRGCTHYACATSAPPLRCFPRKRFFPFFPTQPLLPPWSLELCLSRPAAPLLHGPVCQRCFGSPPVRPGHAQTLRSSSLSLGMAGQFRSYVWDPLLILSQIVLMQTVYYGSLGLWLALVDGLVRSSPSLDQMFDAEILGFSTPPGRLSMMSFILNALTCALGLLYFIRRGKQCLDFTVTVHFFHLLGCWFYSSRFPSALTWWLVQAVCIALMAVIGEYLCMRTELKEIGICC

SEQ ID NO: 851979 - protein, 151 aa, Homo sapiens
MCSVRYPAGLVPGSGGSGRGCTHYACATSAPPLRCFPRKRFFPFFPTQPLLPPWSLELCLSRPAAPLLHGPVCQRCFGSPPVRPGHAQTLRSSSLSLGMAGQFRSYVWDPLLILSQIVLMQTVYYGSLGLLPALNIAGHRTQRRIPALLKV

SEQ ID NO: 851980 - protein, 161 aa, Homo sapiens [sequence omitted]

SEQ ID NO: 851981 - protein, 167 aa, Homo sapiens
MRLGADMDPNPRAALERQQLRLRERQKFFEDILQPETEFVFPLSHLHLESQRPPIGSISSMEVNVDTLEQVELIDLGDPDAADVFLPCEDPPPTPQSSGVDNHLEELSLPVPTSDRTTSRTSSSSSSDSSTNLHSPNPSDDGADTPLAQSDEEEERGDGGAEPGACS

SEQ ID NO: 851982 - protein, 263 aa, Homo sapiens [sequence omitted]

SEQ ID NO: 851983 - protein, 156 aa, Homo sapiens; identical to SEQ ID NO: 851965

SEQ ID NO: 851984 - protein, 225 aa, Homo sapiens
DTARYEAWCESAEGFFPTQPLLPPWSLELCLSRPAAPLLHGPVCQRCFGSPPVRPGHAQTLRSSSLSLGMAGQFRSYVWDPLLILSQIVLMQTVYYGSLGLWLALVDGLVRSSPSLDQMFDAEILGFSTPPGRLSMMSFILNALTCALGLLYFIRRGKQCLDFTVTVHFFHLLGCWFYSSRFPSALTWWLVQAVCIALMAVIGEYLCMRTELKEIPLNSAPKSNV

SEQ ID NO: 851985 - protein, 161 aa, Homo sapiens [sequence omitted]

SEQ ID NO: 851986 - protein, 284 aa, Homo sapiens
RAGRRCHGDRPLAEARLVSLQGMAGQFRSYVWDPLLILSQIVLMQTVYYGSLGLWLALVDGLVRSSPSLDQMFDAEILGFSTPPGRLSMMSFILNALTWHFSLLLPHEEGRVCFPFHHELGADMDPNPRAALERQQLRLRERQKFFEDILQPETEFVFPLSHLHLESQRPPIGSISSMEVNVDTLEQVELIDLGDPDAADVFLPCEDPPPTPQSSGVDNHLEELSLPVPTSDRTTSRTSSSSSSDSSTNLHSPNPSDDGADTPLAQSDEEEERGDGGAEPGACS

SEQ ID NO: 851987 - protein, 263 aa, Homo sapiens [sequence omitted]

SEQ ID NO: 851988 - protein, 245 aa, Homo sapiens
MESWALAVFPEYRVSLLWCLELASPLWSLGQAPPLHETWFVGHTWFQGRGKRSPRAEVSRPEPGAPLLGCWLQWGAPSPGPLCLLFRLCSCTCFAPLPAGADMDPNPRAALERQQLRLRERHHLHLESQRPPIGSISSMEVNVDTLEQVELIDLGDPDAADVFLPCEDPPPTPQSSGVDNHLEELSLPVPTSDRTTSRTSSSSSSDSSTNLHSPNPSDDGADTPLAQSDEEEERGDGGAEPGACS

SEQ ID NO: 851989 - protein, 156 aa, Homo sapiens; identical to SEQ ID NO: 851965

SEQ ID NO: 851990 - protein, 112 aa, Homo sapiens; identical to SEQ ID NO: 851972

SEQ ID NO: 851991 - protein, 156 aa, Homo sapiens; identical to SEQ ID NO: 851965

SEQ ID NO: 851992 - protein, 156 aa, Homo sapiens
MCSVRYPAGLVPGSGGSGRGCTHYACATSAPPLRCFPRKRFFPFFPTQPLLPPWSLELCLSRPAAPLLHGPVCQRCFGSPPVRPGHAQTLRSSSLSLGMAGQFRSYVWDPLLILSQIVLMQTVYYGSLGLWLALVDGLVRSSPSLDQMFDAEAGSP

SEQ ID NO: 851993 - protein, 253 aa, Homo sapiens
MESWALAVFPEYRVSLLWCLELASPLWSLGQAPPLHETWFVGHTWFQGRGKRSPRAEVSRPEPGAPLLGCWLQWGAPSPGPLCLLFRLCSCTCFAPLPAGADMDPNPRAALERQQLRLRERQKFFEDILQPETEFVFPLSHLHLESQRPPIGSISSMEVNVDTLEQVELIDLGDPDAADVFLPCEDPPPTPQSSGVDNHLEELSLPVPTSDRTTSRTSSSSSSDSSTNLHSPNPSDDGADTPLAQSDEEEATD

SEQ ID NO: 851994 - protein, 250 aa, Homo sapiens
MESWALAVFPEYRVSLLWCLELASPLWSLGQAPPLHETWFVGHTWFQGRGKRSPRAEVSRPEPGAPLLGCWLQWGAPSPGPLCLLFRLCSCTCFAPLPAGADMDPNPRAALERQQLRLRERQKFFEDILQPETEFVFPLSHLHLESQRPPIGSISSMEVNVDTLEQVELIDLGDPDAADVFLPCEDPPPTPQSSGVDNHLEELSLPLQTDHAGYSPHETTGPARACREKTRLFTCSRHQRWEGWWDCVPF

SEQ ID NO: 851995 - protein, 248 aa, Homo sapiens; identical to SEQ ID NO: 851978

SEQ ID NO: 851996 - protein, 431 aa, Homo sapiens
MPPILQRLQQATKMMSRRKILLLVLGCSTVSLLIHQGAQLSWYPKLFPLSCPPLRNSPPRPKHMTVAFLKTHKTAGTTVQNILFRFAERHNLTVALPHPSCEHQFCYPRNFSAHFVHPATRPPHVLASHLRFDRAELERLMPPSTVYVTILREPAAMFESLFSYYNQYCPAFRRVPNASLEAFLRAPEAYYRAGEHFAMFAHNTLAYDLGGDNERSPRDDAAYLAGLIRQVEEVFSLVMIAEYFDESLVLLRRLLAWDLDDVLYAKLNARAASSRLAAIPAALARAARTWNALDAGLYDHFNATFWRHVARAGRACVEREARELREARQRLLRRCFGDEPLLRPAAQIRTKQLQPWQPSRKVDIMGYDLPGGGAGPATEACLKLAMPEVQYSNYLLRKQKRRGGARARPEPVLDNPPPRPIRVLPRGPQGP

SEQ ID NO: 851997 - protein, 431 aa, Homo sapiens; identical to SEQ ID NO: 851996

SEQ ID NO: 851998 - protein, 343 aa, Homo sapiens
VLTAAMEALAMGSRALRLWLVAPGGGIKWRFIATSPASQLSPTELTEMRNDLFNKEKARQLSLTPRTEKIEVKHVGKTDPGTVFVMNKNISTPYSCAMHLSEWYCRKSILALVDGQPWDMYKPLTKSCEIKFLTFKDCDPGEVNKAYWRSCAMMMGCVIERAFKDEYMVNLVRAPEVPVISGAFCYDVVLDSKLDEWMPTKENLRSFTKDAHALIYKDLPFETLEVEAKVALEIFQHSKYKVDFIEEKASQNPERIVKLHRIGDFIDVSEGPLIPRTSICFQYEVSAVHNLQPTQPSLIRRFQGVSLPVHLRAHFTIWDKLLERSRKMVTEDQSKATEECTST

SEQ ID NO: 851999 - protein, 169 aa, Homo sapiens
GGLASVYQNYVNLVRAPEVPVISGAFCYDVVLDSKLDEWMPTKENLRSFTKDAHALIYKDLPFETLEVEAKVALEIFQHSKYKVDFIEEKASQNPERIVKLHRIGDFIDVSEGPLIPRTSICFQYEVSAVHNLQPTQPSLIRRFQGVSLPVHLRAHFTIWDNTFARGIL

SEQ ID NO: 852000 - protein, 358 aa, Homo sapiens
VLTAAMEALAMGSRALRLWLVAPGGGIKWRFIATSPASQLSPTELTEMRNDLFNKEKARQLSLTPRTEKIEVKHVGKTDPGTVFVMNKNISTPYSCAMHLSEWYCRKSILALVDGQPWDMYKPLTKSCEIKFLTFKDCDPGEVNKAYWRSCAMMMGCVIERAFKDEYMVNLVRAPEVPVISGAFCYDVVLDSKLDEWMPTKENLRSFTKDAHALIYKDLPFETLEVEAKVALEIFQHSKYKVDFIEEKASQNPERIVKLHRIGDFIDVSEGPLIPRTSICFQYEVSAVHNLQPTQPSLIRRFQGVSLPVHLRAHFTIWDKLLERSRKMTPFPILLLFTTQSFFTTSPESYLLHGTVSE

SEQ ID NO: 852001 - protein, 316 aa, Homo sapiens
VLTAAMEALAMGSRALRLWLVAPGGGIKWRFIATSPASQLSPTELTEMRNDLFNKEKARQLSLTPRTEKIEVKHVGKTDPGTVFVMNKNISTPYSCAMHLSEWYCRKSILALVDGQPWDMYKPLTKSCEIKFLTFKDCDPGEVNKAYWRSCAMMMGCVIERAFKDEYMVNLVRAPEVPVISGAFCYDVVLDSKLDEWMPTKENLRSFTKDAHALIYKDLPFETLEVEAKVALEIFQHSKYKVDFIEEKASQNPERIVKLHRIGDFIDVSEGPLIPRTSICFQYEVSAVHNLQPTQPSLIRRFQGVSLPVHLRVSKA

SEQ ID NO: 852002 - protein, 135 aa, Homo sapiens
  misc_feature (15)..(15): Xaa can be any naturally occurring amino acid
CEALVFAVRPSRIPXISPDTDLLSRRVSPAWYKVDFIEEKASQNPERIVKLHRIGDFIDVSEGPLIPRTSICFQYEVSAVHNLQPTQPSLIRRFQGVSLPVHLRAHFTIWDKLLERSRKMVTEDQSKATEECTST

SEQ ID NO: 852003 - protein, 343 aa, Homo sapiens; identical to SEQ ID NO: 851998

SEQ ID NO: 852004 - protein, 252 aa, Homo sapiens
VLTAAMEALAMGSRALRLWLVAPGGGIKWRFIATSPASQLSPTELTEMRNDLFNKEKARQLSLTPRTEKIEVKHVGKTDPGTVFVMNKNISTPYSCAMHLSEWYCRKSILALVDGQPWDMYKPLTKSCEIKFLTFKDCDPGEVNKAYWRSCAMMMGCVIERAFKDEYMVNLVRAPEVPVLDSKLDEWMPTKENLRSFTKDAHALIYKDLPFETLEVEAKVALEIFQHSKYTVDSSERRKASPEPERIVKVHE

SEQ ID NO: 852005 - protein, 144 aa, Homo sapiens
MTGSSPAASNMAASIQRSRVPASGFRTVGQATSGSAMAGFPGLERKFRRGRPRGKSVSAGERGESPKRPRKSQGVEAPAVEPCGVCVVTPCLCPCSPMLPPCLELSGKRPRLFFYMDLETQGTAGLTPSPPSGSLTSSTSVPMP

SEQ ID NO: 852006 - protein, 226 aa, Homo sapiens
MSVPLLTDAATVSGAERETAAVIFLHGLGDTGHSWADALSTIRLPHVKYICPHAPRIPVTLNMKMVMPSWFDLMGLSPDAPEDEAGIKKAAENIKALIEHEMKNGIPANRIVLGGFSQGGALSLYTALTCPHPLAGIVALSCWLPLHRAFPQAANGSAKDLAILQCHGELDPMVPVRFGALTAEKLRSVVTPARVQFKTYPGVMHSSCPQEMAAVKEFLEKLLPPV

SEQ ID NO: 852007 - protein, 226 aa, Homo sapiens; identical to SEQ ID NO: 852006

SEQ ID NO: 852008 - protein, 226 aa, Homo sapiens; identical to SEQ ID NO: 852006

SEQ ID NO: 852009 - protein, 226 aa, Homo sapiens; identical to SEQ ID NO: 852006

SEQ ID NO: 852010 - protein, 286 aa, Homo sapiens
  misc_feature (1)..(1): Xaa can be any naturally occurring amino acid
XRFAVSGSSSRTEPGCCVGLMAWWPHWARECVLCLVLLLTAAPMYAGPRRGAVWCMCGNTMSVPLLTDAATVSGAERETAAVIFLHGLGDTGHSWADALSTIRLPHVKYICPHAPRIPVTLNMKMVMPSWFDLMGLSPDAPEDEAGIKKAAENIKALIEHEMKNGIPANRIVLGGFSQGGALSLYTALTCPHPLAGIVALSCWLPLHRAFPQAANGSAKDLAILQCHGELDPMVPVRFGALTAEKLRSVVTPARVQFKTYPGVMHSSCPQEMAAVKEFLEKLLPPV

SEQ ID NO: 852011 - protein, 219 aa, Homo sapiens
LGPDWGDRKASPRSVIFLHGLGDTGHSWADALSTIRLPHVKYICPHAPRIPVTLNMKMVMPSWFDLMGLSPDAPEDEAGIKKAAENIKALIEHEMKNGIPANRIVLGGFSQGGALSLYTALTCPHPLAGIVALSCWLPLHRAFPQAANGSAKDLAILQCHGELDPMVPVRFGALTAEKLRSVVTPARVQFKTYPGVMHSSCPQEMAAVKEFLEKLLPPV

SEQ ID NO: 852012 - protein, 244 aa, Homo sapiens
VVKPGLVCSQWQQQQAPAVEPCGVCVVTPCLCPCSPMLPPCLELSGKRPRHSWADALSTIRLPHVKYICPHAPRIPVTLNMKMVMPSWFDLMGLSPDAPEDEAGIKKAAENIKALIEHEMKNGIPANRIVLGGFSQGGALSLYTALTCPHPLAGIVALSCWLPLHRAFPQAANGSAKDLAILQCHGELDPMVPVRFGALTAEKLRSVVTPARVQFKTYPGVMHSSCPQEMAAVKEFLEKLLPPV

SEQ ID NO: 852013 - protein, 125 aa, Homo sapiens
MKNGIPANRIVLGGFSQGGALSLYTALTCPHPLAGIVALSCWLPLHRAFPQAANGSAKDLAILQCHGELDPMVPVRFGALTAEKLRSVVTPARVQFKTYPGVMHSSCPQEMAAVKEFLEKLLPPV

SEQ ID NO: 852014 - protein, 177 aa, Homo sapiens
MSVPLLTDAATVSGAERETAAVIFLHGLGDTGHSWADALSTIRLPHVKYICPHAPRIPVTLNMKMVMPSWFDLMGLSPDAPEDEAGIKKAAENIKALIEHEMKNGIPANRIVLGGFSQGGALSLYTALTCPHPLAGIVALSCWLPLHRAFPQGPVQDIPGCHAQLLSSGDGSCEGIS

SEQ ID NO: 852015 - protein, 172 aa, Homo sapiens
MSVPLLTDAATVSGAERETAAVIFLHGLGDTGHSWADALSTIRLPHVKYICPHAPRIPVTLNMKMVMPSWFDLMGLSPDAPEDEAGIKKAAENIKALIEHEMKNGIPANRIVLGGFSQGGALSLYTALTCPHLSHPHFVPTLEQGGSGGGVVSRLLSPCGFWVFFLLCPGFR

SEQ ID NO: 852016 - protein, 226 aa, Homo sapiens; identical to SEQ ID NO: 852006

SEQ ID NO: 852017 - protein, 226 aa, Homo sapiens; identical to SEQ ID NO: 852006

SEQ ID NO: 852018 - protein, 226 aa, Homo sapiens; identical to SEQ ID NO: 852006

SEQ ID NO: 852019 - protein, 226 aa, Homo sapiens; identical to SEQ ID NO: 852006

SEQ ID NO: 852020 - protein, 259 aa, Homo sapiens
IHSGLAFNLPFLPQSPMSRGPRRGAVWCMCGNTMSVPLLTDAATVSGAERETAAVIFLHGLGDTGHSWADALSTIRLPHVKYICPHAPRIPVTLNMKMVMPSWFDLMGLSPDAPEDEAGIKKAAENIKALIEHEMKNGIPANRIVLGGFSQGGALSLYTALTCPHPLAGIVALSCWLPLHRAFPQAANGSAKDLAILQCHGELDPMVPVRFGALTAEKLRSVVTPARVQFKTYPGVMHSSCPQEMAAVKEFLEKLLPPV

SEQ ID NO: 852021 - protein, 305 aa, Homo sapiens
MTGSSPAASNMAASIQRSRVPASGFRTVGQATSGSAMAGFPGLERKFRRGRPRGKSVSAGERGESPKRPRKSQGVEAPAVEPCGVCVVTPCLCPCSPMLPPCLELSGKRPRHSWADALSTIRLPHVKYICPHAPRIPVTLNMKMVMPSWFDLMGLSPDAPEDEAGIKKAAENIKALIEHEMKNGIPANRIVLGGFSQGGALSLYTALTCPHPLAGIVALSCWLPLHRAFPQAANGSAKDLAILQCHGELDPMVPVRFGALTAEKLRSVVTPARVQFKTYPGVMHSSCPQEMAAVKEFLEKLLPPV

SEQ ID NO: 852022 - protein, 164 aa, Homo sapiens
MKMVMPSWFDLMGLSPDAPEDEAGIKKAAENIKALIEHEMKNGIPANRIVLGGFSQGGALSLYTALTCPHPLAGIVALSCWLPLHRAFPQAANGSAKDLAILQCHGELDPMVPVRFGALTAEKLRSVVTPARVQFKTYPGVMHSSCPQEMAAVKEFLEKLLPPV

SEQ ID NO: 852023 - protein, 179 aa, Homo sapiens
MTGSSPAASNMAASIQRSRVPASGFRTVGQATSGSAMAGFPGLERKFRRGRPRGKSVSAGERGESPKRPRKSQGVEAPAVEPCGVCVVTPCLCPCSPMLPPCLELSGKRPRLFFYMDLETQGTAGLTPSPPSGSLTSSTSVPMRRGPVPLHGPHLPPPSGWHRGVELLAASAPGLPPGS

SEQ ID NO: 852024 - protein, 172 aa, Homo sapiens
  misc_feature (52)..(52): Xaa can be any naturally occurring amino acid
  misc_feature (54)..(55): Xaa can be any naturally occurring amino acid
MSVPLLTDAATVSGAERETAAYFFTWTLRSTTKGPTCPWGPGERPPSIPTPXPXXPSKKPPPGGAPPNFFPPKKKNPGALFLKPKLPGYPPKLGRLASLCTLNMKMVMPSWFDLMGLSPDAPGGSEAGAIPKRANKGGAQKGPHKGKTRKKTPKFPKTGGPPFLANSGNANL

SEQ ID NO: 852025 - protein, 301 aa, Homo sapiens
MLEPQENGVIDLPDYEHVEDETFPPFPPPASPERQDGEGTEPDEESGNGAPVPVPPKRTVKRNIPKLDAQRLISERGLPALRHVFDKAKFKGKGHEAEDLKMLIRHMEHWAHRLFPKLQFEDFIDRVEYLGSKKEVQTCLKRIRLDLPILHEDFVSNNDEVAENNEHDVTSTELDPFLTNLSESEMFASELSRSLTEEQQQRIERNKQLALERRQAKLLSNSQTLGNDMLMNTPRAHTVEEVNTDEDQKEESNGLNEDILDNPCNDAIANTLNEEETLLDQSFKNVQQQLDATSRNITEAR

SEQ ID NO: 852026 - protein, 223 aa, Homo sapiens
TAWGRGPSRTPWRPLSPRGKQVDPAEKKSVSLCGELSRPGAARPPPLRSFAVCTARVKTILINQTVDIPENVNITLKGHTVIVNGPRGTLRRDFNHINVELSLLGKKKKEALVDKWWGNRKELATVRTICSHVQNMIKGVTLGFRYKMRSVYAYFPIIVVIPENGSVVEIRNFLGEKYIRRVRMRPGVACSVSQAQKDELIFEGNDIELVSNSAALIQQATTV

SEQ ID NO: 852027 - protein, 68 aa, Homo sapiens
TAWGRGPSRTPWRPLSPRGKQVDPAEKKSVSLCGELSRPGAARPPPLRVKDIRCTEQRKRVQNKGNIY

SEQ ID NO: 852028 - protein, 351 aa, Homo sapiens
LPGGGVRRGRRGALCRPEASRWTQLRRSLCRCVVSSPGQVPRGLHLCEEKMLEPQENGVIDLPDYEHVEDETFPPFPPPASPERQDGEGTEPDEESGNGAPVPVPPKRTVKRNIPKLDAQRLISERGLPALRHVFDKAKFKGKGHEAEDLKMLIRHMEHWAHRLFPKLQFEDFIDRVEYLGSKKEVQTCLKRIRLDLPILHEDFVSNNDEVAENNEHDVTSTELDPFLTNLSESEMFASELSRSLTEEQQQRIERNKQLALERRQAKLLSNSQTLGNDMLMNTPRAHTVEEVNTDEDQKEESNGLNEDILDNPCNDAIANTLNEEETLLDQSFKNVQQQLDATSRNITEAR

SEQ ID NO: 852029 - protein, 337 aa, Homo sapiens
TAWGRGPSRTPWRPLSPRGKQVDPAEKKSVSLCEEKMLEPQENGVIDLPDYEHVEDETFPPFPPPASPERQDGEGTEPDEESGNGAPVPVPPKRTVKRNIPKLDAQRLISERGLPALRHVFDKAKFKGKGHEAEDLKMLIRHMEHWAHRLFPKLQFEDFIDRVEYLGSKKEVQTCLKRIRLDLPILHEDFVSNNDEVAENNEHDVTSTELDPFLTNLSESEMFASELSRSLTEEQQQRIERNKQLALERRQAKLLSNSQTLGNDMLMNTPRAHTVEEVNTDEDQKEESNGLNEDILDNPCNDAIANTLNEEETLLDQSFKNVQQQLDATSRNITEAR

SEQ ID NO: 852030 - protein, 302 aa, Homo sapiens
MTTVSQDREASCTCSIHLGIPSTYYAKITNDGVADSETLKRSHWTQSGNGAPVPVPPKRTVKRNIPKLDAQRLISERGLPALRHVFDKAKFKGKGHEAEDLKMLIRHMEHWAHRLFPKLQFEDFIDRVEYLGSKKEVQTCLKRIRLDLPILHEDFVSNNDEVAENNEHDVTSTELDPFLTNLSESEMFASELSRSLTEEQQQRIERNKQLALERRQAKLLSNSQTLGNDMLMNTPRAHTVEEVNTDEDQKEESNGLNEDILDNPCNDAIANTLNEEETLLDQSFKNVQQQLDATSRNITEAR

SEQ ID NO: 852031 - protein, 285 aa, Homo sapiens
MLEPQENGVIDLPDYEHVEDETFPPFPPPASPERQDGEGTEPDEESGNGAPVPVPPKRTVKRNIPKLDAQRLISERGLPALRHVFDKAKFKGKGHEAEDLKMLIRHMEHWAHRLFPKLQFEDFIDRVEYLGSKKEVQTCLKRIRLDLPILHEDFVSNNDEVAENNEHDVTSTELDPFLTNLSESEMFASELSRSLTEEQQQRIERNKQLALERRQAKLLSNSQTLGNDCLIPRAHGAVFWWLKGAMVRDLDLVCLPLWRTARLRRVSIRIKMPGVLGELKGGVGG

SEQ ID NO: 852032 - protein, 209 aa, Homo sapiens
TAWGRGPSRTPWRPLSPRGKQVDPAEKKSVSLCGSFAVCTARVKTILINQTVDIPENVNITLKGHTVIVNGPRGTLRRDFNHINVELSLLGKKKKEALVDKWWGNRKELATVRTICSHVQNMIKGVTLGFRYKMRSVYAYFPIIVVIPENGSVVEIRNFLGEKYIRRVRMRPGVACSVSQAQKDELIFEGNDIELVSNSAALIQQATTV

SEQ ID NO: 852033 - protein, 301 aa, Homo sapiens; identical to SEQ ID NO: 852025

SEQ ID NO: 852034 - protein, 301 aa, Homo sapiens; identical to SEQ ID NO: 852025

SEQ ID NO: 852035 - protein, 161 aa, Homo sapiens
MIESSRYPLVLDSFNSNNDEVAENNEHDVTSTELDPFLTNLSESEMFASELSRSLTEEQQQRIERNKQLALERRQAKLLSNSQTLGNDMLMNTPRAHTVEEVNTDEDQKEESNGLNEDILDNPCNDAIANTLNEEETLLDQSFKNVQQQLDATSRNITEAR

SEQ ID NO: 852036 - protein, 146 aa, Homo sapiens
QRQNKNDLSHLSAWRYRPFTGLLPDPCLQPHLKDCPRQRQTRIRSTQVDQVFRLAKRQGRPLLPAPPPHRLASPDISHAPHPGQFALTFQCLIAQATSTGVADAGRAHRVRAPWCLSPAPAKGHKAWQEPRRTRERRRRGQAAGGR

SEQ ID NO: 852037 - protein, 1447 aa, Homo sapiens [sequence omitted]

SEQ ID NO: 852038 - protein, 1049 aa, Homo sapiens
MENSLRCVWVPKLAFVLFGASLLSAHLQVTGFQIKAFTALRFLSEPSDAVTMRGGNVLLDCSAESDRGVPVIKWKKDGIHLALGMDERKQQLSNGSLLIQNILHSRHHKPDEGLYQCEASLGDSGSIISRTAKVAVAGPLRFLSQTESVTAFMGDTVLLKCEVIGEPMPTIHWQKNQQDLTPIPGDSRVVVLPSGALQISRLQPGDIGIYRCSARNPASSRTGNEAEVRILSDPGLHRQLYFLQRPSNVVAIEGKDAVLECCVSGYPPPSFTWLRGEEVIQLRSKKYSLLGGSNLLISNVTDDDSGMYTCVVTYKNENISASAELTVLVPPWFLNHPSNLYAYESMDIEFECTVSGKPVPTVNWMKNGDVVIPSDYFQIVGGSNLRILGVVKSDEGFYQCVAENEAGNAQTSAQLIVPKPAIPSSSVLPSAPRDVVPVLVSSRFVRLSWRPPAEAKGNIQTFTVFFSREGDNRERALNTTQPGSLQLTVGNLKPEAMYTFRVVAYNEWGPGESSQPIKVATQPELQVPGPVENLQAVSTSPTSILITWEPPAYANGPVQGYRLFCTEVSTGKEQNIEVDGLSYKLEGLKKFTEYSLRFLAYNRYGPGVSTDDITVVTLSDVPSAPPQNVSLEVVNSRSIKVSWLPPPSGTQNGFITGYKIRHRKTTRRGEMETLEPNNLWYLFTGLEKGSQYSFQVSAMTVNGTGPPSNWYTAETPENDLDESQVPDQPSSLHVRPQTNCIIMSWTPPLNPNIVVRGYIIGYGVGSPYAETVRVDSKQRYYSIERLESSSHYVISLKAFNNAGEGVPLYESATTRSITDLSTPMLPPVGVQAVALTHDAVRVSWADNSVPKNQKTSEVRLYTVRWRTSFSASAKYKSEDTTSLSYTATGLKPNTMYEFSVMVTKNRRSSTWSMTAHATTYEAAPTSAPKDLTVITREGKPRAVIVSWQPPLEANGKITAYILFYTLDKNIPIDDWIMETISGDRLTHQIMDLNLDTMYYFRIQARNSKGVGPLSDPILFRTLKVEHPDKMANDQDTGVTINLVNEVLLG

SEQ ID NO: 852039 - protein, 1414 aa, Homo sapiens
SSPPPPPIPFAVPFRPLGFQIKAFTALRFLSEPSDAVTMRGGNVLLDCSAESDRGVPVIKWKKDGIHLALGMDERKQQLSNGSLLIQNILHSRHHKPDEGLYQCEASLGDSGSIISRTAKVAVAGPLRFLSQTESVTAFMGDTVLLKCEVIGEPMPTIHWQKNQQDLTPIPGDSRVVVLPSGALQISRLQPGDIGIYRCSARNPASSRTGNEAEVRILSDPGLHRQLYFLQRPSNVVAIEGKDAVLECCVSGYPPPSFTWLRGEEVIQLRSKKYSLLGGSNLLISNVTDDDSGMYTCVVTYKNENISASAELTVLVPPWFLNHPSNLYAYESMDIEFECTVSGKPVPTVNWMKNGDVVIPSDYFQIVGGSNLRILGVVKSDEGFYQCVAENEAGNAQTSAQLIVPKPAIPSSSVLPSAPRDVVPVLVSSRFVRLSWRPPAEAKGNIQTFTVFFSREGDNRERALNTTQPGSLQLTVGNLKPEAMYTFRVVAYNEWGPGESSQPIKVATQPELQVPGPVENLQAVSTSPTSILITWEPPAYANGPVQGYRLFCTEVSTGKEQNIEVDGLSYKLEGLKKFTEYSLRFLAYNRYGPGVSTDDITVVTLSDVPSAPPQNVSLEVVNSRSIKVSWLPPPSGTQNGFITGYKIRHRKTTRRGEMETLEPNNLWYLFTGLEKGSQYSFQVSAMTVNGTGPPSNWYTAETPENDLDESQVPDQPSSLHVRPQTNCIIMSWTPPLNPNIVVRGYIIGYGVGSPYAETVRVDSKQRYYSIERLESSSHYVISLKAFNNAGEGVPLYESATTRSITDLSTPMLPPVGVQAVALTHDAVRVSWADNSVPKNQKTSEVRLYTVRWRTSFSASAKYKSEDTTSLSYTATGLKPNTMYEFSVMVTKNRRSSTWSMTAHATTYEAAPTSAPKDLTVITREGKPRAVIVSWQPPLEANGKITAYILFYTLDKNIPIDDWIMETISGDRLTHQIMDLNLDTMYYFRIQARNSKGVGPLSDPILFRTLKVEHPDKMANDQGRHGDGGYWPVDTNLIDRSTLNEPPIGQMHPPHGSVTPQKNSNLLVIIVVTVGVITVLVVVIVAVICTRRSSAQQRKKRATHSAGKRKGSQKDLRPPDLWIHHEEMEMKNIEKPSGTDPAGRDSPIQSCQDLTPVSHSQSETQLGSKSTSHSGQDTEEAGSSMSTLERSLAARRAPRAKLMIPMDAQSNNPAVVSAIPVPTLESAQYPGILPSPTCGYPHPQFTLRPVPFPTLSVDRGFGAGRSQSVSEGPTTQQPPMLPPSQPEHSSSEEAPSRTIPTACVRPTHPLRSFANPLLPPPMSAIEPKVPYTPLLSQPGPTLPKTHVKTASLGLAGKARSPLLPVSVPTAPEVSEESHKPTEDSANVYEQDDLSEQMASLEGLMKQLNAITGSAF

SEQ ID NO: 852040 - protein, 328 aa, Homo sapiens
SSPPPPPIPFAVPFRPLGFQIKAFTALRFLSEPSDAVTMRGGNVLLDCSAESDRGVPVIKWKKDGIHLALGMDERKQQLSNGSLLIQNILHSRHHKPDEGLYQCEASLGDSGSIISRTAKVAVAGPLRFLSQTESVTAFMGDTVLLKCEVIGEPMPTIHWQKNQQDLTPIPGDSRVVVLPSGALQISRLQPGDIGIYRCSARNPASSRTGNEAEVRILSDPGLHRQLYFLQRPSNVVAIEGKDAVLECCVSGYPPPSFTWLRGEEVIQLRSKKYSLLGGSNLLISNVTDDDSGMYTCVVTYKNENISASAELTVLVIIDKVLVDTFWV

SEQ ID NO: 852041 - protein, 128 aa, Homo sapiens
SSPPPPPIPFAVPFRPLGFQIKAFTALRFLSEPSDAVTMRGGNVLLDCSAESDRGVPVIKWKKDGIHLALGMDERKQQLSNGSLLIQNILHSRHHKPDEGLYQCEASLGDSGSIISRTAKVAVAEEQI

SEQ ID NO: 852042 - protein, 1427 aa, Homo sapiens
MENSLRCVWVPKLAFVLFGASLLSAHLQVTGFQIKAFTALRFLSEPSDAVTMRGGNVLLDCSAESDRGVPVIKWKKDGIHLALGMDERKQQLSNGSLLIQNILHSRHHKPDEGLYQCEASLGDSGSIISRTAKVAVAGPLRFLSQTESVTAFMGDTVLLKCEVIGEPMPTIHWQKNQQDLTPIPGDSRVVVLPSGALQISRLQPGDIGIYRCSARNPASSRTGNEAEVRILSDPGLHRQLYFLQRPSNVVAIEGKDAVLECCVSGYPPPSFTWLRGEEVIQLRSKKYSLLGGSNLLISNVTDDDSGMYTCVVTYKNENISASAELTVLVPPWFLNHPSNLYAYESMDIEFECTVSGKPVPTVNWMKNGDVVIPSDYFQIVGGSNLRILGVVKSDEGFYQCVAENEAGNAQTSAQLIVPKPAIPSSSVLPSAPRDVVPVLVSSRFVRLSWRPPAEAKGNIQTFTVFFSREGDNRERALNTTQPGSLQLTVGNLKPEAMYTFRVVAYNEWGPGESSQPIKVATQPELQVPGPVENLQAVSTSPTSILITWEPPAYANGPVQGYRLFCTEVSTGKEQNIEVDGLSYKLEGLKKFTEYSLRFLAYNRYGPGVSTDDITVVTLSDVPSAPPQNVSLEVVNSRSIKVSWLPPPSGTQNGFITGYKIRHRKTTRRGEMETLEPNNLWYLFTGLEKGSQYSFQVSAMTVNGTGPPSNWYTAETPENDLDESQVPDQPSSLHVRPQTNCIIMSWTPPLNPNIVVRGYIIGYGVGSPYAETVRVDSKQRYYSIERLESSSHYVISLKAFNNAGEGVPLYESATTRSITDLSTPMLPPVGVQAVALTHDAVRVSWADNSVPKNQKTSEVRLYTVRWRTSFSASAKYKSEDTTSLSYTATGLKPNTMYEFSVMVTKNRRSSTWSMTAHATTYEAAPTSAPKDLTVITREGKPRAVIVSWQPPLEANGKITAYILFYTLDKNIPIDDWIMETISGDRLTHQIMDLNLDTMYYFRIQARNSKGVGPLSDPILFRTLKVEHPDKMANDQGRHGDGGYWPVDTNLIDRSTLNEPPIGQMHPPHGSVTPQKNSNLLVIIVVTVGVITVLVVVIVAVICTRRSSAQQRKKRATHSAGKRKGSQKDLRPPDLWIHHEEMEMKNIEKPSGTDPAGRDSPIQSCQDLTPVSHSQSETQLGSKSTSHSGQDTEEAGSSMSTLERSLAARRAPRAKLMIPMDAQSNNPAVVSAIPVPTLESAQYPGILPSPTCGYPHPQFTLRPVPFPTLSVDRGFGAGRSQSVSEGPTTQQPPMLPPSQPEHSSSEEAPSRTIPTACVRPTHPLRSFANPLLPPPMSAIEPKVPYTPLLSQPGPTLPKTHVKTASLGLAGKARSPLLPVSVPTAPEVSEESHKPTEDSANVYEQDDLSEQMASLEGLMKQLNAITGSAF

SEQ ID NO: 852043 - protein, 1412 aa, Homo sapiens
MENSLRCVWVPKLAFVLFGASLLSAHLQVTGFQIKAFTALRFLSEPSDAVTMRGGNVLLDCSAESDRGVPVIKWKKDGIHLALGMDERKQQLSNGSLLIQNILHSRHHKPDEGLYQCEASLGDSGSIISRTAKVAVAGPLRFLSQTESVTAFMGDTVLLKCEVIGEPMPTIHWQKNQQDLTPIPGDSRVVVLPSGALQISRLQPGDIGIYRCSARNPASSRTGNEAEVRILSDPGLHRQLYFLQRPSNVVAIEGKDAVLECCVSGYPPPSFTWLRGEEVIQLRSKKYSLLGGSNLLISNVTDDDSGMYTCVVTYKNENISASAELTVLVPPWFLNHPSNLYAYESMDIEFECTVSGKPVPTVNWMKNGDVVIPSDYFQIVGGSNLRILGVVKSDEGFYQCVAENEAGNAQTSAQLIVPKPAIPSSSVLPSAPRDVVPVLVSSRFVRLSWRPPAEAKGNIQTFTVFFSREGDNRERALNTTQPGSLQLTVGNLKPEAMYTFRVVAYNEWGPGESSQPIKVATQPELQVPGPVENLQAVSTSPTSILITWEPPAYANGPVQGYRLFCTEVSTGKEQNIEVDGLSYKLEGLKKFTEYSLRFLAYNRYGPGVSTDDITVVTLSDVPSAPPQNVSLEVVNSRSIKVSWLPPPSGTQNGFITGYKIRHRKTTRRGEMETLEPNNLWYLFTGLEKGSQYSFQVSAMTVNGTGPPSNWYTAETPENDLDESQVPDQPSSLHVRPQTNCIIMSWTPPLNPNIVVRGYIIGYGVGSPYAETVRVDSKQRYYSIERLESSSHYVISLKAFNNAGEGVPLYESATTRSITDLSTPMLPPVGVQAVALTHDAVRVSWADNSVPKNQKTSEVRLYTVRWRTSFSASAKYKSEDTTSLSYTATGLKPNTMYEFSVMVTKNRRSSTWSMTAHATTYEAAPTSAPKDLTVITREGKPRAVIVSWQPPLEANGKITAYILFYTLDKNIPIDDWIMETISGDRLTHQIMDLNLDTMYYFRIQARNSKGVGPLSDPILFRTLKVEHPDKMANDQGRHGDGGYWPVDTNLIDRSTLNEPPIGQMHPPHGSVTPQKNSNLLVIIVVTVGVITVLVVVIVAVICTRRSSAQQRKKRATHSAGKRKGSQKDLRPPDLWIHHEEMEMKNIEKPSGTDPAGRDSPIQSCQDLTPVSHSQSETQLGSKSTSHSGQDTEEAGSSMSTLERSLAARRAPRAKLMIPMDAQSNNPAVVSAIPVPTLESAQYPGILPSPTCGYPHPQFTLRPVPFPTLSVDRGFGAGRSQSVSEGPTTQQPPMLPPSQPEHSSSEEAPSRTIPTACVRPTHPLRSFANPLLPPPMSAIEPKVPYTPLLSQPGPTLPKTHVKTASLGLAGKARSPLLPVSVPTAPEVSEESHKPTEDSANVRASLKFMLHQGTD

SEQ ID NO: 852044 - protein, 128 aa, Homo sapiens
SSPPPPPIPFAVPFRPLGFQIKAFTALRFLSEPSDAVTMRGGNVLLDCSAESDRGVPVIKWKKDGIHLALGMDERKQQLSNGSLLIQNILHSRHHKPDEGLYQCEASLGDSGSIISRTAKVAVAEREM

SEQ ID NO: 852045 - protein, 191 aa, Homo sapiens
PSFANGPACPSLASVLASPVSLASPVSQPRQCPSLASEPKSENYTYIWWLNGQSLPVSPRVKRPIENRILILPNVTRNETGPYQCEIRDRYGGIRSDPVTLNVLYGPDLPSIYPSFTYYRSGENLYLSCFAESNPPAEYFWTINGKFQQSGQKLSIPQITTKHRGLYTCSVRNSATGKARTLARLDTGEAR

SEQ ID NO: 852046 - protein, 335 aa, Homo sapiens
MGPLSAPPCTQHITWKGVLLTASLLNFWNLPITAQVTIEALPPKVSEGKDVLLLVHNLPQNLAGYIWYKGQLMDLYHYITSYVVDGQINIYGPAYTGRETVYSNASLLIQNVTREDAGSYTLHIIKRGDRTRGVTGYFTFNLYLKLPKPYITINNSKPRENKDVLAFTCEPKSENYTYIWWLNGQSLPVSPRVKQPIENRILILPSVTRNETGPYECEIRDRDGGMHSDPVTLNVLYGPDLPSIYPSFTYYRSGENLYLSCFAESNPPAEYFWTINGKFQQSGQKLSIPQITTKHRGLYTCSVRNSATGKESSKSMTVEVSAPSGIGRLPLLNPI

SEQ ID NO: 852047 - protein, 335 aa, Homo sapiens; identical to SEQ ID NO: 852046

SEQ ID NO: 852048 - protein, 335 aa, Homo sapiens; identical to SEQ ID NO: 852046

SEQ ID NO: 852049 - protein, 176 aa, Homo sapiens
ENKDVLAFTCEPKSENYTYIWWLNGQSLPVSPGVKRPIENRILILPSVTRNETGPYQCEIRDRYGGLRSNPVILNVLYGPDLPSIYPSFTYYRSGENLYLSCFAESNPPAEYFWTINGKFQQSGQKLSIPQITTKHRGLYTCSVRNSATGKESSKSMTVEVSAPSGIGRLPLLNPI

SEQ ID NO: 852050 - protein, 335 aa, Homo sapiens; identical to SEQ ID NO: 852046

SEQ ID NO: 852051 - protein, 336 aa, Homo sapiens
MGPLSAPPCTQHITWKGVLLTASLLNFWNLPITAQVTIEALPPKVSEGKDVLLLVHNLPQNLAGYIWYKGQLMDLYHYITSYVVDGQINIYGPAYTGRETVYSNASLLIQNVTREDAGSYTLHIIKRGDRTRGVTGYFTFNLYLKLPKPYITINNSKPRENKDVLAFTCEPKSENYTYIWWLNGQSLPVSPRVKQPIENRILILPSVTRNETGPYECEIRDRDGGMHSDPVTLNVLYGPDLPSIYPSFTYYRSGENLYLSCFAESNPPAEYFWTINGKFQQSGQKLSIPQITTKHRGLYTCSVRNSATGKESSKSMTVEVSVCPEVELLDQMLLQE

SEQ ID NO: 852052 - protein, 355 aa, Homo sapiens
MGPLSAPPCTQHITWKGVLLTASLLNFWNLPITAQVTIEALPPKVSEGKDVLLLVHNLPQNLAGYIWYKGQLMDLYHYITSYVVDGQINIYGPAYTGRETVYSNASLLIQNVTREDAGSYTLHIIKRGDRTRGVTGYFTFNLYLKLPKPYITINNSKPRENKDVLAFTCEPKSENYTYIWWLNGQSLPVSPRVKQPIENRILILPSVTRNETGPYECEIRDRDGGMHSDPVTLNVLYGPDLPSIYPSFTYYRSGENLYLSCFAESNPPAEYFWTINGKFQQSGQKLSIPQITTKHRGLYTCSVRNSATGKESSKSMTVEVSDSCFDSSSNYLQSPTVQNCFFFKEIYGKDSDKDS

SEQ ID NO: 852053 - protein, 335 aa, Homo sapiens; identical to SEQ ID NO: 852046

SEQ ID NO: 852054 - protein, 335 aa, Homo sapiens; identical to SEQ ID NO: 852046

SEQ ID NO: 852055 - protein, 323 aa, Homo sapiens
MGPLSAPPCTQHITWKGVLLTASLLNFWNLPITAQVTIEALPPKVSEGKDVLLLVHNLPQNLAGYIWYKGQLMDLYHYITSYVVDGQINIYGPAYTGRETVYSNASLLIQNVTREDAGSYTLHIIKRGDRTRGVTGYFTFNLYLKLPKPYITINNSKPRENKDVLAFTCEPKSENYTYIWWLNGQSLPVSPRVKQPIENRILILPSVTRNETGPYECEIRDRDGGMHSDPVTLNVLYGPDLPSIYPSFTYYRSGENLYLSCFAESNPPAEYFWTINGKFQQSGQKLSIPQITTKHRGLYTCSVRNSATGKARTLARLDTGEAR

SEQ ID NO: 852056 - protein, 335 aa, Homo sapiens; identical to SEQ ID NO: 852046

SEQ ID NO: 852057 - protein, 163 aa, Homo sapiens
MGPLSAPPCTQHITWKGVLLTASLLNFWNLPITAQVTIEALPPKVSEGKDVLLLVHNLPQNLAGYIWYKGQLMDLYHYITSYVVDGQINIYGPAYTGRETVYSNASLLIQNVTREDAGSYTLHIIKRGDRTRGVTGYFTFNLYHPAPAQAQRETHTQELSHNK

SEQ ID NO: 852058 - protein, 335 aa, Homo sapiens; identical to SEQ ID NO: 852046

SEQ ID NO: 852059 - protein, 157 aa, Homo sapiens
MWWLNGQSLPVSPRVKRPIENRILILPNVTRNETGPYQCEIRDRYGGIRSDPVTLNVLYGPDLPSIYPSFTYYRSGENLYLSCFAESNPPAEYFWTINGKFQQSGQKLSIPQITTKHRGLYTCSVRNSATGKESSKSMTVEVSAPSGIGRLPLLNPI

SEQ ID NO: 852060 - protein, 157 aa, Homo sapiens [sequence omitted]

SEQ ID NO: 852061 - protein, 355 aa, Homo sapiens; identical to SEQ ID NO: 852052

SEQ ID NO: 852062 - protein, 333 aa, Homo sapiens
MGPLSAPPCTQHITWKGVLLTASLLNFWNLPITAQVTIEALPPKVSEGKDVLLLVHNLPQNLAGYIWYKGQLMDLYHYITSYVVDGQINIYGPAYTGRETVYSNASLLIQNVTREDAGSYTLHIIKRGDRTRGVTGYFTFNLYLKLPKPYITINNSKPRENKDVLAFTCEPKSENYTYIWWLNGQSLPVSPRVKQPIENRILILPSVTRNETGPYECEIRDRDGGMHSDPVTLNVLYGPDLPSIYPSFTYYRSGENLYLSCFAESNPPAEYFWTINGKFQQSGQKLSIPQITTKHRGLYTCSVRNSATGKESSKSMTVEVSGKWIPASLAIGF

SEQ ID NO: 852063 - protein, 152 aa, Homo sapiens
MGPLSAPPCTQHITWKGVLLTASLLNFWNLPITAQVTIEALPPKVSEGKDVLLLVHNLPQNLAGYIWYKGQLMDLYHYITSYVVDGQINIYGPAYTGRETVYSNASLLIQNVTREDAGSYTLHIIKRGDRTRGVTGENPHRHGEKVQISQRH

SEQ ID NO: 852064 - protein, 227 aa, Homo sapiens
CPGNRAARGTFRPLTPPKGRAYVRRLYGGGGFGGTLRTRSQASRSGAAGVTSDLGRGLQGSEPREKALGASSHLFGSRAWGHRVVLCHPHSSSAIPPSPQNSPGTPLSCSSRPSPITVLWAPHPMTQSQASSEMLDDSRPRASPLRLFVARLVIRLHPHTGCSAGSAPFPCEARPPPCATTSVCCSCRLATSRILAWFMDQAPSFSALLLRVCPWPSASSTLRRVLE

SEQ ID NO: 852065 - protein, 495 aa, Homo sapiens
CPGNRAARGTFRPLTPPKGRAYVRRLYGGGGFGGTLRTRSQASRSGAAGVTSDLGRGLQGSEPREKALGASSHLFGSRAWGHRVVLCHPHSSSAIPPSPQNSPGTPLSCSSRPSPITVLWAPHPMTQSQASSEMLDDSRPRASPLRLFVARLVIRLHPQHRMFRWERSIPLRGSAAALCNNLSVLQLPARNLTYFGVVHGPSAQLLSAAPEGVPLAQRQLHAKEGAGVSPPLITQVHWCVLPFRVLLVLTSHRGIQMYESNGYTMVYWHALDSGDASPVQAVFARGIAASGHFICVGTWSGRVLVFDIPAKGPNIVLSEELAGHQMPITDIATEPAQGQDCVADMVTADDSGLLCVWRSGPEFTLLTRIPGFGVPCPSVQLWQGIIAAGYGNGQVHLYEATTGNLHVQINAHARAICALDLASEVGKLLSAGEDTFVHIWKLSRNPESGYIEVEHCHGECVADTQLCGARFCDSSGNSFAVTGYDLAEIRRFSSV

SEQ ID NO: 852066 - protein, 308 aa, Homo sapiens
APATAPPAARSGRSPRPRAVRTCVVSMVAADLEGPYEPGVRRADLGLQVHWCVLPFRVLLVLTSHRGIQMYESNGYTMVYWHALDSGDASPVQAVFARGIAASGHFICVGTWSGRVLVFDIPAKGPNIVLSEELAGHQMPITDIATEPAQGQDCVADMVTADDSGLLCVWRSGPEFTLLTRIPGFGVPCPSVQLWQGIIAAGYGNGQVHLYEATTGNLHVQINAHARAICALDLASEVGKLLSAGEDTFVHIWKLSRNPESGYIEVEHCHGECVADTQLCGARFCDSSGNSFAVTGYDLAEIRRFSSV

SEQ ID NO: 852067 - protein, 170 aa, Homo sapiens
MPITDIATEPAQGQDCVADMVTADDSGLLCVWRSGPEFTLLTRIPGFGVPCPSVQLWQGIIAAGYGNGQVHLYEATTGNLHVQINAHARAICALDLASEVGKLLSAGEDTFVHIWKLSRNPESGYIEVEHCHGECVADTQLCGARFCDSSGNSFAVTGYDLAEIRRFSSV

SEQ ID NO: 852068 - protein, 151 aa, Homo sapiens [sequence omitted]

SEQ ID NO: 852069 - protein, 382 aa, Homo sapiens
PRQPRRPRHVPAAHPAQGPCVRASSLWWRRIWRDPTNQESGEPIWGCRMFRWERSIPLRGSAAALCNNLSVLQLPARNLTYFGVVHGPSAQLLSAAPEGVPLAQRQLHAKEGAGVSPPLITQVHWCVLPFRVLLVLTSHRGIQMYESNGYTMVYWHALDSGDASPVQAVFARGIAASGHFICVGTWSGRVLVFDIPAKGPNIVLSEELAGHQMPITDIATEPAQGQDCVADMVTADDSGLLCVWRSGPEFTLLTRIPGFGVPCPSVQLWQGIIAAGYGNGQVHLYEATTGNLHVQINAHARAICALDLASEVGKLLSAGEDTFVHIWKLSRNPESGYIEVEHCHGECVADTQLCGARFCDSSGNSFAVTGYDLAEIRRFSSV

SEQ ID NO: 852070 - protein, 382 aa, Homo sapiens; identical to SEQ ID NO: 852069

SEQ ID NO: 852071 - protein, 375 aa, Homo sapiens
APATAPPAARSGRSPRPRAVRTCVVSMVAADLEGPYEPGVRMFRWERSIPLRGSAAALCNNLSVLQLPARNLTYFGVVHGPSAQLLSAAPEGVPLAQRQLHAKEGAGVSPPLITQVHWCVLPFRVLLVLTSHRGIQMYESNGYTMVYWHALDSGDASPVQAVFARGIAASGHFICVGTWSGRVLVFDIPAKGPNIVLSEELAGHQMPITDIATEPAQGQDCVADMVTADDSGLLCVWRSGPEFTLLTRIPGFGVPCPSVQLWQGIIAAGYGNGQVHLYEATTGNLHVQINAHARAICALDLASEVGKLLSAGEDTFVHIWKLSRNPESGYIEVEHCHGECVADTQLCGARFCDSSGNSFAVTGYDLAEIRRFSSV

SEQ ID NO: 852072 - protein, 239 aa, Homo sapiens [sequence omitted]

SEQ ID NO: 852073 - protein, 193 aa, Homo sapiens
MVCYVNTRGGAQWGRGSHLNYTTRAAGGDENTTRWRERGKQPPEPEGILANEAETTTRRAGDRGTRGATPPTKEDPKARRGQNTIGRCIEGDHHQAEQSPGGRKNLGPAAISGRHNYTRARVTEKTAATHETQPGIKQTDTVAAMQQTEDNKEEKTQRTDAMQDANNRDSGHTQSTTADAQDHEQKQPARENT

SEQ ID NO: 852074 - protein, 199 aa, Homo sapiens
AESCPAAFSPVATVLTGPVVPRERMNLKVPIYFSTGLTEKANHYYKLFIPWTNQKIRKTFVQRNMFEFKHIKAFDRAFADNPGPMVVFATPGMLHAGQSLQIFRKWAGNEKNMGEGMVRCGNLEAGGRRVVLPPMLSLSSHWLGLVLAKGRGCCCWGTGAMSAWSCSVSVTQLVHLGQNSPSPALDSLVPKPEPFGVCS

SEQ ID NO: 852075 - protein, 527 aa, Homo sapiens
TGSCSEVVAPAQCITAGGPRGSGSAAETMPEIRVTPLGAGQDVGRSCILVSIAGKNVMLDCGMHMGFNDDVDDELEIKAYYAGHVLGAAMFQIKVGSESVVYTGDYNMTPDRHLGAAWIDKCRPNLLITESTYATTIRDSKRCRERDFLKKVHETVERGGKVLIPVFALGRAQELCILLETFWERMNLKVPIYFSTGLTEKANHYYKLFIPWTNQKIRKTFVQRNMFEFKHIKAFDRAFADNPGPMVVFATPGMLHAGQSLQIFRKWAGNEKNMVIMPGYCVQGTVGHKILSGQRKLEMEGRQVLEVKMQVEYMSFSAHADAKGIMQLVGQAEPESVLLVHGEAKKMEFLKQKIEQELRVNCYMPANGETVTLPTSPSIPVGISLGLLKREMAQGLLPEAKKPRLLHGTLIMKDSNFRLVSSEQALKELGLAEHQLRFTCRVHLHDTRKEQETALRVYSHLKSVLKDHCVQHLPDGSVTVESVLLQAAAPSEDPGTKVLLVSWTYQDEELGSFLTSLLKKGLPQAPS

SEQ ID NO: 852076 - protein, 606 aa, Homo sapiens
TGSCSEVVAPAQCITAGGPRGSGSAAETMPEIRVTPLGAGQDVGRSCILVSIAGKNVMLDCGMHMGFNDDRRFPDFSYITQNGRLTDFLDCVIISHFHLDHCGALPYFSEMVGYDGPIYMTHPTQAICPILLEDYRKIAVDKKGEANFFTSQMIKDCMKKVVAVHLHQTVQIKVGSESVVYTGDYNMTPDRHLGAAWIDKCRPNLLITESTYATTIRDSKRCRERDFLKKVHETVERGGKVLIPVFALGRAQELCILLETFWERMNLKVPIYFSTGLTEKANHYYKLFIPWTNQKIRKTFVQRNMFEFKHIKAFDRAFADNPGPMVVFATPGMLHAGQSLQIFRKWAGNEKNMVIMPGYCVQGTVGHKILSGQRKLEMEGRQVLEVKMQVEYMSFSAHADAKGIMQLVGQAEPESVLLVHGEAKKMEFLKQKIEQELRVNCYMPANGETVTLPTSPSIPVGISLGLLKREMAQGLLPEAKKPRLLHGTLIMKDSNFRLVSSEQALKELGLAEHQLRFTCRVHLHDTRKEQETALRVYSHLKSVLKDHCVQHLPDGSVTVESVLLQAAAPSEDPGTKVLLVSWTYQDEELGSFLTSLLKKGLPQAPS

SEQ ID NO: 852077 - protein, 518 aa, Homo sapiens [sequence omitted]

SEQ ID NO: 852078 - protein, 470 aa, Homo sapiens
MIAPLQPGDSPTLSLNFIYLFFFETQSRSVAQAGVQWRDLGLLQPPPPGFKQFSCLSLPSSWDYRRTPPHPANFVFLVETGFFRVGQAGLEFPPQMICPPWSPQVLIPVFALGRAQELCILLETFWERMNLKVPIYFSTGLTEKANHYYKLFIPWTNQKIRKTFVQRNMFEFKHIKAFDRAFADNPGPMVVFATPGMLHAGQSLQIFRKWAGNEKNMVIMPGYCVQGTVGHKILSGQRKLEMEGRQVLEVKMQVEYMSFSAHADAKGIMQLVGQAEPESVLLVHGEAKKMEFLKQKIEQELRVNCYMPANGETVTLPTSPSIPVGISLGLLKREMAQGLLPEAKKPRLLHGTLIMKDSNFRLVSSEQALKELGLAEHQLRFTCRVHLHDTRKEQETALRVYSHLKSVLKDHCVQHLPDGSVTVESVLLQAAAPSEDPGTKVLLVSWTYQDEELGSFLTSLLKKGLPQAPS

SEQ ID NO: 852079 - protein, 431 aa, Homo sapiens
VGALAEVDCHFDPQNRHLGAAWIDKCRPNLLITESTYATTIRDSKRCRERDFLKKVHETVERGGKVLIPVFALGRAQELCILLETFWERMNLKVPIYFSTGLTEKANHYYKLFIPWTNQKIRKTFVQRNMFEFKHIKAFDRAFADNPGPMVVFATPGMLHAGQSLQIFRKWAGNEKNMVIMPGYCVQGTVGHKILSGQRKLEMEGRQVLEVKMQVEYMSFSAHADAKGIMQLVGQAEPESVLLVHGEAKKMEFLKQKIEQELRVNCYMPANGETVTLPTSPSIPVGISLGLLKREMAQGLLPEAKKPRLLHGTLIMKDSNFRLVSSEQALKELGLAEHQLRFTCRVHLHDTRKEQETALRVYSHLKSVLKDHCVQHLPDGSVTVESVLLQAAAPSEDPGTKVLLVSWTYQDEELGSFLTSLLKKGLPQAPS

SEQ ID NO: 852080 - protein, 518 aa, Homo sapiens [sequence omitted]

SEQ ID NO: 852081 - protein, 498 aa, Homo sapiens
MIAPLQPGDSPTLSLNFIYLFFFETQSRSVAQAGVQWRDLGLLQPPPPGFKQFSCLSLPSSWDYRRTPPHPANFVFLVETGFFRVGQAGLEFPPQMICPPWSPQVLIPVFALGRAQELCILLETFWERMNLKVPIYFSTGLTEKANHYYKLFIPWTNQKIRKTFVQRNMFEFKHIKAFDRAFADNPGPMVVFATPGMLHAGQSLQIFRKWAGNEKNMVIMPGYCVQGTVGHKILSGQRKLEMEGRQVVSLDPALGWQGRGAPPGGNHCPRPVASVLEVKMQVEYMSFSAHADAKGIMQLVGQAEPESVLLVHGEAKKMEFLKQKIEQELRVNCYMPANGETVTLPTSPSIPVGISLGLLKREMAQGLLPEAKKPRLLHGTLIMKDSNFRLVSSEQALKELGLAEHQLRFTCRVHLHDTRKEQETALRVYSHLKSVLKDHCVQHLPDGSVTVESVLLQAAAPSEDPGTKVLLVSWTYQDEELGSFLTSLLKKGLPQAPS

SEQ ID NO: 852082 - protein, 572 aa, Homo sapiens
MVGYDGPIYMTHPTQAICPILLEDYRKIAVDKKGEANFFTSQMIKDCMKKVVAVHLHQTVQVDDELEIKAYYAGHVLGAAMFQIKVGSESVVYTGDYNMTPDRHLGAAWIDKCRPNLLITESTYATTIRDSKRCRERDFLKKVHETVERGGKVLIPVFALGRAQELCILLETFWERMNLKVPIYFSTGLTEKANHYYKLFIPWTNQKIRKTFVQRNMFEFKHIKAFDRAFADNPGPMVVFATPGMLHAGQSLQIFRKWAGNEKNMVIMPGYCVQGTVGHKILSGQRKLEMEGRQVLEVKMQVEYMSFSAHADAKGIMQLVGQAEPESVLLVHGEAKKMEFLKQKIEQELRVNCYMPANGETVTLPTSPSIPVGISLGLLKREMAQGMGLGRAGQGARGRRLGAALTLMAPATSSAGLLPEAKKPRLLHGTLIMKDSVSARTVSGGGRAAAALTDLSLPHRNFRLVSSEQALKELGLAEHQLRFTCRVHLHDTRKEQETALRVYSHLKSVLKDHCVQHLPDGSVTVESVLLQAAAPSEDPGTKVLLVSWTYQDEELGSFLTSLLKKGLPQAPS

SEQ ID NO: 852083 - protein, 399 aa, Homo sapiens
MIAPLQPGDSPTLSLNFIYLFFFETQSRSVAQAGVQWRDLGLLQPPPPGFKQFSCLSLPSSWDYRRTPPHPANFVFLVETGFFRVGQAGLEFPPQMICPPWSPQVLIPVFALGRAQELCILLETFWERMNLKVPIYFSTGLTEKANHYYKLFIPWTNQKIRKTFVQRNMFEFKHIKAFDRAFADNPGPMVVFATPGMLHAGQSLQIFRKWAGNEKNMKMEFLKQKIEQELRVNCYMPANGETVTLPTSPSIPVGISLGLLKREMAQGLLPEAKKPRLLHGTLIMKDSNFRLVSSEQALKELGLAEHQLRFTCRVHLHDTRKEQETALRVYSHLKSVLKDHCVQHLPDGSVTVESVLLQAAAPSEDPGTKVLLVSWTYQDEELGSFLTSLLKKGLPQAPS

SEQ ID NO: 852084 - protein, 492 aa, Homo sapiens
MVGYDGPIYMTHPTQAICPILLEDYRKIAVDKKGEANFFTSQMIKDCMKKVVAVHLHQTVQVDDELEIKAYYAGHVLGAAMFQIKVGSESVVYTGDYNMTPDRHLGAAWIDKCRPNLLITESTYATTIRDSKRCRERDFLKKVHETVERGGKVLIPVFALGRAQELCILLETFWERMNLKVPIYFSTGLTEKANHYYKLFIPWTNQKIRKTFVQRNMFEFKHIKAFDRAFADNPGPMVVFATPGMLHAGQSLQIFRKWAGNEKNMVIMPGYCVQGTVGHKILSGQRKLEMEGRQVLEVKMQVEYMSFSAHADAKGIMQLVGQAEPESVLLVHGEAKKMEFLKQKIEQELRVNCYMPANGETVTLPTSPSIPVGISLGLLKREMAQGLLPEAKKPRLLHGTLIMKDSNFRLVSSEQALKELGLAEHQLRFTCRVHLHDTRKEQETALRVYSHLKSPSEDPGTKVLLVSWTYQDEELGSFLTSLLKKGLPQAPS

SEQ ID NO: 852085 - protein, 551 aa, Homo sapiens
MIAPLQPGDSPTLSLNFIYLFFFETQSRSVAQAGVQWRDLGLLQPPPPGFKQFSCLSLPSSWDYRRTPPHPANFVFLVETGFFRVGQAGLEFPPQMICPPWSPQVLIPVFALGRAQELCILLETFWERMNLKVPIYFSTGLTEKANHYYKLFIPWTNQKIRKTFVQRNMFEFKHIKAFDRAFADNPGPMVVFATPGMLHAGQSLQIFRKWAGNEKNMVIMPGYCVQGTVGHKILSGQRKLEMEGRQVVSLDPALGWQGRGAPPGGNHCPRPVASVLEVKMQVEYMSFSAHADAKGIMQLVGQAEPESVLLVHGEAKKMEFLKQKIEQELRRQPGGRRGAHLGSARAAWAEALLFPRGPGVNCYMPANGETVTLPTSPSIPVGISLGLLKREMAQGLLPEAKKPRLLHGTLIMKDSVSARTVSGGGRAAAALTDLSLPHRNFRLVSSEQALKELGLAEHQLRFTCRVHLHDTRKEQETALRVYSHLKSVLKDHCVQHLPDGSVTVESVLLQAAAPSEDPGTKVLLVSWTYQDEELGSFLTSLLKKGLPQAPS

SEQ ID NO: 852086 - protein, 243 aa, Homo sapiens
FVQLGTPPQQTQLEMEGRQVLEVKMQVEYMSFSAHADAKGIMQLVGQAEPESVLLVHGEAKKMEFLKQKIEQELRVNCYMPANGETVTLPTSPSIPVGISLGLLKREMAQGLLPEAKKPRLLHGTLIMKDSNFRLVSSEQALKELGLAEHQLRFTCRVHLHDTRKEQETALRVYSHLKSVLKDHCVQHLPDGSVTVESVLLQAAAPSEDPGTKVLLVSWTYQDEELGSFLTSLLKKGLPQAPS

SEQ ID NO: 852087 - protein, 464 aa, Homo sapiens
MVGYDGPIYMTHPTQAICPILLEDYRKIAVDKKGEANFFTSQMIKDCMKKVVAVHLHQTVQVDDELEIKAYYAGHVLGAAMFQIKVGSESVVYTGDYNMTPDRHLGAAWIDKCRPNLLITESTYATTIRDSKRCRERDFLKKVHETVERGGKVLIPVFALGRAQELCILLETFWERMNLKVPIYFSTGLTEKANHYYKLFIPWTNQKIRKTFVQRNMFEFKHIKAFDRAFADNPGPMVVFATPGMLHAGQSLQIFRKWAGNEKNMVIMPGYCVQGTVGHKILSGQRKLEMEGRQVLEVKMQVEYMSFSAHADAKGIMQLVGQAEPESVLLVHGEAKKMEFLKQKIEQELRVNCYMPANGETVTLPTSPSIPVGISLGLLKREMAQGCPGPEALVLADPVMRNRLPGGVSEKPQSWSLRQWFPAGAVAAGEGVVAQVGAGVPRVGGGPGAFGAGGVPGVLGRRGP

SEQ ID NO: 852088 - protein, 135 aa, Homo sapiens
TGSCSEVVAPAQCITAGGPRGSGSAAETMPEIRVTPLGAGQDVGRSCILVSIAGKNVMLDCGMHMGFNDDVSPLGRRPRGWESRPSTAGPWASEPGQWGGGQQWLCLDGCTLWGAGMGGPGRGEPLHGGVPLCWR

SEQ ID NO: 852089 - protein, 135 aa, Homo sapiens; identical to SEQ ID NO: 852088

SEQ ID NO: 852090 - protein, 628 aa, Homo sapiens
TGSCSEVVAPAQCITAGGPRGSGSAAETMPEIRVTPLGAGQDVGRSCILVSIAGKNVMLDCGMHMGFNDDRRFPDFSYITQNGRLTDFLDCVIISHFHLDHCGALPYFSEMVGYDGPIYMTHPTQAICPILLEDYRKIAVDKKGEANFFTSQMIKDCMKKVVAVHLHQTVQVDDELEIKAYYAGHVLGAAMFQIKVGSESVVYTGDYNMTPDRHLGAAWIDKCRPNLLITESTYATTIRDSKRCRERDFLKKVHETVERGGKVLIPVFALGRAQELCILLETFWERMNLKVPIYFSTGLTEKANHYYKLFIPWTNQKIRKTFVQRNMFEFKHIKAFDRAFADNPGPMVVFATPGMLHAGQSLQIFRKWAGNEKNMVIMPGYCVQGTVGHKILSGQRKLEMEGRQVLEVKMQVEYMSFSAHADAKGIMQLVGQAEPESVLLVHGEAKKMEFLKQKIEQELRVNCYMPANGETVTLPTSPSIPVGISLGLLKREMAQGLLPEAKKPRLLHGTLIMKDSNFRLVSSEQALKELGLAEHQLRFTCRVHLHDTRKEQETALRVYSHLKSVLKDHCVQHLPDGSVTVESVLLQAAAPSEDPGTKVLLVSWTYQDEELGSFLTSLLKKGLPQAPS

SEQ ID NO: 852091 - protein, 421 aa, Homo sapiens
TGSCSEVVAPAQCITAGGPRGSGSAAETMPEIRVTPLGAGQDVGRSCILVSIAGKNVMLDCGMHMGFNDDRRFPDFSYITQNGRLTDFLDCVIISHFHLDHCGALPYFSEMVGYDGPIYMTHPTQAICPILLEDYRKIAVDKKGEANFFTSQMIKDCILLETFWERMNLKVPIYFSTGLTEKANHYYKLFIPWTNQKIRKTFVQRNMFEFKHIKAFDRAFADNPGPMVVFATPGMLHAGQSLQIFRKWAGNEKNMVIMPGYCVQGTVGHKILSGQRKLEMEGRQVLEVKMQVEYMSFSAHADAKGIMQLNFRLVSSEQALKELGLAEHQLRFTCRVHLHDTRKEQETALRVYSHLKSVLKDHCVQHLPDGSVTVESVLLQAAAPSEDPGTKVLLVSWTYQDEELGSFLTSLLKKGLPQAPS

SEQ ID NO: 852092 - protein, 545 aa, Homo sapiens
MVGYDGPIYMTHPTQAICPILLEDYRKIAVDKKGEANFFTSQMIKDCMKKVVAVHLHQTVQVDDELEIKAYYAGHVLGAAMFQIKVGSESVVYTVSGRAGGLGGAAGVGGTLLMASLIVHQGDYNMTPDRHLGAAWIDKCRPNLLITESTYATTIRDSKRCRERDFLKKVHETVERGGKVLIPVFALGRAQELCILLETFWERMNLKVPIYFSTGLTEKANHYYKLFIPWTNQKIRKTFVQRNMFEFKHIKAFDRAFADNPGPMVVFATPGMLHAGQSLQIFRKWAGNEKNMVIMPGYCVQGTVGHKILSGQRKLEMEGRQVLEVKMQVEYMSFSAHADAKGIMQLVGQAEPESVLLVHGEAKKMEFLKQKIEQELRVNCYMPANGETVTLPTSPSIPVGISLGLLKREMAQGLLPEAKKPRLLHGTLIMKDSNFRLVSSEQALKELGLAEHQLRFTCRVHLHDTRKEQETALRVYSHLKSVLKDHCVQHLPDGSVTVESVLLQAAAPSEDPGTKVLLVSWTYQDEELGSFLTSLLKKGLPQAPS

SEQ ID NO: 852093 - protein, 435 aa, Homo sapiens
MQATCWGQPCSRLKWAQSLWSTRAAWIDKCRPNLLITESTYATTIRDSKRCRERDFLKKVHETVERGGKVLIPVFALGRAQELCILLETFWERMNLKVPIYFSTGLTEKANHYYKLFIPWTNQKIRKTFVQRNMFEFKHIKAFDRAFADNPGPMVVFATPGMLHAGQSLQIFRKWAGNEKNMVIMPGYCVQGTVGHKILSGQRKLEMEGRQVLEVKMQVEYMSFSAHADAKGIMQLVGQAEPESVLLVHGEAKKMEFLKQKIEQELRVNCYMPANGETVTLPTSPSIPVGISLGLLKREMAQGLLPEAKKPRLLHGTLIMKDSNFRLVSSEQALKELGLAEHQLRFTCRVHLHDTRKEQETALRVYSHLKSVLKDHCVQHLPDGSVTVESVLLQAAAPSEDPGTKVLLVSWTYQDEELGSFLTSLLKKGLPQAPS

SEQ ID NO: 852094 - protein, 518 aa, Homo sapiens [sequence omitted]

SEQ ID NO: 852095 - protein, 518 aa, Homo sapiens [sequence omitted]

SEQ ID NO: 852096 - protein, 402 aa, Homo sapiens
MVGYDGPIYMTHPTQAICPILLEDYRKIAVDKKGEANFFTSQMIKDCMKKVVAVHLHQTVQVDDELEIKAYYAGHVLGAAMFQIKVGSESVVYTGDYNMTPDRHLGAAWIDKCRPNLLITESTYATTIRDSKRCRERDFLKKVHETVERGGKVLIPVFALGRAQELCILLETFWERMNLKVPIYFSTGLTEKANHYYKLFIPWTNQKIRKTFVQRNMFEFKHIKAFDRAFADNPGPMVVFATPGMLHAGQSLQIFRKWAGNEKNMVIMPGYCVQGTVGHKILSGQRKLEMEGRQVLEVKMQVEYMSFSAHADAKGIMQLVGQAEPESVLLVHGEAKKMEFLKQKIEQELRVNCYMPANGETVTLPTSPSIPVGISLGLLKREMAQELPAGVLRASPQRAGSG

SEQ ID NO: 852097 - protein, 518 aa, Homo sapiens [sequence omitted]

SEQ ID NO: 852098 - protein, 452 aa, Homo sapiens
MVGYDGPIYMTHPTQAICPILLEDYRKIAVDKKGEANFFTSQMIKDCMKKVVAVHLHQTVQVDDELEIKAYYAGHVLGAAMFQIKVGSESVVYTGDYNMTPDRHLGAAWIDKCRPNLLITESTYATTIRDSKRCRERDFLKKVHETVERGGKVLIPVFALGRAQELCILLETFWERMNLKVPIYFSTGLTEKANHYYKLFIPWTNQKIRKTFVQRNMFEFKHIKAFDRAFADNPGPMVVFATPGMLHAGQSLQIFRKWAGNEKNMVIMPGYCVQGTVGHKILSGQRKLEMEGRQVLEVKMQVEYMSFSAHADAKGIMQLVGQAEPESVLLVHGEAKKMEFLKQKIEQELRVNCYMPANGETVTLPTSPSIPVGISLGLLKREMAQGLLPEAKKPRLLHGTLIMKDSNFRLVSSEQALKELGLAEHQLRFTCRVHLHDTRKETRSWGASSHLC

SEQ ID NO: 852099 - protein, 447 aa, Homo sapiens
MVGYDGPIYMTHPTQAICPILLEDYRKIAVDKKGEANFFTSQMIKDCMKKVVAVHLHQTVQVDDELEIKAYYAGHVLGAAMFQIKVGSESVVYTGDYNMTPDRHLGAAWIDKCRPNLLITESTYATTIRDSKRCRERDFLKKVHETVERGGKVLIPVFALGRAQELCILLETFWERMNLKVPIYFSTGLTEKANHYYKLFIPWTNQKIRKTFVQRNMFEFKHIKAFDRAFADNPGPMVVFATPGMLHAGQSLQIFRKWAGNEKNMKMEFLKQKIEQELRVNCYMPANGETVTLPTSPSIPVGISLGLLKREMAQGLLPEAKKPRLLHGTLIMKDSNFRLVSSEQALKELGLAEHQLRFTCRVHLHDTRKEQETALRVYSHLKSVLKDHCVQHLPDGSVTVESVLLQAAAPSEDPGTKVLLVSWTYQDEELGSFLTSLLKKGLPQAPS

SEQ ID NO: 852100 - protein, 553 aa, Homo sapiens
MVGYDGPIYMTHPTQAICPILLEDYRKIAVDKKGEANFFTSQMIKDCMKKVVAVHLHQTVQIKVGSESVVYTGDYNMTPDRHLGAAWIDKCRPNLLITESTYATTIRDSKRCRERDFLKKVHETVERGGKVLIPVFALGRAQELCILLETFWERMNLKVPIYFSTGLTEKANHYYKLFIPWTNQKIRKTFVQRNMFEFKHIKAFDRAFADNPGPMVVFATPGMLHAGQSLQIFRKWAGNEKNMVIMPGYCVQGTVGHKILSGQRKLEMEGRQVVSLDPALGWQGRGAPPGGNHCPRPVASVLEVKMQVEYMSFSAHADAKGIMQLVGQAEPESVLLVHGEAKKMEFLKQKIEQELRRQPGGRRGAHLGSARAAWAEALIFPRGPGVNCYMPANGETVTLPTSPSIPVGISLGLLKREMAQGLLPEAKKPRLLHGTLIMKDSNFRLVSSEQALKELGLAEHQLRFTCRVHLHDTRKEQETALRVYSHLKSVLKDHCVQHLPDGSVTVESVLLQAAAPSEDPGTKVLLVSWTYQDEELGSFLTSLLKKGLPQAPS

SEQ ID NO: 852101 - protein, 135 aa, Homo sapiens; identical to SEQ ID NO: 852088

SEQ ID NO: 852102 - protein, 2969 aa, Homo sapiens [sequence omitted]

SEQ ID NO: 852103 - protein, 2952 aa, Homo sapiens
MDPRNTAMLGLGSDSEGFSRKSPSAISTGTLVSKREVELEKNTKEEEDLRKRNRERNIEAGKDDGLTDAQQQFSVKETNFSEGNLKLKIGLQAKRTKKPPKNLENYVCRPAIKTTIKHPRKALKSGKMTDEKNEHCPSKRDPSKLYKKADDVAAIECQSEEVIRLHSQGENNPLSKKLSPVHSEMADYINATPSTLLGSRDPDLKDRALLNGGTSVTEKLAQLIATCPPSKSSKTKPKKLGTGTTAGLVSKDLIRKAGVGSVAGIIHKDLIKKPTISTAVGLVTKDPGKKPVFNAAVGLVNKDSVKKLGTGTTAVFINKNLGKKPGTITTVGLLSKDSGKKLGIGIVPGLVHKESGKKLGLGTVVGLVNKDLGKKLGSTVGLVAKDCAKKIVASSAMGLVNKDIGKKLMSCPLAGLISKDAINLKAEALLPTQEPLKASCSTNINNQESQELSESLKDSATSKTFEKNVVRQNKESILEKFSVRKEIINLEKEMFNEGTCIQQDSFSSSEKGSYETSKHEKQPPVYCTSPDFKMGGASDVSTAKSPFSAVGESNLPSPSPTVSVNPLTRSPPETSSQLAPNPLLLSSTTELIEEISESVGKNQFTSESTHLNVGHRSVGHSISIECKGIDKEVNDSKTTHIDIPRISSSLGKKPSLTSESSIHTITPSVVNFTSLFSNKPFLKLGAVSASDKHCQVAESLSTSLQSKPLKKRKGRKPRWTKVVARSTCRSPKGLELERSELFKNVSCSSLSNSNSEPAKFMKNIGPPSFVDHDFLKRRLPKLSKSTAPSLALLADSEKPSHKSFATHKLSSSMCVSSDLLSDIYKPKRGRPKSKEMPQLEGPPKRTLKIPASKVFSLQSKEEQEPPILQPEIEIPSFKQGLSVSPFPKKRGRPKRQMRSPVKMKPPVLSVAPFVATESPSKLESESDNHRSSSDFFESEDQLQDPDDLDDSHRPSVCSMSDLEMEPDKKITKRNNGQLMKTIIRKINKMKTLKRKKLLNQILSSSVESSNKGKVQSKLHNTVSSLAATFGSKLGQQINVSKKGTIYIGKRRGRKPKTVLNGILSGSPTSLAVLEQTAQQAAGSALGQILPPLLPSSASSSEILPSPICSQSSGTSGGQSPVSSDAGFVEPSSVPYLHLHSRQGSMIQTLAMKKASKGRRRLSPPTLLPNSPSHLSELTSLKEATPSPISESHSDETIPSDSGIGTDNNSTSDRAEKFCGQKKRRHSFEHVSLIPPETSTVLSSLKEKHKHKCKRRNHDYLSYDKMKRQKRKRKKKYPQLRNRQDPDFIAELEELISRLSEIRITHRSHHFIPRDLLPTIFRINFNSFYTHPSFPLDPLHYIRKPDLKKKRGRPPKMREAMAEMPFMHSLSFPLSSTGFYPSYGMPYSPSPLTAAPIGLGYYGRYPPTLYPPPPSPSFTTPLPPPSYMHAGHLLLNPAKYHKKKHKLLRQEAFLTTSRTPLLSMSTYPSVPPEMAYGWMVEHKHRHRHKHREHRSSEQPQVSMDTGSSRSVLESLKRYRFGKDAVGERYKHKEKHRCHMSCPHLSPSKSLINREEQWVHREPSESSPLALGLQTPLQIDCSESSPSLSLGGFTPNSEPASSDEHTNLFTSAIGSCRVSNPNSSGRKKLTDSPGLFSAQDTSLNRLHRKESLPSNERAVQTLAGSQPTSDKPSQRPSESTNCSPTRKRSSSESTSSTVNGVPSRSPRLVASGDDSVDSLLQRMVQNEDQEPMEKSIDAVIATASAPPSSSPGRSHSKDRTLGKPDSLLVPAVASDSCNNSISLLSEKLTSSCSPHHIKRSVVEAMQRQARKMCNYDKILATKKNLDHVNKILKAKKLQRQARTGNNFVKRRPGRPRKCPLQAVVSMQAFQAAQFVNPELNRDEEGAALHLSPDTVTDVIEAVVQSVNLNPEHKKGLKRKGWLLEEQTRKKQKPLPEEEEQENNKSFNEAPVEIPSPSETPAKPSEPESTLQPVLSLIPREKKPPRPPKKKYQKAGLYSDVYKTTDPKSRLIQLKKEKLEYTPGEHEYGLFPAPIHVVFFVSGKYLRQKRIDFQLPYDILWQWKHNQLYKKPDVPLYKKIRSNVYVDVKPLSGYEATTCNCKKPDDDTRKGCVDDCLNRMIFAECSPNTCPCGEQCCNQRIQRHEWVQCLERFRAEEKGWGIRTKEPLKAGQFIIEYLGEVVSEQEFRNRMIEQYHNHSDHYCLNLDSGMVIDSYRMGNEARFINHSCDPNCEMQKWSVNGVYRIGLYALKDMPAGTELTYDYNFHSFNVEKQQLCKCGFEKCRGIIGGKSQRVNGLTSSKNSQPMATHKKSGRSKEKRKSKHKLKKRRGHLSEEPSENINTPTRLTPQLQMKPMSNRERNFVLKHHVFLVRNWEKIRQKQEEVKHTSDNIHSASLYTRWNGICRDDGNIKSDVFMTQFSALQTARSVRTRRLAAAEENIEVARAARLAQIFKEICDGIISYKDSSRQALAAPLLNLPPKKKNADYYEKISDPLDLITIEKQILTGYYKTVEAFDADMLKVFRNAEKYYGRKSPVGRDVCRLRKAYYNARHEASAQIDEIVGETASEADSSETSVSEKENGHEKDDDVIRCICGLYKDEGLMIQCDKCMVWQHCDCMGVNSDVEHYLCEQCDPRPVDREVPMIPRPHYAQPGCVYFICLLRDDLLLRQGDCVYLMRDSRRTPDGHPVRQSYRLLSHINRDKLDIFRIEKLWKNENHSPSRRFYHNELFRVPLYEIIPLEAVVGTCCVLDLYTYCKGRPKGVKEQDVYICDYRLDKSAHLFYKIHRNRYPVCTKPYAFDHFPKKLTPKKDFSPHYVPDNYKRNGGRSSWKSERSKPPLKDLGQEDDALPLIEEVLASQEQAANEIPSLEEPEREGATANVSEGEKKTEESSQEPQSTCTPEERRHNQRERLNQILLNLLEKIPGKNAIDVTYLLEEGSGRKLRRRTLFIPENSFRK

SEQ ID NO: 852104 - protein, 2969 aa, Homo sapiens [sequence omitted]

SEQ ID NO: 852105 - protein, 2969 aa, Homo sapiens [sequence omitted]

SEQ ID NO: 852106 - protein, 621 aa, Homo sapiens
MKPMSNRERNFVLKHHVFLVRNWEKIRQKQEEVKHTSDNIHSASLYTRWNGICRDDGNIKSDVFMTQFSALQTARSVRTRRLAAAEENIEVARAARLAQIFKEICDGIISYKDSSRQALAAPLLNLPPKKKNADYYEKISDPLDLITIEKQILTGYYKTVEAFDADMLKVFRNAEKYYGRKSPVGRDVCRLRKAYYNARHEASAQIDEIVGETASEADSSETSVSEKENGHEKDDDVIRCICGLYKDEGLMIQCDKCMVWQHCDCMGVNSDVEHYLCEQCDPRPVDREVPMIPRPHYAQPGCVYFICLLRDDLLLRQGDCVYLMRDSRRTPDGHPVRQSYRLLSHINRDKLDIFRIEKLWKNEKEERFAFGHHYFRPHETHHSPSRRFYHNELFRVPLYEIIPLEAVVGTCCVLDLYTYCKGRPKGVKEQDVYICDYRLDKSAHLFYKIHRNRYPVCTKPYAFDHFPKKLTPKKDFSPHYVPDNYKRNGGRSSWKSERSKPPLKDLGQEDDALPLIEEVLASQEQAANEIPSLEEPEREGATANVSEGEKKTEESSQEPQSTCTPEERRHNQRERLNQILLNLLEKIPGKNAIDVTYLLEEGSGRKLRRRTLFIPENSFRK

SEQ ID NO: 852107 - protein, 123 aa, Homo sapiens
GGARRPSLPPSGGAAAATAATLLLPPPPPPLPPPFWVRFAEGRRSQSRLRDPPPLSLPPLAFHLSLLLSRISASQLTRWPPPDKREGSAVDPGKRRSLAATPSSPLPCTLIALGLGLGLRHGE

SEQ ID NO: 852108 - protein, 423 aa, Homo sapiens
MDPRNTAMLGLGSDSEGFSRKSPSAISTGTLVSKREVELEKNTKEEEDLRKRNRERNIEAGKDDGLTDAQQQFSVKETNFSEGNLKLKIGLQAKRTKKPPKNLENYVCRPAIKTTIKHPRKALKSGKMTDEKNEHCPSKRDPSKLYKKADDVAAIECQSEEVIRLHSQGENNPLSKKLSPVHSEMADYINATPSTLLGSRDPDLKDRALLNGGTSVTEKLAQLIATCPPSKSSKTKPKKLGTGTTAGLVSKDLIRKAGVGSVAGIIHKDLIKKPTISTAVGLVTKDPGKKPVFNAAVGLVNKDSVKKLGTGTTAVFINKNLGKKPGTITTVGLLSKDSGKKLGIGIVPGLVHKESGKKLGLGTVVGLVNKDLGKKLGSTVGLVAKDCAKKIVASSAMGLVNKDIGKKLMSCPLAGLISKDAIT

SEQ ID NO: 852109 - protein, 2969 aa, Homo sapiens [sequence omitted]

SEQ ID NO: 852110 - protein, 2771 aa, Homo sapiens
MDPRNTAMLGLGSDSEGFSRKSPSAISTGTLVSKREVELEKNTKEEEDLRKRNRERNIEAGKDDGLTDAQQQFSVKETNFSEGNLKLKIGLQAKRTKKPPKNLENYVCRPAIKTTIKHPRKALKSGKMTDEKNEHCPSKRDPSKLYKKADDVAAIECQSEEVIRLHSQGENNPLSKKLSPVHSEMADYINATPSTLLGSRDPDLKDRALLNGGTSVTEKLAQLIATCPPSKSSKTKPKKLGTGTTAGLVSKDLIRKAGVGSVAGIIHKDLIKKPTISTAVGLVTKDPGKKPVFNAAVGLVNKDSVKKLGTGTTAVFINKNLGKKPGTITTVGLLSKDSGKKLGIGIVPGLVHKESGKKLGLGTVVGLVNKDLGKKLGSTVGLVAKDCAKKIVASSAMGLVNKDIGKKLMSCPLAGLISKDAINLKAEALLPTQEPLKASCSTNINNQESQELSESLKDSATSKTFEKNVVRQNKESILEKFSVRKEIINLEKEMFNEGTCIQQDSFSSSEKGSYETSKHEKQPPVYCTSPDFKMGGASDVSTAKSPFSAVGESNLPSPSPTVSVNPLTRSPPETSSQLAPNPLLLSSTTELIEEISESVGKNQFTSESTHLNVGHRSVGHSISIECKGIDKEVNDSKTTHIDIPRISSSLGKKPSLTSESSIHTITPSVVNFTSLFSNKPFLKLGAVSASDKHCQVAESLSTSLQSKPLKKRKGRKPRWTKVVARSTCRSPKGLELERSELFKNVSCSSLSNSNSEPAKFMKNIGPPSFVDHDFLKRRLPKLSKSTAPSLALLADSEKPSHKSFATHKLSSSMCVSSDLLSDIYKPKRGRPKSKEMPQLEGPPKRTLKIPASKVFSLQSKEEQEPPILQPEIEIPSFKQGLSVSPFPKKRGRPKRQMRSPVKMKPPVLSVAPFVATESPSKLESESDNHRSSSDFFESEDQLQDPDDLDDSHRPSVCSMSDLEMEPDKKITKRNNGQLMKTIIRKINKMKTLKRKKLLNQILSSSVESSNKGKVQSKLHNTVSSLAATFGSKLGQQINVSKKGTIYIGKRRGRKPKTVLNGILSGSPTSLAVLEQTAQQAAGSALGQILPPLLPSSASSSEILPSPICSQSSGTSGGQSPVSSDAGFVEPSSVPYLHLHSRQGSMIQTLAMKKASKGRRRLSPPTLLPNSPSHLSELTSLKEATPSPISESHSDETIPSDSGIGTDNNSTSDRAEKFCGQKKRRHSFEHVSLIPPETSTVLSSLKEKHKHKCKRRNHDYLSYDKMKRQKRKRKKKYPQLRNRQDPDFIAELEELISRLSEIRITHRSHHFIPRDLLPTIFRINFNSFYTHPSFPLDPLHYIRKPDLKKKRGRPPKMREAMAEMPFMHSLSFPLSSTGFYPSYGMPYSPSPLTAAPIGLGYYGRYPPTLYPPPPSPSFTTPLPPPSYMHAGHLLLNPAKYHKKKHKLLRQEAFLTTSRTPLLSMSTYPSVPPEMAYGWMVEHKHRHRHKHREHRSSEQPQVSMDTGSSRSVLESLKRYRFGKDAVGERYKHKEKHRCHMSCPHLSPSKSLINREEQWVHREPSESSPLALGLQTPLQIDCSESSPSLSLGGFTPNSEPASSDEHTNLFTSAIGSCRVSNPNSSGRKKLTDSPGLFSAQDTSLNRLHRKESLPSNERAVQTLAGSQPTSDKPSQRPSESTNCSPTRKRSSSESTSSTVNGVPSRSPRLVASGDDSVDSLLQRMVQNEDQEPMEKSIDAVIATASAPPSSSPGRSHSKDRTLGKPDSLLVPAVASDSCNNSISLLSEKLTSSCSPHHIKRSVVEAMQRQARKMCNYDKILATKKNLDHVNKILKAKKLQRQARTGNNFVKRRPGRPRKCPLQAVVSMQAFQAAQFVNPELNRDEEGAALHLSPDTVTDVIEAVVQSVNLNPEHKKGLKRKGWLLEEQTRKKQKPLPEEEEQENNKSFNEAPVEIPSPSETPAKPSEPESTLQPVLSLIPREKKPPRPPKKKYQKAGLYSDVYKTTDPKSRLIQLKKEKLEYTPGEHEYGLFPAPIHVVFFVSGKYLRQKRIDFQLPYDILWQWKHNQLYKKPDVPLYKKIRSNVYVDVKPLSGYEATTCNCKKPDDDTRKGCVDDCLNRMIFAECSPNTCPCGEQCCNQRIQRHEWVQCLERFRAEEKGWGIRTKEPLKAGQFIIEYLGEVVSEQEFRNRMIEQYHNHSDHYCLNLDSGMVIDSYRMGNEARFINHSCDPNCEMQKWSVNGVYRIGLYALKDMPAGTELTYDYNFHSFNVEKQQLCKCGFEKCRGIIGGKSQRVNGLTSSKNSQPMATHKKSGRSKEKRKSKHKLKKRRGHLSEEPSENINTPTRLTPQLQMKPMSNRERNFVLKHHVFLVRNWEKIRQKQEEVKHTSDNIHSASLYTRWNGICRDDGNIKSDVFMTQFSALQTARSVRTRRLAAAEENIEVARAARLAQIFKEICDGIISYKDSSRQALAAPLLNLPPKKKNADYYEKISDPLDLITIEKQILTGYYKTVEAFDADMLKVFRNAEKYYGRKSPVGRDVCRLRKAYYNARHEASAQIDEIVGETASEADSSETSVSEKENGHEKDDDVIRCICGLYKDEGLMIQCDKCMVWQHCDCMGVNSDVEHYLCEQCDPRPVDREVPMIPRPHYAQPGCVYFICLLRDDLLLRQGDCVYLMRDSRRTPDGHPVRQSYRLLSHINRDKLDIFRIEKLWKNEKEERFAFGHHYFRPHETHHSPSRRFYHNELFRVPLYEIIPLEAVVGTCCVLDLYTYCKGK

SEQ ID NO: 852111 - protein, 2234 aa, Homo sapiens
MDPRNTAMLGLGSDSEGFSRKSPSAISTGTLVSKREVELEKNTKEEEDLRKRNRERNIEAGKDDGLTDAQQQFSVKETNFSEGNLKLKIGLQAKRTKKPPKNLENYVCRPAIKTTIKHPRKALKSGKMTDEKNEHCPSKRDPSKLYKKADDVAAIECQSEEVIRLHSQGENNPLSKKLSPVHSEMADYINATPSTLLGSRDPDLKDRALLNGGTSVTEKLAQLIATCPPSKSSKTKPKKLGTGTTAGLVSKDLIRKAGVGSVAGIIHKDLIKKPTISTAVGLVTKDPGKKPVFNAAVGLVNKDSVKKLGTGTTAVFINKNLGKKPGTITTVGLLSKDSGKKLGIGIVPGLVHKESGKKLGLGTVVGLVNKDLGKKLGSTVGLVAKDCAKKIVASSAMGLVNKDIGKKLMSCPLAGLISKDAINLKAEALLPTQEPLKASCSTNINNQESQELSESLKDSATSKTFEKNVVRQNKESILEKFSVRKEIINLEKEMFNEGTCIQQDSFSSSEKGSYETSKHEKQPPVYCTSPDFKMGGASDVSTAKSPFSAVGESNLPSPSPTVSVNPLTRSPPETSSQLAPNPLLLSSTTELIEEISESVGKNQFTSESTHLNVGHRSVGHSISIECKGIDKEVNDSKTTHIDIPRISSSLGKKPSLTSESSIHTITPSVVNFTSLFSNKPFLKLGAVSASDKHCQVAESLSTSLQSKPLKKRKGRKPRWTKVVARSTCRSPKGLELERSELFKNVSCSSLSNSNSEPAKFMKNIGPPSFVDHDFLKRRLPKLSKSTAPSLALLADSEKPSHKSFATHKLSSSMCVSSDLLSDIYKPKRGRPKSKEMPQLEGPPKRTLKIPASKVFSLQSKEEQEPPILQPEIEIPSFKQGLSVSPFPKKRGRPKRQMRSPVKMKPPVLSVAPFVATESPSKLESESDNHRSSSDFFESEDQLQDPDDLDDSHRPSVCSMSDLEMEPDKKITKRNNGQLMKTIIRKINKMKTLKRKKLLNQILSSSVESSNKGKVQSKLHNTVSSLAATFGSKLGQQINVSKKGTIYIGKRRGRKPKTVLNGILSGSPTSLAVLEQTAQQAAGSALGQILPPLLPSSASSSEILPSPICSQSSGTSGGQSPVSSDAGFVEPSSVPYLHLHSRQGSMIQTLAMKKASKGRRRLSPPTLLPNSPSHLSELTSLKEATPSPISESHSDETIPSDSGIGTDNNSTSDRAEKFCGQKKRRHSFEHVSLIPPETSTVLSSLKEKHKHKCKRRNHDYLSYDKMKRQKRKRKKKYPQLRNRQDPDFIAELEELISRLSEIRITHRSHHFIPRDLLPTIFRINFNSFYTHPSFPLDPLHYIRKPDLKKKRGRPPKMREAMAEMPFMHSLSFPLSSTGFYPSYGMPYSPSPLTAAPIGLGYYGRYPPTLYPPPPSPSFTTPLPPPSYMHAGHLLLNPAKYHKKKHKLLRQEAFLTTSRTPLLSMSTYPSVPPEMAYGWMVEHKHRHRHKHREHRSSEQPQVSMDTGSSRSVLESLKRYRFGKDAVGERYKHKEKHRCHMSCPHLSPSKSLINREEQWVHREPSESSPLALGLQTPLQIDCSESSPSLSLGGFTPNSEPASSDEHTNLFTSAIGSCRVSNPNSSGRKKLTDSPGLFSAQDTSLNRLHRKESLPSNERAVQTLAGSQPTSDKPSQRPSESTNCSPTRKRSSSESTSSTVNGVPSRSPRLVASGDDSVDSLLQRMVQNEDQEPMEKSIDAVIATASAPPSSSPGRSHSKDRTLGKPDSLLVPAVASDSCNNSISLLSEKLTSSCSPHHIKRSVVEAMQRQARKMCNYDKILATKKNLDHVNKILKAKKLQRQARTGNNFVKRRPGRPRKCPLQAVVSMQAFQAAQFVNPELNRDEEGAALHLSPDTVTDVIEAVVQSVNLNPEHKKGLKRKGWLLEEQTRKKQKPLPEEEEQENNKSFNEAPVEIPSPSETPAKPSEPESTLQPVLSLIPREKKPPRPPKKKYQKAGLYSDVYKTTDPKSRLIQLKKEKLEYTPGEHEYGLFPAPIHVVFFVSGKYLRQKRIDFQLPYDILWQWKHNQLYKKPDVPLYKKIRSNVYVDVKPLSGYEATTCNCKKPDDDTRKGCVDDCLNRMIFAECSPNTCPCGEQCCNQRIQRHEWVQCLERFRAEEKGWGIRTKEPLKAGQFIIEYLGEVVSEQEFRNRMIEQYHNHSDHYCLNLDSGMVIDSYRMGNEARFINHSCDPNCEMQKW

SEQ ID NO: 852112 - protein, 2209 aa, Homo sapiens
MKNIGPPSFVDHDFLKRRLPKLSKSTAPSLALLADSEKPSHKSFATHKLSSSMCVSSDLLSDIYKPKRGRPKSKEMPQLEGPPKRTLKIPASKVFSLQSKEEQEPPILQPEIEIPSFKQGLSVSPFPKKRGRPKRQMRSPVKMKPPVLSVAPFVATESPSKLESESDNHRSSSDFFESEDQLQDPDDLDDSHRPSVCSMSDLEMEPDKKITKRNNGQLMKTIIRKINKMKTLKRKKLLNQILSSSVESSNKGKVQSKLHNTVSSLAATFGSKLGQQINVSKKGTIYIGKRRGRKPKTVLNGILSGSPTSLAVLEQTAQQAAGSALGQILPPLLPSSASSSEILPSPICSQSSGTSGGQSPVSSDAGFVEPSSVPYLHLHSRQGSMIQTLAMKKASKGRRRLSPPTLLPNSPSHLSELTSLKEATPSPISESHSDETIPSDSGIGTDNNSTSDRAEKFCGQKKRRHSFEHVSLIPPETSTVLSSLKEKHKHKCKRRNHDYLSYDKMKRQKRKRKKKYPQLRNRQDPDFIAELEELISRLSEIRITHRSHHFIPRDLLPTIFRINFNSFYTHPSFPLDPLHYIRKPDLKKKRGRPPKMREAMAEMPFMHSLSFPLSSTGFYPSYGMPYSPSPLTAAPIGLGYYGRYPPTLYPPPPSPSFTTPLPPPSYMHAGHLLLNPAKYHKKKHKLLRQEAFLTTSRTPLLSMSTYPSVPPEMAYGWMVEHKHRHRHKHREHRSSEQPQVSMDTGSSRSVLESLKRYRFGKDAVGERYKHKEKHRCHMSCPHLSPSKSLINREEQWVHREPSESSPLALGLQTPLQIDCSESSPSLSLGGFTPNSEPASSDEHTNLFTSAIGSCRVSNPNSSGRKKLTDSPGLFSAQDTSLNRLHRKESLPSNERAVQTLAGSQPTSDKPSQRPSESTNCSPTRKRSSSESTSSTVNGVPSRSPRLVASGDDSVDSLLQRMVQNEDQEPMEKSIDAVIATASAPPSSSPGRSHSKDRTLGKPDSLLVPAVASDSCNNSISLLSEKLTSSCSPHHIKRSVVEAMQRQARKMCNYDKILATKKNLDHVNKILKAKKLQRQARTGNNFVKRRPGRPRKCPLQAVVSMQAFQAAQFVNPELNRDEEGAALHLSPDTVTDVIEAVVQSVNLNPEHKKGLKRKGWLLEEQTRKKQKPLPEEEEQENNKSFNEAPVEIPSPSETPAKPSEPESTLQPVLSLIPREKKPPRPPKKKYQKAGLYSDVYKTTDPKSRLIQLKKEKLEYTPGEHEYGLFPAPIHVVFFVSGKYLRQKRIDFQLPYDILWQWKHNQLYKKPDVPLYKKIRSNVYVDVKPLSGYEATTCNCKKPDDDTRKGCVDDCLNRMIFAECSPNTCPCGEQCCNQRIQRHEWVQCLERFRAEEKGWGIRTKEPLKAGQFIIEYLGEVVSEQEFRNRMIEQYHNHSDHYCLNLDSGMVIDSYRMGNEARFINHSCDPNCEMQKWSVNGVYRIGLYALKDMPAGTELTYDYNFHSFNVEKQQLCKCGFEKCRGIIGGKSQRVNGLTSSKNSQPMATHKKSGRSKEKRKSKHKLKKRRGHLSEEPSENINTPTRLTPQLQMKPMSNRERNFVLKHHVFLVRNWEKIRQKQEEVKHTSDNIHSASLYTRWNGICRDDGNIKSDVFMTQFSALQTARSVRTRRLAAAEENIEVARAARLAQIFKEICDGIISYKDSSRQALAAPLLNLPPKKKNADYYEKISDPLDLITIEKQILTGYYKTVEAFDADMLKVFRNAEKYYGRKSPVGRDVCRLRKAYYNARHEASAQIDEIVGETASEADSSETSVSEKENGHEKDDDVIRCICGLYKDEGLMIQCDKCMVWQHCDCMGVNSDVEHYLCEQCDPRPVDREVPMIPRPHYAQPGCVYFICLLRDDLLLRQGDCVYLMRDSRRTPDGHPVRQSYRLLSHINRDKLDIFRIEKLWKNEKEERFAFGHHYFRPHETHHSPSRRFYHNELFRVPLYEIIPLEAVVGTCCVLDLYTYCKGRPKGVKEQDVYICDYRLDKSAHLFYKIHRNRYPVCTKPYAFDHFPKKLTPKKDFSPHYVPDNYKRNGGRSSWKSERSKPPLKDLGQEDDALPLIEEVLASQEQAANEIPSLEEPEREGATANVSEGEKKTEESSQEPQSTCTPEERRHNQRERLNQILLNLLEKIPGKNAIDVTYLLEEGSGRKLRRRTLFIPENSFRK

SEQ ID NO: 852113 - protein, 123 aa, Homo sapiens; identical to SEQ ID NO: 852107

SEQ ID NO: 852114 - protein, 333 aa, Homo sapiens
GGARRPSLPPSGGAAAATAATLLLPPPPPPLPPPFWVRFAEGRRSQSRLRDPPPLSLPPLAFHLSLLLSRISASQLTRWPPPDKREGSAVDPGKRRSLAATPSSPLPCTLIALGHPTTEHREANAAAHATRSCCRNQTRVYAMFWQLIRLTVIFLAVNLPEVLELPVPQMQHGHSPNMDRCMAQKRRSVWLSLTLTLTPLKLYGFEELLANLPKLNNTHDSRTDTHPTPADTTDRTPSAHTTPDRAALAPGPPPQLQRAVPLKHRLPFLATQHPQRDRRLPPRHDCHASTCFQASSEHHNLPQPLCAPPPGHNPHTSPHFARTRPKLHHPTAS

SEQ ID NO: 852115 - protein, 476 aa, Homo sapiens
MAFGKSHRDPYATSVGHLIEKATFAGVQTEDWGQFMHICDIINTTQDGPKDAVKALKKRISKNYNHKEIQLTLSLIDMCVQNCGPSFQSLIVKKEFVKENLVKLLNPRYNLPLDIQNRILNFIKTWSQGFPGGVDVSEVKEVYLDLVKKGVQFPPSEAEAETARQETAQISSNPPTSVPTAPALSSVIAPKNSTVTLVPEQIGKLHSELDMVKMNVRVMSAILMENTPGSENHEDIELLQKLYKTGREMQERIMDLLVVVENEDVTVELIQVNEDLNNAILGYERFTRNQQRILEQNKNQKEATNTTSEPSAPSQDLLDLSPSPRMPRATLGELNTMNNQLSGLNFSLPSSDVTNNLKPSLHPQMNLLALENTEIPPFAQRTSQNLTSSHAYDNFLEHSNSVFLQPVSLQTIAAAPSNQSLPPLPSNHPAMTKSDLQPPNYYEVMEFDPLAPAVTTEAIYEEIDAHQHKGAQNDGD

SEQ ID NO: 852116 - protein, 346 aa, Homo sapiens
MAFGKSHRDPYATSVGHLIEKATFAGVQTEDWGQFMHICDIINTTQDGPKDAVKALKKRISKNYNHKEIQLTLSLIDMCVQNCGPSFQSLIVKKEFVKENLVKLLNPRYNLPLDIQNRILNFIKTWSQGFPGGVDVSEVKEVYLDLVKKGVQFPPSEAEAETARQETAQISSNPPTSVPTAPALSSVIAPKNSTVTLVPEQIGKLHSELDMVKMNVRVMSAILMENTPGSENHEDIELLQKLYKTGREMQERIMDLLVVVENEDVTVELIQVNEDLNNAILGYERFTRNQQRILEQNKNQKEATNTTSEPSAPSQDLLDLSPSPRMPRATLGELNTMNNQLSGLSK

SEQ ID NO: 852117 - protein, 399 aa, Homo sapiens
MCVQNCGPSFQSLIVKKEFVKENLVKLLNPRYNLPLDIQNRILNFIKTWSQGFPGGVDVSEVKEVYLDLVKKGVQFPPSEAEAETARQETAQISSNPPTSVPTAPALSSVIAPKNSTVTLVPEQIGKLHSELDMVKMNVRVMSAILMENTPGSENHEDIELLQKLYKTGREMQERIMDLLVVVENEDVTVELIQVNEDLNNAILGYERFTRNQQRILEQNKNQKEATNTTSEPSAPSQDLLDLSPSPRMPRATLGELNTMNNQLSGLNFSLPSSDVTNNLKPSLHPQMNLLALENTEIPPFAQRTSQNLTSSHAYDNFLEHSNSVFLQPVSLQTIAAAPSNQSLPPLPSNHPAMTKSDLQPPNYYEVMEFDPLAPAVTTEAIYEEIDAHQHKGAQNDGD

SEQ ID NO: 852118 - protein, 472 aa, Homo sapiens
KCTFLSMPPGEWNQTEKATFAGVQTEDWGQFMHICDIINTTQDGPKDAVKALKKRISKNYNHKEIQLTLSLIDMCVQNCGPSFQSLIVKKEFVKENLVKLLNPRYNLPLDIQNRILNFIKTWSQGFPGGVDVSEVKEVYLDLVKKGVQFPPSEAEAETARQETAQISSNPPTSVPTAPALSSVIAPKNSTVTLVPEQIGKLHSELDMVKMNVRVMSAILMENTPGSENHEDIELLQKLYKTGREMQERIMDLLVVVENEDVTVELIQVNEDLNNAILGYERFTRNQQRILEQNKNQKEATNTTSEPSAPSQDLLDLSPSPRMPRATLGELNTMNNQLSGLNFSLPSSDVTNNLKPSLHPQMNLLALENTEIPPFAQRTSQNLTSSHAYDNFLEHSNSVFLQPVSLQTIAAAPSNQSLPPLPSNHPAMTKSDLQPPNYYEVMEFDPLAPAVTTEAIYEEIDAHQHKGAQNDGD

SEQ ID NO: 852119 - protein, 459 aa, Homo sapiens
MAFGKSHRDPYATSVGHLIEKATFAGVQTEDWGQFMHICDIINTTQDGPKDAVKALKLIDMCVQNCGPSFQSLIVKKEFVKENLVKLLNPRYNLPLDIQNRILNFIKTWSQGFPGGVDVSEVKEVYLDLVKKGVQFPPSEAEAETARQETAQISSNPPTSVPTAPALSSVIAPKNSTVTLVPEQIGKLHSELDMVKMNVRVMSAILMENTPGSENHEDIELLQKLYKTGREMQERIMDLLVVVENEDVTVELIQVNEDLNNAILGYERFTRNQQRILEQNKNQKEATNTTSEPSAPSQDLLDLSPSPRMPRATLGELNTMNNQLSGLNFSLPSSDVTNNLKPSLHPQMNLLALENTEIPPFAQRTSQNLTSSHAYDNFLEHSNSVFLQPVSLQTIAAAPSNQSLPPLPSNHPAMTKSDLQPPNYYEVMEFDPLAPAVTTEAIYEEIDAHQHKGAQNDGD

SEQ ID NO: 852120 - protein, 426 aa, Homo sapiens
MAFGKSHRDPYATSVGHLIEKATFAGVQTEDWGQFMHICDIINTTQDGPKDAVKALKKRISKNYNHKEIQLTLSTWSQGFPGGVDVSEVKEVYLDLVKKGVQFPPSEAEAETARQETAQISSNPPTSVPTAPALSSVIAPKNSTVTLVPEQIGKLHSELDMVKMNVRVMSAILMENTPGSENHEDIELLQKLYKTGREMQERIMDLLVVVENEDVTVELIQVNEDLNNAILGYERFTRNQQRILEQNKNQKEATNTTSEPSAPSQDLLDLSPSPRMPRATLGELNTMNNQLSGLNFSLPSSDVTNNLKPSLHPQMNLLALENTEIPPFAQRTSQNLTSSHAYDNFLEHSNSVFLQPVSLQTIAAAPSNQSLPPLPSNHPAMTKSDLQPPNYYEVMEFDPLAPAVTTEAIYEEIDAHQHKGAQNDGD

SEQ ID NO: 852121 - protein, 441 aa, Homo sapiens
MAFGKSHRDPYATSVGHLIEKATFAGVQTEDWGQFMHICDIINTTQDGPKDAVKALKKRISKNYNHKEIQLTLSLIDMCVQNCGPSFQSLIVKKEFVKENLVKLLNPRYNLPLDIQNRILNFIKTWSQGFPGGVDVSEVKEVYLDLVKKGVQFPPSEAEAETARQEIGKLHSELDMVKMNVRVMSAILMENTPGSENHEDIELLQKLYKTGREMQERIMDLLVVVENEDVTVELIQVNEDLNNAILGYERFTRNQQRILEQNKNQKEATNTTSEPSAPSQDLLDLSPSPRMPRATLGELNTMNNQLSGLNFSLPSSDVTNNLKPSLHPQMNLLALENTEIPPFAQRTSQNLTSSHAYDNFLEHSNSVFLQPVSLQTIAAAPSNQSLPPLPSNHPAMTKSDLQPPNYYEVMEFDPLAPAVTTEAIYEEIDAHQHKGAQNDGD

SEQ ID NO: 852122 - protein, 180 aa, Homo sapiens
MAFGKSHRDPYATSVGHLIEKATFAGVQTEDWGQFMHICDIINTTQDGPKDAVKALKKRISKNYNHKEIQLTLSLIDMCVQNCGPSFQSLIVKKEFVKENLVKLLNPRYNLPLDIQNRILNFIKTWSQGFPGGVDVSEVKEVYLDLVKKGVQFPPSEAEAETARQEISRSPRPKSQSPDA

SEQ ID NO: 852123 - protein, 346 aa, Homo sapiens; identical to SEQ ID NO: 852116

SEQ ID NO: 852124 - protein, 465 aa, Homo sapiens
MAFGKSHRDPYATSVGHLIEKATFAGVQTEDWGQFMHICDIINTTQDGPKDAVKALKKRISKNYNHKEIQLTLSLIDMCVQNCGPSFQSLIVKKEFVKENLVKLLNPRYNLPLDIQNRILNFIKTWSQGFPGGVDVSEVKEVYLDLVKKGVQFPPSEAEAETARQETAQISSNPPTSVPTAPALSSVIAPKNSTVTLVPEQIGKLHSELDMVKMNVRVMSAILMENTPGSENHEDIELLQKLYKTGREMQERIMDLLVVVENEDVTVELIQVNEDLNNAILGYERFTRNQQRILEQNKNQKEATNTTSEPSAPSQDLLDLSPSPRMPRATLGELNTMNNQLSGLNFSLPSSDVTNNLKPSLHPQMNLLALENTEIPPFAQRTSQNLTSSHAYDNPVSLQTIAAAPSNQSLPPLPSNHPAMTKSDLQPPNYYEVMEFDPLAPAVTTEAIYEEIDAHQHKGAQNDGD

SEQ ID NO: 852125 - protein, 476 aa, Homo sapiens; identical to SEQ ID NO: 852115

SEQ ID NO: 852126 - protein, 371 aa, Homo sapiens
VRIFQLRRTLQNRILNFIKTWSQGFPGGVDVSEVKEVYLDLVKKGVQFPPSEAEAETARQETAQISSNPPTSVPTAPALSSVIAPKNSTVTLVPEQIGKLHSELDMVKMNVRVMSAILMENTPGSENHEDIELLQKLYKTGREMQERIMDLLVVVENEDVTVELIQVNEDLNNAILGYERFTRNQQRILEQNKNQKEATNTTSEPSAPSQDLLDLSPSPRMPRATLGELNTMNNQLSGLNFSLPSSDVTNNLKPSLHPQMNLLALENTEIPPFAQRTSQNLTSSHAYDNFLEHSNSVFLQPVSLQTIAAAPSNQSLPPLPSNHPAMTKSDLQPPNYYEVMEFDPLAPAVTTEAIYEEIDAHQHKGAQNDGD

SEQ ID NO: 852127 - protein, 203 aa, Homo sapiens
MAFGKSHRDPYATSVGHLIEKATFAGVQTEDWGQFMHICDIINTTQDGPKDAVKALKKRISKNYNHKEIQLTLSLIDMCVQNCGPSFQSLIVKKEFVKENLVKLLNPRYNLPLDIQNRILNFIKTWSQGFPGGVDVSEVKEVYLDLVKKGVQFPPSEAEAETARQETAQISSNPPTSVPTAPALSSVIAPKNSTVTLVPEQVY

SEQ ID NO: 852128 - protein, 100 aa, Homo sapiens
DSSSVPQLQQLQYNSYDNFLEHSNSVFLQPVSLQTIAAAPSNQSLPPLPSNHPAMTKSDLQPPNYYEVMEFDPLAPAVTTEAIYEEIDAHQHKGAQNDGD

SEQ ID NO: 852129 - protein, 469 aa, Homo sapiens
MAFGKSHRDPYATSVGHLIEKATFAGVQTEDWGQFMHICDIINTTQDGPKDAVKALKKRISKNYNHKEIQLTLSLIDMCVQNCGPSFQSLIVKKEFVKENLVKLLNPRYNLPLDIQNRILNFIKTWSQGFPGGVDVSEVKEVYLDLVKKGVQFPPSEAEAETARQETAQISSNPPTSVPTAPALSSVIAPKNSTVTLVPEQIGKLHSELDMVKMNVRVMSAILMENTPGSENHEDIELLQKLYKTGREMQERIMDLLVVVENEDVTVELIQVNEDLNNAILGYERFTRNQQRILEQNKNQKEATNTTSEPSAPSQDLLDLSPSPRMPRATLGELNTMNNQLSGLNFSLPSSDVTNNLKPSLHPQMNLLALENTEIPPFAQRTSQNLTSSHAYDNFLEHSNSVFLQPVSLQTIAAAPSNQSLPPLPSNHPAMTKSDLQPPNYYEVMEFDPLAPAVTTEYIFQLQTYVRRI

SEQ ID NO: 852130 - protein, 165 aa, Homo sapiens
MDEEPERTKRWEGGYERTWEILKEDESGSLKATIEDILFKAKRKRVFEHHGQVRLGMMRHLYVVVDGSRTMEDQDLKPNRLTCTLKLLEYFVEEYFDQNPISQIGIIVTKSKRAEKLTELSGNPRKHITSLKKAVDMTCHGEPSLYNSLSMAMQTLKLVLYIMYN

SEQ ID NO: 852131 - protein, 104 aa, Homo sapiens
MTCHGEPSLYNSLSMAMQTLKHMPGHTSREVLIIFSSLTTCDPSNIYDLIKTLKAAKIRVSVIGLSAEVRVCTVLARETGARTMATTSSTMICVTKGYGCSACA

SEQ ID NO: 852132 - protein, 395 aa, Homo sapiens [sequence omitted]

SEQ ID NO: 852133 - protein, 395 aa, Homo sapiens [sequence omitted]

SEQ ID NO: 852134 - protein, 338 aa, Homo sapiens
MRHLYVVVDGSRTMEDQDLKPNRLTCTLKLLEYFVEEYFDQNPISQIGIIVTKSKRAEKLTELSGNPRKHITSLKKAVDMTCHGEPSLYNSLSMAMQTLKHMPGHTSREVLIIFSSLTTCDPSNIYDLIKTLKAAKIRVSVIGLSAEVRVCTVLARETGGTYHVILDESHYKELLTHHVSPPPASSSSECSLIRMGFPQHTIASLSDQDAKPSFSMAHLDGNTEPGLTLGGYFCPQCRAKYCELPVECKICGLTLVSAPHLARSYHHLFPLDAFQEIPLEEYNGERFCYGCQGELKDQHVYVCAVCQNVFCVDCDVFVHDSLHCCPGCIHKIPAPSGV

SEQ ID NO: 852135 - protein, 377 aa, Homo sapiens
MDEEPERTKRWEGGYERTWEILKEDESGSLKATIEDILFKAKRKRVFEHHGQVRLGMMRHLYVVVDGSRTMEDQDLKPNRLTCTLKLLEYFVEEYFDQNPISQIGIIVTKSKRAEKLTELSGNPRKHITSLKKAVDMTCHGEPSLYNSLSMAMQTLKHMPGHTSREVLIIFSSLTTCDPSNIYDLIKTLKAALARETGGTYHVILDESHYKELLTHHVSPPPASSSSECSLIRMGFPQHTIASLSDQDAKPSFSMAHLDGNTEPGLTLGGYFCPQCRAKYCELPVECKICGLTLVSAPHLARSYHHLFPLDAFQEIPLEEYNGERFCYGCQGELKDQHVYVCAVCQNVFCVDCDVFVHDSLHCCPGCIHKIPAPSGV

SEQ ID NO: 852136 - protein, 210 aa, Homo sapiens
MTCHGEPSLYNSLSMAMQTLKHMPGHTSREVLIIFSSLTTCDPSNIYDLIKTLKAAKIRVSVIGLSAEVRVCTVLARETGGTYHVILDESHYKELLTHHVSPPPASSSSECSLIRMGFPQHTIASLSDQDAKPSFSMAHLFPLDAFQEIPLEEYNGERFCYGCQGELKDQHVYVCAVCQNVFCVDCDVFVHDSLHCCPGCIHKIPAPSGV

SEQ ID NO: 852137 - protein, 165 aa, Homo sapiens; identical to SEQ ID NO: 852130

SEQ ID NO: 852138 - protein, 203 aa, Homo sapiens
MDEEPERTKRWEGGYERTWEILKEDESGSLKATIEDILFKAKRKRVFEHHGQVRLGMMRHLYVVVDGSRTMEDQDLKPNRLTCTLKLLEYFVEEYFDQNPISQIGIIVTKSKRAEKLTELSGNPRKHITSLKKAVDMTCHGEPSLYNSLSMAMQTLKHMPGHTSREVLIIFSSLTTCDPSNIYDLIKVDQKIKTKVITVKRIL

SEQ ID NO: 852139 - protein, 165 aa, Homo sapiens; identical to SEQ ID NO: 852130

SEQ ID NO: 852140 - protein, 395 aa, Homo sapiens [sequence omitted]

SEQ ID NO: 852141 - protein, 395 aa, Homo sapiens [sequence omitted]

SEQ ID NO: 852142 - protein, 203 aa, Homo sapiens; identical to SEQ ID NO: 852138

SEQ ID NO: 852143 - protein, 346 aa, Homo sapiens
MDEEPERTKRWEGGYERTWEILKEDESGSLKATIEDILFKAKRKRVFEHHGQVRLGMMRHLYVVVDGSRTMEDQDLKPNRLTCTLKLLEYFVEEYFDQNPISQIGIIVTKSKRAEKLTELSGNPRKHITSLKKAVDMTCHGEPSLYNSLSMAMQTLKHMPGHTSREVLIIFSSLTTCDPSNIYDLIKTLKAAKIRVSVIGLSAEVRVCTVLARETGGTYHVILDESHYKELLTHHVSPPPASSSSECSLIRMGFPQHTIASLSDQDAKPSFSMAHLFPLDAFQEIPLEEYNGERFCYGCQGELKDQHVYVCAVCQNVFCVDCDVFVHDSLHCCPGCIHKIPAPSGV

SEQ ID NO: 852144 - protein, 348 aa, Homo sapiens
MDEEPERTKRWEGGYERTWEILKEDESGSLKATIEDILFKAKRKRVFEHHGQVRLGMMRHLYVVVDGSRTMEDQDLKPNRLTCTLKLLEYFVEEYFDQNPISQIGIIVTKSKRAEKLTELSGNPRKHITSLKKAVDMTCHGEPSLYNSLSMAMQTLKHMPGHTSREVLIIFSSLTTCDPSNIYDLIKTLKAAKIRVSVIGLSAEVRVCTVLARETGGTYHVILDESHYKELLTHHVSPPPASSSSECSLIRMGFPQHTIASLSDQDAKPSFSMAHLDGNTEPGLTLGGYFCPQCRAKYCELPVECKICGLTLVSAPHLARSYHHLFPLDAFQEIPLEEYNGERYFSLD

SEQ ID NO: 852145 - protein, 165 aa, Homo sapiens; identical to SEQ ID NO: 852130

SEQ ID NO: 852146 - protein, 106 aa, Homo sapiens
MDEEPERTKRWEGGYERTWEILKEDESGSLKATIEDILFKAKRKRVFEHHGQVRLGMMRHLYVVVDGSRTMEDQDLKPNRLTCTLKVKFKFILNHLNLYQNHLNFY

SEQ ID NO: 852147 - protein, 97 aa, Homo sapiens
LSVSDFYYVAMDFGGHGLSSHYSPGVPYYLQTFVSEIRRVVAGKKQSVYFRRCGGCSRAPPLITGGGVGSRKQRWPESGAWALAPGLPAIHGRSWES

SEQ ID NO: 852148 - protein, 113 aa, Homo sapiens [sequence omitted]

SEQ ID NO: 852149 - protein, 351 aa, Homo sapiens
KNILARGWRTEAGARGEGGQPSRRAYNSPGLISELKLAVPWGHIAAKAWGSLQGPPVLCLHGWLDNASSFDRLIPLLPQDFYYVAMDFGGHGLSSHYSPGVPYYLQTFVSEIRRVVAALKWNRFSILGHSFGGVVGGMFFCTFPEMVDKLILLDTPLFLLESDEMENLLTYKRRAIEHVLQVEASQEPSHVFSLKQLLQRLLKSNSHLSEECGELLLQRGTTKVATGLVLNRDQRLAWAENSIDFISRELCAHSIRKLQAHVLLIKAVHGYFDSRQNYSEKESLSFMIDTMKSTLKEVRRGSGSWCPATVAHSGPTSPISSHALGRPWVCPQAQQVTTRIYQASCSTVVSP

SEQ ID NO: 852150 - protein, 43 aa, Homo sapiens
FYYVAMDFGGHGLSSHYSPGVPYYLQTFVSEIRRVVAGKKQSV

SEQ ID NO: 852151 - protein, 314 aa, Homo sapiens
MSENAAPGLISELKLAVPWGHIAAKAWGSLQGPPVLCLHGWLDNASSFDRLIPLLPQDFYYVAMDFGGHGLSSHYSPGVPYYLQTFVSEIRRVVAALKWNRFSILGHSFGGVVGGMFFCTFPEMVDKLILLDTPLFLLESDEMENLLTYKRRAIEHVLQVEASQEPSHVFSLKQLLQRLLKSNSHLSEECGELLLQRGTTKVATGLVLNRDQRLAWAENSIDFISRELCAHSIRKLQAHVLLIKAVHGYFDSRQNYSEKESLSFMIDTMKSTLKEQFQFVEVPGNHCVHMSEPQHVASIISSFLQCTHMLPAQL

SEQ ID NO: 852152 - protein, 209 aa, Homo sapiens
MSENAAPGLISELKLAVPWGHIAAKAWGSLQGPPVLCLHGWLDNASSFDRLIPLLPQDFYYVAMDFGGHGLSSHYSPGVPYYLQTFVSEIRRVVAALKWNRFSILGHSFGGVVGGMFFCTFPEMVDKLILLDTPLFLLESDEMENLLTYKRRAIEHVLQVEASQEPSHVFSLKQLLQRLLKSNSHLSEECGELLLQRGTTKVATGREQH

SEQ ID NO: 852153 - protein, 244 aa, Homo sapiens
MFRGTPGSPGKGGSVLSFFPLFILPFWHPHMFFCTFPEMVDKLILLDTPLFLLESDEMENLLTYKRRAIEHVLQVEASQEPSHVFSLKQLLQRLLKSNSHLSEECGELLLQRGTTKVATGLVLNRDQRLAWAENSIDFISRELCAHSIRKLQAHVLLIKAVHGYFDSRQNYSEKESLSFMIDTMKSTLKEVRRGSGSWCPATVAHSGPTSPISSHALGRPWVCPQAQQVTTRIYQASCSTVVSP

SEQ ID NO: 852154 - protein, 123 aa, Homo sapiens
MAVLPPQARGHRCVCGRSQPPSVGPRSPRSFHGEGQARRAQTMGDRLRQRSPEAPHTNLRPMGPLRGAGVVGPRRPGQESRPRGYAAAGSSSAPLRVLLTHSRAATRRTGRPRPIHTQPYLAF

SEQ ID NO: 852155 - protein, 625 aa, Homo sapiens
MAVLPPQARGHRCVCGRSQPPSVGPRSPRSFHGEGQARRAQTMGDRLRQRSPEAPHTNLRPMGPLRGAGVVGPRRPGQESRPRGYAAAGSSSAPLRVLLTHSRAATRRTGENPATASGRKRTCRDVRHFRGVAWRAWRPPLAACLVPCSASVRPSVPSAQPRQARSEQPTMGWGGGGGCTPRPPIHQQPPERRVVTVVFLGLLLDLLAFTLLLPLLPGLLESHGRAHDPLYGSWQGGVDWFATAIGMPVEKRYNSVLFGGLIGSAFSVLQFLCAPLTGATSDCLGRRPVMLLCLMGVATSYAVWATSRSFAAFLASRLIGGISKGNVSLSTAIVADLGSPLARSQGMAVIGVAFSLGFTLGPMLGASLPLEMAPWFALLFAASDLLFIFCFLPETLPLEKRAPSIALGFRDAADLLSPLALLRFSAVARGQDPPSGDRLSSLRRLGLVYFLYLFLFSGLEYTLSFLTHQRFQFSSLQQGKMFFLIGLTMATIQGAYARRIHPGGEVAAVKRALLLLVPAFLLIGWGRSLPVLGLGLLLYSFAAAVVVPCLSSVVAGYGSPGQKGTVMGTLRSLGALARAAGPLVAASVYWLAGAQACFTTWSGLFLLPFFLLQKLSYPAQTLKAE

SEQ ID NO: 852156 - protein, 536 aa, Homo sapiens
MAVLPPQARGHRCVCGRSQPPSVGPRSPRSFHGEGQARRAQTMGDRLRQRSPEAPHTNLRPMGPLRGAGVVGPRRPGQESRPRGYAAAGSSSAPLRVLLTHSRAATRRTGENPATASGRKRTCRDVRHFRGVAWRAWRPPLAACLVPCSASVRPSVPSAQPRQARSEQPTMGWGGGGGCTPRPPIHQQPPERRVVTVVFLGLLLDLLAFTLLLPLLPGLLESHGRAHDPLYGSWQGGVDWFATAIGMPVEKRYNSVLFGGLIGSAFSVLQFLCAPLTGATSDCLGRRPVMLLCLMGVATSYAVWATSRSFAAFLASRLIGGISKGNVSLSTAIVADLGSPLARSQGMAVIGVAFSLGFTLGPMLGASLPLEMAPWFALLFAASDLLFIFCFLPETLPLEKRAPSIALGFRDAADLLSPLALLRFSAVARGQDPPSGDRLSSLRRLGLVYFLYLFLFSGLEYTLSFLTHQRFQFSRPSCCWCPPSSSSAGDVLCPCWAWGCCSTPLPPPLWCPACPPWSLAMAHQGRRARSWVHCAA

SEQ ID NO: 852157 - protein, 598 aa, Homo sapiens
MAVLPPQARGHRCVCGRSQPPSVGPRSPRSFHGEGQARRAQTMGDRLRQRSPEAPHTNLRPMGPLRGAGVVGPRRPGQESRPRGYAAAGSSSAPLRVLLTHSRAATRRTGENPATASGRKRTCRDVRHFRGVAWRAWRPPLAACLVPCSASVRPSVPSAQPRQARSEQPTMGWGGGGGCTPRPPIHQQPPERRVVTVVFLGLLLDLLAFTLLLPLLPGLLESHGRAHDPLYGSWQGGVDWFATAIGMPVEKRYNSVLFGGLIGSAFSVLQFLCAPLTGATSDCLGRRPVMLLCLMGVATSYAVWATSRSFAAFLASRLIGGISKGNVSLSTAIVADLGSPLARSQGMAVIGVAFSLGFTLGPMLGASLPLEMAPWFALLFAASDLLFIFCFLPETLPLEKRAPSIALGFRDAADLLSPLALLRFSAVARGQDPPSGDRLSSLRRLGLVYFLYLFLFSGLEYTLSFLTHQRFQFSSLQQGKMFFLIGLTMATIQGAYARRIHPGGEVAAVKRALLLLVPAFLLIGWGRSLPVLGLGLLLYSFAAAVVVPCLSSVVAGYGSPGQKGTVMGTLRSLGALARAAGPLVAASEAELPGTDAQG

SEQ ID NO: 852158 - protein, 857 aa, Homo sapiens
MAKAKKVGARRKASGAPAGARGGPAKANSNPFEVKVNRQKFQILGRKTRHDVGLPGVSRARALRKRTQTLLKEYKERDKSNVFRDKRFGEYNSNMSPEEKMMKRFALEQQRHHEKKSIYNLNEDEELTHYGQSLADIEKHNDIVDSDSDAEDRGTLSAELTAAHFGGGGGLLHKKTQQEGEEREKPKSRKELIEELIAKSKQEKRERQAQREDALELTEKLDQDWKEIQTLLSHKTPKSENRDKKEKPKPDAYDMMVRELGFEMKAQPSNRMKTEAELAKEEQEHLRKLEAERLRRMLGKDEDENVKKPKHMSADDLNDGFVLDKDDRRLLSYKDGKMNVEEDVQEEQSKEASDPESNEEEGDSSGGEDTEESDSPDSHLDLESNVESEEENEKPAKEQRQTPGKGLISGKERAGKATRDELPYTFAAPESYEELRSLLLGRSMEEQLLVVERIQKCNHPSLAEGNKAKLEKLFGFLLEYVGDLATDDPPDLTVIDKLVVHLYHLCQMFPESASDAIKFVLRDAMHEMEEMIETKGRAALPGLDVLIYLKITGLLFPTSDFWHPVVTPALVCLSQLLTKCPILSLQDVVKGLFVCCLFLEYVALSQRFIPELINFLLGILYIATPNKASQGSTLVHPFRALGKNSELLVVSAREDVATWQQSSLSLRWASRLRAPTSTEANHIRLSCLAVGLALLKRCVLMYGSLPSFHAIMGPLQALLTDHLADCSHPQELQELCQSTLTEMESQKQLCRPLTCEKSKPVPLKLFTPRLVKVLEFGRKQGSSKEEQERKRLIHKHKREFKGAVREIRKDNQFLARMQLSEIMERDAERKRKVKQLFNSLATQEGEWKALKRKKFKK

SEQ ID NO: 852159 - protein, 857 aa, Homo sapiens; identical to SEQ ID NO: 852158

SEQ ID NO: 852160 - protein, 857 aa, Homo sapiens; identical to SEQ ID NO: 852158

SEQ ID NO: 852161 - protein, 857 aa, Homo sapiens; identical to SEQ ID NO: 852158

SEQ ID NO: 852162 - protein, 690 aa, Homo sapiens
MAVLPPQARGHRCVCGRSQPPSVGPRSPRSFHGEGQARRAQTMGDRLRQRSPEAPHTNLRPMGPLRGAGVVGPRRPGQESRPRGYAAAGSSSAPLRVLLTHSRAATRRTGENPATASGRKRTCRDVRHFRGVAWRAWRPPLAACLVPCSASVRPSVPSAQPRQARSEQPTMGWGGGGGCTPRPPIHQQPPERRVVTVVFLGLLLDLLAFTLLLPLLPGLLESHGRAHDPLYGSWQGGVDWFATAIGMPVEKRYNSVLFGGLIGSAFSVLQFLCAPLTGATSDCLGRRPVMLLCLMGVATSYAVWATSRSFAAFLASRLIGGISKGNVSLSTAIVADLGSPLARSQGMAVIGVAFSLGFTLGPMLGASLPLEMAPWFALLFAASDLLFIFCFLPETLPLEKRVGLWSGTHRPRGWRLDSIAMKVPLCASPRCQGGWAALLVLGPLRPQSVGCQASSRSCRLSNAIPQAPSIALGFRDAADLLSPLALLRFSAVARGQDPPSGDRLSSLRRLGLVYFLYLFLFSGLEYTLSFLTHQRFQFSSLQQGKMFFLIGLTMATIQGAYARRIHPGGEVAAVKRALLLLVPAFLLIGWGRSLPVLGLGLLLYSFAAAVVVPCLSSVVAGYGSPGQKGTVMGTLRSLGALARAAGPLVAASVYWLAGAQACFTTWSGLFLLPFFLLQKLSYPAQTLKAE

SEQ ID NO: 852163 - protein, 638 aa, Homo sapiens
MAVLPPQARGHRCVCGRSQPPSVGPRSPRSFHGEGQARRAQTMGDRLRQRSPEAPHTNLRPMGPLRGAGVVGPRRPGQESRPRGYAAAGSSSAPLRVLLTHSRAATRRTGENPATASGRKRTCRDVRHFRGVAWRAWRPPLAACLVPCSASVRPSVPSAQPRQARSEQPTMGWGGGGGCTPRPPIHQQPPERRVVTVVFLGLLLDLLAFTLLLPLLPGLLESHGRAHDPLYGSWQGGVDWFATAIGMPVEKRYNSVLFGGLIGSAFSVLQFLCAPLTGATSDCLGRRPVMLLCLRPPLPLGPLPLGKMGVATSYAVWATSRSFAAFLASRLIGGISKGNVSLSTAIVADLGSPLARSQGMAVIGVAFSLGFTLGPMLGASLPLEMAPWFALLFAASDLLFIFCFLPETLPLEKRAPSIALGFRDAADLLSPLALLRFSAVARGQDPPSGDRLSSLRRLGLVYFLYLFLFSGLEYTLSFLTHQRFQFSSLQQGKMFFLIGLTMATIQGAYARRIHPGGEVAAVKRALLLLVPAFLLIGWGRSLPVLGLGLLLYSFAAAVVVPCLSSVVAGYGSPGQKGTVMGTLRSLGALARAAGPLVAASVYWLAGAQACFTTWSGLFLLPFFLLQKLSYPAQTLKAE

SEQ ID NO: 852164 - protein, 660 aa, Homo sapiens
CLLFFPQRERQAQREDALELTEKLDQDWKEIQTLLSHKTPKSENRDKKEKPKPDAYDMMVRELGFEMKAQPSNRMKTEAELAKEEQEHLRKLEAERLRRMLGKDEDENVKKPKHMSADDLNDGFVLDKDDRRLLSYKDGKMNVEEDVQEEQSKEASDPESNEEEGDSSGGEDTEESDSPDSHLDLESNVESEEENEKPAKEQRQTPGKGLISGKERAGKATRDELPYTFAAPESYEELRSLLLGRSMEEQLLVVERIQKCNHPSLAEGNKAKLEKLFGFLLEYVGDLATDDPPDLTVIDKLVVHLYHLCQMFPESASDAIKFVLRDAMHEMEEMIETKGRAALPGLDVLIYLKITGLLFPTSDFWHPVVTPALVCLSQLLTKCPILSLQDVVKGLFVCCLFLEYVALSQRFIPELINFLLGILYIATPNKASQGSTLVHPFRALGKNSELLVVSAREDVATWQQSSLSLRWASRLRAPTSTEANHIRLSCLAVGLALLKRCVLMYGSLPSFHAIMGPLQALLTDHLADCSHPQELQELCQSTLTEMESQKQLCRPLTCEKSKPVPLKLFTPRLVKVLEFGRKQGSSKEEQERKRLIHKHKREFKGAVREIRKDNQFLARMQLSEIMERDAERKRKVKQLFNSLATQEGEWKALKRKKFKK

SEQ ID NO: 852165 - protein, 279 aa, Homo sapiens [sequence omitted]

SEQ ID NO: 852166 - protein, 844 aa, Homo sapiens
MAKAKKVGARRKASGAPAGARGGPAKANSNPFEVKVNRQKFQILGRKTRHDVGLPGVSRARALRKRTQTLLKEYKERDKSNVFRDKRFGEYNSNMSPEEKMMKRFALEQQRHHEKKSIYNLNEDEELTHYGQSLADIEKHNDIVDSDSDAEDRGTLSAELTAAHFGGGGGLLHKKTQQEGEEREKPKSRKELIEELIAKSKQEKRERQAQREDALELTEKLDQDWKEIQTLLSHKTPKSENRDKKEKPKPDAYDMMVRELGFEMKAQPSNRMKTEAELAKEEQEHLRKLEAERLRRMLGKDEDENVKKPKHMSADDLNDGFVLDKDDRRLLSYKDGKMNVEEDVQEEQSKEASDPESNEEEGDSSGGEDTEESDSPDSHLDLESNVESEEENEKPAKEQRQTPGKGLISGKERAGKATRDELPYTFAGRSMEEQLLVVERIQKCNHPSLAEGNKAKLEKLFGFLLEYVGDLATDDPPDLTVIDKLVVHLYHLCQMFPESASDAIKFVLRDAMHEMEEMIETKGRAALPGLDVLIYLKITGLLFPTSDFWHPVVTPALVCLSQLLTKCPILSLQDVVKGLFVCCLFLEYVALSQRFIPELINFLLGILYIATPNKASQGSTLVHPFRALGKNSELLVVSAREDVATWQQSSLSLRWASRLRAPTSTEANHIRLSCLAVGLALLKRCVLMYGSLPSFHAIMGPLQALLTDHLADCSHPQELQELCQSTLTEMESQKQLCRPLTCEKSKPVPLKLFTPRLVKVLEFGRKQGSSKEEQERKRLIHKHKREFKGAVREIRKDNQFLARMQLSEIMERDAERKRKVKQLFNSLATQEGEWKALKRKKFKK

SEQ ID NO: 852167 - protein, 810 aa, Homo sapiens
MAKAKKVGARRKASGAPAGARGGPAKANSNPFEVKVNRQKFQILGRKTRHDVGLPGVSRARALRKRTQTLLKEYKERDKSNVFRDKRFGEYNSNMSPEEKMMKRFALEQQRHHEKKSIYNLNEDEELTHYGQSLADIEKHNDIVDSDSDAEDRGTLSAELTAAHFGGGGGLLHKKTQQEGEEREKPKSRKELIEELIAKSKQEKRERQAQREDALELTEKLDQDWKEIQTLLSHKTPKSENRDKKEKPKPDAYDMMVRELGFEMKAQPSNRMKTEAELAKEEQEHLRKLEAERLRRMLGKDEDENVKKPKHMSADDLNDGFVLDKDDRRLLSYKDGKMNVEEDVQEEQSKEASDPESNEEEGDSSGGEDTEESDSPDSHLDLESNVESEEENEKPAKEQRQTPGKGLISGKERAGKATRDELPYTFAAPESYEELRSLLLGRSMEEQLLVVERIQKCNHPSLAEGNKAKLEKLFGFLLEYVGDLATDDPPDLTVIDKLVVHLYHLCQMFPESASDAIKFVLRDAMHEMEEMIETKGRAALPGLDVLIYLKITGLLFPTSDFWHPVVTPALVCLSQLLTKCPILSLQDVVKGLFVCCLFLEYVALSQRFIPELINFLLGILYIATPNKASQGSTLVHPFRALGKNSELLVVSAREDVATWQQSSLSLRWASRLRAPTSTEANHIRLSCLAVGLALLKRCVLMYGSLPSFHAIMGPLQALLTDHLADCSHPQELQELCQSTLTEMESQKQLCRPLTCEKSKPVPLKLFTPRLVKVLVSNSRPQVIHLPWPPNYRCEPQHPAKKVIFFRVIML

SEQ ID NO: 852168 - protein, 801 aa, Homo sapiens
MAKAKKVGARRKASGAPAGARGGPAKANSNPFEVKVNRQKFQILGRKTRHDVGLPGVSRARALRKRTQTLLKEYKERDKSNVFRDKRFGEYNSNMSPEEKMMKRFALEQQRHHEKKSIYNLNEDEELTHYGQSLADIEKHNDIVDSDSDAEDRGTLSAELTAAHFGGGGGLLHKKTQQEGEEREKPKSRKELIEELIAKSKQEKRERQAQREDALELTEKLDQDWKEIQTLLSHKTPKSENRDKKEKPKPDAYDMMVRELGFEMKAQPSNRMKTEAELAKEEQEHLRKLEAERLRRMLGKDEDENVKKPKHMSADDLNDGFVLDKDDRRLLSYKDGKMNVEEDVQEEQSKEASDPESNEEEGDSSGGEDTEESDSPDSHLDLESNVESEEENEKPAKEQRQTPGKGLISGKERAGKATRDELPYTFAAPESYEELRSLLLGRSMEEQLLVVERIQKCNHPSLAEGNKAKLEKLFGFLLEYVGDLATDDPPDLTVIDKLVVHLYHLCQMFPESASDAIKFVLRDAMHEMEEMIETKGRAALPGLDVLIYLKITGLLFPTSDFWHPVVTPALVCLSQLLTKCPILSLQDVVKGLFVCCLFLEYVALSQRFIPELINFLLGILYIATPNKASQGSTLVHPFRALGKNSELLVVSAREDVATWQQSSLSLRWASRLRAPTSTEANHIRLSCLAVGLALLKRCVLMYGSLPSFHAIMGPLQALLTDHLADCSHPQELQELCQSTLTEMESQKQLCRPLTCEKSKPVPLKLFTPRLVKVCGCWQHLPGRPGLWAQWELTGGVCQFCS

SEQ ID NO: 852169 - protein, 828 aa, Homo sapiens
MAKAKKVGARRKASGAPAGARGGPAKANSNPFEVKVNRQKFQILGRKTRHDVGLPGVSRARALRKRTQTLLKEYKERDKSNVFRDKRFGEYNSNMSPEEKMMKRFALEQQRHHEKKSIYNLNEDEELTHYGQSLADIEKHNDIVDSDSDAEDRGTLSAELTAAHFGGGGGLLHKKTQQEGEEREKPKSRKELIEELIAKSKQEKRERQAQREDALELTEKLDQDWKEIQTLLSHKTPKSENRDKKEKPKPDAYDMMVRELGFEMKAQPSNRMKTEAELAKEEQEHLRKLEAERLRRMLGKDEDENVKKPKHMSADDLNDGFVLDKDDRRLLSYKDGKMNVEEDVQEEQSKEASDPESNEEEGDSSGGEDTEESDSPDSHLDLESNVESEEENEKPAKEQRQTPGKGLISGKERAGKATRDELPYTFAAPESYEELRSLLLGRSMEEQLLVVERIQKCNHPSLAEGNKAKLEKLFGFLLEYVGDLATDDPPDLTVIDKLVVHLYHLCQMFPESASDAIKFVLRDAMHEMEEMIETKGRAALPGLDVLIYLKITGLLFPTSDFWHPVVTPALVCLSQLLTKCPILSLQDVVKGLFVCCLFLEYVALSQRFIPELINFLLGILYIATPNKASQGSTLVHPFRALGKNSELLVVSAREDVATWQQSSLSLRWASRLRAPTSTEANHIRLSCLAVGLALLKRCVLMYGSLPSFHAIMGPLQALLTDHLADCSHPQELQELCQSTLTEMESQKQLCRPLTCEKSKPVPLKLFTPRLVKVLEFGRKQGSSKEEQERKRLVSNSRPQVIHLPWPPNYRCEPQHPAKKVIFFRVIML

SEQ ID NO: 852170 - protein, 199 aa, Homo sapiens
MAVLPPQARGHRCVCGRSQPPSVGPRSPRSFHGEGQARRAQTMGDRLRQRSPEAPHTNLRPMGPLRGAGVVGPRRPGQESRPRGYAAAGSSSAPLRVLLTHSRAATRRTGENPATASRRVGRPTASGPTLSGSPGQKGTVMGTLRSLGALARAAGPLVAASVYWLAGAQACFTTWSGLFLLPFFLLQKLSYPAQTLKAE

SEQ ID NO: 852171 - protein, 115 aa, Homo sapiens [sequence omitted]

SEQ ID NO: 852172 - protein, 43 aa, Homo sapiens
MTSSQDSNPPYVPFQCPILSLQDVVKGLFVCCLFLEYVALSQR

SEQ ID NO: 852173 - protein, 106 aa, Homo sapiens [sequence omitted]

SEQ ID NO: 852174 - protein, 455 aa, Homo sapiens
MGWGGGGGCTPRPPIHQQPPERRVVTVVFLGLLLDLLAFTLLLPLLPGLLESHGRAHDPLYGSWQGGVDWFATAIGMPVEKRYNSVLFGGLIGSAFSVLQFLCAPLTGATSDCLGRRPVMLLCLMGVATSYAVWATSRSFAAFLASRLIGGISKGNVSLSTAIVADLGSPLARSQGMAVIGVAFSLGFTLGPMLGASLPLEMAPWFALLFAASDLLFIFCFLPETLPLEKRAPSIALGFRDAADLLSPLALLRFSAVARGQDPPSGDRLSSLRRLGLVYFLYLFLFSGLEYTLSFLTHQRFQFSSLQQGKMFFLIGLTMATIQGAYARRIHPGGEVAAVKRALLLLVPAFLLIGWGRSLPVLGLGLLLYSFAAAVVVPCLSSVVAGYGSPGQKGTVMGTLRSLGALARAAGPLVAASVYWLAGAQACFTTWSGLFLLPFFLLQKLSYPAQTLKAE

SEQ ID NO: 852175 - protein, 625 aa, Homo sapiens; identical to SEQ ID NO: 852155

SEQ ID NO: 852176 - protein, 650 aa, Homo sapiens
MAVLPPQARGHRCVCGRSQPPSVGPRSPRSFHGEGQARRAQTMGDRLRQRSPEAPHTNLRPMGPLRGAGVVGPRRPGQESRPRGYAAAGSSSAPLRVLLTHSRAATRRTGENPATASGRKRTCRDVRHFRGVAWRAWRPPLAACLVPCSASVRPSVPSAQPRQARSEQPTMGWGGGGGCTPRPPIHQQPPERRVVTVVFLGLLLDLLAFTLLLPLLPGLLESHGRAHDPLYGSWQGGVDWFATAIGMPVEKRYNSVLFGGLIGSAFSVLQFLCAPLTGATSDCLGRRPVMLLCLMGVATSYAVWATSRSFAAFLASRLIGGISKGNVSLSTAIVADLGSPLARSQGMAVIGVAFSLGFTLGPMLGASLPLEMAPWFALLFAASDLLFIFCFLPETLPLEKRAPSIALGFRDAADLLSPLALLRFSAVARGQDPPSGDRLSSLRRLGLVYFLYLFLFSGLEYTLSFLTHQRFQFSSLQQGKMFFLIGLTMATIQGAYARRIHPGGEVAAVKRALLLLVPAFLLIGWGRSLPVLGLGLLLYSFAAAVVVPCLSSVVAGYGSPGQKGTVMGTLRSLGALARAAGPLVAASGEGAGWCWGRLGAKHLPSPPKCQPPRGLGDATVSPQCTGWPGPRPASPRGPGSFCSPSSSCRS

SEQ ID NO: 852177 - protein, 857 aa, Homo sapiens; identical to SEQ ID NO: 852158

SEQ ID NO: 852178 - protein, 580 aa, Homo sapiens
MAVLPPQARGHRCVCGRSQPPSVGPRSPRSFHGEGQARRAQTMGDRLRQRSPEAPHTNLRPMGPLRGAGVVGPRRPGQESRPRGYAAAGSSSAPLRVLLTHSRAATRRTGENPATASGRKRTCRDVRHFRGVAWRAWRPPLAACLVPCSASVRPSVPSAQPRQARSEQPTMGWGGGGGCTPRPPIHQQPPERRVVTVVFLGLLLDLLAFTLLLPLLPGLLESHGRAHDPLYGSWQGGVDWFATAIGMPVEKRYNSVLFGGLIGSAFSVLQFLCAPLTGATSDCLGRRPVMLLCLMGVATSYAVWATSRSFAAFLASRLIGGISKGNVSLSTAIVADLGSPLARSQGMAVIGVAFSLGFTLGPMLGASLPLEMAPWFALLFAASDLLFIFCFLPETLPLEKRAPSIALGFRDAADLLSPLALLRFSAVARGQDPPSGDRLSSLRRLGLVYFLYLFLFSGLEYTLSFLTHQRFQFSSLQQGKMFFLIGLTMATIQGAYARRIHPGGEVAAVKRALLLLVPAFLLIGWGRSLPVLGLGLLLYSFGGGVVVPSVSVVVVWSQGEGRMVTGSSVGRPGPGRSKGK

SEQ ID NO: 852179 - protein, 857 aa, Homo sapiens; identical to SEQ ID NO: 852158

SEQ ID NO: 852180 - protein, 857 aa, Homo sapiens; identical to SEQ ID NO: 852158

SEQ ID NO: 852181 - protein, 741 aa, Homo sapiens
MAVLPPQARGHRCVCGRSQPPSVGPRSPRSFHGEGQARRAQTMGDRLRQRSPEAPHTNLRPMGPLRGAGVVGPRRPGQESRPRGYAAAGSSSAPLRVLLTHSRAATRRTGENPATASGRKRTCRDVRHFRGVAWRAWRPPLAACLVPCSASVRPSVPSAQPRQARSEQPTMGWGGGGGCTPRPPIHQQPPERRVVTVVFLGLLLDLLAFTLLLPLLPGLLESHGRAHDPLYGSWQGGVDWFATAIGMPVEKRYNSVLFGGLIGSAFSVLQFLCAPLTGATSDCLGRRPVMLLCLVCSWAWVPMGKPPPTQPVAPWGQVGRGRWLWAPHGHWLALIASWRGFSGDQWLLFQSQAFKELLLAPEEGTENASGPQMLRNRAGLRGVVWVAKPYSEPLLALSDRPCLLAPAPGQMGVATSYAVWATSRSFAAFLASRLIGGISKGNVSLSTAIVADLGSPLARSQGMAVIGVAFSLGFTLGPMLGASLPLEMAPWFALLFAASDLLFIFCFLPETLPLEKRAPSIALGFRDAADLLSPLALLRFSAVARGQDPPSGDRLSSLRRLGLVYFLYLFLFSGLEYTLSFLTHQRFQFSSLQQGKMFFLIGLTMATIQGAYARRIHPGGEVAAVKRALLLLVPAFLLIGWGRSLPVLGLGLLLYSFAAAVVVPCLSSVVAGYGSPGQKGTVMGTLRSLGALARAAGPLVAASVYWLAGAQACFTTWSGLFLLPFFLLQKLSYPAQTLKAE

SEQ ID NO: 852182 - protein, 279 aa, Homo sapiens [sequence omitted]

SEQ ID NO: 852183 - protein, 412 aa, Homo sapiens
MAVLPPQARGHRCVCGRSQPPSVGPRSPRSFHGEGQARRAQTMGDRLRQRSPEAPHTNLRPMGPLRGAGVVGPRRPGQESRPRGYAAAGSSSAPLRVLLTHSRAATRRTGENPATASGRKRTCRDVRHFRGVAWRAWRPPLAACLVPCSASVRPSVPSAQPRQARSEQPTMGWGGGGGCTPRPPIHQQPPERRVVTVVFLGLLLDLLAFTLLLPLLPGLLESHGRAHDPLYGSWQGGVDWFATAIGMPVEKRYNSVLFGGLIGSAFSVLQFLCAPLTGATSDCLGRRPVMLLCLMGVATSYAVWATSRSFAAFLASRLIGGISKGNVSLSTAIVADLGSPLARSQGMPPTCCSSSASCQRRCPWRNGRPLSPWGSVMRLICSAPWPCCASRLSLVARTHPLETGSAACAAWA

SEQ ID NO: 852184 - protein, 675 aa, Homo sapiens
MAKAKKVGARRKASGAPAGARGGPAKANSNPFEVKVNRQKFQILGRKTRHDVGLPGVSRARALRKRTQTLLKEYKERDKSNVFRDKRFGEYNSNMSPEEKMMKRFALEQQRHHEKKSIYNLNEDEELTHYGQSLADIEKHNDIVDSDSDAEDRGTLSAELTAAHFGGGGGLLHKKTQQEGEEREKPKSRKELIEELIAKSKQEKRERQAQREDALELTEKLDQDWKEIQTLLSHKTPKSENRDKKEKPKPDAYDMMVRELGFEMKAQPSNRMKTEAELAKEEQEHLRKLEAERLRRMLGKDEDENVKKPKHMSADDLNDGFVLDKDDRRLLSYKDGKMNVEEDVQEEQSKEASDPESNEEEGDSSGGEDTEESDSPDSHLDLESNVESEEENEKPAKEQRQTPGKGLISGKERAGKATRDELPYTFAAPESYEELRSLLLGRSMEEQLLVVERIQKCNHPSLAEGNKAKLEKLFGFLLEYVGDLATDDPPDLTVIDKLVVHLYHLCQMFPESASDAIKFVLRDAMHEMEEMIETKGRAALPGLDVLIYLKITGLLFPTSDFWHPVVTPALVCLSQLLTKCPILSLQDVVKGLFVCCLFLEYVALSQRFIPELINFLLGILYIATPNKASQGSTLVHPFRALGKNSELLVVSAREDVATWQQSSLSLRWSRIPDLR

SEQ ID NO: 852185 - protein, 663 aa, Homo sapiens
MAKAKKVGARRKASGAPAGARGGPAKANSNPFEVKVNRQKFQILGRKTRHDVGLPGVSRARALRKRTQTLLKEYKERDKSNVFRDKRFGEYNSNMSPEEKMMKRFALEQQRHHEKKSIYNLNEDEELTHYGQSLADIEKHNDIVDSDSDAEDRGTLSAELTAAHFGGGGGLLHKKTQQEGEEREKPKSRKELIEELIAKSKQEKRERQAQREDALELTEKLDQDWKEIQTLLSHKTPKSENRDKKEKPKPDAYDMMVRELGFEMKAQPSNRMKTEAELAKEEQEHLRKLEAERLRRMLGKDEDENVKKPKHMSADDLNDGFVLDKDDRRLLSYKDGKMNVEEDVQEEQSKEASDPESNEEEGDSSGGEDTEESDSPDSHLDLESNVESEEENEKPAKEQRQTPGKGLISGKERAGKATRDELPYTFAAPESYEELRSLLLGRSMEEQLLVVERIQKCNHPSLAEGNKAKLEKLFGFLLEYVGDLATDDPPDLTVIDKLVVHLYHLCQMFPESASDAIKFVLRDAMHEMEEMIETKGRAALPGLDVLIYLKITGLLFPTSDFWHPVVTPALVCLSQLLTKCPILSLQDVVKGLFVCCLFLEYVALSQRFIPELINFLLGILYIATPNKASQERLGRTRNCSWCLLERMWPRGSRAASPSAGRVD

SEQ ID NO: 852186 - protein, 523 aa, Homo sapiens
MAKAKKVGARRKASGAPAGARGGPAKANSNPFEVKVNRQKFQILGRKTRHDVGLPGVSRARALRKRTQTLLKEYKERDKSNVFRDKRFGEYNSNMSPEEKMMKRFALEQQRHHEKKSIYNLNEDEELTHYGQSLADIEKHNDIVDSDSDAEDRGTLSAELTAAHFGGGGGLLHKKTQQEGEEREKPKSRKELIEELIAKSKQEKRERQAQREDALELTEKLDQDWKEIQTLLSHKTPKSENRDKKEKPKPDAYDMMVRELGFEMKAQPSNRMKTEAELAKEEQEHLRKLEAERLRRMLGKDEDENVKKPKHMSADDLNDGFVLDKDDRRLLSYKDGKMNVEEDVQEEQSKEASDPESNEEEGDSSGGEDTEESDSPDSHLDLESNVESEEENEKPAKEQRQTPGKGLISGKERAGKATRDELPYTFAAPESYEELRSLLLGRSMEEQLLVVERIQKCNHPSLAEGNKAKLEKLFGFLLEYVGDLATDDPPDLTVIDKLVVCFLNLQVTLSNLFSEMRCMRWKK

SEQ ID NO: 852187 - protein, 297 aa, Homo sapiens
AILSLQDGALGEQLTEATKCPILSLQDVVKGLFVCCLFLEYVALSQRFIPELINFLLGILYIATPNKASQGSTLVHPFRALGKNSELLVVSAREDVATWQQSSLSLRWASRLRAPTSTEANHIRLSCLAVGLALLKRCVLMYGSLPSFHAIMGPLQALLTDHLADCSHPQELQELCQSTLTEMESQKQLCRPLTCEKSKPVPLKLFTPRLVKVLEFGRKQGSSKEEQERKRLIHKHKREFKGAVREIRKDNQFLARMQLSEIMERDAERKRKVKQLFNSLATQEGEWKALKRKKFKK

SEQ ID NO: 852188 - protein, 116 aa, Homo sapiens
TFLAVRSTGYGDLQLPKSPPFRECSQGPAHGPPSSRRQWLYFVPAVPGLEQPQPWLTPPPTGRRTARAPSCCRELAALSSRCLDTTEPVRGAQGTQQVSHRRVGDFVFFRSCVRAH

SEQ ID NO: 852189 - protein, 75 aa, Homo sapiens
KQMLQGSCSKPRPHTEEKVLGLDSKRSKTGTGTKKRQVKLGEGKQETCTKATAEGAVTGQCISQVSFHELRKTSV

SEQ ID NO: 852190 - protein, 1287 aa, Homo sapiens
RDSCCAEEPCGTRGCARARALWPRRGDSEAHWGLPARGRPRRPARGLRLCAPSPEEDACRHRARAAGLNACLPGAAAALPSAGVGSGTRRAPGGRRAQAGYTLPESAEFAASEGGPAGPDGRGVCGPRRVLRSGPGTGGTLSAGAAAAERTWGGGHAPVRSLEPSGAPRGPARVCGRSGPHSPRARSSQRAPDKMARPVRGGLGAPRRSPCLLLLWLLLLRLEPVTAAAGPRAPCAAACTCAGDSLDCGGRGLAALPGDLPSWTRSLNLSYNKLSEIDPAGFEDLPNLQEVYLNNNELTAVPSLGAASSHVVSLFLQHNKIRSVEGSQLKAYLSLEVLDLSLNNITEVRNTCFPHGPPIKELNLAGNRIGTLELGAFDGLSRSLLTLRLSKNRITQLPVRAFKLPRLTQLDLNRNRIRLIEGLTFQGLNSLEVLKLQRNNISKLTDGAFWGLSKMHVLHLEYNSLVEVNSGSLYGLTALHQLHLSNNSIARIHRKGWSFCQKLHELVLSFNNLTRLDEESLAELSSLSVLRLSHNSISHIAEGAFKGLRSLRVLDLDHNEISGTIEDTSGAFSGLDSLSKLTLFGNKIKSVAKRAFSGLEGLEHLNLGGNAIRSVQFDAFVKMKNLKELHISSDSFLCDCQLKWLPPWLIGRMLQAFVTATCAHPESLKGQSIFSVPPESFVCDDFLKPQIITQPETTMAMVGKDIRFTCSAASSSSSPMTFAWKKDNEVLTNADMENFVHVHAQDGEVMEYTTILHLRQVTFGHEGRYQCVITNHFGSTYSHKARLTVNVLPSFTKTPHDITIRTTTMARLECAATGHPNPQIAWQKDGGTDFPAARERRMHVMPDDDVFFITDVKIDDAGVYSCTAQNSAGSISANATLTVLETPSLVVPLEDRVVSVGETVALQCKATGNPPPRITWFKGDRPLSLTERHHLTPDNQLLVVQNVVAEDAGRYTCEMSNTLGTERAHSQLSVLPAAGCRKDGTTVGIFTIAVVSSIVLTSLVWVCIIYQTRKKSEEYSVTNTDETVVPPDVPSYLSSQGTLSDRQETVVRTEGGPQANGHIESNGVCPRDASHFPEPDTHSVACRQPKLCAGSAYHKEPWKAMEKAEGTPGPHKMEHGGRVVCSDCNTEVDCYSRGQAFHPQPVSRDSAQPSAPNGPEPGGSDQEHSPHHQCSRTAAGSCPECQGSLYPSNHDRMLTAVKKKPMASLDGKGDSSWTLARLYHPDSTELQPASSLTSGSPERAEAQYLLVSNGHLPKACDASPESTPLTGQLPGKQRVPLLLAPKS

SEQ ID NO: 852191 - protein, 1262 aa, Homo sapiens
RDSCCAEEPCGTRGCARARALWPRRGDSEAHWGLPARGRPRRPARGLRLCAPSPEEDACRHRARAAGLNACLPGAAAALPSAGVGSGTRRAPGGRRAQAGYTLPESAEFAASEGGPAGPDGRGVCGPRRVLRSGPGTGGTLSAGAAAAERTWGGGHAPVRSLEPSGAPRGPARVCGRSGPHSPRARSSQRAPDKMARPVRGGLGAPRRSPCLLLLWLLLLRLEPVTAAAGPRAPCAAACTCAGDSLDCGGRGLAALPGDLPSWTRSLNLSYNKLSEIDPAGFEDLPNLQEVQHNKIRSVEGSQLKAYLSLEVLDLSLNNITEVRNTCFPHGPPIKELNLAGNRIGTLELGAFDGLSRSLLTLRLSKNRITQLPVRAFKLPRLTQLDLNRNRIRLIEGLTFQGLNSLEVLKLQRNNISKLTDGAFWGLSKMHVLHLEYNSLVEVNSGSLYGLTALHQLHLSNNSIARIHRKGWSFCQKLHELVLSFNNLTRLDEESLAELSSLSVLRLSHNSISHIAEGAFKGLRSLRVLDLDHNEISGTIEDTSGAFSGLDSLSKLTLFGNKIKSVAKRAFSGLEGLEHLNLGGNAIRSVQFDAFVKMKNLKELHISSDSFLCDCQLKWLPPWLIGRMLQAFVTATCAHPESLKGQSIFSVPPESFVCDDFLKPQIITQPETTMAMVGKDIRFTCSAASSSSSPMTFAWKKDNEVLTNADMENFVHVHAQDGEVMEYTTILHLRQVTFGHEGRYQCVITNHFGSTYSHKARLTVNVLPSFTKTPHDITIRTTTMARLECAATGHPNPQIAWQKDGGTDFPAARERRMHVMPDDDVFFITDVKIDDAGVYSCTAQNSAGSISANATLTVLETPSLVVPLEDRVVSVGETVALQCKATGNPPPRITWFKGDRPLSLTERHHLTPDNQLLVVQNVVAEDAGRYTCEMSNTLGTERAHSQLSVLPAAGCRKDGTTVGIFTIAVVSSIVLTSLVWVCIIYQTRKKSEEYSVTNTDETVVPPDVPSYLSSQGTLSDRQETVVRTEGGPQANGHIESNGVCPRDASHFPEPDTHSVACRQPKLCAGSAYHKEPWKAMEKAEGTPGPHKMEHGGRVVCSDCNTEVDCYSRGQAFHPQPVSRDSAQPSAPNGPEPGGSDQEHSPHHQCSRTAAGSCPECQGSLYPSNHDRMLTAVKKKPMASLDGKGDSSWTLARLYHPDSTELQPASSLTSGSPERAEAQYLLVSNGHLPKACDASPESTPLTGQLPGKQRVPLLLAPKS

SEQ ID NO: 852192 - protein, 1287 aa, Homo sapiens; identical to SEQ ID NO: 852190

SEQ ID NO: 852193 - protein, 843 aa, Homo sapiens
NSSRQWLIGRGYPNLSYNKLSEIDPAGFEDLPNLQEVYLNNNELTAVPSLGAASSHVVSLFLVLSFNNLTRLDEESLAELSSLSVLRLSHNSISHIAEGAFKGLRSLRVLDLDHNEISGTIEDTSGAFSGLDSLSKLTLFGNKIKSVAKRAFSGLEGLEHLNLGGNAIRSVQFDAFVKMKNLKELHISSDSFLCDCQLKWLPPWLIGRMLQAFVTATCAHPESLKGQSIFSVPPESFVCDDFLKPQIITQPETTMAMVGKDIRFTCSAASSSSSPMTFAWKKDNEVLTNADMENFVHVHAQDGEVMEYTTILHLRQVTFGHEGRYQCVITNHFGSTYSHKARLTVNVLPSFTKTPHDITIRTTTMARLECAATGHPNPQIAWQKDGGTDFPAARERRMHVMPDDDVFFITDVKIDDAGVYSCTAQNSAGSISANATLTVLETPSLVVPLEDRVVSVGETVALQCKATGNPPPRITWFKGDRPLSLTERHHLTPDNQLLVVQNVVAEDAGRYTCEMSNTLGTERAHSQLSVLPAAGCRKDGTTVGIFTIAVVSSIVLTSLVWVCIIYQTRKKSEEYSVTNTDETVVPPDVPSYLSSQGTLSDRQETVVRTEGGPQANGHIESNGVCPRDASHFPEPDTHSVACRQPKLCAGSAYHKEPWKAMEKAEGTPGPHKMEHGGRVVCSDCNTEVDCYSRGQAFHPQPVSRDSAQPSAPNGPEPGGSDQEHSPHHQCSRTAAGSCPECQGSLYPSNHDRMLTAVKKKPMASLDGKGDSSWTLARLYHPDSTELQPASSLTSGSPERAEAQYLLVSNGHLPKACDASPESTPLTGQLPGKQRVPLLLAPKS

SEQ ID NO: 852194 - protein, 589 aa, Homo sapiens
MAMVGKDIRFTCSAASSSSSPMTFAWKKDNEVLTNADMENFVHVHAQDGEVMEYTTILHLRQVTFGHEGRYQCVITNHFGSTYSHKARLTVNVLPSFTKTPHDITIRTTTMARLECAATGHPNPQIAWQKDGGTDFPAARERRMHVMPDDDVFFITDVKIDDAGVYSCTAQNSAGSISANATLTVLETPSLVVPLEDRVVSVGETVALQCKATGNPPPRITWFKGDRPLSLTERHHLTPDNQLLVVQNVVAEDAGRYTCEMSNTLGTERAHSQLSVLPAAGCRKDGTTVGIFTIAVVSSIVLTSLVWVCIIYQTRKKSEEYSVTNTDETVVPPDVPSYLSSQGTLSDRQETVVRTEGGPQANGHIESNGVCPRDASHFPEPDTHSVACRQPKLCAGSAYHKEPWKAMEKAEGTPGPHKMEHGGRVVCSDCNTEVDCYSRGQAFHPQPVSRDSAQPSAPNGPEPGGSDQEHSPHHQCSRTAAGSCPECQGSLYPSNHDRMLTAVKKKPMASLDGKGDSSWTLARLYHPDSTELQPASSLTSGSPERAEAQYLLVSNGHLPKACDASPESTPLTGQLPGKQRVPLLLAPKS

SEQ ID NO: 852195 - protein, 479 aa, Homo sapiens
MARLECAATGHPNPQIAWQKDGGTDFPAARERRMHVMPDDDVFFITDVKIDDAGVYSCTAQNSAGSISANATLTVLETPSLVVPLEDRVVSVGETVALQCKATGNPPPRITWFKGDRPLSLTERHHLTPDNQLLVVQNVVAEDAGRYTCEMSNTLGTERAHSQLSVLPAAGCRKDGTTVGIFTIAVVSSIVLTSLVWVCIIYQTRKKSEEYSVTNTDETVVPPDVPSYLSSQGTLSDRQETVVRTEGGPQANGHIESNGVCPRDASHFPEPDTHSVACRQPKLCAGSAYHKEPWKAMEKAEGTPGPHKMEHGGRVVCSDCNTEVDCYSRGQAFHPQPVSRDSAQPSAPNGPEPGGSDQEHSPHHQCSRTAAGSCPECQGSLYPSNHDRMLTAVKKKPMASLDGKGDSSWTLARLYHPDSTELQPASSLTSGSPERAEAQYLLVSNGHLPKACDASPESTPLTGQLPGKQRVPLLLAPKS

SEQ ID NO: 852196 - protein, 883 aa, Homo sapiens
RDSCCAEEPCGTRGCARARALWPRRGDSEAHWGLPARGRPRRPARGLRLCAPSPEEDACRHRARAAGLNACLPGAAAALPSAGVGSGTRRAPGGRRAQAGYTLPESAEFAASEGGPAGPDGRGVCGPRRVLRSGPGTGGTLSAGAAAAERTWGGGHAPVRSLEPSGAPRGPARVCGRSGPHSPRARSSQRAPDKMARPVRGGLGAPRRSPCLLLLWLLLLRLEPVTAAAGPRAPCAAACTCAGDSLDCGGRGLAALPGDLPSWTRSLNLSYNKLSEIDPAGFEDLPNLQEVYLNNNELTAVPSLGAASSHVVSLFLQHNKIRSVEGSQLKAYLSLEVLDLSLNNITEVRNTCFPHGPPIKELNLAGNRIGTLELGAFDGLSRSLLTLRLSKNRITQLPVRAFKLPRLTQLDLNRNRIRLIEGLTFQGLNSLEVLKLQRNNISKLTDGAFWGLSKMHVLHLEYNSLVEVNSGSLYGLTALHQLHLSNNSIARIHRKGWSFCQKLHELVLSFNNLTRLDEESLAELSSLSVLRLSHNSISHIAEGAFKGLRSLRVLDLDHNEISGTIEDTSGAFSGLDSLSKLTLFGNKIKSVAKRAFSGLEGLEHLNLGGNAIRSVQFDAFVKMKNLKELHISSDSFLCDCQLKWLPPWLIGRMLQAFVTATCAHPESLKGQSIFSVPPESFVCDDFLKPQIITQPETTMAMVGKDIRFTCSAASSSSSPMTFAWKKDNEVLTNADMENFVHVHAQDGEVMEYTTILHLRQVTFGHEGRYQCVITNHFGSTYSHKARLTVNVLPSFTKTPHDITIRTTTMARLECAATGHPNPQIAWQKDGGTDFPAARERRMHVMPDDRTAPRETEGATAVGTKKLGFVYLSSCHTNLYGKER

SEQ ID NO: 852197 - protein, 1287 aa, Homo sapiens; identical to SEQ ID NO: 852190

SEQ ID NO: 852198 - protein, 605 aa, Homo sapiens
RDSCCAEEPCGTRGCARARALWPRRGDSEAHWGLPARGRPRRPARGLRLCAPSPEEDACRHRARAAGLNACLPGAAAALPSAGVGSGTRRAPGGRRAQAGYTLPESAEFAASEGGPAGPDGRGVCGPRRVLRSGPGTGGTLSAGAAAAERTWGGGHAPVRSLEPSGAPRGPARVCGRSGPHSPRARSSQRAPDKMARPVRGGLGAPRRSPCLLLLWLLLLRLEPVTAAAGPRAPCAAACTCAGDSLDCGGRGLAALPGDLPSWTRSLNLSYNKLSEIDPAGFEDLPNLQEVYLNNNELTAVPSLGAASSHVVSLFLQHNKIRSVEGSQLKAYLSLEVLDLSLNNITEVRNTCFPHGPPIKELNLAGNRIGTLELGAFDGLSRSLLTLRLSKNRITQLPVRAFKLPRLTQLDLNRNRIRLIEGLTFQGLNSLEVLKLQRNNISKLTDGAFWGLSKMHVLHLEYNSLVEVNSGSLYGLTALHQLHLSNNSIARIHRKGWSFCQKLHELVLSFNNLTRLDEESLAELSSLSVLRLSHNSISHIAEGAFKGLRSLRVLDLDHNEISGTIEDTSGAFSGLDSLSKLTLFGNKIKSVAKRAFSGLEGLEHL

SEQ ID NO: 852199 - protein, 68 aa, Homo sapiens
MAMVGKDIRFTCSAASSSSSPKNHLVEIPTKLPSSLVELRIHGDRDPRGSRCPSDMVQGDSKYCRASR

SEQ ID NO: 852200 - protein, 1390 aa, Homo sapiens
RDSCCAEEPCGTRGCARARALWPRRGDSEAHWGLPARGRPRRPARGLRLCAPSPEEDACRHRARAAGLNACLPGAAAALPSAGVGSGTRRAPGGRRAQAGYTLPESAEFAASEGGPAGPDGRGVCGPRRVLRSGPGTGGTLSAGAAAAERTWGGGHAPVRSLEPSGAPRGPARVCGRSGPHSPRARSSQRAPDKMARPVRGGLGAPRRSPCLLLLWLLLLRLEPVTAAAGPRAPCAAACTCAGDSLDCGGRGLAALPGDLPSWTRSLLSAALSALSAPRGSVTWGWSGGGSYSGRGCGLGCVCGVVRACACWKTVRLEWRKGDSAWRSGGVGVRESLEKKSVPRGVWRRASVGRRDLGVSQHASCVAIWGNLSYNKLSEIDPAGFEDLPNLQEVYLNNNELTAVPSLGAASSHVVSLFLQHNKIRSVEGSQLKAYLSLEVLDLSLNNITEVRNTCFPHGPPIKELNLAGNRIGTLELGAFDGLSRSLLTLRLSKNRITQLPVRAFKLPRLTQLDLNRNRIRLIEGLTFQGLNSLEVLKLQRNNISKLTDGAFWGLSKMHVLHLEYNSLVEVNSGSLYGLTALHQLHLSNNSIARIHRKGWSFCQKLHELVLSFNNLTRLDEESLAELSSLSVLRLSHNSISHIAEGAFKGLRSLRVLDLDHNEISGTIEDTSGAFSGLDSLSKLTLFGNKIKSVAKRAFSGLEGLEHLNLGGNAIRSVQFDAFVKMKNLKELHISSDSFLCDCQLKWLPPWLIGRMLQAFVTATCAHPESLKGQSIFSVPPESFVCDDFLKPQIITQPETTMAMVGKDIRFTCSAASSSSSPMTFAWKKDNEVLTNADMENFVHVHAQDGEVMEYTTILHLRQVTFGHEGRYQCVITNHFGSTYSHKARLTVNVLPSFTKTPHDITIRTTTMARLECAATGHPNPQIAWQKDGGTDFPAARERRMHVMPDDDVFFITDVKIDDAGVYSCTAQNSAGSISANATLTVLETPSLVVPLEDRVVSVGETVALQCKATGNPPPRITWFKGDRPLSLTERHHLTPDNQLLVVQNVVAEDAGRYTCEMSNTLGTERAHSQLSVLPAAGCRKDGTTVGIFTIAVVSSIVLTSLVWVCIIYQTRKKSEEYSVTNTDETVVPPDVPSYLSSQGTLSDRQETVVRTEGGPQANGHIESNGVCPRDASHFPEPDTHSVACRQPKLCAGSAYHKEPWKAMEKAEGTPGPHKMEHGGRVVCSDCNTEVDCYSRGQAFHPQPVSRDSAQPSAPNGPEPGGSDQEHSPHHQCSRTAAGSCPECQGSLYPSNHDRMLTAVKKKPMASLDGKGDSSWTLARLYHPDSTELQPASSLTSGSPERAEAQYLLVSNGHLPKACDASPESTPLTGQLPGKQRVPLLLAPKS

SEQ ID NO: 852201 - protein, 635 aa, Homo sapiens
MLQAFVTATCAHPESLKGQSIFSVPPESFVCDDFLKPQIITQPETTMAMVGKDIRFTCSAASSSSSPMTFAWKKDNEVLTNADMENFVHVHAQDGEVMEYTTILHLRQVTFGHEGRYQCVITNHFGSTYSHKARLTVNVLPSFTKTPHDITIRTTTMARLECAATGHPNPQIAWQKDGGTDFPAARERRMHVMPDDDVFFITDVKIDDAGVYSCTAQNSAGSISANATLTVLETPSLVVPLEDRVVSVGETVALQCKATGNPPPRITWFKGDRPLSLTERHHLTPDNQLLVVQNVVAEDAGRYTCEMSNTLGTERAHSQLSVLPAAGCRKDGTTVGIFTIAVVSSIVLTSLVWVCIIYQTRKKSEEYSVTNTDETVVPPDVPSYLSSQGTLSDRQETVVRTEGGPQANGHIESNGVCPRDASHFPEPDTHSVACRQPKLCAGSAYHKEPWKAMEKAEGTPGPHKMEHGGRVVCSDCNTEVDCYSRGQAFHPQPVSRDSAQPSAPNGPEPGGSDQEHSPHHQCSRTAAGSCPECQGSLYPSNHDRMLTAVKKKPMASLDGKGDSSWTLARLYHPDSTELQPASSLTSGSPERAEAQYLLVSNGHLPKACDASPESTPLTGQLPGKQRVPLLLAPKS

SEQ ID NO: 852202 - protein, 427 aa, Homo sapiens
MYEGWFESGRGSAVLFQLMHPDCLETPSLVVPLEDRVVSVGETVALQCKATGNPPPRITWFKGDRPLSLTERHHLTPDNQLLVVQNVVAEDAGRYTCEMSNTLGTERAHSQLSVLPAAGCRKDGTTVGIFTIAVVSSIVLTSLVWVCIIYQTRKKSEEYSVTNTDETVVPPDVPSYLSSQGTLSDRQETVVRTEGGPQANGHIESNGVCPRDASHFPEPDTHSVACRQPKLCAGSAYHKEPWKAMEKAEGTPGPHKMEHGGRVVCSDCNTEVDCYSRGQAFHPQPVSRDSAQPSAPNGPEPGGSDQEHSPHHQCSRTAAGSCPECQGSLYPSNHDRMLTAVKKKPMASLDGKGDSSWTLARLYHPDSTELQPASSLTSGSPERAEAQYLLVSNGHLPKACDASPESTPLTGQLPGKQRVPLLLAPKS

SEQ ID NO: 852203 - protein, 1287 aa, Homo sapiens; identical to SEQ ID NO: 852190

SEQ ID NO: 852204 - protein, 920 aa, Homo sapiens
RDSCCAEEPCGTRGCARARALWPRRGDSEAHWGLPARGRPRRPARGLRLCAPSPEEDACRHRARAAGLNACLPGAAAALPSAGVGSGTRRAPGGRRAQAGYTLPESAEFAASEGGPAGPDGRGVCGPRRVLRSGPGTGGTLSAGAAAAERTWGGGHAPVRSLEPSGAPRGPARVCGRSGPHSPRARSSQRAPDKMARPVRGGLGAPRRSPCLLLLWLLLLRLEPVTAAAGPRAPCAAACTCAGDSLDCGGRGLAALPGDLPSWTRSLNLSYNKLSEIDPAGFEDLPNLQEVYLNNNELTAVPSLGAASSHVVSLFLQHNKIRSVEGSQLKAYLSLEVLDLSLNNITEVRNTCFPHGPPIKELNLAGNRIGTLELGAFDGLSRSLLTLRLSKNRITQLPVRAFKLPRLTQLDLNRNRIRLIEGLTFQGLNSLEVLKLQRNNISKLTDGAFWGLSKMHVLHLEYNSLVEVNSGSLYGLTALHQLHLSNNSIARIHRKGWSFCQKLHELVLSFNNLTRLDEESLAELSSLSVLRLSHNSISHIAEGAFKGLRSLRVLDLDHNEISGTIEDTSGAFSGLDSLSKLTLFGNKIKSVAKRAFSGLEGLEHLNLGGNAIRSVQFDAFVKMKNLKELHISSDSFLCDCQLKWLPPWLIGRMLQAFVTATCAHPESLKGQSIFSVPPESFVCDDFLKPQIITQPETTMAMVGKDIRFTCSAASSSSSPMTFAWKKDNEVLTNADMENFVHVHAQDGEVMEYTTILHLRQVTFGHEGRYQCVITNHFGSTYSHKARLTVNVLPSFTKTPHDITIRTTTMARLECAATGHPNPQIAWQKDGGTDFPAARERRMHVMPDDDVFFITDVKIDDAGVYSCTAQNSAGSISANATLTVLETPSLVVPLEDRVVSVGETVALQCKATGNPPPRSPQ

SEQ ID NO: 852205 - protein, 872 aa, Homo sapiens
RDSCCAEEPCGTRGCARARALWPRRGDSEAHWGLPARGRPRRPARGLRLCAPSPEEDACRHRARAAGLNACLPGAAAALPSAGVGSGTRRAPGGRRAQAGYTLPESAEFAASEGGPAGPDGRGVCGPRRVLRSGPGTGGTLSAGAAAAERTWGGGHAPVRSLEPSGAPRGPARVCGRSGPHSPRARSSQRAPDKMARPVRGGLGAPRRSPCLLLLWLLLLRLEPVTAAAGPRAPCAAACTCAGDSLDCGGRGLAALPGDLPSWTRSLNLSYNKLSEIDPAGFEDLPNLQEVYLNNNELTAVPSLGAASSHVVSLFLQHNKIRSVEGSQLKAYLSLEVLDLSLNNITEVRNTCFPHGPPIKELNLAGNRIGTLELGAFDGLSRSLLTLRLSKNRITQLPVRAFKLPRLTQLDLNRNRIRLIEGLTFQGLNSLEVLKLQRNNISKLTDGAFWGLSKMHVLHLEYNSLVEVNSGSLYGLTALHQLHLSNNSIARIHRKGWSFCQKLHELVLSFNNLTRLDEESLAELSSLSVLRLSHNSISHIAEGAFKGLRSLRVLDLDHNEISGTIEDTSGAFSGLDSLSKLTLFGNKIKSVAKRAFSGLEGLEHLNLGGNAIRSVQFDAFVKMKNLKELHISSDSFLCDCQLKWLPPWLIGRMLQAFVTATCAHPESLKGQSIFSVPPESFVCDDFLKPQIITQPETTMAMVGKDIRFTCSAASSSSSPMTFAWKKDNEVLTNADMENFVHVHAQDGEVMEYTTILHLRQVTFGHEGRYQCVITNHFGSTYSHKARLTVNVLPSFTKTPHDITIRTTTMARLECAATGHPNPQIAWQKDGGTDFPAARERRMHVMPDDDVFFITDVKIDDAGGYYWVNCRWY

SEQ ID NO: 852206 - protein, 878 aa, Homo sapiens
SGLLGRQALARRAVQAEKMAPPSTREPRVLSATSATKSDGEMVLPGFPDADSFVKFALGSVVAVTKASGGLPQFGDEYDFYRSFPGFQAFCETQGDRLLQCMSRVMQYHGCRSNIKDRSKVTELEDKFDLLVDANDVILERVGILLDEASGVNKNQQPVLPAGLQVPKTVVSSWNRKAAEYGKKAKSETFRLLHAKNIIRPQLKFREKIDNSNTPFLPKIFIKPNAQKPLPQALSKERRERPQDRPEDLDVPPALADFIHQQRTQQVEQDMFAHPYQYELNHFTPADAVLQKPQPQLYRPIEETPCHFISSLDELVELNEKLLNCQEFAVDLEHHSYRSFLGLTCLMQISTRTEDFIIDTLELRSDMYILNESLTDPAIVKVFHGADSDIEWLQKDFGLYVVNMFDTHQAARLLNLGRHSLDHLLKLYCNVDSNKQYQLADWRIRPLPEEMLSYARDDTHYLLYIYDKMRLEMWERGNGQPVQLQVVWQRSRDICLKKFIKPIFTDESYLELYRKQKKHLNTQQLTAFQLLFAWRDKTARREDESYGYVLPNHMMLKIAEELPKEPQGIIACCNPVPPLVRQQINEMHLLIQQAREMPLLKSEVAAGVKKSGPLPSAERLENVLFGPHDCSHAPPDGYPIIPTSGSVPVQKQASLFPDEKEDNLLGTTCLIATAVITLFNEPSAEDSKKGPLTVAQKKAQNIMESFENPFRMISNRWKLAQVQVQKDSKEAVKKKAAEQTAAREQAKEACKAAAEQAISVRQQVVLENAAKKRERATSDPRTTEQKQEKKRLKISKKPKDPEPPEKEFTPYDYSQSDFKAFAGNSKSKVSSQFDPNKQTPSGKKCIAAKKIKQSVGNKSMSFPTGKSDRGFRYNWPQR

SEQ ID NO: 852207 - protein, 703 aa, Homo sapiens
SGLLGRQALARRAVQAEKMAPPSTREPRVLSATSATKSDGEMVLPGFPDADSFVKFALGSVVAVTKASGGLPQFGDEYDFYRSFPGFQAFCETQGDRLLQCMSRVMQYHGCRSNIKDRSKVTELEDKFDLLVDANDVILERVGILLDEASGVNKNQQPVLPAGLQVPKTVVSSWNRKAAEYGKKAKSETFRLLHAKNIIRPQLKFREKIDNSNTPFLPKIFIKPNAQKPLPQALSKERRERPQDRPEDLDVPPALADFIHQQRTQQVEQDMFAHPYQYELNHFTPADAVLQKPQPQLYRPIEETPCHFISSLDELVELNEKLLNCQEFAVDLEHHSYRSFLGLTCLMQISTRTEDFIIDTLELRSDMYILNESLTDPAIVKVFHGADSDIEWLQKDFGLYVVNMFDTHQAARLLNLGRHSLDHLLKLYCNVDSNKQYQLADWRIRPLPEEMLSYARDDTHYLLYIYDKMRLEMWERGNGQPVQLQVVWQRSRDICLKKFIKPIFTDESYLELYRKQKKHLNTQQLTAFQLLFAWRDKTARREDESYGYVLPNHMMLKIAEELPKEPQGIIACCNPVPPLVRQQINEMHLLIQQAREMPLLKSEVAAGVKKSGPLPSAERLENVLFGPHDCSHAPPDGYPIIPTSGKVESPPDCPEEVGTQLPCLKFCRLGRAWWLMPVMPAYWKAEAGRSPEVRSLRPAWPTW

SEQ ID NO: 852208 - protein, 547 aa, Homo sapiens
SGLLGRQALARRAVQAEKMAPPSTREPRVLSATSATKSDGEMVLPGFPDADSFVKFALGSVVAVTKASGGLPQFGDEYDFYRSFPGFQAFCETQGDRLLQCMSRVMQYHGCRSNIKDRSKVTELEDKFDLLVDANDVILERVGILLDEASGVNKNQQPVLPAGLQVPKTVVSSWNRKAAEYGKKAKSETFRLLHAKNIIRPQLKFREKIDNSNTPFLPKIFIKPNAQKPLPQALSKERRERPQDRPEDLDVPPALADFIHQQRTQQVEQDMFAHPYQYELNHFTPADAVLQKPQPQLYRPIEETPCHFISSLDELVELNEKLLNCQEFAVDLEHHSYRSFLGLTCLMQISTRTEDFIIDTLELRSDMYILNESLTDPAIVKVFHGADSDIEWLQKDFGLYVVNMFDTHQAARLLNLGRHSLDHLLKLYCNVDSNKQYQLADWRIRPLPEEMLSYARDDTHYLLYIYDKMRLEMWERGNGQPVQLQVVWQRSRDICLKKFIKPIFTDESYLELYRKQKKHLNTQQLTAFQLLFAWRDKTARREDESYG

SEQ ID NO: 852209 - protein, 903 aa, Homo sapiens
SGLLGRQALARRAVQAEKMAPPSTREPRVLSATSATKSDGEMVLPGFPDADSFVKFALGSVVAVTKASGGLPQFGDEYDFYRSFPGFQAFCETQGDRLLQCMSRVMQYHGCRSNIKDRSKVTELEDKFDLLVDANDVILERVGILLDEASGVNKNQQPVLPAGLQVPKTVVSSWNRKAAEYGKKAKSETFRLLHAKNIIRPQLKFREKIDNSNTPFLPKIFIKPNAQKPLPQALSKERRERPQDRPEDLDVPPALADFIHQQRTQQVEQDMFAHPYQYELNHFTPADAVLQKPQPQLYRPIEETPCHFISSLDELVELNEKLLNCQEFAVDLEHHSYRSFLGLTCLMQISTRTEDFIIDTLELRSDMYILNESLTDPAIVKVFHGADSDIEWLQKDFGLYVVNMFDTHQAARLLNLGRHSLDHLLKLYCNVDSNKQYQLADWRIRPLPEEMLSYARDDTHYLLYIYDKMRLEMWERGNGQPVQLQVVWQRSRDICLKKFIKPIFTDESYLELYRKQKKHLNTQQLTAFQLLFAWRDKTARREDESYGYVLPNHMMLKIAEELPKEPQGIIACCNPVPPLVRQQINEMHLLIQQAREMPLLKSEVAAGVKKSGPLPSAERLENVLFGPHDCSHAPPDGYPIIPTSGSVPVQKQASLFPDEKEDNLLGTTCLIATAVITLFNEPSAEDSKKGPLTVAQKKAQNIMESFENPFRMFLPSLGHRAPVSQAAKFDPSTKIYEISNRWKLAQVQVQKDSKEAVKKKAAEQTAAREQAKEACKAAAEQAISVRQQVVLENAAKKRERATSDPRTTEQKQEKKRLKISKKPKDPEPPEKEFTPYDYSQSDFKAFAGNSKSKVSSQFDPNKQTPSGKKCIAAKKIKQSVGNKSMSFPTGKSDRGFRYNWPQR

SEQ ID NO: 852210 - protein, 762 aa, Homo sapiens
SGLLGRQALARRAVQAEKMAPPSTREPRVLSATSATKSDGEMVLPGFPDADSFVKFALGSVVAVTKASGGLPQFGDEYDFYRSFPGFQAFCETQGDRLLQCMSRVMQYHGCRSNIKDRSKVTELEDKFDLLVDANDVILERVGILLDEASGVNKNQQPVLPAGLQVPKTVVSSWNRKAAEYGKKAKSETFRLLHAKNIIRPQLKFREKIDNSNTPFLPKIFIKPNAQKPLPQALSKERRERPQDRPEDLDVPPALADFIHQQRTQQVEQDMFAHPYQYELNHFTPADAVLQKPQPQLYRPIEETPCHFISSLDELVELNEKLLNCQEFAVDLEHHSYRSFLGLTCLMQISTRTEDFIIDTLELRSDMYILNESLTDPAIVKVFHGADSDIEWLQKDFGLYVVNMFDTHQAARLLNLGRHSLDHLLKLYCNVDSNKQYQLADWRIRPLPEEMLSYARDDTHYLLYIYDKMRLEMWERGNGQPVQLQVVWQRSRDICLKKFIKPIFTDESYLELYRKQKKHLNTQQLTAFQLLFAWRDKTARREDESYGYVLPNHMMLKIAEELPKEPQGIIACCNPVPPLVRQQINEMHLLIQQAREMPLLKSEVAAGVKKSGPLPSAERLENVLFGPHDCSHAPPDGYPIIPTSGSVPVQKQASLFPDEKEDNLLGTTCLIATAVITLFNEPSAEDSKKGPLTVAQKKAQNIMESFENPFRMFLPSLGHRAPVSQAAKFDPSTKIYELPGNRQRRRAKLQQNRPSPSDSRSC

SEQ ID NO: 852211 - protein, 826 aa, Homo sapiens
SGLLGRQALARRAVQAEKMAPPSTREPRVLSATSATKSDGEMVLPGFPDADSFVKFALGSVVAVTKASGGLPQFGDEYDFYRSFPGFQAFCETQGDRLLQCMSRVMQYHGCRSNIKDRSKVTELEDKFDLLVDANDVILERVGILLDEASGVNKNQQPVLPAGLQVPKTVVSSWNRKAAEYGKKAKSETFRLLHAKNIIRPQLKFREKIDNSNTPFLPKIFIKPNAQKPLPQALSKERRERPQDRPEDLDVPPALADFIHQQRTQQVEQDMFAHPYQYELNHFTPADAVLQKPQPQLYRPIEETPCHFISSLDELVELNEKLLNCQEFAVDLEHHSYRSFLGLTCLMQISTRTEDFIIDTLELRSDMYILNESLTDPAIVKVFHGADSDIEWLQKDFGLYVVNMFDTHQAARLLNLGRHSLDHLLKLYCNVDSNKQYQLADWRIRPLPEEMLSYARDDTHYLLYIYDKMRLEMWERGNGQPVQLQVVWQRSRDICLKKFIKPIFTDESYLELYRKQKKHLNTQQLTAFQLLFAWRDKTARREDESYGYVLPNHMMLKIAEELPKEPQGIIACCNPVPPLVRQQINEMHLLIQQAREMPLLKSEVAAGVKKSGPLPSAERLENVLFGPHDCSHAPPDGYPIIPTSGSVPVQKQASLFPDEKEDNLLGTTCLIATAVITLFNEPSAEDSKKGPLTVAQKKAQNIMESFENPFRMFLPSLGHRAPVSQAAKFDPSTKIYEISNRWKLAQVQVQKDSKEAVKKKAAEQTAARTAGLNVRNGHSRQVDKCERKRQGRPKNREVIREAGENAYAPGGHTLPTAVKAGPEATR

SEQ ID NO: 852212 - protein, 805 aa, Homo sapiens
SGLLGRQALARRAVQAEKMAPPSTREPRVLSATSATKSDGEMVLPGFPDADSFVKFALGSVVAVTKASGGLPQFGDEYDFYRSFPGFQAFCETQGDRLLQCMSRVMQYHGCRSNIKDRSKVTELEDKFDLLVDANDVILERVGILLDEASGVNKNQQPVLPAGLQVPKTVVSSWNRKAAEYGKKAKSETFRLLHAKNIIRPQLKFREKIDNSNTPFLPKIFIKPNAQKPLPQALSKERRERPQDRPEDLDVPPALADFIHQQRTQQVEQDMFAHPYQYELNHFTPADAVLQKPQPQLYRPIEETPCHFISSLDELVELNEKLLNCQEFAVDLEHHSYRSFLGLTCLMQISTRTEDFIIDTLELRSDMYILNESLTDPAIVKVFHGADSDIEWLQKDFGLYVVNMFDTHQAARLLNLGRHSLDHLLKLYCNVDSNKQYQLADWRIRPLPEEMLSYARDDTHYLLYIYDKMRLEMWERGNGQPVQLQVVWQRSRDICLKKFIKPIFTDESYLELYRKQKKHLNTQQLTAFQLLFAWRDKTARREDESYGYVLPNHMMLKIAEELPKEPQGIIACCNPVPPLVRQQINEMHLLIQQAREMPLLKSEVAAGVKKSGPLPSAERLENVLFGPHDCSHAPPDGYPIIPTSGSVPVQKQASLFPDEKEDNLLGTTCLIATAVITLFNEPSAEDSKKGPLTVAQKKAQNIMESFENPFRMFLPSLGHRAPVSQAAKFDPSTKIYEISNRWKLAQVQVQKDSKEAVKKKAAEQTGNTHFLATQSAVKEWLLHTRCFSQVPDTAMNEAPVGLPFC

SEQ ID NO: 852213 - protein, 482 aa, Homo sapiens
ESKQVISRLDAWGNTALLVRREWLTLAHGMRIRMHAWRTISMGHDMRAARSWERGKGHGVCEVHVGVARGQEICLKKFIKPIFTDESYLELYRKQKKHLNTQQLTAFQLLFAWRDKTARREDESYGYVLPNHMMLKIAEELPKEPQGIIACCNPVPPLVRQQINEMHLLIQQAREMPLLKSEVAAGVKKSGPLPSAERLENVLFGPHDCSHAPPDGYPIIPTSGSVPVQKQASLFPDEKEDNLLGTTCLIATAVITLFNEPSAEDSKKGPLTVAQKKAQNIMESFENPFRMFLPSLGHRAPVSQAAKFDPSTKIYEISNRWKLAQVQVQKDSKEAVKKKAAEQTAAREQAKEACKAAAEQAISVRQQVVLENAAKKRERATSDPRTTEQKQEKKRLKISKKPKDPEPPEKEFTPYDYSQSDFKAFAGNSKSKVSSQFDPNKQTPSGKKCIAAKKIKQSVGNKSMSFPTGKSDRGFRYNWPQR

SEQ ID NO: 852214 - protein, 323 aa, Homo sapiens
WSKIYPFKVHVCLDEMPRYFGSEVAAGVKKSGPLPSAERLENVLFGPHDCSHAPPDGYPIIPTSGSVPVQKQASLFPDEKEDNLLGTTCLIATAVITLFNEPSAEDSKKGPLTVAQKKAQNIMESFENPFRMFLPSLGHRAPVSQAAKFDPSTKIYEISNRWKLAQVQVQKDSKEAVKKKAAEQTAAREQAKEACKAAAEQAISVRQQVVLENAAKKRERATSDPRTTEQKQEKKRLKISKKPKDPEPPEKEFTPYDYSQSDFKAFAGNSKSKVSSQFDPNKQTPSGKKCIAAKKIKQSVGNKSMSFPTGKSDRGFRYNWPQR

SEQ ID NO: 852215 - protein, 547 aa, Homo sapiens; identical to SEQ ID NO: 852208

SEQ ID NO: 852216 - protein, 183 aa, Homo sapiens
GWLLYSDPFDPSAKIYKISNRWKLAQVQVQKDSKEAVKKKAAEQTAAREQAKEACKAAAEQAISVRQQVVLENAAKKRERATSDPRTTEQKQEKKRLKISKKPKDPEPPEKEFTPYDYSQSDFKAFAGNSKSKVSSQFDPNKQTPSGKKCIAAKKIKQSVGNKSMSFPTGKSDRGFRYNWPQR

SEQ ID NO: 852217 - protein, 219 aa, Homo sapiens
SGLLGRQALARRAVQAEKMAPPSTREPRVLSATSATKSDGEMVLPGFPDADSFVKFALGSVVAVTKASGGLPQFGDEYDFYRSFPGFQAFCETQGDRLLQCMSRVMQYHGCRSNIKDRSKVTELEDKFDLLVDANDVILERVGILLDEASGVNKNQQPVLPAGLQVPKTVVSSWNRKAAEYGKKAKSETFRLLHAKNIIRPQLKFREKIDNSNTPFIMY

SEQ ID NO: 852218 - protein, 903 aa, Homo sapiens; identical to SEQ ID NO: 852209

SEQ ID NO: 852219 - protein, 915 aa, Homo sapiens
SGLLGRQALARRAVQAEKMAPPSTREPRVLSATSATKSDGEMVLPGFPDADSFVKFALGSVVAVTKASGGLPQFGDEYDFYRSFPGFQAFCETQGDRLLQCMSRVMQYHGCRSNIKDRSKVTELEDKFDLLVDANDVILERVGILLDEASGVNKNQQPVLPAGLQVPKTVVSSWNRKAAEYGKKAKSETFRLLHAKNIIRPQLKFREKIDNSNTPFLPKIFIKPNAQKPLPQALSKERRERPQDRPEDLDVPPALADFIHQQRTQQVEQDMFAHPYQYELNHFTPADAVLQKPQPQLYRPIEETPCHFISSLDELVELNEKLLNCQEFAVDLEHHSYRSFLGLTCLMQISTRTEDFIIDTLELRSDMYILNESLTDPAIVKVFHGADSDIEWLQKDFGLYVVNMFDTHQAARLLNLGRHSLDHLLKLYCNVDSNKQYQLADWRIRPLPEEMLSYARDDTHYLLYIYDKMRLEMWERGNGQPVQLQVVWQRSRDICLKKFIKPIFTDESYLELYRKQKKHLNTQQLTAFQLLFAWRDKTARREDESYGYVLPNHMMLKIAEELPKEPQGIIACCNPVPPLVRQQINEMHLLIQQAREMPLLKSEVAAGVKKSGPLPSAERLENVLFGPHDCSHAPPDGYPIIPTSGKVESPPDCPEEGSVPVQKQASLFPDEKEDNLLGTTCLIATAVITLFNEPSAEDSKKGPLTVAQKKAQNIMESFENPFRMFLPSLGHRAPVSQAAKFDPSTKIYEISNRWKLAQVQVQKDSKEAVKKKAAEQTAAREQAKEACKAAAEQAISVRQQVVLENAAKKRERATSDPRTTEQKQEKKRLKISKKPKDPEPPEKEFTPYDYSQSDFKAFAGNSKSKVSSQFDPNKQTPSGKKCIAAKKIKQSVGNKSMSFPTGKSDRGFRYNWPQR

SEQ ID NO: 852220 - protein, 886 aa, Homo sapiens
SGLLGRQALARRAVQAEKMAPPSTREPRVLSATSATKSDGEMVLPGFPDADSFVKFALGSVVAVTKASGGLPQFGDEYDFYRSFPGFQAFCETQGDRLLQCMSRVMQYHGCRSNIKDRSKVTELEDKFDLLVDANDVILERVGILLDEASGVNKNQQPVLPAGLQVPKTVVSSWNRKAAEYGKKAKSETFRLLHAKNIIRPQLKFREKIDNSNTPSLSKERRERPQDRPEDLDVPPALADFIHQQRTQQVEQDMFAHPYQYELNHFTPADAVLQKPQPQLYRPIEETPCHFISSLDELVELNEKLLNCQEFAVDLEHHSYRSFLGLTCLMQISTRTEDFIIDTLELRSDMYILNESLTDPAIVKVFHGADSDIEWLQKDFGLYVVNMFDTHQAARLLNLGRHSLDHLLKLYCNVDSNKQYQLADWRIRPLPEEMLSYARDDTHYLLYIYDKMRLEMWERGNGQPVQLQVVWQRSRDICLKKFIKPIFTDESYLELYRKQKKHLNTQQLTAFQLLFAWRDKTARREDESYGYVLPNHMMLKIAEELPKEPQGIIACCNPVPPLVRQQINEMHLLIQQAREMPLLKSEVAAGVKKSGPLPSAERLENVLFGPHDCSHAPPDGYPIIPTSGSVPVQKQASLFPDEKEDNLLGTTCLIATAVITLFNEPSAEDSKKGPLTVAQKKAQNIMESFENPFRMFLPSLGHRAPVSQAAKFDPSTKIYEISNRWKLAQVQVQKDSKEAVKKKAAEQTAAREQAKEACKAAAEQAISVRQQVVLENAAKKRERATSDPRTTEQKQEKKRLKISKKPKDPEPPEKEFTPYDYSQSDFKAFAGNSKSKVSSQFDPNKQTPSGKKCIAAKKIKQSVGNKSMSFPTGKSDRGFRYNWPQR

SEQ ID NO: 852221 - protein, 349 aa, Homo sapiens [sequence omitted]

SEQ ID NO: 852222 - protein, 722 aa, Homo sapiens
SGLLGRQALARRAVQAEKMAPPSTREPRVLSATSATKSDGEMVLPGFPDADSFVKFALGSVVAVTKASGGLPQFGDEYDFYRSFPGFQAFCETQGDRLLQCMSRVMQYHGCRSNIKDRSKVTELEDKFDLLVDANDVILERVGILLDEASGVNKNQQPVLPAGLQVPKTVVSSWNRKAAEYGKKAKSETFRLLHAKNIIRPQLKFREKIDNSNTPFLPKIFIKPNAQKPLPQALSKERRERPQDRPEDLDVPPALADFIHQQRTQQVEQDMFAHPYQYELNHFTPADAVLQKPQPQLYRPIEETPCHFISSLDELVELNEKLLNCQEFAVDLEHHSYRSFLGLTCLMQISTRTEDFIIDTLELRSDMYILNESLTDPAIVKVFHGADSDIEWLQKDFGLYVVNMFDTHQAARLLNLGRHSLDHLLKLYCNVDSNKQYQLADWRIRPLPEEMLSYARDDTHYLLYIYDKMRLEMWERGNGQPVQLQVVWQRSRDICLKKFIKPIFTDESYLELYRKQKKHLNTQQLTAFQLLFAWRDKTARREDESYGYVLPNHMMLKIAEELPKEPQGIIACCNPVPPLVRQQINEMHLLIQQAREMPLLKSEVAAGVKKSGPLPSAERLENVLFGPHDCSHAPPDGYPIIPTSGSVPVQKQASLFPDEKEDNLLGTTCLIATAVITLFNEPSAEDSKKGPLTVAQKKAQNIMESFENPFRMFLPSTGHRTP

SEQ ID NO: 852223 - protein, 293 aa, Homo sapiens
ACWCLLMQRLENVLFGPHDCSHAPPDGYPIIPTSGSVPVQKQASLFPDEKEDNLLGTTCLIATAVITLFNEPSAEDSKKGPLTVAQKKAQNIMESFENPFRMFLPSLGHRAPVSQAAKFDPSTKIYEISNRWKLAQVQVQKDSKEAVKKKAAEQTAAREQAKEACKAAAEQAISVRQQVVLENAAKKRERATSDPRTTEQKQEKKRLKISKKPKDPEPPEKEFTPYDYSQSDFKAFAGNSKSKVSSQFDPNKQTPSGKKCIAAKKIKQSVGNKSMSFPTGKSDRGFRYNWPQR

SEQ ID NO: 852224 - protein, 185 aa, Homo sapiens
MGDRGPEREEESAVTTPVAEAKSEGDGDGGEGGCWIHQLQRQVLSLAAAREQAKEACKAAAEQAISVRQQVVLENAAKKRERATSDPRTTEQKQEKKRLKISKKPKDPEPPEKEFTPYDYSQSDFKAFAGNSKSKVSSQFDPNKQTPSGKKCIAAKKIKQSVGNKSMSFPTGKSDRGFRYNWPQR

SEQ ID NO: 852225 - protein, 477 aa, Homo sapiens
NSSGAFSRSRLRASALLLRGGSSGAGLGPLKGTGTAATYGVYLGTRGEAAQVRLAMAKQLQARRLDGIDYNPWVEFVKLASEHDVVNLGQGFPDFPPPDFAVEAFQHAVSGDFMLNQYTKTFGYPPLTKILASFFGELLGQEIDPLRNVLVTVGGYGALFTAFQALVDEGDEVIIIEPFFDCYEPMTMMAGGRPVFVSLKPGPIQNGELGSSSNWQLDPMELAGKFTSRTKALVLNTPNNPLGKVFSREELELVASLCQQHDVVCITDEVYQWMVYDGHQHISIASLPGMWERTLTIGSAGKTFSATGWKVGWVLGPDHIMKHLRTVHQNSVFHCPTQSQAAVAESFEREQLLFRQPSSYFVQFPQAMQRCRDHMIRSLQSVGLKPIIPQGSYFLITDISDFKRKMPDLPGAVDEPYDRRFVKWMIKNKGLVAIPVSIFYSVPHQKHFDHYIRFCFVKDEATLQAMDEKLRKWKVEL

SEQ ID NO: 852226 - protein, 427 aa, Homo sapiens
NSSGAFSRSRLRASALLLRGGSSGAGLGPLKGTGTAATYGVYLGTRGEAAQVRLAMAKQLQARRLDGIDYNPWVEFVKLASEHDVVNLGQGFPDFPPPDFAVEAFQHAVSGDFMLNQYTKTFVIIIEPFFDCYEPMTMMAGGRPVFVSLKPGPIQNGELGSSSNWQLDPMELAGKFTSRTKALVLNTPNNPLGKVFSREELELVASLCQQHDVVCITDEVYQWMVYDGHQHISIASLPGMWERTLTIGSAGKTFSATGWKVGWVLGPDHIMKHLRTVHQNSVFHCPTQSQAAVAESFEREQLLFRQPSSYFVQFPQAMQRCRDHMIRSLQSVGLKPIIPQGSYFLITDISDFKRKMPDLPGAVDEPYDRRFVKWMIKNKGLVAIPVSIFYSVPHQKHFDHYIRFCFVKDEATLQAMDEKLRKWKVEL

SEQ ID NO: 852227 - protein, 481 aa, Homo sapiens
NSSGAFSRSRLRASALLLRGGSSGAGLGPLKGTGTAATYGVYLGTRGEAAQVRLAMAKQLQARRLDGIDYNPWVEFVKLASEHDVVNLGQGFPDFPPPDFAVEAFQHAVSGDFMLNQYTKTFGYPPLTKILASFFGELLGQEIDPLRNVLVTVGGYGALFTAFQALVDEGDEVIIIEPFFDCYEPMTMMAGGRPVFVSLKPGPIQNGELGSSSNWQLDPMELAGKFTSRTKALVLNTPNNPLGKVFSREELELVASLCQQHDVVCITDEVYQWMVYDGHQHISIASLPGMWERTLTIGSAGKTFSATGWKVGWVLGPDHIMKHLRTVHQNSVFHCPTQSQAAVAESFEREQLLFRQPSSYFVQFPQAMQRCRDHMIRSLQSVGLKPIIPQGSYFLITDISDFKRKMPDLPGAVDEPYDRRFVKWMIKNKVGWASARQPCMVSQVVCCSRVPRQEAPGLDLSPASAVNLGAGLYPLQRKYGG

SEQ ID NO: 852228 - protein, 116 aa, Homo sapiens
GITGMRHHTRPIFVFLVETGFSHVGQAGLELLTSGDPPVSASQSAGIIGVSHRTWPCSSDFDAALGAGLELTLLPRLVVGTSLSPPEPRPAGPRGRVETCPSSSPGLGGHPCLHLL

SEQ ID NO: 852229 - protein, 265 aa, Homo sapiens
VAEKNVGSPAPRPTSHLGLANPQERKVPQGPQSPCEVPAAEGILRTGGAKLPIQGHPAKLAMAKQLQARRLDGIDYNPWVEFVKLASEHDVVNLGQGFPDFPPPDFAVEAFQHAVSGDFMLNQYTKTFGYPPLTKILASFFGELLGQEIDPLRNVLVTVGGYGALFTAFQALVDEGDEVIIIEPFFDCYEPMTMMAGGRPVFVSLKPGPIQNGELGSSSNWQLDPMELAGKFTSRTKALVLNTPNNPLGKVSPGKARKLVATICT

SEQ ID NO: 852230 - protein, 422 aa, Homo sapiens
MAKQLQARRLDGIDYNPWVEFVKLASEHDVVNLGQGFPDFPPPDFAVEAFQHAVSGDFMLNQYTKTFGYPPLTKILASFFGELLGQEIDPLRNVLVTVGGYGALFTAFQALVDEGDEVIIIEPFFDCYEPMTMMAGGRPVFVSLKPGPIQNGELGSSSNWQLDPMELAGKFTSRTKALVLNTPNNPLGKVFSREELELVASLCQQHDVVCITDEVYQWMVYDGHQHISIASLPGMWERTLTIGSAGKTFSATGWKVGWVLGPDHIMKHLRTVHQNSVFHCPTQSQAAVAESFEREQLLFRQPSSYFVQFPQAMQRCRDHMIRSLQSVGLKPIIPQGSYFLITDISDFKRKMPDLPGAVDEPYDRRFVKWMIKNKGLVAIPVSIFYSVPHQKHFDHYIRFCFVKDEATLQAMDEKLRKWKVEL

SEQ ID NO: 852231 - protein, 134 aa, Homo sapiens
MAKQLQARRLDGIDYNPWVEFVKLASEHDVVNLGQGFPDFPPPDFAVEAFQHAVSGDFMLNQYTKTFGYPPLTKILASFFGELLGQEIDPLRNVLVTVGGYGALFTAFQALVDEGDEVIIIEPFFDCYDRPSSS

SEQ ID NO: 852232 - protein, 364 aa, Homo sapiens
MSLAGGRAPRKTAGNRLSGLLEAEEEDEFYQTTYGGFTEESGDDEYQGDQSDTEDEVDSDFDIDEGDEPSSDGEAEEPRRKRRVVTKAYKEPLKSLRPRKVNTPAGSSQKAREEKALLPLELQDDGSDSRKSMRQSTAEHTRQTFLRVQERQGQSRRRKGPHCERPLTQEELLREAKITEELNLRSLETYERLEADKKKQVHKKRKCPGPIITYHSVTVPLVGEPGPKEENVDIEGLDPAPSVSALTPHAGTGPVNPPARCSRTFITFSDDATFEEWFPQGRPPKVPVREVCPVTHRPALYRDPVTDIPYATARAFKIIREAYKKYITAHGLPPTASALGPGPPPPEPLPGSGPRALRQKIVIK

SEQ ID NO: 852233 - protein, 141 aa, Homo sapiens
CLADPFFGQDKKALDPAPSVSALTPHAGTGPVNPPARCSRTFITFSDDATFEEWFPQGRPPKVPVREVCPVTHRPALYRDPVTDIPYATARAFKIIREAYKKYITAHGLPPTASALGPGPPPPEPLPGSGPRALRQKIVIK

SEQ ID NO: 852234 - protein, 212 aa, Homo sapiens
MVRTINLYYNNRTVQAIVELKNKPARWHKAKKVQLTPGQTEVKIDLPLPIVASNLMIEFADFYENYQASTETLQCPRCSASVPANPGVCGNCGENVYQCHKCRSINYDEKDPFLCNACGFCKYARFDFMLYAKPCCAVDPIENEEDRKKAVSNINTLLDKADRVYHQLMGHRPQLENLLCKVNEAAPEKPQVVPRCKGHLDKGLGLDQKTAS

SEQ ID NO: 852235 - protein, 258 aa, Homo sapiens
MGPGKKGRCREEGPGRGRRAWIIRGSGSSRQGWVGSVESSKRSANVTRQRQIEQILPALAAGSCFHPAFILSCRFSSRTRATSREEKNLQGFLEQPKEKWVESAFEVDGPYYFTVLALHILPPEQWRATRVEILRRLLVTSQARAVAPGGATRLTDKAVKDYSAYRSSLLFWALVDLIYNMFKKVPTSNTEGGWSCSLAEYIRHNDMPIYEAADKALKTFQEEFMPVETFSEFLDVAGLLSEITDPESFLKDLLNSVP

SEQ ID NO: 852236 - protein, 4088 aa, Homo sapiens
DLEVPPQAAISKVQVSLDEHFSKMAAETDPHKSSEITKNLLPATLQLIDTYASFTRAYLLQNFNEEGTTEKPSKEKLQGFAAVLAIGSSRCKANTLGPTLVQNLPSSVQTVCESWNNINTNEFPNIGSWRNAFANDTIPSESYISAVQAAHLGTLCSQSLPLAASLKHTLLSLVRLTGDLIVWSDEMNPPQVIRTLLPLLLESSTESVAEISSNSLERILGPAESDEFLARVYEKLITGCYNILANHADPNSGLDESILEECLQYLEKQLESSQARKAMEEFFSDSGELVQIMMATANENLSAKFCNRVLKFFTKLFQLTEKSPNPSLLHLCGSLAQLACVEPVRLQAWLTRMTTSPPKDSDQLDVIQENRQLLQLLTTYIVRENSQVGEGVCAVLLGTLTPMATEMLANGDGTGFPELMVVMATLASAGQGAGHLQLHNAAVDWLSRCKKYLSQKNVVEKLNANVMHGKHVMILECTCHIMSYLADVTNALSQSNGQGPSHLSVDGEERAIEVDSDWVEELAVEEEDSQAEDSDEDSLCNKLCTFTITQKEFMNQHWYHCHTCKMVDGVGVCTVCAKVCHKDHEISYAKYGSFFCDCGAKEDGSCLALVKRTPSSGMSSTMKESAFQSEPRISESLVRHASTSSPADKAKVTISDGKVADEEKPKKSSLCRTVEGCREELQNQANFSFAPLVLDMLNFLMDAIQTNFQQASAVGSSSRAQQALSELHTVEKAVEMTDQLMVPTLGSQEGAFENVRMNYSGDQGQTIRQLISAHVLRRVAMCVLSSPHGRRQHLAVSHEKGKITVLQLSALLKQADSSKRKLTLTRLASAPVPFTVLSLTGNPCKEDYLAVCGLKDCHVLTFSSSGSVSDHLVLHPQLATGNFIIKAVWLPGSQTELAIVTADFVKIYDLCVDALSPTFYFLLPSSKIRDVTFLFNEEGKNIIVIMSSAGYIYTQLMEEASSAQQGPFYVTNVLEINHEDLKDSNSQVAGGGVSVYYSHVLQMLFFSYCQGKSFAATISRTTLEVLQLFPINIKSSNGGSKTSPALCQWSEVMNHPGLVCCVQQTTGVPLVVMVKPDTFLIQEIKTLPAKAKIQDMVAIRHTACNEQQRTTMILLCEDGSLRIYMANVENTSYWLQPSLQPSSVISIMKPVRKRKTATITTRTSSQVTFPIDFFEHNQQLTDVEFGGNDLLQVYNAQQIKHRLNSTGMYVANTKPGGFTIEISNNNSTMVMTGMRIQIGTQAIERAPSYIEIFGRTMQLNLSRSRWFDFPFTREEALQADKKLNLFIGASVDPAGVTMIDAVKIYGKTKEQFGWPDEPPEEFPSASVSNICPSNLNQSNGTGDSDSAAPTTTSGTVLERLVVSSLEALESCFAVGPIIEKERNKNAAQELATLLLSLPAPASVQQQSKSLLASLHTSRSAYHSHKDQALLSKAVQCLNTSSKEGKDLDPEVFQRLVITARSIAIMRPNNLVHFTESKLPQMETDCFFPRCACWSLGIVGILIGAPLETPSPGKLPGPELTLKQIKFHLRFTIVDNFLFSCLEGMDEGKEPQKQLEGDCCSFITQLVNHFWKLHASKPKNAFLAPACLPGLTHIEATVNALVDIIHGYCTCELDCINTASKIYMQMLLCPDPAVSFSCKQALIRVLRPRNKRRHVTLPSSPRSNTPMGDKDDDDDDDADEKMQSSGIPNGGHIRQESQEQSEVDHGDFEMVSESMVLETAENVNNGNPSPLEALLAGAEGFPPMLDIPPDADDETMVELAIALSLQQDQQAPASDDEGSTAATDGSTLRTSPADHGGSVGSESGGSAVDSVAGEHSVSGRSSAYGDATAEGHPAGPGSVSSSTGAISTTTGHQEGDGSEGEGEGETEGDVHTSNRLHMVRLMLLERLLQTLPQLRNVGGVRAIPYMQVILMLTTDLDGEDEKDKGALDNLLSQLIAELGMDKKDVSKKNERSALNEVHLVVMRLLSVFMSRTKSGSKSSICESSSLISSATAAALLSSGAVDYCLHVLKSLLEYWKSQQNDEEPVATSQLLKPHTTSSPPDMSPFFLRQYVKGHAADVFEAYTQLLTEMVLRLPYQIKKITDTNSRIPPPVFDHSWFYFLSEYLMIQQTPFVRRQVRKLLLFICGSKEKYRQLRDLHTLDSHVRGIKKLLEEQGIFLRASVVTASSGSALQYDTLISLMEHLKACAEIAAQRTINWQKFCIKDDSVLYFLLQVSFLVDEGVSPVLLQLLSCALCGSKVLAALAASSGSSSASSSSAPVAASSGQATTQSKSSTKKSKKEEKEKEKDGETSGSQEDQLCTALVNQLNKFADKETLIQFLRCFLLESNSSSVRWQAHCLTLHIYRNSSKSQQELLLDLMWSIWPELPAYGRKAAQFVDLLGYFSLKTPQTEKKLKEYSQKAVEILRTQNHILTNHPNSNIYNTLSGLVEFDGYYLESDPCLVCNNPEVPFCYIKLSSIKVDTRYTTTQQVVKLIGSHTISKVTVKIGDLKRTKMVRTINLYYNNRTVQAIVELKNKPARWHKAKKVQLTPGQTEVKIDLPLPIVASNLMIEFADFYENYQASTETLQCPRCSASVPANPGVCGNCGENVYQCHKCRSINYDEKDPFLCNACGFCKYARFDFMLYAKPCCAVDPIENEEDRKKAVSNINTLLDKADRVYHQLMGHRPQLENLLCKVNEAAPEKPQDDSGTAGGISSTSASVNRYILQLAQEYCGDCKNSFDELSKIIQKVFASRKELLEYDLQQREAATKSSRTSVQPTFTASQYRALSVLGCGHTSSTKCYGCASAVTEHCITLLRALATNPALRHILVSQGLIRELFDYNLRRGAAAMREEVRQLMCLLTRDNPEATQQMNDLIIGKVSTALKGHWANPDLASSLQYEMLLLTDSISKEDSCWELRLRCALSLFLMAVNIKTPVVVENITLMCLRILQKLIKPPAPTSKKNKDVPVEALTTVKPYCNEIHAQAQLWLKRDPKASYDAWKKCLPIRGIDGNGKAPSKSELRHLYLTEKYVWRWKQFLSRRGKRTSPLDLKLGHNNWLRQVLFTPATQAARQAACTIVEALATIPSRKQQVLDLLTSYLDELSIAGECAAEYLALYQKLITSAHWKVYLAARGVLPYVGNLITKEIARLLALEEATLSTDLQQGYALKSLTGLLSSFVEVESIKRHFKSRLVGTVLNGYLCLRKLVVQRTKLIDETQDMLLEMLEDMTTGTESETKAFMAVCIETAKRYNLDDYRTPVFIFERLCSIIYPEENEVTEFFVTLEKDPQQEDFLQGRMPGNPYSSNEPGIGPLMRDIKNKICQDCDLVALLEDDSGMELLVNNKIISLDLPVAEVYKKVWCTTNEGEPMRIVYRMRGLLGDATEEFIESLDSTTDEEEDEEEVYKMAGVMAQCGGLECMLNRLAGIRDFKQGRHLLTVLLKLFSYCVKVKVNRQQLVKLEMNTLNVMLGTLNLALVAEQESKDSGGAAVAEQVLSIMEIILDESNAEPLSEDKGNLLLTGDKDQLVMLLDQINSTFVRSNPSVLQGLLRIIPYLSFGEVEKMQILVERFKPYCNFDKYDEDHSGDDKVFLDCFCKIAAGIKNNSNGHQLKDLILQKGITQNALDYMKKHIPSAKNLDADIWKKFLSRPALPFILRLLRGLAIQHPGTQVLIGTDSIPNLHKLEQVSSDEGIGTLAENLLEALREHPDVNKKIDAARRETRAEKKRMAMAMRQKALGTLGMTTNEKGQVVTKTALLKQMEELIEEPGLTCCICREGYKFQPTKVLGIYTFTKRVALEELENKPRKQQGYSTVSHFNIVHYDCHLAAVRLARGREEWESAALQNANTKCNGLLPVWGPHVPESAFATCLARHNTYLQECTGQREPTYQLNIHDIKLLFLRFAMEQSFSADTGGGGRESNIHLIPYIIHTVLYVLNTTRATSREEKNLQGFLEQPKEKWVESAFEVDGPYYFTVLALHILPPEQWRATRVEILRRLLVTSQARAVAPGGATRLTDKAVKDYSAYRSSLLFWALVDLIYNMFKKVPTSNTEGGWSCSLAEYIRHNDMPIYEAADKALKTFQEEFMPVETFSEFLDVAGLLSEITDPESFLKDLLNSVP

SEQ ID NO: 852237 - protein, 4194 aa, Homo sapiens
DLEVPPQAAISKVQVSLDEHFSKMAAETDPHKSSEITKNLLPATLQLIDTYASFTRAYLLQNFNEEGTTEKPSKEKLQGFAAVLAIGSSRCKANTLGPTLVQNLPSSVQTVCESWNNINTNEFPNIGSWRNAFANDTIPSESYISAVQAAHLGTLCSQSLPLAASLKHTLLSLVRLTGDLIVWSDEMNPPQVIRTLLPLLLESSTESVAEISSNSLERILGPAESDEFLARVYEKLITGCYNILANHADPNSGLDESILEECLQYLEKQLESSQARKAMEEFFSDSGELVQIMMATANENLSAKFCNRVLKFFTKLFQLTEKSPNPSLLHLCGSLAQLACVEPVRLQAWLTRMTTSPPKDSDQLDVIQENRQLLQLLTTYIVRENSQVGEGVCAVLLGTLTPMATEMLANGDGTGFPELMVVMATLASAGQGAGHLQLHNAAVDWLSRCKKYLSQKNVVEKLNANVMHGKHVMILECTCHIMSYLADVTNALSQSNGQGPSHLSVDGEERAIEVDSDWVEELAVEEEDSQAEDSDEDSLCNKLCTFTITQKEFMNQHWYHCHTCKMVDGVGVCTVCAKVCHKDHEISYAKYGSFFCDCGAKEDGSCLALVKRTPSSGMSSTMKESAFQSEPRISESLVRHASTSSPADKAKVTISDGKVADEEKPKKSSLCRTVEGCREELQNQANFSFAPLVLDMLNFLMDAIQTNFQQASAVGSSSRAQQALSELHTVEKAVEMTDQLMVPTLGSQEGAFENVRMNYSGDQGQTIRQLISAHVLRRVAMCVLSSPHGRRQHLAVSHEKGKITVLQLSALLKQADSSKRKLTLTRLASAPVPFTVLSLTGNPCKEDYLAVCGLKDCHVLTFSSSGSVSDHLVLHPQLATGNFIIKAVWLPGSQTELAIVTADFVKIYDLCVDALSPTFYFLLPSSKIRDVTFLFNEEGKNIIVIMSSAGYIYTQLMEEASSAQQGPFYVTNVLEINHEDLKDSNSQVAGGGVSVYYSHVLQMLFFSYCQGKSFAATISRTTLEVLQLFPINIKSSNGGSKTSPALCQWSEVMNHPGLVCCVQQTTGVPLVVMVKPDTFLIQEIKTLPAKAKIQDMVAIRHTACNEQQRTTMILLCEDGSLRIYMANVENTSYWLQPSLQPSSVISIMKPVRKRKTATITTRTSSQVTFPIDFFEHNQQLTDVEFGGNDLLQVYNAQQIKHRLNSTGMYVANTKPGGFTIEISNNNSTMVMTGMRIQIGTQAIERAPSYIEIFGRTMQLNLSRSRWFDFPFTREEALQADKKLNLFIGASVDPAGVTMIDAVKIYGKTKEQFGWPDEPPEEFPSASVSNICPSNLNQSNGTGDSDSAAPTTTSGTVLERLVVSSLEALESCFAVGPIIEKERNKNAAQELATLLLSLPAPASVQQQSKSLLASLHTSRSAYHSHKDQALLSKAVQCLNTSSKEGKDLDPEVFQRLVITARSIAIMRPNNLVHFTESKLPQMETDCFFPRCACWSLGIVGILIGAPLETPSPGKLPGPELTLKQIKFHLRFTIVDNFLFSCLEGMDEGKEPQKQLEGDCCSFITQLVNHFWKLHASKPKNAFLAPACLPGLTHIEATVNALVDIIHGYCTCELDCINTASKIYMQMLLCPDPAVSFSCKQALIRVLRPRNKRRHVTLPSSPRSNTPMGDKDDDDDDDADEKMQSSGIPNGGHIRQESQEQSEVDHGDFEMVSESMVLETAENVNNGNPSPLEALLAGAEGFPPMLDIPPDADDETMVELAIALSLQQDQQGSSSSALGLQSLGLSGQAPSSSSLDAGTLSDTTASAPASDDEGSTAATDGSTLRTSPADHGGSVGSESGGSAVDSVAGEHSVSGRSSAYGDATAEGHPAGPGSVSSSTGAISTTTGHQEGDGSEGEGEGETEGDVHTSNRLHMVRLMLLERLLQTLPQLRNVGGVRAIPYMQVILMLTTDLDGEDEKDKGALDNLLSQLIAELGMDKKDVSKKNERSALNEVHLVVMRLLSVFMSRTKSGSKSSICESSSLISSATAAALLSSGAVDYCLHVLKSLLEYWKSQQNDEEPVATSQLLKPHTTSSPPDMSPFFLRQYVKAKSSGGPSHLLDSSFVTYNTLHAALPACTFPKGHAADVFEAYTQLLTEMVLRLPYQIKKITDTNSRIPPPVFDHSWFYFLSEYLMIQQTPFVRRQVRKLLLFICGSKEKYRQLRDLHTLDSHVRGIKKLLEEQGIFLRASVVTASSGSALQYDTLISLMEHLKACAEIAAQRTINWQKFCIKDDSVLYFLLQVSFLVDEGVSPVLLQLLSCALCGSKVLAALAASSGSSSASSSSAPVAASSGQATTQSKSSTKKSKKEEKEKEKDGETSGSQEDQLCTALVNQLNKFADKETLIQFLRCFLLESNSSSVRWQAHCLTLHIYRNSSKSQQELLLDLMWSIWPELPAYGRKAAQFVDLLGYFSLKTPQTEKKLKEYSQKAVEILRTQNHILTNHPNSNIYNTLSGLVEFDGYYLESDPCLVCNNPEVPFCYIKLSSIKVDTRYTTTQQVVKLIGSHTISKVTVKIGDLKRTKMVRTINLYYNNRTVQAIVELKNKPARWHKAKKVQLTPGQTEVKIDLPLPIVASNLMIEFADFYENYQASTETLQCPRCSASVPANPGVCGNCGENVYQCHKCRSINYDEKDPFLCNACGFCKYARFDFMLYAKPCCAVDPIENEEDRKKAVSNINTLLDKADRVYHQLMGHRPQLENLLCKVNEAAPEKPQVVPRCKGHLDKGLGLDQKTASYGEITLGGEPDSFLLGLQDDSGTAGGISSTSASVNRYILQLAQEYCGDCKNSFDELSKIIQKVFASRKELLEYDLQQREAATKSSRTSVQPTFTASQYRALSVLGCGHTSSTKCYGCASAVTEHCITLLRALATNPALRHILVSQGLIRELFDYNLRRGAAAMREEVRQLMCLLTRDNPEATQQMNDLIIGKVSTALKGHWANPDLASSLQYEMLLLTDSISKEDSCWELRLRCALSLFLMAVNIKTPVVVENITLMCLRILQKLIKPPAPTSKKNKDVPVEALTTVKPYCNEIHAQAQLWLKRDPKASYDAWKKCLPIRGIDGNGKAPSKSELRHLYLTEKYVWRWKQFLSRRGKRTSPLDLKLGHNNWLRQVLFTPATQAARQAACTIVEALATIPSRKQQVLDLLTSYLDELSIAGECAAEYLALYQKLITSAHWKVYLAARGVLPYVGNLITKEIARLLALEEATLSTDLQQGYALKSLTGLLSSFVEVESIKRHFKSRLVGTVLNGYLCLRKLVVQRTKLIDETQDMLLEMLEDMTTGTESETKAFMAVCIETAKRYNLDDYRTPVFIFERLCSIIYPEENEVTEFFVTLEKDPQQEDFLQGRMPGNPYSSNEPGIGPLMRDIKNKICQDCDLVALLEDDSGMELLVNNKIISLDLPVAEVYKKVWCTTNEGEPMRIVYRMRGLLGDATEEFIESLDSTTDEEEDEEEVYKMAGVMAQCGGLECMLNRLAGIRDFKQGRHLLTVLLKLFSYCVKVKVNRQQLVKLEMNTLNVMLGTLNLALVAEQESKDSGGAAVAEQVLSIMEIILDESNAEPLSEDKGNLLLTGDKDQLVMLLDQINSTFVRSNPSVLQGLLRIIPYLSFGEVEKMQILVERFKPYCNFDKYDEDHSGDDKVFLDCFCKIAAGIKNNSNGHQLKDLILQKGITQNALDYMKKHIPSAKNLDADIWKKFLSRPALPFILRLLRGLAIQHPGTQVLIGTDSIPNLHKLEQVSSDEGIGTLAENLLEALREHPDVNKKIDAARRETRAEKKRMAMAMRQKALGTLGMTTNEKGQVVTKTALLKQMEELIEEPGLTCCICREGYKFQPTKVLGIYTFTKRVALEELENKPRKQQGYSTVSHFNIVHYDCHLAAVRLARGREEWESAALQNANTKCNGLLPVWGPHVPESAFATCLARHNTYLQECTGQREPTYQLNIHDIKLLFLRFAMEQSFSADTGGGGRESNIHLIPYIIHTVLYVLNTTRATSREEKNLQGFLEQPKEKWVESAFEVDGPYYFTVLALHILPPEQWRATRVEILRRLLVTSQARAVAPGGATRLTDKAVKDYSAYRSSLLFWALVDLIYNMFKKVPTSNTEGGWSCSLAEYIRHNDMPIYEAADKALKTFQEEFMPVETFSEFLDVAGLLSEITDPESFLKDLLNSVP

SEQ ID NO: 852238 - protein, 899 aa, Homo sapiens
NQLGPFTAEMLEDMTTGTESETKAFMAVCIETAKRYNLDDYRTPVFIFERLCSIIYPEENEVTEFFVTLEKDPQQEDFLQGRMPGNPYSSNEPGIGPLMRDIKNKICQDCDLVALLEDDSGMELLVNNKIISLDLPVAEVYKKVWCTTNEGEPMRIVYRMRGLLGDATEEFIESLDSTTDEEEDEEEVYKMAGVMAQCGGLECMLNRLAGIRDFKQGRHLLTVLLKLFSYCVKVKVNRQQLVKLEMNTLNVMLGTLNLALVAEQESKDSGGAAVAEQVLSIMEIILDESNAEPLSEDKGNLLLTGDKDQLVMLLDQINSTFVRSNPSVLQGLLRIIPYLSFGEVEKMQILVERFKPYCNFDKYDEDHSGDDKVFLDCFCKIAAGIKNNSNGHQLKDLILQKGITQNALDYMKKHIPSAKNLDADIWKKFLSRPALPFILRLLRGLAIQHPGTQVLIGTDSIPNLHKLEQVSSDEGIGTLAENLLEALREHPDVNKKIDAARRETRAEKKRMAMAMRQKALGTLGMTTNEKGQVVTKTALLKQMEELIEEPGLTCCICREGYKFQPTKVLGIYTFTKRVALEELENKPRKQQGYSTVSHFNIVHYDCHLAAVRLARGREEWESAALQNANTKCNGLLPVWGPHVPESAFATCLARHNTYLQECTGQREPTYQLNIHDIKLLFLRFAMEQSFSADTGGGGRESNIHLIPYIIHTVLYVLNTTRATSREEKNLQGFLEQPKEKWVESAFEVDGPYYFTVLALHILPPEQWRATRVEILRRLLVTSQARAVAPGGATRLTDKAVKDYSAYRSSLLFWALVDLIYNMFKKVPTSNTEGGWSCSLAEYIRHNDMPIYEAADKALKTFQEEFMPVETFSEFLDVAGLLSEITDPESFLKDLLNSVP

SEQ ID NO: 852239 - protein, 863 aa, Homo sapiens
PNKSVKLFRKYTEMYRLKKGIISQWRIYYCCNWCKDPQQEDFLQGRMPGNPYSSNEPGIGPLMRDIKNKICQDCDLVALLEDDSGMELLVNNKIISLDLPVAEVYKKVWCTTNEGEPMRIVYRMRGLLGDATEEFIESLDSTTDEEEDEEEVYKMAGVMAQCGGLECMLNRLAGIRDFKQGRHLLTVLLKLFSYCVKVKVNRQQLVKLEMNTLNVMLGTLNLALVAEQESKDSGGAAVAEQVLSIMEIILDESNAEPLSEDKGNLLLTGDKDQLVMLLDQINSTFVRSNPSVLQGLLRIIPYLSFGEVEKMQILVERFKPYCNFDKYDEDHSGDDKVFLDCFCKIAAGIKNNSNGHQLKDLILQKGITQNALDYMKKHIPSAKNLDADIWKKFLSRPALPFILRLLRGLAIQHPGTQVLIGTDSIPNLHKLEQVSSDEGIGTLAENLLEALREHPDVNKKIDAARRETRAEKKRMAMAMRQKALGTLGMTTNEKGQVVTKTALLKQMEELIEEPGLTCCICREGYKFQPTKVLGIYTFTKRVALEELENKPRKQQGYSTVSHFNIVHYDCHLAAVRLARGREEWESAALQNANTKCNGLLPVWGPHVPESAFATCLARHNTYLQECTGQREPTYQLNIHDIKLLFLRFAMEQSFSADTGGGGRESNIHLIPYIIHTVLYVLNTTRATSREEKNLQGFLEQPKEKWVESAFEVDGPYYFTVLALHILPPEQWRATRVEILRRLLVTSQARAVAPGGATRLTDKAVKDYSAYRSSLLFWALVDLIYNMFKKVPTSNTEGGWSCSLAEYIRHNDMPIYEAADKALKTFQEEFMPVETFSEFLDVAGLLSEITDPESFLKDLLNSVP

SEQ ID NO: 852240 - protein, 1025 aa, Homo sapiens
STYTKIGTIQRRLAWPLRKDDTQIREAFHILGGMSLAGGRAPRKTAGNRLSGLLEAEEEDEFYQTTYGGFTEESGDDEYQGDQSDTEDEVDSDFDIDEGDEPSSDGEAEEPRRKRRVVTKAYKEPLKSLRPRKVNTPAGSSQKAREEKALLPLELQDDGSDSRKSMRQSTAEHTRQTFLRVQERQGQSRRRKGPHCERPLTQEELLREAKITEELNLRSLETYERLEADKKKQVHKKRKCPGPIITYHSVTVPLVGEPGPKEENVDIEGLDPAPSVSALTPHAGTGPVNPPARCSRTFITFSDDATFEEWFPQGRPPKVPVREVCPVTHRPALYRDPVTDIPYATARAFKIIREAYKKYITAHGLPPTASANKRLEALLGTLNLALVAEQESKDSGGAAVAEQVLSIMEIILDESNAEPLSEDKGNLLLTGDKDQLVMLLDQINSTFVRSNPSVLQGLLRIIPYLSFGEVEKMQILVERFKPYCNFDKYDEDHSGDDKVFLDCFCKIAAGIKNNSNGHQLKDLILQKGITQNALDYMKKHIPSAKNLDADIWKKFLSRPALPFILRLLRGLAIQHPGTQVLIGTDSIPNLHKLEQVSSDEGIGTLAENLLEALREHPDVNKKIDAARRETRAEKKRMAMAMRQKALGTLGMTTNEKGQVVTKTALLKQMEELIEEPGLTCCICREGYKFQPTKVLGIYTFTKRVALEELENKPRKQQGYSTVSHFNIVHYDCHLAAVRLARGREEWESAALQNANTKCNGLLPVWGPHVPESAFATCLARHNTYLQECTGQREPTYQLNIHDIKLLFLRFAMEQSFSADTGGGGRESNIHLIPYIIHTVLYVLNTTRATSREEKNLQGFLEQPKEKWVESAFEVDGPYYFTVLALHILPPEQWRATRVEILRRLLVTSQARAVAPGGATRLTDKAVKDYSAYRSSLLFWALVDLIYNMFKKVPTSNTEGGWSCSLAEYIRHNDMPIYEAADKALKTFQEEFMPVETFSEFLDVAGLLSEITDPESFLKDLLNSVP

SEQ ID NO: 852241 - protein, 683 aa, Homo sapiens
MPLLEPSRSFVRLTRSTLLPMDCRPLPQPTSAWRRLLGTLNLALVAEQESKDSGGAAVAEQVLSIMEIILDESNAEPLSEDKGNLLLTGDKDQLVMLLDQINSTFVRSNPSVLQGLLRIIPYLSFGEVEKMQILVERFKPYCNFDKYDEDHSGDDKVFLDCFCKIAAGIKNNSNGHQLKDLILQKGITQNALDYMKKHIPSAKNLDADIWKKFLSRPALPFILRLLRGLAIQHPGTQVLIGTDSIPNLHKLEQVSSDEGIGTLAENLLEALREHPDVNKKIDAARRETRAEKKRMAMAMRQKALGTLGMTTNEKGQVVTKTALLKQMEELIEEPGLTCCICREGYKFQPTKVLGIYTFTKRVALEELENKPRKQQGYSTVSHFNIVHYDCHLAAVRLARGREEWESAALQNANTKCNGLLPVWGPHVPESAFATCLARHNTYLQECTGQREPTYQLNIHDIKLLFLRFAMEQSFSADTGGGGRESNIHLIPYIIHTVLYVLNTTRATSREEKNLQGFLEQPKEKWVESAFEVDGPYYFTVLALHILPPEQWRATRVEILRRLLVTSQARAVAPGGATRLTDKAVKDYSAYRSSLLFWALVDLIYNMFKKVPTSNTEGGWSCSLAEYIRHNDMPIYEAADKALKTFQEEFMPVETFSEFLDVAGLLSEITDPESFLKDLLNSVP

SEQ ID NO: 852242 - protein, 683 aa, Homo sapiens; identical to SEQ ID NO: 852241

SEQ ID NO: 852243 - protein, 3858 aa, Homo sapiens
DLEVPPQAAISKVQVSLDEHFSKMAAETDPHKSSEITKNLLPATLQLIDTYASFTRAYLLQNFNEEGTTEKPSKEKLQGFAAVLAIGSSRCKANTLGPTLVQNLPSSVQTVCESWNNINTNEFPNIGSWRNAFANDTIPSESYISAVQAAHLGTLCSQSLPLAASLKHTLLSLVRLTGDLIVWSDEMNPPQVIRTLLPLLLESSTESVAEISSNSLERILGPAESDEFLARVYEKLITGCYNILANHADPNSGLDESILEECLQYLEKQLESSQARKAMEEFFSDSGELVQIMMATANENLSAKFCNRVLKFFTKLFQLTEKSPNPSLLHLCGSLAQLACVEPVRLQAWLTRMTTSPPKDSDQLDVIQENRQLLQLLTTYIVRENSQVGEGVCAVLLGTLTPMATEMLANGDGTGFPELMVVMATLASAGQGAGHLQLHNAAVDWLSRCKKYLSQKNVVEKLNANVMHGKHVMILECTCHIMSYLADVTNALSQSNGQGPSHLSVDGEERAIEVDSDWVEELAVEEEDSQAEDSDEDSLCNKLCTFTITQKEFMNQHWYHCHTCKMVDGVGVCTVCAKVCHKDHEISYAKYGSFFCDCGAKEDGSCLALVKRTPSSGMSSTMKESAFQSEPRISESLVRHASTSSPADKAKVTISDGKVADEEKPKKSSLCRTVEGCREELQNQANFSFAPLVLDMLNFLMDAIQTNFQQASAVGSSSRAQQALSELHTVEKAVEMTDQLMVPTLGSQEGAFENVRMNYSGDQGQTIRQLISAHVLRRVAMCVLSSPHGRRQHLAVSHEKGKITVLQLSALLKQADSSKRKLTLTRLASAPVPFTVLSLTGNPCKEDYLAVCGLKDCHVLTFSSSGSVSDHLVLHPQLATGNFIIKAVWLPGSQTELAIVTADFVKIYDLCVDALSPTFYFLLPSSKIRDVTFLFNEEGKNIIVIMSSAGYIYTQLMEEASSAQQGPFYVTNVLEINHEDLKDSNSQVAGGGVSVYYSHVLQMLFFSYCQGKSFAATISRTTLEVLQLFPINIKSSNGGSKTSPALCQWSEVMNHPGLVCCVQQTTGVPLVVMVKPDTFLIQEIKTLPAKAKIQDMVAIRHTACNEQQRTTMILLCEDGSLRIYMANVENTSYWLQPSLQPSSVISIMKPVRKRKTATITTRTSSQVTFPIDFFEHNQQLTDVEFGGNDLLQVYNAQQIKHRLNSTGMYVANTKPGGFTIEISNNNSTMVMTGMRIQIGTQAIERAPSYIEIFGRTMQLNLSRSRWFDFPFTREEALQADKKLNLFIGASVDPAGVTMIDAVKIYGKTKEQFGWPDEPPEEFPSASVSNICPSNLNQSNGTGDSDSAAPTTTSGTVLERLVVSSLEALESCFAVGPIIEKERNKNAAQELATLLLSLPAPASVQQQSKSLLASLHTSRSAYHSHKDQALLSKAVQCLNTSSKEGKDLDPEVFQRLVITARSIAIMRPNNLVHFTESKLPQMETDCFFPRCACWSLGIVGILIGAPLETPSPGKLPGPELTLKQIKFHLRFTIVDNFLFSCLEGMDEGKEPQKQLEGDCCSFITQLVNHFWKLHASKPKNAFLAPACLPGLTHIEATVNALVDIIHGYCTCELDCINTASKIYMQMLLCPDPAVSFSCKQALIRVLRPRNKRRHVTLPSSPRSNTPMGDKDDDDDDDADEKMQSSGIPNGGHIRQESQEQSEVDHGDFEMVSESMVLETAENVNNGNPSPLEALLAGAEGFPPMLDIPPDADDETMVELAIALSLQQDQQGSSSSALGLQSLGLSGQAPSSSSLDAGTLSDTTASAPASDDEGSTAATDGSTLRTSPADHGGSVGSESGGSAVDSVAGEHSVSGRSSAYGDATAEGHPAGPGSVSSSTGAISTTTGHQEGDGSEGEGEGETEGDVHTSNRLHMVRLMLLERLLQTLPQLRNVGGVRAIPYMQVILMLTTDLDGEDEKDKGALDNLLSQLIAELGMDKKDVSKKNERSALNEVHLVVMRLLSVFMSRTKSGSKSSICESSSLISSATAAALLSSGAVDYCLHVLKSLLEYWKSQQNDEEPVATSQLLKPHTTSSPPDMSPFFLRQYVKGHAADVFEAYTQLLTEMVLRLPYQIKKITDTNSRIPPPVFDHSWFYFLSEYLMIQQTPFVRRQVRKLLLFICGSKEKYRQLRDLHTLDSHVRGIKKLLEEQGIFLRASVVTASSGSALQYDTLISLMEHLKACAEIAAQRTINWQKFCIKDDSVLYFLLQVSFLVDEGVSPVLLQLLSCALCGSKVLAALAASSGSSSASSSSAPVAASSGQATTQSKSSTKKSKKEEKEKEKDGETSGSQEDQLCTALVNQLNKFADKETLIQFLRCFLLESNSSSVRWQAHCLTLHIYRNSSKSQQELLLDLMWSIWPELPAYGRKAAQFVDLLGYFSLKTPQTEKKLKEYSQKAVEILRTQNHILTNHPNSNIYNTLSGLVEFDGYYLESDPCLVCNNPEVPFCYIKLSSIKVDTRYTTTQQVVKLIGSHTISKVTVKIGDLKRTKMVRTINLYYNNRTVQAIVELKNKPARWHKAKKVQLTPGQTEVKIDLPLPIVASNLMIEFADFYENYQASTETLQCPRCSASVPANPGVCGNCGENVYQCHKCRSINYDEKDPFLCNACGFCKYARFDFMLYAKPCCAVDPIENEEDRKKAVSNINTLLDKADRVYHQLMGHRPQLENLLCKVNEAAPEKPQDDSGTAGGISSTSASVNRYILQLAQEYCGDCKNSFDELSKIIQKVFASRKELLEYDLQQREAATKSSRTSVQPTFTASQYRALSVLGCGHTSSTKCYGCASAVTEHCITLLRALATNPALRHILVSQGLIRELFDYNLRRGAAAMREEVRQLMCLLTRDNPEATQQMNDLIIGKVSTALKGHWANPDLASSLQYEMLLLTDSISKEDSCWELRLRCALSLFLMAVNIKTPVVVENITLMCLRILQKLIKPPAPTSKKNKDVPVEALTTVKPYCNEIHAQAQLWLKRDPKASYDAWKKCLPIRGIDGNGKAPSKSELRHLYLTEKYVWRWKQFLSRRGKRTSPLDLKLGHNNWLRQVLFTPATQAARQAACTIVEALATIPSRKQQVLDLLTSYLDELSIAGECAAEYLALYQKLITSAHWKVYLAARGVLPYVGNLITKEIARLLALEEATLSTDLQQGYALKSLTGLLSSFVEVESIKRHFKSRLVGTVLNGYLCLRKLVVQRTKLIDETQDMLLEMLEDMTTGTESETKAFMAVCIETAKRYNLDDYRTPVFIFERLCSIIYPEENEVTEFFVTLEKDPQQEDFLQGRMPGNPYSSNEPGIGPLMRDIKNKICQDCDLVALLEDDSGMELLVNNKIISLDLPVAEVYKKVWCTTNEGEPMRIVYRMRGLLGDATEEFIESLDSTTDEEEDEEEVYKMAGVMAQCGGLECMLNRLAGIRDFKQGRHLLTVLLKLFSYCVKVKVNRQQLVKLEMNTLNVMLGTLNLALVAEQESKDSGGAAVAEQVLSIMEIILDESNAEPLSEDKGNLLLTGDKDQLVMLLDQINSTFVRSNPSVLQGLLRIIPYLSFGEVEKMQILVERFKPYCNFDKYDEDHSGDDKVFLDCFCKIAAGIKNNSNGHQLKDLILQKGITQNALDYMKKHIPSAKNLDADIWKKFLSRPALPFILRLLRGLAIQHPGTQVLIGTDSIPNLHKLEQVSSDEGIGTLAENLLEALREHPDVNKKIDAARRETRAEKKRMAMAMRQKALGTLGMTTNEKGQVVTKTALLKQMEELIEEPGLTCCIMPTPSATGSFRSGDLMSLNQLLPLAWQDTTLTSRNVQASGSPRISSTSTTSNCSSCASPWSSRSAQTLAGAAGRATST

SEQ ID NO: 852244 - protein, 4123 aa, Homo sapiens
DLEVPPQAAISKVQVSLDEHFSKMAAETDPHKSSEITKNLLPATLQLIDTYASFTRAYLLQNFNEEGTTEKPSKEKLQGFAAVLAIGSSRCKANTLGPTLVQNLPSSVQTVCESWNNINTNEFPNIGSWRNAFANDTIPSESYISAVQAAHLGTLCSQSLPLAASLKHTLLSLVRLTGDLIVWSDEMNPPQVIRTLLPLLLESSTESVAEISSNSLERILGPAESDEFLARVYEKLITGCYNILANHADPNSGLDESILEECLQYLEKQLESSQARKAMEEFFSDSGELVQIMMATANENLSAKFCNRVLKFFTKLFQLTEKSPNPSLLHLCGSLAQLACVEPVRLQAWLTRMTTSPPKDSDQLDVIQENRQLLQLLTTYIVRENSQVGEGVCAVLLGTLTPMATEMLANGDGTGFPELMVVMATLASAGQGAGHLQLHNAAVDWLSRCKKYLSQKNVVEKLNANVMHGKHVMILECTCHIMSYLADVTNALSQSNGQGPSHLSVDGEERAIEVDSDWVEELAVEEEDSQAEDSDEDSLCNKLCTFTITQKEFMNQHWYHCHTCKMVDGVGVCTVCAKVCHKDHEISYAKYGSFFCDCGAKEDGSCLALVKRTPSSGMSSTMKESAFQSEPRISESLVRHASTSSPADKAKVTISDGKVADEEKPKKSSLCRTVEGCREELQNQANFSFAPLVLDMLNFLMDAIQTNFQQASAVGSSSRAQQALSELHTVEKAVEMTDQLMVPTLGSQEGAFENVRMNYSGDQGQTIRQLISAHVLRRVAMCVLSSPHGRRQHLAVSHEKGKITVLQLSALLKQADSSKRKLTLTRLASAPVPFTVLSLTGNPCKEDYLAVCGLKDCHVLTFSSSGSVSDHLVLHPQLATGNFIIKAVWLPGSQTELAIVTADFVKIYDLCVDALSPTFYFLLPSSKIRDVTFLFNEEGKNIIVIMSSAGYIYTQLMEEASSAQQGPFYVTNVLEINHEDLKDSNSQVAGGGVSVYYSHVLQMLFFSYCQGKSFAATISRTTLEVLQLFPINIKSSNGGSKTSPALCQWSEVMNHPGLVCCVQQTTGVPLVVMVKPDTFLIQEIKTLPAKAKIQDMVAIRHTACNEQQRTTMILLCEDGSLRIYMANVENTSYWLQPSLQPSSVISIMKPVRKRKTATITTRTSSQVTFPIDFFEHNQQLTDVEFGGNDLLQVYNAQQIKHRLNSTGMYVANTKPGGFTIEISNNNSTMVMTGMRIQIGTQAIERAPSYIEIFGRTMQLNLSRSRWFDFPFTREEALQADKKLNLFIGASVDPAGVTMIDAVKIYGKTKEQFGWPDEPPEEFPSASVSNICPSNLNQSNGTGDSDSAAPTTTSGTVLERLVVSSLEALESCFAVGPIIEKERNKNAAQELATLLLSLPAPASVQQQSKSLLASLHTSRSAYHSHKDQALLSKAVQCLNTSSKEGKDLDPEVFQRLVITARSIAIMRPNNLVHFTESKLPQMETDCFFPRCACWSLGIVGILIGAPLETPSPGKLPGPELTLKQIKFHLRFTIVDNFLFSCLEGMDEGKEPQKQLEGDCCSFITQLVNHFWKLHASKPKNAFLAPACLPGLTHIEATVNALVDIIHGYCTCELDCINTASKIYMQMLLCPDPAVSFSCKQALIRVLRPRNKRRHVTLPSSPRSNTPMGDKDDDDDDDADEKMQSSGIPNGGHIRQESQEQSEVDHGDFEMVSESMVLETAENVNNGNPSPLEALLAGAEGFPPMLDIPPDADDETMVELAIALSLQQDQQGSSSSALGLQSLGLSGQAPSSSSLDAGTLSDTTASAPASDDEGSTAATDGSTLRTSPADHGGSVGSESGGSAVDSVAGEHSVSGRSSAYGDATAEGHPAGPGSVSSSTGAISTTTGHQEGDGSEGEGEGETEGDVHTSNRLHMVRLMLLERLLQTLPQLRNVGGVRAIPYMQVILMLTTDLDGEDEKDKGALDNLLSQLIAELGMDKKDVSKKNERSALNEVHLVVMRLLSVFMSRTKSGSKSSICESSSLISSATAAALLSSGAVDYCLHVLKSLLEYWKSQQNDEEPVATSQLLKPHTTSSPPDMSPFFLRQYVKGHAADVFEAYTQLLTEMVLRLPYQIKKITDTNSRIPPPVFDHSWFYFLSEYLMIQQTPFVRRQVRKLLLFICGSKEKYRQLRDLHTLDSHVRGIKKLLEEQGIFLRASVVTASSGSALQYDTLISLMEHLKACAEIAAQRTINWQKFCIKDDSVLYFLLQVSFLVDEGVSPVLLQLLSCALCGSKVLAALAASSGSSSASSSSAPVAASSGQATTQSKSSTKKSKKEEKEKEKDGETSGSQEDQLCTALVNQLNKFADKETLIQFLRCFLLESNSSSVRWQAHCLTLHIYRNSSKSQQELLLDLMWSIWPELPAYGRKAAQFVDLLGYFSLKTPQTEKKLKEYSQKAVEILRTQNHILTNHPNSNIYNTLSGLVEFDGYYLESDPCLVCNNPEVPFCYIKLSSIKVDTRYTTTQQVVKLIGSHTISKVTVKIGDLKRTKMVRTINLYYNNRTVQAIVELKNKPARWHKAKKVQLTPGQTEVKIDLPLPIVASNLMIEFADFYENYQASTETLQCPRCSASVPANPGVCGNCGENVYQCHKCRSINYDEKDPFLCNACGFCKYARFDFMLYAKPCCAVDPIENEEDRKKAVSNINTLLDKADRVYHQLMGHRPQLENLLCKVNEAAPEKPQDDSGTAGGISSTSASVNRYILQLAQEYCGDCKNSFDELSKIIQKVFASRKELLEYDLQQREAATKSSRTSVQPTFTASQYRALSVLGCGHTSSTKCYGCASAVTEHCITLLRALATNPALRHILVSQGLIRELFDYNLRRGAAAMREEVRQLMCLLTRDNPEATQQMNDLIIGKVSTALKGHWANPDLASSLQYEMLLLTDSISKEDSCWELRLRCALSLFLMAVNIKTPVVVENITLMCLRILQKLIKPPAPTSKKNKDVPVEALTTVKPYCNEIHAQAQLWLKRDPKASYDAWKKCLPIRGIDGNGKAPSKSELRHLYLTEKYVWRWKQFLSRRGKRTSPLDLKLGHNNWLRQVLFTPATQAARQAACTIVEALATIPSRKQQVLDLLTSYLDELSIAGECAAEYLALYQKLITSAHWKVYLAARGVLPYVGNLITKEIARLLALEEATLSTDLQQGYALKSLTGLLSSFVEVESIKRHFKSRLVGTVLNGYLCLRKLVVQRTKLIDETQDMLLEMLEDMTTGTESETKAFMAVCIETAKRYNLDDYRTPVFIFERLCSIIYPEENEVTEFFVTLEKDPQQEDFLQGRMPGNPYSSNEPGIGPLMRDIKNKICQDCDLVALLEDDSGMELLVNNKIISLDLPVAEVYKKVWCTTNEGEPMRIVYRMRGLLGDATEEFIESLDSTTDEEEDEEEVYKMAGVMAQCGGLECMLNRLAGIRDFKQGRHLLTVLLKLFSYCVKVKVNRQQLVKLEMNTLNVMLGTLNLALVAEQESKDSGGAAVAEQVLSIMEIILDESNAEPLSEDKGNLLLTGDKDQLVMLLDQINSTFVRSNPSVLQGLLRIIPYLSFGEVEKMQILVERFKPYCNFDKYDEDHSGDDKVFLDCFCKIAAGIKNNSNGHQLKDLILQKGITQNALDYMKKHIPSAKNLDADIWKKFLSRPALPFILRLLRGLAIQHPGTQVLIGTDSIPNLHKLEQVSSDEGIGTLAENLLEALREHPDVNKKIDAARRETRAEKKRMAMAMRQKALGTLGMTTNEKGQVVTKTALLKQMEELIEEPGLTCCICREGYKFQPTKVLGIYTFTKRVALEELENKPRKQQGYSTVSHFNIVHYDCHLAAVRLARGREEWESAALQNANTKCNGLLPVWGPHVPESAFATCLARHNTYLQECTGQREPTYQLNIHDIKLLFLRFAMEQSFSADTGGGGRESNIHLIPYIIHTVLYVLNTTRATSREEKNLQGFLEQPKEKWVESAFEVDGPYYFTVLALHILPPEQWRATRVEILRRLLVTSQARAVAPGGATRLTDKAVKDYSAYRSSLLFWALVDLIYNMFKKVPTSNTEGGWSCSLAEYIRHNDMPIYEAADKALKTFQEEFMPVETFSEFLDVAGLLSEITDPESFLKDLLNSVP

SEQ ID NO: 852245 - protein, 4123 aa, Homo sapiens; identical to SEQ ID NO: 852244

SEQ ID NO: 852246 - protein, 4123 aa, Homo sapiens; identical to SEQ ID NO: 852244

SEQ ID NO: 852247 - protein, 4103 aa, Homo sapiens
DLEVPPQAAISKVQVSLDEHFSKMAAETDPHKSSEITKNLLPATLQLIDTYASFTRAYLLQNFNEEGTTEKPSKEKLQGFAAVLAIGSSRCKANTLGPTLVQNLPSSVQTVCESWNNINTNEFPNIGSWRNAFANDTIPSESYISAVQAAHLGTLCSQSLPLAASLKHTLLSLVRLTGDLIVWSDEMNPPQVIRTLLPLLLESSTESVAEISSNSLERILGPAESDEFLARVYEKLITGCYNILANHADPNSGLDESILEECLQYLEKQLESSQARKAMEEFFSDSGELVQIMMATANENLSAKFCNRVLKFFTKLFQLTEKSPNPSLLHLCGSLAQLACVEPVRLQAWLTRMTTSPPKDSDQLDVIQENRQLLQLLTTYIVRENSQVGEGVCAVLLGTLTPMATEMLANGDGTGFPELMVVMATLASAGQGAGHLQLHNAAVDWLSRCKKYLSQKNVVEKLNANVMHGKHVMILECTCHIMSYLADVTNALSQSNGQGPSHLSVDGEERAIEVDSDWVEELAVEEEDSQAEDSDEDSLCNKLCTFTITQKEFMNQHWYHCHTCKMVDGVGVCTVCAKVCHKDHEISYAKYGSFFCDCGAKEDGSCLALVKRTPSSGMSSTMKESAFQSEPRISESLVRHASTSSPADKAKVTISDGKVADEEKPKKSSLCRTVEGCREELQNQANFSFAPLVLDMLNFLMDAIQTNFQQASAVGSSSRAQQALSELHTVEKAVEMTDQLMVPTLGSQEGAFENVRMNYSGDQGQTIRQLISAHVLRRVAMCVLSSPHGRRQHLAVSHEKGKITVLQLSALLKQADSSKRKLTLTRLASAPVPFTVLSLTGNPCKEDYLAVCGLKDCHVLTFSSSGSVSDHLVLHPQLATGNFIIKAVWLPGSQTELAIVTADFVKIYDLCVDALSPTFYFLLPSSKIRDVTFLFNEEGKNIIVIMSSAGYIYTQLMEEASSAQQGPFYVTNVLEINHEDLKDSNSQVAGGGVSVYYSHVLQMLFFSYCQGKSFAATISRTTLEVLQLFPINIKSSNGGSKTSPALCQWSEVMNHPGLVCCVQQTTGVPLVVMVKPDTFLIQEIKTLPAKAKIQDMVAIRHTACNEQQRTTMILLCEDGSLRIYMANVENTSYWLQPSLQPSSVISIMKPVRKRKTATITTRTSSQVTFPIDFFEHNQQLTDVEFGGNDLLQVYNAQQIKHRLNSTGMYVANTKPGGFTIEISNNNSTMVMTGMRIQIGTQAIERAPSYIEIFGRTMQLNLSRSRWFDFPFTREEALQADKKLNLFIGASVDPAGVTMIDAVKIYGKTKEQFGWPDEPPEEFPSASVSNICPSNLNQSNGTGDSDSAAPTTTSGTVLERLVVSSLEALESCFAVGPIIEKERNKNAAQELATLLLSLPAPASVQQQSKSLLASLHTSRSAYHSHKDQALLSKAVQCLNTSSKEGKDLDPEVFQRLVITARSIAIMRPNNLVHFTESKLPQMETDCFFPRCACWSLGIVGILIGAPLETPSPGKLPGPELTLKQIKFHLRFTIVDNFLFSCLEGMDEGKEPQKQLEGDCCSFITQLVNHFWKLHASKPKNAFLAPACLPGLTHIEATVNALVDIIHGYCTCELDCINTASKIYMQMLLCPDPAVSFSCKQALIRVLRPRNKRRHVTLPSSPRSNTPMGDKDDDDDDDADEKMQSSGIPNGGHIRQESQEQSEVDHGDFEMVSESMVLETAENVNNGNPSPLEALLAGAEGFPPMLDIPPDADDETMVELAIALSLQQDQQGSSSSALGLQSLGLSGQAPSSSSLDAGTLSDTTASAPASDDEGSTAATDGSTLRTSPADHGGSVGSESGGSAVDSVAGEHSVSGRSSAYGDATAEGHPAGPGSVSSSTGAISTTTGHQEGDGSEGEGEGETEGDVHTSNRLHMVRLMLLERLLQTLPQLRNVGGVRAIPYMQVILMLTTDLDGEDEKDKGALDNLLSQLIAELGMDKKDVSKKNERSALNEVHLVVMRLLSVFMSRTKSGSKSSICESSSLISSATAAALLSSGAVDYCLHVLKSLLEYWKSQQNDEEPVATSQLLKPHTTSSPPDMSPFFLRQYVKGHAADVFEAYTQLLTEMVLRLPYQIKKITDTNSRIPPPVFDHSWFYFLSEYLMIQQTPFVRRQVRKLLLFICGSKEKYRQLRDLHTLDSHVRGIKKLLEEQGIFLRASVVTASSGSALQYDTLISLMEHLKACAEIAAQRTINWQKFCIKDDSVLYFLLQVSFLVDEGVSPVLLQLLSCALCGSKVLAALAASSGSSSASSSSAPVAASSGQATTQSKSSTKKSKKEEKEKEKDGETSGSQEDQLCTALVNQLNKFADKETLIQFLRCFLLESNSSSVRWQAHCLTLHIYRNSSKSQQELLLDLMWSIWPELPAYGRKAAQFVDLLGYFSLKTPQTEKKLKEYSQKAVEILRTQNHILTNHPNSNIYNTLSGLVEFDGYYLESDPCLVCNNPEVPFCYIKLSSIKVDTRYTTTQQVVKLIGSHTISKVTVKIGDLKRTKMVRTINLYYNNRTVQAIVELKNKPARWHKAKKVQLTPGQTEVKIDLPLPIVASNLMIEFADFYENYQASTETLQCPRCSASVPANPGVCGNCGENVYQCHKCRSINYDEKDPFLCNACGFCKYARFDFMLYAKPCCAVDPIENEEDRKKAVSNINTLLDKADRVYHQLMGHRPQLENLLCKVNEAAPEKPQDDSGTAGGISSTSASVNRYILQLAQEYCGDCKNSFDELSKIIQKVFASRKELLEYDLQQREAATKSSRTSVQPTFTASQYRALSVLGCGHTSSTKCYGCASAVTEHCITLLRALATNPALRHILVSQGLIRELFDYNLRRGAAAMREEVRQLMCLLTRDNPEATQQMNDLIIGKVSTALKGHWANPDLASSLQYEMLLLTDSISKEDSCWELRLRCALSLFLMAVNIKTPVVVENITLMCLRILQKLIKPPAPTSKKNKDVPVEALTTVKPYCNEIHAQAQLWLKRDPKASYDAWKKCLPIRGIDGNGKAPSKSELRHLYLTEKYVWRWKQFLSRRGKRTSPLDLKLGHNNWLRQVLFTPATQAARQAACTIVEALATIPSRKQQVLDLLTSYLDELSIAGECAAEYLALYQKLITSAHWKVYLAARGVLPYVGNLITKEIARLLALEEATLSTDLQQGYALKSLTGLLSSFVEVESIKRHFKSRLVGTVLNGYLCLRKLVVQRTKLIDETQDMLLEMLEDMTTGTESETKAFMAVCIETAKRYNLDDYRTPVFIFERLCSIIYPEENEVTEFFVTLEKDPQQEDFLQGRMPGNPYSSNEPGIGPLMRDIKNKICQDCDLVALLEDDSGMELLVNNKIISLDLPVAEVYKKVWCTTNEGEPMRIVYRMRGLLGDATEEFIESLDSTTDEEEDEEEVYKMAGVMAQCGGLECMLNRLAGIRDFKQGRHLLTVLLKLFSYCVKVKVNRQQLVKLEMNTLNVMLGTLNLALVAEQESKDSGGAAVAEQVLSIMEIILDESNAEPLSEDKGNLLLTGDKDQLVMLLDQINSTFVRSNPSVLQGLLRIIPYLSFGEVEKMQILVERFKPYCNFDKYDEDHSGDDKVFLDCFCKIAAGIKNNSNGHQLKDLILQKGITQNALDYMKKHIPSAKNLDADIWKKFLSRPALPFILRLLRGLAIQHPGTQVLIGTDSIPNLHKLEQVSSDEGIGTLAENLLEALREHPDVNKKIDAARRETRAEKKRMAMAMRQKALGTLGMTTNEKGQVVTKTALLKQMEELIEEPGLTCCICREGYKFQPTKVLGIYTFTKRVALEELENKPRKQQGYSTVSHFNIVHYDCHLAAVRLARGREEWESAALQNANTKCNGLLPVWGPHVPESAFATCLARHNTYLQECTGQREPTYQLNIHDIKLLFLRFAMEQSFSADTGGGGRESNIHLIPYIIHTVLYVLNTTRATSREEKNLQGFLEQPKEKWVESAFEVDGPYYFTVLALHILPPEQWRATRVEILRRLLVTSQARAVAPGGATRLTDKAVKDYSAYRSSLLFWALVDLIYNMFKKVPTSNTEGGWSCSLAEYIRHNDMPIYEAADKALKTFQEEFMPVETFSEFLDVAG

SEQ ID NO: 852248 - protein, 4036 aa, Homo sapiens
DLEVPPQAAISKVQVSLDEHFSKMAAETDPHKSSEITKNLLPATLQLIDTYASFTRAYLLQNFNEEGTTEKPSKEKLQGFAAVLAIGSSRCKANTLGPTLVQNLPSSVQTVCESWNNINTNEFPNIGSWRNAFANDTIPSESYISAVQAAHLGTLCSQSLPLAASLKHTLLSLVRLTGDLIVWSDEMNPPQVIRTLLPLLLESSTESVAEISSNSLERILGPAESDEFLARVYEKLITGCYNILANHADPNSGLDESILEECLQYLEKQLESSQARKAMEEFFSDSGELVQIMMATANENLSAKFCNRVLKFFTKLFQLTEKSPNPSLLHLCGSLAQLACVEPVRLQAWLTRMTTSPPKDSDQLDVIQENRQLLQLLTTYIVRENSQVGEGVCAVLLGTLTPMATEMLANGDGTGFPELMVVMATLASAGQGAGHLQLHNAAVDWLSRCKKYLSQKNVVEKLNANVMHGKHVMILECTCHIMSYLADVTNALSQSNGQGPSHLSVDGEERAIEVDSDWVEELAVEEEDSQAEDSDEDSLCNKLCTFTITQKEFMNQHWYHCHTCKMVDGVGVCTVCAKVCHKDHEISYAKYGSFFCDCGAKEDGSCLALVKRTPSSGMSSTMKESAFQSEPRISESLVRHASTSSPADKAKVTISDGKVADEEKPKKSSLCRTVEGCREELQNQANFSFAPLVLDMLNFLMDAIQTNFQQASAVGSSSRAQQALSELHTVEKAVEMTDQLMVPTLGSQEGAFENVRMNYSGDQGQTIRQLISAHVLRRVAMCVLSSPHGRRQHLAVSHEKGKITVLQLSALLKQADSSKRKLTLTRLASAPVPFTVLSLTGNPCKEDYLAVCGLKDCHVLTFSSSGSVSDHLVLHPQLATGNFIIKAVWLPGSQTELAIVTADFVKIYDLCVDALSPTFYFLLPSSKIRDVTFLFNEEGKNIIVIMSSAGYIYTQLMEEASSAQQGPFYVTNVLEINHEDLKDSNSQVAGGGVSVYYSHVLQMLFFSYCQGKSFAATISRTTLEVLQLFPINIKSSNGGSKTSPALCQWSEVMNHPGLVCCVQQTTGVPLVVMVKPDTFLIQEIKTLPAKAKIQDMVAIRHTACNEQQRTTMILLCEDGSLRIYMANVENTSYWLQPSLQPSSVISIMKPVRKRKTATITTRTSSQVTFPIDFFEHNQQLTDVEFGGNDLLQVYNAQQIKHRLNSTGMYVANTKPGGFTIEISNNNSTMVMTGMRIQIGTQAIERAPSYIEIFGRTMQLNLSRSRWFDFPFTREEALQADKKLNLFIGASVDPAGVTMIDAVKIYGKTKEQFGWPDEPPEEFPSASVSNICPSNLNQSNGTGDSDSAAPTTTSGTVLERLVVSSLEALESCFAVGPIIEKERNKNAAQELATLLLSLPAPASVQQQSKSLLASLHTSRSAYHSHKDQALLSKAVQCLNTSSKEGKDLDPEVFQRLVITARSIAIMRPNNLVHFTESKLPQMETDCFFPRCACWSLGIVGILIGAPLETPSPGKLPGPELTLKQIKFHLRFTIVDNFLFSCLEGMDEGKEPQKQLEGDCCSFITQLVNHFWKLHASKPKNAFLAPACLPGLTHIEATVNALVDIIHGYCTCELDCINTASKIYMQMLLCPDPAVSFSCKQALIRVLRPRNKRRHVTLPSSPRSNTPMGDKDDDDDDDADEKMQSSGIPNGGHIRQESQEQSEVDHGDFEMVSESMVLETAENVNNGNPSPLEALLAGAEGFPPMLDIPPDADDETMVELAIALSLQQDQQGSSSSALGLQSLGLSGQAPSSSSLDAGTLSDTTASAPASDDEGSTAATDGSTLRTSPADHGGSVGSESGGSAVDSVAGEHSVSGRSSAYGDATAEGHPAGPGSVSSSTGAISTTTGHQEGDGSEGEGEGETEGDVHTSNRLHMVRLMLLERLLQTLPQLRNVGGVRAIPYMQVILMLTTDLDGEDEKDKGALDNLLSQLIAELGMDKKDVSKKNERSALNEVHLVVMRLLSVFMSRTKSGSKSSICESSSLISSATAAALLSSGAVDYCLHVLKSLLEYWKSQQNDEEPVATSQLLKPHTTSSPPDMSPFFLRQYVKGHAADVFEAYTQLLTEMVLRLPYQIKKITDTNSRIPPPVFDHSWFYFLSEYLMIQQTPFVRRQVRKLLLFICGSKEKYRQLRDLHTLDSHVRGIKKLLEEQGIFLRASVVTASSGSALQYDTLISLMEHLKACAEIAAQRTINWQKFCIKDDSVLYFLLQVSFLVDEGVSPVLLQLLSCALCGSKVLAALAASSGSSSASSSSAPVAASSGQATTQSKSSTKKSKKEEKEKEKDGETSGSQEDQLCTALVNQLNKFADKETLIQFLRCFLLESNSSSVRWQAHCLTLHIYRNSSKSQQELLLDLMWSIWPELPAYGRKAAQFVDLLGYFSLKTPQTEKKLKEYSQKAVEILRTQNHILTNHPNSNIYNTLSGLVEFDGYYLESDPCLVCNNPEVPFCYIKLSSIKVDTRYTTTQQVVKLIGSHTISKVTVKIGDLKRTKMVRTINLYYNNRTVQAIVELKNKPARWHKAKKVQLTPGQTEVKIDLPLPIVASNLMIEFADFYENYQASTETLQCPRCSASVPANPGVCGNCGENVYQCHKCRSINYDEKDPFLCNACGFCKYARFDFMLYAKPCCAVDPIENEEDRKKAVSNINTLLDKADRVYHQLMGHRPQLENLLCKVNEAAPEKPQDDSGTAGGISSTSASVNRYILQLAQEYCGDCKNSFDELSKIIQKVFASRKELLEYDLQQREAATKSSRTSVQPTFTASQYRALSVLGCGHTSSTKCYGCASAVTEHCITLLRALATNPALRHILVSQGLIRELFDYNLRRGAAAMREEVRQLMCLLTRDNPEATQQMNDLIIGKVSTALKGHWANPDLASSLQYEMLLLTDSISKEDSCWELRLRCALSLFLMAVNIKTPVVVENITLMCLRILQKLIKPPAPTSKKNKDVPVEALTTVKPYCNEIHAQAQLWLKRDPKASYDAWKKCLPIRGIDGNGKAPSKSELRHLYLTEKYVWRWKQFLSRRGKRTSPLDLKLGHNNWLRQVLFTPATQAARQAACTIVEALATIPSRKQQVLDLLTSYLDELSIAGECAAEYLALYQKLITSAHWKVYLAARGVLPYVGNLITKEIARLLALEEATLSTDLQQGYALKSLTGLLSSFVEVESIKRHFKSRLVGTVLNGYLCLRKLVVQRTKLIDETQDMLLEMLEDMTTGTESETKAFMAVCIETAKRYNLDDYRTPVFIFERLCSIIYPEENEVTEFFVTLEKDPQQEDFLQGRMPGNPYSSNEPGIGPLMRDIKNKICQDCDLVALLEDDSGMELLVNNKIISLDLPVAEVYKKVWCTTNEGEPMRIVYRMRGLLGDATEEFIESLDSTTDEEEDEEEVYKMAGVMAQCGGLECMLNRLAGIRDFKQGRHLLTVLLKLFSYCVKVKVNRQQLVKLEMNTLNVMLGTLNLALVAEQESKDSGGAAVAEQVLSIMEIILDESNAEPLSEDKGNLLLTGDKDQLVMLLDQINSTFVRSNPSVLQGLLRIIPYLSFGEVEKMQILVERFKPYCNFDKYDEDHSGDDKVFLDCFCKIAAGIKNNSNGHQLKDLILQKGITQNALDYMKKHIPSAKNLDADIWKKFLSRPALPFILRLLRGLAIQHPGTQVLIGTDSIPNLHKLEQVSSDEGIGTLAENLLEALREHPDVNKKIDAARRETRAEKKRMAMAMRQKALGTLGMTTNEKGQVVTKTALLKQMEELIEEPGLTCCICREGYKFQPTKVLGIYTFTKRVALEELENKPRKQQGYSTVSHFNIVHYDCHLAAVRLARGREEWESAALQNANTKCNGLLPVWGPHVPESAFATCLARHNTYLQECTGQREPTYQLNIHDIKLLFLRFAMEQSFSADTGGGGRESNIHLIPYIIHTVLYVLNTTRATSREEKNLQGFLEQPKEKWVESAFEVDGPYYFTVLALHILPPEQWRATRVEILRRLLVTSQARAVAPGGATRSVPASGSCCSLFPIISFE

SEQ ID NO: 852249 - protein, 3894 aa, Homo sapiens
DLEVPPQAAISKVQVSLDEHFSKMAAETDPHKSSEITKNLLPATLQLIDTYASFTRAYLLQNFNEEGTTEKPSKEKLQGFAAVLAIGSSRCKANTLGPTLVQNLPSSVQTVCESWNNINTNEFPNIGSWRNAFANDTIPSESYISAVQAAHLGTLCSQSLPLAASLKHTLLSLVRLTGDLIVWSDEMNPPQVIRTLLPLLLESSTESVAEISSNSLERILGPAESDEFLARVYEKLITGCYNILANHADPNSGLDESILEECLQYLEKQLESSQARKAMEEFFSDSGELVQIMMATANENLSAKFCNRVLKFFTKLFQLTEKSPNPSLLHLCGSLAQLACVEPVRLQAWLTRMTTSPPKDSDQLDVIQENRQLLQLLTTYIVRENSQVGEGVCAVLLGTLTPMATEMLANGDGTGFPELMVVMATLASAGQGAGHLQLHNAAVDWLSRCKKYLSQKNVVEKLNANVMHGKHVMILECTCHIMSYLADVTNALSQSNGQGPSHLSVDGEERAIEVDSDWVEELAVEEEDSQAEDSDEDSLCNKLCTFTITQKEFMNQHWYHCHTCKMVDGVGVCTVCAKVCHKDHEISYAKYGSFFCDCGAKEDGSCLALVKRTPSSGMSSTMKESAFQSEPRISESLVRHASTSSPADKAKVTISDGKVADEEKPKKSSLCRTVEGCREELQNQANFSFAPLVLDMLNFLMDAIQTNFQQASAVGSSSRAQQALSELHTVEKAVEMTDQLMVPTLGSQEGAFENVRMNYSGDQGQTIRQLISAHVLRRVAMCVLSSPHGRRQHLAVSHEKGKITVLQLSALLKQADSSKRKLTLTRLASAPVPFTVLSLTGNPCKEDYLAVCGLKDCHVLTFSSSGSVSDHLVLHPQLATGNFIIKAVWLPGSQTELAIVTADFVKIYDLCVDALSPTFYFLLPSSKIRDVTFLFNEEGKNIIVIMSSAGYIYTQLMEEASSAQQGPFYVTNVLEINHEDLKDSNSQVAGGGVSVYYSHVLQMLFFSYCQGKSFAATISRTTLEVLQLFPINIKSSNGGSKTSPALCQWSEVMNHPGLVCCVQQTTGVPLVVMVKPDTFLIQEIKTLPAKAKIQDMVAIRHTACNEQQRTTMILLCEDGSLRIYMANVENTSYWLQPSLQPSSVISIMKPVRKRKTATITTRTSSQVTFPIDFFEHNQQLTDVEFGGNDLLQVYNAQQIKHRLNSTGMYVANTKPGGFTIEISNNNSTMVMTGMRIQIGTQAIERAPSYIEIFGRTMQLNLSRSRWFDFPFTREEALQADKKLNLFIGASVDPAGVTMIDAVKIYGKTKEQFGWPDEPPEEFPSASVSNICPSNLNQSNGTGDSDSAAPTTTSGTVLERLVVSSLEALESCFAVGPIIEKERNKNAAQELATLLLSLPAPASVQQQSKSLLASLHTSRSAYHSHKDQALLSKAVQCLNTSSKEGKDLDPEVFQRLVITARSIAIMRPNNLVHFTESKLPQMETDCFFPRCACWSLGIVGILIGAPLETPSPGKLPGPELTLKQIKFHLRFTIVDNFLFSCLEGMDEGKEPQKQLEGDCCSFITQLVNHFWKLHASKPKNAFLAPACLPGLTHIEATVNALVDIIHGYCTCELDCINTASKIYMQMLLCPDPAVSFSCKQALIRVLRPRNKRRHVTLPSSPRSNTPMGDKDDDDDDDADEKMQSSGIPNGGHIRQESQEQSEVDHGDFEMVSESMVLETAENVNNGNPSPLEALLAGAEGFPPMLDIPPDADDETMVELAIALSLQQDQQGSSSSALGLQSLGLSGQAPSSSSLDAGTLSDTTASAPASDDEGSTAATDGSTLRTSPADHGGSVGSESGGSAVDSVAGEHSVSGRSSAYGDATAEGHPAGPGSVSSSTGAISTTTGHQEGDGSEGEGEGETEGDVHTSNRLHMVRLMLLERLLQTLPQLRNVGGVRAIPYMQVILMLTTDLDGEDEKDKGALDNLLSQLIAELGMDKKDVSKKNERSALNEVHLVVMRLLSVFMSRTKSGSKSSICESSSLISSATAAALLSSGAVDYCLHVLKSLLEYWKSQQNDEEPVATSQLLKPHTTSSPPDMSPFFLRQYVKGHAADVFEAYTQLLTEMVLRLPYQIKKITDTNSRIPPPVFDHSWFYFLSEYLMIQQTPFVRRQVRKLLLFICGSKEKYRQLRDLHTLDSHVRGIKKLLEEQGIFLRASVVTASSGSALQYDTLISLMEHLKACAEIAAQRTINWQKFCIKDDSVLYFLLQVSFLVDEGVSPVLLQLLSCALCGSKVLAALAASSGSSSASSSSAPVAASSGQATTQSKSSTKKSKKEEKEKEKDGETSGSQEDQLCTALVNQLNKFADKETLIQFLRCFLLESNSSSVRWQAHCLTLHIYRNSSKSQQELLLDLMWSIWPELPAYGRKAAQFVDLLGYFSLKTPQTEKKLKEYSQKAVEILRTQNHILTNHPNSNIYNTLSGLVEFDGYYLESDPCLVCNNPEVPFCYIKLSSIKVDTRYTTTQQVVKLIGSHTISKVTVKIGDLKRTKMVRTINLYYNNRTVQAIVELKNKPARWHKAKKVQLTPGQTEVKIDLPLPIVASNLMIEFADFYENYQASTETLQCPRCSASVPANPGVCGNCGENVYQCHKCRSINYDEKDPFLCNACGFCKYARFDFMLYAKPCCAVDPIENEEDRKKAVSNINTLLDKADRVYHQLMGHRPQLENLLCKVNEAAPEKPQDDSGTAGGISSTSASVNRYILQLAQEYCGDCKNSFDELSKIIQKVFASRKELLEYDLQQREAATKSSRTSVQPTFTASQYRALSVLGCGHTSSTKCYGCASAVTEHCITLLRALATNPALRHILVSQGLIRELFDYNLRRGAAAMREEVRQLMCLLTRDNPEATQQMNDLIIGKVSTALKGHWANPDLASSLQYEMLLLTDSISKEDSCWELRLRCALSLFLMAVNIKTPVVVENITLMCLRILQKLIKPPAPTSKKNKDVPVEALTTVKPYCNEIHAQAQLWLKRDPKASYDAWKKCLPIRGIDGNGKAPSKSELRHLYLTEKYVWRWKQFLSRRGKRTSPLDLKLGHNNWLRQVLFTPATQAARQAACTIVEALATIPSRKQQVLDLLTSYLDELSIAGECAAEYLALYQKLITSAHWKVYLAARGVLPYVGNLITKEIARLLALEEATLSTDLQQGYALKSLTGLLSSFVEVESIKRHFKSRLVGTVLNGYLCLRKLVVQRTKLIDETQDMLLEMLEDMTTGTESETKAFMAVCIETAKRYNLDDYRTPVFIFERLCSIIYPEENEVTEFFVTLEKDPQQEDFLQGRMPGNPYSSNEPGIGPLMRDIKNKICQDCDLVALLEDDSGMELLVNNKIISLDLPVAEVYKKVWCTTNEGEPMRIVYRMRGLLGDATEEFIESLDSTTDEEEDEEEVYKMAGVMAQCGGLECMLNRLAGIRDFKQGRHLLTVLLKLFSYCVKVKVNRQQLVKLEMNTLNVMLGTLNLALVAEQESKDSGGAAVAEQVLSIMEIILDESNAEPLSEDKGNLLLTGDKDQLVMLLDQINSTFVRSNPSVLQGLLRIIPYLSFGEVEKMQILVERFKPYCNFDKYDEDHSGDDKVFLDCFCKIAAGIKNNSNGHQLKDLILQKGITQNALDYMKKHIPSAKNLDADIWKKFLSRPALPFILRLLRGLAIQHPGTQVLIGTDSIPNLHKLEQVSSDEGIGTLAENLLEALREHPDVNKKIDAARRETRAEKKRMAMAMRQKALGTLGMTTNEKGQVVTKTALLKQMEELIEEPGLTCCICREGYKFQPTKVLGIYTFTKRVALEELENKPRKQQGYSTVSHFNIVHYDCHLAAVRLARGREEWESAALQNANTKCNGLLPVWGPHVPESAFATCLARACTYLGAMSCPGQLHT

SEQ ID NO: 852250 - protein, 397 aa, Homo sapiens
STYTKIGTIQRRLAWPLRKDDTQIREAFHILGGMSLAGGRAPRKTAGNRLSGLLEAEEEDEFYQTTYGGFTEESGDDEYQGDQSDTEDEVDSDFDIDEGDEPSSDGEAEEPRRKRRVVTKAYKEPLKSLRPRKVNTPAGSSQKAREEKALLPLELQDDGSDSRKSMRQSTAEHTRQTFLRVQERQGQSRRRKGPHCERPLTQEELLREAKITEELNLRSLETYERLEADKKKQVHKKRKCPGPIITYHSVTVPLVGEPGPKEENVDIEGLDPAPSVSALTPHAGTGPVNPPARCSRTFITFSDDATFEEWFPQGRPPKVPVREVCPVTHRPALYRDPVTDIPYATARAFKIIREAYKKYITAHGLPPTASALGPGPPPPEPLPGSGPRALRQKIVIK

SEQ ID NO: 852251 - protein, 106 aa, Homo sapiens
MRFGPKTSEYSAYRSSLLFWALVDLIYNMFKKVPTSNTEGGWSCSLAEYIRHNDMPIYEAADKALKTFQEEFMPVETFSEFLDVAGLLSEITDPESFLKDLLNSVP

SEQ ID NO: 852252 - protein, 3317 aa, Homo sapiens
DLEVPPQAAISKVQVSLDEHFSKMAAETDPHKSSEITKNLLPATLQLIDTYASFTRAYLLQNFNEEGTTEKPSKEKLQGFAAVLAIGSSRCKANTLGPTLVQNLPSSVQTVCESWNNINTNEFPNIGSWRNAFANDTIPSESYISAVQAAHLGTLCSQSLPLAASLKHTLLSLVRLTGDLIVWSDEMNPPQVIRTLLPLLLESSTESVAEISSNSLERILGPAESDEFLARVYEKLITGCYNILANHADPNSGLDESILEECLQYLEKQLESSQARKAMEEFFSDSGELVQIMMATANENLSAKFCNRVLKFFTKLFQLTEKSPNPSLLHLCGSLAQLACVEPVRLQAWLTRMTTSPPKDSDQLDVIQENRQLLQLLTTYIVRENSQVGEGVCAVLLGTLTPMATEMLANGDGTGFPELMVVMATLASAGQGAGHLQLHNAAVDWLSRCKKYLSQKNVVEKLNANVMHGKHVMILECTCHIMSYLADVTNALSQSNGQGPSHLSVDGEERAIEVDSDWVEELAVEEEDSQAEDSDEDSLCNKLCTFTITQKEFMNQHWYHCHTCKMVDGVGVCTVCAKVCHKDHEISYAKYGSFFCDCGAKEDGSCLALVKRTPSSGMSSTMKESAFQSEPRISESLVRHASTSSPADKAKVTISDGKVADEEKPKKSSLCRTVEGCREELQNQANFSFAPLVLDMLNFLMDAIQTNFQQASAVGSSSRAQQALSELHTVEKAVEMTDQLMVPTLGSQEGAFENVRMNYSGDQGQTIRQLISAHVLRRVAMCVLSSPHGRRQHLAVSHEKGKITVLQLSALLKQADSSKRKLTLTRLASAPVPFTVLSLTGNPCKEDYLAVCGLKDCHVLTFSSSGSVSDHLVLHPQLATGNFIIKAVWLPGSQTELAIVTADFVKIYDLCVDALSPTFYFLLPSSKIRDVTFLFNEEGKNIIVIMSSAGYIYTQLMEEASSAQQGPFYVTNVLEINHEDLKDSNSQVAGGGVSVYYSHVLQMLFFSYCQGKSFAATISRTTLEVLQLFPINIKSSNGGSKTSPALCQWSEVMNHPGLVCCVQQTTGVPLVVMVKPDTFLIQEIKTLPAKAKIQDMVAIRHTACNEQQRTTMILLCEDGSLRIYMANVENTSYWLQPSLQPSSVISIMKPVRKRKTATITTRTSSQVTFPIDFFEHNQQLTDVEFGGNDLLQVYNAQQIKHRLNSTGMYVANTKPGGFTIEISNNNSTMVMTGMRIQIGTQAIERAPSYIEIFGRTMQLNLSRSRWFDFPFTREEALQADKKLNLFIGASVDPAGVTMIDAVKIYGKTKEQFGWPDEPPEEFPSASVSNICPSNLNQSNGTGDSDSAAPTTTSGTVLERLVVSSLEALESCFAVGPIIEKERNKNAAQELATLLLSLPAPASVQQQSKSLLASLHTSRSAYHSHKDQALLSKAVQCLNTSSKEGKDLDPEVFQRLVITARSIAIMRPNNLVHFTESKLPQMETDCFFPRCACWSLGIVGILIGAPLETPSPGKLPGPELTLKQIKFHLRFTIVDNFLFSCLEGMDEGKEPQKQLEGDCCSFITQLVNHFWKLHASKPKNAFLAPACLPGLTHIEATVNALVDIIHGYCTCELDCINTASKIYMQMLLCPDPAVSFSCKQALIRVLRPRNKRRHVTLPSSPRSNTPMGDKDDDDDDDADEKMQSSGIPNGGHIRQESQEQSEVDHGDFEMVSESMVLETAENVNNGNPSPLEALLAGAEGFPPMLDIPPDADDETMVELAIALSLQQDQQGSSSSALGLQSLGLSGQAPSSSSLDAGTLSDTTASAPASDDEGSTAATDGSTLRTSPADHGGSVGSESGGSAVDSVAGEHSVSGRSSAYGDATAEGHPAGPGSVSSSTGAISTTTGHQEGDGSEGEGEGETEGDVHTSNRLHMVRLMLLERLLQTLPQLRNVGGVRAIPYMQVILMLTTDLDGEDEKDKGALDNLLSQLIAELGMDKKDVSKKNERSALNEVHLVVMRLLSVFMSRTKSGSKSSICESSSLISSATAAALLSSGAVDYCLHVLKSLLEYWKSQQNDEEPVATSQLLKPHTTSSPPDMSPFFLRQYVKGHAADVFEAYTQLLTEMVLRLPYQIKKITDTNSRIPPPVFDHSWFYFLSEYLMIQQTPFVRRQVRKLLLFICGSKEKYRQLRDLHTLDSHVRGIKKLLEEQGIFLRASVVTASSGSALQYDTLISLMEHLKACAEIAAQRTINWQKFCIKDDSVLYFLLQVSFLVDEGVSPVLLQLLSCALCGSKVLAALAASSGSSSASSSSAPVAASSGQATTQSKSSTKKSKKEEKEKEKDGETSGSQEDQLCTALVNQLNKFADKETLIQFLRCFLLESNSSSVRWQAHCLTLHIYRNSSKSQQELLLDLMWSIWPELPAYGRKAAQFVDLLGYFSLKTPQTEKKLKEYSQKAVEILRTQNHILTNHPNSNIYNTLSGLVEFDGYYLESDPCLVCNNPEVPFCYIKLSSIKVDTRYTTTQQVVKLIGSHTISKVTVKIGDLKRTKMVRTINLYYNNRTVQAIVELKNKPARWHKAKKVQLTPGQTEVKIDLPLPIVASNLMIEFADFYENYQASTETLQCPRCSASVPANPGVCGNCGENVYQCHKCRSINYDEKDPFLCNACGFCKYARFDFMLYAKPCCAVDPIENEEDRKKAVSNINTLLDKADRVYHQLMGHRPQLENLLCKVNEAAPEKPQDDSGTAGGISSTSASVNRYILQLAQEYCGDCKNSFDELSKIIQKVFASRKELLEYDLQQREAATKSSRTSVQPTFTASQYRALSVLGCGHTSSTKCYGCASAVTEHCITLLRALATNPALRHILVSQGLIRELFDYNLRRGAAAMREEVRQLMCLLTRDNPEATQQMNDLIIGKVSTALKGHWANPDLASSLQYEMLLLTDSISKEDSCWELRLRCALSLFLMAVNIKTPVVVENITLMCLRILQKLIKPPAPTSKKNKDVPVEALTTVKPYCNEIHAQAQLWLKRDPKASYDAWKKCLPIRGIDGNGKAPSKSELRHLYLTEKYVWRWKQFLSRRGKRTSPLDLKLGHNNWLRQVLFTPATQAARQAACTIVEALATIPSRKQQVLDLLTSYLDELSIAGECAAEYLALYQKLITSAHWKVYLAARGVLPYVGNLITKEIARLLALEEATLSTDLQQGYALKSLTGLLSSFVEVESIKRHFKSRLVGTVLNGYLCLRKLVVQRTKLIDETQDMLLEMLEDMTTGTESETKAFMAVCIETAKRYNLDDYRTPVFIFERLCSIIYPEENEVTEFFVTLEKDPQQEDFLQGRMPGNPYSSISL

SEQ ID NO: 852253 - protein, 397 aa, Homo sapiens; identical to SEQ ID NO: 852250

SEQ ID NO: 852254 - protein, 397 aa, Homo sapiens; identical to SEQ ID NO: 852250

SEQ ID NO: 852255 - protein, 2265 aa, Homo sapiens
DLEVPPQAAISKVQVSLDEHFSKMAAETDPHKSSEITKNLLPATLQLIDTYASFTRAYLLQNFNEEGTTEKPSKEKLQGFAAVLAIGSSRCKANTLGPTLVQNLPSSVQTVCESWNNINTNEFPNIGSWRNAFANDTIPSESYISAVQAAHLGTLCSQSLPLAASLKHTLLSLVRLTGDLIVWSDEMNPPQVIRTLLPLLLESSTESVAEISSNSLERILGPAESDEFLARVYEKLITGCYNILANHADPNSGLDESILEECLQYLEKQLESSQARKAMEEFFSDSGELVQIMMATANENLSAKFCNRVLKFFTKLFQLTEKSPNPSLLHLCGSLAQLACVEPVRLQAWLTRMTTSPPKDSDQLDVIQENRQLLQLLTTYIVRENSQVGEGVCAVLLGTLTPMATEMLANGDGTGFPELMVVMATLASAGQGAGHLQLHNAAVDWLSRCKKYLSQKNVVEKLNANVMHGKHVMILECTCHIMSYLADVTNALSQSNGQGPSHLSVDGEERAIEVDSDWVEELAVEEEDSQAEDSDEDSLCNKLCTFTITQKEFMNQHWYHCHTCKMVDGVGVCTVCAKVCHKDHEISYAKYGSFFCDCGAKEDGSCLALVKRTPSSGMSSTMKESAFQSEPRISESLVRHASTSSPADKAKVTISDGKVADEEKPKKSSLCRTVEGCREELQNQANFSFAPLVLDMLNFLMDAIQTNFQQASAVGSSSRAQQALSELHTVEKAVEMTDQLMVPTLGSQEGAFENVRMNYSGDQGQTIRQLISAHVLRRVAMCVLSSPHGRRQHLAVSHEKGKITVLQLSALLKQADSSKRKLTLTRLASAPVPFTVLSLTGNPCKEDYLAVCGLKDCHVLTFSSSGSVSDHLVLHPQLATGNFIIKAVWLPGSQTELAIVTADFVKIYDLCVDALSPTFYFLLPSSKIRDVTFLFNEEGKNIIVIMSSAGYIYTQLMEEASSAQQGPFYVTNVLEINHEDLKDSNSQVAGGGVSVYYSHVLQMLFFSYCQGKSFAATISRTTLEVLQLFPINIKSSNGGSKTSPALCQWSEVMNHPGLVCCVQQTTGVPLVVMVKPDTFLIQEIKTLPAKAKIQDMVAIRHTACNEQQRTTMILLCEDGSLRIYMANVENTSYWLQPSLQPSSVISIMKPVRKRKTATITTRTSSQVTFPIDFFEHNQQLTDVEFGGNDLLQVYNAQQIKHRLNSTGMYVANTKPGGFTIEISNNNSTMVMTGMRIQIGTQAIERAPSYIEIFGRTMQLNLSRSRWFDFPFTREEALQADKKLNLFIGASVDPAGVTMIDAVKIYGKTKEQFGWPDEPPEEFPSASVSNICPSNLNQSNGTGDSDSAAPTTTSGTVLERLVVSSLEALESCFAVGPIIEKERNKNAAQELATLLLSLPAPASVQQQSKSLLASLHTSRSAYHSHKDQALLSKAVQCLNTSSKEGKDLDPEVFQRLVITARSIAIMRPNNLVHFTESKLPQMETDCFFPRCACWSLGIVGILIGAPLETPSPGKLPGPELTLKQIKFHLRFTIVDNFLFSCLEGMDEGKEPQKQLEGDCCSFITQLVNHFWKLHASKPKNAFLAPACLPGLTHIEATVNALVDIIHGYCTCELDCINTASKIYMQMLLCPDPAVSFSCKQALIRVLRPRNKRRHVTLPSSPRSNTPMGDKDDDDDDDADEKMQSSGIPNGGHIRQESQEQSEVDHGDFEMVSESMVLETAENVNNGNPSPLEALLAGAEGFPPMLDIPPDADDETMVELAIALSLQQDQQGSSSSALGLQSLGLSGQAPSSSSLDAGTLSDTTASAPASDDEGSTAATDGSTLRTSPADHGGSVGSESGGSAVDSVAGEHSVSGRSSAYGDATAEGHPAGPGSVSSSTGAISTTTGHQEGDGSEGEGEGETEGDVHTSNRLHMVRLMLLERLLQTLPQLRNVGGVRAIPYMQVILMLTTDLDGEDEKDKGALDNLLSQLIAELGMDKKDVSKKNERSALNEVHLVVMRLLSVFMSRTKSGSKSSICESSSLISSATAAALLSSGAVDYCLHVLKSLLEYWKSQQNDEEPVATSQLLKPHTTSSPPDMSPFFLRQYVKGHAADVFEAYTQLLTEMVLRLPYQIKKITDTNSRIPPPVFDHSWFYFLSEYLMIQQTPFVRRQVRKLLLFICGSKEKYRQLRDLHTLDSHVRGIKKLLEEQGIFLRASVVTASSGSALQYDTLISLMEHLKACAEIAAQRTINWQKFCIKDDSVLYFLLPRESVFVYNVFFHFWRILFV

SEQ ID NO: 852256 - protein, 2147 aa, Homo sapiens
DLEVPPQAAISKVQVSLDEHFSKMAAETDPHKSSEITKNLLPATLQLIDTYASFTRAYLLQNFNEEGTTEKPSKEKLQGFAAVLAIGSSRCKANTLGPTLVQNLPSSVQTVCESWNNINTNEFPNIGSWRNAFANDTIPSESYISAVQAAHLGTLCSQSLPLAASLKHTLLSLVRLTGDLIVWSDEMNPPQVIRTLLPLLLESSTESVAEISSNSLERILGPAESDEFLARVYEKLITGCYNILANHADPNSGLDESILEECLQYLEKQLESSQARKAMEEFFSDSGELVQIMMATANENLSAKFCNRVLKFFTKLFQLTEKSPNPSLLHLCGSLAQLACVEPVRLQAWLTRMTTSPPKDSDQLDVIQENRQLLQLLTTYIVRENSQVGEGVCAVLLGTLTPMATEMLANGDGTGFPELMVVMATLASAGQGAGHLQLHNAAVDWLSRCKKYLSQKNVVEKLNANVMHGKHVMILECTCHIMSYLADVTNALSQSNGQGPSHLSVDGEERAIEVDSDWVEELAVEEEDSQAEDSDEDSLCNKLCTFTITQKEFMNQHWYHCHTCKMVDGVGVCTVCAKVCHKDHEISYAKYGSFFCDCGAKEDGSCLALVKRTPSSGMSSTMKESAFQSEPRISESLVRHASTSSPADKAKVTISDGKVADEEKPKKSSLCRTVEGCREELQNQANFSFAPLVLDMLNFLMDAIQTNFQQASAVGSSSRAQQALSELHTVEKAVEMTDQLMVPTLGSQEGAFENVRMNYSGDQGQTIRQLISAHVLRRVAMCVLSSPHGRRQHLAVSHEKGKITVLQLSALLKQADSSKRKLTLTRLASAPVPFTVLSLTGNPCKEDYLAVCGLKDCHVLTFSSSGSVSDHLVLHPQLATGNFIIKAVWLPGSQTELAIVTADFVKIYDLCVDALSPTFYFLLPSSKIRDVTFLFNEEGKNIIVIMSSAGYIYTQLMEEASSAQQGPFYVTNVLEINHEDLKDSNSQVAGGGVSVYYSHVLQMLFFSYCQGKSFAATISRTTLEVLQLFPINIKSSNGGSKTSPALCQWSEVMNHPGLVCCVQQTTGVPLVVMVKPDTFLIQEIKTLPAKAKIQDMVAIRHTACNEQQRTTMILLCEDGSLRIYMANVENTSYWLQPSLQPSSVISIMKPVRKRKTATITTRTSSQVTFPIDFFEHNQQLTDVEFGGNDLLQVYNAQQIKHRLNSTGMYVANTKPGGFTIEISNNNSTMVMTGMRIQIGTQAIERAPSYIEIFGRTMQLNLSRSRWFDFPFTREEALQADKKLNLFIGASVDPAGVTMIDAVKIYGKTKEQFGWPDEPPEEFPSASVSNICPSNLNQSNGTGDSDSAAPTTTSGTVLERLVVSSLEALESCFAVGPIIEKERNKNAAQELATLLLSLPAPASVQQQSKSLLASLHTSRSAYHSHKDQALLSKAVQCLNTSSKEGKDLDPEVFQRLVITARSIAIMRPNNLVHFTESKLPQMETDCFFPRCACWSLGIVGILIGAPLETPSPGKLPGPELTLKQIKFHLRFTIVDNFLFSCLEGMDEGKEPQKQLEGDCCSFITQLVNHFWKLHASKPKNAFLAPACLPGLTHIEATVNALVDIIHGYCTCELDCINTASKIYMQMLLCPDPAVSFSCKQALIRVLRPRNKRRHVTLPSSPRSNTPMGDKDDDDDDDADEKMQSSGIPNGGHIRQESQEQSEVDHGDFEMVSESMVLETAENVNNGNPSPLEALLAGAEGFPPMLDIPPDADDETMVELAIALSLQQDQQGSSSSALGLQSLGLSGQAPSSSSLDAGTLSDTTASAPASDDEGSTAATDGSTLRTSPADHGGSVGSESGGSAVDSVAGEHSVSGRSSAYGDATAEGHPAGPGSVSSSTGAISTTTGHQEGDGSEGEGEGETEGDVHTSNRLHMVRLMLLERLLQTLPQLRNVGGVRAIPYMQVILMLTTDLDGEDEKDKGALDNLLSQLIAELGMDKKDVSKKNERSALNEVHLVVMRLLSVFMSRTKSGSKSSICESSSLISSATAAALLSSGAVDYCLHVLKSLLEYWKSQQNDEEPVATSQLLKPHTTSSPPDMSPFFLRQYVKGHAADVFEAYTQLLTEMVLRLPYQIKKITDTNSRIPPPVFDHSWFYFLSEYLMSNIGPSSM

SEQ ID NO: 852257 - protein, 1792 aa, Homo sapiens
DLEVPPQAAISKVQVSLDEHFSKMAAETDPHKSSEITKNLLPATLQLIDTYASFTRAYLLQNFNEEGTTEKPSKEKLQGFAAVLAIGSSRCKANTLGPTLVQNLPSSVQTVCESWNNINTNEFPNIGSWRNAFANDTIPSESYISAVQAAHLGTLCSQSLPLAASLKHTLLSLVRLTGDLIVWSDEMNPPQVIRTLLPLLLESSTESVAEISSNSLERILGPAESDEFLARVYEKLITGCYNILANHADPNSGLDESILEECLQYLEKQLESSQARKAMEEFFSDSGELVQIMMATANENLSAKFCNRVLKFFTKLFQLTEKSPNPSLLHLCGSLAQLACVEPVRLQAWLTRMTTSPPKDSDQLDVIQENRQLLQLLTTYIVRENSQVGEGVCAVLLGTLTPMATEMLANGDGTGFPELMVVMATLASAGQGAGHLQLHNAAVDWLSRCKKYLSQKNVVEKLNANVMHGKHVMILECTCHIMSYLADVTNALSQSNGQGPSHLSVDGEERAIEVDSDWVEELAVEEEDSQAEDSDEDSLCNKLCTFTITQKEFMNQHWYHCHTCKMVDGVGVCTVCAKVCHKDHEISYAKYGSFFCDCGAKEDGSCLALVKRTPSSGMSSTMKESAFQSEPRISESLVRHASTSSPADKAKVTISDGKVADEEKPKKSSLCRTVEGCREELQNQANFSFAPLVLDMLNFLMDAIQTNFQQASAVGSSSRAQQALSELHTVEKAVEMTDQLMVPTLGSQEGAFENVRMNYSGDQGQTIRQLISAHVLRRVAMCVLSSPHGRRQHLAVSHEKGKITVLQLSALLKQADSSKRKLTLTRLASAPVPFTVLSLTGNPCKEDYLAVCGLKDCHVLTFSSSGSVSDHLVLHPQLATGNFIIKAVWLPGSQTELAIVTADFVKIYDLCVDALSPTFYFLLPSSKIRDVTFLFNEEGKNIIVIMSSAGYIYTQLMEEASSAQQGPFYVTNVLEINHEDLKDSNSQVAGGGVSVYYSHVLQMLFFSYCQGKSFAATISRTTLEVLQLFPINIKSSNGGSKTSPALCQWSEVMNHPGLVCCVQQTTGVPLVVMVKPDTFLIQEIKTLPAKAKIQDMVAIRHTACNEQQRTTMILLCEDGSLRIYMANVENTSYWLQPSLQPSSVISIMKPVRKRKTATITTRTSSQVTFPIDFFEHNQQLTDVEFGGNDLLQVYNAQQIKHRLNSTGMYVANTKPGGFTIEISNNNSTMVMTGMRIQIGTQAIERAPSYIEIFGRTMQLNLSRSRWFDFPFTREEALQADKKLNLFIGASVDPAGVTMIDAVKIYGKTKEQFGWPDEPPEEFPSASVSNICPSNLNQSNGTGDSDSAAPTTTSGTVLERLVVSSLEALESCFAVGPIIEKERNKNAAQELATLLLSLPAPASVQQQSKSLLASLHTSRSAYHSHKDQALLSKAVQCLNTSSKEGKDLDPEVFQRLVITARSIAIMRPNNLVHFTESKLPQMETDCFFPRCACWSLGIVGILIGAPLETPSPGKLPGPELTLKQIKFHLRFTIVDNFLFSCLEGMDEGKEPQKQLEGDCCSFITQLVNHFWKLHASKPKNAFLAPACLPGLTHIEATVNALVDIIHGYCTCELDCINTASKIYMQMLLCPDPAVSFSCKQALIRVLRPRNKRRHVTLPSSPRSNTPMGDKDDDDDDDADEKMQSSGIPNGGHIRQESQEQSEVDHGDFEMVSESMVLETAENVNNGNPSPLEALLAGAEGFPPMLDIPPDADDETMVELAIALSLQQDQQGRRPCQEQSGPLALHRKRGFGSY

SEQ ID NO: 852258 - protein, 307 aa, Homo sapiens
STYTKIGTIQRRLAWPLRKDDTQIREAFHILGGMSLAGGRAPRKTAGNRLSGLLEAEEEDEFYQTTYGGFTEESGDDEYQGDQSDTEDEVDSDFDIDEGDEPSSDGEAEEPRRKRRVVTKAYKEPLKSLRPRKVNTPAGSSQKAREEKALLPLELQDDGSDSRKSMRQSTAEHTRQTFLRVQERQGQSRRRKGPHCERPLTQEELLREAKITEELNLRSLETYERLEADKKKQVHKKRKCPGPIITYHSVTVPLVGEPGPKEENVDIEGSPAKEEITLHFPLPTSAGSTGHLNPHLSSFPVNKSPSI

SEQ ID NO: 852259 - protein, 230 aa, Homo sapiens
STYTKIGTIQRRLAWPLRKDDTQIREAFHILGGMSLAGGRAPRKTAGNRLSGLLEAEEEDEFYQTTYGGFTEESGDDEYQGDQSDTEDEVDSDFDIDEGDEPSSDGEAEEPRRKRRVVTKAYKEPLKSLRPRKVNTPAGSSQKAREEKALLPLELQDDGSDSRKSMRQSTAEHTRQTFLRVQERQGQSRRRKGPHCERPLTQEELLREAKITEELNLRSLDLILLPRCLH

SEQ ID NO: 852260 - protein, 269 aa, Homo sapiens
STYTKIGTIQRRLAWPLRKDDTQIREAFHILGGMSLAGGRAPRKTAGNRLSGLLEAEEEDEFYQTTYGGFTEESGDDEYQGDQSDTEDEVDSDFDIDEGDEPSSDGEAEEPRRKRRVVTKAYKEPLKSLRPRKVNTPAGSSQKAREEKALLPLELQDDGSDSRKSMRQSTAEHTRQTFLRVQERQGQSRRRKGPHCERPLTQEELLREAKITEELNLRSLGKSVVSEKVSRGAEGHEKNHETWRTKELERWKFGMMESEGRNGGAVPLS

SEQ ID NO: 852261 - protein, 116 aa, Homo sapiens
STYTKIGTIQRRLAWPLRKDDTQIREAFHILGGMSLAGGRAPRKTAGNRLSGLLEAEEEDEFYQTTYGGFTEESGDDEYQGDQSDTEDEVDSDFDIDEGDEPSSDGEAEEQKIVIK

SEQ ID NO: 852262 - protein, 179 aa, Homo sapiens
QAPSGDWGFFDSGDKDDDDDDDADEKMQSSGIPNGGHIRQESQEQSEVDHGDFEMVVSLWQQEKEEEELHNSPLALIQWTSKSYHLPWDTDRAFSLQSESMVLETAENVNNGNPSPLEALLAGAEGFPPMLDIPPDADDETMVELAIALSLQQDQQGRRPCQEQSGPLALHRKRGFGSY

SEQ ID NO: 852263 - protein, 75 aa, Homo sapiens
DKDQLVMLLDQINSTFVRSNPSVLQGLLRIIPYLSFGEVEKMQILVERFKPYCNFDKYVTLISYSEMRVSTKTPN

SEQ ID NO: 852264 - protein, 153 aa, Homo sapiens
SLAPIMWTKRKALHILPPEQWRATRVEILRRLLVTSQARAVAPGGATRLTDKAVKDYSAYRSSLLFWALVDLIYNMFKKVPTSNTEGGWSCSLAEYIRHNDMPIYEAADKALKTFQEEFMPVETFSEFLDVAGLLSEITDPESFLKDLLNSVP

SEQ ID NO: 852265 - protein, 142 aa, Homo sapiens
NQLGPFTAEMLEDMTTGTESETKAFMAVCIETAKRYNLDDYRTPVFIFERLCSIIYPEENEVTEFFVTLEKDPQQEDFLQGRMPGNPYSSISALEISKRGDAAQKTDTSHHDQDHPTFNKITPNLAEFLQPIPPAAHQSTAS

SEQ ID NO: 852266 - protein, 4123 aa, Homo sapiens; identical to SEQ ID NO: 852244

SEQ ID NO: 852267 - protein, 2855 aa, Homo sapiens
DLEVPPQAAISKVQVSLDEHFSKMAAETDPHKSSEITKNLLPATLQLIDTYASFTRAYLLQNFNEEGTTEKPSKEKLQGFAAVLAIGSSRCKANTLGPTLVQNLPSSVQTVCESWNNINTNEFPNIGSWRNAFANDTIPSESYISAVQAAHLGTLCSQSLPLAASLKHTLLSLVRLTGDLIVWSDEMNPPQVIRTLLPLLLESSTESVAEISSNSLERILGPAESDEFLARVYEKLITGCYNILANHADPNSGLDESILEECLQYLEKQLESSQARKAMEEFFSDSGELVQIMMATANENLSAKFCNRVLKFFTKLFQLTEKSPNPSLLHLCGSLAQLACVEPVRLQAWLTRMTTSPPKDSDQLDVIQENRQLLQLLTTYIVRENSQVGEGVCAVLLGTLTPMATEMLANGDGTGFPELMVVMATLASAGQGAGHLQLHNAAVDWLSRCKKYLSQKNVVEKLNANVMHGKHVMILECTCHIMSYLADVTNALSQSNGQGPSHLSVDGEERAIEVDSDWVEELAVEEEDSQAEDSDEDSLCNKLCTFTITQKEFMNQHWYHCHTCKMVDGVGVCTVCAKVCHKDHEISYAKYGSFFCDCGAKEDGSCLALVKRTPSSGMSSTMKESAFQSEPRISESLVRHASTSSPADKAKVTISDGKVADEEKPKKSSLCRTVEGCREELQNQANFSFAPLVLDMLNFLMDAIQTNFQQASAVGSSSRAQQALSELHTVEKAVEMTDQLMVPTLGSQEGAFENVRMNYSGDQGQTIRQLISAHVLRRVAMCVLSSPHGRRQHLAVSHEKGKITVLQLSALLKQADSSKRKLTLTRLASAPVPFTVLSLTGNPCKEDYLAVCGLKDCHVLTFSSSGSVSDHLVLHPQLATGNFIIKAVWLPGSQTELAIVTADFVKIYDLCVDALSPTFYFLLPSSKIRDVTFLFNEEGKNIIVIMSSAGYIYTQLMEEASSAQQGPFYVTNVLEINHEDLKDSNSQVAGGGVSVYYSHVLQMLFFSYCQGKSFAATISRTTLEVLQLFPINIKSSNGGSKTSPALCQWSEVMNHPGLVCCVQQTTGVPLVVMVKPDTFLIQEIKTLPAKAKIQDMVAIRHTACNEQQRTTMILLCEDGSLRIYMANVENTSYWLQPSLQPSSVISIMKPVRKRKTATITTRTSSQVTFPIDFFEHNQQLTDVEFGGNDLLQVYNAQQIKHRLNSTGMYVANTKPGGFTIEISNNNSTMVMTGMRIQIGTQAIERAPSYIEIFGRTMQLNLSRSRWFDFPFTREEALQADKKLNLFIGASVDPAGVTMIDAVKIYGKTKEQFGWPDEPPEEFPSASVSNICPSNLNQSNGTGDSDSAAPTTTSGTVLERLVVSSLEALESCFAVGPIIEKERNKNAAQELATLLLSLPAPASVQQQSKSLLASLHTSRSAYHSHKDQALLSKAVQCLNTSSKEGKDLDPEVFQRLVITARSIAIMRPNNLVHFTESKLPQMETDCFFPRCACWSLGIVGILIGAPLETPSPGKLPGPELTLKQIKFHLRFTIVDNFLFSCLEGMDEGKEPQKQLEGDCCSFITQLVNHFWKLHASKPKNAFLAPACLPGLTHIEATVNALVDIIHGYCTCELDCINTASKIYMQMLLCPDPAVSFSCKQALIRVLRPRNKRRHVTLPSSPRSNTPMGDKDDDDDDDADEKMQSSGIPNGGHIRQESQEQSEVDHGDFEMVSESMVLETAENVNNGNPSPLEALLAGAEGFPPMLDIPPDADDETMVELAIALSLQQDQQGSSSSALGLQSLGLSGQAPSSSSLDAGTLSDTTASAPASDDEGSTAATDGSTLRTSPADHGGSVGSESGGSAVDSVAGEHSVSGRSSAYGDATAEGHPAGPGSVSSSTGAISTTTGHQEGDGSEGEGEGETEGDVHTSNRLHMVRLMLLERLLQTLPQLRNVGGVRAIPYMQVILMLTTDLDGEDEKDKGALDNLLSQLIAELGMDKKDVSKKNERSALNEVHLVVMRLLSVFMSRTKSGSKSSICESSSLISSATAAALLSSGAVDYCLHVLKSLLEYWKSQQNDEEPVATSQLLKPHTTSSPPDMSPFFLRQYVKGHAADVFEAYTQLLTEMVLRLPYQIKKITDTNSRIPPPVFDHSWFYFLSEYLMIQQTPFVRRQVRKLLLFICGSKEKYRQLRDLHTLDSHVRGIKKLLEEQGIFLRASVVTASSGSALQYDTLISLMEHLKACAEIAAQRTINWQKFCIKDDSVLYFLLQVSFLVDEGVSPVLLQLLSCALCGSKVLAALAASSGSSSASSSSAPVAASSGQATTQSKSSTKKSKKEEKEKEKDGETSGSQEDQLCTALVNQLNKFADKETLIQFLRCFLLESNSSSVRWQAHCLTLHIYRNSSKSQQELLLDLMWSIWPELPAYGRKAAQFVDLLGYFSLKTPQTEKKLKEYSQKAVEILRTQNHILTNHPNSNIYNTLSGLVEFDGYYLESDPCLVCNNPEVPFCYIKLSSIKVDTRYTTTQQVVKLIGSHTISKVTVKIGDLKRTKMVRTINLYYNNRTVQAIVELKNKPARWHKAKKVQLTPGQTEVKIDLPLPIVASNLMIEFADFYENYQASTETLQCPRCSASVPANPGVCGNCGENVYQCHKCRSINYDEKDPFLCNACGFCKYARFDFMLYAKPCCAVDPIENEEDRKKAVSNINTLLDKADRVYHQLMGHRPQLENLLCKVNEAAPEKPQVVPRCKGHLDKGLGLDQKTASYGEITLGGEPDSFLLGLQDDSGTAGGISSTSASVNRYILQLAQEYCGDCKNSFDELSKIIQVESGEQLLGVFCPSVTGVVFTAVLLLSHLAVQVLVLSLPNLAEKAGRWLHQTASPPP

SEQ ID NO: 852268 - protein, 3893 aa, Homo sapiens
DLEVPPQAAISKVQVSLDEHFSKMAAETDPHKSSEITKNLLPATLQLIDTYASFTRAYLLQNFNEEGTTEKPSKEKLQGFAAVLAIGSSRCKANTLGPTLVQNLPSSVQTVCESWNNINTNEFPNIGSWRNAFANDTIPSESYISAVQAAHLGTLCSQSLPLAASLKHTLLSLVRLTGDLIVWSDEMNPPQVIRTLLPLLLESSTESVAEISSNSLERILGPAESDEFLARVYEKLITGCYNILANHADPNSGLDESILEECLQYLEKQLESSQARKAMEEFFSDSGELVQIMMATANENLSAKFCNRVLKFFTKLFQLTEKSPNPSLLHLCGSLAQLACVEPVRLQAWLTRMTTSPPKDSDQLDVIQENRQLLQLLTTYIVRENSQVGEGVCAVLLGTLTPMATEMLANGDGTGFPELMVVMATLASAGQGAGHLQLHNAAVDWLSRCKKYLSQKNVVEKLNANVMHGKHVMILECTCHIMSYLADVTNALSQSNGQGPSHLSVDGEERAIEVDSDWVEELAVEEEDSQAEDSDEDSLCNKLCTFTITQKEFMNQHWYHCHTCKMVDGVGVCTVCAKVCHKDHEISYAKYGSFFCDCGAKEDGSCLALVKRTPSSGMSSTMKESAFQSEPRISESLVRHASTSSPADKAKVTISDGKVADEEKPKKSSLCRTVEGCREELQNQANFSFAPLVLDMLNFLMDAIQTNFQQASAVGSSSRAQQALSELHTVEKAVEMTDQLMVPTLGSQEGAFENVRMNYSGDQGQTIRQLISAHVLRRVAMCVLSSPHGRRQHLAVSHEKGKITVLQLSALLKQADSSKRKLTLTRLASAPVPFTVLSLTGNPCKEDYLAVCGLKDCHVLTFSSSGSVSDHLVLHPQLATGNFIIKAVWLPGSQTELAIVTADFVKIYDLCVDALSPTFYFLLPSSKIRDVTFLFNEEGKNIIVIMSSAGYIYTQLMEEASSAQQGPFYVTNVLEINHEDLKDSNSQVAGGGVSVYYSHVLQMLFFSYCQGKSFAATISRTTLEVLQLFPINIKSSNGGSKTSPALCQWSEVMNHPGLVCCVQQTTGVPLVVMVKPDTFLIQEIKTLPAKAKIQDMVAIRHTACNEQQRTTMILLCEDGSLRIYMANVENTSYWLQPSLQPSSVISIMKPVRKRKTATITTRTSSQVTFPIDFFEHNQQLTDVEFGGNDLLQVYNAQQIKHRLNSTGMYVANTKPGGFTIEISNNNSTMVMTGMRIQIGTQAIERAPSYIEIFGRTMQLNLSRSRWFDFPFTREEALQADKKLNLFIGASVDPAGVTMIDAVKIYGKTKEQFGWPDEPPEEFPSASVSNICPSNLNQSNGTGDSDSAAPTTTSGTVLERLVVSSLEALESCFAVGPIIEKERNKNAAQELATLLLSLPAPASVQQQSKSLLASLHTSRSAYHSHKDQALLSKAVQCLNTSSKEGKDLDPEVFQRLVITARSIAIMRPNNLVHFTESKLPQMETDCFFPRCACWSLGIVGILIGAPLETPSPGKLPGPELTLKQIKFHLRFTIVDNFLFSCLEGMDEGKEPQKQLEGDCCSFITQLVNHFWKLHASKPKNAFLAPACLPGLTHIEATVNALVDIIHGYCTCELDCINTASKIYMQMLLCPDPAVSFSCKQALIRVLRPRNKRRHVTLPSSPRSNTPMGDKDDDDDDDADEKMQSSGIPNGGHIRQESQEQSEVDHGDFEMVSESMVLETAENVNNGNPSPLEALLAGAEGFPPMLDIPPDADDETMVELAIALSLQQDQQGSSSSALGLQSLGLSGQAPSSSSLDAGTLSDTTASAPASDDEGSTAATDGSTLRTSPADHGGSVGSESGGSAVDSVAGEHSVSGRSSAYGDATAEGHPAGPGSVSSSTGAISTTTGHQEGDGSEGEGEGETEGDVHTSNRLHMVRLMLLERLLQTLPQLRNVGGVRAIPYMQVILMLTTDLDGEDEKDKGALDNLLSQLIAELGMDKKDVSKKNERSALNEVHLVVMRLLSVFMSRTKSGSKSSICESSSLISSATAAALLSSGAVDYCLHVLKSLLEYWKSQQNDEEPVATSQLLKPHTTSSPPDMSPFFLRQYVKGHAADVFEAYTQLLTEMVLRLPYQIKKITDTNSRIPPPVFDHSWFYFLSEYLMIQQTPFVRRQVRKLLLFICGSKEKYRQLRDLHTLDSHVRGIKKLLEEQGIFLRASVVTASSGSALQYDTLISLMEHLKACAEIAAQRTINWQKFCIKDDSVLYFLLQVSFLVDEGVSPVLLQLLSCALCGSKVLAALAASSGSSSASSSSAPVAASSGQATTQSKSSTKKSKKEEKEKEKDGETSGSQEDQLCTALVNQLNKFADKETLIQFLRCFLLESNSSSVRWQAHCLTLHIYRNSSKSQQELLLDLMWSIWPELPAYGRKAAQFVDLLGYFSLKTPQTEKKLKEYSQKAVEILRTQNHILTNHPNSNIYNTLSGLVEFDGYYLESDPCLVCNNPEVPFCYIKLSSIKVDTRYTTTQQVVKLIGSHTISKVTVKIGDLKRTKMVRTINLYYNNRTVQAIVELKNKPARWHKAKKVQLTPGQTEVKIDLPLPIVASNLMIEFADFYENYQASTETLQCPRCSASVPANPGVCGNCGENVYQCHKCRSINYDEKDPFLCNACGFCKYARFDFMLYAKPCCAVDPIENEEDRKKAVSNINTLLDKADRVYHQLMGHRPQLENLLCKVNEAAPEKPQDDSGTAGGISSTSASVNRYILQLAQEYCGDCKNSFDELSKIIQKVFASRKELLEYDLQQREAATKSSRTSVQPTFTASQYRALSVLGCGHTSSTKCYGCASAVTEHCITLLRALATNPALRHILVSQGLIRELFDYNLRRGAAAMREEVRQLMCLLTRDNPEATQQMNDLIIGKVSTALKGHWANPDLVSRPEQAQLSSLTSPHMPCVSQLPLPGPAVTEEGRSRTLPQNGFPREEPGAQGSPSVLCLCWSHLGPEIVLIVKSRWTGGKLVVQRTKLIDETQDMLLEMLEDMTTGTESETKAFMAVCIETAKRYNLDDYRTPVFIFERLCSIIYPEENEVTEFFVTLEKDPQQEDFLQGRMPGNPYSSNEPGIGPLMRDIKNKICQDCDLVALLEDDSGMELLVNNKIISLDLPVAEVYKKVWCTTNEGEPMRIVYRMRGLLGDATEEFIESLDSTTDEEEDEEEVYKMAGVMAQCGGLECMLNRLAGIRDFKQGRHLLTVLLKLFSYCVKVKVNRQQLVKLEMNTLNVMLGTLNLALVAEQESKDSGGAAVAEQVLSIMEIILDESNAEPLSEDKGNLLLTGDKDQLVMLLDQINSTFVRSNPSVLQGLLRIIPYLSFGEVEKMQILVERFKPYCNFDKYDEDHSGDDKVFLDCFCKIAAGIKNNSNGHQLKDLILQKGITQNALDYMKKHIPSAKNLDADIWKKFLSRPALPFILRLLRGLAIQHPGTQVLIGTDSIPNLHKLEQVSSDEGIGTLAENLLEALREHPDVNKKIDAARRETRAEKKRMAMAMRQKALGTLGMTTNEKGQVVTKTALLKQMEELIEEPGLTCCICREGYKFQPTKVLGIYTFTKRVALEELENKPRKQQGYSTVSHFNIVHYDCHLAAVRLARGREEWESAALQNANTKCNGLLPVWGPHVPESAFATCLARHNTYLQECTGQREPTYQLNIHDIKLLFLRFAMEQSFSADTGGGGRESNIHLIPYIIHTVLYVLNTTRATSREEKNLQGFLEQPKEKWVESAFEVDGPYYFTVLALHILPPEQWRATRVEILRRLLVTSQARAVAPGGATRLTDKAVKDYSAYRSSLLFWALVDLIYNMFKKVPTSNTEGGWSCSLAEYIRHNDMPIYEAADKALKTFQEEFMPVETFSEFLDVAGLLSEITDPESFLKDLLNSVP

SEQ ID NO: 852269 - protein, 4038 aa, Homo sapiens
DLEVPPQAAISKVQVSLDEHFSKMAAETDPHKSSEITKNLLPATLQLIDTYASFTRAYLLQNFNEEGTTEKPSKEKLQGFAAVLAIGSSRCKANTLGPTLVQNLPSSVQTVCESWNNINTNEFPNIGSWRNAFANDTIPSESYISAVQAAHLGTLCSQSLPLAASLKHTLLSLVRLTGDLIVWSDEMNPPQVIRTLLPLLLESSTESVAEISSNSLERILGPAESDEFLARVYEKLITGCYNILANHADPNSGLDESILEECLQYLEKQLESSQARKAMEEFFSDSGELVQIMMATANENLSAKFCNRVLKFFTKLFQLTEKSPNPSLLHLCGSLAQLACVEPVRLQAWLTRMTTSPPKDSDQLDVIQENRQLLQLLTTYIVRENSQVGEGVCAVLLGTLTPMATEMLANGDGTGFPELMVVMATLASAGQGAGHLQLHNAAVDWLSRCKKYLSQKNVVEKLNANVMHGKHVMILECTCHIMSYLADVTNALSQSNGQGPSHLSVDGEERAIEVDSDWVEELAVEEEDSQAEDSDEDSLCNKLCTFTITQKEFMNQHWYHCHTCKMVDGVGVCTVCAKVCHKDHEISYAKYGSFFCDCGAKEDGSCLALVKRTPSSGMSSTMKESAFQSEPRISESLVRHASTSSPADKAKVTISDGKVADEEKPKKSSLCRTVEGCREELQNQANFSFAPLVLDMLNFLMDAIQTNFQQASAVGSSSRAQQALSELHTVEKAVEMTDQLMVPTLGSQEGAFENVRMNYSGDQGQTIRQLISAHVLRRVAMCVLSSPHGRRQHLAVSHEKGKITVLQLSALLKQADSSKRKLTLTRLASAPVPFTVLSLTGNPCKEDYLAVCGLKDCHVLTFSSSGSVSDHLVLHPQLATGNFIIKAVWLPGSQTELAIVTADFVKIYDLCVDALSPTFYFLLPSSKIRDVTFLFNEEGKNIIVIMSSAGYIYTQLMEEASSAQQGPFYVTNVLEINHEDLKDSNSQVAGGGVSVYYSHVLQMLFFSYCQGKSFAATISRTTLEVLQLFPINIKSSNGGSKTSPALCQWSEVMNHPGLVCCVQQTTGVPLVVMVKPDTFLIQEIKTLPAKAKIQDMVAIRHTACNEQQRTTMILLCEDGSLRIYMANVENTSYWLQPSLQPSSVISIMKPVRKRKTATITTRTSSQVTFPIDFFEHNQQLTDVEFGGNDLLQVYNAQQIKHRLNSTGMYVANTKPGGFTIEISNNNSTMVMTGMRIQIGTQAIERAPSYIEIFGRTMQLNLSRSRWFDFPFTREEALQADKKLNLFIGASVDPAGVTMIDAVKIYGKTKEQFGWPDEPPEEFPSASVSNICPSNLNQSNGTGDSDSAAPTTTSGTVLERLVVSSLEALESCFAVGPIIEKERNKNAAQELATLLLSLPAPASVQQQSKSLLASLHTSRSAYHSHKDQALLSKAVQCLNTSSKEGKDLDPEVFQRLVITARSIAIMRPNNLVHFTESKLPQMETDCFFPRCACWSLGIVGILIGAPLETPSPGKLPGPELTLKQIKFHLRFTIVDNFLFSCLEGMDEGKEPQKQLEGDCCSFITQLVNHFWKLHASKPKNAFLAPACLPGLTHIEATVNALVDIIHGYCTCELDCINTASKIYMQMLLCPDPAVSFSCKQALIRVLRPRNKRRHVTLPSSPRSNTPMGDKDDDDDDDADEKMQSSGIPNGGHIRQESQEQSEVDHGDFEMVSESMVLETAENVNNGNPSPLEALLAGAEGFPPMLDIPPDADDETMVELAIALSLQQDQQGSSSSALGLQSLGLSGQAPSSSSLDAGTLSDTTASAPASDDEGSTAATDGSTLRTSPADHGGSVGSESGGSAVDSVAGEHSVSGRSSAYGDATAEGHPAGPGSVSSSTGAISTTTGHQEGDGSEGEGEGETEGDVHTSNRLHMVRLMLLERLLQTLPQLRNVGGVRAIPYMQVILMLTTDLDGEDEKDKGALDNLLSQLIAELGMDKKDVSKKNERSALNEVHLVVMRLLSVFMSRTKSGSKSSICESSSLISSATAAALLSSGAVDYCLHVLKSLLEYWKSQQNDEEPVATSQLLKPHTTSSPPDMSPFFLRQYVKGHAADVFEAYTQLLTEMVLRLPYQIKKITDTNSRIPPPVFDHSWFYFLSEYLMIQQTPFVRRQVRKLLLFICGSKEKYRQLRDLHTLDSHVRGIKKLLEEQGIFLRASVVTASSGSALQYDTLISLMEHLKACAEIAAQRTINWQKFCIKDDSVLYFLLQVSFLVDEGVSPVLLQLLSCALCGSKVLAALAASSGSSSASSSSAPVAASSGQATTQSKSSTKKSKKEEKEKEKDGETSGSQEDQLCTALVNQLNKFADKETLIQFLRCFLLESNSSSVRWQAHCLTLHIYRNSSKSQQELLLDLMWSIWPELPAYGRKAAQFVDLLGYFSLKTPQTEKKLKEYSQKAVEILRTQNHILTNHPNSNIYNTLSGLVEFDGYYLESDPCLVCNNPEVPFCYIKLSSIKVDTRYTTTQQVVKLIGSHTISKVTVKIGDLKRTKMVRTINLYYNNRTVQAIVELKNKPARWHKAKKVQLTPGQTEVKIDLPLPIVASNLMIEFADFYENYQASTETLQCPRCSASVPANPGVCGNCGENVYQCHKCRSINYDEKDPFLCNACGFCKYARFDFMLYAKPCCAVDPIENEEDRKKAVSNINTLLDKADRVYHQLMGHRPQLENLLCKVNEAAPEKPQDDSGTAGGISSTSASVNRYILQLAQEYCGDCKNSFDELSKIIQKVFASRKELLEYDLQQREAATKSSRTSVQPTFTASQYRALSVLGCGHTSSTKCYGCASAVTEHCITLLRALATNPALRHILVSQGLIRELFDYNLRRGAAAMREEVRQLMCLLTRDNPEATQQMNDLIIGKVSTALKGHWANPDLASSLQYEMLLLTDSISKEDSCWELRLRCALSLFLMAVNIKTPVVVENITLMCLRILQKLIKPPAPTSKKNKDVPVEALTTVKPYCNEIHAQAQLWLKRDPKASYDAWKKCLPIRGIDGNGKAPSKSELRHLYLTEKYVWRWKQFLSRRGKRTSPLDLKLGHNNWLRQVLFTPATQAARQAACTIVEALATIPSRKQQVLDLLTSYLDELSIAGECAAEYLALYQKLITSAHWKVYLAARGVLPYVGNLITKEIARLLALEEATLSTDLQQGYALKSLTGLLSSFVEVESIKRHFKSRLVGTVLNGYLCLRKLVVQRTKLIDETQDMLLEMLEDMTTGTESETKAFMAVCIETAKRYNLDDYRTPVFIFERLCSIIYPEENEVTEFFVTLEKDPQQEDFLQGRMPGNPYSSNEPGIGPLMRDIKNKICQDCDLVALLEDDSGMELLVNNKIISLDLPVAEVYKKVWCTTNEGEPMRIVYRMRGLLGDATEEFIESLDSTTDEEEDEEEVYKMAGVMAQCGGLECMLNRLAGIRDFKQGRHLLTVLLKLFSYCVKVKVNRQQLVKLEMNTLNVMLGTLNLGNLLLTGDKDQLVMLLDQINSTFVRSNPSVLQGCFCKIAAGIKNNSNGHQLKDLILQKGITQNALDYMKKHIPSAKNLDADIWKKFLSRPALPFILRLLRGLAIQHPGTQVLIGTDSIPNLHKLEQVSSDEGIGTLAENLLEALREHPDVNKKIDAARRETRAEKKRMAMAMRQKALGTLGMTTNEKGQVVTKTALLKQMEELIEEPGLTCCICREGYKFQPTKVLGIYTFTKRVALEELENKPRKQQGYSTVSHFNIVHYDCHLAAVRLARGREEWESAALQNANTKCNGLLPVWGPHVPESAFATCLARHNTYLQECTGQREPTYQLNIHDIKLLFLRFAMEQSFSADTGGGGRESNIHLIPYIIHTVLYVLNTTRATSREEKNLQGFLEQPKEKWVESAFEVDGPYYFTVLALHILPPEQWRATRVEILRRLLVTSQARAVAPGGATRLTDKAVKDYSAYRSSLLFWALVDLIYNMFKKVPTSNTEGGWSCSLAEYIRHNDMPIYEAADKALKTFQEEFMPVETFSEFLDVAGLLSEITDPESFLKDLLNSVP

SEQ ID NO: 852270 - protein, 3750 aa, Homo sapiens
DLEVPPQAAISKVQVSLDEHFSKMAAETDPHKSSEITKNLLPATLQLIDTYASFTRAYLLQNFNEEGTTEKPSKEKLQGFAAVLAIGSSRCKANTLGPTLVQNLPSSVQTVCESWNNINTNEFPNIGSWRNAFANDTIPSESYISAVQAAHLGTLCSQSLPLAASLKHTLLSLVRLTGDLIVWSDEMNPPQVIRTLLPLLLESSTESVAEISSNSLERILGPAESDEFLARVYEKLITGCYNILANHADPNSGLDESILEECLQYLEKQLESSQARKAMEEFFSDSGELVQIMMATANENLSAKFCNRVLKFFTKLFQLTEKSPNPSLLHLCGSLAQLACVEPVRLQAWLTRMTTSPPKDSDQLDVIQENRQLLQLLTTYIVRENSQVGEGVCAVLLGTLTPMATEMLANGDGTGFPELMVVMATLASAGQGAGHLQLHNAAVDWLSRCKKYLSQKNVVEKLNANVMHGKHVMILECTCHIMSYLADVTNALSQSNGQGPSHLSVDGEERAIEVDSDWVEELAVEEEDSQAEDSDEDSLCNKLCTFTITQKEFMNQHWYHCHTCKMVDGVGVCTVCAKVCHKDHEISYAKYGSFFCDCGAKEDGSCLALVKRTPSSGMSSTMKESAFQSEPRISESLVRHASTSSPADKAKVTISDGKVADEEKPKKSSLCRTVEGCREELQNQANFSFAPLVLDMLNFLMDAIQTNFQQASAVGSSSRAQQALSELHTVEKAVEMTDQLMVPTLGSQEGAFENVRMNYSGDQGQTIRQLISAHVLRRVAMCVLSSPHGRRQHLAVSHEKGKITVLQLSALLKQADSSKRKLTLTRLASAPVPFTVLSLTGNPCKEDYLAVCGLKDCHVLTFSSSGSVSDHLVLHPQLATGNFIIKAVWLPGSQTELAIVTADFVKIYDLCVDALSPTFYFLLPSSKIRDVTFLFNEEGKNIIVIMSSAGYIYTQLMEEASSAQQGPFYVTNVLEINHEDLKDSNSQVAGGGVSVYYSHVLQMLFFSYCQGKSFAATISRTTLEVLQLFPINIKSSNGGSKTSPALCQWSEVMNHPGLVCCVQQTTGVPLVVMVKPDTFLIQEIKTLPAKAKIQDMVAIRHTACNEQQRTTMILLCEDGSLRIYMANVENTSYWLQPSLQPSSVISIMKPVRKRKTATITTRTSSQVTFPIDFFEHNQQLTDVEFGGNDLLQVYNAQQIKHRLNSTGMYVANTKPGGFTIEISNNNSTMVMTGMRIQIGTQAIERAPSYIEIFGRTMQLNLSRSRWFDFPFTREEALQADKKLNLFIGASVDPAGVTMIDAVKIYGKTKEQFGWPDEPPEEFPSASVSNICPSNLNQSNGTGDSDSAAPTTTSGTVLERLVVSSLEALESCFAVGPIIEKERNKNAAQELATLLLSLPAPASVQQQSKSLLASLHTSRSAYHSHKDQALLSKAVQCLNTSSKEGKDLDPEVFQRLVITARSIAIMRPNNLVHFTESKLPQMETDCFFPRCACWSLGIVGILIGAPLETPSPGKLPGPELTLKQIKFHLRFTIVDNFLFSCLEGMDEGKEPQKQLEGDCCSFITQLVNHFWKLHASKPKNAFLAPACLPGLTHIEATVNALVDIIHGYCTCELDCINTASKIYMQMLLCPDPAVSFSCKQALIRVLRPRNKRRHVTLPSSPRSNTPMGDKDDDDDDDADEKMQSSGIPNGGHIRQESQEQSEVDHGDFEMVSESMVLETAENVNNGNPSPLEALLAGAEGFPPMLDIPPDADDETMVELAIALSLQQDQQGSSSSALGLQSLGLSGQAPSSSSLDAGTLSDTTASAPASDDEGSTAATDGSTLRTSPADHGGSVGSESGGSAVDSVAGEHSVSGRSSAYGDATAEGHPAGPGSVSSSTGAISTTTGHQEGDGSEGEGEGETEGDVHTSNRLHMVRLMLLERLLQTLPQLRNVGGVRAIPYMQVILMLTTDLDGEDEKDKGALDNLLSQLIAELGMDKKDVSKKNERSALNEVHLVVMRLLSVFMSRTKSGSKSSICESSSLISSATAAALLSSGAVDYCLHVLKSLLEYWKSQQNDEEPVATSQLLKPHTTSSPPDMSPFFLRQYVKGHAADVFEAYTQLLTEMVLRLPYQIKKITDTNSRIPPPVFDHSWFYFLSEYLMIQQTPFVRRQVRKLLLFICGSKEKYRQLRDLHTLDSHVRGIKKLLEEQGIFLRASVVTASSGSALQYDTLISLMEHLKACAEIAAQRTINWQKFCIKDDSVLYFLLQVSFLVDEGVSPVLLQLLSCALCGSKVLAALAASSGSSSASSSSAPVAASSGQATTQSKSSTKKSKKEEKEKEKDGETSGSQEDQLCTALVNQLNKFADKETLIQFLRCFLLESNSSSVRWQAHCLTLHIYRNSSKSQQELLLDLMWSIWPELPAYGRKAAQFVDLLGYFSLKTPQTEKKLKEYSQKAVEILRTQNHILTNHPNSNIYNTLSGLVEFDGYYLESDPCLVCNNPEVPFCYIKLSSIKVDTRYTTTQQVVKLIGSHTISKVTVKIGDLKRTKMVRTINLYYNNRTVQAIVELKNKPARWHKAKKVQLTPGQTEVKIDLPLPIVASNLMIEFADFYENYQASTETLQCPRCSASVPANPGVCGNCGENVYQCHKCRSINYDEKDPFLCNACGFCKYARFDFMLYAKPCCAVDPIENEEDRKKAVSNINTLLDKADRVYHQLMGHRPQLENLLCKVNEAAPEKPQDDSGTAGGISSTSASVNRYILQLAQEYCGDCKNSFDELSKIIQKVFASRKELLEYDLQQREAATKSSRTSVQPTFTASQYRALSVLGCGHTSSTKCYGCASAVTEHCITLLRALATNPALRHILVSQGLIRELFDYNLRRGAAAMREEVRQLMCLLTRDNPEATQQMNDLIIGKVSTALKGHWANPDLASSLQYEMLLLTDSISKEDSCWELRLRCALSLFLMAVNIKTPVVVENITLMCLRILQKLIKPPAPTSKKNKDVPVEALTTVKPYCNEIHAQAQLWLKRDPKASYDAWKKCLPIRGIDGNGKAPSKSELRHLYLTEKYVWRWKQFLSRRGKRTSPLDLKLGHNNWLRQVLFTPATQAARQAACTIVEALATIPSRKQQVLDLLTSYLDELSIAGECAAEYLALYQKLITSAHWKVYLAARGVLPYVGNLITKEIARLLALEEATLSTDLQQGYALKSLTGLLSSFVEVESIKRHFKSRLVGTVLNGYLCLRKLVVQRTKLIDETQDMLLEMLEDMTTGTESETKAFMAVCIETAKRYNLDDYRTPVFIFERLCSIIYPEENEVTEFFVTLEKDPQQEDFLQGRMPGNPYSSNEPGIGPLMRDIKNKICQDCDLVALLEDDSGMELLVNNKIISLDLPVAEVYKKVWCTTNEGEPMRIVYRMRGLLGDATEEFIESLDSTTDEEEDEEEVYKMAGVMAQCGGLECMLNRLAGIRDFKQGRHLLTVLLKLFSYCVKVKVNRQQLVKLEMNTLNVMLGTLNLALVAEQESKDSGGAAVAEQVLSIMEIILDESNAEPLSEDKGNLLLTGDKDQLVMLLDQINSTFVRSNPSVLQGLLRIIPYLSFGEVEKMQILVERFKPYCNFDKYDEDHSGDDKVFLDCFCKIAAGIKNNSNGHQLKDLILQKGITQNALDYMKKHIPSAKNLDADIWKKFLSRPALPFILRLLRGLAIQHPGTQVLIGTDSIPNLHKLEQVSSDEGIGTLAENLLEALREHPDVNKKIDAARRETRAEKKRMAMAMRQKALGTLGMT

SEQ ID NO: 852271 - protein, 683 aa, Homo sapiens; identical to SEQ ID NO: 852241

SEQ ID NO: 852272 - protein, 4123 aa, Homo sapiens; identical to SEQ ID NO: 852244

SEQ ID NO: 852273 - protein, 556 aa, Homo sapiens
RVEKPTLLRLAIPYHRASKGPPRMLVCRGRCLSRWTQRRLRSTNNSNGHQLKDLILQKGITQNALDYMKKHIPSAKNLDADIWKKFLSRPALPFILRLLRGLAIQHPGTQVLIGTDSIPNLHKLEQVSSDEGIGTLAENLLEALREHPDVNKKIDAARRETRAEKKRMAMAMRQKALGTLGMTTNEKGQVVTKTALLKQMEELIEEPGLTCCICREGYKFQPTKVLGIYTFTKRVALEELENKPRKQQGYSTVSHFNIVHYDCHLAAVRLARGREEWESAALQNANTKCNGLLPVWGPHVPESAFATCLARHNTYLQECTGQREPTYQLNIHDIKLLFLRFAMEQSFSADTGGGGRESNIHLIPYIIHTVLYVLNTTRATSREEKNLQGFLEQPKEKWVESAFEVDGPYYFTVLALHILPPEQWRATRVEILRRLLVTSQARAVAPGGATRLTDKAVKDYSAYRSSLLFWALVDLIYNMFKKVPTSNTEGGWSCSLAEYIRHNDMPIYEAADKALKTFQEEFMPVETFSEFLDVAGLLSEITDPESFLKDLLNSVP

SEQ ID NO: 852274 - protein, 4123 aa, Homo sapiens; identical to SEQ ID NO: 852244

SEQ ID NO: 852275 - protein, 4128 aa, Homo sapiens
DLEVPPQAAISKVQVSLDEHFSKMAAETDPHKSSEITKNLLPATLQLIDTYASFTRAYLLQNFNEEGTTEKPSKEKLQGFAAVLAIGSSRCKANTLGPTLVQNLPSSVQTVCESWNNINTNEFPNIGSWRNAFANDTIPSESYISAVQAAHLGTLCSQSLPLAASLKHTLLSLVRLTGDLIVWSDEMNPPQVIRTLLPLLLESSTESVAEISSNSLERILGPAESDEFLARVYEKLITGCYNILANHADPNSGLDESILEECLQYLEKQLESSQARKAMEEFFSDSGELVQIMMATANENLSAKFCNRVLKFFTKLFQLTEKSPNPSLLHLCGSLAQLACVEPVRLQAWLTRMTTSPPKDSDQLDVIQENRQLLQLLTTYIVRENSQVGEGVCAVLLGTLTPMATEMLANGDGTGFPELMVVMATLASAGQGAGHLQLHNAAVDWLSRCKKYLSQKNVVEKLNANVMHGKHVMILECTCHIMSYLADVTNALSQSNGQGPSHLSVDGEERAIEVDSDWVEELAVEEEDSQAEDSDEDSLCNKLCTFTITQKEFMNQHWYHCHTCKMVDGVGVCTVCAKVCHKDHEISYAKYGSFFCDCGAKEDGSCLALVKRTPSSGMSSTMKESAFQSEPRISESLVRHASTSSPADKAKVTISDGKVADEEKPKKSSLCRTVEGCREELQNQANFSFAPLVLDMLNFLMDAIQTNFQQASAVGSSSRAQQALSELHTVEKAVEMTDQLMVPTLGSQEGAFENVRMNYSGDQGQTIRQLISAHVLRRVAMCVLSSPHGRRQHLAVSHEKGKITVLQLSALLKQADSSKRKLTLTRLASAPVPFTVLSLTGNPCKEDYLAVCGLKDCHVLTFSSSGSVSDHLVLHPQLATGNFIIKAVWLPGSQTELAIVTADFVKIYDLCVDALSPTFYFLLPSSKIRDVTFLFNEEGKNIIVIMSSAGYIYTQLMEEASSAQQGPFYVTNVLEINHEDLKDSNSQVAGGGVSVYYSHVLQMLFFSYCQGKSFAATISRTTLEVLQLFPINIKSSNGGSKTSPALCQWSEVMNHPGLVCCVQQTTGVPLVVMVKPDTFLIQEIKTLPAKAKIQDMVAIRHTACNEQQRTTMILLCEDGSLRIYMANVENTSYWLQPSLQPSSVISIMKPVRKRKTATITTRTSSQVTFPIDFFEHNQQLTDVEFGGNDLLQVYNAQQIKHRLNSTGMYVANTKPGGFTIEISNNNSTMVMTGMRIQIGTQAIERAPSYIEIFGRTMQLNLSRSRWFDFPFTREEALQADKKLNLFIGASVDPAGVTMIDAVKIYGKTKEQFGWPDEPPEEFPSASVSNICPSNLNQSNGTGDSDSAAPTTTSGTVLERLVVSSLEALESCFAVGPIIEKERNKNAAQELATLLLSLPAPASVQQQSKSLLASLHTSRSAYHSHKDQALLSKAVQCLNTSSKEGKDLDPEVFQRLVITARSIAIMRPNNLVHFTESKLPQMETDCFFPRCACWSLGIVGILIGAPLETPSPGKLPGPELTLKQIKFHLRFTIVDNFLFSCLEGMDEGKEPQKQLEGDCCSFITQLVNHFWKLHASKPKNAFLAPACLPGLTHIEATVNALVDIIHGYCTCELDCINTASKIYMQMLLCPDPAVSFSCKQALIRVLRPRNKRRHVTLPSSPRSNTPMGDKDDDDDDDADEKMQSSGIPNGGHIRQESQEQSEVDHGDFEMVSESMVLETAENVNNGNPSPLEALLAGAEGFPPMLDIPPDADDETMVELAIALSLQQDQQGSSSSALGLQSLGLSGQAPSSSSLDAGTLSDTTASAPASDDEGSTAATDGSTLRTSPADHGGSVGSESGGSAVDSVAGEHSVSGRSSAYGDATAEGHPAGPGSVSSSTGAISTTTGHQEGDGSEGEGEGETEGDVHTSNRLHMVRLMLLERLLQTLPQLRNVGGVRAIPYMQVILMLTTDLDGEDEKDKGALDNLLSQLIAELGMDKKDVSKKNERSALNEVHLVVMRLLSVFMSRTKSGSKSSICESSSLISSATAAALLSSGAVDYCLHVLKSLLEYWKSQQNDEEPVATSQLLKPHTTSSPPDMSPFFLRQYVKGHAADVFEAYTQLLTEMVLRLPYQIKKITDTNSRIPPPVFDHSWFYFLSEYLMIQQTPFVRRQVRKLLLFICGSKEKYRQLRDLHTLDSHVRGIKKLLEEQGIFLRASVVTASSGSALQYDTLISLMEHLKACAEIAAQRTINWQKFCIKDDSVLYFLLQVSFLVDEGVSPVLLQLLSCALCGSKVLAALAASSGSSSASSSSAPVAASSGQATTQSKSSTKKSKKEEKEKEKDGETSGSQEDQLCTALVNQLNKFADKETLIQFLRCFLLESNSSSVRWQAHCLTLHIYRNSSKSQQELLLDLMWSIWPELPAYGRKAAQFVDLLGYFSLKTPQTEKKLKEYSQKAVEILRTQNHILTNHPNSNIYNTLSGLVEFDGYYLESDPCLVCNNPEVPFCYIKLSSIKVDTRYTTTQQVVKLIGSHTISKVTVKIGDLKRTKMVRTINLYYNNRTVQAIVELKNKPARWHKAKKVQLTPGQTEVKIDLPLPIVASNLMIEFADFYENYQASTETLQCPRCSASVPANPGVCGNCGENVYQCHKCRSINYDEKDPFLCNACGFCKYARFDFMLYAKPCCAVDPIENEEDRKKAVSNINTLLDKADRVYHQLMGHRPQLENLLCKVNEAAPEKPQDDSGTAGGISSTSASVNRYILQLAQEYCGDCKNSFDELSKIIQKVFASRKELLEYDLQQREAATKSSRTSVQPTFTASQYRALSVLGCGHTSSTKCYGCASAVTEHCITLLRALATNPALRHILVSQGLIRELFDYNLRRGAAAMREEVRQLMCLLTRDNPEATQQMNDLIIGKVSTALKGHWANPDLASSLQYEMLLLTDSISKEDSCWELRLRCALSLFLMAVNIKTPVVVENITLMCLRILQKLIKPPAPTSKKNKDVPVEALTTVKPYCNEIHAQAQLWLKRDPKASYDAWKKCLPIRGIDGNGKAPSKSELRHLYLTEKYVWRWKQFLSRRGKRTSPLDLKLGHNNWLRQVLFTPATQAARQAACTIVEALATIPSRKQQVLDLLTSYLDELSIAGECAAEYLALYQKLITSAHWKVYLAARGVLPYVGNLITKEIARLLALEEATLSTDLQQGYALKSLTGLLSSFVEVESIKRHFKSRLVGTVLNGYLCLRKLVVQRTKLIDETQDMLLEMLEDMTTGTESETKAFMAVCIETAKRYNLDDYRTPVFIFERLCSIIYPEENEVTEFFVTLEKDPQQEDFLQGRMPGNPYSSNEPGIGPLMRDIKNKICQDCDLVALLEDDSGMELLVNNKIISLDLPVAEVYKKVWCTTNEGEPMRIVYRMRGLLGDATEEFIESLDSTTDEEEDEEEVYKMAGVMAQCGGLECMLNRLAGIRDFKQGRHLLTVLLKLFSYCVKVKVNRQQLVKLEMNTLNVMLGTLNLALVAEQESKDSGGAAVAEQVLSIMEIILDESNAEPLSEDKGNLLLTGDKDQLVMLLDQINSTFVRSNPSVLQGLLRIIPYLSFGEVEKMQILVERFKPYCNFDKYDEDHSGDDKVFLDCFCKIAAGIKNNSNGHQLKDLILQKGITQNALDYMKKHIPSAKNLDADIWKKFLSRPALPFILRLLRGLAIQHPGTQVLIGTDSIPNLHKLEQVSSDEGIGTLAENLLEALREHPDVNKKIDAARRETRAEKKRMAMAMRQKALGTLGMTTNEKGQVVTKTALLKQMEELIEEPGLTCCICREGYKFQPTKVLGIYTFTKRVALEELENKPRKQQGYSTVSHFNIVHYDCHLAAVRLARGREEWESAALQNANTKCNGLLPVWGPHVPESAFATCLARHNTYLQECTGQREPTYQLNIHDIKLLFLRFAMEQSFSADTGGGGRESNIHLIPYIIHTVLYVLNTTRATSREEKNLQGFLEQPKEKWVESAFEVDGPYYFTVLALHILPPEQWRATRVEILRRLLVTSQARAVAPGGATRLDKYGSAVDSVAGEHSVSGRSSAYGDATAEGHPAGPGSVSSSTGAISTTTGHQEGDGSEGEGEGETEGDVHTSNRLHMVRLMLLERLLQTLPQLRNVGGVRAIPYMQGPT

SEQ ID NO: 852276 - protein, 3445 aa, Homo sapiens
DLEVPPQAAISKVQVSLDEHFSKMAAETDPHKSSEITKNLLPATLQLIDTYASFTRAYLLQNFNEEGTTEKPSKEKLQGFAAVLAIGSSRCKANTLGPTLVQNLPSSVQTVCESWNNINTNEFPNIGSWRNAFANDTIPSESYISAVQAAHLGTLCSQSLPLAASLKHTLLSLVRLTGDLIVWSDEMNPPQVIRTLLPLLLESSTESVAEISSNSLERILGPAESDEFLARVYEKLITGCYNILANHADPNSGLDESILEECLQYLEKQLESSQARKAMEEFFSDSGELVQIMMATANENLSAKFCNRVLKFFTKLFQLTEKSPNPSLLHLCGSLAQLACVEPVRLQAWLTRMTTSPPKDSDQLDVIQENRQLLQLLTTYIVRENSQVGEGVCAVLLGTLTPMATEMLANGDGTGFPELMVVMATLASAGQGAGHLQLHNAAVDWLSRCKKYLSQKNVVEKLNANVMHGKHVMILECTCHIMSYLADVTNALSQSNGQGPSHLSVDGEERAIEVDSDWVEELAVEEEDSQAEDSDEDSLCNKLCTFTITQKEFMNQHWYHCHTCKMVDGVGVCTVCAKVCHKDHEISYAKYGSFFCDCGAKEDGSCLALVKRTPSSGMSSTMKESAFQSEPRISESLVRHASTSSPADKAKVTISDGKVADEEKPKKSSLCRTVEGCREELQNQANFSFAPLVLDMLNFLMDAIQTNFQQASAVGSSSRAQQALSELHTVEKAVEMTDQLMVPTLGSQEGAFENVRMNYSGDQGQTIRQLISAHVLRRVAMCVLSSPHGRRQHLAVSHEKGKITVLQLSALLKQADSSKRKLTLTRLASAPVPFTVLSLTGNPCKEDYLAVCGLKDCHVLTFSSSGSVSDHLVLHPQLATGNFIIKAVWLPGSQTELAIVTADFVKIYDLCVDALSPTFYFLLPSSKIRDVTFLFNEEGKNIIVIMSSAGYIYTQLMEEASSAQQGPFYVTNVLEINHEDLKDSNSQVAGGGVSVYYSHVLQMLFFSYCQGKSFAATISRTTLEVLQLFPINIKSSNGGSKTSPALCQWSEVMNHPGLVCCVQQTTGVPLVVMVKPDTFLIQEIKTLPAKAKIQDMVAIRHTACNEQQRTTMILLCEDGSLRIYMANVENTSYWLQPSLQPSSVISIMKPVRKRKTATITTRTSSQVTFPIDFFEHNQQLTDVEFGGNDLLQVYNAQQIKHRLNSTGMYVANTKPGGFTIEISNNNSTMVMTGMRIQIGTQAIERAPSYIEIFGRTMQLNLSRSRWFDFPFTREEALQADKKLNLFIGASVDPAGVTMIDAVKIYGKTKEQFGWPDEPPEEFPSASVSNICPSNLNQSNGTGDSDSAAPTTTSGTVLERLVVSSLEALESCFAVGPIIEKERNKNAAQELATLLLSLPAPASVQQQSKSLLASLHTSRSAYHSHKDQALLSKAVQCLNTSSKEGKDLDPEVFQRLVITARSIAIMRPNNLVHFTESKLPQMETDCFFPRCACWSLGIVGILIGAPLETPSPGKLPGPELTLKQIKFHLRFTIVDNFLFSCLEGMDEGKEPQKQLEGDCCSFITQLVNHFWKLHASKPKNAFLAPACLPGLTHIEATVNALVDIIHGYCTCELDCINTASKIYMQMLLCPDPAVSFSCKQALIRVLRPRNKRRHVTLPSSPRSNTPMGDKDDDDDDDADEKMQSSGIPNGGHIRQESQEQSEVDHGDFEMVSESMVLETAENVNNGNPSPLEALLAGAEGFPPMLDIPPDADDETMVELAIALSLQQDQQGSSSSALGLQSLGLSGQAPSSSSLDAGTLSDTTASAPASDDEGSTAATDGSTLRTSPADHGGSVGSESGGSAVDSVAGEHSVSGRSSAYGDATAEGHPAGPGSVSSSTGAISTTTGHQEGDGSEGEGEGETEGDVHTSNRLHMVRLMLLERLLQTLPQLRNVGGVRAIPYMQVILMLTTDLDGEDEKDKGALDNLLSQLIAELGMDKKDVSKKNERSALNEVHLVVMRLLSVFMSRTKSGSKSSICESSSLISSATAAALLSSGAVDYCLHVLKSLLEYWKSQQNDEEPVATSQLLKPHTTSSPPDMSPFFLRQYVKGHAADVFEAYTQLLTEMVLRLPYQIKKITDTNSRIPPPVFDHSWFYFLSEYLMIQQTPFVRRQVRKLLLFICGSKEKYRQLRDLHTLDSHVRGIKKLLEEQGIFLRASVVTASSGSALQYDTLISLMEHLKACAEIAAQRTINWQKFCIKDDSVLYFLLQVSFLVDEGVSPVLLQLLSCALCGSKVLAALAASSGSSSASSSSAPVAASSGQATTQSKSSTKKSKKEEKEKEKDGETSGSQEDQLCTALVNQLNKFADKETLIQFLRCFLLESNSSSVRWQAHCLTLHIYRNSSKSQQELLLDLMWSIWPELPAYGRKAAQFVDLLGYFSLKTPQTEKKLKEYSQKAVEILRTQNHILTNHPNSNIYNTLSGLVEFDGYYLESDPCLVCNNPEVPFCYIKLSSIKVDTRYTTTQQVVKLIGSHTISKVTVKIGDLKRTKMVRTINLYYNNRTVQAIVELKNKPARWHKAKKVQLTPGQTEVKIDLPLPIVASNLMIEFADFYENYQASTETLQCPRCSASVPANPGVCGNCGENVYQCHKCRSINYDEKDPFLCNACGFCKYARFDFMLYAKPCCAVDPIENEEDRKKAVSNINTLLDKADRVYHQLMGHRPQLENLLCKVNEAAPEKPQDDSGTAGGISSTSASVNRYILQLAQEYCGDCKNSFDELSKIIQKVFASRKELLEYDLQQREAATKSSRTSVQPTFTASQYRALSVLGCGHTSSTKCYGCASAVTEHCITLLRALATNPALRHILVSQGLIRELFDYNLRRGAAAMREEVRQLMCLLTRDNPEATQQMNDLIIGKVSTALKGHWANPDLASSLQYEMLLLTDSISKEDSCWELRLRCALSLFLMAVNIKTPVVVENITLMCLRILQKLIKPPAPTSKKNKDVPVEALTTVKPYCNEIHAQAQLWLKRDPKASYDAWKKCLPIRGIDGNGKAPSKSELRHLYLTEKYVWRWKQFLSRRGKRTSPLDLKLGHNNWLRQVLFTPATQAARQAACTIVEALATIPSRKQQVLDLLTSYLDELSIAGECAAEYLALYQKLITSAHWKVYLAARGVLPYVGNLITKEIARLLALEEATLSTDLQQGYALKSLTGLLSSFVEVESIKRHFKSRLVGTVLNGYLCLRKLVVQRTKLIDETQDMLLEMLEDMTTGTESETKAFMAVCIETAKRYNLDDYRTPVFIFERLCSIIYPEENEVTEFFVTLEKDPQQEDFLQGRMPGNPYSSNEPGIGPLMRDIKNKICQDCDLVALLEDDSGMELLVNNKIISLDLPVAEVYKKVWCTTNEGEPMRIVYRMRGLLGDATEEFIESLDSTTDETMTQYSYCIYICCNYCKKEREQKKKKKKKKFLSIMWCEKR

SEQ ID NO: 852277 - protein, 397 aa, Homo sapiens; identical to SEQ ID NO: 852250

SEQ ID NO: 852278 - protein, 2307 aa, Homo sapiens
VTYEVPPQAAISKVQVSLDEHFSKMAAETDPHKSSEITKNLLPATLQLIDTYASFTRAYLLQNFNEEGTTEKPSKEKLQGFAAVLAIGSSRCKANTLGPTLVQNLPSSVQTVCESWNNINTNEFPNIGSWRNAFANDTIPSESYISAVQAAHLGTLCSQSLPLAASLKHTLLSLVRLTGDLIVWSDEMNPPQVIRTLLPLLLESSTESVAEISSNSLERILGPAESDEFLARVYEKLITGCYNILANHADPNSGLDESILEECLQYLEKQLESSQARKAMEEFFSDSGELVQIMMATANENLSAKFCNRVLKFFTKLFQLTEKSPNPSLLHLCGSLAQLACVEPVRLQAWLTRMTTSPPKDSDQLDVIQENRQLLQLLTTYIVRENSQVGEGVCAVLLGTLTPMATEMLANGDGTGFPELMVVMATLASAGQGAGHLQLHNAAVDWLSRCKKYLSQKNVVEKLNANVMHGKHVMILECTCHIMSYLADVTNALSQSNGQGPSHLSVDGEERAIEVDSDWVEELAVEEEDSQAEDSDEDSLCNKLCTFTITQKEFMNQHWYHCHTCKMVDGVGVCTVCAKVCHKDHEISYAKYGSFFCDCGAKEDGSCLALVKRTPSSGMSSTMKESAFQSEPRISESLVRHASTSSPADKAKVTISDGKVADEEKPKKSSLCRTVEGCREELQNQANFSFAPLVLDMLNFLMDAIQTNFQQASAVGSSSRAQQALSELHTVEKAVEMTDQLMVPTLGSQEGAFENVRMNYSGDQGQTIRQLISAHVLRRVAMCVLSSPHGRRQHLAVSHEKGKITVLQLSALLKQADSSKRKLTLTRLASAPVPFTVLSLTGNPCKEDYLAVCGLKDCHVLTFSSSGSVSDHLVLHPQLATGNFIIKAVWLPGSQTELAIVTADFVKIYDLCVDALSPTFYFLLPSSKIRDVTFLFNEEGKNIIVIMSSAGYIYTQLMEEASSAQQGPFYVTNVLEINHEDLKDSNSQVAGGGVSVYYSHVLQMLFFSYCQGKSFAATISRTTLEVLQLFPINIKSSNGGSKTSPALCQWSEVMNHPGLVCCVQQTTGVPLVVMVKPDTFLIQEIKTLPAKAKIQDMVAIRHTACNEQQRTTMILLCEDGSLRIYMANVENTSYWLQPSLQPSSVISIMKPVRKRKTATITTRTSSQVTFPIDFFEHNQQLTDVEFGGNDLLQVYNAQQIKHRLNSTGMYVANTKPGGFTIEISNNNSTMVMTGMRIQIGTQAIERAPSYIEIFGRTMQLNLSRSRWFDFPFTREEALQADKKLNLFIGASVDPAGVTMIDAVKIYGKTKEQFGWPDEPPEEFPSASVSNICPSNLNQSNGTGDSDSAAPTTTSGTVLERLVVSSLEALESCFAVGPIIEKERNKNAAQELATLLLSLPAPASVQQQSKSLLASLHTSRSAYHSHKDQALLSKAVQCLNTSSKEGKDLDPEVFQRLVITARSIAIMRPNNLVHFTESKLPQMETDCFFPRCACWSLGIVGILIGAPLETPSPGKLPGPELTLKQIKFHLRFTIVDNFLSPGLEGMDEGKEPQKQLEGDCCSFITQLVNHFWKLHASKPKNAFLAPACLPGLTHIEATVNALVDIIHGYCTCELDCINTASKIYMQMLLCPDPAVSFSCKQALIRVLRPRNKRRHVTLPSSPRSNTPMGDKDDDDDDDADEKMQSSGIPNGGHIRQESQEQSEVDHGDFEMVSESMVLETAENVNNGNPSPLEALLAGAEGFPPMLDIPPDADDETMVELAIALSLQQDQQGSSSSALGLQSLGLSGQAPSSSSLDAGTLSDTTASAPASDDEGSTAATDGSTLRTSPADHGGSVGSESGGSAVDSVAGEHSVSGRSSAYGDATAEGHPAGPGSVSSSTGAISTTTGHQEGDGSEGEGEGETEGDVHTSNRLHMVRLMLLERLLQTLPQLRNVGGVRAIPYMQVILMLTTDLDGEDEKDKGALDNLLSQLIAELGMDKKDVSKKNERSALNEVHLVVMRLLSVFMSRTKSGSKSSICESSSLISSATAAALLSSGAVDYCLHVLKSLLEYWKSQQNDEEPVATSQLLKPHTTSSPPDMSPFFLRQYVKGHAADVFEAYTQLLTEMVLRLPYQIKKITDTNSRIPPPVFDHSWFYFLSEYLMIQQTPFVRRQVRKLLLFICGSKEKYRQLRDLHTLDSHVRGIKKLLEEQGIFLRASVVTASSGSALQYDTLISLMEHLKACAEIAAQRTINWQKFCIKDDSVLYFLLQVSFLVDEGVSPVLLQLLSCALCGSKVLAALAASSGSSSASSSSAPVAASSGQATTQSKSS

SEQ ID NO: 852279 - protein, 406 aa, Homo sapiens
STYTKIGTIQRRLAWPLRKDDTQIREAFHILGGMSLAGGRAPRKTAGNRLSGLLEAEEEDEFYQTTYGGFTEESGDDEYQGDQSDTEDEVDSDFDIDEGDEPSSDGEAEEPRRKRRVVTKAYKEPLKSLRPRKVNTPAGSSQKAREEKALLPLELQDDGSDSRKSMRQSTAEHTRQTFLRVQERQGQSRRRKGPHCERPLTQEELLREAKITEELNLRSLETYERLEADKKKQVHKKRKCPGPIITYHSVTVPLVGEPGPKEENVDIEGLDPAPSVSALTPHAGTGPVNPPARCSRTFITFSDDATFEEWFPQGRPPKVPVREVCPVTHRPALYRDPVTDIPYATARAFKIIREAYKKYITAHGLPPTASALGPGPPPPEPLPGSGPRALRVISDLCLICFFFLFP

SEQ ID NO: 852280 - protein, 2028 aa, Homo sapiens
DLEVPPQAAISKVQVSLDEHFSKMAAETDPHKSSEITKNLLPATLQLIDTYASFTRAYLLQNFNEEGTTEKPSKEKLQGFAAVLAIGSSRCKANTLGPTLVQNLPSSVQTVCESWNNINTNEFPNIGSWRNAFANDTIPSESYISAVQAAHLGTLCSQSLPLAASLKHTLLSLVRLTGDLIVWSDEMNPPQVIRTLLPLLLESSTESVAEISSNSLERILGPAESDEFLARVYEKLITGCYNILANHADPNSGLDESILEECLQYLEKQLESSQARKAMEEFFSDSGELVQIMMATANENLSAKFCNRVLKFFTKLFQLTEKSPNPSLLHLCGSLAQLACVEPVRLQAWLTRMTTSPPKDSDQLDVIQENRQLLQLLTTYIVRENSQVGEGVCAVLLGTLTPMATEMLANGDGTGFPELMVVMATLASAGQGAGHLQLHNAAVDWLSRCKKYLSQKNVVEKLNANVMHGKHVMILECTCHIMSYLADVTNALSQSNGQGPSHLSVDGEERAIEVDSDWVEELAVEEEDSQAEDSDEDSLCNKLCTFTITQKEFMNQHWYHCHTCKMVDGVGVCTVCAKVCHKDHEISYAKYGSFFCDCGAKEDGSCLALVKRTPSSGMSSTMKESAFQSEPRISESLVRHASTSSPADKAKVTISDGKVADEEKPKKSSLCRTVEGCREELQNQANFSFAPLVLDMLNFLMDAIQTNFQQASAVGSSSRAQQALSELHTVEKAVEMTDQLMVPTLGSQEGAFENVRMNYSGDQGQTIRQLISAHVLRRVAMCVLSSPHGRRQHLAVSHEKGKITVLQLSALLKQADSSKRKLTLTRLASAPVPFTVLSLTGNPCKEDYLAVCGLKDCHVLTFSSSGSVSDHLVLHPQLATGNFIIKAVWLPGSQTELAIVTADFVKIYDLCVDALSPTFYFLLPSSKIRDVTFLFNEEGKNIIVIMSSAGYIYTQLMEEASSAQQGPFYVTNVLEINHEDLKDSNSQVAGGGVSVYYSHVLQMLFFSYCQGKSFAATISRTTLEVLQLFPINIKSSNGGSKTSPALCQWSEVMNHPGLVCCVQQTTGVPLVVMVKPDTFLIQEIKTLPAKAKIQDMVAIRHTACNEQQRTTMILLCEDGSLRIYMANVENTSYWLQPSLQPSSVISIMKPVRKRKTATITTRTSSQVTFPIDFFEHNQQLTDVEFGGNDLLQVYNAQQIKHRLNSTGMYVANTKPGGFTIEISNNNSTMVMTGMRIQIGTQAIERAPSYIEIFGRTMQLNLSRSRWFDFPFTREEALQADKKLNLFIGASVDPAGVTMIDAVKIYGKTKEQFGWPDEPPEEFPSASVSNICPSNLNQSNGTGDSDSAAPTTTSGTVLERLVVSSLEALESCFAVGPIIEKERNKNAAQELATLLLSLPAPASVQQQSKSLLASLHTSRSAYHSHKDQALLSKAVQCLNTSSKEGKDLDPEVFQRLVITARSIAIMRPNNLVHFTESKLPQMETDCFFPRCACWSLGIVGILIGAPLETPSPGKLPGPELTLKQIKFHLRFTIVDNFLFSCLEGMDEGKEPQKQLEGDCCSFITQLVNHFWKLHASKPKNAFLAPACLPGLTHIEATVNALVDIIHGYCTCELDCINTASKIYMQMLLCPDPAVSFSCKQALIRVLRPRNKRRHVTLPSSPRSNTPMGDKDDDDDDDADEKMQSSGIPNGGHIRQESQEQSEVDHGDFEMVSESMVLETAENVNNGNPSPLEALLAGAEGFPPMLDIPPDADDETMVELAIALSLQQDQQGSSSSALGLQSLGLSGQAPSSSSLDAGTLSDTTASAPASDDEGSTAATDGSTLRTSPADHGGSVGSESGGSAVDSVAGEHSVSGRSSAYGDATAEGHPAGPGSVSSSTGAISTTTGHQEGDGSEGEGEGETEGDVHTSNRLHMVRLMLLERLLQTLPQLRNVGGVRAIPYMQVILMLTTDLDGEDEKDKGALDNLLSQLIAELGMDKKDVSKKNERSALNEVHLVVMRLLSVFMSRTKSGSKSSICEVFLLWVHGFGER

SEQ ID NO: 852281 - protein, 269 aa, Homo sapiens
STYTKIGTIQRRLAWPLRKDDTQIREAFHILGGMSLAGGRAPRKTAGNRLSGLLEAEEEDEFYQTTYGGFTEESGDDEYQGDQSDTEDEVDSDFDIDEGDEPSSDGEAEEPRRKRRVVTKAYKEPLKSLRPRKVNTPAGSSQKAREEKALLPLELQDDGSDSRKSMRQSTAEHTRQTFLRVQERQGQSRRRKGPHCERPLTQEELLREAKITEELNLRSLETYERLEADKKKQVHKKRKCPGPIITYHSVTVPLVGEPGPKEENVDIEG

SEQ ID NO: 852282 - protein, 1337 aa, Homo sapiens
DLEVPPQAAISKVQVSLDEHFSKMAAETDPHKSSEITKNLLPATLQLIDTYASFTRAYLLQNFNEEGTTEKPSKEKLQGFAAVLAIGSSRCKANTLGPTLVQNLPSSVQTVCESWNNINTNEFPNIGSWRNAFANDTIPSESYISAVQAAHLGTLCSQSLPLAASLKHTLLSLVRLTGDLIVWSDEMNPPQVIRTLLPLLLESSTESVAEISSNSLERILGPAESDEFLARVYEKLITGCYNILANHADPNSGLDESILEECLQYLEKQLESSQARKAMEEFFSDSGELVQIMMATANENLSAKFCNRVLKFFTKLFQLTEKSPNPSLLHLCGSLAQLACVEPVRLQAWLTRMTTSPPKDSDQLDVIQENRQLLQLLTTYIVRENSQVGEGVCAVLLGTLTPMATEMLANGDGTGFPELMVVMATLASAGQGAGHLQLHNAAVDWLSRCKKYLSQKNVVEKLNANVMHGKHVMILECTCHIMSYLADVTNALSQSNGQGPSHLSVDGEERAIEVDSDWVEELAVEEEDSQAEDSDEDSLCNKLCTFTITQKEFMNQHWYHCHTCKMVDGVGVCTVCAKVCHKDHEISYAKYGSFFCDCGAKEDGSCLALVKRTPSSGMSSTMKESAFQSEPRISESLVRHASTSSPADKAKVTISDGKVADEEKPKKSSLCRTVEGCREELQNQANFSFAPLVLDMLNFLMDAIQTNFQQASAVGSSSRAQQALSELHTVEKAVEMTDQLMVPTLGSQEGAFENVRMNYSGDQGQTIRQLISAHVLRRVAMCVLSSPHGRRQHLAVSHEKGKITVLQLSALLKQADSSKRKLTLTRLASAPVPFTVLSLTGNPCKEDYLAVCGLKDCHVLTFSSSGSVSDHLVLHPQLATGNFIIKAVWLPGSQTELAIVTADFVKIYDLCVDALSPTFYFLLPSSKIRDVTFLFNEEGKNIIVIMSSAGYIYTQLMEEASSAQQGPFYVTNVLEINHEDLKDSNSQVAGGGVSVYYSHVLQMLFFSYCQGKSFAATISRTTLEVLQLFPINIKSSNGGSKTSPALCQWSEVMNHPGLVCCVQQTTGVPLVVMVKPDTFLIQEIKTLPAKAKIQDMVAIRHTACNEQQRTTMILLCEDGSLRIYMANVENTSYWLQPSLQPSSVISIMKPVRKRKTATITTRTSSQVTFPIDFFEHNQQLTDVEFGGNDLLQVYNAQQIKHRLNSTGMYVANTKPGGFTIEISNNNSTMVMTGMRIQIGTQAIERAPSYIEIFGRTMQLNLSRSRWFDFPFTREEALQADKKLNLFSESPTPGADSVLIVTAKLGATGLWLSNILGSLHSADFSVLSSGNFELHLMY

SEQ ID NO: 852283 - protein, 157 aa, Homo sapiens
STYTKIGTIQRRLAWPLRKDDTQIREAFHILGGMSLAGGRAPRKTAGNRLSGLLEAAYTGTLLQTYPMPLLEPSRSFVRLTRSTLLPMDCRPLPQPWAPARHLLSPSLALGPEPCARKLSLNEEMSSPQKLLSCPDWGSCCSVSSPCFSPLSSLIFA

SEQ ID NO: 852284 - protein, 52 aa, Homo sapiens
MAPGSRCGACLGNVVELLLSRGWFLFQMEHLKACAEIAAQRTINWQKFCIKD

SEQ ID NO: 852285 - protein, 83 aa, Homo sapiens
LVKRTPSSGMSSTMKESAFQSEPRISESLVRHASTSSPADKAKVTISDGKVADEEKPKKSSLCRTVEGCREELQNQVGLTDAP

SEQ ID NO: 852286 - protein, 587 aa, Homo sapiens [sequence omitted]

SEQ ID NO: 852287 - protein, 569 aa, Homo sapiens
MEHVSSPCDSNSSSLPRGDVLGSSRPHRRRPCVQQSLSSSFTCEKDPECKVDHKKGLRKSENPRGPLVLPAGGGAQDESGSRIHHKNWTLASKRGRNSAQKASLCLNGSSLSEDDTERDMGSKGGSWAAPSLPSGVREDDPCANAEGHDPGLPLGSLTAPPAPEPSACSEPGECPAKKRPRLDGSQRPPAVQLEPMAAGAAPSPGPGPGPRESVTPRSTARLGPPPSHASADATRCLPCPDSQKLEKECQSSEESMGSNSMRSILEEDEEDEEPPRVLLYHEPRSFEVGMLVWHKHKKYPFWPAVVKSVRQRDKKASVLYIEGHMNPKMKGFTVSLKSLKHFDCKEKQTLLNQAREDFNQDIGWCVSLITDYRVRLGCGSFAGSFLEYYAADISYPVRKSIQQDVLGTKLPQLSKGSPEEPVVGCPLGQRQPCRKMLPDRSRAARDRANQKLVEYIVKAKGAESHLRAILKSRKPSRWLQTFLSSSQYVTCVETYLEDEGQLDLVVKYLQGVYQEVGAKVLQRTNGDRIRFILDVLLPEAIICAISAVDEVDYKTAEEKYIKGPSLSYR

SEQ ID NO: 852288 - protein, 587 aa, Homo sapiens [sequence omitted]

SEQ ID NO: 852289 - protein, 569 aa, Homo sapiens; identical to SEQ ID NO: 852287

SEQ ID NO: 852290 - protein, 710 aa, Homo sapiens [sequence omitted]

SEQ ID NO: 852291 - protein, 587 aa, Homo sapiens [sequence omitted]

SEQ ID NO: 852292 - protein, 587 aa, Homo sapiens [sequence omitted]

SEQ ID NO: 852293 - protein, 569 aa, Homo sapiens; identical to SEQ ID NO: 852287

SEQ ID NO: 852294 - protein, 96 aa, Homo sapiens
AVAEAVSAGGADGSGWRAGPPLLRPLRPPCPGLGRRAGESRGPGHIGVRPGSTLCQIIATCHMSVNDGGCQVCPLPMGKAIMACEGFGPNRDFNKK

SEQ ID NO: 852295 - protein, 587 aa, Homo sapiens [sequence omitted]

SEQ ID NO: 852296 - protein, 587 aa, Homo sapiens [sequence omitted]

SEQ ID NO: 852297 - protein, 587 aa, Homo sapiens [sequence omitted]

SEQ ID NO: 852298 - protein, 587 aa, Homo sapiens [sequence omitted]

SEQ ID NO: 852299 - protein, 109 aa, Homo sapiens
MGQTASTSPARLACPECISLHCVVTAQPVTAVSVIGADGYAGVPGWPQQSGSLWEPWGGVTNRIVLCPPWQKRSLCMEAQPRSRLEKRLPGCGCRVGSGPQHGAGAAGC

SEQ ID NO: 852300 - protein, 587 aa, Homo sapiens [sequence omitted]

SEQ ID NO: 852301 - protein, 189 aa, Homo sapiens
MSRVPGPGGLGAAFSPLAGLHLALAGGLALRGCDPLPPGPPQPTTATGEEIGTRLSQMQGAVRDEAARTLVSGPWDSGGARGGGCSGPRCSLTFVSLASARLREQETRPWPGSSASHARTLGSVLSGAVGHTPEEAGVRAVGLGPLLVAVSGTRGGQYHRLRRGSAALHVRASYCLMENPPEPPSIVGS

SEQ ID NO: 852302 - protein, 189 aa, Homo sapiens; identical to SEQ ID NO: 852301

SEQ ID NO: 852303 - protein, 130 aa, Homo sapiens
MVSGEHQGHLVPSWPPVHKTRKDFAAIRGEVLPFSFPLPIVRFAVVLSLPGQSGLSPRFEKQLVVCLKFQSRAQGRERVAWHWGWWHPLFEALSWGARGRSEVELSASHPSGCAFSQAFSLAPTSFAHCG

SEQ ID NO: 852304 - protein, 411 aa, Homo sapiens
AAATSTPRHLLCGSCASQAQCRSARRSGCSCPARRRPARAVGCGLRPRCWPALHGCGLCGARCSATLRRAAWDNAAMVRRDRLRRMREWWVQVGLLAVPLLAAYLHIPPPQLSPALHSWKSSGKFFTYKGLRIFYQDSVGVVGSPEIVVLLHGFPTSSYDWYKIWEGLTLRFHRVIALDFLGFGFSDKPRPHHYSIFEQASIVEALLRHLGLQNRRINLLSHDYGDIVAQELLYRYKQNRSGRLTIKSLCLSNGGIFPETHRPLLLQKLLKDGGVLSPILTRLMNFFVFSRGLTPVFGPYTRPSESELWDMWAGIRNNDGNLVIDSLLQYINQRKKFRRRWVGALASVTIPIHFIYGPLDPVNPYPEFLELYRKTLPRSTVSILDDHISHYPQLEDPMGFLNAYMGFINSF

SEQ ID NO: 852305 - protein, 411 aa, Homo sapiens; identical to SEQ ID NO: 852304

SEQ ID NO: 852306 - protein, 326 aa, Homo sapiens
MREWWVQVGLLAVPLLAAYLHIPPPQLSPALHSWKSSGKFFTYKGLRIFYQDSVGVVGSPEIVVLLHGFPTSSYDWYKIWEGLTLRFHRVIALDFLGFGFSDKPRPHHYSIFEQASIVEALLRHLGLQNRRINLLSHDYGDIVAQELLYRYKQNRSGRLTIKSLCLSNGGIFPETHRPLLLQKLLKDGGVLSPILTRLMNFFVFSRGLTPVFGPYTRPSESELWDMWAGIRNNDGNLVIDSLLQYINQRKKFRRRWVGALASVTIPIHFIYGPLDPVNPYPEFLELYRKTLPRSTVSILDDHISHYPQLEDPMGFLNAYMGFINSF

SEQ ID NO: 852307 - protein, 326 aa, Homo sapiens; identical to SEQ ID NO: 852306

SEQ ID NO: 852308 - protein, 391 aa, Homo sapiens
AAATSTPRHLLCGSCASQAQCRSARRSGCSCPARRRPARAVGCGLRPRCWPALHGCGLCGARCSATLRRAAWDNAAMVRRDRLRRMREWWVQVGLLAVPLLAAYLHIPPPQLSPALHSWKSSGKFFTYKGLRIFYQDSVGVVGSPEIVVLLHGFPTSSYDWYKIWEGLTLRFHRVIALDFLGFGFSDKPRPHHYSIFEQASIVEALLRHLGLQNRRINLLSHDYGDIVAQELLYRYKQNRSGRLTIKSLCLSNGGIFPETHRPLLLQKLLKDGGVLSPILTRLMNFFVWDMWAGIRNNDGNLVIDSLLQYINQRKKFRRRWVGALASVTIPIHFIYGPLDPVNPYPEFLELYRKTLPRSTVSILDDHISHYPQLEDPMGFLNAYMGFINSF

SEQ ID NO: 852309 - protein, 411 aa, Homo sapiens; identical to SEQ ID NO: 852304

SEQ ID NO: 852310 - protein, 292 aa, Homo sapiens
MREWWVQVGLLAVPLLAAYLHIPPPQLSPALHSWKSSGKFFTYKIWEGLTLRFHRVIALDFLGFGFSDKPRPHHYSIFEQASIVEALLRHLGLQNRRINLLSHDYGDIVAQELLYRYKQNRSGRLTIKSLCLSNGGIFPETHRPLLLQKLLKDGGVLSPILTRLMNFFVFSRGLTPVFGPYTRPSESELWDMWAGIRNNDGNLVIDSLLQYINQRKKFRRRWVGALASVTIPIHFIYGPLDPVNPYPEFLELYRKTLPRSTVSILDDHISHYPQLEDPMGFLNAYMGFINSF

SEQ ID NO: 852311 - protein, 411 aa, Homo sapiens; identical to SEQ ID NO: 852304

SEQ ID NO: 852312 - protein, 411 aa, Homo sapiens; identical to SEQ ID NO: 852304

SEQ ID NO: 852313 - protein, 411 aa, Homo sapiens; identical to SEQ ID NO: 852304

SEQ ID NO: 852314 - protein, 411 aa, Homo sapiens; identical to SEQ ID NO: 852304

SEQ ID NO: 852315 - protein, 483 aa, Homo sapiens
AAATSTPRHLLCGSCASQAQCRSARRSGCSCPARRRPARAVGCGLRPRCWPALHGCGLCGARCSATLRRAAWDNAAMVRRDRLRRMREWWVQVGLLAVPLLAAYLHIPPPQLSPALHSWKSSGKFFTYKGLRIFYQDSVGVVGSPEIVVLLHGFPTSSYDWYKIWEGLTLRFHRVIALDFLGFGFSDKPRPHHYSIFEQASIVEALLRHLGLQNRRINLLSHDYGDIVAQELLYRYKQNRSGRLTIKSLCLSNGGIFPETHRPLLLQKLLKDGGVLSPILTRLMNFFVFSRGLTPVFGPYTRPSESELWDMWAGIRNNDGNLVIDKVRSYPLLWFPETCFCGEVGIACSVPWLAYSLITGRLMMTYGANQKVMVYMKKEIENKSETGLFVSIKCFKVLNHGCESSLVPPSRYKALPFAYLSAATGSERADFSFSVLYKEFPCLGSNENVDTFTRDPEVVIAVTTWDKTLTSSHLAQCSFQCFY

SEQ ID NO: 852316 - protein, 411 aa, Homo sapiens; identical to SEQ ID NO: 852304

SEQ ID NO: 852317 - protein, 326 aa, Homo sapiens; identical to SEQ ID NO: 852306

SEQ ID NO: 852318 - protein, 374 aa, Homo sapiens
AAATSTPRHLLCGSCASQAQCRSARRSGCSCPARRRPARAVGCGLRPRCWPALHGCGLCGARCSATLRRAAWDNAAMVRRDRLRRMREWWVQVGLLAVPLLAAYLHIPPPQLSPALHSWKSSGKFFTYKGLRIFYQDSVGVVGSPEIVVLLHGFPTSSYDWYKIWEGLTLRFHRVIALDFLGFGFSDKPRPHHYSIFEQASIVEALLRHLGLQNRRINLLSHDYGDIVAQELLYRYKQNRSGRLTIKSLCLSNGGIFPETHRPLLLQKLLKDGGVLSPILTRLMNFFDSLLQYINQRKKFRRRWVGALASVTIPIHFIYGPLDPVNPYPEFLELYRKTLPRSTVSILDDHISHYPQLEDPMGFLNAYMGFINSF

SEQ ID NO: 852319 - protein, 401 aa, Homo sapiens
AAATSTPRHLLCGSCASQAQCRSARRSGCSCPARRRPARAVGCGLRPRCWPALHGCGLCGARCSATLRRAAWDNAAMVRRDRLRRMREWWVQVGLLAVPLLAAYLHIPPPQLSPALHSWKSSGKFFTYKGLRIFYQDSVGVVGSPEIVVLLHGFPTSSYDWYKIWEGLTLRFHRVIALDFLGFGFSDKPASIVEALLRHLGLQNRRINLLSHDYGDIVAQELLYRYKQNRSGRLTIKSLCLSNGGIFPETHRPLLLQKLLKDGGVLSPILTRLMNFFVFSRGLTPVFGPYTRPSESELWDMWAGIRNNDGNLVIDSLLQYINQRKKFRRRWVGALASVTIPIHFIYGPLDPVNPYPEFLELYRKTLPRSTVSILDDHISHYPQLEDPMGFLNAYMGFINSF

SEQ ID NO: 852320 - protein, 411 aa, Homo sapiens; identical to SEQ ID NO: 852304

SEQ ID NO: 852321 - protein, 289 aa, Homo sapiens
MREWWVQVGLLAVPLLAAYLHIPPPQLSPALHSWKSSGKFFTYKGLRIFYQDSVGVVGSPEIVVLLHGFPTSSYDWYKIWEGLTLRFHRVIALDFLGFGFSDKPRPHHYSIFEQASIVEALLRHLGLQNRRINLLSHDYGDIVAQELLYRYKQNRSGRLTIKSLCLSNGGIFPETHRPLLLQKLLKDGGVLSPILTRLMNFFDSLLQYINQRKKFRRRWVGALASVTIPIHFIYGPLDPVNPYPEFLELYRKTLPRSTVSILDDHISHYPQLEDPMGFLNAYMGFINSF

SEQ ID NO: 852322 - protein, 364 aa, Homo sapiens
AAATSTPRHLLCGSCASQAQCRSARRSGCSCPARRRPARAVGCGLRPRCWPALHGCGLCGARCSATLRRAAWDNAAMVRRDRLRRMREWWVQVGLLAVPLLAAYLHIPPPQLSPALHSWKSSGKFFTYKGLRIFYQDSVGVVGSPEIVVLLHGFPTSSYDWYKIWEGLTLRFHRVIALDFLGFGFSDKPASIVEALLRHLGLQNRRINLLSHDYGDIVAQELLYRYKQNRSGRLTIKSLCLSNGGIFPETHRPLLLQKLLKDGGVLSPILTRLMNFFDSLLQYINQRKKFRRRWVGALASVTIPIHFIYGPLDPVNPYPEFLELYRKTLPRSTVSILDDHISHYPQLEDPMGFLNAYMGFINSF

SEQ ID NO: 852323 - protein, 261 aa, Homo sapiens
AAATSTPRHLLCGSCASQAQCRSARRSGCSCPARRRPARAVGCGLRPRCWPALHGCGLCGARCSATLRRAAWDNAAMVRRDRLRRMREWWVQVGLLAVPLLAAYLHIPPPQLSPALHSWKSSGKFFTYKGLRIFYQDSVGVVGSPEIVVLLHGFPTSSYDWYKIWEGLTLRFHRVIALDFLGFGFSDKPRPHHYSIFEQASIVEALLRHLGLQNRRINLLSHDYGDIVAQELLYRYKQNRSGRLTIKSLCLSNGGNCLGGR

SEQ ID NO: 852324 - protein, 2432 aa, Homo sapiens
MKPQSLQLVLEEQVLALQQQMAENQAASWRKLKNSQEAQQRQATLVRKLQAKVLQYRSWCQELEKRLEATGGPIPQRWENVEEPNLDELLVRLEEEQQRCESLAEVNTQLRLHMEKADVVNKALREDVEKLTVDWSRARDELMRKESQWQMEQEFFKGYLKGEHGRLLSLWREVVTFRRHFLEMKSATDRDLMELKAEHVRLSGSLLTCCLRLTVGAQSREPNGSGRMDGREPAQLLLLLAKTQELEKEAHERSQELIQLKSQGDLEKAELQDRVTELSALLTQSQKQNEDYEKMIKALRETVEILETNHTELMEHEASLSRNAQEEKLSLQQVIKDITQVMVEEGDNIAQGSGHENSLELDSSIFSQFDYQDADKALTLVRSVLTRRRQAVQDLRQQLAGCQEAVNLLQQQHDQWEEEGKALRQRLQKLTGERDTLAGQTVDLQGEVDSLSKERELLQKAREELRQQLEVLEQEAWRLRRVNVELQLQGDSAQGQKEEQQEELHLAVRERERLQEMLMGLEAKQSESLSELITLREALESSHLEGELLRQEQTEVTAALARAEQSIAELSSSENTLKTEVADLRAAAVKLSALNEALALDKVGLNQQLLQLEEENQSVCSRMEAAEQARNALQVDLAEAEKRREALWEKNTHLEAQLQKAEEAGAELQADLRDIQEEKEEIQKKLSESRHQQEAATTQLEQLHQEAKRQEEVLARAVQEKEALVREKAALEVRLQAVERDRQDLAEQLQGLSSAKELLESSLFEAQQQNSVIEVTKGQLEVQIQTVTQAKEVIQGEVRCLKLELDTERSQAEQERDAAARQLAQAEQEGKTALEQQKAAHEKEVNQLREKWEKERSWHQQELAKALESLEREKMELEMRLKEQQTEMEAIQAQREEERTQAESALCQMQLETEKERVSLLETLLQTQKELADASQQLERLRQDMKVQKLKEQETTGILQTQLQEAQRELKEAARQHRDDLAALQEESSSLLQDKMDLQKQVEDLKSQLVAQDDSQRLVEQEVQEKLRETQEYNRIQKELEREKASLTLSLMEKEQRLLVLQEADSIRQQELSALRQDMQEAQGEQKELSAQMELLRQEVKEKEADFLAQEAQLLEELEASHITEQQLRASLWAQEAKAAQLQLRLRSTESQLEALAAEQQPGNQAQAQAQLASLYSALQQALGSVCESRPELSGGGDSAPSVWGLEPDQNGARSLFKRGPLLTALSAEAVASALHKLHQDLWKTQQTRDVLRDQVQKLEERLTDTEAEKSQVHTELQDLQRQLSQNQEEKSKWEGKQNSLESELMELHETMASLQSRLRRAELQRMEAQGERELLQAAKENLTAQVEHLQAAVVEARAQASAAGILEEDLRTARSALKLKNEEVESERERAQALQEQGELKVAQGKALQENLALLTQTLAEREEEVETLRGQIQELEKQREMQKAALELLSLDLKKRNQEVDLQQEQIQELEKCRSVLEHLPMAVQEREQKLTVQREQIRELEKDRETQRNVLEHQLLELEKKDQMIESQRGQVQDLKKQLVTLECLALELEENHHKMECQQKLIKELEGQRETQRVALTHLTLDLEERSQELQAQSSQIHDLESHSTVLARELQERDQEVKSQREQIEELQRQKEHLTQDLERRDQELMLQKERIQVLEDQRTRQTKILEEDLEQIKLSLRERGRELTTQRQLMQERAEEGKGPSKAQRGSLEHMKLILRDKEKEVECQQEHIHELQELKDQLEQQLQGLHRKVGETSLLLSQREQEIVVLQQQLQEAREQGELKEQSLQSQLDEAQRALAQRDQELEALQQEQQQAQGQEERVKEKADALQGALEQAHMTLKERHGELQDHKEQARRLEEELAVEGRRVQALEEVLGDLRAESREQEKALLALQQQCAEQAQEHEVETRALQDSWLQAQAVLKERDQELEALRAESQSSRHQEEAARARAEALQEALGKAHAALQGKEQHLLEQAELSRSLEASTATLQASLDACQAHSRQLEEALRIQEGEIQDQDLRYQEDVQQLQQALAQRDEELRHQQEREQLLEKSLAQRVQENMIQEKQNLGQEREEEEIRGLHQSVRELQLTLAQKEQEILELRETQQRNNLEALPHSHKTSPMEEQSLKLDSLEPRLQRELERLQAALRQTEAREIEWREKAQDLALSLAQTKASVSSLQEVAMFLQASVLERDSEQQRLQDELELTRRALEKERLHSPGATSTAELGSRGEQGVQLGEVSGVEAEPSPDGMEKQSWRQRLEHLQQAVARLEIDRSRLQRHNVQLRSTLEQVERERRKLKREAMRAAQAGSLEISKATASSPTQQDGRGQKNSDAKCVAELQKEVVLLQAQLTLERKQKQDYITRSAQTSRELAGLHHSLSHSLLAVAQAPEATVLEAETRRLDESLTQSLTSPGPVLLHPSPSTTQAASR

SEQ ID NO: 852325 - protein, 2432 aa, Homo sapiens; identical to SEQ ID NO: 852324

SEQ ID NO: 852326 - protein, 2138 aa, Homo sapiens
MIKALRETVEILETNHTELMEHEASLSRNAQEEKLSLQQVIKDITQVMVEEGDNIAQGSGHENSLELDSSIFSQFDYQDADKALTLVRSVLTRRRQAVQDLRQQLAGCQEAVNLLQQQHDQWEEEGKALRQRLQKLTGERDTLAGQTVDLQGEVDSLSKERELLQKAREELRQQLEVLEQEAWRLRRVNVELQLQGDSAQGQKEEQQEELHLAVRERERLQEMLMGLEAKQSESLSELITLREALESSHLEGELLRQEQTEVTAALARAEQSIAELSSSENTLKTEVADLRAAAVKLSALNEALALDKVGLNQQLLQLEEENQSVCSRMEAAEQARNALQVDLAEAEKRREALWEKNTHLEAQLQKAEEAGAELQADLRDIQEEKEEIQKKLSESRHQQEAATTQLEQLHQEAKRQEEVLARAVQEKEALVREKAALEVRLQAVERDRQDLAEQLQGLSSAKELLESSLFEAQQQNSVIEVTKGQLEVQIQTVTQAKEVIQGEVRCLKLELDTERSQAEQERDAAARQLAQAEQEGKTALEQQKAAHEKEVNQLREKWEKERSWHQQELAKALESLEREKMELEMRLKEQQTEMEAIQAQREEERTQAESALCQMQLETEKERVSLLETLLQTQKELADASQQLERLRQDMKVQKLKEQETTGILQTQLQEAQRELKEAARQHRDDLAALQEESSSLLQDKMDLQKQVEDLKSQLVAQDDSQRLVEQEVQEKLRETQEYNRIQKELEREKASLTLSLMEKEQRLLVLQEADSIRQQELSALRQDMQEAQGEQKELSAQMELLRQEVKEKEADFLAQEAQLLEELEASHITEQQLRASLWAQEAKAAQLQLRLRSTESQLEALAAEQQPGNQAQAQAQLASLYSALQQALGSVCESRPELSGGGDSAPSVWGLEPDQNGARSLFKRGPLLTALSAEAVASALHKLHQDLWKTQQTRDVLRDQVQKLEERLTDTEAEKSQVHTELQDLQRQLSQNQEEKSKWEGKQNSLESELMELHETMASLQSRLRRAELQRMEAQGERELLQAAKENLTAQVEHLQAAVVEARAQASAAGILEEDLRTARSALKLKNEEVESERERAQALQEQGELKVAQGKALQENLALLTQTLAEREEEVETLRGQIQELEKQREMQKAALELLSLDLKKRNQEVDLQQEQIQELEKCRSVLEHLPMAVQEREQKLTVQREQIRELEKDRETQRNVLEHQLLELEKKDQMIESQRGQVQDLKKQLVTLECLALELEENHHKMECQQKLIKELEGQRETQRVALTHLTLDLEERSQELQAQSSQIHDLESHSTVLARELQERDQEVKSQREQIEELQRQKEHLTQDLERRDQELMLQKERIQVLEDQRTRQTKILEEDLEQIKLSLRERGRELTTQRQLMQERAEEGKGPSKAQRGSLEHMKLILRDKEKEVECQQEHIHELQELKDQLEQQLQGLHRKVGETSLLLSQREQEIVVLQQQLQEAREQGELKEQSLQSQLDEAQRALAQRDQELEALQQEQQQAQGQEERVKEKADALQGALEQAHMTLKERHGELQDHKEQARRLEEELAVEGRRVQALEEVLGDLRAESREQEKALLALQQQCAEQAQEHEVETRALQDSWLQAQAVLKERDQELEALRAESQSSRHQEEAARARAEALQEALGKAHAALQGKEQHLLEQAELSRSLEASTATLQASLDACQAHSRQLEEALRIQEGEIQDQDLRYQEDVQQLQQALAQRDEELRHQQEREQLLEKSLAQRVQENMIQEKQNLGQEREEEEIRGLHQSVRELQLTLAQKEQEILELRETQQRNNLEALPHSHKTSPMEEQSLKLDSLEPRLQRELERLQAALRQTEAREIEWREKAQDLALSLAQTKASVSSLQEVAMFLQASVLERDSEQQRLQDELELTRRALEKERLHSPGATSTAELGSRGEQGVQLGEVSGVEAEPSPDGMEKQSWRQRLEHLQQAVARLEIDRSRLQRHNVQLRSTLEQVERERRKLKREAMRAAQAGSLEISKATASSPTQQDGRGQKNSDAKCVAELQKEVVLLQAQLTLERKQKQDYITRSAQTSRELAGLHHSLSHSLLAVAQAPEATVLEAETRRLDESLTQSLTSPGPVLLHPSPSTTQAASR

SEQ ID NO: 852327 - protein, 1810 aa, Homo sapiens
MEAAEQARNALQVDLAEAEKRREALWEKNTHLEAQLQKAEEAGAELQADLRDIQEEKEEIQKKLSESRHQQEAATTQLEQLHQEAKRQEEVLARAVQEKEALVREKAALEVRLQAVERDRQDLAEQLQGLSSAKELLESSLFEAQQQNSVIEVTKGQLEVQIQTVTQAKEVIQGEVRCLKLELDTERSQAEQERDAAARQLAQAEQEGKTALEQQKAAHEKEVNQLREKWEKERSWHQQELAKALESLEREKMELEMRLKEQQTEMEAIQAQREEERTQAESALCQMQLETEKERVSLLETLLQTQKELADASQQLERLRQDMKVQKLKEQETTGILQTQLQEAQRELKEAARQHRDDLAALQEESSSLLQDKMDLQKQVEDLKSQLVAQDDSQRLVEQEVQEKLRETQEYNRIQKELEREKASLTLSLMEKEQRLLVLQEADSIRQQELSALRQDMQEAQGEQKELSAQMELLRQEVKEKEADFLAQEAQLLEELEASHITEQQLRASLWAQEAKAAQLQLRLRSTESQLEALAAEQQPGNQAQAQAQLASLYSALQQALGSVCESRPELSGGGDSAPSVWGLEPDQNGARSLFKRGPLLTALSAEAVASALHKLHQDLWKTQQTRDVLRDQVQKLEERLTDTEAEKSQVHTELQDLQRQLSQNQEEKSKWEGKQNSLESELMELHETMASLQSRLRRAELQRMEAQGERELLQAAKENLTAQVEHLQAAVVEARAQASAAGILEEDLRTARSALKLKNEEVESERERAQALQEQGELKVAQGKALQENLALLTQTLAEREEEVETLRGQIQELEKQREMQKAALELLSLDLKKRNQEVDLQQEQIQELEKCRSVLEHLPMAVQEREQKLTVQREQIRELEKDRETQRNVLEHQLLELEKKDQMIESQRGQVQDLKKQLVTLECLALELEENHHKMECQQKLIKELEGQRETQRVALTHLTLDLEERSQELQAQSSQIHDLESHSTVLARELQERDQEVKSQREQIEELQRQKEHLTQDLERRDQELMLQKERIQVLEDQRTRQTKILEEDLEQIKLSLRERGRELTTQRQLMQERAEEGKGPSKAQRGSLEHMKLILRDKEKEVECQQEHIHELQELKDQLEQQLQGLHRKVGETSLLLSQREQEIVVLQQQLQEAREQGELKEQSLQSQLDEAQRALAQRDQELEALQQEQQQAQGQEERVKEKADALQGALEQAHMTLKERHGELQDHKEQARRLEEELAVEGRRVQALEEVLGDLRAESREQEKALLALQQQCAEQAQEHEVETRALQDSWLQAQAVLKERDQELEALRAESQSSRHQEEAARARAEALQEALGKAHAALQGKEQHLLEQAELSRSLEASTATLQASLDACQAHSRQLEEALRIQEGEIQDQDLRYQEDVQQLQQALAQRDEELRHQQEREQLLEKSLAQRVQENMIQEKQNLGQEREEEEIRGLHQSVRELQLTLAQKEQEILELRETQQRNNLEALPHSHKTSPMEEQSLKLDSLEPRLQRELERLQAALRQTEAREIEWREKAQDLALSLAQTKASVSSLQEVAMFLQASVLERDSEQQRLQDELELTRRALEKERLHSPGATSTAELGSRGEQGVQLGEVSGVEAEPSPDGMEKQSWRQRLEHLQQAVARLEIDRSRLQRHNVQLRSTLEQVERERRKLKREAMRAAQAGSLEISKATASSPTQQDGRGQKNSDAKCVAELQKEVVLLQAQLTLERKQKQDYITRSAQTSRELAGLHHSLSHSLLAVAQAPEATVLEAETRRLDESLTQSLTSPGPVLLHPSPSTTQAASR

SEQ ID NO: 852328 - protein, 1437 aa, Homo sapiens
MPLIFQVEDLKSQLVAQDDSQRLVEQEVQEKLRETQEYNRIQKELEREKASLTLSLMEKEQRLLVLQEADSIRQQELSALRQDMQEAQGEQKELSAQMELLRQEVKEKEADFLAQEAQLLEELEASHITEQQLRASLWAQEAKAAQLQLRLRSTESQLEALAAEQQPGNQAQAQAQLASLYSALQQALGSVCESRPELSGGGDSAPSVWGLEPDQNGARSLFKRGPLLTALSAEAVASALHKLHQDLWKTQQTRDVLRDQVQKLEERLTDTEAEKSQVHTELQDLQRQLSQNQEEKSKWEGKQNSLESELMELHETMASLQSRLRRAELQRMEAQGERELLQAAKENLTAQVEHLQAAVVEARAQASAAGILEEDLRTARSALKLKNEEVESERERAQALQEQGELKVAQGKALQENLALLTQTLAEREEEVETLRGQIQELEKQREMQKAALELLSLDLKKRNQEVDLQQEQIQELEKCRSVLEHLPMAVQEREQKLTVQREQIRELEKDRETQRNVLEHQLLELEKKDQMIESQRGQVQDLKKQLVTLECLALELEENHHKMECQQKLIKELEGQRETQRVALTHLTLDLEERSQELQAQSSQIHDLESHSTVLARELQERDQEVKSQREQIEELQRQKEHLTQDLERRDQELMLQKERIQVLEDQRTRQTKILEEDLEQIKLSLRERGRELTTQRQLMQERAEEGKGPSKAQRGSLEHMKLILRDKEKEVECQQEHIHELQELKDQLEQQLQGLHRKVGETSLLLSQREQEIVVLQQQLQEAREQGELKEQSLQSQLDEAQRALAQRDQELEALQQEQQQAQGQEERVKEKADALQGALEQAHMTLKERHGELQDHKEQARRLEEELAVEGRRVQALEEVLGDLRAESREQEKALLALQQQCAEQAQEHEVETRALQDSWLQAQAVLKERDQELEALRAESQSSRHQEEAARARAEALQEALGKAHAALQGKEQHLLEQAELSRSLEASTATLQASLDACQAHSRQLEEALRIQEGEIQDQDLRYQEDVQQLQQALAQRDEELRHQQEREQLLEKSLAQRVQENMIQEKQNLGQEREEEEIRGLHQSVRELQLTLAQKEQEILELRETQQRNNLEALPHSHKTSPMEEQSLKLDSLEPRLQRELERLQAALRQTEAREIEWREKAQDLALSLAQTKASVSSLQEVAMFLQASVLERDSEQQRLQDELELTRRALEKERLHSPGATSTAELGSRGEQGVQLGEVSGVEAEPSPDGMEKQSWRQRLEHLQQAVARLEIDRSRLQRHNVQLRSTLEQVERERRKLKREAMRAAQAGSLEISKATASSPTQQDGRGQKNSDAKCVAELQKEVVLLQAQLTLERKQKQDYITRSAQTSRELAGLHHSLSHSLLAVAQAPEATVLEAETRRLDESLTQSLTSPGPVLLHPSPSTTQAASR

SEQ ID NO: 852329 - protein, 2360 aa, Homo sapiens
MKPQSLQLVLEEQVLALQQQMAENQAASWRKLKNSQEAQQRQATLVRKLQAKVLQYRSWCQELEKRLEATGGPIPQRWENVEEPNLDELLVRLEEEQQRCESLAEVNTQLRLHMEKADVVNKALREDVEKLTVDWSRARDELMRKESQWQMEQEFFKGYLKGEHGRLLSLWREVVTFRRHFLEMKSATDRDLMELKAEHVRLSGSLLTCCLRLTVGAQSREPNGSGRMDGREPAQLLLLLAKTQELEKEAHERSQELIQLKSQGDLEKAELQDRVTELSALLTQSQKQNEDYEKMIKALRETVEILETNHTELMEHEASLSRNAQEEKLSLQQVIKDITQVMVEEGDNIAQGSGHENSLELDSSIFSQFDYQDADKALTLVRSVLTRRRQAVQDLRQQLAGCQEAVNLLQQQHDQWEEEGKALRQRLQKLTGERDTLAGQTVDLQGEVDSLSKERELLQKAREELRQQLEVLEQEAWRLRRVNVELQLQGDSAQGQKEEQQEELHLAVRERERLQEMLMGLEAKQSESLSELITLREALESSHLEGELLRQEQTEVTAALARAEQSIAELSSSENTLKTEVADLRAAAVKLSALNEALALDKVGLNQQLLQLEEENQSVCSRMEAAEQARNALQVDLAEAEKRREALWEKNTHLEAQLQKAEEAGAELQADLRDIQEEKEEIQKKLSESRHQQEAATTQLEQLHQEAKRQEEVLARAVQEKEALVREKAALEVRLQAVERDRQDLAEQLQGLSSAKELLESSLFEAQQQNSVIEVTKGQLEVQIQTVTQAKEVIQGEVRCLKLELDTERSQAEQERDAAARQLAQAEQEGKTALEQQKAAHEKEVNQLREKWEKERSWHQQELAKALESLEREKMELEMRLKEQQTEMEAIQAQREEERTQAESALCQMQLETEKERVSLLETLLQTQKELADASQQLERLRQDMKVQKLKEQETTGILQTQLQEAQRELKEAARQHRDDLAALQEESSSLLQDKMDLQKQVEDLKSQLVAQDDSQRLVEQEVQEKLRETQEYNRIQKELEREKASLTLSLMEKEQRLLVLQEADSIRQQELSALRQDMQEAQGEQKELSAQMELLRQEVKEKEADFLAQEAQLLEELEASHITEQQLRASLWAQEAKAAQLQLRLRSTESQLEALAAEQQPGNQAQAQAQLASLYSALQQALGSVCESRPELSGGGDSAPSVWGLEPDQNGARSLFKRGPLLTALSAEAVASALHKLHQDLWKTQQTRDVLRDQVQKLEERLTDTEAEKSQVHTELQDLQRQLSQNQEEKSKWEGKQNSLESELMELHETMASLQSRLRRAELQRMEAQGERELLQAAKENLTAQVEHLQAAVVEARAQASAAGILEEDLRTARSALKLKNEEVESERERAQALQEQGELKVAQGKALQENLALLTQTLAEREEEVETLRGQIQELEKQREMQKAALELLSLDLKKRNQEVDLQQEQIQELEKCRSVLEHLPMAVQEREQKLTVQREQIRELEKDRETQRNVLEHQLLELEKKDQMIESQRGQVQDLKKQLVTLECLALELEENHHKMECQQKLIKELEGQRETQRVALTHLTLDLEERSQELQAQSSQIHDLESHSTVLARELQERDQEVKSQREQIEELQRQKEHLTQDLERRDQELMLQKERIQVLEDQRTRQTKILEEDLEQIKLSLRERGRELTTQRQLMQERAEEGKGPSKAQRGSLEHMKLILRDKEKEVECQQEHIHELQELKDQLEQQLQGLHRKVGETSLLLSQREQEIVVLQQQLQEAREQGELKEQSLQSQLDEAQRALAQRDQELEALQQEQQQAQGQEERVKEKADALQGALEQAHMTLKERHGELQDHKEQARRLEEELAVEGRRVQALEEVLGDLRAESREQEKALLALQQQCAEQAQEHEVETRALQDSWLQAQAVLKERDQELEALRAESQSSRHQEEAARARAEALQEALGKAHAALQGKEQHLLEQAELSRSLEASTATLQASLDACQAHSRQLEEALRIQEGEIQDQDLRYQEDVQQLQQALAQRDEELRHQQEREQLLEKSLAQRVQENMIQEKQNLGQEREEEEIRGLHQSVRELQLTLAQKEQEILELRETQQRNNLEALPHSHKTSPMEEQSLKLDSLEPRLQRELERLQAALRQTEAREIEWREKAQDLALSLAQTKASVSSLQEVAMFLQASVLERDSEQQRLQDELELTRRALEKERLHSPGATSTAELGSRGEQGVQLGEVSGVEAEPSPDGMEKQSWRQRLEHLQQAVARLEIDRSRLQRHNVQLRSTLEQVERERRKLKREAMRAAQAGSLEISKATASSPTQQDGRGQKNSDAKCVAELQKEGRAHGKWHADSDTGH

SEQ ID NO: 852330 - protein, 2315 aa, Homo sapiens
MKPQSLQLVLEEQVLALQQQMAENQAASWRKLKNSQEAQQRQATLVRKLQAKVLQYRSWCQELEKRLEATGGPIPQRWENVEEPNLDELLVRLEEEQQRCESLAEVNTQLRLHMEKADVVNKALREDVEKLTVDWSRARDELMRKESQWQMEQEFFKGYLKGEHGRLLSLWREVVTFRRHFLEMKSATDRDLMELKAEHVRLSGSLLTCCLRLTVGAQSREPNGSGRMDGREPAQLLLLLAKTQELEKEAHERSQELIQLKSQGDLEKAELQDRVTELSALLTQSQKQNEDYEKMIKALRETVEILETNHTELMEHEASLSRNAQEEKLSLQQVIKDITQVMVEEGDNIAQGSGHENSLELDSSIFSQFDYQDADKALTLVRSVLTRRRQAVQDLRQQLAGCQEAVNLLQQQHDQWEEEGKALRQRLQKLTGERDTLAGQTVDLQGEVDSLSKERELLQKAREELRQQLEVLEQEAWRLRRVNVELQLQGDSAQGQKEEQQEELHLAVRERERLQEMLMGLEAKQSESLSELITLREALESSHLEGELLRQEQTEVTAALARAEQSIAELSSSENTLKTEVADLRAAAVKLSALNEALALDKVGLNQQLLQLEEENQSVCSRMEAAEQARNALQVDLAEAEKRREALWEKNTHLEAQLQKAEEAGAELQADLRDIQEEKEEIQKKLSESRHQQEAATTQLEQLHQEAKRQEEVLARAVQEKEALVREKAALEVRLQAVERDRQDLAEQLQGLSSAKELLESSLFEAQQQNSVIEVTKGQLEVQIQTVTQAKEVIQGEVRCLKLELDTERSQAEQERDAAARQLAQAEQEGKTALEQQKAAHEKEVNQLREKWEKERSWHQQELAKALESLEREKMELEMRLKEQQTEMEAIQAQREEERTQAESALCQMQLETEKERVSLLETLLQTQKELADASQQLERLRQDMKVQKLKEQETTGILQTQLQEAQRELKEAARQHRDDLAALQEESSSLLQDKMDLQKQVEDLKSQLVAQDDSQRLVEQEVQEKLRETQEYNRIQKELEREKASLTLSLMEKEQRLLVLQEADSIRQQELSALRQDMQEAQGEQKELSAQMELLRQEVKEKEADFLAQEAQLLEELEASHITEQQLRASLWAQEAKAAQLQLRLRSTESQLEALAAEQQPGNQAQAQAQLASLYSALQQALGSVCESRPELSGGGDSAPSVWGLEPDQNGARSLFKRGPLLTALSAEAVASALHKLHQDLWKTQQTRDVLRDQVQKLEERLTDTEAEKSQVHTELQDLQRQLSQNQEEKSKWEGKQNSLESELMELHETMASLQSRLRRAELQRMEAQGERELLQAAKENLTAQVEHLQAAVVEARAQASAAGILEEDLRTARSALKLKNEEVESERERAQALQEQGELKVAQGKALQENLALLTQTLAEREEEVETLRGQIQELEKQREMQKAALELLSLDLKKRNQEVDLQQEQIQELEKCRSVLEHLPMAVQEREQKLTVQREQIRELEKDRETQRNVLEHQLLELEKKDQMIESQRGQVQDLKKQLVTLECLALELEENHHKMECQQKLIKELEGQRETQRVALTHLTLDLEERSQELQAQSSQIHDLESHSTVLARELQERDQEVKSQREQIEELQRQKEHLTQDLERRDQELMLQKERIQVLEDQRTRQTKILEEDLEQIKLSLRERGRELTTQRQLMQERAEEGKGPSKAQRGSLEHMKLILRDKEKEVECQQEHIHELQELKDQLEQQLQGLHRKVGETSLLLSQREQEIVVLQQQLQEAREQGELKEQSLQSQLDEAQRALAQRDQELEALQQEQQQAQGQEERVKEKADALQGALEQAHMTLKERHGELQDHKEQARRLEEELAVEGRRVQALEEVLGDLRAESREQEKALLALQQQCAEQAQEHEVETRALQDSWLQAQAVLKERDQELEALRAESQSSRHQEEAARARAEALQEALGKAHAALQGKEQHLLEQAELSRSLEASTATLQASLDACQAHSRQLEEALRIQEGEIQDQDLRYQEDVQQLQQALAQRDEELRHQQEREQLLEKSLAQRVQENMIQEKQNLGQEREEEEIRGLHQSVRELQLTLAQKEQEILELRETQQRNNLEALPHSHKTSPMEEQSLKLDSLEPRLQRELERLQAALRQTEAREIEWREKAQDLALSLAQTKASVSSLQEVAMFLQASVLERDSEQQRLQDELELTRRALEKERLHSPGATSTAELGSRGEQGVQLGEVSGVEAEPSPDGMEKQARSTQTEDCVMGHGPSAHLQVCQRKSLALLGTQEPQVGGCSQEEEVNLQPWGGPQLTWE

SEQ ID NO: 852331 - protein, 316 aa, Homo sapiens
MKPQSLQLVLEEQVLALQQQMAENQAASWRKLKNSQEAQQRQATLVRKLQAKVLQYRSWCQELEKRLEATGGPIPQRWENVEEPNLDELLVRLEEEQQRCESLAEVNTQLRLHMEKADVVNKALREDVEKLTVDWSRARDELMRKESQWQMEQEFFKGYLKGEHGRLLSLWREVVTFRRHFLEMKSATDRDLMELKAEHVRLSGSLLTCCLRLTVGAQSREPNGSGRMDGREPAQLLLLLAKTQELEKEAHERSQELIQLKSQGDLEKAELQDRVTELSALLTQSQKQNEDYEKMIKALRETVEILKKLRSMLLKL

SEQ ID NO: 852332 - protein, 274 aa, Homo sapiens [sequence omitted]

SEQ ID NO: 852333 - protein, 68 aa, Homo sapiens
MKVCRMTQLCRRDPLAALSEARESQTEHLGQREGLKALSKCQASWMHGLCGVQGYIQKQWQVLSIHSG

SEQ ID NO: 852334 - protein, 2383 aa, Homo sapiens
MKPQSLQLVLEEQVLALQQQMAENQAASWRKLKNSQEAQQRQATLVRKLQAKVLQYRSWCQELEKRLEATGGPIPQRWENVEEPNLDELLVRLEEEQQRCESLAEVNTQLRLHMEKADVVNKALREDVEKLTVDWSRARDELMRKESQWQMEQEFFKGYLKGEHGRLLSLWREVVTFRRHFLEMKSATDRDLMELKAEHVRLSGSLLTCCLRLTVGAQSREPNGSGRMDGREPAQLLLLLAKTQELEKEAHERSQELIQLKSQGDLEKAELQDRVTELSALLTQSQKQNEDYEKMIKALRETVEILETNHTELMEHEASLSRNAQEEKLSLQQVIKDITQVMVEEGDNIAQGSGHENSLELDSSIFSQFDYQDADKALTLVRSVLTRRRQAVQDLRQQLAGCQEAVNLLQQQHDQWEEEGKALRQRLQKLTGERDTLAGQTVDLQGEVDSLSKERELLQKAREELRQQLEVLEQEAWRLRRVNVELQLQGDSAQGQKEEQQEELHLAVRERERLQEMLMGLEAKQSESLSELITLREALESSHLEGELLRQEQTEVTAALARAEQSIAELSSSENTLKTEVADLRAAAVKLSALNEALALDKVGLNQQLLQLEEENQSVCSRMEAAEQARNALQVDLAEAEKRREALWEKNTHLEAQLQKAEEAGAELQADLRDIQEEKEEIQKKLSESRHQQEAATTQLEQLHQEAKRQEEVLARAVQEKEALVREKAALEVRLQAVERDRQDLAEQLQGLSSAKELLESSLFEAQQQNSVIEVTKGQLEVQIQTVTQAKEVIQGEVRCLKLELDTERSQAEQERDAAARQLAQAEQEGKTALEQQKAAHEKEVNQLREKWEKERSWHQQELAKALESLEREKMELEMRLKEQQTEMEAIQAQREEERTQAESALCQMQLETEKERVSLLETLLQTQKELADASQQLERLRQDMKVQKLKEQETTGILQTQLQEAQRELKEAARQHRDDLAALQEESSSLLQDKMDLQKQVEDLKSQLVAQDDSQRLVEQEVQEKLRETQEYNRIQKELEREKASLTLSLMEKEQRLLVLQEADSIRQQELSALRQDMQEAQGEQKELSAQMELLRQEVKEKEADFLAQEAQLLEELEASHITEQQLRASLWAQEAKAAQLQLRLRSTESQLEALAAEQQPGNQAQAQAQLASLYSALQQALGSVCESRPELSGGGDSAPSVWGLEPDQNGARSLFKRGPLLTALSAEAVASALHKLHQDLWKTQQTRDVLRDQVQKLEERLTDTEAEKSQVHTELQDLQRQLSQNQEEKSKWEGKQNSLESELMELHETMASLQSRLRRAELQRMEAQGERELLQAAKENLTAQVEHLQAAVVEARAQASAAGILEEDLRTARSALKLKNEEVESERERAQALQEQGELKVAQGKALQENLALLTQTLAEREEEVETLRGQIQELEKQREMQKAALELLSLDLKKRNQEVDLQQEQIQELEKCRSVLEHLPMAVQEREQKLTVQREQIRELEKDRETQRNVLEHQLLELEKKDQMIESQRGQVQDLKKQLVTLECLALELEENHHKMECQQKLIKELEGQRETQRVALTHLTLDLEERSQELQAQSSQIHDLESHSTVLARELQERDQEVKSQREQIEELQRQKEHLTQDLERRDQELMLQKERIQVLEDQRTRQTKILEEDLEQIKLSLRERGRELTTQRQLMQERAEEGKGPSKAQRGSLEHMKLILRDKEKEVECQQEHIHELQELKDQLEQQLQGLHRKVGETSLLLSQREQEIVVLQQQLQEAREQGELKEQSLQSQLDEAQRALAQRDQELEALQQEQQQAQGQEERVKEKADALQGALEQAHMTLKERHGELQDHKEQARRLEEELAVEGRRVQALEEVLGDLRAESREQEKALLALQQQCAEQAQEHEVETRALQDSWLQAQAVLKERDQELEALRAESQSSRHQEEAARARAEALQEALGKAHAALQGKEQHLLEQAELSRSLEASTATLQASLDACQAHSRQLEEALRIQEGEIQDQDLRYQEDVQQLQQALAQRDEELRHQQEREQLLEKSLAQRVQENMIQEKQNLGQEREEEEIRGLHQSSPGCSGSWSGYRQPWRQTEAREIEWREKAQDLALSLAQTKASVSSLQEVAMFLQASVLERDSEQQRLQDELELTRRALEKERLHSPGATSTAELGSRGEQGVQLGEVSGVEAEPSPDGMEKQSWRQRLEHLQQAVARLEIDRSRLQRHNVQLRSTLEQVERERRKLKREAMRAAQAGSLEISKATASSPTQQDGRGQKNSDAKCVAELQKEVVLLQAQLTLERKQKQDYITRSAQTSRELAGLHHSLSHSLLAVAQAPEATVLEAETRRLDESLTQSLTSPGPVLLHPSPSTTQAASR

SEQ ID NO: 852335 - protein, 2348 aa, Homo sapiens
MKPQSLQLVLEEQVLALQQQMAENQAASWRKLKNSQEAQQRQATLVRKLQAKVLQYRSWCQELEKRLEATGGPIPQRWENVEEPNLDELLVRLEEEQQRCESLAEVNTQLRLHMEKADVVNKALREDVEKLTVDWSRARDELMRKESQWQMEQEFFKGYLKGEHGRLLSLWREVVTFRRHFLEMKSATDRDLMELKAEHVRLSGSLLTCCLRLTVGAQSREPNGSGRMDGREPAQLLLLLAKTQELEKEAHERSQELIQLKSQGDLEKAELQDRVTELSALLTQSQKQNEDYEKMIKALRETVEILETNHTELMEHEASLSRNAQEEKLSLQQVIKDITQVMVEEGDNIAQGSGHENSLELDSSIFSQFDYQDADKALTLVRSVLTRRRQAVQDLRQQLAGCQEAVNLLQQQHDQWEEEGKALRQRLQKLTGERDTLAGQTVDLQGEVDSLSKERELLQKAREELRQQLEVLEQEAWRLRRVNVELQLQGDSAQGQKEEQQEELHLAVRERERLQEMLMGLEAKQSESLSELITLREALESSHLEGELLRQEQTEVTAALARAEQSIAELSSSENTLKTEVADLRAAAVKLSALNEALALDKVGLNQQLLQLEEENQSVCSRMEAAEQARNALQVDLAEAEKRREALWEKNTHLEAQLQKAEEAGAELQADLRDIQEEKEEIQKKLSESRHQQEAATTQLEQLHQEAKRQEEVLARAVQEKEALVREKAALEVRLQAVERDRQDLAEQLQGLSSAKELLESSLFEAQQQNSVIEVTKGQLEVQIQTVTQAKEVIQGEVRCLKLELDTERSQAEQERDAAARQLAQAEQEGKTALEQQKAAHEKEVNQLREKWEKERSWHQQELAKALESLEREKMELEMRLKEQQTEMEAIQAQREEERTQAESALCQMQLETEKERVSLLETLLQTQKELADASQQLERLRQDMKVQKLKEQETTGILQTQLQEAQRELKEAARQHRDDLAALQEESSSLLQDKMDLQKQVEDLKSQLVAQDDSQRLVEQEVQEKLRETQEYNRIQKELEREKASLTLSLMEKEQRLLVLQEADSIRQQELSALRQDMQEAQGEQKELSAQMELLRQEVKEKEADFLAQEAQLLEELEASHITEQQLRASLWAQEAKAAQLQLRLRSTESQLEALAAEQQPGNQAQAQAQLASLYSALQQALGSVCESRPELSGGGDSAPSVWGLEPDQNGARSLFKRGPLLTALSAEAVASALHKLHQDLWKTQQTRDVLRDQVQKLEERLTDTEAEKSQVHTELQDLQRQLSQNQEEKSKWEGKQNSLESELMELHETMASLQSRLRRAELQRMEAQGERELLQAAKENLTAQVEHLQAAVVEARAQASAAGILEEDLRTARSALKLKNEEVESERERAQALQEQGELKVAQGKALQENLALLTQTLAEREEEVETLRGQIQELEKQREMQKAALELLSLDLKKRNQEVDLQQEQIQELEKCRSVLEHLPMAVQEREQKLTVQREQIRELEKDRETQRNVLEHQLLELEKKDQMIESQRGQVQDLKKQLVTLECLALELEENHHKMECQQKLIKELEGQRETQRVALTHLTLDLEERSQELQAQSSQIHDLESHSTVLARELQERDQEVKSQREQIEELQRQKEHLTQDLERRDQELMLQKERIQVLEDQRTRQTKILEEDLEQIKLSLRERGRELTTQRQLMQERAEEGKGPSKAQRGSLEHMKLILRDKEKEVECQQEHIHELQELKDQLEQQLQGLHRKVGETSLLLSQREQEIVVLQQQLQEAREQGELKEQSLQSQLDEAQRALAQRDQELEALQQEQQQAQGQEERVKEKADALQGALEQAHMTLKERHGELQDHKEQARRLEEELAVEGRRVQALEEVLGDLRAESREQEKALLALQQQCAEQAQEHEVETRALQDSWLQAQAVLKERDQELEALRAESQSSRHQEEAARARAEALQEALGKAHAALQGKEQHLLEQAELSRSLEASTATLQASLDACQAHSRQLEEALRIQEGEIQDQDLRYQEDVQQLQQALAQRDEELRHQQEREQLLEKSLAQRVQENMIQEKQNLGQEREEEEIRGLHQSVRELQLTLAQKEQEILELRETQQRNNLEALPHSHKTSPMEEQSLKLDSLEPRLQRELERLQAALRQTEAREIEWREKAQDLALSLAQTKASVSSLQEVAMFLQASVLERDSEQQRLQDELELTRRALEKERLHSPGATSTAELGSRGEQGVQLGEVSGVEAEPSPDGMEKQSWRQRLEHLQQAVARLEIDRSRLQRHNVQLRSTLEQVERERRKLKREAMRAAQAGSLEISKATASSPTQQDGRGQKNSDAKCVAELQKEECS

SEQ ID NO: 852336 - protein, 1645 aa, Homo sapiens
MKPQSLQLVLEEQVLALQQQMAENQAASWRKLKNSQEAQQRQATLVRKLQAKVLQYRSWCQELEKRLEATGGPIPQRWENVEEPNLDELLVRLEEEQQRCESLAEVNTQLRLHMEKADVVNKALREDVEKLTVDWSRARDELMRKESQWQMEQEFFKGYLKGEHGRLLSLWREVVTFRRHFLEMKSATDRDLMELKAEHVRLSGSLLTCCLRLTVGAQSREPNGSGRMDGREPAQLLLLLAKTQELEKEAHERSQELIQLKSQGDLEKAELQDRVTELSALLTQSQKQNEDYEKMIKALRETVEILETNHTELMEHEASLSRNAQEEKLSLQQVIKDITQVMVEEGDNIAQGSGHENSLELDSSIFSQFDYQDADKALTLVRSVLTRRRQAVQDLRQQLAGCQEAVNLLQQQHDQWEEEGKALRQRLQKLTGERDTLAGQTVDLQGEVDSLSKERELLQKAREELRQQLEVLEQEAWRLRRVNVELQLQGDSAQGQKEEQQEELHLAVRERERLQEMLMGLEAKQSESLSELITLREALESSHLEGELLRQEQTEVTAALARAEQSIAELSSSENTLKTEVADLRAAAVKLSALNEALALDKVGLNQQLLQLEEENQSVCSRMEAAEQARNALQVDLAEAEKRREALWEKNTHLEAQLQKAEEAGAELQADLRDIQEEKEEIQKKLSESRHQQEAATTQLEQLHQEAKRQEEVLARAVQEKEALVREKAALEVRLQAVERDRQDLAEQLQGLSSAKELLESSLFEAQQQNSVIEVTKGQLEVQIQTVTQAKEVIQGEVRCLKLELDTERSQAEQERDAAARQLAQAEQEGKTALEQQKAAHEKEVNQLREKWEKERSWHQQELAKALESLEREKMELEMRLKEQQTEMEAIQAQREEERTQAESALCQMQLETEKERVSLLETLLQTQKELADASQQLERLRQDMKVQKLKEQETTGILQTQLQEAQRELKEAARQHRDDLAALQEESSSLLQDKMDLQKQVEDLKSQLVAQDDSQRLVEQEVQEKLRETQEYNRIQKELEREKASLTLSLMEKEQRLLVLQEADSIRQQELSALRQDMQEAQGEQKELSAQMELLRQEVKEKEADFLAQEAQLLEELEASHITEQQLRASLWAQEAKAAQLQLRLRSTESQLEALAAEQQPGNQAQAQAQLASLYSALQQALGSVCESRPELSGGGDSAPSVWGLEPDQNGARSLFKRGPLLTALSAEAVASALHKLHQDLWKTQQTRDVLRDQVQKLEERLTDTEAEKSQVHTELQDLQRQLSQNQEEKSKWEGKQNSLESELMELHETMASLQSRLRRAELQRMEAQGERELLQAAKENLTAQVEHLQAAVVEARAQASAAGILEEDLRTARSALKLKNEEVESERERAQALQEQGELKVAQGKALQENLALLTQTLAEREEEVETLRGQIQELEKQREMQKAALELLSLDLKKRNQEVDLQQEQIQELEKCRSVLEHLPMAVQEREQKLTVQREQIRELEKDRETQRNVLEHQLLELEKKDQMIESQRGQVQDLKKQLVTLECLALELEENHHKMECQQKLIKELEGQRETQRVALTHLTLDLEERSQELQAQSSQIHDLESHSTVLARELQERDQEVKSQREQIEELPPSGPIQSSRVPC

SEQ ID NO: 852337 - protein, 1556 aa, Homo sapiens
MKPQSLQLVLEEQVLALQQQMAENQAASWRKLKNSQEAQQRQATLVRKLQAKVLQYRSWCQELEKRLEATGGPIPQRWENVEEPNLDELLVRLEEEQQRCESLAEVNTQLRLHMEKADVVNKALREDVEKLTVDWSRARDELMRKESQWQMEQEFFKGYLKGEHGRLLSLWREVVTFRRHFLEMKSATDRDLMELKAEHVRLSGSLLTCCLRLTVGAQSREPNGSGRMDGREPAQLLLLLAKTQELEKEAHERSQELIQLKSQGDLEKAELQDRVTELSALLTQSQKQNEDYEKMIKALRETVEILETNHTELMEHEASLSRNAQEEKLSLQQVIKDITQVMVEEGDNIAQGSGHENSLELDSSIFSQFDYQDADKALTLVRSVLTRRRQAVQDLRQQLAGCQEAVNLLQQQHDQWEEEGKALRQRLQKLTGERDTLAGQTVDLQGEVDSLSKERELLQKAREELRQQLEVLEQEAWRLRRVNVELQLQGDSAQGQKEEQQEELHLAVRERERLQEMLMGLEAKQSESLSELITLREALESSHLEGELLRQEQTEVTAALARAEQSIAELSSSENTLKTEVADLRAAAVKLSALNEALALDKVGLNQQLLQLEEENQSVCSRMEAAEQARNALQVDLAEAEKRREALWEKNTHLEAQLQKAEEAGAELQADLRDIQEEKEEIQKKLSESRHQQEAATTQLEQLHQEAKRQEEVLARAVQEKEALVREKAALEVRLQAVERDRQDLAEQLQGLSSAKELLESSLFEAQQQNSVIEVTKGQLEVQIQTVTQAKEVIQGEVRCLKLELDTERSQAEQERDAAARQLAQAEQEGKTALEQQKAAHEKEVNQLREKWEKERSWHQQELAKALESLEREKMELEMRLKEQQTEMEAIQAQREEERTQAESALCQMQLETEKERVSLLETLLQTQKELADASQQLERLRQDMKVQKLKEQETTGILQTQLQEAQRELKEAARQHRDDLAALQEESSSLLQDKMDLQKQVEDLKSQLVAQDDSQRLVEQEVQEKLRETQEYNRIQKELEREKASLTLSLMEKEQRLLVLQEADSIRQQELSALRQDMQEAQGEQKELSAQMELLRQEVKEKEADFLAQEAQLLEELEASHITEQQLRASLWAQEAKAAQLQLRLRSTESQLEALAAEQQPGNQAQAQAQLASLYSALQQALGSVCESRPELSGGGDSAPSVWGLEPDQNGARSLFKRGPLLTALSAEAVASALHKLHQDLWKTQQTRDVLRDQVQKLEERLTDTEAEKSQVHTELQDLQRQLSQNQEEKSKWEGKQNSLESELMELHETMASLQSRLRRAELQRMEAQGERELLQAAKENLTAQVEHLQAAVVEARAQASAAGILEEDLRTARSALKLKNEEVESERERAQALQEQGELKVAQGKALQENLALLTQTLAEREEEVETLRGQIQELEKQREMQKAALELLSLDLKKRNQEVDLQQEQIQELEKCRSVLEHLPMAVQEREQKLTVQREQIRELEKDRETQRNVLEHQLLELEEARRPEQARRPEQARRPEQARRPEQARRPEQAEL

SEQ ID NO: 852338 - protein, 329 aa, Homo sapiens [sequence omitted]

SEQ ID NO: 852339 - protein, 150 aa, Homo sapiens
MGHEQNQGAALLQMLPLLWLLPHSWAVPEAPTPMWPDDLQNHTFLHTVYCQDGSPSVGLSEAYDEDQLSFLPFFPNLFPRNNFPGGLAFALGPGKFLWALWGTFGGASKGRTKGGNGNGFPHGHHFDFEQESYWRSGIESMQDREGRTEL

SEQ ID NO: 852340 - protein, 131 aa, Homo sapiens [sequence omitted]

SEQ ID NO: 852341 - protein, 157 aa, Homo sapiens
MGHEQNQGAALLQMLPLLWLLPHSWAVPEAPTPMWPDDLQNHTFLHTVYCQDGSPSVGLSEAYDEDQLFFFDFSQNTRVPRLPEFADWAQEQGDAPAILFDKEFCEWMIQQIGPKLDGKIPVSRGFPIAEVFTLKPLEFGKPNTLVCFLSVISSHPC

SEQ ID NO: 852342 - protein, 131 aa, Homo sapiens [sequence omitted]

SEQ ID NO: 852343 - protein, 106 aa, Homo sapiens [sequence omitted]

SEQ ID NO: 852344 - protein, 139 aa, Homo sapiens
MGHEQNQGAALLQMLPLLWLLPHSWAVPEAPTPMWPDDLQNHTFLHTVYCQDGSPSVGLSEAYDEDQLFFFDFSQNTRVPRLPEFADWAQEQGDAPAILFDKEFCEWMIQQIGPKLDGLEFGKPNTLVCFLSVISSHPC

SEQ ID NO: 852345 - protein, 106 aa, Homo sapiens [sequence omitted]

SEQ ID NO: 852346 - protein, 106 aa, Homo sapiens [sequence omitted]

SEQ ID NO: 852347 - protein, 179 aa, Homo sapiens
DLRPPSRGGSWGSWVGWVGSSYLLCGKKVWVMNRTKELRCYRCYHFCGCYPTPGPSLKLLLQCGQMTCKTTHSCTQLNWQHHSVPVEGFGPTFVSAVDGLSFQAFSYLNFTPEPSDIFSCIVTHEIDRYTAIAYWVPRNALPSDLLENVLCGVAFGLGVLGIIVGIVLIIYFRKPCSGD

SEQ ID NO: 852348 - protein, 157 aa, Homo sapiens; identical to SEQ ID NO: 852341

SEQ ID NO: 852349 - protein, 71 aa, Homo sapiens
SVRCLEDPGSTCIVTHEIDRYTAIAYWVPRNALPSDLLENVLCGVAFGLGVLGIIVGIVLIIYFRKPCSGD

SEQ ID NO: 852350 - protein, 86 aa, Homo sapiens
DLRPPSRGGSWGSWVGWVGSSYLLCGKKVWVMNRTKELRCYRCYHFCGCYPTPGPSLKLLLQCGQMTCKTTHSCTQCEGDPHRVGQ

SEQ ID NO: 852351 - protein, 157 aa, Homo sapiens; identical to SEQ ID NO: 852341

SEQ ID NO: 852352 - protein, 142 aa, Homo sapiens
DLRPPSRGGSWGSWVGWVGSSYLLCGKKVWVMNRTKELRCYRCYHFCGCYPTPGPSLKLLLQCGQMTVGLSEAYDEDQLFFFDFSQNTRVPRLPEFADWAQEQGDAPAILFDKEFCEWMIQQIGPKLDGKIPVSRGQEFSGE

SEQ ID NO: 852353 - protein, 187 aa, Homo sapiens
VSCWLSDSCQELQRRGIILCSYGVTSPIAVFGRPGRLRNRRHFERRLVPMKWLKKCLDTAPTPMWPDDLQNHTFLHTVYCQDGSPSVGLSEAYDEDQLFFFDFSQNTRVPRLPEFADWAQEQGDAPAILFDKEFCEWMIQQIGPKLDGKIPVSRGFPIAEVFTLKPLEFGKPNTLVCFLSVISSHPC

SEQ ID NO: 852354 - protein, 106 aa, Homo sapiens [sequence omitted]

SEQ ID NO: 852355 - protein, 140 aa, Homo sapiens
DLRPPSRGGSWGSWVGWVGSSYLLCGKKVWVMNRTKELRCYRCYHFCGCYPTPGPSLKNTRVPRLPEFADWAQEQGDAPAILFDKEFCEWMIQQIGPKLDGKIPVSRGFPIAEVFTLKPLEFGKPNTLVCFLSVISSHPC

SEQ ID NO: 852356 - protein, 227 aa, Homo sapiens
MGHEQNQGAALLQMLPLLWLLPHSWAVPEAPTPMWPDDLQNHTFLHTVYCQDGSPSVGLSEAYDEDQLFFFDFSQNTRVPRLPEFADWAQEQGDAPAILFDKEFCEWMIQQIGPKLDGKIPVSRVNWQHHSVPVEGFGPTFVSAVDGLSFQAFSYLNFTPEPSDIFSCIVTHEIDRYTAIAYWVPRNALPSDLLENVLCGVAFGLGVLGIIVGIVLIIYFRKPCSGD

SEQ ID NO: 852357 - protein, 106 aa, Homo sapiens [sequence omitted]

SEQ ID NO: 852358 - protein, 106 aa, Homo sapiens [sequence omitted]

SEQ ID NO: 852359 - protein, 131 aa, Homo sapiens [sequence omitted]

SEQ ID NO: 852360 - protein, 157 aa, Homo sapiens; identical to SEQ ID NO: 852341

SEQ ID NO: 852361 - protein, 298 aa, Homo sapiens
MEGMDVDLDPELMQKFSCLGTTDKDVLISEFQRLLGFQLNPAGCAFFLDMTNWNLQAAIGAYYDFESPNISVPSMSFVEDVTIGEGESIPPDTQFVKTWRIQNSGAEAWPPGVCLKYVGGDQFGHVNMVMVRSLEPQEIADVSVQMCSPSRAGMYQGQWRMCTATGLYYGDVIWVILSVEVGGLLGVTQQLSSFETEFNTQPHRKVEGNFNPFASPQKNRQSDENNLKDPGGSEFDSISKNTWAPAPDTWAPAPDQTEQDQNRLSQNSVNLSPSSHANNLSVVTYSKGLHGPYPFGQS

SEQ ID NO: 852362 - protein, 232 aa, Homo sapiens
MEGMDVDLDPELMQKFSCLGTTDKDVLISEFQRLLGFQLNPAGCAFFLDMTNWNLQAAIGAYYDFESPNISVPSMSFVEDVTIGEGESIPPDTQFVKTWRIQNSDVIWVILSVEVGGLLGVTQQLSSFETEFNTQPHRKVEGNFNPFASPQKNRQSDENNLKDPGGSEFDSISKNTWAPAPDTWAPAPDQTEQDQNRLSQNSVNLSPSSHANNLSVVTYSKGLHGPYPFGQS

SEQ ID NO: 852363 - protein, 289 aa, Homo sapiens
MEGMDVDLDPELMQKFSCLGTTDKDVLISEFQRLLGFQLNPAGCAFFLDMTNWNLQAAIGAYYDFESPNISVPSMSFVEDVTIGEGESIPPDTQFVKTWRIQNSGAEAWPPGVCLKYVGGDQFGHVNMVMVRSLEPQEIADVSVQMCSPSRAGMYQGQWRMCTATGLYYGDVIWVILSVEVGGLLGVTQQLSSFETEFNTQPHRKVEGNFNPFASPQKNRQSDENNLKDPGGSEFDSISKNTWAPAPDTWAPAPDQTEQDQNRLSQNSVNLSPSSHANNLSVVTYSKCT

SEQ ID NO: 852364 - protein, 297 aa, Homo sapiens
MEGMDVDLDPELMQKFSCLGTTDKDVLISEFQRLLGFQLNPAGCAFFLDMTNWNLQAAIGAYYDFESPNISVPSMSFVEDVTIGEGESIPPDTQFVKTWRIQNSGAEAWPPGVCLKYVGGDQFGHVNMVMVRSLEPQEIADVSVQMCSPSRAGMYQGQWRMCTATGLYYGDVIWVILSVEVGGLLGVTQQLSSFETEFNTQPHRKVEGNFNPFASPQKNRQSDENNLKDPGGSEFDSISKNTWAPAPDTWAPAPDQTEQDQNRLSQNSVNLSPSSHANNLSVVTYSKSSCRAFCIWS

SEQ ID NO: 852365 - protein, 145 aa, Homo sapiens [sequence omitted]

SEQ ID NO: 852366 - protein, 62 aa, Homo sapiens
MEGMDVDLDPELMQKFSCLGTTDKDVLISEFQRLLGFQLNPAGCAVLDDFLDLRILFHLFRG

SEQ ID NO: 852367 - protein, 224 aa, Homo sapiens
MSFVEDVTIGEGESIPPDTQFVKTWRIQNSGAEAWPPGVCLKYVGGDQFGHVNMVMVRSLEPQEIADVSVQMCSPSRAGMYQGQWRMCTATGLYYGDVIWVILSVEVGGLLGVTQQLSSFETEFNTQPHRKVEGNFNPFASPQKNRQSDENNLKDPGGSEFDSISKNTWAPAPDTWAPAPDQTEQDQNRLSQNSVNLSPSSHANNLSVVTYSKGLHGPYPFGQS

SEQ ID NO: 852368 - protein, 298 aa, Homo sapiens; identical to SEQ ID NO: 852361

SEQ ID NO: 852369 - protein, 117 aa, Homo sapiens
MEGMDVDLDPELMQKFSCLGTTDKDVLISEFQRLLGFQLNPAGCAFFLDMTNWNLQAAIGAYYDFESPNISVPSMSFVEDVTIGEGESIPPDTQFVKTWRIQNSVTLLGTREEWSQD

SEQ ID NO: 852370 - protein, 117 aa, Homo sapiens; identical to SEQ ID NO: 852369

SEQ ID NO: 852371 - protein, 324 aa, Homo sapiens
MAAAAPGNGRASAPRLLLLFLVPLLWAPAAVRAGPDEDLSHRNKEPPAPAQQLQPQPVAVQGPEPARVEKIFTPAAPVHTNKEDPATQTNLGFIHAFVAAISVIIVSELGDKTFFIAAIMAMRYNRLTVLAGAMLALGLMTCLSVLFGYATTVIPRVYTYYVSTVLFAIFGIRMLREGLKMSPDEGQEELEEVQAELKKKDEEFQRTKLLNGPGDVETGTSITVPQKKWLHFISPIFVQALTLTFLAEWGDRSQLTTIVLAAREDPYGVAVGGTVGHCLCTGLAVIGGRMIAQKISVRTVTIIGGIVFLAFAFSALFISPDSGF

SEQ ID NO: 852372 - protein, 324 aa, Homo sapiens; identical to SEQ ID NO: 852371

SEQ ID NO: 852373 - protein, 302 aa, Homo sapiens
MAAAAPGNGRASAPRLLLLFLVPLLWAPAAVRAGPDEDLSHRNKEPPAPAQQLQPQPVAVQGPEPARVEKIFTPAAPVHTNKEDPATQTNLGFIHAFVAAISVIIVSELGDKTFFIAAIMAMRYNRLTVLAGAMLALGLMTCLSVLFGYATTVIPRVYTYYVSTVLFAIFGIRMLREGLKMSPDEGQEELEEVQAELKKKDEEFQRTKLLNGPGDVETGTSITVPQKKWLHFISPIFVQALTLTFLAEWGDRSQLTTIVLAAREDPYGVAVGGTVGHCLCTGLAVIGGRMIAQKISVRTGKS

SEQ ID NO: 852374 - protein, 268 aa, Homo sapiens
MAAAAPGNGRASAPRLLLLFLVPLLWAPAAVRAGPDEDLSHRNKEPPAPAQQLQPQPVAVQGPEPARVEKIFTPAAPVHTNKEDPATQTNLGFIHAFVAAISVIIVSELGDKTFFIAAIMAMRYNRLTVLAGAMLALGLMTCLSVLFGYATTVIPRVYTYYVSTVLFAIFGIRMLREGLKMSPDEGQEELEEVQAELKKKDEEFQRTKLLNGPGDVETGTSITVPQKKWLHFISPIFVQALTLTFLAEWGDRSQLTTIVLAAREVSDI

SEQ ID NO: 852375 - protein, 324 aa, Homo sapiens; identical to SEQ ID NO: 852371

SEQ ID NO: 852376 - protein, 285 aa, Homo sapiens
MAAAAPGNGRASAPRLLLLFLVPLLWAPAAKIFTPAAPVHTNKEDPATQTNLGFIHAFVAAISVIIVSELGDKTFFIAAIMAMRYNRLTVLAGAMLALGLMTCLSVLFGYATTVIPRVYTYYVSTVLFAIFGIRMLREGLKMSPDEGQEELEEVQAELKKKDEEFQRTKLLNGPGDVETGTSITVPQKKWLHFISPIFVQALTLTFLAEWGDRSQLTTIVLAAREDPYGVAVGGTVGHCLCTGLAVIGGRMIAQKISVRTVTIIGGIVFLAFAFSALFISPDSGF

SEQ ID NO: 852377 - protein, 324 aa, Homo sapiens; identical to SEQ ID NO: 852371

SEQ ID NO: 852378 - protein, 268 aa, Homo sapiens; identical to SEQ ID NO: 852374

SEQ ID NO: 852379 - protein, 161 aa, Homo sapiens
MAAAAPGNGRASAPRLLLLFLVPLLWAPAAVRAGPDEDLSHRNKEPPAPAQQLQPQPVAVQGPEPARVEKIFTPAAPVHTNKEDPATQTNLGFIHAFVAAISVIIVSELGDKTFFIAAIMAMRYNRLTVLAGAMLALGLMTCLSETGFRHVDQWSQAPGLK

SEQ ID NO: 852380 - protein, 129 aa, Homo sapiens
MAAAAPGNGRASAPRLLLLFLVPLLWAPAAVRAGPDEDLSHRNKEPPAPAQQLQPQPVAVQGPEPARVEDPYGVAVGGTVGHCLCTGLAVIGGRMIAQKISVRTVTIIGGIVFLAFAFSALFISPDSGF

SEQ ID NO: 852381 - protein, 324 aa, Homo sapiens; identical to SEQ ID NO: 852371

SEQ ID NO: 852382 - protein, 324 aa, Homo sapiens; identical to SEQ ID NO: 852371

SEQ ID NO: 852383 - protein, 268 aa, Homo sapiens; identical to SEQ ID NO: 852374

SEQ ID NO: 852384 - protein, 257 aa, Homo sapiens [sequence omitted]

SEQ ID NO: 852385 - protein, 321 aa, Homo sapiens
MAAAAPGNGRASAPRLLLLFLVPLLWAPAAVRAGPDEDLSHRNKEPPAPAQQLQPQPVAVQGPEPARVEKIFTPAAPVHTNKEDPATQTNLGFIHAFVAAISVIIVSELGDKTFFIAAIMAMRYNRLTVLAGAMLALGLMTCLSVLFGYATTVIPRVYTYYVSTVLFAIFGIRMLREGLKMSPDEGQEELEEVQAELKKKDEEFQRTKLLNGPGDVETGTSITVPQKKWLHFISPIFVQALTLTFLAEWGDRSQLTTIVLAAREDPYGVAVGGTVGHCLCTGLAVIGGRMIAQKISVRTGSFSPWLILHACSDGKGHLERN

SEQ ID NO: 852386 - protein, 268 aa, Homo sapiens; identical to SEQ ID NO: 852374

SEQ ID NO: 852387 - protein, 111 aa, Homo sapiens
MAAAAPGNGRASAPRLLLLFLVPLLWAPAAVRAGPDEDLSHRNKEPPAAPSTRLQAFESAALRRPRLGEGSPAPAPGVEGGRLRCFPVRPGLARSFRERERESPRGARYKR

SEQ ID NO: 852388 - protein, 562 aa, Homo sapiens
MDDKGDPSNEEAPKAIKPTSKEFRKTWGFRRTTIAKREGAGDAEADPLEPPPPQQQLGLSLRRSGRQPKRTERVEQFLTIARRRGRRSMPVSLEDSGEPTSCPATDAETASEGSVESASETRSGPQSASTAVKERPASSEKVKGGDDHDDTSDSDSDGLTLKELQNRLRRKREQEPTERPLKGIQSRLRKKRREEGPAETVGSEASDTVEGVLPSKQEPENDQGVVSQAGKDDRESKLEGKAAQDIKDEEPGDLGRPKPECEGYDPNALYCICRQPHNNRFMICCDRCEEWFHGDCVGISEARGRLLERNGEDYICPNCTILQVQDETHSETADQQEAKWRPGDADGTDCTSIGTIEQKSSEDQGIKGRIEKAANPSGKKKLKIFQPVIEAPGASKCIGPGCCHVAQPDSVYCSNDCILKHAAATMKFLSSGKEQKPKPKEKMKMKPEKPSLPKCGAQAGIKISSVHKRPAPEKKETTVKKAVVVPARSEALGKEAACESSTPSWASDHNYNAVKPEKTAAPSPSLLYKCMYHLGVGLLDPSRSFWIAIPWACPGLGVAALC

SEQ ID NO: 852389 - protein, 111 aa, Homo sapiens
GAGGQAHRRPPLSTSRDSKRAREREPMTNEAPPRGGGADGLPEARNLSFRTCAELPSRRPRTTGWRQSQKASALWQDGCCGGVGARKSGTGMATSTLSRRRRSQLFSCRLR

SEQ ID NO: 852390 - protein, 1225 aa, Homo sapiens
MDDKGDPSNEEAPKAIKPTSKEFRKTWGFRRTTIAKREGAGDAEADPLEPPPPQQQLGLSLRRSGRQPKRTERVEQFLTIARRRGRRSMPVSLEDSGEPTSCPATDAETASEGSVESASETRSGPQSASTAVKERPASSEKVKGGDDHDDTSDSDSDGLTLKELQNRLRRKREQEPTERPLKGIQSRLRKKRREEGPAETVGSEASDTVEGVLPSKQEPENDQGVVSQAGKDDRESKLEGKAAQDIKDEEPGDLGRPKPECEGYDPNALYCICRQPHNNRFMICCDRCEEWFHGDCVGISEARGRLLERNGEDYICPNCTILQVQDETHSETADQQEAKWRPGDADGTDCTSIGTIEQKSSEDQGIKGRIEKAANPSGKKKLKIFQPGPGPVPTQLPVLWQVLEIAVSRSISAFTLLHCISCKVIEAPGASKCIGPGCCHVAQPDSVYCSNDCILKHAAATMKFLSSGKEQKPKPKEKMKMKPEKPSLPKCGAQAGIKISSVHKRPAPEKKETTVKKAVVVPARSEALGKEAACESSTPSWASDHNYNAVKPEKTAAPSPSLLYKSTKEDRRSEEKAAAMAASKKTAPPGSAVGKQPAPRNLVPKKSSFANVAAATPAIKKPPSGFKGTIPKRPWLSATPSSGASAARQAGPAPAAATAASKKFPGSAALVGAVRKPVVPSVPMASPAPGRLGAMSAAPSQPNSQIRQNIRRSLKEILWKRVNDSDDLIMTENEVGKIALHIEKEMFNLFQVTDNRYKSKYRSIMFNLKDPKNQGLFHRVLREEISLAKLVRLKPEELVSKELSTWKERPARSVMESRTKLHNESKKTAPRQEAIPDLEDSPPVSDSEEQQESARAVPEKSTAPLLDVFSSMLKDTTSQHRAHLFDLNCKICTGQVPSAEDEPAPKKQKLSASVKKEDLKSKHDSSAPDPAPDSADEVMPEAVPEVASEPGLESASHPNVDRTYFPGPPGDGHPEPSPLEDLSPCPASCGSGVVTTVTVSGRDPRTAPSSSCTAVASAASRPDSTHMVEARQDVPKPVLTSVMVPKSILAKPSSSPDPRYLSVPPSPNISTSESRSPPEGDTTLFLSRLSTIWKGFINMQSVAKFVTKAYPVSGCFDYLSEDLPDTIHIGGRIAPKTVWDYVGKLKSSVSKELCLIRFHPATEEEEVAYISLYSYFSSRGRFGVVANNNRHVKDLYLIPLSAQDPVPSKLLPFEGPGKRRLSGWR

SEQ ID NO: 852391 - protein, 544 aa, Homo sapiens
MDDKGDPSNEEAPKAIKPTSKEFRKTWGFRRTTIAKREGAGDAEADPLEPPPPQQQLGLSLRRSGRQPKRTERVEQFLTIARRRGRRSMPVSLEDSGEPTSCPATDAETASEGSVESASETRSGPQSASTAVKERPASSEKVKGGDDHDDTSDSDSDGLTLKELQNRLRRKREQEPTERPLKGIQSRLRKKRREEGPAETVGSEASDTVEGVLPSKQEPENDQGVVSQAGKDDRESKLEGKAAQDIKDEEPGDLGRPKPECEGYDPNALYCICRQPHNNRFMICCDRCEEWFHGDCVGISEARGRLLERNGEDYICPNCTILQVQDETHSETADQQEAKWRPGDADGTDCTSIGTIEQKSSEDQGIKGRIEKAANPSGKKKLKIFQPVIEAPGASKCIGPGCCHVAQPDSVYCSNDCILKHAAATMKFLSSGKEQKPKPKEKMKMKPEKPSLPKCGAQAGIKISSVHKRPAPEKKETTVKKAVVVPARSEALGKEAACESSTPSWASDHNYNAVKPEKTAAPSPSLLYKCSGKYSYSLHPSLIA

SEQ ID NO: 852392 - protein, 562 aa, Homo sapiens; identical to SEQ ID NO: 852388

SEQ ID NO: 852393 - protein, 1189 aa, Homo sapiens
MDDKGDPSNEEAPKAIKPTSKEFRKTWGFRRTTIAKREGAGDAEADPLEPPPPQQQLGLSLRRSGRQPKRTERVEQFLTIARRRGRRSMPVSLEDSGEPTSCPATDAETASEGSVESASETRSGPQSASTAVKERPASSEKVKGGDDHDDTSDSDSDGLTLKELQNRLRRKREQEPTERPLKGIQSRLRKKRREEGPAETVGSEASDTVEGVLPSKQEPENDQGVVSQAGKDDRESKLEGKAAQDIKDEEPGDLGRPKPECEGYDPNALYCICRQPHNNRFMICCDRCEEWFHGDCVGISEARGRLLERNGEDYICPNCTILQVQDETHSETADQQEAKWRPGDADGTDCTSIGTIEQKSSEDQGIKGRIEKAANPSGKKKLKIFQPVIEAPGASKCIGPGCCHVAQPDSVYCSNDCILKHAAATMKFLSSGKEQKPKPKEKMKMKPEKPSLPKCGAQAGIKISSVHKRPAPEKKETTVKKAVVVPARSEALGKEAACESSTPSWASDHNYNAVKPEKTAAPSPSLLYKSTKEDRRSEEKAAAMAASKKTAPPGSAVGKQPAPRNLVPKKSSFANVAAATPAIKKPPSGFKGTIPKRPWLSATPSSGASAARQAGPAPAAATAASKKFPGSAALVGAVRKPVVPSVPMASPAPGRLGAMSAAPSQPNSQIRQNIRRSLKEILWKRVNDSDDLIMTENEVGKIALHIEKEMFNLFQVTDNRYKSKYRSIMFNLKDPKNQGLFHRVLREEISLAKLVRLKPEELVSKELSTWKERPARSVMESRTKLHNESKKTAPRQEAIPDLEDSPPVSDSEEQQESARAVPEKSTAPLLDVFSSMLKDTTSQHRAHLFDLNCKICTGQVPSAEDEPAPKKQKLSASVKKEDLKSKHDSSAPDPAPDSADEVMPEAVPEVASEPGLESASHPNVDRTYFPGPPGDGHPEPSPLEDLSPCPASCGSGVVTTVTVSGRDPRTAPSSSCTAVASAASRPDSTHMVEARQDVPKPVLTSVMVPKSILAKPSSSPDPRYLSVPPSPNISTSESRSPPEGDTTLFLSRLSTIWKGFINMQSVAKFVTKAYPVSGCFDYLSEDLPDTIHIGGRIAPKTVWDYVGKLKSSVSKELCLIRFHPATEEEEVAYISLYSYFSSRGRFGVVANNNRHVKDLYLIPLSAQDPVPSKLLPFEGPGKRRLSGWR

SEQ ID NO: 852394 - protein, 1186 aa, Homo sapiens
MDDKGDPSNEEAPKAIKPTSKEFRKTWGFRRTTIAKREGAGDAEADPLEPPPPQQQLGLSLRRSGRQPKRTERVEQFLTIARRRGRRSMPVSLEDSGEPTSCPATDAETASEGSVESASETRSGPQSASTAVKERPASSEKVKGGDDHDDTSDSDSDGLTLKELQNRLRRKREQEPTERPLKGIQSRLRKKRREEGPAETVGSEASDTVEGVLPSKQEPENDQGVVSQAGKDDRESKLEGKAAQDIKDEEPGDLGRPKPECEGYDPNALYCICRQPHNNRFMICCDRCEEWFHGDCVGISEARGRLLERNGEDYICPNCTILQVQDETHSETADQQEAKWRPGDADGTDCTSIGTIEQKSSEDQGIKGRIEKAANPSGKKKLKIFQPVIEAPGASKCIGPGCCHVAQPDSVYCSNDCILKHAAATMKFLSSGKEQKPKPKEKMKMKPEKPSLPKCGAQAGIKISSVHKRPAPEKKETTVKKAVVVPARSEALGKEAACESSTPSWASDHNYNAVKPEKTAAPSPSLLYKSTKEDRRSEEKAAAMAASKKTAPPGSAVGKQPAPRNLVPKKSSFANVAAATPAIKKPPSGFKGTIPKRPWLSATPSSGASAARQAGPAPAAATAASKKFPGSAALVGAVRKPVVPSVPMASPAPGRLGAMSAAPSQPNSQIRQNIRRSLKEILWKRVNDSDDLIMTENEVGKIALHIEKEMFNLFQVTDNRYKSKYRSIMFNLKDPKNQGLFHRVLREEISLAKLVRLKPEELVSKELSTWKERPARSVMESRTKLHNESKKTAPRQEAIPDLEDSPPVSDSEEQQESARAVPEKSTAPLLDVFSSMLKDTTSQHRAHLFDLNCKICTGQVPSAEDEPAPKKQKLSASVKKEDLKSKHDSSAPDPAPDSADEVMPEAVPEVASEPGLESASHPNVDRTYFPGPPGDGHPEPSPLEDLSPCPASCGSGVVTTVTVSGRDPRTAPSSSCTAVASAASRPDSTHMVEARQDVPKPVLTSVMVPKSILAKPSSSPDPRYLSVPPSPNISTSESRSPPEGDTTLFLSRLSTIWKGFINMQSVAKFVTKAYPVSGCFDYLSEDLPDTIHIGGRIAPKTVWDYVGKLKSSVSKELCLIRFHPATEEEEVAYISLYSYFSSRGRFGVVANNNRHVKDLYLIPLSAQDPVPSKLLPFEGPVVSHTS

SEQ ID NO: 852395 - protein, 792 aa, Homo sapiens
MDDKGDPSNEEAPKAIKPTSKEFRKTWGFRRTTIAKREGAGDAEADPLEPPPPQQQLGLSLRRSGRQPKRTERVEQFLTIARRRGRRSMPVSLEDSGEPTSCPATDAETASEGSVESASETRSGPQSASTAVKERPASSEKVKGGDDHDDTSDSDSDGLTLKELQNRLRRKREQEPTERPLKGIQSRLRKKRREEGPAETVGSEASDTVEGVLPSKQEPENDQGVVSQAGKDDRESKLEGKAAQDIKDEEPGDLGRPKPECEGYDPNALYCICRQPHNNRFMICCDRCEEWFHGDCVGISEARGRLLERNGEDYICPNCTILQVQDETHSETADQQEAKWRPGDADGTDCTSIGTIEQKSSEDQGIKGRIEKAANPSGKKKLKIFQPVIEAPGASKCIGPGCCHVAQPDSVYCSNDCILKHAAATMKFLSSGKEQKPKPKEKMKMKPEKPSLPKCGAQAGIKISSVHKRPAPEKKETTVKKAVVVPARSEALGKEAACESSTPSWASDHNYNAVKPEKTAAPSPSLLYKSTKEDRRSEEKAAAMAASKKTAPPGSAVGKQPAPRNLVPKKSSFANVAAATPAIKKPPSGFKGTIPKRPWLSATPSSGASAARQAGPAPAAATAASKKFPGSAALVGAVRKPVVPSVPMASPAPGRLGAMSAAPSQPNSQIRQNIRRSLKEILWKRVNDSDDLIMTENEVGKIALHIEKEMFNLFQVTDNRYKSKYRSIMFNLKDPKNQVCAWCRCIGVFLFCSLGAKGINQYFEMFVSFPGKLRRFFLLCDPSAAHVLLHWR

SEQ ID NO: 852396 - protein, 646 aa, Homo sapiens
MAASKKTAPPGSAVGKQPAPRNLVPKKSSFANVAAATPAIKKPPSGFKGTIPKRPWLSATPSSGASAARQAGPAPAAATAASKKFPGSAALVGAVRKPVVPSVPMASPAPGRLGAMSAAPSQPNSQIRQNIRRSLKEILWKRVNDSDDLIMTENEVGKIALHIEKEMFNLFQVTDNRYKSKYRSIMFNLKDPKNQGLFHRVLREEISLAKLVRLKPEELVSKELSTWKERPARSVMESRTKLHNESKKTAPRQEAIPDLEDSPPVSDSEEQQESARAVPEKSTAPLLDVFSSMLKDTTSQHRAHLFDLNCKICTGQVPSAEDEPAPKKQKLSASVKKEDLKSKHDSSAPDPAPDSADEVMPEAVPEVASEPGLESASHPNVDRTYFPGPPGDGHPEPSPLEDLSPCPASCGSGVVTTVTVSGRDPRTAPSSSCTAVASAASRPDSTHMVEARQDVPKPVLTSVMVPKSILAKPSSSPDPRYLSVPPSPNISTSESRSPPEGDTTLFLSRLSTIWKGFINMQSVAKFVTKAYPVSGCFDYLSEDLPDTIHIGGRIAPKTVWDYVGKLKSSVSKELCLIRFHPATEEEEVAYISLYSYFSSRGRFGVVANNNRHVKDLYLIPLSAQDPVPSKLLPFEGPGKRRLSGWR

SEQ ID NO: 852397 - protein, 562 aa, Homo sapiens; identical to SEQ ID NO: 852388

SEQ ID NO: 852398 - protein, 138 aa, Homo sapiens
MDDKGDPSNEEAPKAIKPTSKEFRKTWGFRRTTIAKREGAGDAEADPLEPPPPQQQLGLSLRRSGRQPKRTERVEQFLTIARRRGRRSMPVSLEDSGEPTSCPATDAETASEGSVESASETRSGPQSASTGERRGWTR

SEQ ID NO: 852399 - protein, 562 aa, Homo sapiens; identical to SEQ ID NO: 852388

SEQ ID NO: 852400 - protein, 562 aa, Homo sapiens; identical to SEQ ID NO: 852388

SEQ ID NO: 852401 - protein, 281 aa, Homo sapiens [sequence omitted]

SEQ ID NO: 852402 - protein, 1327 aa, Homo sapiens
MDDKGDPSNEEAPKAIKPTSKEFRKTWGFRRTTIAKREGAGDAEADPLEPPPPQQQLGLSLRRSGRQPKRTERVEQFLTIARRRGRRSMPVSLEDSGEPTSCPATDAETASEGSVESASETRSGPQSASTAVKERPASSEKVKGGDDHDDTSDSDSDGLTLKELQNRLRRKREQEPTERPLKGIQSRLRKKRREEGPAETVGSEASDTVEGVLPSKQEPENDQGVVSQAGKDDRESKLEGKAAQDIKDEEPGDLGRPKPECEGYDPNALYCICRQPHNNRFMICCDRCEEWFHGDCVGISEARGRLLERNGEDYICPNCTILQVQDETHSETADQQEAKWRPGDADGTDCTSIGTIEQKSSEDQGIKGRIEKAANPSGKKKLKIFQPVIEAPGASKCIGPGCCHVAQPDSVYCSNDCILKHAAATMKFLSSGKEQKPKPKEKMKMKPEKPSLPKCGAQAGIKISSVHKRPAPEKKETTVKKAVVVPARSEALGKEAACESSTPSWASDHNYNAVKPEKTAAPSPSLLYKSTKEDRRSEEKAAAMAASKKTAPPGSAVGKQPAPRNLVPKKSSFANVAAATPAIKKPPSGFKGTIPKRPWLSATPSSGASAARQAGPAPAAATAASKKFPGSAALVGAVRKPVVPSVPMASPAPGRLGAMSAAPSQPNSQIRQNIRRSLKEILWKRVNDSDDLIMTENEVGKIALHIEKEMFNLFQVTDNRYKSKYRSIMFNLKDPKNQGLFHRVLREEISLAKLVRLKPEELVSKELSTWKERPARSVMESRTKLHNESKKTAPRQEAIPDLEDSPPVSDSEEQQESARAVPEKSTAPLLDVFSSMLKDTTSQHRAHLFDLNCKICTGQVPSAEDEPAPKKQKLSASVKKEDLKSKHDSSAPDPAPDSADEVMPEAVPEVASEPGLESASHPNVDRTYFPGPPGDGHPEPSPLEDLSPCPASCGSGVVTTVTVSGRDPRTAPSSSCTAVASAASRPDSTHMVEARQDVPKPVLTSVMVPKSILAKPSSSPDPRYLSVPPSPNISTSESRSPPEGDTTLFLSRLSTIWKGFINMQSVAKFVTKAYPVSGCFDYLSEDLPDTIHIGGRIAPKTVWDYVGKLKSSVSKELCLIRFHPATEEEEVAYISLYSYFSSRGRFGVVANNNRHVKDLYLIPLSAQDPVPSKLLPFEGPGLESPRPNIILGLVICQKIKRPANSGELDKMDEKRTRLQPEEADVPAYPKVATVPQSEKKPSKYPLCSADAAVSTTPPGSPPPPPPLPEPPVLKVLSSLKPAAPSPATAATTAAAASTAASSTASSASKTASPLEHILQTLFGKKKS

SEQ ID NO: 852403 - protein, 120 aa, Homo sapiens
LPADGAAGDCDQLNTKLQLPVLQRHKRPAPEKKETTVKKAVVVPARSEALGKEAACESSTPSWASDHNYNAVKPEKTAAPSPSLLYKCMYHLGVGLLDPSRSFWIAIPWACPGLGVAALC

SEQ ID NO: 852404 - protein, 473 aa, Homo sapiens [sequence omitted]

SEQ ID NO: 852405 - protein, 354 aa, Homo sapiens
MASTDYSTYSQAAAQQGYSAYTAQPTQGYAQTTQAYGQQSYGTYGQPTDVSYTQAQTTATYGQTAYATSYGQPPTGYTTPTAPQAYSQPVQGYGTGAYDTTTATVTTTQASYAAQSAYGTQPAYPAYGQQPAATAPTRPQDGNKPTETSQPQSSTGGYNQPSLGYGQSNYSYPQVPGSYPMQPVTAPPSYPPTSYSSTQPTSYDQSSYSQQNTYGQPSSYGQQSSYGQQSSYGQQPPTSYPPQTGSYSQAPSQYSQQSSSYGQQSSFRQDHPSSMGVYGQESGGFSGPGENRSMSGPDNRGRGRGGFDRGGMSRGGRGGGRGGMGLQSESLVYTSILKKYPYSVLSRQHNEKWD

SEQ ID NO: 852406 - protein, 105 aa, Homo sapiens
SFALHPEEPVFLAQTNGNYLALFSTVWPYRMSRRRRYEGHKVEGYSVGCECSPGGDLLVTGSADGRVLMYSFRTASRACTLQGHTQACVGTTYHPMLPSALPTQI

SEQ ID NO: 852407 - protein, 62 aa, Homo sapiens
RARYPRPATGRPRVVIVAEVALVACGEEEVASWIVVVPVECSEVAVVETEVAATTGGDPTRV

SEQ ID NO: 852408 - protein, 687 aa, Homo sapiens
MERVNDASCGPSGCYTYQVSRHSTEMLHNLNQQRKNGGRFCDVLLRVGDESFPAHRAVLAACSEYFESVFSAQLGDGGAADGGPADVGGATAAPGGGAGGSRELEMHTISSKVFGDILDFAYTSRIVVRLESFPELMTAAKFLLMRSVIEICQEVIKQSNVQILVPPARADIMLFRPPGTSDLGFPLDMTNGAALAANSNGIAGSMQPEEEAARAAGAAIAGQASLPVLPGVDRLPMVAGPLSPQLLTSPFPSVASSAPPLTGKRGRGRPRKANLLDSMFGSPGGLREAGILPCGLCGKVFTDANRLRQHEAQHGVTSLQLGYIDLPPPRLGENGLPISEDPDGPRKRSRTRKQVACEICGKIFRDVYHLNRHKLSHSGEKPYSCPVCGLRFKRKDRMSYHVRSHDGSVGKPYICQSCGKGFSRPDHLNGHIKQVHTSERPHKCQTCNASFATRDRLRSHLACHEDKVPCQVCGKYLRAAYMADHLKKHSEGPSNFCSICNRGFSSASYLKVHVKTHHGVPLPQVSRHQEPILNGGAAFHCARTYGNKEGQKCSHQDPIESSDSYGDLSDASDLKTPEKQSANGSFSCDMAVPKNKMESDGEKKYPCPECGSFFRSKSYLNKHIQKVHVRALGGPLGDLGPALGSPFSPQQNMSLLESFGFQIVQSAFASSLVDPEVDQQPMGPEGK

SEQ ID NO: 852409 - protein, 537 aa, Homo sapiens
MERVNDASCGPSGCYTYQVSRHSTEMLHNLNQQRKNGGRFCDVLLRVGDESFPAHRAVLAACSEYFESVFSAQLGDGGAADGGPADVGGATAAPGGGAGGSRELEMHTISSKVFGDILDFAYTSRIVVRLESFPELMTAAKFLLMRSVIEICQEVIKQSNVQILVPPARADIMLFRPPGTSDLGFPLDMTNGAALAANSNGIAGSMQPEEEAARAAGAAIAGQASLPVLPGVDRLPMVAGPLSPQLLTSPFPSVASSAPPLTGKRGRGRPRKANLLDSMFGSPGGLREAGILPCGLCGKVFTDANRLRQHEAQHGVTSLQLGYIDLPPPRLGENGLPISEDPDGPRKRSRTRKQVACEICGKIFRDVYHLNRHKLSHSGEKPYSCPVCGLRFKRKDRMSYHVRSHDGSVGKPYICQSCGKGFSRPDHLNGHIKQVHTSERPHKCQTCNASFATRDRLRSHLACHEDKVPCQVCGKYLRAAYMADHLKKHSEGPSNFCSICNRGLQAPGAHPEWGSSVPLRQDLWQQRRPEMLTSGSD

SEQ ID NO: 852410 - protein, 656 aa, Homo sapiens
MASTDYSTYSQAAAQQGYSAYTAQPTQGYAQTTQAYGQQSYGTYGQPTDVSYTQAQTTATYGQTAYATSYGQPPTGYTTPTAPQAYSQPVQGYGTGAYDTTTATVTTTQASYAAQSAYGTQPAYPAYGQQPAATAPTRPQDGNKPTETSQPQSSTGGYNQPSLGYGQSNYSYPQVPGSYPMQPVTAPPSYPPTSYSSTQPTSYDQSSYSQQNTYGQPSSYGQQSSYGQQSSYGQQPPTSYPPQTGSYSQAPSQYSQQSSSYGQQSSFRQDHPSSMGVYGQESGGFSGPGENRSMSGPDNRGRGRGGFDRGGMSRGGRGGGRGGMGSAGERGGFNKPGGPMDEGPDLDLGPPVDPDEDSDNSAIYVQGLNDSVTLDDLADFFKQCGVVKMNKRTGQPMIHIYLDKETGKPKGDATVSYEDPPTAKAAVEWFDGKDFQGSKLKVSLARKKPPMNSMRGGLPPREGRGMPPPLRGGPGGPGGPGGPMGRMGGRGGDRGGFPPRGPRGSRGNPSGGGNVQHRAGDWQCPNPGCGNQNFAWRTECNQCKAPKPEGFLPPPFPPPGGDRGRGGPGGMRGGRGGLMDRGGPGGMFRGGRGGDRGGFRGGRGMDRGGFGGGRRGGPGGPPGPLMEQMGGRRGGRGGPGKMDKGEHRQERRDRPY

SEQ ID NO: 852411 - protein, 656 aa, Homo sapiens; identical to SEQ ID NO: 852410

SEQ ID NO: 852412 - protein, 354 aa, Homo sapiens; identical to SEQ ID NO: 852405

SEQ ID NO: 852413 - protein, 354 aa, Homo sapiens; identical to SEQ ID NO: 852405

SEQ ID NO: 852414 - protein, 656 aa, Homo sapiens; identical to SEQ ID NO: 852410

SEQ ID NO: 852415 - protein, 656 aa, Homo sapiens; identical to SEQ ID NO: 852410

SEQ ID NO: 852416 - protein, 656 aa, Homo sapiens; identical to SEQ ID NO: 852410

SEQ ID NO: 852417 - protein, 656 aa, Homo sapiens; identical to SEQ ID NO: 852410

SEQ ID NO: 852418 - protein, 656 aa, Homo sapiens; identical to SEQ ID NO: 852410

SEQ ID NO: 852419 - protein, 669 aa, Homo sapiens
MASTDYSTYSQAAAQQGYSAYTAQPTQGYAQTTQAYGQQSYGTYGQPTDVSYTQAQTTATYGQTAYATSYGQPPTGYTTPTAPQAYSQPVQGYGTGAYDTTTATVTTTQASYAAQSAYGTQPAYPAYGQQPAATAPTRPQDGNKPTETSQPQSSTGGYNQPSLGYGQSNYSYPQVPGSYPMQPVTAPPSYPPTSYSSTQPTSYDQSSYSQQNTYGQPSSYGQQSSYGQQSSYGQQPPTSYPPQTGSYSQAPSQYSQQSSSYGQQSSFRQDHPSSMGVYGQESGGFSGPGENRSMSGPDNRGRGRGGFDRGGMSRGGRGGGRGGMGSAGERGGFNKPGGPMDEGPDLDLGPPVDPDEDSDNSAIYVQGLNDSVTLDDLADFFKQCGVVKMNKRTGQPMIHIYLDKETGKPKGDATVSYEDPPTAKAAVEWFDGKDFQGSKLKVSLARKKPPMNSMRGGLPPREGRGMPPPLRGGPGGPGGPGGPMGRMGGRGGDRGGFPPRGPRGSRGNPSGGGNVQHRAGDWQCPNPSIGDFCCDVIVCRGCGNQNFAWRTECNQCKAPKPEGFLPPPFPPPGGDRGRGGPGGMRGGRGGLMDRGGPGGMFRGGRGGDRGGFRGGRGMDRGGFGGGRRGGPGGPPGPLMEQMGGRRGGRGGPGKMDKGEHRQERRDRPY

SEQ ID NO: 852420 - protein, 583 aa, Homo sapiens
MASTDYSTYSQAAAQQGYSAYTAQPTQGYAQTTQAYGQQSYGTYGQPTDVSYTQAQTTATYGQTAYATSYGQPPTGYTTPTAPQAYSQPVQGYGTGAYDTTTATVTTTQASYAAQSAYGTQPAYPAYGQQPAATAPTRPQDGNKPTETSQPQSSTGGYNQPSLGYGQSNYSYPQVPGSYPMQPVTAPPSYPPTSYSSTQPTSYDQSSYSQQNTYGQPSSYGQQSSYGQQSSYGQQPPTSYPPQTGSYSQAPSQYSQQSSSYGQQSSFRQDHPSSMGVYGQESGGFSGPGENRSMSGPDNRGRGRGGFDRGGMSRGGRGGGRGGMGSAGERGGFNKPGGPMDEGPDLDLGPPVDPDEDSDNSAIYVQGLNDSVTLDDLADFFKQCGVVKMNKRTGQPMIHIYLDKETGKPKGDATVSYEDPPTAKAAVEWFDGKDFQGSKLKVSLARKKPPMNSMRGGLPPREGRGMPPPLRGGPGGPGGPGGPMGRMGGRGGDRGGFPPRGPRGSRGNPSGGGNVQHRAGDWQCPNPGCGNQNFAWRTECNQCKAPKPEGFLPPPFPPPGRCRFHECPLSFLVLNLFSYLWAW

SEQ ID NO: 852421 - protein, 534 aa, Homo sapiens
MASTDYSTYSQAAAQQGYSAYTAQPTQGYAQTTQAYGQQSYGTYGQPTDVSYTQAQTTATYGQTAYATSYGQPPTGYTTPTAPQAYSQPVQGYGTGAYDTTTATVTTTQASYAAQSAYGTQPAYPAYGQQPAATAPTRPQDGNKPTETSQPQSSTGGYNQPSLGYGQSNYSYPQVPGSYPMQPVTAPPSYPPTSYSSTQPTSYDQSSYSQQNTYGQPSSYGQQSSYGQQSSYGQQPPTSYPPQTGSYSQAPSQYSQQSSSYGQQSSFRQDHPSSMGVYGQESGGFSGPGENRSMSGPDNRGRGRGGFDRGGMSRGGRGGGRGGMGSAGERGGFNKPGGPMDEGPDLDLGPPVDPDEDSDNSAIYVQGLNDSVTLDDLADFFKQCGVVKMNKRTGQPMIHIYLDKETGKPKGDATVSYEDPPTAKAAVEWFDGKDFQGSKLKVSLARKKPPMNSMRGGLPPREGRGMPPPLRGGPGGPGGPGGPMGRMGGRGGDRGGFPPRGPRGSRGNPSGGGNVQHRAGDWQCPNPYVLVLAN

SEQ ID NO: 852422 - protein, 639 aa, Homo sapiens
MASTDYSTYSQAAAQQGYSAYTAQPTQGYAQTTQAYGQQSYGTYGQPTDVSYTQAQTTATYGQTAYATSYGQPPTGYTTPTAPQAYSQPVQGYGTGAYDTTTATVTTTQASYAAQSAYGTQPAYPAYGQQPAATAPTRPQDGNKPTETSQPQSSTGGYNQPSLGYGQSNYSYPQVPGSYPMQPVTAPPSYPPTSYSSTQPTSYDQSSYSQQNTYGQPSSYGQQSSYGQQSSYGQQPPTSYPPQTGSYSQAPSQYSQQSSSYGQQSSFRQDHPSSMGVYGQESGGFSGPGENRSMSGPDNRGRGRGGFDRGGMSRGGRGGGRGGMGSAGERGGFNKPGGPMDEGPDLDLGPPVDPDEDSDNSAIYVQGLNDSVTLDDLADFFKQCGVVKMNKRTGQPMIHIYLDKETGKPKGDATVSYEDPPTAKAAVEWFDGKDFQGSKLKVSLARKKPPMNSMRGGLPPREGRGMPPPLRGGPGGPGGPGGPMGRMGGRGGDRGGFPPRGPRGSRGNPSGGGNVQHRAGDWQCPNPGCGNQNFAWRTECNQCGDRGRGGPGGMRGGRGGLMDRGGPGGMFRGGRGGDRGGFRGGRGMDRGGFGGGRRGGPGGPPGPLMEQMGGRRGGRGGPGKMDKGEHRQERRDRPY

SEQ ID NO: 852423 - protein, 652 aa, Homo sapiens
MASTDYSTYSQAAAQQGYSAYTAQPTQGYAQTTQAYGQQSYGTYGQPTDVSYTQAQTTATYGQTAYATSYGQPPTGYTTPTAPQAYSQPVQGYGTGAYDTTTATVTTTQASYAAQSAYGTQPAYPAYGQQPAATAPTRPQDGNKPTETSQPQSSTGGYNQPSLGYGQSNYSYPQVPGSYPMQPVTAPPSYPPTSYSSTQPTSYDQSSYSQQNTYGQPSSYGQQSSYGQQSSYGQQPPTSYPPQTGSYSQAPSQYSQQSSSYGQQSSFRQDHPSSMGVYGQESGGFSGPGENRSMSGPDNRGRGRGGFDRGGMSRGGRGGGRGGMGSAGERGGFNKPGGPMDEGPDLDLGPPVDPDEDSDNSAIYVQGLNDSVTLDDLADFFKQCGVVKMNKRTGQPMIHIYLDKETGKPKGDATVSYEDPPTAKAAVEWFDGKDFQGSKLKVSLARKKPPMNSMRGGLPPREGRGMPPPLRGGPGGPGGPGGPMGRMGGRGGDRGGFPPRGPRGSRGNPSGGGNVQHRAGDWQCPNPSIGDFCCDVIVCRGCGNQNFAWRTECNQCGDRGRGGPGGMRGGRGGLMDRGGPGGMFRGGRGGDRGGFRGGRGMDRGGFGGGRRGGPGGPPGPLMEQMGGRRGGRGGPGKMDKGEHRQERRDRPY

SEQ ID NO: 852424 - protein, 534 aa, Homo sapiens; identical to SEQ ID NO: 852421

SEQ ID NO: 852425 - protein, 583 aa, Homo sapiens; identical to SEQ ID NO: 852420

SEQ ID NO: 852426 - protein, 548 aa, Homo sapiens
MASTDYSTYSQAAAQQGYSAYTAQPTQGYAQTTQAYGQQSYGTYGQPTDVSYTQAQTTATYGQTAYATSYGQPPTGYTTPTAPQAYSQPVQGYGTGAYDTTTATVTTTQASYAAQSAYGTQPAYPAYGQQPAATAPTRPQDGNKPTETSQPQSSTGGYNQPSLGYGQSNYSYPQVPGSYPMQPVTAPPSYPPTSYSSTQPTSYDQSSYSQQNTYGQPSSYGQQSSYGQQSSYGQQPPTSYPPQTGSYSQAPSQYSQQSSSYGQQSSFRQDHPSSMGVYGQESGGFSGPGENRSMSGPDNRGRGRGGFDRGGMSRGGRGGGRGGMGSAGERGGFNKPGGPMDEGPDLDLGPPVDPDEDSDNSAIYVQGLNDSVTLDDLADFFKQCGVVKMNKRTGQPMIHIYLDKETGKPKGDATVSYEDPPTAKAAVEWFDGKDFQGSKLKVSLARKKPPMNSMRGGLPPREGRGMPPPLRGGPGGPGGPGGPMGRMGGRGGDRGGFPPRGPRGSRGNPSGGGNVQHRAGDWQCPNPGCGNQNFAWRTECNQCGPLDL

SEQ ID NO: 852427 - protein, 713 aa, Homo sapiens
MASTDYSTYSQAAAQQGYSAYTAQPTQGYAQTTQAYGQQSYGTYGQPTDVSYTQAQTTATYGQTAYATSYGQPPTGYTTPTAPQAYSQPVQGYGTGAYDTTTATVTTTQASYAAQSAYGTQPAYPAYGQQPAATAPTRPQDGNKPTETSQPQSSTGGYNQPSLGYGQSNYSYPQVPGSYPMQPVTAPPSYPPTSYSSTQPTSYDQSSYSQQNTYGQPSSYGQQSSYGQQSSYGQQPPTSYPPQTGSYSQAPSQYSQQSSSYGQQSSFRQDHPSSMGVYGQESGGFSGPGENRSMSGPDNRGRGRGGFDRGGMSRGGRGGGRGGMGVASSAPPLTGKRGRGRPRKANLLDSMFGSPGGLREAGILPCGLCGKVFTDANRLRQHEAQHGVTSLQLGYIDLPPPRLGENGLPISEDPDGPRKRSRTRKQVACEICGKIFRDVYHLNRHKLSHSGEKPYSCPVCGLRFKRKDRMSYHVRSHDGSVGKPYICQSCGKGFSRPDHLNGHIKQVHTSERPHKCQTCNASFATRDRLRSHLACHEDKVPCQVCGKYLRAAYMADHLKKHSEGPSNFCSICNREGQKCSHQDPIESSDSYGDLSDASDLKTPEKQSANGSFSCDMAVPKNKMESDGEKKYPCPECGSFFRSKSYLNKHIQKVHVRALGGPLGDLGPALGSPFSPQQNMSLLESFGFQIVQSAFASSLVDPEVDQQPMGPEGK

SEQ ID NO: 852428 - protein, 609 aa, Homo sapiens
MASTDYSTYSQAAAQQGYSAYTAQPTQGYAQTTQAYGQQSYGTYGQPTDVSYTQAQTTATYGQTAYATSYGQPPTGYTTPTAPQAYSQPVQGYGTGAYDTTTATVTTTQASYAAQSAYGTQPAYPAYGQQPAATAPTRPQDGNKPTETSQPQSSTGGYNQPSLGYGQSNYSYPQVPGSYPMQPVTAPPSYPPTSYSSTQPTSYDQSSYSQQNTYGQPSSYGQQSSYGQQSSYGQQPPTSYPPQTGSYSQAPSQYSQQSSSYGQQSSFRQDHPSSMGVYGQESGGFSGPGENRSMSGPDNRGRGRGGFDRGGMSRGGRGGGRGGMGVASSAPPLTGKRGRGRPRKANLLDSMFGSPGGLREAGILPCGLCGKVFTDANRLRQHEAQHGVTSLQLGYIDLPPPRLGENGLPISEDPDGPRKRSRTRKQVACEICGKIFRDVYHLNRHKLSHSGEKPYSCPVCGLRFKRKDRMSYHVRSHDGSVGKPYICQSCGKGFSRPDHLNGHIKQVHTSERPHKCQVWVGSSSGLPPLEPLPSDLPSWDFAQPALWRSSHSVPDTAFSLSLKKSFPALENLGPAHSSNTLFCPAPPGYLRQGWTTPEGSRAFTQWPVG

SEQ ID NO: 852429 - protein, 354 aa, Homo sapiens; identical to SEQ ID NO: 852405

SEQ ID NO: 852430 - protein, 759 aa, Homo sapiens
MASTDYSTYSQAAAQQGYSAYTAQPTQGYAQTTQAYGQQSYGTYGQPTDVSYTQAQTTATYGQTAYATSYGQPPTGYTTPTAPQAYSQPVQGYGTGAYDTTTATVTTTQASYAAQSAYGTQPAYPAYGQQPAATAPTRPQDGNKPTETSQPQSSTGGYNQPSLGYGQSNYSYPQVPGSYPMQPVTAPPSYPPTSYSSTQPTSYDQSSYSQQNTYGQPSSYGQQSSYGQQSSYGQQPPTSYPPQTGSYSQAPSQYSQQSSSYGQQSSFRQDHPSSMGVYGQESGGFSGPGENRSMSGPDNRGRGRGGFDRGGMSRGGRGGGRGGMGVASSAPPLTGKRGRGRPRKANLLDSMFGSPGGLREAGILPCGLCGKVFTDANRLRQHEAQHGVTSLQLGYIDLPPPRLGENGLPISEDPDGPRKRSRTRKQVACEICGKIFRDVYHLNRHKLSHSGEKPYSCPVCGLRFKRKDRMSYHVRSHDGSVGKPYICQSCGKGFSRPDHLNGHIKQVHTSERPHKCQTCNASFATRDRLRSHLACHEDKVPCQVCGKYLRAAYMADHLKKHSEGPSNFCSICNRGFSSASYLKVHVKTHHGVPLPQVSRHQEPILNGGAAFHCARTYGNKEGQKCSHQDPIESSDSYGDLSDASDLKTPEKQSANGSFSCDMAVPKNKMESDGEKKYPCPECGSFFRSKSYLNKHIQKVHVRALGGPLGDLGPALGSPFSPQQNMSLLESFGFQIVQSAFASSLVDPEVDQQPMGPEGK

SEQ ID NO: 852431 - protein, 354 aa, Homo sapiens; identical to SEQ ID NO: 852405

SEQ ID NO: 852432 - protein, 419 aa, Homo sapiens
MDRVTTVIPRYLGATPCSQSLHLHPTLLPAIPLHSRLVMIRAVTLSRTPMGNRAAMDSRVAMVNKAAMGSSLPLVTHPKLDPTAKLQVNIANRAAATGSRGPMDEGPDLDLGPPVDPDEDSDNSAIYVQGLNDSVTLDDLADFFKQCGVVKMNKRTGQPMIHIYLDKETGKPKGDATVSYEDPPTAKAAVEWFDGKDFQGSKLKVSLARKKPPMNSMRGGLPPREGRGMPPPLRGGPGGPGGPGGPMGRMGGRGGDRGGFPPRGPRGSRGNPSGGGNVQHRAGDWQCPNPGCGNQNFAWRTECNQCKAPKPEGFLPPPFPPPGGDRGRGGPGGMRGGRGGLMDRGGPGGMFRGGRGGDRGGFRGGRGMDRGGFGGGRRGGPGGPPGPLMEQMGGRRGGRGGPGKMDKGEHRQERRDRPY

SEQ ID NO: 852433 - protein, 713 aa, Homo sapiens; identical to SEQ ID NO: 852427

SEQ ID NO: 852434 - protein, 354 aa, Homo sapiens; identical to SEQ ID NO: 852405

SEQ ID NO: 852435 - protein, 325 aa, Homo sapiens
MASTDYSTYSQAAAQQGYSAYTAQPTQGYAQTTQAYGQQSYGTYGQPTDVSYTQAQTTATYGQTAYATSYGQPPTGYTTPTAPQAYSQPVQGYGTGAYDTTTATVTTTQASYAAQSAYGTQPAYPAYGQQPAATAPTRPQDGNKPTETSQPQSSTGGYNQPSLGYGQSNYSYPQVPGSYPMQPVTAPPSYPPTSYSSTQPTSYDQSSYSQQNTYGQPSSYGQQSSYGQQSSYGQQPPTSYPPQTGSYSQAPSQYSQQSSSYGQQSSFRQDHPSSMGVYGQESGGFSGPGENRSMSGPDNRGRGRGGFDRGGMSRGGRGGGRGGMG

SEQ ID NO: 852436 - protein, 582 aa, Homo sapiens
MASTDYSTYSQAAAQQGYSAYTAQPTQGYAQTTQAYGQQSYGTYGQPTDVSYTQAQTTATYGQTAYATSYGQPPTGYTTPTAPQAYSQPVQGYGTGAYDTTTATVTTTQASYAAQSAYGTQPAYPAYGQQPAATAPTRPQDGNKPTETSQPQSSTGGYNQPSLGYGQSNYSYPQVPGSYPMQPVTAPPSYPPTSYSSTQPTSYDQSSYSQQNTYGQPSSYGQQSSYGQQSSYGQQPPTSYPPQTGSYSQAPSQYSQQSSSYGQQSSFRQDHPSSMGVYGQESGGFSGPGENRSMSGPDNRGRGRGGFDRGGMSRGGRGGGRGGMGVASSAPPLTGKRGRGRPRKANLLDSMFGSPGGLREAGILPCGLCGKVFTDANRLRQHEAQHGVTSLQLGYIDLPPPRLGENGLPISEDPDGPRKRSRTRKQVACEICGKIFRDVYHLNRHKLSHSGEKPYSCPVCGLRFKRKDRMSYHVRSHDGSVGKPYICQSCGKGFSRPDHLNGHIKQVHTSERPHKCQVWVGSSSGLPPLEPLPSDLPSWDFAQPALWRSSHSVPDTAFSLSLKKSFPALENLGPAHSSNTQI

SEQ ID NO: 852437 - protein, 354 aa, Homo sapiens; identical to SEQ ID NO: 852405

SEQ ID NO: 852438 - protein, 638 aa, Homo sapiens
MASTDYSTYSQAAAQQGYSAYTAQPTQGYAQTTQAYGQQSYGTYGQPTDVSYTQAQTTATYGQTAYATSYGQPPTGYTTPTAPQAYSQPVQGYGTGAYDTTTATVTTTQASYAAQSAYGTQPAYPAYGQQPAATAPTRPQDGNKPTETSQPQSSTGGYNQPSLGYGQSNYSYPQVPGSYPMQPVTAPPSYPPTSYSSTQPTSYDQSSYSQQNTYGQQPPTSYPPQTGSYSQAPSQYSQQSSSYGQQSSFRQDHPSSMGVYGQESGGFSGPGENRSMSGPDNRGRGRGGFDRGGMSRGGRGGGRGGMGSAGERGGFNKPGGPMDEGPDLDLGPPVDPDEDSDNSAIYVQGLNDSVTLDDLADFFKQCGVVKMNKRTGQPMIHIYLDKETGKPKGDATVSYEDPPTAKAAVEWFDGKDFQGSKLKVSLARKKPPMNSMRGGLPPREGRGMPPPLRGGPGGPGGPGGPMGRMGGRGGDRGGFPPRGPRGSRGNPSGGGNVQHRAGDWQCPNPGCGNQNFAWRTECNQCKAPKPEGFLPPPFPPPGGDRGRGGPGGMRGGRGGLMDRGGPGGMFRGGRGGDRGGFRGGRGMDRGGFGGGRRGGPGGPPGPLMEQMGGRRGGRGGPGKMDKGEHRQERRDRPY

SEQ ID NO: 852439 - protein, 478 aa, Homo sapiens
MASTDYSTYSQAAAQQGYSAYTAQPTQGYAQTTQAYGQQSYGTYGQPTDVSYTQAQTTATYGQTAYATSYGQPPTGYTTPTAPQAYSQPVQGYGTGAYDTTTATVTTTQASYAAQSAYGTQPAYPAYGQQPAATAPTRPQDGNKPTETSQPQSSTGGYNQPSLGYGQSNYSYPQVPGSYPMQPVTAPPSYPPTSYSSTQPTSYDQSSYSQQNTYGQPSSYGQQSSYGQQSSYGQQPPTSYPPQTGSYSQAPSQYSQQSSSYGQQNVTGCASMYLHTEGFSGPSPGDGAMGYGYEKPLRPFPDDVCVVPEKFEGDIKQEGVGAFREGPPYQRRGALQLWQFLVALLDDPTNAHFIAWTGRGMEFKLIEPEEVARLWGIQKNRPAMNYDKLSRSLRYYYEKGIMQKVAGERYVYKFVCEPEALFSLAFPDNQRPALKAEFDRPVSEEDTVPLSHLDESPAYLPELAGPAQPFGPKGGYSY

SEQ ID NO: 852440 - protein, 432 aa, Homo sapiens
MASTDYSTYSQAAAQQGYSAYTAQPTQGYAQTTQAYGQQSYGTYGQPTDVSYTQAQTTATYGQTAYATSYGQPPTGYTTPTAPQAYSQPVQGYGTGAYDTTTATVTTTQASYAAQSAYGTQPAYPAYGQQPAATAPTRPQDGNKPTETSQPQSSTGGYNQPSLGYGQSNYSYPQVPGSYPMQPVTAPPSYPPTSYSSTQPTSYDQSSYSQQNTYGQPSSYGQQSSYGQQSSYGQQPPTSYPPQTGSYSQAPSQYSQQSSSYGQQSSGQIQLWQFLLELLSDSSNSSCITWEGTNGEFKMTDPDEVARRWGQRKSKPNMNYDKLSRALRYYYDKNIMTKVHGKSYAYKFDFHGIAQALQPHPTESSLYKYPSDISYMGSYHAHQQKVNFVAPHPPALPVTSSSFFAAPNPYWNSPTGGIYPNTRLPTSHMPSH

SEQ ID NO: 852441 - protein, 360 aa, Homo sapiens
MASTDYSTYSQAAAQQGYSAYTAQPTQGYAQTTQAYGQQSYGTYGQPTDVSYTQAQTTATYGQTAYATSYGQPPTGYTTPTAPQAYSQPVQGYGTGAYDTTTATVTTTQASYAAQSAYGTQPAYPAYGQQPAATAPTRPQDGNKPTETSQPQSSTGGYNQPSLGYGQSNYSYPQVPGSYPMQPVTAPPSYPPTSYSSTQPTSYDQSSYSQQNTYGQPSSYGQQSSYGQQSSYGQQPPTSYPPQTGSYSQAPSQYSQQSSSYGQQIAIAPNGALQLASPGTDGVQGLQTLTMTNSGSTQQGTTILQYAQTSDGQQILVPSNQVVVQTASGDMPTYQIRTTPSATSLPQTVVMTSPVTLTSQ

SEQ ID NO: 852442 - protein, 244 aa, Homo sapiens
MASTDYSTYSQAAAQQGYSAYTAQPTQGYAQTTQAYGQQSYGTYGQPTDVSYTQAQTTATYGQTAYATSYGQPPTGYTTPTAPQAYSQPVQGYGTGAYDTTTATVTTTQASYAAQSAYGTQPAYPAYGQQPAATAPTRPQDGNKPTETSQPQSSTGGYNQPSLGYGQSNYSYPQVPGSYPMQPVTAPPSYPPTSYSSTQPTSYDQSSYSQQNTYGQPSSYGQQSSYGQQSSYGHTLRGVRARSF

SEQ ID NO: 852443 - protein, 262 aa, Homo sapiens
MASTDYSTYSQAAAQQGYSAYTAQPTQGYAQTTQAYGQQSYGTYGQPTDVSYTQAQTTATYGQTAYATSYGQPPTGYTTPTAPQAYSQPVQGYGTGAYDTTTATVTTTQASYAAQSAYGTQPAYPAYGQQPAATAPTRPQDGNKPTETSQPQSSTGGYNQPSLGYGQSNYSYPQVPGSYPMQPVTAPPSYPPTSYSSTQPTSYDCYSHHHPGLLMQLSLHMALSLLIQPMGSSQQPCTYKTAGCNKPSETSQPQSSNGVTPT

SEQ ID NO: 852444 - protein, 537 aa, Homo sapiens
MERVNDASCGPSGCYTYQVSRHSTEMLHNLNQQRKNGGRFCDVLLRVGDESFPAHRAVLAACSEYFESVFSAQLGDGGAADGGPADVGGATAAPGGGAGGSRELEMHTISSKVFGDILDFAYTSRIVVRLESFPELMTAAKFLLMRSVIEICQEVIKQSNVQILVPPARADIMLFRPPGTSDLGFPLDMTNGAALAANSNGIAGSMQPEEEAARAAGAAIAGQASLPVLPGVDRLPMVAGPLSPQLLTSPFPSVASSAPPLTGKRGRGRPRKANLLDSMFGSPGGLREAGILPCGLCGKVFTDANRLRQHEAQHGVTSLQLGYIDLPPPRLGENGLPISEDPDGPRKRSRTRKQVACEICGKIFRDVYHLNRHKLSHSGEKPYSCPVCGLRFKRKDRMSYHVRSHDGSVGKPYICQSCGKGFSRPDHLNGHIKQVHTSERPHKCQVWVGSSSGLPPLEPLPSDLPSWDFAQPALWRSSHSVPDTAFSLSLKKSFPALENLGPAHSSNTLFCPAPPGYLRQGWTTPEGSRAFTQWPVG

SEQ ID NO: 852445 - protein, 132 aa, Homo sapiens
  misc_feature (5)..(5): Xaa can be any naturally occurring amino acid
  misc_feature (15)..(15): Xaa can be any naturally occurring amino acid
  misc_feature (23)..(23): Xaa can be any naturally occurring amino acid
  misc_feature (25)..(25): Xaa can be any naturally occurring amino acid
  misc_feature (38)..(38): Xaa can be any naturally occurring amino acid
  misc_feature (40)..(40): Xaa can be any naturally occurring amino acid
RGPGXKRGSPKGPGXPRTLGEEXFXPQVEAGKCPIRVXNXTWVVKTSATPGRPQSLKASSRHPFRPRVVIVAEVALVACGEEEVASWIVVVPVECSEVAVVETEVASVVAGAWTEVALVEEDEVALGGPLDL

SEQ ID NO: 852446 - protein, 125 aa, Homo sapiens
CVALEDPAHPLGQQSSLGNESSYGQQPPTSYPPQTGSYSQAPSQYSQQSSSYGQQSEKPYQCDFKDCERRFSRSDQLKRHQRRHTGVKPFQCKTCQRKFSRSDHLKTHTRTHTGKTSEKPFSCRW

SEQ ID NO: 852447 - protein, 641 aa, Homo sapiens
MERVNDASCGPSGCYTYQVSRHSTEMLHNLNQQRKNGGRFCDVLLRVGDESFPAHRAVLAACSEYFESVFSAQLGDGGAADGGPADVGGATAAPGGGAGGSRELEMHTISSKVFGDILDFAYTSRIVVRLESFPELMTAAKFLLMRSVIEICQEVIKQSNVQILVPPARADIMLFRPPGTSDLGFPLDMTNGAALAANSNGIAGSMQPEEEAARAAGAAIAGQASLPVLPGVDRLPMVAGPLSPQLLTSPFPSVASSAPPLTGKRGRGRPRKANLLDSMFGSPGGLREAGILPCGLCGKVFTDANRLRQHEAQHGVTSLQLGYIDLPPPRLGENGLPISEDPDGPRKRSRTRKQVACEICGKIFRDVYHLNRHKLSHSGEKPYSCPVCGLRFKRKDRMSYHVRSHDGSVGKPYICQSCGKGFSRPDHLNGHIKQVHTSERPHKCQTCNASFATRDRLRSHLACHEDKVPCQVCGKYLRAAYMADHLKKHSEGPSNFCSICNREGQKCSHQDPIESSDSYGDLSDASDLKTPEKQSANGSFSCDMAVPKNKMESDGEKKYPCPECGSFFRSKSYLNKHIQKVHVRALGGPLGDLGPALGSPFSPQQNMSLLESFGFQIVQSAFASSLVDPEVDQQPMGPEGK

SEQ ID NO: 852448 - protein, 656 aa, Homo sapiens; identical to SEQ ID NO: 852410

SEQ ID NO: 852449 - protein, 354 aa, Homo sapiens; identical to SEQ ID NO: 852405

SEQ ID NO: 852450 - protein, 656 aa, Homo sapiens; identical to SEQ ID NO: 852410

SEQ ID NO: 852451 - protein, 656 aa, Homo sapiens; identical to SEQ ID NO: 852410

SEQ ID NO: 852452 - protein, 317 aa, Homo sapiens
MASTDYSTYSQAAAQQGYSAYTAQPTQGYAQTTQAYGQQSYGTYGQPTDVSYTQAQTTATYGQTAYATSYGQPPTGYTTPTAPQAYSQPVQGYGTGAYDTTTATVTTTQASYAAQSAYGTQPAYPAYGQQPAATAPTRPQDGNKPTETSQPQSSTGGYNQPSLGYGQSNYSYPQVPGSYPMQPVTAPPSYPPTSYSSTQPTSYDQSSYSQQNTYGQPSSYGQQSSYGQQSSYGQQPPTSYPPQTGSYSQAPSQYSQQSSSYGQQSSFRQDHPSSMGVYGQESGGFSGPGENRSMSGPDNRGRGRGGFDRGGMSRTHG

SEQ ID NO: 852453 - protein, 656 aa, Homo sapiens; identical to SEQ ID NO: 852410

SEQ ID NO: 852454 - protein, 656 aa, Homo sapiens; identical to SEQ ID NO: 852410

SEQ ID NO: 852455 - protein, 639 aa, Homo sapiens; identical to SEQ ID NO: 852422

SEQ ID NO: 852456 - protein, 652 aa, Homo sapiens; identical to SEQ ID NO: 852423

SEQ ID NO: 852457 - protein, 656 aa, Homo sapiens
MASTDYSTYSQAAAQQGYSAYTAQPTQGYAQTTQAYGQQSYGTYGQPTDVSYTQAQTTATYGQTAYATSYGQPPTGYTTPTAPQAYSQPVQGYGTGAYDTTTATVTTTQASYAAQSAYGTQPAYPAYGQQPAATAPTRPQDGNKPTETSQPQSSTGGYNQPSLGYGQSNYSYPQVPGSYPMQPVTAPPSYPPTSYSSTQPTSYDQSSYSQQNTYGQPSSYGQQSSYGQQSSYGQQPPTSYPPQTGSYSQAPSQYSQQSSSYGQQSSFRQDHPSSMGVYGQESGGFSGPGENRSMSGPDNRGRGRGGFDRGGMSRGGRGGGRGGMGSAGERGGFNKPGGPMDEGPDLDLGPPVDPDEDSDNSAIYVQGLNDSVTLDDLADFFKQCGVVKMNKRTGQPMIHIYLDKETGKPKGDATVSYEDPPTAKAAVEWFDGKDFQGSKLKVSLARKKPPMNSMRGGLPPREGRGMPPPLRGGPGGPGGPGGPMGRMGGRGGDRGGFPPRGPRGSRGNPSGGGNVQHRAGDWQCPNPGCENQSFQWRTECNQCKAPKPEGFLPPPFPPPGGDRGRGGPGGMRGGRGGLMDRGGPGGMFRGGRGGDRGGFRGGRGMDRGGFGGGRRGGPGGPPGPLMEQMGGRRGGRGGPGKMDKGEHRQERRDRPY

SEQ ID NO: 852458 - protein, 632 aa, Homo sapiens
MASTDYSTYSQAAAQQGYSAYTAQPTQGYAQTTQAYGQQSYGTYGQPTDVSYTQAQTTATYGQTAYATSYGQPPTGYTTPTAPQAYSQPVQGYGTGAYDTTTATVTTTQASYAAQSAYGTQPAYPAYGQQPAATAPTRPQDGNKPTETSQPQSSTGGYNQPSLGYGQSNYSYPQVPGSYPMQPVTAPPSYPPTSYSSTQPTSYDQSSYSQQNTYGQPSSYGQQSSYGQQSSYGQQPPTSYPPQTGSYSQAPSQYSQQSSSYGQQSSFRQDHPSSMGVYGQESGGFSGPGENRSMSGPDNRGRGRGGFDRGGMSRGGRGGGRGGMGSAGERGGFNKPGGPMDEGPDLDLGPPVDPDEDSDNSAIYVQGLNDSVTLDDLADFFKQCGVVKMNKRTGQPMIHIYLDKETGKPKGDATVSYEDPPTAKAAVEWFDGKDFQGSKLKVSLARKKPPMNSMRGGLPPREGRGMPPPLRGGPGGPGGPGGPMGRMGGRGGDRGGFPPRGPRGSRGNPSGGGNVQHRAGDWQCPNPGCGNQNFAWGDRGRGGPGGMRGGRGGLMDRGGPGGMFRGGRGGDRGGFRGGRGMDRGGFGGGRRGGPGGPPGPLMEQMGGRRGGRGGPGKMDKGEHRQERRDRPY

SEQ ID NO: 852459 - protein, 534 aa, Homo sapiens; identical to SEQ ID NO: 852421

SEQ ID NO: 852460 - protein, 583 aa, Homo sapiens; identical to SEQ ID NO: 852420

SEQ ID NO: 852461 - protein, 548 aa, Homo sapiens; identical to SEQ ID NO: 852426

SEQ ID NO: 852462 - protein, 609 aa, Homo sapiens
MASTDYSTYSQAAAQQGYSAYTAQPTQGYAQTTQAYGQQSYGTYGQPTDVSYTQAQTTATYGQTAYATSYGQPPTGYTTPTAPQAYSQPVQGYGTGAYDTTTATVTTTQASYAAQSAYGTQPAYPAYGQQPAATAPTRPQDGNKPTETSQPQSSTGGYNQPSLGYGQSNYSYPQVPGSYPMQPVTAPPSYPPTSYSSTQPTSYDQSSYSQQNTYGQPSSYGQQSSYGQQSSYGQQPPTSYPPQTGSYSQAPSQYSQQSSSYGQQSSFRQDHPSSMGVYGQESGGFSGPGENRSMSGPDNRGRGRGGFDRGGMSRGGRGGGRGGMGVASSAPPLTGKRGRGRPRKANLLDSMFGSPGGLREAGILPCGLCGKVFTDANRLRQHEAQHGVTSLQLGYIDLPPPRLGENGLPISEDPDGPRKRSRTRKQVACEICGKIFRDVYHLNRHKLSHSGEKPYSCPVCGLRFKRKDRMSYHVRSHDGSVGKPYICQSCGKGFSRPDHLNGHIKQVHTSERPHKCQTCNASFATRDRLRSHLACHEDKVPCQVCGKYLRAAYMADHLKKHSEGPSNFCSICNRGLQAPGAHPEWGSSVPLRQDLWQQRRPEMLTSGSD

SEQ ID NO: 852463 - protein, 634 aa, Homo sapiens
MASTDYSTYSQAAAQQGYSAYTAQPTQGYAQTTQAYGQQSYGTYGQPTDVSYTQAQTTATYGQTAYATSYGQPPTGYTTPTAPQAYSQPVQGYGTGAYDTTTATVTTTQASYAAQSAYGTQPAYPAYGQQPAATAPTRPQDGNKPTETSQPQSSTGGYNQPSLGYGQSNYSYPQVPGSYPMQPVTAPPSYPPTSYSSTQPTSYDQSSYSQQNTYGQPSSYGQQSSYGQQSSYGQQPPTSYPPQTGSYSQAPSQYSQQSSSYGQQSSFRQDHPSSMGVYGQESGGFSGPGENRSMSGPDNRGRGRGGFDRGGMSRGGRGGGRGGMGSAGERGGFNKPGGPMDEGPDLDLGPPVDPDEDSDNSAIYVQGLNDSVTLDDLADFFKQCGVVKMNKRTGQPMIHIYLDKETGKPKGDATVSYEDPPTAKAAVEWFDGKDFQGSKLKVSLARKKPPMNSMRGGLPPREGRGMPPPLRGGPGGPGGPGGPMGRMGGRGGDRGGFPPRGPRGSRGNPSGGGNVQHRAGDWQCPNPSIGDFCCDVIVCRGCGNQNFAWRTECNQCGDRGRGGPGGMRGGRGGLMDRGGPGGMFRGGRGGDRGGFRGGRGMDRGGFGGGRRGGPGGPPGPLMEQMGSNIMSSLL

SEQ ID NO: 852464 - protein, 407 aa, Homo sapiens
MASTDYSTYSQAAAQQGYSAYTAQPTQGYAQTTQAYGQQSYGTYGQPTDVSYTQAQTTATYGQTAYATSYGQPPTGYTTPTAPQAYSQPVQGYGTGAYDTTTATVTTTQASYAAQSAYGTQPAYPAYGQQPAATAPTRPQDGNKPTETSQPQSSTGGYNQPSLGYGQSNYSYPQVPGSYPMQPVTAPPSYPPTSYSSTQPTSYDQSSYSQQNTYGQPSSYGQQSSYGQQSSYGQQPPTSYPPQTGSYSQAPSQYSQQSSSYGQQSSFRQDHPSSMGVYGQESGGFSGPGENRSMSGPDNRGRGRGGFDRGGMSRGGRGGGRGGMGSAGERGGFNKPGGPMDEGPDLDLGPPVDPDEDSDNSAIYVQGLNDSVTLDDLADFFKQCGVVKMNKRTGQPMIHIYLGPLDL

SEQ ID NO: 852465 - protein, 609 aa, Homo sapiens; identical to SEQ ID NO: 852428

SEQ ID NO: 852466 - protein, 594 aa, Homo sapiens
MASTDYSTYSQAAAQQGYSAYTAQPTQGYAQTTQAYGQQSYGTYGQPTDVSYTQAQTTATYGQTAYATSYGQPPTGYTTPTAPQAYSQPVQGYGTGAYDTTTATVTTTQASYAAQSAYGTQPAYPAYGQQPAATAPTRPQDGNKPTETSQPQSSTGGYNQPSLGYGQSNYSYPQVPGSYPMQPVTAPPSYPPTSYSSTQPTSYDQSSYSQQNTYGQPSSYGQQSSYGQQSSYGQQPPTSYPPQTGSYSQAPSQYSQQSSSYGQQSSFRQDHPSSMGVYGQESGGFSGPGENRSMSGPDNRGRGRGGFDRGGMSRGGRGGGRGGMGVASSAPPLTGKRGRGRPRKANLLDSMFGSPGGLREAGILPCGLCGKVFTDANRLRQHEAQHGVTSLQLGYIDLPPPRLGENGLPISEDPDGPRKRSRTRKQVACEICGKIFRDVYHLNRHKLSHSGEKPYSCPVCGLRFKRKDRMSYHVRSHDGSVGKPYICQSCGKGFSRPDHLNGHIKQVHTSERPHKCQTCNASFATRDRLRSHLACHEDKVPCQVCGKYLRAAYMADHLKKHSEGPSNFCSICNRGNLPTVSSLPEDGPERVWEA

SEQ ID NO: 852467 - protein, 325 aa, Homo sapiens; identical to SEQ ID NO: 852435

SEQ ID NO: 852468 - protein, 601 aa, Homo sapiens
MASTDYSTYSQAAAQQGYSAYTAQPTQGYAQTTQAYGQQSYGTYGQPTDVSYTQAQTTATYGQTAYATSYGQPPTGYTTPTAPQAYSQPVQGYGTGAYDTTTATVTTTQASYAAQSAYGTQPAYPAYGQQPAATAPTSSYSSTQPTSYDQSSYSQQNTYGQPSSYGQQSSYGQQSSYGQQPPTSYPPQTGSYSQAPSQYSQQSSSYGQQSSFRQDHPSSMGVYGQESGGFSGPGENRSMSGPDNRGRGRGGFDRGGMSRGGRGGGRGGMGSAGERGGFNKPGGPMDEGPDLDLGPPVDPDEDSDNSAIYVQGLNDSVTLDDLADFFKQCGVVKMNKRTGQPMIHIYLDKETGKPKGDATVSYEDPPTAKAAVEWFDGKDFQGSKLKVSLARKKPPMNSMRGGLPPREGRGMPPPLRGGPGGPGGPGGPMGRMGGRGGDRGGFPPRGPRGSRGNPSGGGNVQHRAGDWQCPNPGCGNQNFAWRTECNQCKAPKPEGFLPPPFPPPGGDRGRGGPGGMRGGRGGLMDRGGPGGMFRGGRGGDRGGFRGGRGMDRGGFGGGRRGGPGGPPGPLMEQMGGRRGGRGGPGKMDKGEHRQERRDRPY

SEQ ID NO: 852469 - protein, 477 aa, Homo sapiens
MASTDYSTYSQAAAQQGYSAYTAQPTQGYAQTTQAYGQQSYGTYGQPTDVSYTQAQTTATYGQTAYATSYGQPPTGYTTPTAPQAYSQPVQGYGTGAYDTTTATVTTTQASYAAQSAYGTQPAYPAYGQQPAATAPTRPQDGNKPTETSQPQSSTGGYNQPSLGYGQSNYSYPQVPGSYPMQPVTAPPSYPPTSYSSTQPTSYDQSSYSQQNTYGQPSSYGQQSSYGQQSSYGQQPPTSYPPQTGSYSQAPSQYSQQSSSYGQQSPPLGGAQTISKNTEQRPQPDPYQILGPTSSRLANPGSSGQIQLWQFLLELLSDSSNSSCITWEGTNGEFKMTDPDEVARRWGQRKSKPNMNYDKLSRALRYYYDKNIMTKVHGKSYAYKFDFHGIAQALQPHPTESSLYKYPSDISYMASYHAHQQKVNFVPPHPSSMPVTSSSFFGAASQYWTSPTGGIYPNPNVPRHPNTHVPSHLGSYY

SEQ ID NO: 852470 - protein, 334 aa, Homo sapiens
MASTDYSTYSQAAAQQGYSAYTAQPTQGYAQTTQAYGQQSYGTYGQPTDVSYTQAQTTATYGQTAYATSYGQPPTGYTTPTAPQAYSQPVQGYGTGAYDTTTATVTTTQASYAAQSAYGTQPAYPAYGQQPAATAPTRPQDGNKPTETSQPQSSTGGYNQPSLGYGQSNYSYPQVPGSYPMQPVTAPPSYPPTSYSSTQPTSYDQSSYSQQNTYGQPSSYGQQSSYGQQSSYGQQPPTSYPPQTGSYSQAPSQYSQQSSSYGQQSEKPYQCDFKDCERRFSRSDQLKRHQRRHTGVKPFQCKTCQRKFSRSDHLKTHTRTHTGKTSEKPFSCRW

SEQ ID NO: 852471 - protein, 297 aa, Homo sapiens
MASTDYSTYSQAAAQQGYSAYTAQPTQGYAQTTQAYGQQSYGTYGQPTDVSYTQAQTTATYGQTAYATSYGQPPTGYTTPTAPQAYSQPVQGYGTGAYDTTTATVTTTQASYAAQSAYGTQPAYPAYGQQPAATAPTRPQDGNKPTETSQPQSSTGGYNQHRAGDWQCPNPSIGDFCCDVIVCRGCGNQNFAWENQSCKPVGDRGRGGPGGMRGGRGGLMDRGGPGGMFRGGRGGDRGGFRGGRGMDRGGFGGGRRGGPGGPPGPLMEQMGGRRGGRGGPGKMDKGEHRQERRDRPY

SEQ ID NO: 852472 - protein, 214 aa, Homo sapiens
MSDLEDDETPQLSAHALAALQEFYAEQKQQIEPGEDDKYNIGIIEENWQLSQFWYSQETALQLAQEAIAAVGEGGRIACVSAPSVYQKLRELCRENFSIYIFEYDKRFAMYGEEFIFYDYNNPLDLPERIAAHSFDIVIADPPYLSEECLRKTSETVKYLTRGKILLCTGAIMEEQAAELLGVKMCTFVPRHTRNLANEFRCYVNYDSGLDCGI

SEQ ID NO: 852473 - protein, 105 aa, Homo sapiens
MYGEEFIFYDYNNPLDLPERIAAHSFDIVIADPPYLSEECLRKTSETVKYLTRGKILLCTGAIMEEQAAELLGVKMCTFVPRHTRNLANEFRCYVNYDSGLDCGI

SEQ ID NO: 852474 - protein, 214 aa, Homo sapiens; identical to SEQ ID NO: 852472

SEQ ID NO: 852475 - protein, 214 aa, Homo sapiens; identical to SEQ ID NO: 852472

SEQ ID NO: 852476 - protein, 302 aa, Homo sapiens
SHISATALRICEQPLTGCYFTTTDDMIILIYLFLLLWEDTQGWGFKDGIFHNSIWLERAAGVYHREARSGKYKLTYAEAKAVCEFEGGHLATYKQLEAARKIGFHVCAAGWMAKGRVGYPIVKPGPNCGFGKTGIIDYGIRLNRSERWDAYCYNPHAKECGGVFTDPKQIFKSPGFPNEYEDNQICYWHIRLKYGQRIHLSFLDFDLEDDPGCLADYVEIYDSYDDVHGFVGRYCGDELPDDIISTGNVMTLKFLSDASVTAGGFQIKYVAMDPVSKSSQGKNTSTTSTGNKNFLAGRFSHL

SEQ ID NO: 852477 - protein, 251 aa, Homo sapiens
SHISATALRICEQPLTGCYFTTTDDMIILIYLFLLLWEDTQGWGFKDGIFHNSIWLERAAGVYHREARSGKYKLTYAEAKAVCEFEGGHLATYKQLEAARKIGFHVCAAGWMAKGRVGYPIVKPGPNCGFGKTGIIDYGIRLNRSERWDAYCYNPHAKECGGVFTDPKQIFKSPGFPNEYEDNQICYWHIRLKYGQRIHLSFLDFDLEDDPGCLADYVEIYDSYDDVHGFVGRYCGDELPDDIISTGKVLN

SEQ ID NO: 852478 - protein, 266 aa, Homo sapiens
SHISATALRICEQPLTGCYFTTTDDMIILIYLFLLLWEDTQGWGFKDGIFHNSIWLERAAGVYHREARSGKYKLTYAEAKAVCEFEGGHLATYKQLEAARKIGFHVCAAGWMAKGRVGYPIVKPGPNCGFGKTGIIDYGIRLNRSERWDAYCYNPHAKECGGVFTDPKQIFKSPGFPNEYEDNQICYWHIRLKYGQRIHLSFLDFDLEDDPGCLADYVEIYDSYDDVHGFVGRYCGDELPDDIISTGRKKHSCYSVMRDVGTQTIP

SEQ ID NO: 852479 - protein, 302 aa, Homo sapiens; identical to SEQ ID NO: 852476

SEQ ID NO: 852480 - protein, 305 aa, Homo sapiens
SHISATALRICEQPLTGCYFTTTDDMIILIYLFLLLWEDTQGWGFKDGIFHNSIWLERAAGVYHREARSGKYKLTYAEAKAVCEFEGGHLATYKQLEAARKIGFHVCAAGWMAKGRVGYPIVKPGPNCGFGKTGIIDYGIRLNRSERWDAYCYNPHAKECGGVFTDPKQIFKSPGFPNEYEDNQICYWHIRLKYGQRIHLSFLDFDLEDDPGCLADYVEIYDSYDDVHGFVGRYCGDELPDDIISTDPHSRRVLPHTQKEGVLHREAKKNLDRQALLGLPTWSIAMRSHDLSNHISTWPSILHQT

SEQ ID NO: 852481 - protein, 221 aa, Homo sapiens
MSDGDYDYLIKFLALGDSGVGKTSVLYQYTDGKFNSKFITTVGIDFREKRVVYRASGPDGATGRGQRIHLQLWDTAGQERFRSLTTAFFRDAMGFLLLFDLTNEQSFLNVRNWISQLQMHAYCENPDIVLCGNKSDLEDQRVVKEEEAIALAEKYGIPYFETSAANGTNISQAIEMLLDLIMKRMERCVDKSWIPEGVVRSNGHASTDQLSEEKEKGACGC

SEQ ID NO: 852482 - protein, 86 aa, Homo sapiens
  misc_feature (15)..(15): Xaa can be any naturally occurring amino acid
YDEGDKEQAGTGPEXGIGGLCARGSENCWKAPGLWRGAGGSEFSDVEQAQNSRRYLSELLKTVTVIVDVSVGVNISDLKRFPGCGV

SEQ ID NO: 852483 - protein, 69 aa, Homo sapiens
SSHPTWWPPCGFLSPFPNRGIATRLWLGGLCARGSENCWKAPGLWRGAGGSEFSDVEQAQNSRRYLSGY

SEQ ID NO: 852484 - protein, 221 aa, Homo sapiens; identical to SEQ ID NO: 852481

SEQ ID NO: 852485 - protein, 221 aa, Homo sapiens; identical to SEQ ID NO: 852481

SEQ ID NO: 852486 - protein, 221 aa, Homo sapiens; identical to SEQ ID NO: 852481

SEQ ID NO: 852487 - protein, 213 aa, Homo sapiens
MSDGDYDYLIKFLALGDSGVGKTSVLYQYTDGKFNSKFITTVGIDFREKRVVYRASGPDGATGRGQRIHLQLWDTAGQERFRSLTTAFFRDAMGFLLLFDLTNEQSFLNVRNWISQLQMHAYCENPDIVLCGNKSDLEDQRVVKEEEAIPYFETSAANGTNISQAIEMLLDLIMKRMERCVDKSWIPEGVVRSNGHASTDQLSEEKEKGACGC

SEQ ID NO: 852488 - protein, 221 aa, Homo sapiens; identical to SEQ ID NO: 852481

SEQ ID NO: 852489 - protein, 73 aa, Homo sapiens
APTRRGGLLAVSFRRFRTEGLLLAFGLAVSVLGGPKTAGRPPVSGGEQAVASLVTWSRRRTVGDLKRFPGCGV

SEQ ID NO: 852490 - protein, 221 aa, Homo sapiens; identical to SEQ ID NO: 852481

SEQ ID NO: 852491 - protein, 221 aa, Homo sapiens; identical to SEQ ID NO: 852481

SEQ ID NO: 852492 - protein, 221 aa, Homo sapiens; identical to SEQ ID NO: 852481

SEQ ID NO: 852493 - protein, 221 aa, Homo sapiens; identical to SEQ ID NO: 852481

SEQ ID NO: 852494 - protein, 181 aa, Homo sapiens
MSDGDYDYLIKFLALGDSGVGKTSVLYQYTDGKFNSKFITTVGIDFREKRVVYRASGPDGATGRGQRIHLQLWDTAGQERFRSLTTAFFRDAMGFLLLFDLTNEQSFLNVRNWISQLQMHAYCENPDIVLCGNKSDLEDQRVVKEEEAIALAEKYGIPTLNDGAKGQRSNGSLARSMTGGT

SEQ ID NO: 852495 - protein, 69 aa, Homo sapiens; identical to SEQ ID NO: 852483

SEQ ID NO: 852496 - protein, 69 aa, Homo sapiens; identical to SEQ ID NO: 852483

SEQ ID NO: 852497 - protein, 846 aa, Homo sapiens
MEAPLRPAADILRRNPQQDYELVQRVGSGTYGDVYKARNVHTGELAAVKIIKLEPGDDFSLIQQEIFMVKECKHCNIVAYFGSYLSREKLWICMEYCGGGSLQDIYHVTGPLSELQIAYVCRETLQGLAYLHTKGKMHRDIKGANILLTDHGDVKLADFGVAAKITATIAKRKSFIGTPYWMAPEVAAVEKNGGYNQLCDIWAVGITAIELGELQPPMFDLHPMRALFLMSKSNFQPPKLKDKTKWSSTFHNFVKIALTKNPKKRPTAERLLTHTFVAQPGLSRALAVELLDKVNNPDNHAHYTEADDDDFEPHAIIRHTIRSTNRNARAERTASEINFDKLQFEPPLRKETEARDEMGLSSDPNFMLQWNPFVDGANTGKSTSKRAIPPPLPPKPRISSYPEDNFPDEEKASTIKHCPDSESRAPQILRRQSSPSCGPVAETSSIGNGDGISKLMSENTEGSAQAPQLPRKKDKRDFPKPAINGLPPTPKVLMGACFSKVFDGCPLKINCATSWIHPDTKDQYIIFGTEDGIYTLNLNELHEATMEQLFPRKCTWLYVINNTLMSLSEGKTFQLYSHNLIALFEHAKKPGLAAHIQTHRFPDRILPRKFALTTKIPDTKGCHKCCIVRNPYTGHKYLCGALQSGIVLLQWYEPMQKFMLIKHFDFPLPSPLNVFEMLVIPEQEYPMVCVAISKGTESNQVVQFETINLNSASSWFTEIGAGSQQLDSIHVTQLERDTVLVCLDKFVKIVNLQGKLKSSKKLASELSFDFRIESVVCLQDSVLAFWKHGMQGKSFKSDEVTQEISDETRVFRLLGSDRVVVLESRPTENPTAHSNLYILAGHENSY

SEQ ID NO: 852498 - protein, 846 aa, Homo sapiens; identical to SEQ ID NO: 852497

SEQ ID NO: 852499 - protein, 846 aa, Homo sapiens; identical to SEQ ID NO: 852497

SEQ ID NO: 852500 - protein, 779 aa, Homo sapiens
MVKECKHCNIVAYFGSYLSREKLWICMEYCGGGSLQDIYHVTGPLSELQIAYVCRETLQGLAYLHTKGKMHRDIKGANILLTDHGDVKLADFGVAAKITATIAKRKSFIGTPYWMAPEVAAVEKNGGYNQLCDIWAVGITAIELGELQPPMFDLHPMRALFLMSKSNFQPPKLKDKTKWSSTFHNFVKIALTKNPKKRPTAERLLTHTFVAQPGLSRALAVELLDKVNNPDNHAHYTEADDDDFEPHAIIRHTIRSTNRNARAERTASEINFDKLQFEPPLRKETEARDEMGLSSDPNFMLQWNPFVDGANTGKSTSKRAIPPPLPPKPRISSYPEDNFPDEEKASTIKHCPDSESRAPQILRRQSSPSCGPVAETSSIGNGDGISKLMSENTEGSAQAPQLPRKKDKRDFPKPAINGLPPTPKVLMGACFSKVFDGCPLKINCATSWIHPDTKDQYIIFGTEDGIYTLNLNELHEATMEQLFPRKCTWLYVINNTLMSLSEGKTFQLYSHNLIALFEHAKKPGLAAHIQTHRFPDRILPRKFALTTKIPDTKGCHKCCIVRNPYTGHKYLCGALQSGIVLLQWYEPMQKFMLIKHFDFPLPSPLNVFEMLVIPEQEYPMVCVAISKGTESNQVVQFETINLNSASSWFTEIGAGSQQLDSIHVTQLERDTVLVCLDKFVKIVNLQGKLKSSKKLASELSFDFRIESVVCLQDSVLAFWKHGMQGKSFKSDEVTQEISDETRVFRLLGSDRVVVLESRPTENPTAHSNLYILAGHENSY

SEQ ID NO: 852501 - protein, 726 aa, Homo sapiens
MDLYGILWWRITSRYLPCYWTIIRIANSLCMQRNLTADFGVAAKITATIAKRKSFIGTPYWMAPEVAAVEKNGGYNQLCDIWAVGITAIELGELQPPMFDLHPMRALFLMSKSNFQPPKLKDKTKWSSTFHNFVKIALTKNPKKRPTAERLLTHTFVAQPGLSRALAVELLDKVNNPDNHAHYTEADDDDFEPHAIIRHTIRSTNRNARAERTASEINFDKLQFEPPLRKETEARDEMGLSSDPNFMLQWNPFVDGANTGKSTSKRAIPPPLPPKPRISSYPEDNFPDEEKASTIKHCPDSESRAPQILRRQSSPSCGPVAETSSIGNGDGISKLMSENTEGSAQAPQLPRKKDKRDFPKPAINGLPPTPKVLMGACFSKVFDGCPLKINCATSWIHPDTKDQYIIFGTEDGIYTLNLNELHEATMEQLFPRKCTWLYVINNTLMSLSEGKTFQLYSHNLIALFEHAKKPGLAAHIQTHRFPDRILPRKFALTTKIPDTKGCHKCCIVRNPYTGHKYLCGALQSGIVLLQWYEPMQKFMLIKHFDFPLPSPLNVFEMLVIPEQEYPMVCVAISKGTESNQVVQFETINLNSASSWFTEIGAGSQQLDSIHVTQLERDTVLVCLDKFVKIVNLQGKLKSSKKLASELSFDFRIESVVCLQDSVLAFWKHGMQGKSFKSDEVTQEISDETRVFRLLGSDRVVVLESRPTENPTAHSNLYILAGHENSY

SEQ ID NO: 852502 - protein, 610 aa, Homo sapiens
ILYSTNIQDTQHYPLNHQWKMYTYNSEKRPTAERLLTHTFVAQPGLSRALAVELLDKVNNPDNHAHYTEADDDDFEPHAIIRHTIRSTNRNARAERTASEINFDKLQFEPPLRKETEARDEMGLSSDPNFMLQWNPFVDGANTGKSTSKRAIPPPLPPKPRISSYPEDNFPDEEKASTIKHCPDSESRAPQILRRQSSPSCGPVAETSSIGNGDGISKLMSENTEGSAQAPQLPRKKDKRDFPKPAINGLPPTPKVLMGACFSKVFDGCPLKINCATSWIHPDTKDQYIIFGTEDGIYTLNLNELHEATMEQLFPRKCTWLYVINNTLMSLSEGKTFQLYSHNLIALFEHAKKPGLAAHIQTHRFPDRILPRKFALTTKIPDTKGCHKCCIVRNPYTGHKYLCGALQSGIVLLQWYEPMQKFMLIKHFDFPLPSPLNVFEMLVIPEQEYPMVCVAISKGTESNQVVQFETINLNSASSWFTEIGAGSQQLDSIHVTQLERDTVLVCLDKFVKIVNLQGKLKSSKKLASELSFDFRIESVVCLQDSVLAFWKHGMQGKSFKSDEVTQEISDETRVFRLLGSDRVVVLESRPTENPTAHSNLYILAGHENSY

SEQ ID NO: 852503 - protein, 846 aa, Homo sapiens; identical to SEQ ID NO: 852497

SEQ ID NO: 852504 - protein, 805 aa, Homo sapiens
MEAPLRPAADILRRNPQQDYELVQRVGSGTYGDVYKARNVHTGELAAVKIIKLEPGDDFSLIQQEIFMVKECKHCNIVAYFGSYLSREKLWICMEYCGGGSLQDIYHVTGPLSELQIAYVCRETLQGLAYLHTKGKMHRDIKGANILLTDHGDVKLADFGVAAKITATIAKRKSFIGTPYWMAPEVAAVEKNGGYNQLCDIWAVGITAIELGELQPPMFDLHPMRALFLMSKSNFQPPKLKDKTKWSSTFHNFVKIALTKNPKKRPTAERLLTHTFVAQPGLSRALAVELLDKVNNPDNHAHYTEADDDDFEPHAIIRHTIRSTNRNARAERTASEINFDKLQFEPPLRKETEARDEMGLSSDPNFMLQWNPFVDGANTGKSTSKRAIPPPLPPKPRISSYPEDNFPDEEKASTIKHCPDSESRAPQILRRQSSPSCGPVAETSSIGNGDGISKLMSENTEGSAQAPQLPRKKDKRDFPKPAINGLPPTPKVLMGACFSKVFDGCPLKINCATSWIHPDTKDQYIIFGTEDGIYTLNLNELHEATMEQLFPRKCTWLYVINNTLMSLSEGKTFQLYSHNLIALFEHAKKPGLAAHIQTHRFPDRILPRKFALTTKIPDTKGCHKCCIVRNPYTGHKYLCGALQSGIVLLQWYEPMQKFMLIKHFDFPLPSPLNVFEMLVIPEQEYPMVCVAISKGTESNQVVQFETINLNSASSWFTEIGAGSQQLDSIHVTQLERDTVLVCLDKFVKIVNLQGKLKSSKKLASELSFDFRIESVVCLQDSVLAFWKHGMQGKSFKSDEGCRFGK

SEQ ID NO: 852505 - protein, 761 aa, Homo sapiens
MEAPLRPAADILRRNPQQDYELVQRVGSGTYGDVYKARNVHTGELAAVKIIKLEPGDDFSLIQQEIFMVKECKHCNIVAYFGSYLSREKLWICMEYCGGGSLQDIYHVTGPLSELQIAYVCRETLQGLAYLHTKGKMHRDIKGANILLTDHGDVKLADFGVAAKITATIAKRKSFIGTPYWMAPEVAAVEKNGGYNQLCDIWAVGITAIELGELQPPMFDLHPMRALFLMSKSNFQPPKLKDKTKWSSTFHNFVKIALTKNPKKRPTAERLLTHTFVAQPGLSRALAVELLDKVNNPDNHAHYTEADDDDFEPHAIIRHTIRSTNRNARAERTASEINFDKLQFEPPLRKETEARDEMGLSSDPNFMLQWNPFVDGANTGKSTSKRAIPPPLPPKPRISSYPEDNFPDEEKASTIKHCPDSESRAPQILRRQSSPSCGPVAETSSIGNGDGISKLMSENTEGSAQAPQLPRKKDKRDFPKPAINGLPPTPKVLMGACFSKVFDGCPLKINCATSWIHPDTKDQYIIFGTEDGIYTLNLNELHEATMEQLFPRKCTWLYVINNTLMSLSEGKTFQLYSHNLIALFEHAKKPGLAAHIQTHRFPDRILPRKFALTTKIPDTKGCHKCCIVRNPYTGHKYLCGALQSGIVLLQWYEPMQKFMLIKHFDFPLPSPLNVFEMLVIPEQEYPMVCVAISKGTESNQVVQFETINLNSASSWFTEIGAGSQQLDSIHVTQLERDTVLVCLDNCDLSSTRTFNQLATGL

SEQ ID NO: 852506 - protein, 578 aa, Homo sapiens
MEAPLRPAADILRRNPQQDYELVQRVGSGTYGDVYKARNVHTGELAAVKIIKLEPGDDFSLIQQEIFMVKECKHCNIVAYFGSYLSREKLWICMEYCGGGSLQDIYHVTGPLSELQIAYVCRETLQGLAYLHTKGKMHRDIKGANILLTDHGDVKLADFGVAAKITATIAKRKSFIGTPYWMAPEVAAVEKNGGYNQLCDIWAVGITAIELGELQPPMFDLHPMRALFLMSKSNFQPPKLKDKTKWSSTFHNFVKIALTKNPKKRPTAERLLTHTFVAQPGLSRALAVELLDKVNNPDNHAHYTEADDDDFEPHAIIRHTIRSTNRNARAERTASEINFDKLQFEPPLRKETEARDEMGLSSDPNFMLQWNPFVDGANTGKSTSKRAIPPPLPPKPRISSYPEDNFPDEEKASTIKHCPDSESRAPQILRRQSSPSCGPVAETSSIGNGDGISKLMSENTEGSAQAPQLPRKKDKRDFPKPAINGLPPTPKVLMGACFSKVFDGCPLKINCATSWIHPDTKDQYIIFGTEDGIYTLNLNELHEATMEQLFPRKCTWLYVINNTLMSLSGMYVMMKNKP

SEQ ID NO: 852507 - protein, 465 aa, Homo sapiens
MLPLWTLSLLLGAVAGKEVCYERLGCFSDDSPWSGITERPLHILPWSPKDVNTRFLLYTNENPNNFQEVAADSSSISGSNFKTNRKTRFIIHGFIDKGEENWLANVCKNLFKVESVNCICVDWKGGSRTGYTQASQNIRIVGAEVAYFVEFLQSAFGYSPSNVHVIGHSLGAHAAGEAGRRTNGTIGRITGLDPAEPCFQGTPELVRLDPSDAKFVDVIHTDGAPIVPNLGFGMSQVVGHLDFFPNGGVEMPGCKKNILSQIVDIDGIWEGTRDFAACNHLRSYKYYTDSIVNPDGFAGFPCASYNVFTANKCFPCPSGGCPQMGHYADRYPGKTNDVGQKFYLDTGDASNFARWRYKVSVTLSGKKVTGHILVSLFGNKGNSKQYEIFKGTLKPDSTHSNEFDSDVDVGDLQMVKFIWYNNVINPTLPRVGASKIIVETNVGKQFNFCSPETVREEVLLTLTPC

SEQ ID NO: 852508 - protein, 465 aa, Homo sapiens; identical to SEQ ID NO: 852507

SEQ ID NO: 852509 - protein, 465 aa, Homo sapiens; identical to SEQ ID NO: 852507

SEQ ID NO: 852510 - protein, 465 aa, Homo sapiens; identical to SEQ ID NO: 852507

SEQ ID NO: 852511 - protein, 418 aa, Homo sapiens
SFWGIAGKEVCYERLGCFSDDSPWSGITERPSNFKTNRKTRFIIHGFIDKGEENWLANVCKNLFKVESVNCICVDWKGGSRTGYTQASQNIRIVGAEVAYFVEFLQSAFGYSPSNVHVIGHSLGAHAAGEAGRRTNGTIGRITGLDPAEPCFQGTPELVRLDPSDAKFVDVIHTDGAPIVPNLGFGMSQVVGHLDFFPNGGVEMPGCKKNILSQIVDIDGIWEGTRDFAACNHLRSYKYYTDSIVNPDGFAGFPCASYNVFTANKCFPCPSGGCPQMGHYADRYPGKTNDVGQKFYLDTGDASNFARWRYKVSVTLSGKKVTGHILVSLFGNKGNSKQYEIFKGTLKPDSTHSNEFDSDVDVGDLQMVKFIWYNNVINPTLPRVGASKIIVETNVGKQFNFCSPETVREEVLLTLTPC

SEQ ID NO: 852512 - protein, 135 aa, Homo sapiens
MTPHGQELRKDPSIYCLGLQKMSTPASSYILMRTQTTFKKLPQIHQASVAPISKQIEKLAGTLKPDSTHSNEFDSDVDVGDLQMVKFIWYNNVINPTLPRVGASKIIVETNVGKQFNFCSPETVREEVLLTLTPC

SEQ ID NO: 852513 - protein, 160 aa, Homo sapiens
MLPLWTLSLLLGAVAGKEVCYERLGCFSDDSPWSGITERPLHILPWSPKDVNTRFLLYTNENPNNFQEVAADSSSISGSNFKTNRKTRFIIHGFIDKGEENWLANVCKNLFKVESVNCICVDWKGGSRTGYTQASQNIRIVGAEVAYFVEFLQGNYSRIA

SEQ ID NO: 852514 - protein, 140 aa, Homo sapiens
MLPLWTLSLLLGAVAGKEVCYERLGCFSDDSPWSGITERPLHILPWSPKDVNTRFLLYTNENPNNFQEVAADSSSISGSNFKTNRKTRFIIHGFIDKGEENWLANVCKNLFKVESVNCICVDWKGGSRNQDRGSRSGIFC

SEQ ID NO: 852515 - protein, 322 aa, Homo sapiens
RSNRLYHTAQSAFGYSPSNVHVIGHSLGAHAAGEAGRRTNGTIGRITGLDPAEPCFQGTPELVRLDPSDAKFVDVIHTDGAPIVPNLGFGMSQVVGHLDFFPNGGVEMPGCKKNILSQIVDIDGIWEGTRDFAACNHLRSYKYYTDSIVNPDGFAGFPCASYNVFTANKCFPCPSGGCPQMGHYADRYPGKTNDVGQKFYLDTGDASNFARWRYKVSVTLSGKKVTGHILVSLFGNKGNSKQYEIFKGTLKPDSTHSNEFDSDVDVGDLQMVKFIWYNNVINPTLPRVGASKIIVETNVGKQFNFCSPETVREEVLLTLTPC

SEQ ID NO: 852516 - protein, 153 aa, Homo sapiens
MLPLWTLSLLLGAVAGKEVCYERLGCFSDDSPWSGITERPLHILPWSPKDVNTRFLLYTNENPNNFQEVAADSSSISGSNFKTNRKTRFIIHGFIDKGEENWLANVCKNLFKVESVNCICVDWKGGSRTGYTQASQNIRIVGAEVAYFVEFLQ

SEQ ID NO: 852517 - protein, 189 aa, Homo sapiens
MLPLWTLSLLLGAVAGKEVCYERLGCFSDDSPWSGITERPLHILPWSPKDVNTRFLLYTNENPNNFQEVAADSSSISGSNFKTNRKTRKKKKFGGGGAEEGLPKNPIWVVGGAGRHDGYGRPRAPTARVPKEKPGRHRTAAAVVFPKKKTRRGGHRAGSSDNPRRGVQRGTTGAHSREALGRQINCPPR

SEQ ID NO: 852518 - protein, 963 aa, Homo sapiens
MLHFHLLKFKTRVIFSAVIIMVTGLCLFLLSLPHLHGVFEQVPAPWWTSLCPWPIMEAAAFQSGSLYPVASFLAAPMSELVPDLSFQVDLHTGLSEFSVTQRRLAHGWNEFVADNSEPVWKKYLDQFKNPLILLLLGSALVSVLTKEYEDAVSIATAVLVVVTVAFIQEYRSEKSLEELTKLVPPECNCLREGKLQHLLARELVPGDVVSLSIGDRIPADIRLTEVTDLLVDESSFTGEAEPCSKTDSPLTGGGDLTTLSNIVFMGTLVQYGRGQGVVIGTGESSQFGEVFKMMQAEETPKTPLQKSMDRLGKQLTLFSFGIIGLIMLIGWSQGKQLLSMFTIGVSLAVAAIPEGLPIVVMVTLVLGVLRMAKKRVIVKKLPIVETLGCCSVLCSDKTGTLTANEMTVTQLVTSDGLRAEVSGVGYDGQGTVCLLPSKEVIKEFSNVSVGKLVEAGCVANNAVIRKNAVMGQPTEGALMALAMKMDLSDIKNSYIRKKEIPFSSEQKWMAVKCSLKTEDQEDIYFMKGALEEVIRYCTMYNNGGIPLPLTPQQRSFCLQEEKRMGSLGLRVLALASGPELGRLTFLGLVGIIDPPRVGVKEAVQVLSESGVSVKMITGDALETALAIGRNIGLCNGKLQAMSGEEVDSVEKGELADRVGKVSVFFRTSPKHKLKIIKALQESGAIVAMTGDGVNDAVALKSADIGIAMGQTGTDVSKEAANMILVDDDFSAIMNAVEEGKGIFYNIKNFVRFQLSTSISALSLITLSTVFNLPSPLNAMQILWINIIMDGPPAQSLGVEPVDKDAFRQPPRSVRDTILSRALILKILMSAAIIFSGTLFIFWKEMPEDRASTPRTTTMTFTCFVFFDLFNALTCRSQTKLIFEIGFLRNHMFLYSVLGSILGQLAVIYIPPLQRVFQTENLGALDLLFLTGLASSVFILSELLKLCEKYCCSPKRVQMHPEDV

SEQ ID NO: 852519 - protein, 1023 aa, Homo sapiens
MLHFHLLKFKTRVIFSAVIIMVTGLCLFLLSLPHLHGVFEQVPAPWWTSLCPWPIMEAAAFQSGSLYPVASFLAAPMSELVPDLSFQVDLHTGLSEFSVTQRRLAHGWNEFVADNSEPVWKKYLDQFKNPLILLLLGSALVSVLTKEYEDAVSIATAVLVVVTVAFIQVSISEVPVRVSWAGQELHGVPTFKQHICCASCQEYRSEKSLEELTKLVPPECNCLREGKLQHLLARELVPGDVVSLSIGDRIPADIRLTEVTDLLVDESSFTGEAEPCSKTDSPLTGGGDLTTLSNIVFMGTLVQYGRGQGVVIGTGESSQFGEVFKMMQAEETPKTPLQKSMDRLGKQLTLFSFGIIGLIMLIGWSQGKQLLSMFTIGVSLAVAAIPEGLPIVVMVTLVLGVLRMAKKRVIVKKLPIVETLGCCSVLCSDKTGTLTANEMTVTQLVTSDGLRAEVSGVGYDGQGTVCLLPSKEVIKEFSNVSVGKLVEAGCVANNAVIRKNAVMGQPTEGALMALAMKMDLSDIKNSYIRKKEIPFSSEQKWMAVKCSLKTEDQEDIYFMKGALEEVIRYCTMYNNGGIPLPLTPQQRSFCLQEEKRMGSLGLRVLALASGPELGRLTFLGLVGIIDPPRVGVKEAVQVLSESGVSVKMITGDALETALAIGRNIGLCNGKLQAMSGEEVDSVEKGELADRVGKVSVFFRTSPKHKLKIIKALQESGAIVAMTGDGVNDAVALKSADIGIAMGQTGTDVSKEAANMILVDDDFSAIMNAVEEGKGIFYNIKNFVRFQLSTEVEASIPSVIKHHAWRAAADWLRVPRRSISALSLITLSTVFNLPSPLNAMQILWINIIMDGPPAQSLGVEPVDKDAFRQPPRSVRDTILSRALILKILMSAAIIFSGTLFIFWKEMPEDRASTPRTTTMTFTCFVFFDLFNALTCRSQTKLIFEIGFLRNHMFLYSVLGSILGQLAVIYIPPLQRVFQTENLGALDLLFLTGLASSVFILSELLKLCEKYCCSPKRVQMHPEDV

SEQ ID NO: 852520 - protein, 635 aa, Homo sapiens
IGRNIGLCNGKLQAMSGEEVDSVKKLPIVETLGCCSVLCSDKTGTLTANEMTVTQLVTSDGLRAEVSGVGYDGQGTVCLLPSKEVIKEFSNVSVGKLVEAGCVANNAVIRKNAVMGQPTEGALMALAMKMDLSDIKNSYIRKKEIPFSSEQKWMAVKCSLKTEDQEDIYFMKGALEEVIRYCTMYNNGGIPLPLTPQQRSFCLQEEKRMGSLGLRVLALASGPELGRLTFLGLVGIIDPPRVGVKEAVQVLSESGVSVKMITGDALETALAIGRNIGLCNGKLQAMSGEEVDSVEKGELADRVGKVSVFFRTSPKHKLKIIKALQESGAIVAMTGDGVNDAVALKSADIGIAMGQTGTDVSKEAANMILVDDDFSAIMNAVEEGKGIFYNIKNFVRFQLSTEVEASIPSVIKHHAWRAAADWLRVPRRSISALSLITLSTVFNLPSPLNAMQILWINIIMDGPPAQSLGVEPVDKDAFRQPPRSVRDTILSRALILKILMSAAIIFSGTLFIFWKEMPEDRASTPRTTTMTFTCFVFFDLFNALTCRSQTKLIFEIGFLRNHMFLYSVLGSILGQLAVIYIPPLQRVFQTENLGALDLLFLTGLASSVFILSELLKLCEKYCCSPKRVQMHPEDV

SEQ ID NO: 852521 - protein, 369 aa, Homo sapiens
MHGALRESGQGWGPPGLGRRVIHGLIGGIRCTLGTEGRTWLKDQFPVGRGAPVRTPPSPTNVSPRMPARGTSRGPSITSIWASHHCPLQQPMHWSSPHAGPLREEMALFSCRNAVEEGKGIFYNIKNFVRFQLSTEVEASIPSVIKHHAWRAAADWLRVPRRSISALSLITLSTVFNLPSPLNAMQILWINIIMDGPPAQSLGVEPVDKDAFRQPPRSVRDTILSRALILKILMSAAIIFSGTLFIFWKEMPEDRASTPRTTTMTFTCFVFFDLFNALTCRSQTKLIFEIGFLRNHMFLYSVLGSILGQLAVIYIPPLQRVFQTENLGALDLLFLTGLASSVFILSELLKLCEKYCCSPKRVQMHPEDV

SEQ ID NO: 852522 - protein, 934 aa, Homo sapiens
MLHFHLLKFKTRVIFSAVIIMVTGLCLFLLSLPHLHGVFEQVPAPWWTSLCPWPIMEAAAFQSGSLYPVASFLAAPMSELVPDLSFQVDLHTGLSEFSVTQRRLAHGWNEFVADNSEPVWKKYLDQFKNPLILLLLGSALVSVLTKEYEDAVSIATAVLVVVTVAFIQVSISEVPVRVSWAGQELHGVPTFKQHICCASCQEYRSEKSLEELTKLVPPECNCLREGKLQHLLARELVPGDVVSLSIGDRIPADIRLTEVTDLLVDESSFTGEAEPCSKTDSPLTGGGDLTTLSNIVFMGTLVQYGRGQGVVIGTGESSQFGEVFKMMQAEETPKTPLQKSMDRLGKQLTLFSFGIIGLIMLIGWSQGKQLLSMFTIGVSLAVAAIPEGLPIVVMVTLVLGVLRMAKKRVIVKKLPIVETLGCCSVLCSDKTGTLTANEMTVTQLVTSDGLRAEVSGVGYDGQGTVCLLPSKEVIKEFSNVSVGKLVEAGCVANNAVIRKNAVMGQPTEGALMALAMKMDLSDIKNSYIRKKEIPFSSEQKWMAVKCSLKTEDQEDIYFMKGALEEVIRYCTMYNNGGIPLPLTPQQRSFCLQEEKRMGSLGLRVLALASGPELGRLTFLGLVGIIDPPRVGVKEAVQVLSESGVSVKMITGDALETALAIGRNIGLCNGKLQAMSGEEVDSVEKGELADRVGKVSVFFRTSPKHKLKIIKALQESGAIVAMTGDGVNDAVALKSADIGIAMGQTGTDVSKEAANMILVDDDFSAIMNAVEEGKGIFYNIKNFVRFQLSTEVEASIPSVIKHHAWRAAADWLRVPRRSISALSLITLSTVFNLPSPLNAMQILWINIIMDGPPAQSLGVEPVDKDAFRQPPRSVRDTILSRALILKILMSAAIIFSGTLFIFWKEEMTFTLGLTGVASPPRETVTSWRKWCFLHP

SEQ ID NO: 852523 - protein, 909 aa, Homo sapiens
MLHFHLLKFKTRVIFSAVIIMVTGLCLFLLSLPHLHGVFEQVPAPWWTSLCPWPIMEAAAFQSGSLYPVASFLAAPMSELVPDLSFQVDLHTGLSEFSVTQRRLAHGWNEFVADNSEPVWKKYLDQFKNPLILLLLGSALVSVLTKEYEDAVSIATAVLVVVTVAFIQVSISEVPVRVSWAGQELHGVPTFKQHICCASCQEYRSEKSLEELTKLVPPECNCLREGKLQHLLARELVPGDVVSLSIGDRIPADIRLTEVTDLLVDESSFTGEAEPCSKTDSPLTGGGDLTTLSNIVFMGTLVQYGRGQGVVIGTGESSQFGEVFKMMQAEETPKTPLQKSMDRLGKQLTLFSFGIIGLIMLIGWSQGKQLLSMFTIGVSLAVAAIPEGLPIVVMVTLVLGVLRMAKKRVIVKKLPIVETLGCCSVLCSDKTGTLTANEMTVTQLVTSDGLRAEVSGVGYDGQGTVCLLPSKEVIKEFSNVSVGKLVEAGCVANNAVIRKNAVMGQPTEGALMALAMKMDLSDIKNSYIRKKEIPFSSEQKWMAVKCSLKTEDQEDIYFMKGALEEVIRYCTMYNNGGIPLPLTPQQRSFCLQEEKRMGSLGLRVLALASGPELGRLTFLGLVGIIDPPRVGVKEAVQVLSESGVSVKMITGDALETALAIGRNIGLCNGKLQAMSGEEVDSVEKGELADRVGKVSVFFRTSPKHKLKIIKALQESGAIVAMTGDGVNDAVALKSADIGIAMGQTGTDVSKEAANMILVDDDFSAIMNAVEEGKGIFYNIKNFVRFQLSTEVEASIPSVIKHHAWRAAADWLRVPRRSISALSLITLSTVFNLPSPLNAMQILWINIIMDGPPAQSLGVEPVDKDAFRQPPRSVRDTILSRALILKILMSAAIIFSGTLFIFWKELSLYY

SEQ ID NO: 852524 - protein, 855 aa, Homo sapiens
MLHFHLLKFKTRVIFSAVIIMVTGLCLFLLSLPHLHGVFEQVPAPWWTSLCPWPIMEAAAFQSGSLYPVASFLAAPMSELVPDLSFQVDLHTGLSEFSVTQRRLAHGWNEFVADNSEPVWKKYLDQFKNPLILLLLGSALVSVLTKEYEDAVSIATAVLVVVTVAFIQVSISEVPVRVSWAGQELHGVPTFKQHICCASCQEYRSEKSLEELTKLVPPECNCLREGKLQHLLARELVPGDVVSLSIGDRIPADIRLTEVTDLLVDESSFTGEAEPCSKTDSPLTGGGDLTTLSNIVFMGTLVQYGRGQGVVIGTGESSQFGEVFKMMQAEETPKTPLQKSMDRLGKQLTLFSFGIIGLIMLIGWSQGKQLLSMFTIGVSLAVAAIPEGLPIVVMVTLVLGVLRMAKKRVIVKKLPIVETLGCCSVLCSDKTGTLTANEMTVTQLVTSDGLRAEVSGVGYDGQGTVCLLPSKEVIKEFSNVSVGKLVEAGCVANNAVIRKNAVMGQPTEGALMALAMKMDLSDIKNSYIRKKEIPFSSEQKWMAVKCSLKTEDQEDIYFMKGALEEVIRYCTMYNNGGIPLPLTPQQRSFCLQEEKRMGSLGLRVLALASGPELGRLTFLGLVGIIDPPRVGVKEAVQVLSESGVSVKMITGDALETALAIGRNIGLCNGKLQAMSGEEVDSVEKGELADRVGKVSVFFRTSPKHKLKIIKALQESGAIVAMTGDGVNDAVALKSADIGIAMGQTGTDVSKEAANMILVDDDFSAIMNAVEEGKGIFYNIKNFVRFQLSTEVEASIPSVIKHHAWRAAADWLRVPRRSISALSLITLSTVFNLPSPLNAMQILWINIIMDGPPAQR

SEQ ID NO: 852525 - protein, 172 aa, Homo sapiens
MLHFHLLKFKTRVIFSAVIIMVTGLCLFLLSLPHLHGVFEQVPAPWWTSLCPWPIMEAAAFQSGSLYPVASFLAAPMSELVPDLSFQVDLHTGLSEFSVTQRRLAHGWNEFVADNSEPVWKKYLDQFKNPLILLLLGSALVSVLTKEYEDAVSIATAVLVVVTVAFIQVSIS

SEQ ID NO: 852526 - protein, 112 aa, Homo sapiens
LPFVFSKDQEDIYFMKGALEEVIRYCTMYNNGGIPLPLTPQQRSFCLQEEKRMGSLGLRGQCLWSRPRALSLHVTLTFKCIQAGSLVKEVTRPKESGSMLTAIMCAWNLMVT

SEQ ID NO: 852527 - protein, 963 aa, Homo sapiens; identical to SEQ ID NO: 852518

SEQ ID NO: 852528 - protein, 381 aa, Homo sapiens
DLKNTKQVNVIVVVRGVLALSSGISFQKIKRVPRTGDALETALAIGRNIGLCNGKLQAMSGEEVDSVEKGELADRVGKVSVFFRTSPKHKLKIIKALQESGAIVAMTGDGVNDAVALKSADIGIAMGQTGTDVSKEAANMILVDDDFSAIMNAVEEGKGIFYNIKNFVRFQLSTSISALSLITLSTVFNLPSPLNAMQILWINIIMDGPPAQSLGVEPVDKDAFRQPPRSVRDTILSRALILKILMSAAIIFSGTLFIFWKEMPEDRASTPRTTTMTFTCFVFFDLFNALTCRSQTKLIFEIGFLRNHMFLYSVLGSILGQLAVIYIPPLQRVFQTENLGALDLLFLTGLASSVFILSELLKLCEKYCCSPKRVQMHPEDV

SEQ ID NO: 852529 - protein, 909 aa, Homo sapiens; identical to SEQ ID NO: 852523

SEQ ID NO: 852530 - protein, 924 aa, Homo sapiens
MLHFHLLKFKTRVIFSAVIIMVTGLCLFLLSLPHLHGVFEQVPAPWWTSLCPWPIMEAAAFQSGSLYPVASFLAAPMSELVPDLSFQVDLHTGLSEFSVTQRRLAHGWNEFVADNSEPVWKKYLDQFKNPLILLLLGSALVSVLTKEYEDAVSIATAVLVVVTVAFIQVSISEVPVRVSWAGQELHGVPTFKQHICCASCQEYRSEKSLEELTKLVPPECNCLREGKLQHLLARELVPGDVVSLSIGDRIPADIRLTEVTDLLVDESSFTGEAEPCSKTDSPLTGGGDLTTLSNIVFMGTLVQYGRGQGVVIGTGESSQFGEVFKMMQAEETPKTPLQKSMDRLGKQLTLFSFGIIGLIMLIGWSQGKQLLSMFTIGVSLAVAAIPEGLPIVVMVTLVLGVLRMAKKRVIVKKLPIVETLGCCSVLCSDKTGTLTANEMTVTQLVTSDGLRAEVSGVGYDGQGTVCLLPSKEVIKEFSNVSVGKLVEAGCVANNAVIRKNAVMGQPTEGALMALAMKMDLSDIKNSYIRKKEIPFSSEQKWMAVKCSLKTEDQEDIYFMKGALEEVIRYCTMYNNGGIPLPLTPQQRSFCLQEEKRMGSLGLRVLALASGPELGRLTFLGLVGIIDPPRVGVKEAVQVLSESGVSVKMITGDALETALAIGRNIGLCNGKLQAMSGEEVDSVEKGELADRVGKVSVFFRTSPKHKLKIIKALQESGAIVAMTGDGVNDAVALKSADIGIAMGQTGTDVSKEAANMILVDDDFSAIMNAVEEGKGIFYNIKNFVRFQLSTEVEASIPSVIKHHAWRAAADWLRVPRRSISALSLITLSTVFNLPSPLNAMQILWINIIMDGPPAQSLGVEPVDKDAFRQPPRSVRDTILSRALILKILMSAAIIFSGTLFIFWKEVPCPHPHGGSKSACAGETLG

SEQ ID NO: 852531 - protein, 666 aa, Homo sapiens
MLHFHLLKFKTRVIFSAVIIMVTGLCLFLLSLPHLHGVFEQVPAPWWTSLCPWPIMEAAAFQSGSLYPVASFLAAPMSELVPDLSFQVDLHTGLSEFSVTQRRLAHGWNEFVADNSEPVWKKYLDQFKNPLILLLLGSALVSVLTKEYEDAVSIATAVLVVVTVAFIQVSISEVPVRVSWAGQELHGVPTFKQHICCASCQEYRSEKSLEELTKLVPPECNCLREGKLQHLLARELVPGDVVSLSIGDRIPADIRLTEVTDLLVDESSFTGEAEPCSKTDSPLTGGGDLTTLSNIVFMGTLVQYGRGQGVVIGTGESSQFGEVFKMMQAEETPKTPLQKSMDRLGKQLTLFSFGIIGLIMLIGWSQGKQLLSMFTIGVSLAVAAIPEGLPIVVMVTLVLGVLRMAKKRVIVKKLPIVETLGCCSVLCSDKTGTLTANEMTVTQLVTSDGLRAEVSGVGYDGQGTVCLLPSKEVIKEFSNVSVGKLVEAGCVANNAVIRKNAVMGQPTEGALMALAMKMDLSDIKNSYIRKKEIPFSSEQKWMAVKCSLKTEDQEDIYFMKGALEEVIRYCTMYNNGGIPLPLTPQQRSFCLQEEKRMGSLGLRVLALASGPELGRLTFLGLVGIIDPPRVGVKEAVQVLSESGVSVKMIETGSERGKLALSGRNWL

SEQ ID NO: 852532 - protein, 172 aa, Homo sapiens; identical to SEQ ID NO: 852525

SEQ ID NO: 852533 - protein, 135 aa, Homo sapiens
MFHVVYDIGVEKPPKFTEKGNLEVLLFTIQSKMRANNQKVYMPREGKLISDINKAWERLEKAEHERELALRNELIRQEKLEQLARRFDRKAAMRETWLSENQRLVSQDNFGFDLPAVEAWCSVVRPVPLNFCPIC

SEQ ID NO: 852534 - protein, 186 aa, Homo sapiens
SSSVSRVGPCRITDLYTDLRDGRMLIKLLEVLSGERLPKPTKGRMRIHCLENVDKALQFLKEQRVHLENMGSHDIVDGNHRLTLGLIWTIILRFQIQDISVETEDNKEKKSAKDALLLWCQMKTAGYPNVNIHNFTTSWRDGMAFNALIHKHRPDLIDFDKLKNVTAHYNLAECILILSVQHLALS

SEQ ID NO: 852535 - protein, 2364 aa, Homo sapiens
MTTTVATDYDNIEIQQQYSDVNNRWDVDDWDNENSSARLFERSRIKALADEREAVQKKTFTKWVNSHLARVSCRITDLYTDLRDGRMLIKLLEVLSGERLPKPTKGRMRIHCLENVDKALQFLKEQRVHLENMGSHDIVDGNHRLTLGLIWTIILRFQIQDISVETEDNKEKKSAKDALLLWCQMKTAGYPNVNIHNFTTSWRDGMAFNALIHKHRPDLIDFDKLKKSNAHYNLQNAFNLAEQHLGLTKLLDPEDISVDHPDEKSIITYVVTYYHYFSKMKALAVEGKRIGKVLDNAIETEKMIEKYESLASDLLEWIEQTIIILNNRKFANSLVGVQQQLQAFNTYRTVEKPPKFTEKGNLEVLLFTIQSKMRANNQKVYMPREGKLISDINKAWERLEKAEHERELALRNELIRQEKLEQLARRFDRKAAMRETWLSENQRLVSQDNFGFDLPAVEAATKKHEAIETDIAAYEERVQAVVAVARELEAENYHDIKRITARKDNVIRLWEYLLELLRARRQRLEMNLGLQKIFQEMLYIMDWMDEMKVLVLSQDYGKHLLGVEDLLQKHTLVEADIGIQAERVRGVNASAQKFATDGEGYKPCDPQVIRDRVAHMEFCYQELCQLAAERRARLEESRRLWKFFWEMAEEEGWIREKEKILSSDDYGKDLTSVMRLLSKHRAFEDEMSGRSGHFEQAIKEGEDMIAEEHFGSEKIRERIIYIREQWANLEQLSAIRKKRLEEASLLHQFQADADDIDAWMLDILKIVSSSDVGHDEYSTQSLVKKHKDVAEEIANYRPTLDTLHEQASALPQEHAESPDVRGRLSGIEERYKEVAELTRLRKQALQDTLALYKMFSEADACELWIDEKEQWLNNMQIPEKLEDLEVIQHRFESLEPEMNNQASRVAVVNQIARQLMHSGHPSEKEIKAQQDKLNTRWSQFRELVDRKKDALLSALSIQNYHLECNETKSWIREKTKVIESTQDLGNDLAGVMALQRKLTGMERDLVAIEAKLSDLQKEAEKLESEHPDQAQAILSRLAEISDVWEEMKTTLKNREASLGEASKLQQFLRDLDDFQSWLSRTQTAIASEDMPNTLTEAEKLLTQHENIKNEIDNYEEDYQKMRDMGEMVTQGQTDAQYMFLRQRLQALDTGWNELHKMWENRQNLLSQSHAYQQFLRDTKQAEAFLNNQEYVLAHTEMPTTLEGAEAAIKKQEDFMTTMDANEEKINAVVETGRRLVSDGNINSDRIQEKVDSIDDRHRKNRETASELLMRLKDNRDLQKFLQDCQELSLWINEKMLTAQDMSYDEARNLHSKWLKHQAFMAELASNKEWLDKIEKEGMQLISEKPETEAVVKEKLTGLHKMWEVLESTTQTKAQRLFDANKAELFTQSCADLDKWLHGLESQIQSDDYGKDLTSVNILLKKQQMLENQMEVRKKEIEELQSQAQALSQEGKSTDEVDSKRLTVQTKFMELLEPLNERKHNLLASKEIHQFNRDVEDEILWVGERMPLATSTDHGHNLQTVQLLIKKNQTLQKEIQGHQPRIDDIFERSQNIVTDSSSLSAEAIRQRLADLKQLWGLLIEETEKRHRRLEEAHRAQQYYFDAAEAEAWMSEQELYMMSEEKAKDEQSAVSMLKKHQILEQAVEDYAETVHQLSKTSRALVADSHPESERISMRQSKVDKLYAGLKDLAEERRGKLDERHRLFQLNREVDDLEQWIAEREVVAGSHELGQDYEHVTMLQERFREFARDTGNIGQERVDTVNHLADELINSGHSDAATIAEWKDGLNEAWADLLELIDTRTQILAASYELHKFYHDAKEIFGRIQDKHKKLPEELGRDQNTVETLQRMHTTFEHDIQALGTQVRQLQEDAARLQAAYAGDKADDIQKRENEVLEAWKSLLDACESRRVRLVDTGDKFRFFSMVRDLMLWMEDVIRQIEAQEKPRDVSSVELLMNNHQGIKAEIDARNDSFTTCIELGKSLLARKHYASEEIKEKLLQLTEKRKEMIDKWEDRWEWLRLILEVHQFSRDASVAEAWLLGQEPYLSSREIGQSVDEVEKLIKRHEAFEKSAATWDERFSALERLTTLELLEVRRQQEEEERKRRPPSPEPSTKVSEEAESQQQWDTSKGEQVSQNGLPAEQGSPRMAETVDTSEMVNGATEQRTSSKESSPIPSPTSDRKAKTALPAQSAATLPARTQETPSAQMEGFLNRKHEWEAHNKKASSRSWHNVYCVINNQEMGFYKDAKTAASGIPYHSEVPVSLKEAVCEVALDYKKKKHVFKLRLNDGNEYLFQAKDDEEMNTWIQAISSAISSDKHEVSASTQSTPASSRAQTLPTSVVTITSESSPGKREKDKEKDKEKRFSLFGKKK

SEQ ID NO: 852536 - protein, 2364 aa, Homo sapiens; identical to SEQ ID NO: 852535

SEQ ID NO: 852537 - protein, 2364 aa, Homo sapiens; identical to SEQ ID NO: 852535

SEQ ID NO: 852538 - protein, 2364 aa, Homo sapiens; identical to SEQ ID NO: 852535

SEQ ID NO: 852539 - protein, 2364 aa, Homo sapiens; identical to SEQ ID NO: 852535

SEQ ID NO: 852540 - protein, 2364 aa, Homo sapiens; identical to SEQ ID NO: 852535

SEQ ID NO: 852541 - protein, 2364 aa, Homo sapiens; identical to SEQ ID NO: 852535

SEQ ID NO: 852542 - protein, 2335 aa, Homo sapiens
MTTTVATDYDNIEIQQQYSDVNNRWDVDDWDNENSSARLFERSRIKALADEREAVQKKTFTKWVNSHLARVSCRITDLYTDLRDGRMLIKLLEVLSGERLPKPTKGRMRIHCLENVDKALQFLKEQRVHLENMGSHDIVDGNHRLTLGLIWTIILRFQIQDISVETEDNKEKKSAKDALLLWCQMKTAGYPNVNIHNFTTSWRDGMAFNALIHKHRPDLIDFDKLKKSNAHYNLQNAFNLAEQHLGLTKLLDPEDISVDHPDEKSIITYVVTYYHYFSKMKALAVEGKRIGKVLDNAIETEKMIEKYESLASDLLEWIEQTIIILNNRKFANSLVGVQQQLQAFNTYRTVEKPPKFTEKGNLEVLLFTIQSKMRANNQKVYMPREGKLISDINKAWERLEKAEHERELALRNELIRQEKLEQLARRFDRKAAMRETWLSENQRLVSQDNFGFDLPAVEAATKKHEAIETDIAAYEERVQAVVAVARELEAENYHDIKRITARKDNVIRLWEYLLELLRARRQRLEMNLGLQKIFQEMLYIMDWMDEMKVLVLSQDYGKHLLGVEDLLQKHTLVEADIGIQAERVRGVNASAQKFATDGEGYKPCDPQVIRDRVAHMEFCYQELCQLAAERRARLEESRRLWKFFWEMAEEEGWIREKEKILSSDDYGKDLTSVMRLLSKHRAFEDEMSGRSGHFEQAIKEGEDMIAEEHFGSEKIRERIIYIREQWANLEQLSAIRKKRLEEASLLHQFQADADDIDAWMLDILKIVSSSDVGHDEYSTQSLVKKHKDVAEEIANYRPTLDTLHEQASALPQEHAESPDVRGRLSGIEERYKEVAELTRLRKQALQDTLALYKMFSEADACELWIDEKEQWLNNMQIPEKLEDLEVIQHRFESLEPEMNNQASRVAVVNQIARQLMHSGHPSEKEIKAQQDKLNTRWSQFRELVDRKKDALLSALSIQNYHLECNETKSWIREKTKVIESTQDLGNDLAGVMALQRKLTGMERDLVAIEAKLSDLQKEAEKLESEHPDQAQAILSRLAEISDVWEEMKTTLKNREASLGEASKLQQFLRDLDDFQSWLSRTQTAIASEDMPNTLTEAEKLLTQHENIKNEIDNYEEDYQKMRDMGEMVTQGQTDAQYMFLRQRLQALDTGWNELHKMWENRQNLLSQSHAYQQFLRDTKQAEAFLNNQEYVLAHTEMPTTLEGAEAAIKKQEDFMTTMDANEEKINAVVETGRRLVSDGNINSDRIQEKVDSIDDRHRKNRETASELLMRLKDNRDLQKFLQDCQELSLWINEKMLTAQDMSYDEARNLHSKWLKHQAFMAELASNKEWLDKIEKEGMQLISEKPETEAVVKEKLTGLHKMWEVLESTTQTKAQRLFDANKAELFTQSCADLDKWLHGLESQIQSDDYGKDLTSVNILLKKQQMLENQMEVRKKEIEELQSQAQALSQEGKSTDEVDSKRLTVQTKFMELLEPLNERKHNLLASKEIHQFNRDVEDEILWVGERMPLATSTDHGHNLQTVQLLIKKNQTLQKEIQGHQPRIDDIFERSQNIVTDSSSLSAEAIRQRLADLKQLWGLLIEETEKRHRRLEEAHRAQQYYFDAAEAEAWMSEQELYMMSEEKAKDEQSAVSMLKKHQILEQAVEDYAETVHQLSKTSRALVADSHPESERISMRQSKVDKLYAGLKDLAEERRGKLDERHRLFQLNREVDDLEQWIAEREVVAGSHELGQDYEHVTMLQERFREFARDTGNIGQERVDTVNHLADELINSGHSDAATIAEWKDGLNEAWADLLELIDTRTQILAASYELHKFYHDAKEIFGRIQDKHKKLPEELGRDQNTVETLQRMHTTFEHDIQALGTQVRQLQEDAARLQAAYAGDKADDIQKRENEVLEAWKSLLDACESRRVRLVDTGDKFRFFSMVRDLMLWMEDVIRQIEAQEKPRDVSSVELLMNNHQGIKAEIDARNDSFTTCIELGKSLLARKHYASEVLEVHQFSRDASVAEAWLLGQEPYLSSREIGQSVDEVEKLIKRHEAFEKSAATWDERFSALERLTTLELLEVRRQQEEEERKRRPPSPEPSTKVSEEAESQQQWDTSKGEQVSQNGLPAEQGSPRMAETVDTSEMVNGATEQRTSSKESSPIPSPTSDRKAKTALPAQSAATLPARTQETPSAQMEGFLNRKHEWEAHNKKASSRSWHNVYCVINNQEMGFYKDAKTAASGIPYHSEVPVSLKEAVCEVALDYKKKKHVFKLRLNDGNEYLFQAKDDEEMNTWIQAISSAISSDKHEVSASTQSTPASSRAQTLPTSVVTITSESSPGKREKDKEKDKEKRFSLFGKKK

SEQ ID NO: 852543 - protein, 2168 aa, Homo sapiens
MTTTVATDYDNIEIQQQYSDVNNRWDVDDWDNENSSARLFERSRIKALADEREAVQKKTFTKWVNSHLARVSCRITDLYTDLRDGRMLIKLLEVLSGERLPKPTKGRMRIHCLENVDKALQFLKEQRVHLENMGSHDIVDGNHRLTLGLIWTIILRFQIQDISVETEDNKEKKSAKDALLLWCQMKTAGYPNVNIHNFTTSWRDGMAFNALIHKHRPDLIDFDKLKKSNAHYNLQNAFNLAEQHLGLTKLLDPEDISVDHPDEKSIITYVVTYYHYFSKMKALAVEGKRIGKVLDNAIETEKMIEKYESLASDLLEWIEQTIIILNNRKFANSLVGVQQQLQAFNTYRTVEKPPKFTEKGNLEVLLFTIQSKMRANNQKVYMPREGKLISDINKAWERLEKAEHERELALRNELIRQEKLEQLARRFDRKAAMRETWLSENQRLVSQDNFGFDLPAVEAATKKHEAIETDIAAYEERVQAVVAVARELEAENYHDIKRITARKDNVIRLWEYLLELLRARRQRLEMNLGLQKIFQEMLYIMDWMDEMKVLVLSQDYGKHLLGVEDLLQKHTLVEADIGIQAERVRGVNASAQKFATDGEGYKPCDPQVIRDRVAHMEFCYQELCQLAAERRARLEESRRLWKFFWEMAEEEGWIREKEKILSSDDYGKDLTSVMRLLSKHRAFEDEMSGRSGHFEQAIKEGEDMIAEEHFGSEKIRERIIYIREQWANLEQLSAIRKKRLEEASLLHQFQADADDIDAWMLDILKIVSSSDVGHDEYSTQSLVKKHKDVAEEIANYRPTLDTLHEQASALPQEHAESPDVRGRLSGIEERYKEVAELTRLRKQALQDTLALYKMFSEADACELWIDEKEQWLNNMQIPEKLEDLEVIQHRFESLEPEMNNQASRVAVVNQIARQLMHSGHPSEKEIKAQQDKLNTRWSQFRELVDRKKDALLSALSIQNYHLECNETKSWIREKTKVIESTQDLGNDLAGVMALQRKLTGMERDLVAIEAKLSDLQKEAEKLESEHPDQAQAILSRLAEISDVWEEMKTTLKNREASLGEASKLQQFLRDLDDFQSWLSRTQTAIASEDMPNTLTEAEKLLTQHENIKNEIDNYEEDYQKMRDMGEMVTQGQTDAQYMFLRQRLQALDTGWNELHKMWENRQNLLSQSHAYQQFLRDTKQAEAFLNNQEYVLAHTEMPTTLEGAEAAIKKQEDFMTTMDANEEKINAVVETGRRLVSDGNINSDRIQEKVDSIDDRHRKNRETASELLMRLKDNRDLQKFLQDCQELSLWINEKMLTAQDMSYDEARNLHSKWLKHQAFMAELASNKEWLDKIEKEGMQLISEKPETEAVVKEKLTGLHKMWEVLESTTQTKAQRLFDANKAELFTQSCADLDKWLHGLESQIQSDDYGKDLTSVNILLKKQQMLENQMEVRKKEIEELQSQAQALSQEGKSTDEVDSKRLTVQTKFMELLEPLNERKHNLLASKEIHQFNRDVEDEILWVGERMPLATSTDHGHNLQTVQLLIKKNQTLQKEIQGHQPRIDDIFERSQNIVTDSSSLSAEAIRQRLADLKQLWGLLIEETEKRHRRLEEAHRAQQYYFDAAEAEAWMSEQELYMMSEEKAKDEQSAVSMLKKHQILEQAVEDYAETVHQLSKTSRALVADSHPESERISMRQSKVDKLYAGLKDLAEERRGKLDERHRLFQLNREVDDLEQWIAEREVVAGSHELGQDYEHVTMLQERFREFARDTGNIGQERVDTVNHLADELINSGHSDAATIAEWKDGLNEAWADLLELIDTRTQILAASYELHKFYHDAKEIFGRIQDKHKKLPEELGRDQNTVETLQRMHTTFEHDIQALGTQVRQLQEDAARLQAAYAGDKADDIQKRENEVLEAWKSLLDACESRRVRLVDTGDKFRFFSMVRDLMLWMEDVIRQIEAQEKPRDVSSVELLMNNHQGIKAEIDARNDSFTTCIELGKSLLARKHYASEEIKEKLLQLTEKRKEMIDKWEDRWEWLRLILEVHQFSRDASVAEAWLLGQEPYLSSREIGQSVDEVEKLIKRHEAFEKSAATWDERFSALERLTTLELLEVRRQQEEEERKRRPPSPEPSTKVSEEAESQQQWDTSKGEQVSQNGLPAEQGSPRVSYRSQTYQNYKNFNSRRTASDQPWSGL

SEQ ID NO: 852544 - protein, 2279 aa, Homo sapiens
MTTTVATDYDNIEIQQQYSDVNNRWDVDDWDNENSSARLFERSRIKALADEREAVQKKTFTKWVNSHLARVSCRITDLYTDLRDGRMLIKLLEVLSGERLPKPTKGRMRIHCLENVDKALQFLKEQRVHLENMGSHDIVDGNHRLTLGLIWTIILRFQIQDISVETEDNKEKKSAKDALLLWCQMKTAGYPNVNIHNFTTSWRDGMAFNALIHKHRPDLIDFDKLKKSNAHYNLQNAFNLAEQHLGLTKLLDPEDISVDHPDEKSIITYVVTYYHYFSKMKALAVEGKRIGKVLDNAIETEKMIEKYESLASDLLEWIEQTIIILNNRKFANSLVGVQQQLQAFNTYRTVEKPPKFTEKGNLEVLLFTIQSKMRANNQKVYMPREGKLISDINKAWERLEKAEHERELALRNELIRQEKLEQLARRFDRKAAMRETWLSENQRLVSQDNFGFDLPAVEAATKKHEAIETDIAAYEERVQAVVAVARELEAENYHDIKRITARKDNVIRLWEYLLELLRARRQRLEMNLGLQKIFQEMLYIMDWMDEMKVLVLSQDYGKHLLGVEDLLQKHTLVEADIGIQAERVRGVNASAQKFATDGEGYKPCDPQVIRDRVAHMEFCYQELCQLAAERRARLEESRRLWKFFWEMAEEEGWIREKEKILSSDDYGKDLTSVMRLLSKHRAFEDEMSGRSGHFEQAIKEGEDMIAEEHFGSEKIRERIIYIREQWANLEQLSAIRKKRLEEASLLHQFQADADDIDAWMLDILKIVSSSDVGHDEYSTQSLVKKHKDVAEEIANYRPTLDTLHEQASALPQEHAESPDVRGRLSGIEERYKEVAELTRLRKQALQDTLALYKMFSEADACELWIDEKEQWLNNMQIPEKLEDLEVIQHRFESLEPEMNNQASRVAVVNQIARQLMHSGHPSEKEIKAQQDKLNTRWSQFRELVDRKKDALLSALSIQNYHLECNETKSWIREKTKVIESTQDLGNDLAGVMALQRKLTGMERDLVAIEAKLSDLQKEAEKLESEHPDQAQAILSRLAEISDVWEEMKTTLKNREASLGEASKLQQFLRDLDDFQSWLSRTQTAIASEDMPNTLTEAEKLLTQHENIKNEIDNYEEDYQKMRDMGEMVTQGQTDAQYMFLRQRLQALDTGWNELHKMWENRQNLLSQSHAYQQFLRDTKQAEAFLNNQEYVLAHTEMPTTLEGAEAAIKKQEDFMTTMDANEEKINAVVETGRRLVSDGNINSDRIQEKVDSIDDRHRKNRETASELLMRLKDNRDLQKFLQDCQELSLWINEKMLTAQDMSYDEARNLHSKWLKHQAFMAELASNKEWLDKIEKEGMQLISEKPETEAVVKEKLTGLHKMWEVLESTTQTKAQRLFDANKAELFTQSCADLDKWLHGLESQIQSDDYGKDLTSVNILLKKQQMLENQMEVRKKEIEELQSQAQALSQEGKSTDEVDSKRLTVQTKFMELLEPLNERKHNLLASKEIHQFNRDVEDEILWVGERMPLATSTDHGHNLQTVQLLIKKNQTLQKEIQGHQPRIDDIFERSQNIVTDSSSLSAEAIRQRLADLKQLWGLLIEETEKRHRRLEEAHRAQQYYFDAAEAEAWMSEQELYMMSEEKAKDEQSAVSMLKKHQILEQAVEDYAETVHQLSKTSRALVADSHPESERISMRQSKVDKLYAGLKDLAEERRGKLDERHRLFQLNREVDDLEQWIAEREVVAGSHELGQDYEHVTMLQERFREFARDTGNIGQERVDTVNHLADELINSGHSDAATIAEWKDGLNEAWADLLELIDTRTQILAASYELHKFYHDAKEIFGRIQDKHKKLPEELGRDQNTVETLQRMHTTFEHDIQALGTQVRQLQEDAARLQAAYAGDKADDIQKRENEVLEAWKSLLDACESRRVRLVDTGDKFRFFSMVRDLMLWMEDVIRQIEAQEKPRDVSSVELLMNNHQGIKAEIDARNDSFTTCIELGKSLLARKHYASEEIKEKLLQLTEKRKEMIDKWEDRWEWLRLILEVHQFSRDASVAEAWLLGQEPYLSSREIGQSVDEVEKLIKRHEAFEKSAATWDERFSALERLTTLELLEVRRQQEEEERKRRPPSPEPSTKVSEEAESQQQWDTSKGEQVSQNGLPAEQGSPRMAETVDTSEMVNGATEQRTSSKESSPIPSPTSDRKAKTALPAQSAATLPARTQETPSAQMEGFLNRKHEWEAHNKKASSRSWHNVYCVINNQEMGFYKDAKTAASGIPYHSEVPVSLKEAVCEVALDYKKKKHVFKLRD

SEQ ID NO: 852545 - protein, 2303 aa, Homo sapiens
MTTTVATDYDNIEIQQQYSDVNNRWDVDDWDNENSSARLFERSRIKALADEREAVQKKTFTKWVNSHLARVSCRITDLYTDLRDGRMLIKLLEVLSGERLPKPTKGRMRIHCLENVDKALQFLKEQRVHLENMGSHDIVDGNHRLTLGLIWTIILRFQIQDISVETEDNKEKKSAKDALLLWCQMKTAGYPNVNIHNFTTSWRDGMAFNALIHKHRPDLIDFDKLKKSNAHYNLQNAFNLAEQHLGLTKLLDPEDISVDHPDEKSIITYVVTYYHYFSKMKALAVEGKRIGKVLDNAIETEKMIEKYESLASDLLEWIEQTIIILNNRKFANSLVGVQQQLQAFNTYRTVEKPPKFTEKGNLEVLLFTIQSKMRANNQKVYMPREGKLISDINKAWERLEKAEHERELALRNELIRQEKLEQLARRFDRKAAMRETWLSENQRLVSQDNFGFDLPAVEAATKKHEAIETDIAAYEERVQAVVAVARELEAENYHDIKRITARKDNVIRLWEYLLELLRARRQRLEMNLGLQKIFQEMLYIMDWMDEMKVLVLSQDYGKHLLGVEDLLQKHTLVEADIGIQAERVRGVNASAQKFATDGEGYKPCDPQVIRDRVAHMEFCYQELCQLAAERRARLEESRRLWKFFWEMAEEEGWIREKEKILSSDDYGKDLTSVMRLLSKHRAFEDEMSGRSGHFEQAIKEGEDMIAEEHFGSEKIRERIIYIREQWANLEQLSAIRKKRLEEASLLHQFQADADDIDAWMLDILKIVSSSDVGHDEYSTQSLVKKHKDVAEEIANYRPTLDTLHEQASALPQEHAESPDVRGRLSGIEERYKEVAELTRLRKQALQDTLALYKMFSEADACELWIDEKEQWLNNMQIPEKLEDLEVIQHRFESLEPEMNNQASRVAVVNQIARQLMHSGHPSEKEIKAQQDKLNTRWSQFRELVDRKKDALLSALSIQNYHLECNETKSWIREKTKVIESTQDLGNDLAGVMALQRKLTGMERDLVAIEAKLSDLQKEAEKLESEHPDQAQAILSRLAEISDVWEEMKTTLKNREASLGEASKLQQFLRDLDDFQSWLSRTQTAIASEDMPNTLTEAEKLLTQHENIKNEIDNYEEDYQKMRDMGEMVTQGQTDAQYMFLRQRLQALDTGWNELHKMWENRQNLLSQSHAYQQFLRDTKQAEAFLNNQEYVLAHTEMPTTLEGAEAAIKKQEDFMTTMDANEEKINAVVETGRRLVSDGNINSDRIQEKVDSIDDRHRKNRETASELLMRLKDNRDLQKFLQDCQELSLWINEKMLTAQDMSYDEARNLHSKWLKHQAFMAELASNKEWLDKIEKEGMQLISEKPETEAVVKEKLTGLHKMWEVLESTTQTKAQRLFDANKAELFTQSCADLDKWLHGLESQIQSDDYGKDLTSVNILLKKQQMLENQMEVRKKEIEELQSQAQALSQEGKSTDEVDSKRLTVQTKFMELLEPLNERKHNLLASKEIHQFNRDVEDEILWVGERMPLATSTDHGHNLQTVQLLIKKNQTLQKEIQGHQPRIDDIFERSQNIVTDSSSLSAEAIRQRLADLKQLWGLLIEETEKRHRRLEEAHRAQQYYFDAAEAEAWMSEQELYMMSEEKAKDEQSAVSMLKKHQILEQAVEDYAETVHQLSKTSRALVADSHPESERISMRQSKVDKLYAGLKDLAEERRGKLDERHRLFQLNREVDDLEQWIAEREVVAGSHELGQDYEHVTMLQERFREFARDTGNIGQERVDTVNHLADELINSGHSDAATIAEWKDGLNEAWADLLELIDTRTQILAASYELHKFYHDAKEIFGRIQDKHKKLPEELGRDQNTVETLQRMHTTFEHDIQALGTQVRQLQEDAARLQAAYAGDKADDIQKRENEVLEAWKSLLDACESRRVRLVDTGDKFRFFSMVRDLMLWMEDVIRQIEAQEKPRDVSSVELLMNNHQGIKAEIDARNDSFTTCIELGKSLLARKHYASEEIKEKLLQLTEKRKEMIDKWEDRWEWLRLILEVHQFSRDASVAEAWLLGQEPYLSSREIGQSVDEVEKLIKRHEAFEKSAATWDERFSALERLTTLELLEVRRQQEEEERKRRPPSPEPSTKVSEEAESQQQWDTSKGEQVSQNGLPAEQGSPRMAETVDTSEMVNGATEQRTSSKESSPIPSPTSDRKAKTALPAQSAATLPARTQETPSAQMEGFLNRKHEWEAHNKKASSRSWHNVYCVINNQEMGFYKDAKTAASGIPYHSEVPVSLKEAVCEVALDYKKKKHVFKLRLNDGNEYLFQAKDKEKRFSLFGKKK

SEQ ID NO: 852546 - protein, 2200 aa, Homo sapiens
MTTTVATDYDNIEIQQQYSDVNNRWDVDDWDNENSSARLFERSRIKALADEREAVQKKTFTKWVNSHLARVSCRITDLYTDLRDGRMLIKLLEVLSGERLPKPTKGRMRIHCLENVDKALQFLKEQRVHLENMGSHDIVDGNHRLTLGLIWTIILRFQIQDISVETEDNKEKKSAKDALLLWCQMKTAGYPNVNIHNFTTSWRDGMAFNALIHKHRPDLIDFDKLKKSNAHYNLQNAFNLAEQHLGLTKLLDPEDISVDHPDEKSIITYVVTYYHYFSKMKALAVEGKRIGKVLDNAIETEKMIEKYESLASDLLEWIEQTIIILNNRKFANSLVGVQQQLQAFNTYRTVEKPPKFTEKGNLEVLLFTIQSKMRANNQKVYMPREGKLISDINKAWERLEKAEHERELALRNELIRQEKLEQLARRFDRKAAMRETWLSENQRLVSQDNFGFDLPAVEAATKKHEAIETDIAAYEERVQAVVAVARELEAENYHDIKRITARKDNVIRLWEYLLELLRARRQRLEMNLGLQKIFQEMLYIMDWMDEMKVLVLSQDYGKHLLGVEDLLQKHTLVEADIGIQAERVRGVNASAQKFATDGEGYKPCDPQVIRDRVAHMEFCYQELCQLAAERRARLEESRRLWKFFWEMAEEEGWIREKEKILSSDDYGKDLTSVMRLLSKHRAFEDEMSGRSGHFEQAIKEGEDMIAEEHFGSEKIRERIIYIREQWANLEQLSAIRKKRLEEASLLHQFQADADDIDAWMLDILKIVSSSDVGHDEYSTQSLVKKHKDVAEEIANYRPTLDTLHEQASALPQEHAESPDVRGRLSGIEERYKEVAELTRLRKQALQDTLALYKMFSEADACELWIDEKEQWLNNMQIPEKLEDLEVIQHRFESLEPEMNNQASRVAVVNQIARQLMHSGHPSEKEIKAQQDKLNTRWSQFRELVDRKKDALLSALSIQNYHLECNETKSWIREKTKVIESTQDLGNDLAGVMALQRKLTGMERDLVAIEAKLSDLQKEAEKLESEHPDQAQAILSRLAEISDVWEEMKTTLKNREASLGEASKLQQFLRDLDDFQSWLSRTQTAIASEDMPNTLTEAEKLLTQHENIKNEIDNYEEDYQKMRDMGEMVTQGQTDAQYMFLRQRLQALDTGWNELHKMWENRQNLLSQSHAYQQFLRDTKQAEAFLNNQEYVLAHTEMPTTLEGAEAAIKKQEDFMTTMDANEEKINAVVETGRRLVSDGNINSDRIQEKVDSIDDRHRKNRETASELLMRLKDNRDLQKFLQDCQELSLWINEKMLTAQDMSYDEARNLHSKWLKHQAFMAELASNKEWLDKIEKEGMQLISEKPETEAVVKEKLTGLHKMWEVLESTTQTKAQRLFDANKAELFTQSCADLDKWLHGLESQIQSDDYGKDLTSVNILLKKQQMLENQMEVRKKEIEELQSQAQALSQEGKSTDEVDSKRLTVQTKFMELLEPLNERKHNLLASKEIHQFNRDVEDEILWVGERMPLATSTDHGHNLQTVQLLIKKNQTLQKEIQGHQPRIDDIFERSQNIVTDSSSLSAEAIRQRLADLKQLWGLLIEETEKRHRRLEEAHRAQQYYFDAAEAEAWMSEQELYMMSEEKAKDEQSAVSMLKKHQILEQAVEDYAETVHQLSKTSRALVADSHPESERISMRQSKVDKLYAGLKDLAEERRGKLDERHRLFQLNREVDDLEQWIAEREVVAGSHELGQDYEHVTMLQERFREFARDTGNIGQERVDTVNHLADELINSGHSDAATIAEWKDGLNEAWADLLELIDTRTQILAASYELHKFYHDAKEIFGRIQDKHKKLPEELGRDQNTVETLQRMHTTFEHDIQALGTQVRQLQEDAARLQAAYAGDKADDIQKRENEVLEAWKSLLDACESRRVRLVDTGDKFRFFSMVRDLMLWMEDVIRQIEAQEKPRDVSSVELLMNNHQGIKAEIDARNDSFTTCIELGKSLLARKHYASEEIKEKLLQLTEKRKEMIDKWEDRWEWLRLILEVHQFSRDASVAEAWLLGQEPYLSSREIGQSVDEVEKLIKRHEAFEKSAATWDERFSALERLTTLELLEVRRQQEEEERKRRPPSPEPSTKVSEEAESQQQWDTSKGEQVSQNGLPAEQGSPRMAETVDTSEMVNGATEQRTSSKESSPTSVVTITSESSPGKREKDKEKDKEKRFSLFGKKK

SEQ ID NO: 852547 - protein, 1759 aa, Homo sapiens
MTTTVATDYDNIEIQQQYSDVNNRWDVDDWDNENSSARLFERSRIKALADEREAVQKKTFTKWVNSHLARVSCRITDLYTDLRDGRMLIKLLEVLSGERLPKPTKGRMRIHCLENVDKALQFLKEQRVHLENMGSHDIVDGNHRLTLGLIWTIILRFQIQDISVETEDNKEKKSAKDALLLWCQMKTAGYPNVNIHNFTTSWRDGMAFNALIHKHRPDLIDFDKLKKSNAHYNLQNAFNLAEQHLGLTKLLDPEDISVDHPDEKSIITYVVTYYHYFSKMKALAVEGKRIGKVLDNAIETEKMIEKYESLASDLLEWIEQTIIILNNRKFANSLVGVQQQLQAFNTYRTVEKPPKFTEKGNLEVLLFTIQSKMRANNQKVYMPREGKLISDINKAWERLEKAEHERELALRNELIRQEKLEQLARRFDRKAAMRETWLSENQRLVSQDNFGFDLPAVEAATKKHEAIETDIAAYEERVQAVVAVARELEAENYHDIKRITARKDNVIRLWEYLLELLRARRQRLEMNLGLQKIFQEMLYIMDWMDEMKVLVLSQDYGKHLLGVEDLLQKHTLVEADIGIQAERVRGVNASAQKFATDGEGYKPCDPQVIRDRVAHMEFCYQELCQLAAERRARLEESRRLWKFFWEMAEEEGWIREKEKILSSDDYGKDLTSVMRLLSKHRAFEDEMSGRSGHFEQAIKEGEDMIAEEHFGSEKIRERIIYIREQWANLEQLSAIRKKRLEEASLLHQFQADADDIDAWMLDILKIVSSSDVGHDEYSTQSLVKKHKDVAEEIANYRPTLDTLHEQASALPQEHAESPDVRGRLSGIEERYKEVAELTRLRKQALQDTLALYKMFSEADACELWIDEKEQWLNNMQIPEKLEDLEVIQHRFESLEPEMNNQASRVAVVNQIARQLMHSGHPSEKEIKAQQDKLNTRWSQFRELVDRKKDALLSALSIQNYHLECNETKSWIREKTKVIESTQDLGNDLAGVMALQRKLTGMERDLVAIEAKLSDLQKEAEKLESEHPDQAQAILSRLAEISDVWEEMKTTLKNREASLGEASKLQQFLRDLDDFQSWLSRTQTAIASEDMPNTLTEAEKLLTQHENIKNEIDNYEEDYQKMRDMGEMVTQGQTDAQYMFLRQRLQALDTGWNELHKMWENRQNLLSQSHAYQQFLRDTKQAEAFLNNQEYVLAHTEMPTTLEGAEAAIKKQEDFMTTMDANEEKINAVVETGRRLVSDGNINSDRIQEKVDSIDDRHRKNRETASELLMRLKDNRDLQKFLQDCQELSLWINEKMLTAQDMSYDEARNLHSKWLKHQAFMAELASNKEWLDKIEKEGMQLISEKPETEAVVKEKLTGLHKMWEVLESTTQTKAQRLFDANKAELFTQSCADLDKWLHGLESQIQSDDYGKDLTSVNILLKKQQMLENQMEVRKKEIEELQSQAQALSQEGKSTDEAFEKSAATWDERFSALERLTTLELLEVRRQQEEEERKRRPPSPEPSTKVSEEAESQQQWDTSKGEQVSQNGLPAEQGSPRMAETVDTSEMVNGATEQRTSSKESSPIPSPTSDRKAKTALPAQSAATLPARTQETPSAQMEGFLNRKHEWEAHNKKASSRSWHNVYCVINNQEMGFYKDAKTAASGIPYHSEVPVSLKEAVCEVALDYKKKKHVFKLRLNDGNEYLFQAKDDEEMNTWIQAISSAISSDKHEVSASTQSTPASSRAQTLPTSVVTITSESSPGKREKDKEKDKEKRFSLFGKKK

SEQ ID NO: 852548 - protein, 2364 aa, Homo sapiens; identical to SEQ ID NO: 852535

SEQ ID NO: 852549 - protein, 2364 aa, Homo sapiens; identical to SEQ ID NO: 852535

SEQ ID NO: 852550 - protein, 2364 aa, Homo sapiens; identical to SEQ ID NO: 852535

SEQ ID NO: 852551 - protein, 438 aa, Homo sapiens
RSPRGSQIEVRVEPRDVSSVELLMNNHQGIKAEIDARNDSFTTCIELGKSLLARKHYASEEIKEKLLQLTEKRKEMIDKWEDRWEWLRLILEVHQFSRDASVAEAWLLGQEPYLSSREIGQSVDEVEKLIKRHEAFEKSAATWDERFSALERLTTLELLEVRRQQEEEERKRRPPSPEPSTKVSEEAESQQQWDTSKGEQVSQNGLPAEQGSPRMAETVDTSEMVNGATEQRTSSKESSPIPSPTSDRKAKTALPAQSAATLPARTQETPSAQMEGFLNRKHEWEAHNKKASSRSWHNVYCVINNQEMGFYKDAKTAASGIPYHSEVPVSLKEAVCEVALDYKKKKHVFKLRLNDGNEYLFQAKDDEEMNTWIQAISSAISSDKHEVSASTQSTPASSRAQTLPTSVVTITSESSPGKREKDKEKDKEKRFSLFGKKK

SEQ ID NO: 852552 - protein, 2338 aa, Homo sapiens
MTTTVATDYDNIEIQQQYSDVNNRWDVDDWDNENSSARLFERSRIKALADEREAVQKKTFTKWVNSHLARVSCRITDLYTDLRDGRMLIKLLEVLSGERLPKPTKGRMRIHCLENVDKALQFLKEQRVHLENMGSHDIVDGNHRLTLGLIWTIILRFQIQDISVETEDNKEKKSAKDALLLWCQMKTAGYPNVNIHNFTTSWRDGMAFNALIHKHRPDLIDFDKLKKSNAHYNLQNAFNLAEQHLGLTKLLDPEDISVDHPDEKSIITYVVTYYHYFSKMKALAVEGKRIGKVLDNAIETEKMIEKYESLASDLLEWIEQTIIILNNRKFANSLVGVQQQLQAFNTYRTVEKPPKFTEKGNLEVLLFTIQSKMRANNQKVYMPREGKLISDINKAWERLEKAEHERELALRNELIRQEKLEQLARRFDRKAAMRETWLSENQRLVSQDNFGFDLPAVEAATKKHEAIETDIAAYEERVQAVVAVARELEAENYHDIKRITARKDNVIRLWEYLLELLRARRQRLEMNLGLQKIFQEMLYIMDWMDEMKVLVLSQDYGKHLLGVEDLLQKHTLVEADIGIQAERVRGVNASAQKFATDGEGYKPCDPQVIRDRVAHMEFCYQELCQLAAERRARLEESRRLWKFFWEMAEEEGWIREKEKILSSDDYGKDLTSVMRLLSKHRAFEDEMSGRSGHFEQAIKEGEDMIAEEHFGSEKIRERIIYIREQWANLEQLSAIRKKRLEEASLLHQFQADADDIDAWMLDILKIVSSSDVGHDEYSTQSLVKKHKDVAEEIANYRPTLDTLHEQASALPQEHAESPDVRGRLSGIEERYKEVAELTRLRKQALQDTLALYKMFSEADACELWIDEKEQWLNNMQIPEKLEDLEVIQHRFESLEPEMNNQASRVAVVNQIARQLMHSGHPSEKEIKAQQDKLNTRWSQFRELVDRKKDALLSALSIQNYHLECNETKSWIREKTKVIESTQDLGNDLAGVMALQRKLTGMERDLVAIEAKLSDLQKEAEKLESEHPDQAQAILSRLAEISDVWEEMKTTLKNREASLGEASKLQQFLRDLDDFQSWLSRTQTAIASEDMPNTLTEAEKLLTQHENIKNEIDNYEEDYQKMRDMGEMVTQGQTDAQYMFLRQRLQALDTGWNELHKMWENRQNLLSQSHAYQQFLRDTKQAEAFLNNQEYVLAHTEMPTTLEGAEAAIKKQEDFMTTMDANEEKINAVVETGRRLVSDGNINSDRIQEKVDSIDDRHRKNRETASELLMRLKDNRDLQKFLQDCQELSLWINEKMLTAQDMSYDEARNLHSKWLKHQAFMAELASNKEWLDKIEKEGMQLISEKPETEAVVKEKLTGLHKMWEVLESTTQTKAQRLFDANKAELFTQSCADLDKWLHGLESQIQSDDYGKDLTSVNILLKKQQMLENQMEVRKKEIEELQSQAQALSQEGKSTDEVDSKRLTVQTKFMELLEPLNERKHNLLASKEIHQFNRDVEDEILWVGERMPLATSTDHGHNLQTVQLLIKKNQTLQKEIQGHQPRIDDIFERSQNIVTDSSSLSAEAIRQRLADLKQLWGLLIEETEKRHRRLEEAHRAQQYYFDAAEAEAWMSEQELYMMSEEKAKDEQSAVSMLKKHQILEQAVEDYAETVHQLSKTSRALVADSHPESERISMRQSKVDKLYAGLKDLAEERRGKLDERHRLFQLNREVDDLEQWIAEREVVAGSHELGQDYEHVTMLQERFREFARDTGNIGQERVDTVNHLADELINSGHSDAATIAEWKDGLNEAWADLLELIDTRTQILAASYELHKFYHDAKEIFGRIQDKHKKLPEELGRDQNTVETLQRMHTTFEHDIQALGTQVRQLQEDAARLQAAYAGDKADDIQKRENEVLEAWKSLLDACESRRVRLVDTGDKFRFFSMVRDLMLWMEDVIRQIEAQEKPRDVSSVELLMNNHQGIKAEIDARNDSFTTCIELGKSLLARKHYASEEIKEKLLQLTEKRKEMIDKWEDRWEWLRLILEVHQFSRDASVAEAWLLGQEPYLSSREIGQSVDEVEKLIKRHEAFEKSAATWDERFSALERLTTLELLEVRRQQEEEERKRRPPSPEPSTKVSEEAESQQQWDTSKGEQVSQNGLPAEQGSPRMAETVDTSEMVNGATEQRTSSKESSPIPSPTSDRKAKTALPAQSAATLPARTQETPSAQMEGFLNRKHEWEAHNKKASSRSWHNVYCVINNQEMGFYKDAKTAASGIPYHSEVPVSLKEAVCEVALDYKKKKHVFKLRLNDGNEYLFQAKDDEEMNTWIQAISSAISSDKHEVSASTQSTPASSRAQTLPNSVVTMMQ

SEQ ID NO: 852553 - protein, 2279 aa, Homo sapiens; identical to SEQ ID NO: 852544

SEQ ID NO: 852554 - protein, 2267 aa, Homo sapiens
MTTTVATDYDNIEIQQQYSDVNNRWDVDDWDNENSSARLFERSRIKALADEREAVQKKTFTKWVNSHLARVSCRITDLYTDLRDGRMLIKLLEVLSGERLPKPTKGRMRIHCLENVDKALQFLKEQRVHLENMGSHDIVDGNHRLTLGLIWTIILRFQIQDISVETEDNKEKKSAKDALLLWCQMKTAGYPNVNIHNFTTSWRDGMAFNALIHKHRPDLIDFDKLKKSNAHYNLQNAFNLAEQHLGLTKLLDPEDISVDHPDEKSIITYVVTYYHYFSKMKALAVEGKRIGKVLDNAIETEKMIEKYESLASDLLEWIEQTIIILNNRKFANSLVGVQQQLQAFNTYRTVEKPPKFTEKGNLEVLLFTIQSKMRANNQKVYMPREGKLISDINKAWERLEKAEHERELALRNELIRQEKLEQLARRFDRKAAMRETWLSENQRLVSQDNFGFDLPAVEAATKKHEAIETDIAAYEERVQAVVAVARELEAENYHDIKRITARKDNVIRLWEYLLELLRARRQRLEMNLGLQKIFQEMLYIMDWMDEMKVLVLSQDYGKHLLGVEDLLQKHTLVEADIGIQAERVRGVNASAQKFATDGEGYKPCDPQVIRDRVAHMEFCYQELCQLAAERRARLEESRRLWKFFWEMAEEEGWIREKEKILSSDDYGKDLTSVMRLLSKHRAFEDEMSGRSGHFEQAIKEGEDMIAEEHFGSEKIRERIIYIREQWANLEQLSAIRKKRLEEASLLHQFQADADDIDAWMLDILKIVSSSDVGHDEYSTQSLVKKHKDVAEEIANYRPTLDTLHEQASALPQEHAESPDVRGRLSGIEERYKEVAELTRLRKQALQDTLALYKMFSEADACELWIDEKEQWLNNMQIPEKLEDLEVIQHRFESLEPEMNNQASRVAVVNQIARQLMHSGHPSEKEIKAQQDKLNTRWSQFRELVDRKKDALLSALSIQNYHLECNETKSWIREKTKVIESTQDLGNDLAGVMALQRKLTGMERDLVAIEAKLSDLQKEAEKLESEHPDQAQAILSRLAEISDVWEEMKTTLKNREASLGEASKLQQFLRDLDDFQSWLSRTQTAIASEDMPNTLTEAEKLLTQHENIKNEIDNYEEDYQKMRDMGEMVTQGQTDAQYMFLRQRLQALDTGWNELHKMWENRQNLLSQSHAYQQFLRDTKQAEAFLNNQEYVLAHTEMPTTLEGAEAAIKKQEDFMTTMDANEEKINAVVETGRRLVSDGNINSDRIQEKVDSIDDRHRKNRETASELLMRLKDNRDLQKFLQDCQELSLWINEKMLTAQDMSYDEARNLHSKWLKHQAFMAELASNKEWLDKIEKEGMQLISEKPETEAVVKEKLTGLHKMWEVLESTTQTKAQRLFDANKAELFTQSCADLDKWLHGLESQIQSDDYGKDLTSVNILLKKQQMLENQMEVRKKEIEELQSQAQALSQEGKSTDEVDSKRLTVQTKFMELLEPLNERKHNLLASKEIHQFNRDVEDEILWVGERMPLATSTDHGHNLQTVQLLIKKNQTLQKEIQGHQPRIDDIFERSQNIVTDSSSLSAEAIRQRLADLKQLWGLLIEETEKRHRRLEEAHRAQQYYFDAAEAEAWMSEQELYMMSEEKAKDEQSAVSMLKKHQILEQAVEDYAETVHQLSKTSRALVADSHPESERISMRQSKVDKLYAGLKDLAEERRGKLDERHRLFQLNREVDDLEQWIAEREVVAGSHELGQDYEHVTMLQERFREFARDTGNIGQERVDTVNHLADELINSGHSDAATIAEWKDGLNEAWADLLELIDTRTQILAASYELHKFYHDAKEIFGRIQDKHKKLPEELGRDQNTVETLQRMHTTFEHDIQALGTQVRQLQEDAARLQAAYAGDKADDIQKRENEVLEAWKSLLDACESRRVRLVDTGDKFRFFSMVRDLMLWMEDVIRQIEAQEKPRDVSSVELLMNNHQGIKAEIDARNDSFTTCIELGKSLLARKHYASEEIKEKLLQLTEKRKEMIDKWEDRWEWLRLILEVHQFSRDASVAEAWLLGQEPYLSSREIGQSVDEVEKLIKRHEAFEKSAATWDERFSALERLTTLELLEVRRQQEEEERKRRPPSPEPSTKVSEEAESQQQWDTSKGEQVSQNGLPAEQGSPRMAETVDTSEMVNGATEQRTSSKESSPIPSPTSDRKAKTALPAQSAATLPARTQETPSAQMEGFLNRKHEWEAHNKKASSRSWHNVYCVINNQEMGFYKDAKTAASGIPYHSEVPVSLKEAVCEVALD

SEQ ID NO: 852555 - protein, 2309 aa, Homo sapiens
MTTTVATDYDNIEIQQQYSDVNNRWDVDDWDNENSSARLFERSRIKALADEREAVQKKTFTKWVNSHLARVSCRITDLYTDLRDGRMLIKLLEVLSGERLPKPTKGRMRIHCLENVDKALQFLKEQRVHLENMGSHDIVDGNHRLTLGLIWTIILRFQIQDISVETEDNKEKKSAKDALLLWCQMKTAGYPNVNIHNFTTSWRDGMAFNALIHKHRPDLIDFDKLKKSNAHYNLQNAFNLAEQHLGLTKLLDPEDISVDHPDEKSIITYVVTYYHYFSKMKALAVEGKRIGKVLDNAIETEKMIEKYESLASDLLEWIEQTIIILNNRKFANSLVGVQQQLQAFNTYRTVEKPPKFTEKGNLEVLLFTIQSKMRANNQKVYMPREGKLISDINKAWERLEKAEHERELALRNELIRQEKLEQLARRFDRKAAMRETWLSENQRLVSQDNFGFDLPAVEAATKKHEAIETDIAAYEERVQAVVAVARELEAENYHDIKRITARKDNVIRLWEYLLELLRARRQRLEMNLGLQKIFQEMLYIMDWMDEMKVLVLSQDYGKHLLGVEDLLQKHTLVEADIGIQAERVRGVNASAQKFATDGEGYKPCDPQVIRDRVAHMEFCYQELCQLAAERRARLEESRRLWKFFWEMAEEEGWIREKEKILSSDDYGKDLTSVMRLLSKHRAFEDEMSGRSGHFEQAIKEGEDMIAEEHFGSEKIRERIIYIREQWANLEQLSAIRKKRLEEASLLHQFQADADDIDAWMLDILKIVSSSDVGHDEYSTQSLVKKHKDVAEEIANYRPTLDTLHEQASALPQEHAESPDVRGRLSGIEERYKEVAELTRLRKQALQDTLALYKMFSEADACELWIDEKEQWLNNMQIPEKLEDLEVIQHRFESLEPEMNNQASRVAVVNQIARQLMHSGHPSEKEIKAQQDKLNTRWSQFRELVDRKKDALLSALSIQNYHLECNETKSWIREKTKVIESTQDLGNDLAGVMALQRKLTGMERDLVAIEAKLSDLQKEAEKLESEHPDQAQAILSRLAEISDVWEEMKTTLKNREASLGEASKLQQFLRDLDDFQSWLSRTQTAIASEDMPNTLTEAEKLLTQHENIKNEIDNYEEDYQKMRDMGEMVTQGQTDAQYMFLRQRLQALDTGWNELHKMWENRQNLLSQSHAYQQFLRDTKQAEAFLNNQEYVLAHTEMPTTLEGAEAAIKKQEDFMTTMDANEEKINAVVETGRRLVSDGNINSDRIQEKVDSIDDRHRKNRETASELLMRLKDNRDLQKFLQDCQELSLWINEKMLTAQDMSYDEARNLHSKWLKHQAFMAELASNKEWLDKIEKEGMQLISEKPETEAVVKEKLTGLHKMWEVLESTTQTKAQRLFDANKAELFTQSCADLDKWLHGLESQIQSDDYGKDLTSVNILLKKQQMLENQMEVRKKEIEELQSQAQALSQEGKSTDEVDSKRLTVQTKFMELLEPLNERKHNLLASKEIHQFNRDVEDEILWVGERMPLATSTDHGHNLQTVQLLIKKNQTLQKEIQGHQPRIDDIFERSQNIVTDSSSLSAEAIRQRLADLKQLWGLLIEETEKRHRRLEEAHRAQQYYFDAAEAEAWMSEQELYMMSEEKAKDEQSAVSMLKKHQILEQAVEDYAETVHQLSKTSRALVADSHPESERISMRQSKVDKLYAGLKDLAEERRGKLDERHRLFQLNREVDDLEQWIAEREVVAGSHELGQDYEHVTMLQERFREFARDTGNIGQERVDTVNHLADELINSGHSDAATIAEWKDGLNEAWADLLELIDTRTQILAASYELHKFYHDAKEIFGRIQDKHKKLPEELGRDQNTVETLQRMHTTFEHDIQALGTQVRQLQEDAARLQAAYAGDKADDIQKRENEVLEAWKSLLDACESRRVRLVDTGDKFRFFSMVRDLMLWMEDVIRQIEAQEKPRDVSSVELLMNNHQGIKAEIDARNDSFTTCIELGKSLLARKHYASEEIKEKLLQLTEKRKEMIDKWEDRWEWLRLILEVHQFSRDASVAEAWLLGQEPYLSSREIGQSVDEVEKLIKRHEAFEKSAATWDERFSALERLTTLELLEVRRQQEEEERKRRPPSPEPSTKVSEEAESQQQWDTSKGEQVSQNGLPAEQGSPRMAETVDTSEMVNGATEQRTSSKESSPIPSPTSDRKAKTALPAQSAATLPARTQETPSAQMEGFLNRKHEWEAHNKKASSRSWHNVYCVINNQEMGFYKDAKTAASGIPYHSEVPVSLKEAVCEVALDYFSTSSTLWHISRVDRYGSCPSSQASATLASLEKLMDLQNQS

SEQ ID NO: 852556 - protein, 2168 aa, Homo sapiens; identical to SEQ ID NO: 852543

SEQ ID NO: 852557 - protein, 2000 aa, Homo sapiens
MTTTVATDYDNIEIQQQYSDVNNRWDVDDWDNENSSARLFERSRIKALADEREAVQKKTFTKWVNSHLARVSCRITDLYTDLRDGRMLIKLLEVLSGERLPKPTKGRMRIHCLENVDKALQFLKEQRVHLENMGSHDIVDGNHRLTLGLIWTIILRFQIQDISVETEDNKEKKSAKDALLLWCQMKTAGYPNVNIHNFTTSWRDGMAFNALIHKHRPDLIDFDKLKKSNAHYNLQNAFNLAEQHLGLTKLLDPEDISVDHPDEKSIITYVVTYYHYFSKMKALAVEGKRIGKVLDNAIETEKMIEKYESLASDLLEWIEQTIIILNNRKFANSLVGVQQQLQAFNTYRTVEKPPKFTEKGNLEVLLFTIQSKMRANNQKVYMPREGKLISDINKAWERLEKAEHERELALRNELIRQEKLEQLARRFDRKAAMRETWLSENQRLVSQDNFGFDLPAVEAATKKHEAIETDIAAYEERVQAVVAVARELEAENYHDIKRITARKDNVIRLWEYLLELLRARRQRLEMNLGLQKIFQEMLYIMDWMDEMKVLVLSQDYGKHLLGVEDLLQKHTLVEADIGIQAERVRGVNASAQKFATDGEGYKPCDPQVIRDRVAHMEFCYQELCQLAAERRARLEESRRLWKFFWEMAEEEGWIREKEKILSSDDYGKDLTSVMRLLSKHRAFEDEMSGRSGHFEQAIKEGEDMIAEEHFGSEKIRERIIYIREQWANLEQLSAIRKKRLEEASLLHQFQADADDIDAWMLDILKIVSSSDVGHDEYSTQSLVKKHKDVAEEIANYRPTLDTLHEQASALPQEHAESPDVRGRLSGIEERYKEVAELTRLRKQALQDTLALYKMFSEADACELWIDEKEQWLNNMQIPEKLEDLEVIQHRFESLEPEMNNQASRVAVVNQIARQLMHSGHPSEKEIKAQQDKLNTRWSQFRELVDRKKDALLSALSIQNYHLECNETKSWIREKTKVIESTQDLGNDLAGVMALQRKLTGMERDLVAIEAKLSDLQKEAEKLESEHPDQAQAILSRLAEISDVWEEMKTTLKNREASLGEASKLQQFLRDLDDFQSWLSRTQTAIASEDMPNTLTEAEKLLTQHENIKNEIDNYEEDYQKMRDMGEMVTQGQTDAQYMFLRQRLQALDTGWNELHKMWENRQNLLSQSHAYQQFLRDTKQAEAFLNNQEYVLAHTEMPTTLEGAEAAIKKQEDFMTTMDANEEKINAVVETGRRLVSDGNINSDRIQEKVDSIDDRHRKNRETASELLMRLKDNRDLQKFLQDCQELSLWINEKMLTAQDMSYDEARNLHSKWLKHQAFMAELASNKEWLDKIEKEGMQLISEKPETEAVVKEKLTGLHKMWEVLESTTQTKAQRLFDANKAELFTQSCADLDKWLHGLESQIQSDDYGKDLTSVNILLKKQQMLENQMEVRKKEIEELQSQAQALSQEGKSTDEVDSKRLTVQTKFMELLEPLNERKHNLLASKEIHQFNRDVEDEILWVGERMPLATSTDHGHNLQTVQLLIKKNQTLQKEIQGHQPRIDDIFERSQNIVTDSSSLSAEAIRQRLADLKQLWGLLIEETEKRHRRLEEAHRAQQYYFDAAEAEAWMSEQELYMMSEEKAKDEQSAVSMLKKHQILEQAVEDYAETVHQLSKTSRALVADSHPESERISMRQSKVDKLYAGLKDLAEERRGKLDERHRLFQLNREVDDLEQWIAEREVVAGSHELGQDYEHVTMLQERFREFARDTGNIGQERVDTVNHLADELINSGHSDAATIAEWKDGLNEAWADLLELIDTRTQILAASYELHKFYHDAKEIFGRIQDKHKKLPEELGRDQNTVETLQRMHTTFEHDIQALGTQVRQLQEDAARLQAAYAGDKADDIQKRENEVLEAWKSLLDACESRRVRLVDTGDKFRFFSMVRDLMLWMEDVIRQIEAQEKPRDVSSVELLMNNHQGIKAEIDARNDIDRNELQRLGLNREVVAQAWCSVVRPVPLNFCPIC

SEQ ID NO: 852558 - protein, 1738 aa, Homo sapiens
MTTTVATDYDNIEIQQQYSDVNNRWDVDDWDNENSSARLFERSRIKALADEREAVQKKTFTKWVNSHLARVSCRITDLYTDLRDGRMLIKLLEVLSGERLPKPTKGRMRIHCLENVDKALQFLKEQRVHLENMGSHDIVDGNHRLTLGLIWTIILRFQIQDISVETEDNKEKKSAKDALLLWCQMKTAGYPNVNIHNFTTSWRDGMAFNALIHKHRPDLIDFDKLKKSNAHYNLQNAFNLAEQHLGLTKLLDPEDISVDHPDEKSIITYVVTYYHYFSKMKALAVEGKRIGKVLDNAIETEKMIEKYESLASDLLEWIEQTIIILNNRKFANSLVGVQQQLQAFNTYRTVEKPPKFTEKGNLEVLLFTIQSKMRANNQKVYMPREGKLISDINKAWERLEKAEHERELALRNELIRQEKLEQLARRFDRKAAMRETWLSENQRLVSQDNFGFDLPAVEAATKKHEAIETDIAAYEERVQAVVAVARELEAENYHDIKRITARKDNVIRLWEYLLELLRARRQRLEMNLGLQKIFQEMLYIMDWMDEMKVLVLSQDYGKHLLGVEDLLQKHTLVEADIGIQAERVRGVNASAQKFATDGEGYKPCDPQVIRDRVAHMEFCYQELCQLAAERRARLEESRRLWKFFWEMAEEEGWIREKEKILSSDDYGKDLTSVMRLLSKHRAFEDEMSGRSGHFEQAIKEGEDMIAEEHFGSEKIRERIIYIREQWANLEQLSAIRKKRLEEASLLHQFQADADDIDAWMLDILKIVSSSDVGHDEYSTQSLVKKHKDVAEEIANYRPTLDTLHEQASALPQEHAESPDVRGRLSGIEERYKEVAELTRLRKQALQDTLALYKMFSEADACELWIDEKEQWLNNMQIPEKLEDLEVIQHRFESLEPEMNNQASRVAVVNQIARQLMHSGHPSEKEIKAQQDKLNTRWSQFRELVDRKKDALLSALSIQNYHLECNETKSWIREKTKVIESTQDLGNDLAGVMALQRKLTGMERDLVAIEAKLSDLQKEAEKLESEHPDQAQAILSRLAEISDVWEEMKTTLKNREASLGEASKLQQFLRDLDDFQSWLSRTQTAIASEDMPNTLTEAEKLLTQHENIKNEIDNYEEDYQKMRDMGEMVTQGQTDAQYMFLRQRLQALDTGWNELHKMWENRQNLLSQSHAYQQFLRDTKQAEAFLNNQEYVLAHTEMPTTLEGAEAAIKKQEDFMTTMDANEEKINAVVETGRRLVSDGNINSDRIQEKVDSIDDRHRKNRETASELLMRLKDNRDLQKFLQDCQELSLWINEKMLTAQDMSYDEARNLHSKWLKHQAFMAELASNKEWLDKIEKEGMQLISEKPETEAVVKEKLTGLHKMWEVLESTTQTKAQRLFDANKAELFTQSCADLDKWLHGLESQIQSDDYGKDLTSVNILLKKQQMLENQMEVRKKEIEELQSQAQALSQEGKSTDEVDSKRLTVQTKFMELLEPLNERKHNLLASKEIHQFNRDVEDEILWVGERMPLATSTDHGHNLQTVQLLIKKNQTLQKEIQGHQPRIDDIFERSQNIVTDSSSLSAEAIRQRLADLKQLWGLLIEETEKRHRRLEEAHRAQQYYFDAAEAEAWMSEQELYMMSEEKAKDEQSAVSMLKKHQILEQAVEDYAETVHQLSKTSRALVADSHPESERISMRQSKVDKLYAGLKDLAEERRGKLDERHRLFQLNREVDDLEQWIAEREVVAGSHELGQDYEHVTVKLF

SEQ ID NO: 852559 - protein, 1545 aa, Homo sapiens
MTTTVATDYDNIEIQQQYSDVNNRWDVDDWDNENSSARLFERSRIKALADEREAVQKKTFTKWVNSHLARVSCRITDLYTDLRDGRMLIKLLEVLSGERLPKPTKGRMRIHCLENVDKALQFLKEQRVHLENMGSHDIVDGNHRLTLGLIWTIILRFQIQDISVETEDNKEKKSAKDALLLWCQMKTAGYPNVNIHNFTTSWRDGMAFNALIHKHRPDLIDFDKLKKSNAHYNLQNAFNLAEQHLGLTKLLDPEDISVDHPDEKSIITYVVTYYHYFSKMKALAVEGKRIGKVLDNAIETEKMIEKYESLASDLLEWIEQTIIILNNRKFANSLVGVQQQLQAFNTYRTVEKPPKFTEKGNLEVLLFTIQSKMRANNQKVYMPREGKLISDINKAWERLEKAEHERELALRNELIRQEKLEQLARRFDRKAAMRETWLSENQRLVSQDNFGFDLPAVEAATKKHEAIETDIAAYEERVQAVVAVARELEAENYHDIKRITARKDNVIRLWEYLLELLRARRQRLEMNLGLQKIFQEMLYIMDWMDEMKVLVLSQDYGKHLLGVEDLLQKHTLVEADIGIQAERVRGVNASAQKFATDGEGYKPCDPQVIRDRVAHMEFCYQELCQLAAERRARLEESRRLWKFFWEMAEEEGWIREKEKILSSDDYGKDLTSVMRLLSKHRAFEDEMSGRSGHFEQAIKEGEDMIAEEHFGSEKIRERIIYIREQWANLEQLSAIRKKRLEEASLLHQFQADADDIDAWMLDILKIVSSSDVGHDEYSTQSLVKKHKDVAEEIANYRPTLDTLHEQASALPQEHAESPDVRGRLSGIEERYKEVAELTRLRKQALQDTLALYKMFSEADACELWIDEKEQWLNNMQIPEKLEDLEVIQHRFESLEPEMNNQASRVAVVNQIARQLMHSGHPSEKEIKAQQDKLNTRWSQFRELVDRKKDALLSALSIQNYHLECNETKSWIREKTKVIESTQDLGNDLAGVMALQRKLTGMERDLVAIEAKLSDLQKEAEKLESEHPDQAQAILSRLAEISDVWEEMKTTLKNREASLGEASKLQQFLRDLDDFQSWLSRTQTAIASEDMPNTLTEAEKLLTQHENIKNEIDNYEEDYQKMRDMGEMVTQGQTDAQYMFLRQRLQALDTGWNELHKMWENRQNLLSQSHAYQQFLRDTKQAEAFLNNQEYVLAHTEMPTTLEGAEAAIKKQEDFMTTMDANEEKINAVVETGRRLVSDGNINSDRIQEKVDSIDDRHRKNRETASELLMRLKDNRDLQKFLQDCQELSLWINEKMLTAQDMSYDEARNLHSKWLKHQAFMAELASNKEWLDKIEKEGMQLISEKPETEAVVKEKLTGLHKMWEVLESTTQTKAQRLFDANKAELFTQSCADLDKWLHGLESQIQSDDYGKDLTSVNILLKKQQMLENQMEVRKKEIEELQSQAQALSQEGKSTDEVDSKRLTVQTKFMELLEPLNERKHNLLASKEIHQFNRDVEDEILWVGERMPLATSTDHGHNLQTVQLLIKKNQTLQEPMMSRNPPDPNDG

SEQ ID NO: 852560 - protein, 1592 aa, Homo sapiens
  misc_feature (1505)..(1505): Xaa can be any naturally occurring amino acid
MTTTVATDYDNIEIQQQYSDVNNRWDVDDWDNENSSARLFERSRIKALADEREAVQKKTFTKWVNSHLARVSCRITDLYTDLRDGRMLIKLLEVLSGERLPKPTKGRMRIHCLENVDKALQFLKEQRVHLENMGSHDIVDGNHRLTLGLIWTIILRFQIQDISVETEDNKEKKSAKDALLLWCQMKTAGYPNVNIHNFTTSWRDGMAFNALIHKHRPDLIDFDKLKKSNAHYNLQNAFNLAEQHLGLTKLLDPEDISVDHPDEKSIITYVVTYYHYFSKMKALAVEGKRIGKVLDNAIETEKMIEKYESLASDLLEWIEQTIIILNNRKFANSLVGVQQQLQAFNTYRTVEKPPKFTEKGNLEVLLFTIQSKMRANNQKVYMPREGKLISDINKAWERLEKAEHERELALRNELIRQEKLEQLARRFDRKAAMRETWLSENQRLVSQDNFGFDLPAVEAATKKHEAIETDIAAYEERVQAVVAVARELEAENYHDIKRITARKDNVIRLWEYLLELLRARRQRLEMNLGLQKIFQEMLYIMDWMDEMKVLVLSQDYGKHLLGVEDLLQKHTLVEADIGIQAERVRGVNASAQKFATDGEGYKPCDPQVIRDRVAHMEFCYQELCQLAAERRARLEESRRLWKFFWEMAEEEGWIREKEKILSSDDYGKDLTSVMRLLSKHRAFEDEMSGRSGHFEQAIKEGEDMIAEEHFGSEKIRERIIYIREQWANLEQLSAIRKKRLEEASLLHQFQADADDIDAWMLDILKIVSSSDVGHDEYSTQSLVKKHKDVAEEIANYRPTLDTLHEQASALPQEHAESPDVRGRLSGIEERYKEVAELTRLRKQALQDTLALYKMFSEADACELWIDEKEQWLNNMQIPEKLEDLEVIQHRFESLEPEMNNQASRVAVVNQIARQLMHSGHPSEKEIKAQQDKLNTRWSQFRELVDRKKDALLSALSIQNYHLECNETKSWIREKTKVIESTQDLGNDLAGVMALQRKLTGMERDLVAIEAKLSDLQKEAEKLESEHPDQAQAILSRLAEISDVWEEMKTTLKNREASLGEASKLQQFLRDLDDFQSWLSRTQTAIASEDMPNTLTEAEKLLTQHENIKNEIDNYEEDYQKMRDMGEMVTQGQTDAQYMFLRQRLQALDTGWNELHKMWENRQNLLSQSHAYQQFLRDTKQAEAFLNNQEYVLAHTEMPTTLEGAEAAIKKQEDFMTTMDANEEKINAVVETGRRLVSDGNINSDRIQEKVDSIDDRHRKNRETASELLMRLKDNRDLQKFLQDCQELSLWINEKMLTAQDMSYDEARNLHSKWLKHQAFMAELASNKEWLDKIEKEGMQLISEKPETEAVVKEKLTGLHKMWEVLESTTQTKAQRLFDANKAELFTQSCADLDKWLHGLESQIQSDDYGKDLTSVNILLKKQQMLENQMEVRKKEIEELQSQAQALSQEGKSTDEVDSKRLTVQTKFMELLEPLNERKHNLLASKEIHQFNRDVEDEIVSRPLLXHMVFPRAPLPVLKPTFSLLSHPHLGPRWQAELPKSRRLWKFFWEMAEEEGWIREKEKILSSDDYGKDLTSVMRLLSKHRAFEDEMSG

SEQ ID NO: 852561 - protein, 1199 aa, Homo sapiens
MTTTVATDYDNIEIQQQYSDVNNRWDVDDWDNENSSARLFERSRIKALADEREAVQKKTFTKWVNSHLARVSCRITDLYTDLRDGRMLIKLLEVLSGERLPKPTKGRMRIHCLENVDKALQFLKEQRVHLENMGSHDIVDGNHRLTLGLIWTIILRFQIQDISVETEDNKEKKSAKDALLLWCQMKTAGYPNVNIHNFTTSWRDGMAFNALIHKHRPDLIDFDKLKKSNAHYNLQNAFNLAEQHLGLTKLLDPEDISVDHPDEKSIITYVVTYYHYFSKMKALAVEGKRIGKVLDNAIETEKMIEKYESLASDLLEWIEQTIIILNNRKFANSLVGVQQQLQAFNTYRTVEKPPKFTEKGNLEVLLFTIQSKMRANNQKVYMPREGKLISDINKAWERLEKAEHERELALRNELIRQEKLEQLARRFDRKAAMRETWLSENQRLVSQDNFGFDLPAVEAATKKHEAIETDIAAYEERVQAVVAVARELEAENYHDIKRITARKDNVIRLWEYLLELLRARRQRLEMNLGLQKIFQEMLYIMDWMDEMKVLVLSQDYGKHLLGVEDLLQKHTLVEADIGIQAERVRGVNASAQKFATDGEGYKPCDPQVIRDRVAHMEFCYQELCQLAAERRARLEESRRLWKFFWEMAEEEGWIREKEKILSSDDYGKDLTSVMRLLSKHRAFEDEMSGRSGHFEQAIKEGEDMIAEEHFGSEKIRERIIYIREQWANLEQLSAIRKKRLEEASLLHQFQADADDIDAWMLDILKIVSSSDVGHDEYSTQSLVKKHKDVAEEIANYRPTLDTLHEQASALPQEHAESPDVRGRLSGIEERYKEVAELTRLRKQALQDTLALYKMFSEADACELWIDEKEQWLNNMQIPEKLEDLEVIQHRFESLEPEMNNQASRVAVVNQIARQLMHSGHPSEKEIKAQQDKLNTRWSQFRELVDRKKDALLSALSIQNYHLECNETKSWIREKTKVIESTQDLGNDLAGVMALQRKLTGMERDLVAIEAKLSDLQKEAEKLESEHPDQAQAILSRLAEISDVWEEMKTTLKNREASLGEASKLQQFLRDLDDFQSWLSRTQTAIASEDMPNTLTEAEKLLTQHENIKNEIDNYEEDYQKMRDMGEMVTQGQTDAQYMFLRQRLQALDTGWNELHKMWENRQNLLSQSHAYQQFLRDTKQAEAFLNNQVRFVPAFASFR

SEQ ID NO: 852562 - protein, 1032 aa, Homo sapiens
MTTTVATDYDNIEIQQQYSDVNNRWDVDDWDNENSSARLFERSRIKALADEREAVQKKTFTKWVNSHLARVSCRITDLYTDLRDGRMLIKLLEVLSGERLPKPTKGRMRIHCLENVDKALQFLKEQRVHLENMGSHDIVDGNHRLTLGLIWTIILRFQIQDISVETEDNKEKKSAKDALLLWCQMKTAGYPNVNIHNFTTSWRDGMAFNALIHKHRPDLIDFDKLKKSNAHYNLQNAFNLAEQHLGLTKLLDPEDISVDHPDEKSIITYVVTYYHYFSKMKALAVEGKRIGKVLDNAIETEKMIEKYESLASDLLEWIEQTIIILNNRKFANSLVGVQQQLQAFNTYRTVEKPPKFTEKGNLEVLLFTIQSKMRANNQKVYMPREGKLISDINKAWERLEKAEHERELALRNELIRQEKLEQLARRFDRKAAMRETWLSENQRLVSQDNFGFDLPAVEAATKKHEAIETDIAAYEERVQAVVAVARELEAENYHDIKRITARKDNVIRLWEYLLELLRARRQRLEMNLGLQKIFQEMLYIMDWMDEMKVLVLSQDYGKHLLGVEDLLQKHTLVEADIGIQAERVRGVNASAQKFATDGEGYKPCDPQVIRDRVAHMEFCYQELCQLAAERRARLEESRRLWKFFWEMAEEEGWIREKEKILSSDDYGKDLTSVMRLLSKHRAFEDEMSGRSGHFEQAIKEGEDMIAEEHFGSEKIRERIIYIREQWANLEQLSAIRKKRLEEASLLHQFQADADDIDAWMLDILKIVSSSDVGHDEYSTQSLVKKHKDVAEEIANYRPTLDTLHEQASALPQEHAESPDVRGRLSGIEERYKEVAELTRLRKQALQDTLALYKMFSEADACELWIDEKEQWLNNMQIPEKLEDLEVIQHRFESLEPEMNNQASRVAVVNQIARQLMHSGHPSEKEIKAQQDKLNTRWSQFRELVDRKKDALLSALSIQNYHLECNETKSWIREKTKVIESTQDLGNDLAGVMALQRKLTGMERDLVAIEAKLSDLQKEAEKLESEHPDQAQA

SEQ ID NO: 852563 - protein, 575 aa, Homo sapiens
MTTTVATDYDNIEIQQQYSDVNNRWDVDDWDNENSSARLFERSRIKALADEREAVQKKTFTKWVNSHLARVSCRITDLYTDLRDGRMLIKLLEVLSGERLPKPTKGRMRIHCLENVDKALQFLKEQRVHLENMGSHDIVDGNHRLTLGLIWTIILRFQIQDISVETEDNKEKKSAKDALLLWCQMKTAGYPNVNIHNFTTSWRDGMAFNALIHKHRPDLIDFDKLKKSNAHYNLQNAFNLAEQHLGLTKLLDPEDISVDHPDEKSIITYVVTYYHYFSKMKALAVEGKRIGKVLDNAIETEKMIEKYESLASDLLEWIEQTIIILNNRKFANSLVGVQQQLQAFNTYRTVEKPPKFTEKGNLEVLLFTIQSKMRANNQKVYMPREGKLISDINKAWERLEKAEHERELALRNELIRQEKLEQLARRFDRKAAMRETWLSENQRLVSQDNFGFDLPAVEAATKKHEAIETDIAAYEERVQAVVAVARELEAENYHDIKRITARKDNVIRLWEYLLELLRARRQRLEMNLGLQKIFQEMLYIMDWMDEMKVLVLSQDYGKHLLGVEDLLQKHQHEFP

SEQ ID NO: 852564 - protein, 174 aa, Homo sapiens
MTTTVATDYDNIEIQQQYSDVNNRWDVDDWDNENSSARLFERSRIKALADEREAVQKKTFTKWVNSHLARVSCRITDLYTDLRDGRMLIKLLEVLSGERLPKPTKGRMRIHCLENVDKALQFLKEQRVHLENMGSHDIVDGNHRLTLGLIWTIILRFQIQDISVESARDPLEQL

SEQ ID NO: 852565 - protein, 51 aa, Homo sapiens
MEFCYQELCQLAAERRARLEESRRLWKFFWEMAEEEGWIREKEKILSSDDY

SEQ ID NO: 852566 - protein, 215 aa, Homo sapiens
MVNGATEQRTSSKESSPIPSPTSDRKAKTALPAQSAATLPARTQETPSAQMEGFLNRKHEWEAHNKKASSRSWHNVYCVINNQEMGFYKDAKTAASGIPYHSEVPVSLKEAVCEVALDYKKKKHVFKLRLNDGNEYLFQAKDDEEMNTWIQAISSAISSDKHEVSASTQSTPASSRAQTLPTSVVTITSESSPGKREKDKEKDKEKRFSLFGKKK

SEQ ID NO: 852567 - protein, 93 aa, Homo sapiens
SSPVPSHLPYRLISLTVLISLTVLISLTIAEWKDGLNEAWADLLELIDTRTQILAASYELHKFYHDAKEIFDGKGDEDGKGDETVREMRREGD

SEQ ID NO: 852568 - protein, 2364 aa, Homo sapiens; identical to SEQ ID NO: 852535

SEQ ID NO: 852569 - protein, 2364 aa, Homo sapiens; identical to SEQ ID NO: 852535

SEQ ID NO: 852570 - protein, 2364 aa, Homo sapiens; identical to SEQ ID NO: 852535

SEQ ID NO: 852571 - protein, 2364 aa, Homo sapiens; identical to SEQ ID NO: 852535

SEQ ID NO: 852572 - protein, 2364 aa, Homo sapiens; identical to SEQ ID NO: 852535

SEQ ID NO: 852573 - protein, 2364 aa, Homo sapiens
MTTTVATDYDNIEIQQQYSDVNNRWDVDDWDNENSSARLFERSRIKALADEREAVQKKTFTKWVNSHLARVSCRITDLYTDLRDGRMLIKLLEVLSGERLPKPTKGRMRIHCLENVDKALQFLKEQRVHLENMGSHDIVDGNHRLTLGLIWTIILRFQIQDISVETEDNKEKKSAKDALLLWCQMKTAGYPNVNIHNFTTSWRDGMAFNALIHKHRPDLIDFDKLKKSNAHYNLQNAFNLAEQHLGLTKLLDPEDISVDHPDEKSIITYVVTYYHYFSKMKALAVEGKRIGKVLDNAIETEKMIEKYESLASDLLEWIEQTIIILNNRKFANSLVGVQQQLQAFNTYRTVEKPPKFTEKGNLEVLLFTIQSKMRANNQKVYMPREGKLISDINKAWERLEKAEHERELALRNELIRQEKLEQLARRFDRKAAMRETWLSENQRLVSQDNFGFDLPAVEAATKKHEAIETDIAAYEERVQAVVAVARELEAENYHDIKRITARKDNVIRLWEYLLELLRARRQRLEMNLGLQKIFQEMLYIMDWMDEMKVLVLSQDYGKHLLGVEDLLQKHTLVEADIGIQAERVRGVNASAQKFATDGEGYKPCDPQVIRDRVAHMEFCYQELCQLAAERRARLEESRRLWKFFWEMAEEEGWIREKEKILSSDDYGKDLTSVMRLLSKHRAFEDEMSGRSGHFEQAIKEGEDMIAEEHFGSEKIRERIIYIREQWANLEQLSAIRKKRLEEASLLHQFQADADDIDAWMLDILKIVSSSDVGHDEYSTQSLVKKHKDVAEEIANYRPTLDTLHEQASALPQEHAESPDVRGRLSGIEERYKEVAELTRLRKQALQDTLALYKMFSEADACELWIDEKEQWLNNMQIPEKLEDLEVIQHRFESLEPEMNNQASRVAVVNQIARQLMHSGHPSEKEIKAQQDKLNTRWSQFRELVDRKKDALLSALSIQNYHLECNETKSWIREKTKVIESTQDLGNDLAGVMALQRKLTGMERDLVAIEAKLSDLQKEAEKLESEHPDQAQAILSRLAEISDVWEEMKTTLKNREASLGEASKLQQFLRDLDDFQSWLSRTQTAIASEDMPNTLTEAEKLLTQHENIKNEIDNYEEDYQKMRDMGEMVTQGQTDAQYMFLRQRLQALDTGWNELHKMWENRQNLLSQSHAYQQFLRDTKQAEAFLNNQEYVLAHTEMPTTLEGAEAAIKKQEDFMTTMDANEEKINAVVETGRRLVSDGNINSDRIQEKVDSIDDRHRKNRETASELLMRLKDNRDLQKFLQDCQELSLWINEKMLTAQDMSYDEARNLHSKWLKHQAFMAELASNKEWLDKIEKEGMQLISEKPETEAVVKEKLTGLHKMWEVLESTTQTKAQRLFDANKAELFTQSCADLDKWLHGLESQIQSDDYGKDLTSVNILLKKQQMLENQMEVRKKEIEELQSQAQALSQEGKSTDEVDSKRLTVQTKFMELLEPLNERKHNLLASKEIHQFNRDVEDEILWVGERMPLATSTDHGHNLQTVQLLIKKNQTLQKEIQGHQPRIDDIFERSQNIVTDSSSLSAEAIRQRLADLKQLWGLLIEETEKRHRRLEEAHRAQQYYFDAAEAEAWMSEQELYMMSEEKAKDEQSAVSMLKKHQILEQAVEDYAETVHQLSKTSRALVADSHPESERISMRQSKVDKLYAGLKDLAEERRGKLDERHRLFQLNREVDDLEQWIAEREVVAGSHELGQDYEHVTMLQERFREFARDTGNIGQERVDTVNHLADELINSGHSDAATIAEWKDGLNEAWADLLELIDTRTQILAASYELHKFYHDAKEIFGRIQDKHKKLPEELGRDQNTVETLQRMHTTFEHDIQALGTQVRQLQEDAARLQAAYAGDKADDIQKRENEVLEAWKSLLDACESRRVRLVDTGDKFRFFSMVRDLMLWMEDVIRQIEAQEKPRDVSSVELLMNNHQGIKAEIDARNDSFTTCIELGKSLLARKHYASEEIQGKYTWVTEKRKEMIDKWEDRWEWLRLILEVHQFSRDASVAEAWLLGQEPYLSSREIGQSVDEVEKLIKRHEAFEKSAATWDERFSALERLTTLELLEVRRQQEEEERKRRPPSPEPSTKVSEEAESQQQWDTSKGEQVSQNGLPAEQGSPRMAETVDTSEMVNGATEQRTSSKESSPIPSPTSDRKAKTALPAQSAATLPARTQETPSAQMEGFLNRKHEWEAHNKKASSRSWHNVYCVINNQEMGFYKDAKTAASGIPYHSEVPVSLKEAVCEVALDYKKKKHVFKLRLNDGNEYLFQAKDDEEMNTWIQAISSAISSDKHEVSASTQSTPASSRAQTLPTSVVTITSESSPGKREKDKEKDKEKRFSLFGKKK

SEQ ID NO: 852574 - protein, 2150 aa, Homo sapiens [sequence omitted]

SEQ ID NO: 852575 - protein, 2267 aa, Homo sapiens; identical to SEQ ID NO: 852554

SEQ ID NO: 852576 - protein, 2364 aa, Homo sapiens; identical to SEQ ID NO: 852535

SEQ ID NO: 852577 - protein, 2168 aa, Homo sapiens; identical to SEQ ID NO: 852543

SEQ ID NO: 852578 - protein, 2303 aa, Homo sapiens; identical to SEQ ID NO: 852545

SEQ ID NO: 852579 - protein, 2279 aa, Homo sapiens; identical to SEQ ID NO: 852544

SEQ ID NO: 852580 - protein, 2279 aa, Homo sapiens; identical to SEQ ID NO: 852544

SEQ ID NO: 852581 - protein, 2279 aa, Homo sapiens; identical to SEQ ID NO: 852544

SEQ ID NO: 852582 - protein, 2220 aa, Homo sapiens
MTTTVATDYDNIEIQQQYSDVNNRWDVDDWDNENSSARLFERSRIKALADEREAVQKKTFTKWVNSHLARVSCRITDLYTDLRDGRMLIKLLEVLSGERLPKPTKGRMRIHCLENVDKALQFLKEQRVHLENMGSHDIVDGNHRLTLGLIWTIILRFQIQDISVETEDNKEKKSAKDALLLWCQMKTAGYPNVNIHNFTTSWRDGMAFNALIHKHRPDLIDFDKLKKSNAHYNLQNAFNLAEQHLGLTKLLDPEDISVDHPDEKSIITYVVTYYHYFSKMKALAVEGKRIGKVLDNAIETEKMIEKYESLASDLLEWIEQTIIILNNRKFANSLVGVQQQLQAFNTYRTVEKPPKFTEKGNLEVLLFTIQSKMRANNQKVYMPREGKLISDINKAWERLEKAEHERELALRNELIRQEKLEQLARRFDRKAAMRETWLSENQRLVSQDNFGFDLPAVEAATKKHEAIETDIAAYEERVQAVVAVARELEAENYHDIKRITARKDNVIRLWEYLLELLRARRQRLEMNLGLQKIFQEMLYIMDWMDEMKVLVLSQDYGKHLLGVEDLLQKHTLVEADIGIQAERVRGVNASAQKFATDGEGYKPCDPQVIRDRVAHMEFCYQELCQLAAERRARLEESRRLWKFFWEMAEEEGWIREKEKILSSDDYGKDLTSVMRLLSKHRAFEDEMSGRSGHFEQAIKEGEDMIAEEHFGSEKIRERIIYIREQWANLEQLSAIRKKRLEEASLLHQFQADADDIDAWMLDILKIVSSSDVGHDEYSTQSLVKKHKDVAEEIANYRPTLDTLHEQASALPQEHAESPDVRGRLSGIEERYKEVAELTRLRKQALQDTLALYKMFSEADACELWIDEKEQWLNNMQIPEKLEDLEVIQHRFESLEPEMNNQASRVAVVNQIARQLMHSGHPSEKEIKAQQDKLNTRWSQFRELVDRKKDALLSALSIQNYHLECNETKSWIREKTKVIESTQDLGNDLAGVMALQRKLTGMERDLVAIEAKLSDLQKEAEKLESEHPDQAQAILSRLAEISDVWEEMKTTLKNREASLGEASKLQQFLRDLDDFQSWLSRTQTAIASEDMPNTLTEAEKLLTQHENIKNEIDNYEEDYQKMRDMGEMVTQGQTDAQYMFLRQRLQALDTGWNELHKMWENRQNLLSQSHAYQQFLRDTKQAEAFLNNQEYVLAHTEMPTTLEGAEAAIKKQEDFMTTMDANEEKINAVVETGRRLVSDGNINSDRIQEKVDSIDDRHRKNRETASELLMRLKDNRDLQKFLQDCQELSLWINEKMLTAQDMSYDEARNLHSKWLKHQAFMAELASNKEWLDKIEKEGMQLISEKPETEAVVKEKLTGLHKMWEVLESTTQTKAQRLFDANKAELFTQSCADLDKWLHGLESQIQSDDYGKDLTSVNILLKKQQMLENQMEVRKKEIEELQSQAQALSQEGKSTDEVDSKRLTVQTKFMELLEPLNERKHNLLASKEIHQFNRDVEDEILWVGERMPLATSTDHGHNLQTVQLLIKKNQTLQKEIQGHQPRIDDIFERSQNIVTDSSSLSAEAIRQRLADLKQLWGLLIEETEKRHRRLEEAHRAQQYYFDAAEAEAWMSEQELYMMSEEKAKDEQSAVSMLKKHQILEQAVEDYAETVHQLSKTSRALVADSHPESERISMRQSKVDKLYAGLKDLAEERRGKLDERHRLFQLNREVDDLEQWIAEREVVAGSHELGQDYEHVTMLQERFREFARDTGNIGQERVDTVNHLADELINSGHSDAATIAEWKDGLNEAWADLLELIDTRTQILAASYELHKFYHDAKEIFGRIQDKHKKLPEELGRDQNTVETLQRMHTTFEHDIQALGTQVRQLQEDAARLQAAYAGDKADDIQKRENEVLEAWKSLLDACESRRVRLVDTGDKFRFFSMVRDLMLWMEDVIRQIEAQEKPRDVSSVELLMNNHQGIKAEIDARNDSFTTCIELGKSLLARKHYASEEIKEKLLQLTEKRKEMIDKWEDRWEWLRLILEVHQFSRDASVAEAWLLGQEPYLSSREIGQSVDEVEKLIKRHEAFEKSAATWDERFSALERLTTLELLEVRRQQEEEERKRRPPSPEPSTKVSEEAESQQQWDTSKGEQVSQNGLPAEQGSPRMAETVDTSEMVNGATEQRTSSKESSPIPSPTSDRKAKTALPAQSAATLPARTQETPSAQMEGFLNRKHEWEAHNKKASSR

SEQ ID NO: 852583 - protein, 2237 aa, Homo sapiens
MTTTVATDYDNIEIQQQYSDVNNRWDVDDWDNENSSARLFERSRIKALADEREAVQKKTFTKWVNSHLARVSCRITDLYTDLRDGRMLIKLLEVLSGERLPKPTKGRMRIHCLENVDKALQFLKEQRVHLENMGSHDIVDGNHRLTLGLIWTIILRFQIQDISVETEDNKEKKSAKDALLLWCQMKTAGYPNVNIHNFTTSWRDGMAFNALIHKHRPDLIDFDKLKKSNAHYNLQNAFNLAEQHLGLTKLLDPEDISVDHPDEKSIITYVVTYYHYFSKMKALAVEGKRIGKVLDNAIETEKMIEKYESLASDLLEWIEQTIIILNNRKFANSLVGVQQQLQAFNTYRTVEKPPKFTEKGNLEVLLFTIQSKMRANNQKVYMPREGKLISDINKAWERLEKAEHERELALRNELIRQEKLEQLARRFDRKAAMRETWLSENQRLVSQDNFGFDLPAVEAATKKHEAIETDIAAYEERVQAVVAVARELEAENYHDIKRITARKDNVIRLWEYLLELLRARRQRLEMNLGLQKIFQEMLYIMDWMDEMKVLVLSQDYGKHLLGVEDLLQKHTLVEADIGIQAERVRGVNASAQKFATDGEGYKPCDPQVIRDRVAHMEFCYQELCQLAAERRARLEESRRLWKFFWEMAEEEGWIREKEKILSSDDYGKDLTSVMRLLSKHRAFEDEMSGRSGHFEQAIKEGEDMIAEEHFGSEKIRERIIYIREQWANLEQLSAIRKKRLEEASLLHQFQADADDIDAWMLDILKIVSSSDVGHDEYSTQSLVKKHKDVAEEIANYRPTLDTLHEQASALPQEHAESPDVRGRLSGIEERYKEVAELTRLRKQALQDTLALYKMFSEADACELWIDEKEQWLNNMQIPEKLEDLEVIQHRFESLEPEMNNQASRVAVVNQIARQLMHSGHPSEKEIKAQQDKLNTRWSQFRELVDRKKDALLSALSIQNYHLECNETKSWIREKTKVIESTQDLGNDLAGVMALQRKLTGMERDLVAIEAKLSDLQKEAEKLESEHPDQAQAILSRLAEISDVWEEMKTTLKNREASLGEASKLQQFLRDLDDFQSWLSRTQTAIASEDMPNTLTEAEKLLTQHENIKNEIDNYEEDYQKMRDMGEMVTQGQTDAQYMFLRQRLQALDTGWNELHKMWENRQNLLSQSHAYQQFLRDTKQAEAFLNNQEYVLAHTEMPTTLEGAEAAIKKQEDFMTTMDANEEKINAVVETGRRLVSDGNINSDRIQEKVDSIDDRHRKNRETASELLMRLKDNRDLQKFLQDCQELSLWINEKMLTAQDMSYDEARNLHSKWLKHQAFMAELASNKEWLDKIEKEGMQLISEKPETEAVVKEKLTGLHKMWEVLESTTQTKAQRLFDANKAELFTQSCADLDKWLHGLESQIQSDDYGKDLTSVNILLKKQQMLENQMEVRKKEIEELQSQAQALSQEGKSTDEVDSKRLTVQTKFMELLEPLNERKHNLLASKEIHQFNRDVEDEILWVGERMPLATSTDHGHNLQTVQLLIKKNQTLQKEIQGHQPRIDDIFERSQNIVTDSSSLSAEAIRQRLADLKQLWGLLIEETEKRHRRLEEAHRAQQYYFDAAEAEAWMSEQELYMMSEEKAKDEQSAVSMLKKHQILEQAVEDYAETVHQLSKTSRALVADSHPESERISMRQSKVDKLYAGLKDLAEERRGKLDERHRLFQLNREVDDLEQWIAEREVVAGSHELGQDYEHVTMLQERFREFARDTGNIGQERVDTVNHLADELINSGHSDAATIAEWKDGLNEAWADLLELIDTRTQILAASYELHKFYHDAKEIFGRIQDKHKKLPEELGRDQNTVETLQRMHTTFEHDIQALGTQVRQLQEDAARLQAAYAGDKADDIQKRENEVLEAWKSLLDACESRRVRLVDTGDKFRFFSMVRDLMLWMEDVIRQIEAQEKPRDVSSVELLMNNHQGIKAEIDARNDSFTTCIELGKSLLARKHYASEEIKEKLLQLTEKRKEMIDKWEDRWEWLRLILEVHQFSRDASVAEAWLLGQEPYLSSREIGQSVDEVEKLIKRHEAFEKSAATWDERFSALERLTTLELLEVRRQQEEEERKRRPPSPEPSTKVSEEAESQQQWDTSKGEQVSQNGLPAEQGSPRMAETVDTSEMVNGATEQRTSSKESSPIPSPTSDRKAKTALPAQSAATLPARTQETPSAQMEGFLNRKHEWEAHNKKASSRNGFKKQELASSIYFLLC

SEQ ID NO: 852584 - protein, 1830 aa, Homo sapiens
MTTTVATDYDNIEIQQQYSDVNNRWDVDDWDNENSSARLFERSRIKALADEREAVQKKTFTKWVNSHLARVSCRITDLYTDLRDGRMLIKLLEVLSGERLPKPTKGRMRIHCLENVDKALQFLKEQRVHLENMGSHDIVDGNHRLTLGLIWTIILRFQIQDISVETEDNKEKKSAKDALLLWCQMKTAGYPNVNIHNFTTSWRDGMAFNALIHKHRPDLIDFDKLKKSNAHYNLQNAFNLAEQHLGLTKLLDPEDISVDHPDEKSIITYVVTYYHYFSKMKALAVEGKRIGKVLDNAIETEKMIEKYESLASDLLEWIEQTIIILNNRKFANSLVGVQQQLQAFNTYRTVEKPPKFTEKGNLEVLLFTIQSKMRANNQKVYMPREGKLISDINKAWERLEKAEHERELALRNELIRQEKLEQLARRFDRKAAMRETWLSENQRLVSQDNFGFDLPAVEAATKKHEAIETDIAAYEERVQAVVAVARELEAENYHDIKRITARKDNVIRLWEYLLELLRARRQRLEMNLGLQKIFQEMLYIMDWMDEMKVLVLSQDYGKHLLGVEDLLQKHTLVEADIGIQAERVRGVNASAQKFATDGEGYKPCDPQVIRDRVAHMEFCYQELCQLAAERRARLEESRRLWKFFWEMAEEEGWIREKEKILSSDDYGKDLTSVMRLLSKHRAFEDEMSGRSGHFEQAIKEGEDMIAEEHFGSEKIRERIIYIREQWANLEQLSAIRKKRLEEASLLHQFQADADDIDAWMLDILKIVSSSDVGHDEYSTQSLVKKHKDVAEEIANYRPTLDTLHEQASALPQEHAESPDVRGRLSGIEERYKEVAELTRLRKQALQDTLALYKMFSEADACELWIDEKEQWLNNMQIPEKLEDLEVIQHRFESLEPEMNNQASRVAVVNQIARQLMHSGHPSEKEIKAQQDKLNTRWSQFRELVDRKKDALLSALSIQNYHLECNETKSWIREKTKVIESTQDLGNDLAGVMALQRKLTGMERDLVAIEAKLSDLQKEAEKLESEHPDQAQAILSRLAEISDVWEEMKTTLKNREASLGEASKLQQFLRDLDDFQSWLSRTQTAIASEDMPNTLTEAEKLLTQHENIKNEIDNYEEDYQKMRDMGEMVTQGQTDAQYMFLRQRLQALDTGWNELHKMWENRQNLLSQSHAYQQFLRDTKQAEAFLNNQEYVLAHTEMPTTLEGAEAAIKKQEDFMTTMDANEEKINAVVETGRRLVSDGNINSDRIQEKVDSIDDRHRKNRETASELLMRLKDNRDLQKFLQDCQELSLWINEKMLTAQDMSYDEARNLHSKWLKHQAFMAELASNKEWLDKIEKEGMQLISEKPETEAVVKEKLTGLHKMWEVLESTTQTKAQRLFDANKAELFTQSCADLDKWLHGLESQIQSDDYGKDLTSVNILLKKQQMLENQMEVRKKEIEELQSQAQALSQEGKSTDEVDSKRLTVQTKFMELLEPLNERKHNLLASKEIHQFNRDVEDEILWVGERMPLATSTDHGHNLQTVQLLIKKNQTLQKEIQGHQPRIDDIFERSQNIVTDSSSLSAEAIRQRLADLKQLWGLLIEETEKRHRRLEEAHRAQQYYFDAAEAEAWMSEQELYMMSEEKAKDEQSAVSMLKKHQILEQAVEDYAETVHQLSKTSRALVADSHPESERISMRQSKVDKLYAGLKDLAEERRGKLDERHRLFQLNREVDDLEQWIAEREVVAGSHELGQDYEHVTMLQERFREFARDTGNIGQERVDTVNHLADELINSGHSDAATIAEWKDGLNEAWADLLELIDTRTQILAASYELHKFYHDAKEIFDDLQGVRRVYSA

SEQ ID NO: 852585 - protein, 1631 aa, Homo sapiens
MTTTVATDYDNIEIQQQYSDVNNRWDVDDWDNENSSARLFERSRIKALADEREAVQKKTFTKWVNSHLARVSCRITDLYTDLRDGRMLIKLLEVLSGERLPKPTKGRMRIHCLENVDKALQFLKEQRVHLENMGSHDIVDGNHRLTLGLIWTIILRFQIQDISVETEDNKEKKSAKDALLLWCQMKTAGYPNVNIHNFTTSWRDGMAFNALIHKHRPDLIDFDKLKKSNAHYNLQNAFNLAEQHLGLTKLLDPEDISVDHPDEKSIITYVVTYYHYFSKMKALAVEGKRIGKVLDNAIETEKMIEKYESLASDLLEWIEQTIIILNNRKFANSLVGVQQQLQAFNTYRTVEKPPKFTEKGNLEVLLFTIQSKMRANNQKVYMPREGKLISDINKAWERLEKAEHERELALRNELIRQEKLEQLARRFDRKAAMRETWLSENQRLVSQDNFGFDLPAVEAATKKHEAIETDIAAYEERVQAVVAVARELEAENYHDIKRITARKDNVIRLWEYLLELLRARRQRLEMNLGLQKIFQEMLYIMDWMDEMKVLVLSQDYGKHLLGVEDLLQKHTLVEADIGIQAERVRGVNASAQKFATDGEGYKPCDPQVIRDRVAHMEFCYQELCQLAAERRARLEESRRLWKFFWEMAEEEGWIREKEKILSSDDYGKDLTSVMRLLSKHRAFEDEMSGRSGHFEQAIKEGEDMIAEEHFGSEKIRERIIYIREQWANLEQLSAIRKKRLEEASLLHQFQADADDIDAWMLDILKIVSSSDVGHDEYSTQSLVKKHKDVAEEIANYRPTLDTLHEQASALPQEHAESPDVRGRLSGIEERYKEVAELTRLRKQALQDTLALYKMFSEADACELWIDEKEQWLNNMQIPEKLEDLEVIQHRFESLEPEMNNQASRVAVVNQIARQLMHSGHPSEKEIKAQQDKLNTRWSQFRELVDRKKDALLSALSIQNYHLECNETKSWIREKTKVIESTQDLGNDLAGVMALQRKLTGMERDLVAIEAKLSDLQKEAEKLESEHPDQAQAILSRLAEISDVWEEMKTTLKNREASLGEASKLQQFLRDLDDFQSWLSRTQTAIASEDMPNTLTEAEKLLTQHENIKNEIDNYEEDYQKMRDMGEMVTQGQTDAQYMFLRQRLQALDTGWNELHKMWENRQNLLSQSHAYQQFLRDTKQAEAFLNNQEYVLAHTEMPTTLEGAEAAIKKQEDFMTTMDANEEKINAVVETGRRLVSDGNINSDRIQEKVDSIDDRHRKNRETASELLMRLKDNRDLQKFLQDCQELSLWINEKMLTAQDMSYDEARNLHSKWLKHQAFMAELASNKEWLDKIEKEGMQLISEKPETEAVVKEKLTGLHKMWEVLESTTQTKAQRLFDANKAELFTQSCADLDKWLHGLESQIQSDDYGKDLTSVNILLKKQQMLENQMEVRKKEIEELQSQAQALSQEGKSTDEVDSKRLTVQTKFMELLEPLNERKHNLLASKEIHQFNRDVEDEILWVGERMPLATSTDHGHNLQTVQLLIKKNQTLQKEIQGHQPRIDDIFERSQNIVTDSSSLSAEAIRQRLADLKQLWGLLIEETEKRHRRLEEAHRAQQYYFDAAEAEAWMSEQELYMMSEEKAKDEQSAVSMA

SEQ ID NO: 852586 - protein, 1277 aa, Homo sapiens
MTTTVATDYDNIEIQQQYSDVNNRWDVDDWDNENSSARLFERSRIKALADEREAVQKKTFTKWVNSHLARVSCRITDLYTDLRDGRMLIKLLEVLSGERLPKPTKGRMRIHCLENVDKALQFLKEQRVHLENMGSHDIVDGNHRLTLGLIWTIILRFQIQDISVETEDNKEKKSAKDALLLWCQMKTAGYPNVNIHNFTTSWRDGMAFNALIHKHRPDLIDFDKLKKSNAHYNLQNAFNLAEQHLGLTKLLDPEDISVDHPDEKSIITYVVTYYHYFSKMKALAVEGKRIGKVLDNAIETEKMIEKYESLASDLLEWIEQTIIILNNRKFANSLVGVQQQLQAFNTYRTVEKPPKFTEKGNLEVLLFTIQSKMRANNQKVYMPREGKLISDINKAWERLEKAEHERELALRNELIRQEKLEQLARRFDRKAAMRETWLSENQRLVSQDNFGFDLPAVEAATKKHEAIETDIAAYEERVQAVVAVARELEAENYHDIKRITARKDNVIRLWEYLLELLRARRQRLEMNLGLQKIFQEMLYIMDWMDEMKVLVLSQDYGKHLLGVEDLLQKHTLVEADIGIQAERVRGVNASAQKFATDGEGYKPCDPQVIRDRVAHMEFCYQELCQLAAERRARLEESRRLWKFFWEMAEEEGWIREKEKILSSDDYGKDLTSVMRLLSKHRAFEDEMSGRSGHFEQAIKEGEDMIAEEHFGSEKIRERIIYIREQWANLEQLSAIRKKRLEEASLLHQFQADADDIDAWMLDILKIVSSSDVGHDEYSTQSLVKKHKDVAEEIANYRPTLDTLHEQASALPQEHAESPDVRGRLSGIEERYKEVAELTRLRKQALQDTLALYKMFSEADACELWIDEKEQWLNNMQIPEKLEDLEVIQHRFESLEPEMNNQASRVAVVNQIARQLMHSGHPSEKEIKAQQDKLNTRWSQFRELVDRKKDALLSALSIQNYHLECNETKSWIREKTKVIESTQDLGNDLAGVMALQRKLTGMERDLVAIEAKLSDLQKEAEKLESEHPDQAQAILSRLAEISDVWEEMKTTLKNREASLGEASKLQQFLRDLDDFQSWLSRTQTAIASEDMPNTLTEAEKLLTQHENIKNEIDNYEEDYQKMRDMGEMVTQGQTDAQYMFLRQRLQALDTGWNELHKMWENRQNLLSQSHAYQQFLRDTKQAEAFLNNQEYVLAHTEMPTTLEGAEAAIKKQEDFMTTMDANEEKINAVVETGRRLVSDGNINSDRIQEKVDSIDDRHRKNRETASSGSASRGSASSG

SEQ ID NO: 852587 - protein, 1026 aa, Homo sapiens
MTTTVATDYDNIEIQQQYSDVNNRWDVDDWDNENSSARLFERSRIKALADEREAVQKKTFTKWVNSHLARVSCRITDLYTDLRDGRMLIKLLEVLSGERLPKPTKGRMRIHCLENVDKALQFLKEQRVHLENMGSHDIVDGNHRLTLGLIWTIILRFQIQDISVETEDNKEKKSAKDALLLWCQMKTAGYPNVNIHNFTTSWRDGMAFNALIHKHRPDLIDFDKLKKSNAHYNLQNAFNLAEQHLGLTKLLDPEDISVDHPDEKSIITYVVTYYHYFSKMKALAVEGKRIGKVLDNAIETEKMIEKYESLASDLLEWIEQTIIILNNRKFANSLVGVQQQLQAFNTYRTVEKPPKFTEKGNLEVLLFTIQSKMRANNQKVYMPREGKLISDINKAWERLEKAEHERELALRNELIRQEKLEQLARRFDRKAAMRETWLSENQRLVSQDNFGFDLPAVEAATKKHEAIETDIAAYEERVQAVVAVARELEAENYHDIKRITARKDNVIRLWEYLLELLRARRQRLEMNLGLQKIFQEMLYIMDWMDEMKVLVLSQDYGKHLLGVEDLLQKHTLVEADIGIQAERVRGVNASAQKFATDGEGYKPCDPQVIRDRVAHMEFCYQELCQLAAERRARLEESRRLWKFFWEMAEEEGWIREKEKILSSDDYGKDLTSVMRLLSKHRAFEDEMSGRSGHFEQAIKEGEDMIAEEHFGSEKIRERIIYIREQWANLEQLSAIRKKRLEEASLLHQFQADADDIDAWMLDILKIVSSSDVGHDEYSTQSLVKKHKDVAEEIANYRPTLDTLHEQASALPQEHAESPDVRGRLSGIEERYKEVAELTRLRKQALQDTLALYKMFSEADACELWIDEKEQWLNNMQIPEKLEDLEVIQHRFESLEPEMNNQASRVAVVNQIARQLMHSGHPSEKEIKAQQDKLNTRWSQFRELVDRKKDALLSALSIQNYHLECNETKSWIREKTKVIESTQDLGNDLAGVMALQRKLTGMERDLVAIEAKLSKQVGVRILLDHHH

SEQ ID NO: 852588 - protein, 868 aa, Homo sapiens
MTTTVATDYDNIEIQQQYSDVNNRWDVDDWDNENSSARLFERSRIKALADEREAVQKKTFTKWVNSHLARVSCRITDLYTDLRDGRMLIKLLEVLSGERLPKPTKGRMRIHCLENVDKALQFLKEQRVHLENMGSHDIVDGNHRLTLGLIWTIILRFQIQDISVETEDNKEKKSAKDALLLWCQMKTAGYPNVNIHNFTTSWRDGMAFNALIHKHRPDLIDFDKLKKSNAHYNLQNAFNLAEQHLGLTKLLDPEDISVDHPDEKSIITYVVTYYHYFSKMKALAVEGKRIGKVLDNAIETEKMIEKYESLASDLLEWIEQTIIILNNRKFANSLVGVQQQLQAFNTYRTVEKPPKFTEKGNLEVLLFTIQSKMRANNQKVYMPREGKLISDINKAWERLEKAEHERELALRNELIRQEKLEQLARRFDRKAAMRETWLSENQRLVSQDNFGFDLPAVEAATKKHEAIETDIAAYEERVQAVVAVARELEAENYHDIKRITARKDNVIRLWEYLLELLRARRQRLEMNLGLQKIFQEMLYIMDWMDEMKVLVLSQDYGKHLLGVEDLLQKHTLVEADIGIQAERVRGVNASAQKFATDGEGYKPCDPQVIRDRVAHMEFCYQELCQLAAERRARLEESRRLWKFFWEMAEEEGWIREKEKILSSDDYGKDLTSVMRLLSKHRAFEDEMSGRSGHFEQAIKEGEDMIAEEHFGSEKIRERIIYIREQWANLEQLSAIRKKRLEEASLLHQFQADADDIDAWMLDILKIVSSSDVGHDEYSTQSLVKKHKDVAEEIANYKIVSSSDVGHDDYSTQSLVKKHRDVAEEIANSQDCLQPATWATIEYSTQARAQETQGRGGRDRPCHDCLLQR

SEQ ID NO: 852589 - protein, 86 aa, Homo sapiens
EYVLAHTEMPTTLEGAEAAIKKQEDFMTTMDANEEKINAVVETGRRLVSDGNINSDRIQEKVDSIDDRYSFLRFLREPCTLGLSNF

SEQ ID NO: 852590 - protein, 149 aa, Homo sapiens
MVFLTAQLWLRNRVTDRYFRIQEVLKHARHFRGRKNRCYRLAVRTVIRAFVKCTKARYLKKKNMRTLWINRITAASQEHGLKYPALIGNLVKCQVELNRKVLADLAIYEPKTFKSLAALASRRRHEGFAAALGDGKEPEGIFSRVVQYH

SEQ ID NO: 852591 - protein, 149 aa, Homo sapiens; identical to SEQ ID NO: 852590

SEQ ID NO: 852592 - protein, 187 aa, Homo sapiens
MSPRFSSPAGIGGNAPTSGGWWPGPCRLDWLFSHLQEATPSRQLSLNPKGDAHFSPGLSAPRCPYIYTAVRRPLPQPACLADPAVGAPKLSARLPSKGSWLESCGNVPFTLCQQLLGSLSGPFLRLTTYLQPAQNNQRPDHLLEMASGRPLHPHCRPSFLLASITAWPPKRSPSWPLSLCLMTATTP

SEQ ID NO: 852593 - protein, 167 aa, Homo sapiens
LTARYEAGWWARWQRRCACVVECSGRRPAGAMVFLTAQLWLRNRVTDRYFRIQEVLKHARHFRGRKNRCYRLAVRTVIRAFVKCTKARYLKKKNMRTTESRAVTQAGVQWRDLGLMQPRLPGSSDFPAPVSRVTVTAGVRHQAIFCIFSRDRVPPCWSGWSRTPDLK

SEQ ID NO: 852594 - protein, 138 aa, Homo sapiens
TNTKIRPGTVSHACNPALWEAEAGETPCPALVAEFNAQRDGPPFLLLKLWHCSLASEILCGSCRHFQVGLKGYPRPAVSSVRVVTKDPEQGVWFPGPTSGLESSLPADSTGASLTRVHIYPSASCLEVLCCATQIGFS

SEQ ID NO: 852595 - protein, 121 aa, Homo sapiens
LTARYEAGWWARWQRRCACVVECSGRRPAGAMVFLTAQLWLRNRVTDRYFRIQEVLKHARHFRGRKNRCYRLAVRTVIRAFVKCTKARYLKKKNMRTRKRGPGTPAGQRTRGPCVSAPRPS

SEQ ID NO: 852596 - protein, 149 aa, Homo sapiens; identical to SEQ ID NO: 852590

SEQ ID NO: 852597 - protein, 186 aa, Homo sapiens
LTARYEAGWWARWQRRCACVVECSGRRPAGAMVFLTAQLWLRNRVTDRYFRIQEVLKHARHFRGRKNRCYRLAVRTVIRAFVKCTKARYLKKKNMRTLWINRITAASQEHGLKYPALIGNLVKVWVSMWVPLKFWTSAETIMRGVVVLPVVPANQEAEARGSLETDFWAVVCYADGVSMLSVVSIW

SEQ ID NO: 852598 - protein, 139 aa, Homo sapiens
LTARYEAGWWARWQRRCACVVECSGRRPAGAMVFLTAQLWLRNRVTDRYFRIQEVLKHARHFRGRKNRCYRLAVRTVIRAFVKCTKARYLKKKNMRTTESRAVTQAGVQWRDLGLMQPRLPVFSKPDMQGGSLERPQQR

SEQ ID NO: 852599 - protein, 74 aa, Homo sapiens
MRVSSRGRPSGASDPAPRPGFSSGGRPAPDPTEMAPLDPQAFRDASFRDPGSLCERGHLGRVPAPLGAHRQALS

SEQ ID NO: 852600 - protein, 180 aa, Homo sapiens
LTARYEAGWWARWQRRCACVVECSGRRPAGAMVFLTAQLWLRNRVTDRYFRIQEVLKHARHFRGRKNRCYRLAVRTVIRAFVKCTKARYLKKKNMRTLWINRITAASQEHGLKYPALIGNLVKCQVELNRKVLADLAIYEPKTFKSLAALASRRRHEGFAAALGDGKEPEGIFSRVVQYH

SEQ ID NO: 852601 - protein, 150 aa, Homo sapiens
YPRDPPPTASPEGSPTPRLHPRDLPPTGSPQGSPTHRITRRLAVRTVIRAFVKCTKARYLKKKNMRTLWINRITAASQEHGLKYPALIGNLVKCQVELNRKVLADLAIYEPKTFKSLAALASRRRHEGFAAALGDGKEPEGIFSRVVQYH

SEQ ID NO: 852602 - protein, 121 aa, Homo sapiens; identical to SEQ ID NO: 852595

SEQ ID NO: 852603 - protein, 149 aa, Homo sapiens; identical to SEQ ID NO: 852590

SEQ ID NO: 852604 - protein, 149 aa, Homo sapiens; identical to SEQ ID NO: 852590

SEQ ID NO: 852605 - protein, 85 aa, Homo sapiens
LTARYEAGWWARWQRRCACVVECSGRRPAGAMVFLTAQLWLRNRVTDRYFRIQEVLKHARHFRGRKNRCYSSGLIELQLLARNMD

SEQ ID NO: 852606 - protein, 110 aa, Homo sapiens
LTARYEAGWWARWQRRCACVVECSGRRPAGAMVFLTAQLWLRNRVTDRYFRIQEVLKHARHFRGRKNRCYRLAVRTVIRAFVKCTKARYLKKKNMRTNLLDSYLWGHECS

SEQ ID NO: 852607 - protein, 1760 aa, Homo sapiens
MKVERLGLFGRGEIFKRISDEECFVLGMEPRYARPEWMIVTVLPVPPLSVRPAVVMQGSARNQDDLTHKLADIVKINNQLRRNEQNGAAAHVIAEDVKLLQFHVATMVDNELPGLPRAMQKSGRPLKSLKQRLKGKEGRVRGNLMGKRVDFSARTVITPDPNLSIDQVGVPRSIAANMTFAEIVTPFNIDRLQELVRRGNSQYPGAKYIIRDNGDRIDLRFHPKPSDLHLQTGYKVERHMCDGDIVIFNRQPTLHKMSMMGHRVRILPWSTFRLNLSVTTPYNADFDGDEMNLHLPQSLETRAEIQELAMVPRMIVTPQSNRPVMGIVQDTLTAVRKFTKRDVFLERGEVMNLLMFLSTWDGKVPQPAILKPRPLWTGKQIFSLIIPGHINCIRTHSTHPDDEDSGPYKHISPGDTKVVVENGELIMGILCKKSLGTSAGSLVHISYLEMGHDITRLFYSNIQTVINNWLLIEGHTIGIGDSIADSKTYQDIQNTIKKAKQDVIEVIEKAHNNELEPTPGNTLRQTFENQVNRILNDARDKTGSSAQKSLSEYNNFKSMVVSGAKGSKINISQVIAVVGQQNVEGKRIPFGFKHRTLPHFIKDDYGPESRGFVENSYLAGLTPTEFFFHAMGGREGLIDTAVKTAETGYIQRRLIKSMESVMVKYDATVRNSINQVVQLRYGEDGLAGESVEFQNLATLKPSNKAFEKKFRFDYTNERALRRTLQEDLVKDVLSNAHIQNELEREFERMREDREVLRVIFPTGDSKVVLPCNLLRMIWNAQKIFHINPRLPSDLHPIKVVEGVKELSKKLVIVNGDDPLSRQAQENATLLFNIHLRSTLCSRRMAEEFRLSGEAFDWLLGEIESKFNQAIAHPGEMVGALAAQSLGEPATQMTLNTFHYAGVSAKNVTLGVPRLKELINISKKPKTPSLTVFLLGQSARDAERAKDILCRLEHTTLRKVTANTAIYYDPNPQSTVVAEDQEWVNVYYEMPDFDVARISPWLLRVELDRKHMTDRKLTMEQIAEKINAGFGDDLNCIFNDDNAEKLVLRIRIMNSDENKMQEEEEVVDKMDDDVFLRCIESNMLTDMTLQGIEQISKVYMHLPQTDNKKKIIITEDGEFKALQEWILETDGVSLMRVLSEKDVDPVRTTSNDIVEIFTVLGIEAVRKALERELYHVISFDGSYVNYRHLALLCDTMTCRGHLMAITRHGVNRQDTGPLMKCSFEETVDVLMEAAAHGESDPMKGVSENIMLGQLAPAGTGCFDLLLDAEKCKYGMEIPTNIPGLGAAGPTGMFFGSAPSPMGGISPAMTPWNQGATPAYGAWSPSVGSGMTPGAAGFSPSAASDASGFSPGYSPAWSPTPGSPGSPGPSSPYIPSPGGAMSPSYSPTSPAYEPRSPGGYTPQSPSYSPTSPSYSPTSPSYSPTSPNYSPTSPSYSPTSPSYSPTSPSYSPTSPSYSPTSPSYSPTSPSYSPTSPSYSPTSPSYSPTSPSYSPTSPSYSPTSPSYSPTSPSYSPTSPSYSPTSPSYSPTSPSYSPTSPNYSPTSPNYTPTSPSYSPTSPSYSPTSPNYTPTSPNYSPTSPSYSPTSPSYSPTSPSYSPSSPRYTPQSPTYTPSSPSYSPSSPSYSPTSPKYTPTSPSYSPSSPEYTPTSPKYSPTSPKYSPTSPKYSPTSPTYSPTTPKYSPTSPTYSPTSPVYTPTSPKYSPTSPTYSPTSPKYSPTSPTYSPTSPKGSTYSPTSPGYSPTSPTYSLTSPAISPDDSDEEN

SEQ ID NO: 852608 - protein, 1197 aa, Homo sapiens
SRYRYAPRRQVIAVVGQQNVEGKRIPFGFKHRTLPHFIKDDYGPESRGFVENSYLAGLTPTEFFFHAMGGREGLIDTAVKTAETGYIQRRLIKSMESVMVKYDATVRNSINQVVQLRYGEDGLAGESVEFQNLATLKPSNKAFEKKFRFDYTNERALRRTLQEDLVKDVLSNAHIQNELEREFERMREDREVLRVIFPTGDSKVVLPCNLLRMIWNAQKIFHINPRLPSDLHPIKVVEGVKELSKKLVIVNGDDPLSRQAQENATLLFNIHLRSTLCSRRMAEEFRLSGEAFDWLLGEIESKFNQAIAHPGEMVGALAAQSLGEPATQMTLNTFHYAGVSAKNVTLGVPRLKELINISKKPKTPSLTVFLLGQSARDAERAKDILCRLEHTTLRKVTANTAIYYDPNPQSTVVAEDQEWVNVYYEMPDFDVARISPWLLRVELDRKHMTDRKLTMEQIAEKINAGFGDDLNCIFNDDNAEKLVLRIRIMNSDENKMQEEEEVVDKMDDDVFLRCIESNMLTDMTLQGIEQISKVYMHLPQTDNKKKIIITEDGEFKALQEWILETDGVSLMRVLSEKDVDPVRTTSNDIVEIFTVLGIEAVRKALERELYHVISFDGSYVNYRHLALLCDTMTCRGHLMAITRHGVNRQDTGPLMKCSFEETVDVLMEAAAHGESDPMKGVSENIMLGQLAPAGTGCFDLLLDAEKCKYGMEIPTNIPGLGAAGPTGMFFGSAPSPMGGISPAMTPWNQGATPAYGAWSPSVGSGMTPGAAGFSPSAASDASGFSPGYSPAWSPTPGSPGSPGPSSPYIPSPGGAMSPSYSPTSPAYEPRSPGGYTPQSPSYSPTSPSYSPTSPSYSPTSPNYSPTSPSYSPTSPSYSPTSPSYSPTSPSYSPTSPSYSPTSPSYSPTSPSYSPTSPSYSPTSPSYSPTSPSYSPTSPSYSPTSPSYSPTSPSYSPTSPSYSPTSPSYSPTSPNYSPTSPNYTPTSPSYSPTSPSYSPTSPNYTPTSPNYSPTSPSYSPTSPSYSPTSPSYSPSSPRYTPQSPTYTPSSPSYSPSSPSYSPTSPKYTPTSPSYSPSSPEYTPTSPKYSPTSPKYSPTSPKYSPTSPTYSPTTPKYSPTSPTYSPTSPVYTPTSPKYSPTSPTYSPTSPKYSPTSPTYSPTSPKGSTYSPTSPGYSPTSPTYSLTSPAISPDDSDEEN

SEQ ID NO: 852609 - protein, 2002 aa, Homo sapiens
MHGGGPPSGDSACPLRTIKRVQFGVLSPDELKRMSVTEGGIKYPETTEGGRPKLGGLMDPRQGVIERTGRCQTCAGNMTECPGHFGHIELAKPVFHVGFLVKTMKVLRCVCFFCSKLLVDSNNPKIKDILAKSKGQPKKRLTHVYDLCKGKNICEGGEEMDNKFGVEQPEGDEDLTKEKGHGGCGRYQPRIRRSGLELYAEWKHVNEDSQEKKILLSPERVHEIFKRISDEECFVLGMEPRYARPEWMIVTVLPVPPLSVRPAVVMQGSARNQDDLTHKLADIVKINNQLRRNEQNGAAAHVIAEDVKLLQFHVATMVDNELPGLPRAMQKSGRPLKSLKQRLKGKEGRVRGNLMGKRVDFSARTVITPDPNLSIDQVGVPRSIAANMTFAEIVTPFNIDRLQELVRRGNSQYPGAKYIIRDNGDRIDLRFHPKPSDLHLQTGYKVERHMCDGDIVIFNRQPTLHKMSMMGHRVRILPWSTFRLNLSVTTPYNADFDGDEMNLHLPQSLETRAEIQELAMVPRMIVTPQSNRPVMGIVQDTLTAVRKFTKRDVFLERGEVMNLLMFLSTWDGKVPQPAILKPRPLWTGKQIFSLIIPGHINCIRTHSTHPDDEDSGPYKHISPGDTKVVVENGELIMGILCKKSLGTSAGSLVHISYLEMGHDITRLFYSNIQTVINNWLLIEGHTIGIGDSIADSKTYQDIQNTIKKAKQDVIEVIEKAHNNELEPTPGNTLRQTFENQVNRILNDARDKTGSSAQKSLSEYNNFKSMVVSGAKGSKINISQVIAVVGQQNVEGKRIPFGFKHRTLPHFIKDDYGPESRGFVENSYLAGLTPTEFFFHAMGGREGLIDTAVKTAETGYIQRRLIKSMESVMVKYDATVRNSINQVVQLRYGEDGLAGESVEFQNLATLKPSNKAFEKKFRFDYTNERALRRTLQEDLVKDVLSNAHIQNELEREFERMREDREVLRVIFPTGDSKVVLPCNLLRMIWNAQKIFHINPRLPSDLHPIKVVEGVKELSKKLVIVNGDDPLSRQAQENATLLFNIHLRSTLCSRRMAEEFRLSGEAFDWLLGEIESKFNQAIAHPGEMVGALAAQSLGEPATQMTLNTFHYAGVSAKNVTLGVPRLKELINISKKPKTPSLTVFLLGQSARDAERAKDILCRLEHTTLRKVTANTAIYYDPNPQSTVVAEDQEWVNVYYEMPDFDVARISPWLLRVELDRKHMTDRKLTMEQIAEKINAGFGDDLNCIFNDDNAEKLVLRIRIMNSDENKMQEEEEVVDKMDDDVFLRCIESNMLTDMTLQGIEQISKVYMHLPQTDNKKKIIITEDGEFKALQEWILETDGVSLMRVLSEKDVDPVRTTSNDIVEIFTVLGIEAVRKALERELYHVISFDGSYVNYRHLALLCDTMTCRGHLMAITRHGVNRQDTGPLMKCSFEETVDVLMEAAAHGESDPMKGVSENIMLGQLAPAGTGCFDLLLDAEKCKYGMEIPTNIPGLGAAGPTGMFFGSAPSPMGGISPAMTPWNQGATPAYGAWSPSVGSGMTPGAAGFSPSAASDASGFSPGYSPAWSPTPGSPGSPGPSSPYIPSPGELSPSVRPGLFPPQFWVSLSIAISFVGCFPTGGAMSPSYSPTSPAYEPRSPGGYTPQSPSYSPTSPSYSPTSPSYSPTSPNYSPTSPSYSPTSPSYSPTSPSYSPTSPSYSPTSPSYSPTSPSYSPTSPSYSPTSPSYSPTSPSYSPTSPSYSPTSPSYSPTSPSYSPTSPSYSPTSPSYSPTSPSYSPTSPNYSPTSPNYTPTSPSYSPTSPSYSPTSPNYTPTSPNYSPTSPSYSPTSPSYSPTSPSYSPSSPRYTPQSPTYTPSSPSYSPSSPSYSPTSPKYTPTSPSYSPSSPEYTPTSPKYSPTSPKYSPTSPKYSPTSPTYSPTTPKYSPTSPTYSPTSPVYTPTSPKYSPTSPTYSPTSPKYSPTSPTYSPTSPKGSTYSPTSPGYSPTSPTYSLTSPAISPDDSDEEN

SEQ ID NO: 852610 - protein, 708 aa, Homo sapiens
MGISSTTRSEEEVVDKMDDDVFLRCIESNMLTDMTLQGIEQISKVYMHLPQTDNKKKIIITEDGEFKALQEWILETDGVSLMRVLSEKDVDPVRTTSNDIVEIFTVLGIEAVRKALERELYHVISFDGSYVNYRHLALLCDTMTCRGHLMAITRHGVNRQDTGPLMKCSFEETVDVLMEAAAHGESDPMKGVSENIMLGQLAPAGTGCFDLLLDAEKCKYGMEIPTNIPGLGAAGPTGMFFGSAPSPMGGISPAMTPWNQGATPAYGAWSPSVGSGMTPGAAGFSPSAASDASGFSPGYSPAWSPTPGSPGSPGPSSPYIPSPGGAMSPSYSPTSPAYEPRSPGGYTPQSPSYSPTSPSYSPTSPSYSPTSPNYSPTSPSYSPTSPSYSPTSPSYSPTSPSYSPTSPSYSPTSPSYSPTSPSYSPTSPSYSPTSPSYSPTSPSYSPTSPSYSPTSPSYSPTSPSYSPTSPSYSPTSPSYSPTSPNYSPTSPNYTPTSPSYSPTSPSYSPTSPNYTPTSPNYSPTSPSYSPTSPSYSPTSPSYSPSSPRYTPQSPTYTPSSPSYSPSSPSYSPTSPKYTPTSPSYSPSSPEYTPTSPKYSPTSPKYSPTSPKYSPTSPTYSPTTPKYSPTSPTYSPTSPVYTPTSPKYSPTSPTYSPTSPKYSPTSPTYSPTSPKGSTYSPTSPGYSPTSPTYSLTSPAISPDDSDEEN

SEQ ID NO: 852611 - protein, 382 aa, Homo sapiens
MSPSYSPTSPAYEPRSPGGYTPQSPSYSPTSPSYSPTSPSYSPTSPNYSPTSPSYSPTSPSYSPTSPSYSPTSPSYSPTSPSYSPTSPSYSPTSPSYSPTSPSYSPTSPSYSPTSPSYSPTSPSYSPTSPSYSPTSPSYSPTSPSYSPTSPSYSPTSPNYSPTSPNYTPTSPSYSPTSPSYSPTSPNYTPTSPNYSPTSPSYSPTSPSYSPTSPSYSPSSPRYTPQSPTYTPSSPSYSPSSPSYSPTSPKYTPTSPSYSPSSPEYTPTSPKYSPTSPKYSPTSPKYSPTSPTYSPTTPKYSPTSPTYSPTSPVYTPTSPKYSPTSPTYSPTSPKYSPTSPTYSPTSPKGSTYSPTSPGYSPTSPTYSLTSPAISPDDSDEEN

SEQ ID NO: 852612 - protein, 1908 aa, Homo sapiens
MHGGGPPSGDSACPLRTIKRVQFGVLSPDELKRMSVTEGGIKYPETTEGGRPKLGGLMDPRQGVIERTGRCQTCAGNMTECPGHFGHIELAKPVFHVGFLVKTMKVLRCVCFFCSKLLVDSNNPKIKDILAKSKGQPKKRLTHVYDLCKGKNICEGGEEMDNKFGVEQPEGDEDLTKEKGHGGCGRYQPRIRRSGLELYAEWKHVNEDSQEKKILLSPERVHEIFKRISDEECFVLGMEPRYARPEWMIVTVLPVPPLSVRPAVVMQGSARNQDDLTHKLADIVKINNQLRRNEQNGAAAHVIAEDVKLLQFHVATMVDNELPGLPRAMQKSGRPLKSLKQRLKGKEGRVRGNLMGKRVDFSARTVITPDPNLSIDQVGVPRSIAANMTFAEIVTPFNIDRLQELVRRGNSQYPGAKYIIRDNGDRIDLRFHPKPSDLHLQTGYKVERHMCDGDIVIFNRQPTLHKMSMMGHRVRILPWSTFRLNLSVTTPYNADFDGDEMNLHLPQSLETRAEIQELAMVPRMIVTPQSNRPVMGIVQDTLTAVRKFTKRDVFLERGEVMNLLMFLSTWDGKVPQPAILKPRPLWTGKQIFSLIIPGHINCIRTHSTHPDDEDSGPYKHISPGDTKVVVENGELIMGILCKKSLGTSAGSLVHISYLEMGHDITRLFYSNIQTVINNWLLIEGHTIGIGDSIADSKTYQDIQNTIKKAKQDVIEVIEKAHNNELEPTPGNTLRQTFENQVNRILNDARDKTGSSAQKSLSEYNNFKSMVVSGAKGSKINISQVIAVVGQQNVEGKRIPFGFKHRTLPHFIKDDYGPESRGFVENSYLAGLTPTEFFFHAMGGREGLIDTAVKTAETGYIQRRLIKSMESVMVKYDATVRNSINQVVQLRYGEDGLAGESVEFQNLATLKPSNKAFEKKFRFDYTNERALRRTLQEDLVKDVLSNAHIQNELEREFERMREDREVLRVIFPTGDSKVVLPCNLLRMIWNAQKIFHINPRLPSDLHPIKVVEGVKELSKKLVIVNGDDPLSRQAQENATLLFNIHLRSTLCSRRMAEEFRLSGEAFDWLLGEIESKFNQAIAHPGEMVGALAAQSLGEPATQMTLNTFHYAGVSAKNVTLGVPRLKELINISKKPKTPSLTVFLLGQSARDAERAKDILCRLEHTTLRKVTANTAIYYDPNPQSTVVAEDQEWVNVYYEMPDFDVARISPWLLRVELDRKHMTDRKLTMEQIAEKINAGFGDDLNCIFNDDNAEKLVLRIRIMNSDENKMQEEEEVVDKMDDDVFLRCIESNMLTDMTLQGIEQISKVYMHLPQTDNKKKIIITEDGEFKALQEWILETDGVSLMRVLSEKDVDPVRTTSNDIVEIFTVLGIEAVRKALERELYHVISFDGSYVNYRHLALLCDTMTCRGHLMAITRHGVNRQDTGPLMKCSFEETVDVLMEAAAHGESDPMKGVSENIMLGQLAPAGTGCFDLLLDAEKCKYGMEIPTNIPGLGAAGPTGMFFGSAPSPMGGISPAMTPWNQGATPAYGAWSPSVGSGMTPGAAGFSPSAASDASGFSPGYSPAWSPTPGSPGSPGPSSPYIPSPGGAMSPSYSPTSPAYEPRSPGGYTPQSPSYSPTSPSYSPTSPSYSPTSPNYSPTSPSYSPTSPSYSPTSPSYSPTSPSYSPTSPSYSPTSPSYSPTSPSYSPTSPSYSPTSPSYSPTSPSYSPTSPSYSPTSPSYSPTSPSYSPTSPSYSPTSPSYSPTSPNYSPTSPNYTPTSPSYSPTSPSYSPTSPNYTPTSPNYSPTSPSYSPTSPSYSPTSPSYSPSSPRYTPQSPTYTPSSPSYSPSSPSYSPTSPKYTPTSPSYSPSSPEYTPTSPKYSPTSPKYSPTSPKYSPTSPTYSPTTPKYSPTSPTYSPTFYTNPVIVGL

SEQ ID NO: 852613 - protein, 1894 aa, Homo sapiens
MHGGGPPSGDSACPLRTIKRVQFGVLSPDELKRMSVTEGGIKYPETTEGGRPKLGGLMDPRQGVIERTGRCQTCAGNMTECPGHFGHIELAKPVFHVGFLVKTMKVLRCVCFFCSKLLVDSNNPKIKDILAKSKGQPKKRLTHVYDLCKGKNICEGGEEMDNKFGVEQPEGDEDLTKEKGHGGCGRYQPRIRRSGLELYAEWKHVNEDSQEKKILLSPERVHEIFKRISDEECFVLGMEPRYARPEWMIVTVLPVPPLSVRPAVVMQGSARNQDDLTHKLADIVKINNQLRRNEQNGAAAHVIAEDVKLLQFHVATMVDNELPGLPRAMQKSGRPLKSLKQRLKGKEGRVRGNLMGKRVDFSARTVITPDPNLSIDQVGVPRSIAANMTFAEIVTPFNIDRLQELVRRGNSQYPGAKYIIRDNGDRIDLRFHPKPSDLHLQTGYKVERHMCDGDIVIFNRQPTLHKMSMMGHRVRILPWSTFRLNLSVTTPYNADFDGDEMNLHLPQSLETRAEIQELAMVPRMIVTPQSNRPVMGIVQDTLTAVRKFTKRDVFLERGEVMNLLMFLSTWDGKVPQPAILKPRPLWTGKQIFSLIIPGHINCIRTHSTHPDDEDSGPYKHISPGDTKVVVENGELIMGILCKKSLGTSAGSLVHISYLEMGHDITRLFYSNIQTVINNWLLIEGHTIGIGDSIADSKTYQDIQNTIKKAKQDVIEVIEKAHNNELEPTPGNTLRQTFENQVNRILNDARDKTGSSAQKSLSEYNNFKSMVVSGAKGSKINISQVIAVVGQQNVEGKRIPFGFKHRTLPHFIKDDYGPESRGFVENSYLAGLTPTEFFFHAMGGREGLIDTAVKTAETGYIQRRLIKSMESVMVKYDATVRNSINQVVQLRYGEDGLAGESVEFQNLATLKPSNKAFEKKFRFDYTNERALRRTLQEDLVKDVLSNAHIQNELEREFERMREDREVLRVIFPTGDSKVVLPCNLLRMIWNAQKIFHINPRLPSDLHPIKVVEGVKELSKKLVIVNGDDPLSRQAQENATLLFNIHLRSTLCSRRMAEEFRLSGEAFDWLLGEIESKFNQAIAHPGEMVGALAAQSLGEPATQMTLNTFHYAGVSAKNVTLGVPRLKELINISKKPKTPSLTVFLLGQSARDAERAKDILCRLEHTTLRKVTANTAIYYDPNPQSTVVAEDQEWVNVYYEMPDFDVARISPWLLRVELDRKHMTDRKLTMEQIAEKINAGFGDDLNCIFNDDNAEKLVLRIRIMNSDENKMQEEEEVVDKMDDDVFLRCIESNMLTDMTLQGIEQISKVYMHLPQTDNKKKIIITEDGEFKALQEWILETDGVSLMRVLSEKDVDPVRTTSNDIVEIFTVLGIEAVRKALERELYHVISFDGSYVNYRHLALLCDTMTCRGHLMAITRHGVNRQDTGPLMKCSFEETVDVLMEAAAHGESDPMKGVSENIMLGQLAPAGTGCFDLLLDAEKCKYGMEIPTNIPGLGAAGPTGMFFGSAPSPMGGISPAMTPWNQGATPAYGAWSPSVGSGMTPGAAGFSPSAASDASGFSPGYSPAWSPTPGSPGSPGPSSPYIPSPGGAMSPSYSPTSPAYEPRSPGGYTPQSPSYSPTSPSYSPTSPSYSPTSPNYSPTSPSYSPTSPSYSPTSPSYSPTSPSYSPTSPSYSPTSPSYSPTSPSYSPTSPSYSPTSPSYSPTSPSYSPTSPSYSPTSPSYSPTSPSYSPTSPSYSPTSPSYSPTSPNYSPTSPNYTPTSPSYSPTSPSYSPTSPNYTPTSPNYSPTSPSYSPTSPSYSPTSPSYSPSSPRYTPQSPTYTPSSPSYSPSSPSYSPTSPKYTPTSPSYSPSSPEYTPTSPKYSPTGLGLPGQVDLTQVNLTQVHLTQVDLTRSVKT

SEQ ID NO: 852614 - protein, 1834 aa, Homo sapiens
MHGGGPPSGDSACPLRTIKRVQFGVLSPDELKRMSVTEGGIKYPETTEGGRPKLGGLMDPRQGVIERTGRCQTCAGNMTECPGHFGHIELAKPVFHVGFLVKTMKVLRCVCFFCSKLLVDSNNPKIKDILAKSKGQPKKRLTHVYDLCKGKNICEGGEEMDNKFGVEQPEGDEDLTKEKGHGGCGRYQPRIRRSGLELYAEWKHVNEDSQEKKILLSPERVHEIFKRISDEECFVLGMEPRYARPEWMIVTVLPVPPLSVRPAVVMQGSARNQDDLTHKLADIVKINNQLRRNEQNGAAAHVIAEDVKLLQFHVATMVDNELPGLPRAMQKSGRPLKSLKQRLKGKEGRVRGNLMGKRVDFSARTVITPDPNLSIDQVGVPRSIAANMTFAEIVTPFNIDRLQELVRRGNSQYPGAKYIIRDNGDRIDLRFHPKPSDLHLQTGYKVERHMCDGDIVIFNRQPTLHKMSMMGHRVRILPWSTFRLNLSVTTPYNADFDGDEMNLHLPQSLETRAEIQELAMVPRMIVTPQSNRPVMGIVQDTLTAVRKFTKRDVFLERGEVMNLLMFLSTWDGKVPQPAILKPRPLWTGKQIFSLIIPGHINCIRTHSTHPDDEDSGPYKHISPGDTKVVVENGELIMGILCKKSLGTSAGSLVHISYLEMGHDITRLFYSNIQTVINNWLLIEGHTIGIGDSIADSKTYQDIQNTIKKAKQDVIEVIEKAHNNELEPTPGNTLRQTFENQVNRILNDARDKTGSSAQKSLSEYNNFKSMVVSGAKGSKINISQVIAVVGQQNVEGKRIPFGFKHRTLPHFIKDDYGPESRGFVENSYLAGLTPTEFFFHAMGGREGLIDTAVKTAETGYIQRRLIKSMESVMVKYDATVRNSINQVVQLRYGEDGLAGESVEFQNLATLKPSNKAFEKKFRFDYTNERALRRTLQEDLVKDVLSNAHIQNELEREFERMREDREVLRVIFPTGDSKVVLPCNLLRMIWNAQKIFHINPRLPSDLHPIKVVEGVKELSKKLVIVNGDDPLSRQAQENATLLFNIHLRSTLCSRRMAEEFRLSGEAFDWLLGEIESKFNQAIAHPGEMVGALAAQSLGEPATQMTLNTFHYAGVSAKNVTLGVPRLKELINISKKPKTPSLTVFLLGQSARDAERAKDILCRLEHTTLRKVTANTAIYYDPNPQSTVVAEDQEWVNVYYEMPDFDVARISPWLLRVELDRKHMTDRKLTMEQIAEKINAGFGDDLNCIFNDDNAEKLVLRIRIMNSDENKMQEEEEVVDKMDDDVFLRCIESNMLTDMTLQGIEQISKVYMHLPQTDNKKKIIITEDGEFKALQEWILETDGVSLMRVLSEKDVDPVRTTSNDIVEIFTVLGIEAVRKALERELYHVISFDGSYVNYRHLALLCDTMTCRGHLMAITRHGVNRQDTGPLMKCSFEETVDVLMEAAAHGESDPMKGVSENIMLGQLAPAGTGCFDLLLDAEKCKYGMEIPTNIPGLGAAGPTGMFFGSAPSPMGGISPAMTPWNQGATPAYGAWSPSVGSGMTPGAAGFSPSAASDASGFSPGYSPAWSPTPGSPGSPGPSSPYIPSPGGAMSPSYSPTSPAYEPRSPGGYTPQSPSYSPTSPSYSPTSPSYSPTSPNYSPTSPSYSPTSPSYSPTSPSYSPTSPSYSPTSPSYSPTSPSYSPTSPSYSPTSPSYSPTSPSYSPTSPSYSPTSPSYSPTSPSYSPTSPSYSPTSPSYSPTSPSYSPTSPNYSPTSPNYTPTSPSYSPTSPSYSPTSPNYTPTSPNYSPTSPSYSPTSPSYSPTSPSYSPSSPRYTPQSPTYTPSSPSYSPSSFTPTP

SEQ ID NO: 852615 - protein, 237 aa, Homo sapiens
YVDWHCRDASLIILPAFQGCLDHAGTPALSITLSGKSRFSGEGASTSTPSLSLSSFSAFLGEGQVPLNPFSFTLSGKSRFSMGQEHPNPLFLHPNLLSLCPITYFYTPTSPSYSPSSPEYTPTSPKYSPTSPKYSPTSPKYSPTSPTYSPTTPKYSPTSPTYSPTSPVYTPTSPKYSPTSPTYSPTSPKYSPTSPTYSPTSPKGSTYSPTSPGYSPTSPTYSLTSPAISPDDSDEEN

SEQ ID NO: 852616 - protein, 1583 aa, Homo sapiens
MHGGGPPSGDSACPLRTIKRVQFGVLSPDELKRMSVTEGGIKYPETTEGGRPKLGGLMDPRQGVIERTGRCQTCAGNMTECPGHFGHIELAKPVFHVGFLVKTMKVLRCVCFFCSKLLVDSNNPKIKDILAKSKGQPKKRLTHVYDLCKGKNICEGGEEMDNKFGVEQPEGDEDLTKEKGHGGCGRYQPRIRRSGLELYAEWKHVNEDSQEKKILLSPERVHEIFKRISDEECFVLGMEPRYARPEWMIVTVLPVPPLSVRPAVVMQGSARNQDDLTHKLADIVKINNQLRRNEQNGAAAHVIAEDVKLLQFHVATMVDNELPGLPRAMQKSGRPLKSLKQRLKGKEGRVRGNLMGKRVDFSARTVITPDPNLSIDQVGVPRSIAANMTFAEIVTPFNIDRLQELVRRGNSQYPGAKYIIRDNGDRIDLRFHPKPSDLHLQTGYKVERHMCDGDIVIFNRQPTLHKMSMMGHRVRILPWSTFRLNLSVTTPYNADFDGDEMNLHLPQSLETRAEIQELAMVPRMIVTPQSNRPVMGIVQDTLTAVRKFTKRDVFLERGEVMNLLMFLSTWDGKVPQPAILKPRPLWTGKQIFSLIIPGHINCIRTHSTHPDDEDSGPYKHISPGDTKVVVENGELIMGILCKKSLGTSAGSLVHISYLEMGHDITRLFYSNIQTVINNWLLIEGHTIGIGDSIADSKTYQDIQNTIKKAKQDVIEVIEKAHNNELEPTPGNTLRQTFENQVNRILNDARDKTGSSAQKSLSEYNNFKSMVVSGAKGSKINISQVIAVVGQQNVEGKRIPFGFKHRTLPHFIKDDYGPESRGFVENSYLAGLTPTEFFFHAMGGREGLIDTAVKTAETGYIQRRLIKSMESVMVKYDATVRNSINQVVQLRYGEDGLAGESVEFQNLATLKPSNKAFEKKFRFDYTNERALRRTLQEDLVKDVLSNAHIQNELEREFERMREDREVLRVIFPTGDSKVVLPCNLLRMIWNAQKIFHINPRLPSDLHPIKVVEGVKELSKKLVIVNGDDPLSRQAQENATLLFNIHLRSTLCSRRMAEEFRLSGEAFDWLLGEIESKFNQAIAHPGEMVGALAAQSLGEPATQMTLNTFHYAGVSAKNVTLGVPRLKELINISKKPKTPSLTVFLLGQSARDAERAKDILCRLEHTTLRKVTANTAIYYDPNPQSTVVAEDQEWVNVYYEMPDFDVARISPWLLRVELDRKHMTDRKLTMEQIAEKINAGFGDDLNCIFNDDNAEKLVLRIRIMNSDENKMQEEEEVVDKMDDDVFLRCIESNMLTDMTLQGIEQISKVYMHLPQTDNKKKIIITEDGEFKALQEWILETDGVSLMRVLSEKDVDPVRTTSNDIVEIFTVLGIEAVRKALERELYHVISFDGSYVNYRHLALLCDTMTCRGHLMAITRHGVNRQDTGPLMKCSFEETVDVLMEAAAHGESDPMKGVSENIMLGQLAPAGTGCFDLLLDAEKCKYGMEIPTNIPGLGAAGPTGMFFGSAPSPMGGISPAMTPWNQGATPAYGAWSPSVGSGMTPGAAGFSPSAASDASGFSPGYSPAWSPTPGSPGCRRRTPGGRG

SEQ ID NO: 852617 - protein, 1318 aa, Homo sapiens
MHGGGPPSGDSACPLRTIKRVQFGVLSPDELKRMSVTEGGIKYPETTEGGRPKLGGLMDPRQGVIERTGRCQTCAGNMTECPGHFGHIELAKPVFHVGFLVKTMKVLRCVCFFCSKLLVDSNNPKIKDILAKSKGQPKKRLTHVYDLCKGKNICEGGEEMDNKFGVEQPEGDEDLTKEKGHGGCGRYQPRIRRSGLELYAEWKHVNEDSQEKKILLSPERVHEIFKRISDEECFVLGMEPRYARPEWMIVTVLPVPPLSVRPAVVMQGSARNQDDLTHKLADIVKINNQLRRNEQNGAAAHVIAEDVKLLQFHVATMVDNELPGLPRAMQKSGRPLKSLKQRLKGKEGRVRGNLMGKRVDFSARTVITPDPNLSIDQVGVPRSIAANMTFAEIVTPFNIDRLQELVRRGNSQYPGAKYIIRDNGDRIDLRFHPKPSDLHLQTGYKVERHMCDGDIVIFNRQPTLHKMSMMGHRVRILPWSTFRLNLSVTTPYNADFDGDEMNLHLPQSLETRAEIQELAMVPRMIVTPQSNRPVMGIVQDTLTAVRKFTKRDVFLERGEVMNLLMFLSTWDGKVPQPAILKPRPLWTGKQIFSLIIPGHINCIRTHSTHPDDEDSGPYKHISPGDTKVVVENGELIMGILCKKSLGTSAGSLVHISYLEMGHDITRLFYSNIQTVINNWLLIEGHTIGIGDSIADSKTYQDIQNTIKKAKQDVIEVIEKAHNNELEPTPGNTLRQTFENQVNRILNDARDKTGSSAQKSLSEYNNFKSMVVSGAKGSKINISQVIAVVGQQNVEGKRIPFGFKHRTLPHFIKDDYGPESRGFVENSYLAGLTPTEFFFHAMGGREGLIDTAVKTAETGYIQRRLIKSMESVMVKYDATVRNSINQVVQLRYGEDGLAGESVEFQNLATLKPSNKAFEKKFRFDYTNERALRRTLQEDLVKDVLSNAHIQNELEREFERMREDREVLRVIFPTGDSKVVLPCNLLRMIWNAQKIFHINPRLPSDLHPIKVVEGVKELSKKLVIVNGDDPLSRQAQENATLLFNIHLRSTLCSRRMAEEFRLSGEAFDWLLGEIESKFNQAIAHPGEMVGALAAQSLGEPATQMTLNTFHYAGVSAKNVTLGVPRLKELINISKKPKTPSLTVFLLGQSARDAERAKDILCRLEHTTLRKVTANTAIYYDPNPQSTVVAEDQEWVNVYYEMPDFDVARISPWLLRVELDRKHMTDRKLTMEQIAEKINAGFGDDLNCIFNDDNAEKLVLRIRIMNSDENKMQEEEEVVDKMDDDVFLRCIESNMLTDMTLQGIEQISKVYMHLPQTDNQH

SEQ ID NO: 852618 - protein, 1242 aa, Homo sapiens
MHGGGPPSGDSACPLRTIKRVQFGVLSPDELKRMSVTEGGIKYPETTEGGRPKLGGLMDPRQGVIERTGRCQTCAGNMTECPGHFGHIELAKPVFHVGFLVKTMKVLRCVCFFCSKLLVDSNNPKIKDILAKSKGQPKKRLTHVYDLCKGKNICEGGEEMDNKFGVEQPEGDEDLTKEKGHGGCGRYQPRIRRSGLELYAEWKHVNEDSQEKKILLSPERVHEIFKRISDEECFVLGMEPRYARPEWMIVTVLPVPPLSVRPAVVMQGSARNQDDLTHKLADIVKINNQLRRNEQNGAAAHVIAEDVKLLQFHVATMVDNELPGLPRAMQKSGRPLKSLKQRLKGKEGRVRGNLMGKRVDFSARTVITPDPNLSIDQVGVPRSIAANMTFAEIVTPFNIDRLQELVRRGNSQYPGAKYIIRDNGDRIDLRFHPKPSDLHLQTGYKVERHMCDGDIVIFNRQPTLHKMSMMGHRVRILPWSTFRLNLSVTTPYNADFDGDEMNLHLPQSLETRAEIQELAMVPRMIVTPQSNRPVMGIVQDTLTAVRKFTKRDVFLERGEVMNLLMFLSTWDGKVPQPAILKPRPLWTGKQIFSLIIPGHINCIRTHSTHPDDEDSGPYKHISPGDTKVVVENGELIMGILCKKSLGTSAGSLVHISYLEMGHDITRLFYSNIQTVINNWLLIEGHTIGIGDSIADSKTYQDIQNTIKKAKQDVIEVIEKAHNNELEPTPGNTLRQTFENQVNRILNDARDKTGSSAQKSLSEYNNFKSMVVSGAKGSKINISQVIAVVGQQNVEGKRIPFGFKHRTLPHFIKDDYGPESRGFVENSYLAGLTPTEFFFHAMGGREGLIDTAVKTAETGYIQRRLIKSMESVMVKYDATVRNSINQVVQLRYGEDGLAGESVEFQNLATLKPSNKAFEKKFRFDYTNERALRRTLQEDLVKDVLSNAHIQNELEREFERMREDREVLRVIFPTGDSKVVLPCNLLRMIWNAQKIFHINPRLPSDLHPIKVVEGVKELSKKLVIVNGDDPLSRQAQENATLLFNIHLRSTLCSRRMAEEFRLSGEAFDWLLGEIESKFNQAIAHPGEMVGALAAQSLGEPATQMTLNTFHYAGVSAKNVTLGVPRLKELINISKKPKTPSLTVFLLGQSARDAERAKDILCRLEHTTLRKVTANTAIYYDPNPQSTVVAEDQEWVNVYYEMPDFDVARISPWLLRVELDRKHMTDRKLTMEQIAEKINAGFVTT

SEQ ID NO: 852619 - protein, 748 aa, Homo sapiens
MHGGGPPSGDSACPLRTIKRVQFGVLSPDELKRMSVTEGGIKYPETTEGGRPKLGGLMDPRQGVIERTGRCQTCAGNMTECPGHFGHIELAKPVFHVGFLVKTMKVLRCVCFFCSKLLVDSNNPKIKDILAKSKGQPKKRLTHVYDLCKGKNICEGGEEMDNKFGVEQPEGDEDLTKEKGHGGCGRYQPRIRRSGLELYAEWKHVNEDSQEKKILLSPERVHEIFKRISDEECFVLGMEPRYARPEWMIVTVLPVPPLSVRPAVVMQGSARNQDDLTHKLADIVKINNQLRRNEQNGAAAHVIAEDVKLLQFHVATMVDNELPGLPRAMQKSGRPLKSLKQRLKGKEGRVRGNLMGKRVDFSARTVITPDPNLSIDQVGVPRSIAANMTFAEIVTPFNIDRLQELVRRGNSQYPGAKYIIRDNGDRIDLRFHPKPSDLHLQTGYKVERHMCDGDIVIFNRQPTLHKMSMMGHRVRILPWSTFRLNLSVTTPYNADFDGDEMNLHLPQSLETRAEIQELAMVPRMIVTPQSNRPVMGIVQDTLTAVRKFTKRDVFLERGEVMNLLMFLSTWDGKVPQPAILKPRPLWTGKQIFSLIIPGHINCIRTHSTHPDDEDSGPYKHISPGDTKVVVENGELIMGILCKKSLGTSAGSLVHISYLEMGHDITRLFYSNIQTVINNWLLIEGHTIGIGDSIADSKTYQDIQNTIKKAKQDVIEVIEKAHNNELEPTPGNRNCERSLLVGVLWWEVV

SEQ ID NO: 852620 - protein, 694 aa, Homo sapiens
MHGGGPPSGDSACPLRTIKRVQFGVLSPDELKRMSVTEGGIKYPETTEGGRPKLGGLMDPRQGVIERTGRCQTCAGNMTECPGHFGHIELAKPVFHVGFLVKTMKVLRCVCFFCSKLLVDSNNPKIKDILAKSKGQPKKRLTHVYDLCKGKNICEGGEEMDNKFGVEQPEGDEDLTKEKGHGGCGRYQPRIRRSGLELYAEWKHVNEDSQEKKILLSPERVHEIFKRISDEECFVLGMEPRYARPEWMIVTVLPVPPLSVRPAVVMQGSARNQDDLTHKLADIVKINNQLRRNEQNGAAAHVIAEDVKLLQFHVATMVDNELPGLPRAMQKSGRPLKSLKQRLKGKEGRVRGNLMGKRVDFSARTVITPDPNLSIDQVGVPRSIAANMTFAEIVTPFNIDRLQELVRRGNSQYPGAKYIIRDNGDRIDLRFHPKPSDLHLQTGYKVERHMCDGDIVIFNRQPTLHKMSMMGHRVRILPWSTFRLNLSVTTPYNADFDGDEMNLHLPQSLETRAEIQELAMVPRMIVTPQSNRPVMGIVQDTLTAVRKFTKRDVFLERGEVMNLLMFLSTWDGKVPQPAILKPRPLWTGKQIFSLIIPGHINCIRTHSTHPDDEDSGPYKHISPGDTKVVVENGELIMGILCKKSLGTSAGSLVHISYLEMGHDITRLFYSNIQTVINNWLLIEGHECSGTSSSS

SEQ ID NO: 852621 - protein, 656 aa, Homo sapiens
MHGGGPPSGDSACPLRTIKRVQFGVLSPDELKRMSVTEGGIKYPETTEGGRPKLGGLMDPRQGVIERTGRCQTCAGNMTECPGHFGHIELAKPVFHVGFLVKTMKVLRCVCFFCSKLLVDSNNPKIKDILAKSKGQPKKRLTHVYDLCKGKNICEGGEEMDNKFGVEQPEGDEDLTKEKGHGGCGRYQPRIRRSGLELYAEWKHVNEDSQEKKILLSPERVHEIFKRISDEECFVLGMEPRYARPEWMIVTVLPVPPLSVRPAVVMQGSARNQDDLTHKLADIVKINNQLRRNEQNGAAAHVIAEDVKLLQFHVATMVDNELPGLPRAMQKSGRPLKSLKQRLKGKEGRVRGNLMGKRVDFSARTVITPDPNLSIDQVGVPRSIAANMTFAEIVTPFNIDRLQELVRRGNSQYPGAKYIIRDNGDRIDLRFHPKPSDLHLQTGYKVERHMCDGDIVIFNRQPTLHKMSMMGHRVRILPWSTFRLNLSVTTPYNADFDGDEMNLHLPQSLETRAEIQELAMVPRMIVTPQSNRPVMGIVQDTLTAVRKFTKRDVFLERGEVMNLLMFLSTWDGKVPQPAILKPRPLWTGKQIFSLIIPGHINCIRTHSTHPDDEDSGPYKHISPGDTKLVLENGDLIMAIRLYAVCEHVNGLLSGNI

SEQ ID NO: 852622 - protein, 575 aa, Homo sapiens
MHGGGPPSGDSACPLRTIKRVQFGVLSPDELKRMSVTEGGIKYPETTEGGRPKLGGLMDPRQGVIERTGRCQTCAGNMTECPGHFGHIELAKPVFHVGFLVKTMKVLRCVCFFCSKLLVDSNNPKIKDILAKSKGQPKKRLTHVYDLCKGKNICEGGEEMDNKFGVEQPEGDEDLTKEKGHGGCGRYQPRIRRSGLELYAEWKHVNEDSQEKKILLSPERVHEIFKRISDEECFVLGMEPRYARPEWMIVTVLPVPPLSVRPAVVMQGSARNQDDLTHKLADIVKINNQLRRNEQNGAAAHVIAEDVKLLQFHVATMVDNELPGLPRAMQKSGRPLKSLKQRLKGKEGRVRGNLMGKRVDFSARTVITPDPNLSIDQVGVPRSIAANMTFAEIVTPFNIDRLQELVRRGNSQYPGAKYIIRDNGDRIDLRFHPKPSDLHLQTGYKVERHMCDGDIVIFNRQPTLHKMSMMGHRVRILPWSTFRLNLSVTTPYNADFDGDEMNLHLPQSLETRAEIQELAMVPRMIVTPQSNRPVMGIVQDTLTAVRKFTKRDVFLERMLNEKPQRNSIQIEARVS

SEQ ID NO: 852623 - protein, 106 aa, Homo sapiens
QVDLTAQVENKTRVCIRNGIQKFTHLSQCCVRCQRLQPRLLPCLVSHTGLPGVPRSLKPLHPFTRWCHVSQLLANVTCLRAPLSWGLHTPESLLFPHFTLLLPYLG

SEQ ID NO: 852624 - protein, 132 aa, Homo sapiens
VAGAGGDFWEGGVRGLEGGNWKGRKQEGLAWCGGKWSTLWALMAPVSPWKGHGGCGRYQPRIRRSGLELYAEWKHVNEDSQEKKILLSPERVHEIFKRISDEECFVLGMEPRYARPEWMIVTVLPVPPLSVR

SEQ ID NO: 852625 - protein, 70 aa, Homo sapiens
STWDGKVPQPAILKPRPLWTGKQIFSLIIPGHINCIRTHSTHPDDEDSGPYKHISPGDTKVGLGFWICED

SEQ ID NO: 852626 - protein, 1970 aa, Homo sapiens
MHGGGPPSGDSACPLRTIKRVQFGVLSPDELKRMSVTEGGIKYPETTEGGRPKLGGLMDPRQGVIERTGRCQTCAGNMTECPGHFGHIELAKPVFHVGFLVKTMKVLRCVCFFCSKLLVDSNNPKIKDILAKSKGQPKKRLTHVYDLCKGKNICEGGEEMDNKFGVEQPEGDEDLTKEKGHGGCGRYQPRIRRSGLELYAEWKHVNEDSQEKKILLSPERVHEIFKRISDEECFVLGMEPRYARPEWMIVTVLPVPPLSVRPAVVMQGSARNQDDLTHKLADIVKINNQLRRNEQNGAAAHVIAEDVKLLQFHVATMVDNELPGLPRAMQKSGRPLKSLKQRLKGKEGRVRGNLMGKRVDFSARTVITPDPNLSIDQVGVPRSIAANMTFAEIVTPFNIDRLQELVRRGNSQYPGAKYIIRDNGDRIDLRFHPKPSDLHLQTGYKVERHMCDGDIVIFNRQPTLHKMSMMGHRVRILPWSTFRLNLSVTTPYNADFDGDEMNLHLPQSLETRAEIQELAMVPRMIVTPQSNRPVMGIVQDTLTAVRKFTKRDVFLERGEVMNLLMFLSTWDGKVPQPAILKPRPLWTGKQIFSLIIPGHINCIRTHSTHPDDEDSGPYKHISPGDTKVVVENGELIMGILCKKSLGTSAGSLVHISYLEMGHDITRLFYSNIQTVINNWLLIEGHTIGIGDSIADSKTYQDIQNTIKKAKQDVIEVIEKAHNNELEPTPGNTLRQTFENQVNRILNDARDKTGSSAQKSLSEYNNFKSMVVSGAKGSKINISQVIAVVGQQNVEGKRIPFGFKHRTLPHFIKDDYGPESRGFVENSYLAGLTPTEFFFHAMGGREGLIDTAVKTAETGYIQRRLIKSMESVMVKYDATVRNSINQVVQLRYGEDGLAGESVEFQNLATLKPSNKAFEKKFRFDYTNERALRRTLQEDLVKDVLSNAHIQNELEREFERMREDREVLRVIFPTGDSKVVLPCNLLRMIWNAQKIFHINPRLPSDLHPIKVVEGVKELSKKLVIVNGDDPLSRQAQENATLLFNIHLRSTLCSRRMAEEFRLSGEAFDWLLGEIESKFNQAIAHPGEMVGALAAQSLGEPATQMTLNTFHYAGVSAKNVTLGVPRLKELINISKKPKTPSLTVFLLGQSARDAERAKDILCRLEHTTLRKVTANTAIYYDPNPQSTVVAEDQEWVNVYYEMPDFDVARISPWLLRVELDRKHMTDRKLTMEQIAEKINAGFGDDLNCIFNDDNAEKLVLRIRIMNSDENKMQEEEEVVDKMDDDVFLRCIESNMLTDMTLQGIEQISKVYMHLPQTDNKKKIIITEDGEFKALQEWILETDGVSLMRVLSEKDVDPVRTTSNDIVEIFTVLGIEAVRKALERELYHVISFDGSYVNYRHLALLCDTMTCRGHLMAITRHGVNRQDTGPLMKCSFEETVDVLMEAAAHGESDPMKGVSENIMLGQLAPAGTGCFDLLLDAEKCKYGMEIPTNIPGLGAAGPTGMFFGSAPSPMGGISPAMTPWNQGATPAYGAWSPSVGSGMTPGAAGFSPSAASDASGFSPGYSPAWSPTPGSPGSPGPSSPYIPSPGGAMSPSYSPTSPAYEPRSPGGYTPQSPSYSPTSPSYSPTSPSYSPTSPNYSPTSPSYSPTSPSYSPTSPSYSPTSPSYSPTSPSYSPTSPSYSPTSPSYSPTSPSYSPTSPSYSPTSPSYSPTSPSYSPTSPSYSPTSPSYSPTSPSYSPTSPSYSPTSPNYSPTSPNYTPTSPSYSPTSPSYSPTSPNYTPTSPNYSPTSPSYSPTSPSYSPTSPSYSPSSPRYTPQSPTYTPSSPSYSPSSPSYSPTSPKYTPTSPSYSPSSPEYTPTSPKYSPTSPKYSPTSPKYSPTSPTYSPTTPKYSPTSPTYSPTSPVYTPTSPKYSPTSPTYSPTSPKYSPTSPTYSPTSPKGSTYSPTSPGYSPTSPTYSLTSPAISPDDSDEEN

SEQ ID NO: 852627 - protein, 1416 aa, Homo sapiens
MLSGEVMNLLMFLSTWDGKVPQPAILKPRPLWTGKQIFSLIIPGHINCIRTHSTHPDDEDSGPYKHISPGDTKVVVENGELIMGILCKKSLGTSAGSLVHISYLEMGHDITRLFYSNIQTVINNWLLIEGHTIGIGDSIADSKTYQDIQNTIKKAKQDVIEVIEKAHNNELEPTPGNTLRQTFENQVNRILNDARDKTGSSAQKSLSEYNNFKSMVVSGAKGSKINISQVIAVVGQQNVEGKRIPFGFKHRTLPHFIKDDYGPESRGFVENSYLAGLTPTEFFFHAMGGREGLIDTAVKTAETGYIQRRLIKSMESVMVKYDATVRNSINQVVQLRYGEDGLAGESVEFQNLATLKPSNKAFEKKFRFDYTNERALRRTLQEDLVKDVLSNAHIQNELEREFERMREDREVLRVIFPTGDSKVVLPCNLLRMIWNAQKIFHINPRLPSDLHPIKVVEGVKELSKKLVIVNGDDPLSRQAQENATLLFNIHLRSTLCSRRMAEEFRLSGEAFDWLLGEIESKFNQAIAHPGEMVGALAAQSLGEPATQMTLNTFHYAGVSAKNVTLGVPRLKELINISKKPKTPSLTVFLLGQSARDAERAKDILCRLEHTTLRKVTANTAIYYDPNPQSTVVAEDQEWVNVYYEMPDFDVARISPWLLRVELDRKHMTDRKLTMEQIAEKINAGFGDDLNCIFNDDNAEKLVLRIRIMNSDENKMQEEEEVVDKMDDDVFLRCIESNMLTDMTLQGIEQISKVYMHLPQTDNKKKIIITEDGEFKALQEWILETDGVSLMRVLSEKDVDPVRTTSNDIVEIFTVLGIEAVRKALERELYHVISFDGSYVNYRHLALLCDTMTCRGHLMAITRHGVNRQDTGPLMKCSFEETVDVLMEAAAHGESDPMKGVSENIMLGQLAPAGTGCFDLLLDAEKCKYGMEIPTNIPGLGAAGPTGMFFGSAPSPMGGISPAMTPWNQGATPAYGAWSPSVGSGMTPGAAGFSPSAASDASGFSPGYSPAWSPTPGSPGSPGPSSPYIPSPGGAMSPSYSPTSPAYEPRSPGGYTPQSPSYSPTSPSYSPTSPSYSPTSPNYSPTSPSYSPTSPSYSPTSPSYSPTSPSYSPTSPSYSPTSPSYSPTSPSYSPTSPSYSPTSPSYSPTSPSYSPTSPSYSPTSPSYSPTSPSYSPTSPSYSPTSPSYSPTSPNYSPTSPNYTPTSPSYSPTSPSYSPTSPNYTPTSPNYSPTSPSYSPTSPSYSPTSPSYSPSSPRYTPQSPTYTPSSPSYSPSSPSYSPTSPKYTPTSPSYSPSSPEYTPTSPKYSPTSPKYSPTSPKYSPTSPTYSPTTPKYSPTSPTYSPTSPVYTPTSPKYSPTSPTYSPTSPKYSPTSPTYSPTSPKGSTYSPTSPGYSPTSPTYSLTSPAISPDDSDEEN

SEQ ID NO: 852628 - protein, 726 aa, Homo sapiens
SRGSLTPCHNLVLRIRIMNSDENKMQEEEEVVDKMDDDVFLRCIESNMLTDMTLQGIEQISKVYMHLPQTDNKKKIIITEDGEFKALQEWILETDGVSLMRVLSEKDVDPVRTTSNDIVEIFTVLGIEAVRKALERELYHVISFDGSYVNYRHLALLCDTMTCRGHLMAITRHGVNRQDTGPLMKCSFEETVDVLMEAAAHGESDPMKGVSENIMLGQLAPAGTGCFDLLLDAEKCKYGMEIPTNIPGLGAAGPTGMFFGSAPSPMGGISPAMTPWNQGATPAYGAWSPSVGSGMTPGAAGFSPSAASDASGFSPGYSPAWSPTPGSPGSPGPSSPYIPSPGGAMSPSYSPTSPAYEPRSPGGYTPQSPSYSPTSPSYSPTSPSYSPTSPNYSPTSPSYSPTSPSYSPTSPSYSPTSPSYSPTSPSYSPTSPSYSPTSPSYSPTSPSYSPTSPSYSPTSPSYSPTSPSYSPTSPSYSPTSPSYSPTSPSYSPTSPSYSPTSPNYSPTSPNYTPTSPSYSPTSPSYSPTSPNYTPTSPNYSPTSPSYSPTSPSYSPTSPSYSPSSPRYTPQSPTYTPSSPSYSPSSPSYSPTSPKYTPTSPSYSPSSPEYTPTSPKYSPTSPKYSPTSPKYSPTSPTYSPTTPKYSPTSPTYSPTSPVYTPTSPKYSPTSPTYSPTSPKYSPTSPTYSPTSPKGSTYSPTSPGYSPTSPTYSLTSPAISPDDSDEEN

SEQ ID NO: 852629 - protein, 692 aa, Homo sapiens
MDDDVFLRCIESNMLTDMTLQGIEQISKVYMHLPQTDNKKKIIITEDGEFKALQEWILETDGVSLMRVLSEKDVDPVRTTSNDIVEIFTVLGIEAVRKALERELYHVISFDGSYVNYRHLALLCDTMTCRGHLMAITRHGVNRQDTGPLMKCSFEETVDVLMEAAAHGESDPMKGVSENIMLGQLAPAGTGCFDLLLDAEKCKYGMEIPTNIPGLGAAGPTGMFFGSAPSPMGGISPAMTPWNQGATPAYGAWSPSVGSGMTPGAAGFSPSAASDASGFSPGYSPAWSPTPGSPGSPGPSSPYIPSPGGAMSPSYSPTSPAYEPRSPGGYTPQSPSYSPTSPSYSPTSPSYSPTSPNYSPTSPSYSPTSPSYSPTSPSYSPTSPSYSPTSPSYSPTSPSYSPTSPSYSPTSPSYSPTSPSYSPTSPSYSPTSPSYSPTSPSYSPTSPSYSPTSPSYSPTSPSYSPTSPNYSPTSPNYTPTSPSYSPTSPSYSPTSPNYTPTSPNYSPTSPSYSPTSPSYSPTSPSYSPSSPRYTPQSPTYTPSSPSYSPSSPSYSPTSPKYTPTSPSYSPSSPEYTPTSPKYSPTSPKYSPTSPKYSPTSPTYSPTTPKYSPTSPTYSPTSPVYTPTSPKYSPTSPTYSPTSPKYSPTSPTYSPTSPKGSTYSPTSPGYSPTSPTYSLTSPAISPDDSDEEN

SEQ ID NO: 852630 - protein, 1884 aa, Homo sapiens
MHGGGPPSGDSACPLRTIKRVQFGVLSPDELKRMSVTEGGIKYPETTEGGRPKLGGLMDPRQGVIERTGRCQTCAGNMTECPGHFGHIELAKPVFHVGFLVKTMKVLRCVCFFCSKLLVDSNNPKIKDILAKSKGQPKKRLTHVYDLCKGKNICEGGEEMDNKFGVEQPEGDEDLTKEKGHGGCGRYQPRIRRSGLELYAEWKHVNEDSQEKKILLSPERVHEIFKRISDEECFVLGMEPRYARPEWMIVTVLPVPPLSVRPAVVMQGSARNQDDLTHKLADIVKINNQLRRNEQNGAAAHVIAEDVKLLQFHVATMVDNELPGLPRAMQKSGRPLKSLKQRLKGKEGRVRGNLMGKRVDFSARTVITPDPNLSIDQVGVPRSIAANMTFAEIVTPFNIDRLQELVRRGNSQYPGAKYIIRDNGDRIDLRFHPKPSDLHLQTGYKVERHMCDGDIVIFNRQPTLHKMSMMGHRVRILPWSTFRLNLSVTTPYNADFDGDEMNLHLPQSLETRAEIQELAMVPRMIVTPQSNRPVMGIVQDTLTAVRKFTKRDVFLERGEVMNLLMFLSTWDGKVPQPAILKPRPLWTGKQIFSLIIPGHINCIRTHSTHPDDEDSGPYKHISPGDTKVVVENGELIMGILCKKSLGTSAGSLVHISYLEMGHDITRLFYSNIQTVINNWLLIEGHTIGIGDSIADSKTYQDIQNTIKKAKQDVIEVIEKAHNNELEPTPGNTLRQTFENQVNRILNDARDKTGSSAQKSLSEYNNFKSMVVSGAKGSKINISQVIAVVGQQNVEGKRIPFGFKHRTLPHFIKDDYGPESRGFVENSYLAGLTPTEFFFHAMGGREGLIDTAVKTAETGYIQRRLIKSMESVMVKYDATVRNSINQVVQLRYGEDGLAGESVEFQNLATLKPSNKAFEKKFRFDYTNERALRRTLQEDLVKDVLSNAHIQNELEREFERMREDREVLRVIFPTGDSKVVLPCNLLRMIWNAQKIFHINPRLPSDLHPIKVVEGVKELSKKLVIVNGDDPLSRQAQENATLLFNIHLRSTLCSRRMAEEFRLSGEAFDWLLGEIESKFNQAIAHPGEMVGALAAQSLGEPATQMTLNTFHYAGVSAKNVTLGVPRLKELINISKKPKTPSLTVFLLGQSARDAERAKDILCRLEHTTLRKVTANTAIYYDPNPQSTVVAEDQEWVNVYYEMPDFDVARISPWLLRVELDRKHMTDRKLTMEQIAEKINAGFGDDLNCIFNDDNAEKLVLRIRIMNSDENKMQEEEEVVDKMDDDVFLRCIESNMLTDMTLQGIEQISKVYMHLPQTDNKKKIIITEDGEFKALQEWILETDGVSLMRVLSEKDVDPVRTTSNDIVEIFTVLGIEAVRKALERELYHVISFDGSYVNYRHLALLCDTMTCRGHLMAITRHGVNRQDTGPLMKCSFEETVDVLMEAAAHGESDPMKGVSENIMLGQLAPAGTGCFDLLLDAEKCKYGMEIPTNIPGLGAAGPTGMFFGSAPSPMGGISPAMTPWNQGATPAYGAWSPSVGSGMTPGAAGFSPSAASDASGFSPGYSPAWSPTPGSPGSPGPSSPYIPSPGGAMSPSYSPTSPAYEPRSPGGYTPQSPSYSPTSPSYSPTSPSYSPTSPNYSPTSPSYSPTSPSYSPTSPSYSPTSPSYSPTSPSYSPTSPSYSPTSPSYSPTSPSYSPTSPSYSPTSPSYSPTSPSYSPTSPSYSPTSPSYSPTSPSYSPTSPSYSPTSPNYSPTSPNYTPTSPSYSPTSPSYSPTSPNYTPTSPNYSPTSPSYSPTSPSYSPTSPSYSPSSPRYTPQSPTYTPSSPSYSPSSPSYSPTSPKYTPTSPSYSPSSPEYTPTSPKYSPTSPKYSPTSPKYSPTSPFTPTP

SEQ ID NO: 852631 - protein, 1877 aa, Homo sapiens
MHGGGPPSGDSACPLRTIKRVQFGVLSPDELKRMSVTEGGIKYPETTEGGRPKLGGLMDPRQGVIERTGRCQTCAGNMTECPGHFGHIELAKPVFHVGFLVKTMKVLRCVCFFCSKLLVDSNNPKIKDILAKSKGQPKKRLTHVYDLCKGKNICEGGEEMDNKFGVEQPEGDEDLTKEKGHGGCGRYQPRIRRSGLELYAEWKHVNEDSQEKKILLSPERVHEIFKRISDEECFVLGMEPRYARPEWMIVTVLPVPPLSVRPAVVMQGSARNQDDLTHKLADIVKINNQLRRNEQNGAAAHVIAEDVKLLQFHVATMVDNELPGLPRAMQKSGRPLKSLKQRLKGKEGRVRGNLMGKRVDFSARTVITPDPNLSIDQVGVPRSIAANMTFAEIVTPFNIDRLQELVRRGNSQYPGAKYIIRDNGDRIDLRFHPKPSDLHLQTGYKVERHMCDGDIVIFNRQPTLHKMSMMGHRVRILPWSTFRLNLSVTTPYNADFDGDEMNLHLPQSLETRAEIQELAMVPRMIVTPQSNRPVMGIVQDTLTAVRKFTKRDVFLERGEVMNLLMFLSTWDGKVPQPAILKPRPLWTGKQIFSLIIPGHINCIRTHSTHPDDEDSGPYKHISPGDTKVVVENGELIMGILCKKSLGTSAGSLVHISYLEMGHDITRLFYSNIQTVINNWLLIEGHTIGIGDSIADSKTYQDIQNTIKKAKQDVIEVIEKAHNNELEPTPGNTLRQTFENQVNRILNDARDKTGSSAQKSLSEYNNFKSMVVSGAKGSKINISQVIAVVGQQNVEGKRIPFGFKHRTLPHFIKDDYGPESRGFVENSYLAGLTPTEFFFHAMGGREGLIDTAVKTAETGYIQRRLIKSMESVMVKYDATVRNSINQVVQLRYGEDGLAGESVEFQNLATLKPSNKAFEKKFRFDYTNERALRRTLQEDLVKDVLSNAHIQNELEREFERMREDREVLRVIFPTGDSKVVLPCNLLRMIWNAQKIFHINPRLPSDLHPIKVVEGVKELSKKLVIVNGDDPLSRQAQENATLLFNIHLRSTLCSRRMAEEFRLSGEAFDWLLGEIESKFNQAIAHPGEMVGALAAQSLGEPATQMTLNTFHYAGVSAKNVTLGVPRLKELINISKKPKTPSLTVFLLGQSARDAERAKDILCRLEHTTLRKVTANTAIYYDPNPQSTVVAEDQEWVNVYYEMPDFDVARISPWLLRVELDRKHMTDRKLTMEQIAEKINAGFGDDLNCIFNDDNAEKLVLRIRIMNSDENKMQEEEEVVDKMDDDVFLRCIESNMLTDMTLQGIEQISKVYMHLPQTDNKKKIIITEDGEFKALQEWILETDGVSLMRVLSEKDVDPVRTTSNDIVEIFTVLGIEAVRKALERELYHVISFDGSYVNYRHLALLCDTMTCRGHLMAITRHGVNRQDTGPLMKCSFEETVDVLMEAAAHGESDPMKGVSENIMLGQLAPAGTGCFDLLLDAEKCKYGMEIPTNIPGLGAAGPTGMFFGSAPSPMGGISPAMTPWNQGATPAYGAWSPSVGSGMTPGAAGFSPSAASDASGFSPGYSPAWSPTPGSPGSPGPSSPYIPSPGGAMSPSYSPTSPAYEPRSPGGYTPQSPSYSPTSPSYSPTSPSYSPTSPNYSPTSPSYSPTSPSYSPTSPSYSPTSPSYSPTSPSYSPTSPSYSPTSPSYSPTSPSYSPTSPSYSPTSPSYSPTSPSYSPTSPSYSPTSPSYSPTSPSYSPTSPSYSPTSPNYSPTSPNYTPTSPSYSPTSPSYSPTSPNYTPTSPNYSPTSPSYSPTSPSYSPTSPSYSPSSPRYTPQSPTYTPSSPSYSPSSPSYSPTSPKYTPTSPSYSPSFTDAPPSHGNDMVYISGVLLLRHRSLRC

SEQ ID NO: 852632 - protein, 1879 aa, Homo sapiens
MHGGGPPSGDSACPLRTIKRVQFGVLSPDELKRMSVTEGGIKYPETTEGGRPKLGGLMDPRQGVIERTGRCQTCAGNMTECPGHFGHIELAKPVFHVGFLVKTMKVLRCVCFFCSKLLVDSNNPKIKDILAKSKGQPKKRLTHVYDLCKGKNICEGGEEMDNKFGVEQPEGDEDLTKEKGHGGCGRYQPRIRRSGLELYAEWKHVNEDSQEKKILLSPERVHEIFKRISDEECFVLGMEPRYARPEWMIVTVLPVPPLSVRPAVVMQGSARNQDDLTHKLADIVKINNQLRRNEQNGAAAHVIAEDVKLLQFHVATMVDNELPGLPRAMQKSGRPLKSLKQRLKGKEGRVRGNLMGKRVDFSARTVITPDPNLSIDQVGVPRSIAANMTFAEIVTPFNIDRLQELVRRGNSQYPGAKYIIRDNGDRIDLRFHPKPSDLHLQTGYKVERHMCDGDIVIFNRQPTLHKMSMMGHRVRILPWSTFRLNLSVTTPYNADFDGDEMNLHLPQSLETRAEIQELAMVPRMIVTPQSNRPVMGIVQDTLTAVRKFTKRDVFLERGEVMNLLMFLSTWDGKVPQPAILKPRPLWTGKQIFSLIIPGHINCIRTHSTHPDDEDSGPYKHISPGDTKVVVENGELIMGILCKKSLGTSAGSLVHISYLEMGHDITRLFYSNIQTVINNWLLIEGHTIGIGDSIADSKTYQDIQNTIKKAKQDVIEVIEKAHNNELEPTPGNTLRQTFENQVNRILNDARDKTGSSAQKSLSEYNNFKSMVVSGAKGSKINISQVIAVVGQQNVEGKRIPFGFKHRTLPHFIKDDYGPESRGFVENSYLAGLTPTEFFFHAMGGREGLIDTAVKTAETGYIQRRLIKSMESVMVKYDATVRNSINQVVQLRYGEDGLAGESVEFQNLATLKPSNKAFEKKFRFDYTNERALRRTLQEDLVKDVLSNAHIQNELEREFERMREDREVLRVIFPTGDSKVVLPCNLLRMIWNAQKIFHINPRLPSDLHPIKVVEGVKELSKKLVIVNGDDPLSRQAQENATLLFNIHLRSTLCSRRMAEEFRLSGEAFDWLLGEIESKFNQAIAHPGEMVGALAAQSLGEPATQMTLNTFHYAGVSAKNVTLGVPRLKELINISKKPKTPSLTVFLLGQSARDAERAKDILCRLEHTTLRKVTANTAIYYDPNPQSTVVAEDQEWVNVYYEMPDFDVARISPWLLRVELDRKHMTDRKLTMEQIAEKINAGFGDDLNCIFNDDNAEKLVLRIRIMNSDENKMQEEEEVVDKMDDDVFLRCIESNMLTDMTLQGIEQISKVYMHLPQTDNKKKIIITEDGEFKALQEWILETDGVSLMRVLSEKDVDPVRTTSNDIVEIFTVLGIEAVRKALERELYHVISFDGSYVNYRHLALLCDTMTCRGHLMAITRHGVNRQDTGPLMKCSFEETVDVLMEAAAHGESDPMKGVSENIMLGQLAPAGTGCFDLLLDAEKCKYGMEIPTNIPGLGAAGPTGMFFGSAPSPMGGISPAMTPWNQGATPAYGAWSPSVGSGMTPGAAGFSPSAASDASGFSPGYSPAWSPTPGSPGSPGPSSPYIPSPGGAMSPSYSPTSPAYEPRSPGGYTPQSPSYSPTSPSYSPTSPSYSPTSPNYSPTSPSYSPTSPSYSPTSPSYSPTSPSYSPTSPSYSPTSPSYSPTSPSYSPTSPSYSPTSPSYSPTSPSYSPTSPSYSPTSPSYSPTSPSYSPTSPSYSPTSPSYSPTSPNYSPTSPNYTPTSPSYSPTSPSYSPTSPNYTPTSPNYSPTSPSYSPTSPSYSPTSPSYSPSSPRYTPQSPTYTPSSPSYSPSSPSYSPTSPKYTPTSPSYSPSSPEYTPTSPKYSPTGLGLPGQVDLTSKIES

SEQ ID NO: 852633 - protein, 154 aa, Homo sapiens
LKEEVSKPRNKEAIIYIEQCYVKLLKLGLSKLLSNITQLFPDLTKLLPFQPTIHTTVSNLYPKLTQLQPQLAQLQPNLTQVHPNQSFLQSQLPRVYPNLSQVLTYQSQIFTHLSQVLAYQSHLFTHHPKILPNISYLFPNLSSLHPNLSQVLTY

SEQ ID NO: 852634 - protein, 1639 aa, Homo sapiens
MHGGGPPSGDSACPLRTIKRVQFGVLSPDELKRMSVTEGGIKYPETTEGGRPKLGGLMDPRQGVIERTGRCQTCAGNMTECPGHFGHIELAKPVFHVGFLVKTMKVLRCVCFFCSKLLVDSNNPKIKDILAKSKGQPKKRLTHVYDLCKGKNICEGGEEMDNKFGVEQPEGDEDLTKEKGHGGCGRYQPRIRRSGLELYAEWKHVNEDSQEKKILLSPERVHEIFKRISDEECFVLGMEPRYARPEWMIVTVLPVPPLSVRPAVVMQGSARNQDDLTHKLADIVKINNQLRRNEQNGAAAHVIAEDVKLLQFHVATMVDNELPGLPRAMQKSGRPLKSLKQRLKGKEGRVRGNLMGKRVDFSARTVITPDPNLSIDQVGVPRSIAANMTFAEIVTPFNIDRLQELVRRGNSQYPGAKYIIRDNGDRIDLRFHPKPSDLHLQTGYKVERHMCDGDIVIFNRQPTLHKMSMMGHRVRILPWSTFRLNLSVTTPYNADFDGDEMNLHLPQSLETRAEIQELAMVPRMIVTPQSNRPVMGIVQDTLTAVRKFTKRDVFLERGEVMNLLMFLSTWDGKVPQPAILKPRPLWTGKQIFSLIIPGHINCIRTHSTHPDDEDSGPYKHISPGDTKVVVENGELIMGILCKKSLGTSAGSLVHISYLEMGHDITRLFYSNIQTVINNWLLIEGHTIGIGDSIADSKTYQDIQNTIKKAKQDVIEVIEKAHNNELEPTPGNTLRQTFENQVNRILNDARDKTGSSAQKSLSEYNNFKSMVVSGAKGSKINISQVIAVVGQQNVEGKRIPFGFKHRTLPHFIKDDYGPESRGFVENSYLAGLTPTEFFFHAMGGREGLIDTAVKTAETGYIQRRLIKSMESVMVKYDATVRNSINQVVQLRYGEDGLAGESVEFQNLATLKPSNKAFEKKFRFDYTNERALRRTLQEDLVKDVLSNAHIQNELEREFERMREDREVLRVIFPTGDSKVVLPCNLLRMIWNAQKIFHINPRLPSDLHPIKVVEGVKELSKKLVIVNGDDPLSRQAQENATLLFNIHLRSTLCSRRMAEEFRLSGEAFDWLLGEIESKFNQAIAHPGEMVGALAAQSLGEPATQMTLNTFHYAGVSAKNVTLGVPRLKELINISKKPKTPSLTVFLLGQSARDAERAKDILCRLEHTTLRKVTANTAIYYDPNPQSTVVAEDQEWVNVYYEMPDFDVARISPWLLRVELDRKHMTDRKLTMEQIAEKINAGFGDDLNCIFNDDNAEKLVLRIRIMNSDENKMQEEEEVVDKMDDDVFLRCIESNMLTDMTLQGIEQISKVYMHLPQTDNKKKIIITEDGEFKALQEWILETDGVSLMRVLSEKDVDPVRTTSNDIVEIFTVLGIEAVRKALERELYHVISFDGSYVNYRHLALLCDTMTCRGHLMAITRHGVNRQDTGPLMKCSFEETVDVLMEAAAHGESDPMKGVSENIMLGQLAPAGTGCFDLLLDAEKCKYGMEIPTNIPGLGAAGPTGMFFGSAPSPMGGISPAMTPWNQGATPAYGAWSPSVGSGMTPGAAGFSPSAASDASGFSPGYSPAWSPTPGSPGSPGPSSPYIPSPGGAMSPSYSPTSPAYEPRSPGGYTPQSPSYSPTSPSYSPTWVRSTWPGRPNYFR

SEQ ID NO: 852635 - protein, 1135 aa, Homo sapiens
MHGGGPPSGDSACPLRTIKRVQFGVLSPDELKRMSVTEGGIKYPETTEGGRPKLGGLMDPRQGVIERTGRCQTCAGNMTECPGHFGHIELAKPVFHVGFLVKTMKVLRCVCFFCSKLLVDSNNPKIKDILAKSKGQPKKRLTHVYDLCKGKNICEGGEEMDNKFGVEQPEGDEDLTKEKGHGGCGRYQPRIRRSGLELYAEWKHVNEDSQEKKILLSPERVHEIFKRISDEECFVLGMEPRYARPEWMIVTVLPVPPLSVRPAVVMQGSARNQDDLTHKLADIVKINNQLRRNEQNGAAAHVIAEDVKLLQFHVATMVDNELPGLPRAMQKSGRPLKSLKQRLKGKEGRVRGNLMGKRVDFSARTVITPDPNLSIDQVGVPRSIAANMTFAEIVTPFNIDRLQELVRRGNSQYPGAKYIIRDNGDRIDLRFHPKPSDLHLQTGYKVERHMCDGDIVIFNRQPTLHKMSMMGHRVRILPWSTFRLNLSVTTPYNADFDGDEMNLHLPQSLETRAEIQELAMVPRMIVTPQSNRPVMGIVQDTLTAVRKFTKRDVFLERGEVMNLLMFLSTWDGKVPQPAILKPRPLWTGKQIFSLIIPGHINCIRTHSTHPDDEDSGPYKHISPGDTKVVVENGELIMGILCKKSLGTSAGSLVHISYLEMGHDITRLFYSNIQTVINNWLLIEGHTIGIGDSIADSKTYQDIQNTIKKAKQDVIEVIEKAHNNELEPTPGNTLRQTFENQVNRILNDARDKTGSSAQKSLSEYNNFKSMVVSGAKGSKINISQVIAVVGQQNVEGKRIPFGFKHRTLPHFIKDDYGPESRGFVENSYLAGLTPTEFFFHAMGGREGLIDTAVKTAETGYIQRRLIKSMESVMVKYDATVRNSINQVVQLRYGEDGLAGESVEFQNLATLKPSNKAFEKKFRFDYTNERALRRTLQEDLVKDVLSNAHIQNELEREFERMREDREVLRVIFPTGDSKVVLPCNLLRMIWNAQKIFHINPRLPSDLHPIKVVEGVKELSKKLVIVNGDDPLSRQAQENATLLFNIHLRSTLCSRRMAEEFRLSGEAFDWLLGEIESKFNQAIVSVVLFTAVFFSSFYLLTSVVSKSSPLLSTTYRIGSVGSVPPNNSSHSWRDCLYL

SEQ ID NO: 852636 - protein, 700 aa, Homo sapiens
MHGGGPPSGDSACPLRTIKRVQFGVLSPDELKRMSVTEGGIKYPETTEGGRPKLGGLMDPRQGVIERTGRCQTCAGNMTECPGHFGHIELAKPVFHVGFLVKTMKVLRCVCFFCSKLLVDSNNPKIKDILAKSKGQPKKRLTHVYDLCKGKNICEGGEEMDNKFGVEQPEGDEDLTKEKGHGGCGRYQPRIRRSGLELYAEWKHVNEDSQEKKILLSPERVHEIFKRISDEECFVLGMEPRYARPEWMIVTVLPVPPLSVRPAVVMQGSARNQDDLTHKLADIVKINNQLRRNEQNGAAAHVIAEDVKLLQFHVATMVDNELPGLPRAMQKSGRPLKSLKQRLKGKEGRVRGNLMGKRVDFSARTVITPDPNLSIDQVGVPRSIAANMTFAEIVTPFNIDRLQELVRRGNSQYPGAKYIIRDNGDRIDLRFHPKPSDLHLQTGYKVERHMCDGDIVIFNRQPTLHKMSMMGHRVRILPWSTFRLNLSVTTPYNADFDGDEMNLHLPQSLETRAEIQELAMVPRMIVTPQSNRPVMGIVQDTLTAVRKFTKRDVFLERGEVMNLLMFLSTWDGKVPQPAILKPRPLWTGKQIFSLIIPGHINCIRTHSTHPDDEDSGPYKHISPGDTKVVVENGELIMGILCKKSLGTSAGSLVHISYLEMGHDITRLFYSNIQTVINNWLLIEGHTIGIWGYSYCCVPSR

SEQ ID NO: 852637 - protein, 609 aa, Homo sapiens
MHGGGPPSGDSACPLRTIKRVQFGVLSPDELKRMSVTEGGIKYPETTEGGRPKLGGLMDPRQGVIERTGRCQTCAGNMTECPGHFGHIELAKPVFHVGFLVKTMKVLRCVCFFCSKLLVDSNNPKIKDILAKSKGQPKKRLTHVYDLCKGKNICEGGEEMDNKFGVEQPEGDEDLTKEKGHGGCGRYQPRIRRSGLELYAEWKHVNEDSQEKKILLSPERVHEIFKRISDEECFVLGMEPRYARPEWMIVTVLPVPPLSVRPAVVMQGSARNQDDLTHKLADIVKINNQLRRNEQNGAAAHVIAEDVKLLQFHVATMVDNELPGLPRAMQKSGRPLKSLKQRLKGKEGRVRGNLMGKRVDFSARTVITPDPNLSIDQVGVPRSIAANMTFAEIVTPFNIDRLQELVRRGNSQYPGAKYIIRDNGDRIDLRFHPKPSDLHLQTGYKVERHMCDGDIVIFNRQPTLHKMSMMGHRVRILPWSTFRLNLSVTTPYNADFDGDEMNLHLPQSLETRAEIQELAMVPRMIVTPQSNRPVMGIVQDTLTAVRKFTKRDVFLERGEVMNLLMFLSTWDGKVPQPAILKPRPLWTGKQIFSLIIPGHIRTARVRADI

SEQ ID NO: 852638 - protein, 431 aa, Homo sapiens
MHGGGPPSGDSACPLRTIKRVQFGVLSPDELKRMSVTEGGIKYPETTEGGRPKLGGLMDPRQGVIERTGRCQTCAGNMTECPGHFGHIELAKPVFHVGFLVKTMKVLRCVCFFCSKLLVDSNNPKIKDILAKSKGQPKKRLTHVYDLCKGKNICEGGEEMDNKFGVEQPEGDEDLTKEKGHGGCGRYQPRIRRSGLELYAEWKHVNEDSQEKKILLSPERVHEIFKRISDEECFVLGMEPRYARPEWMIVTVLPVPPLSVRPAVVMQGSARNQDDLTHKLADIVKINNQLRRNEQNGAAAHVIAEDVKLLQFHVATMVDNELPGLPRAMQKSGRPLKSLKQRLKGKEGRVRGNLMGKRVDFSARTVITPDPNLSIDQVGVPRSIAANMTFAEIVTPFNIDRLQELVRRGNSQAARCPPWWPHGTGGASHPL

SEQ ID NO: 852639 - protein, 112 aa, Homo sapiens
RCCVWRGLMGPVCSVQVDVLMEAAAHGESDPMKGVSENIMLGQLAPAGTGCFDLLLDAEKCKYGMEIPTNIPGLGAAGREYEAPAAVPACVGEAGGQAMGARVSPVHDCCSC

SEQ ID NO: 852640 - protein, 278 aa, Homo sapiens
MAALFLKRLTLQTVKSENSCIRCFGKHILQKTAPAQLSPIASAPRLSFLIHAKAFSTAEDTQNEGKKTKKNKTAFSNVGRKISQRVIHLFDEKGNDLGNMHRANVIRLMDERDLRLVQRNTSTEPAEYQLMTGLQILQERQRLREMEKANPKTGPTLRKELILSSNIGQHDLDTKTKQIQQWIKKKHLVQITIKKGKNVDVSENEMEEIFHQILQTMPGIATFSSRPQAVQGGKALMCVLRALSKNEEKAYKETQETQERDTLNKDHGNDKESNVLHQ

SEQ ID NO: 852641 - protein, 278 aa, Homo sapiens; identical to SEQ ID NO: 852640

SEQ ID NO: 852642 - protein, 278 aa, Homo sapiens; identical to SEQ ID NO: 852640

SEQ ID NO: 852643 - protein, 278 aa, Homo sapiens; identical to SEQ ID NO: 852640

SEQ ID NO: 852644 - protein, 208 aa, Homo sapiens
MAALFLKRLTLQTVKSENSCIRCFGKHILQKTAPAQLSPIASAPRLSFLIHAKAFSTAEDTQNEGKKTKKNKTAFSNVGRKISQRVIHLFDEKGNDLGNMHRANVIRLMDERDLRLVQRNTSTEPAEYQLMTGLQILQERQRLREMEKANPKTGPTLRKELILSSNIGQHDLDTKTKQIQQWIKKKHLVQITIKKGKNVDVSENEMQK

SEQ ID NO: 852645 - protein, 278 aa, Homo sapiens; identical to SEQ ID NO: 852640

SEQ ID NO: 852646 - protein, 210 aa, Homo sapiens
MQKPLVPLKTPRMKEKRQKRIKQLLVTLEEKMHRANVIRLMDERDLRLVQRNTSTEPAEYQLMTGLQILQERQRLREMEKANPKTGPTLRKELILSSNIGQHDLDTKTKQIQQWIKKKHLVQITIKKGKNVDVSENEMEEIFHQILQTMPGIATFSSRPQAVQGGKALMCVLRALSKNEEKAYKETQETQERDTLNKDHGNDKESNVLHQ

SEQ ID NO: 852647 - protein, 174 aa, Homo sapiens [sequence omitted]

SEQ ID NO: 852648 - protein, 278 aa, Homo sapiens; identical to SEQ ID NO: 852640

SEQ ID NO: 852649 - protein, 249 aa, Homo sapiens
MAALFLKRLTLQTVKSENSCIRCFGKHILQKTAPAQLSPIASAPRLSFLIHAKAFSTAEDTQNEGKKTKKNKTAFSNVGRKISQRVIHLFDEKGNDLGNMHRANVIRLMDERDLRLVQRNTSTEPAEYQLMTGLQILQERQRLREMEKANPKTGPTLRKELILSSNIGQHDLDTKTKQIQQWIKKKHLVQITIKKGKNVDVSENEMREIFSFQIIQNMAWISTFLILGHKLSRGESFSVSPGLGTRGEV

SEQ ID NO: 852650 - protein, 278 aa, Homo sapiens; identical to SEQ ID NO: 852640

SEQ ID NO: 852651 - protein, 278 aa, Homo sapiens; identical to SEQ ID NO: 852640

SEQ ID NO: 852652 - protein, 208 aa, Homo sapiens; identical to SEQ ID NO: 852644

SEQ ID NO: 852653 - protein, 278 aa, Homo sapiens; identical to SEQ ID NO: 852640

SEQ ID NO: 852654 - protein, 174 aa, Homo sapiens [sequence omitted]

SEQ ID NO: 852655 - protein, 863 aa, Homo sapiens
DRAAEDAEVVAAAFEQVSEPPSETPALGTGGRRASGPLKALRRRGDTMAEPLKEEDGEDGSAEPPGPVKAEPAHTAASVAAKNLALLKARSFDVTFDVGDEYEIIETIGNGAYGVVSSARRRLTGQQVAIKKIPNAFDVVTNAKRTLRELKILKHFKHDNIIAIKDILRPTVPYGEFKSVYVVLDLMESDLHQIIHSSQPLTLEHVRYFLYQLLRGLKYMHSAQVIHRDLKPSNLLVNENCELKIGDFGMARGLCTSPAEHQYFMTEYVATRWYRAPELMLSLHEYTQAIDLWSVGCIFGEMLARRQLFPGKNYVHQLQLIMMVLGTPSPAVIQAVGAERVRAYIQSLPPRQPVPWETVYPGADRQALSLLGRMLRFEPSARISAAAALRHPFLAKYHDPDDEPDCAPPFDFAFDREALTRERIKEAIVAEIEDFHARREGIRQQIRFQPSLQPVASEPGCPDVEMPSPWAPSGDCAMESPPPAPPPCPGPAPDTIDLTLQPPPPVSEPAPPKKDGAISDNTKAALKAALLKSLRSRLRDGPSAPLEAPEPRKPVTAQERQREREEKRRRRQERAKEREKRRQERERKERGAGASGGPSTDPLAGLVLSDNDRSLLERWTRMARPAAPALTSVPAPAPAPTPTPTPVQPTSPPPGPVAQPTGPQPQSAGSTSGPVPQPACPPPGPAPHPTGPPGPIPVPAPPQIATSTSLLAAQSLVPPPGLPGSSTPGVLPYFPPGLPPPDAGGAPQSSMSESPDVNLVTQQLSKSQVEDPLPPVFSGTPKGSGAGYGVGFDLEEFLNQSFDMGVADGPQDGQADSASLSASLLADWLEGHGMNPADIESLQREIQMDSPMLLADLPDLQDP

SEQ ID NO: 852656 - protein, 816 aa, Homo sapiens
MAEPLKEEDGEDGSAEPPGPVKAEPAHTAASVAAKNLALLKARSFDVTFDVGDEYEIIETIGNGAYGVVSSARRRLTGQQVAIKKIPNAFDVVTNAKRTLRELKILKHFKHDNIIAIKDILRPTVPYGEFKSVYVVLDLMESDLHQIIHSSQPLTLEHVRYFLYQLLRGLKYMHSAQVIHRDLKPSNLLVNENCELKIGDFGMARGLCTSPAEHQYFMTEYVATRWYRAPELMLSLHEYTQAIDLWSVGCIFGEMLARRQLFPGKNYVHQLQLIMMVLGTPSPAVIQAVGAERVRAYIQSLPPRQPVPWETVYPGADRQALSLLGRMLRFEPSARISAAAALRHPFLAKYHDPDDEPDCAPPFDFAFDREALTRERIKEAIVAEIEDFHARREGIRQQIRFQPSLQPVASEPGCPDVEMPSPWAPSGDCAMESPPPAPPPCPGPAPDTIDLTLQPPPPVSEPAPPKKDGAISDNTKAALKAALLKSLRSRLRDGPSAPLEAPEPRKPVTAQERQREREEKRRRRQERAKEREKRRQERERKERGAGASGGPSTDPLAGLVLSDNDRSLLERWTRMARPAAPALTSVPAPAPAPTPTPTPVQPTSPPPGPVAQPTGPQPQSAGSTSGPVPQPACPPPGPAPHPTGPPGPIPVPAPPQIATSTSLLAAQSLVPPPGLPGSSTPGVLPYFPPGLPPPDAGGAPQSSMSESPDVNLVTQQLSKSQVEDPLPPVFSGTPKGSGAGYGVGFDLEEFLNQSFDMGVADGPQDGQADSASLSASLLADWLEGHGMNPADIESLQREIQMDSPMLLADLPDLQDP

SEQ ID NO: 852657 - protein, 699 aa, Homo sapiens
TGQLKTRRWWLRPLNNYVVLDLMESDLHQIIHSSQPLTLEHVRYFLYQLLRGLKYMHSAQVIHRDLKPSNLLVNENCELKIGDFGMARGLCTSPAEHQYFMTEYVATRWYRAPELMLSLHEYTQAIDLWSVGCIFGEMLARRQLFPGKNYVHQLQLIMMVLGTPSPAVIQAVGAERVRAYIQSLPPRQPVPWETVYPGADRQALSLLGRMLRFEPSARISAAAALRHPFLAKYHDPDDEPDCAPPFDFAFDREALTRERIKEAIVAEIEDFHARREGIRQQIRFQPSLQPVASEPGCPDVEMPSPWAPSGDCAMESPPPAPPPCPGPAPDTIDLTLQPPPPVSEPAPPKKDGAISDNTKAALKAALLKSLRSRLRDGPSAPLEAPEPRKPVTAQERQREREEKRRRRQERAKEREKRRQERERKERGAGASGGPSTDPLAGLVLSDNDRSLLERWTRMARPAAPALTSVPAPAPAPTPTPTPVQPTSPPPGPVAQPTGPQPQSAGSTSGPVPQPACPPPGPAPHPTGPPGPIPVPAPPQIATSTSLLAAQSLVPPPGLPGSSTPGVLPYFPPGLPPPDAGGAPQSSMSESPDVNLVTQQLSKSQVEDPLPPVFSGTPKGSGAGYGVGFDLEEFLNQSFDMGVADGPQDGQADSASLSASLLADWLEGHGMNPADIESLQREIQMDSPMLLADLPDLQDP

SEQ ID NO: 852658 - protein, 863 aa, Homo sapiens; identical to SEQ ID NO: 852655

SEQ ID NO: 852659 - protein, 237 aa, Homo sapiens
YIQSLPPRQPVPWETVYPGADRQALSLLGRMLRFEPSARISAAAALRHPFLAKYHDPDDEPDCAPPFDFAFDREALTRERIKEAIVAEIEDFHARREGIRQQIRFQPSLQPVASEPGCPDVEMPSPWAPSGDCAMESPPPAPPPCPGPAPDTIDLTLQPPPPVSEPAPPKKDGAISDNTKAALKAALLKSLRSRLRGALWAGRVGRGETWTWTRLQAFTFSPAQLPRRWPQRTPGGS

SEQ ID NO: 852660 - protein, 677 aa, Homo sapiens
MESDLHQIIHSSQPLTLEHVRYFLYQLLRGLKYMHSAQVIHRDLKPSNLLVNENCELKIGDFGMARGLCTSPAEHQYFMTEYVATRWYRAPELMLSLHEYTQAIDLWSVGCIFGEMLARRQLFPGKNYVHQLQLIMMVLGTPSPAVIQAVGAERVRAYIQSLPPRQPVPWETVYPGADRQALSLLGRMLRFEPSARISAAAALRHPFLAKYHDPDDEPDCAPPFDFAFDREALTRERIKEAIVAEIEDFHARREGIRQQIRFQPSLQPVASEPGCPDVEMPSPWAPSGDCAMESPPPAPPPCPGPAPDTIDLTLQPPPPVSEPAPPKKDGAISDNTKAALKAALLKSLRSRLRDGPSAPLEAPEPRKPVTAQERQREREEKRRRRQERAKEREKRRQERERKERGAGASGGPSTDPLAGLVLSDNDRSLLERWTRMARPAAPALTSVPAPAPAPTPTPTPVQPTSPPPGPVAQPTGPQPQSAGSTSGPVPQPACPPPGPAPHPTGPPGPIPVPAPPQIATSTSLLAAQSLVPPPGLPGSSTPGVLPYFPPGLPPPDAGGAPQSSMSESPDVNLVTQQLSKSQVEDPLPPVFSGTPKGSGAGYGVGFDLEEFLNQSFDMGVADGPQDGQADSASLSASLLADWLEGHGMNPADIESLQREIQMDSPMLLADLPDLQDP

SEQ ID NO: 852661 - protein, 816 aa, Homo sapiens; identical to SEQ ID NO: 852656

SEQ ID NO: 852662 - protein, 677 aa, Homo sapiens; identical to SEQ ID NO: 852660

SEQ ID NO: 852663 - protein, 93 aa, Homo sapiens
SFSPEETPLGSPAVLLCSIASHLLTQQLAMLERAEQAQARTPTCMPTDMQACTHTHAHGYTHTLRLPSPGPDLTLLALLPAQWCNGKVSSSHP

SEQ ID NO: 852664 - protein, 303 aa, Homo sapiens
MARGKAKEEGSWKKFIWNSEKKEFLGRTGGSWFKILLFYVIFYGCLAGIFIGTIQVMLLTISEFKPTYQDRVAPPGLTQIPQIQKTEISFRPNDPKSYEAYVLNIVRFLEKYKDSAQRDDMIFEDCGDVPSEPKERGDFNHERGERKVCRFKLEWLGNCSGLNDETYGYKEGKPCIIIKLNRVLGFKPKPPKNESLETYPVMKYNPNVLPVQCTGKRDEDKDKVGNVEYFGLGNSPGFPLQYYPYYGKLLQPKYLQPLLAVQFTNLTMDTEIRIECKAYGENIGYSEKDRFQGRFDVKIEVKS

SEQ ID NO: 852665 - protein, 303 aa, Homo sapiens; identical to SEQ ID NO: 852664

SEQ ID NO: 852666 - protein, 303 aa, Homo sapiens; identical to SEQ ID NO: 852664

SEQ ID NO: 852667 - protein, 303 aa, Homo sapiens; identical to SEQ ID NO: 852664

SEQ ID NO: 852668 - protein, 303 aa, Homo sapiens; identical to SEQ ID NO: 852664

SEQ ID NO: 852669 - protein, 303 aa, Homo sapiens; identical to SEQ ID NO: 852664

SEQ ID NO: 852670 - protein, 303 aa, Homo sapiens; identical to SEQ ID NO: 852664

SEQ ID NO: 852671 - protein, 303 aa, Homo sapiens; identical to SEQ ID NO: 852664

SEQ ID NO: 852672 - protein, 303 aa, Homo sapiens; identical to SEQ ID NO: 852664

SEQ ID NO: 852673 - protein, 319 aa, Homo sapiens
MARGKAKEEGSWKKFIWNSEKKEFLGRTGGSWFKILLFYVIFYGCLAGIFIGTIQVMLLTISEFKPTYQDRVAPPGLTQIPQIQKTEISFRPNDPKSYEAYVLNIVRFLEKYKDSAQRDDMIFEDCGDVPSEPKERGDFNHERGERKVCRFKLEWLGNCSGLNDETYGYKEGKPCIIIKLNRVLGFKPKPPKNESLETYPVMKYNPNVLPVQCTGKRDEDKDKVGNVEYFGLGNSPGFPLQYYPYYGKILEPKYLSPCWPYYGKLLQPKYLQPLLAVQFTNLTMDTEIRIECKAYGENIGYSEKDRFQGRFDVKIEVKS

SEQ ID NO: 852674 - protein, 304 aa, Homo sapiens
MARGKAKEEGSWKKFIWNSEKKEFLGRTGGSWFKILLFYVIFYGCLAGIFIGTIQVMLLTISEFKPTYQDRVAPPGLTQIPQIQKTEISFRPNDPKSYEAYVLNIVRFLEKYKDSAQRDDMIFEDCGDVPSEPKERGDFNHERGERKVCRFKLEWLGNCSGLNDETYGYKEGKPCIIIKLNRVLGFKPKPPKNESLETYPVMKYNPNVLPVQCTGKRDEDKDKVGNVEYFGLGNSPGFPLQYYPYYGKLLQPKYLQPLLAVQFTNLTMDTEIRIECKAYGENIGYSEKDRFQGRFDVKIGGTAL

SEQ ID NO: 852675 - protein, 256 aa, Homo sapiens
MARGKAKEEGSWKKFIWNSEKKEFLGRTGGSWFKILLFYVIFYGCLAGIFIGTIQVMLLTISEFKPTYQDRVAPPGLTQIPQIQKTEISFRPNDPKSYEAYVLNIVRFLEKYKDSAQRDDMIFEDCGDVPSEPKERGDFNHERGERKVCRFKLEWLGNCSGLNDETYGYKEGKPCIIIKLNRVLGFKPKPPKNESLETYPVMKYNPNVLPVQCTGKWTGQLPWFSSAVLSVLWQTPAAQIPAAPAGRTVHQSYHGH

SEQ ID NO: 852676 - protein, 303 aa, Homo sapiens; identical to SEQ ID NO: 852664

SEQ ID NO: 852677 - protein, 227 aa, Homo sapiens
MARGKAKEEGSWKKFIWNSEKKEFLGRTGGSWFKILLFYVIFYGCLAGIFIGTIQVMLLTISEFKPTYQDRVAPPGLTQIPQIQKTEISFRPNDPKSYEAYVLNIVRFLEKYKDSAQRDDMIFEDCGDVPSEPKERGDFNHERGERKVCRFKLEWLGNCSGLNDETYGYKEGKPCIIIKLNRVLGFKPKPPKNESLETYPVMKYNPNVLPVQCTGKTSRIRYRARFD

SEQ ID NO: 852678 - protein, 198 aa, Homo sapiens [sequence omitted]

SEQ ID NO: 852679 - protein, 113 aa, Homo sapiens
MARGKAKEEGSWKKFIWNSEKKEFLGRTGGSWFKILLFYVIFYGCLAGIFIGTIQVMLLTISEFKPTYQDRVAPPGKIHMNSFISFRDSMGVTFSIEKKFFGKLLYNVVLKQP

SEQ ID NO: 852680 - protein, 190 aa, Homo sapiens
SRLRATQVRIPQPRKGRFTPSRELGGGCAALPARPSPPPPPPPRPAPNAPRPAIQAAPLAPAAPLCRPRTRPLGPSPCPWRRRLATGPLEGGAHGRRGAVYSKGRAGAAEFLGSWRECRWRPAVRLSVLPSLTLLPRACLCRGQGRRGPSTRPQWQRERQLRVRGAPDPPRARGALGGPKKARERLRAHQ

SEQ ID NO: 852681 - protein, 303 aa, Homo sapiens; identical to SEQ ID NO: 852664

SEQ ID NO: 852682 - protein, 303 aa, Homo sapiens; identical to SEQ ID NO: 852664

SEQ ID NO: 852683 - protein, 303 aa, Homo sapiens; identical to SEQ ID NO: 852664

SEQ ID NO: 852684 - protein, 303 aa, Homo sapiens; identical to SEQ ID NO: 852664

SEQ ID NO: 852685 - protein, 303 aa, Homo sapiens; identical to SEQ ID NO: 852664

SEQ ID NO: 852686 - protein, 303 aa, Homo sapiens; identical to SEQ ID NO: 852664

SEQ ID NO: 852687 - protein, 303 aa, Homo sapiens; identical to SEQ ID NO: 852664

SEQ ID NO: 852688 - protein, 303 aa, Homo sapiens; identical to SEQ ID NO: 852664

SEQ ID NO: 852689 - protein, 183 aa, Homo sapiens
MIFEDCGDVPSEPKERGDFNHERGERKVCRFKLEWLGNCSGLNDETYGYKEGKPCIIIKLNRVLGFKPKPPKNESLETYPVMKYNPNVLPVQCTGKRDEDKDKVGNVEYFGLGNSPGFPLQYYPYYGKLLQPKYLQPLLAVQFTNLTMDTEIRIECKAYGENIGYSEKDRFQGRFDVKIEVKS

SEQ ID NO: 852690 - protein, 114 aa, Homo sapiens
MARGKAKEEGSWKKFIWNSEKKEFLGRTGGSWFKILLFYVIFYGCLAGIFIGTIQVMLLTISEFKPTYQDRVAPPGLTQIPQIQKTEISFRPNDPKSYEAYVLNIVRFLEKCAQ

SEQ ID NO: 852691 - protein, 183 aa, Homo sapiens; identical to SEQ ID NO: 852689

SEQ ID NO: 852692 - protein, 288 aa, Homo sapiens
MARGKAKEEGSWKKFIWNSEKKEFLGRTGGSWFKILLFYVIFYGCLAGIFIGTIQVMLLTISEFKPTYQDRVAPPGLTQIPQIQKTEISFRPNDPKSYEAYVLNIVRFLEKYKDSAQRDDMIFEDCGDVPSEPKERGDFNHERGERKVCRFKLEWLGNCSGLNDETYGYKEGKPCIIIKLNRVLGFKPKPPKNESLETYPVMKYNPNVLPVQCTGKRDEDKDKVGNVEYFGLGNSPGFPLQYYPYYGKLLQPKYLQPLLAVQFTNLTMDTEIRIECKAHITSVPSSIV

SEQ ID NO: 852693 - protein, 106 aa, Homo sapiens
MIQFSSDLNIRVPRSVHWQRDEDKDKVGNVEYFGLGNSPGFPLQYYPYYGKLLQPKYLQPLLAVQFTNLTMDTEIRIECKAYGENIGYSEKDRFQGRFDVKIEVKS

SEQ ID NO: 852694 - protein, 153 aa, Homo sapiens [sequence omitted]

SEQ ID NO: 852695 - protein, 153 aa, Homo sapiens [sequence omitted]

SEQ ID NO: 852696 - protein, 153 aa, Homo sapiens [sequence omitted]

SEQ ID NO: 852697 - protein, 153 aa, Homo sapiens [sequence omitted]

SEQ ID NO: 852698 - protein, 197 aa, Homo sapiens
  misc_feature (3)..(3): Xaa can be any naturally occurring amino acid
VLXHVPFPTHVPLPTHVRSQRMCRSQRMCRSQRMCRSQRMCRSQRMCRSQRMCRSQRMCRFPTHVPLPTFALPVVGMWEAHLSSCDFMSQTKDERLVSAMMVVSEAFPCPVWCLPHIVPDTGFLDPLLLSFLSFRSRSPVLYPAPQKPQCFSSAGLGHKEALGYGERLLLPRVYSQARGLPSSSQTSLKGSPFGAGR

SEQ ID NO: 852699 - protein, 153 aa, Homo sapiens [sequence omitted]

SEQ ID NO: 852700 - protein, 153 aa, Homo sapiens [sequence omitted]

SEQ ID NO: 852701 - protein, 153 aa, Homo sapiens [sequence omitted]

SEQ ID NO: 852702 - protein, 153 aa, Homo sapiens [sequence omitted]

SEQ ID NO: 852703 - protein, 153 aa, Homo sapiens [sequence omitted]

SEQ ID NO: 852704 - protein, 168 aa, Homo sapiens
EPFTRCCAQCPSISRLRAEDCFSSLLQGLVTEPARGATMRQKAVSLFLCYLLLFTCSGVEAGKKKCSESSDSGSGFWKALTFMAVGGGLAVAGLPALGFTGAGIAANSVAASLMSWSAILNGGGVPAGGLVATLQSLGAGGSSVVIGNIGALMGYATHKYLDSEEDEE

SEQ ID NO: 852705 - protein, 297 aa, Homo sapiens
LGPITGPQGTPPHQPRGGIPRARRWKASRPATQDPVTPARNSCPLQHSPARPLGFKELQEALGIQPRSPRQRLGPLPQLGPPGSGEGSAPPESPGCVVPESPGPRGADGRYDGGESRAPDLADPVAGGGRPAGRQPDQGPSISRLRAEDCFSSLLQGLVTEPARGATMRQKAVSLFLCYLLLFTCSGVEAGKKKCSESSDSGSGFWKALTFMAVGGGLAVAGLPALGFTGAGIAANSVAASLMSWSAILNGGGVPAGGLVATLQSLGAGGSSVVIGNIGALMGYATHKYLDSEEDEE

SEQ ID NO: 852706 - protein, 196 aa, Homo sapiens
MRGNEITVDLDELGTVGHPECSWNGPAPFIGPSAHGGTSTSPPRGVPRSSCAFHPSRPCSRRPNSRVLAVARIQAWLLRFLETGEAVQCPRQLRRAKVGPTGLATKASSSGLVLGPSHVRSRYSYGSTHFVFAPLDLGALSVPTPYLNGNFFRSQLDARRFEGTLGPDKVFLQEDATYLSFLVGLKLLPRLGLSDT

SEQ ID NO: 852707 - protein, 110 aa, Homo sapiens
MDAGKKKCSESSDSGSGFWKALTFMAVGGGLAVAGLPALGFTGAGIAANSVAASLMSWSAILNGGGVPAGGLVATLQSLGAGGSSVVIGNIGALMGYATHKYLDSEEDEE

SEQ ID NO: 852708 - protein, 168 aa, Homo sapiens; identical to SEQ ID NO: 852704

SEQ ID NO: 852709 - protein, 297 aa, Homo sapiens; identical to SEQ ID NO: 852705

SEQ ID NO: 852710 - protein, 297 aa, Homo sapiens; identical to SEQ ID NO: 852705

SEQ ID NO: 852711 - protein, 96 aa, Homo sapiens
FCPGSQCCVEDGPESIDSIIDMDAVCKRVTTLGLDVSVTISQDAGSLGSQKSKVKVVAGLVPSGGAEGKNPSLPKVTVFSAAEGGPGPSRLSVASP

SEQ ID NO: 852712 - protein, 109 aa, Homo sapiens
FCPGSQCCVEDGPESIDSIIDMDAVCKRVTTLGLDVSVTISQDAGRKKPFPAKGDCVFCRRRRARSLQAQCGFSLTPALELLPVPFLKLLCPGPPRRRRICRILPGAGL

SEQ ID NO: 852713 - protein, 26 aa, Homo sapiens
MAVEGQALPSAHVWKANSRVDAEHTC

SEQ ID NO: 852714 - protein, 108 aa, Homo sapiens
RCWTSWSSQRAKSTIATNTEGRSGLLRPHPAGDPTRGHPPSGVWPGKDKLFSLGIRSGREILICPPPLPPSLQKLRLIRGKNPSLPKVTVFSAAEGGPGPSRLSVASP

SEQ ID NO: 852715 - protein, 91 aa, Homo sapiens
GMAREDEFNLGELTTLHGFLSCLKFLSRKKPFPAKGDCVFCRRRRARSLQAQCGFSLTPALELLPVPFLKLLCPGPPRRRRICRILPGAGL

SEQ ID NO: 852716 - protein, 82 aa, Homo sapiens
RCWTSWSSQRAKSTIATNTEGRSGLLRPHPAGDPTRGHPPSGVWPGKDKLFSLGIRSGREILICPPPLPPSLQKLRLIRGKW

SEQ ID NO: 852717 - protein, 26 aa, Homo sapiens
MAVEGQALPSAHVWKANSRVDAEHTC

SEQ ID NO: 852718 - protein, 115 aa, Homo sapiens
MDKMRRDRDKSILLCFQETSSCLSGDGATTGGPGRLESGMKENSASSLLSKPRGRLRLKRSRMEEGIGTHLQTSTVSRKFGSIPSPRTHQPRSWQNPLTNQENTDPVCLLTTEWN

SEQ ID NO: 852719 - protein, 109 aa, Homo sapiens
GSRFPCQPPAVSSPSPASAEIPGPIETRTSLSATASHASAAGNPAISAPAEKVPGCRRRRREREERLGGSPGRGVVRLRERPGCGHTGLVNSHLLGSCSRTHSLPHPLF

SEQ ID NO: 852720 - protein, 105 aa, Homo sapiens
MDKMRRDRDKSILLCFQETSSCLSGDGATTGGPGRLESGMKENSASSLLSKPRGPGDNLRALKCFNTMYQLDFSTCPLDCPKAKSQRGQGPSRAGSLRASYRAAP

SEQ ID NO: 852721 - protein, 176 aa, Homo sapiens
MPHPCALGLWTQQLPSLPTERDYHSLCERQPIGRLLFREFCATRPELSRCVAFLDGVAEYEVTPDDKRKACGRQLTQNFLSHTGPDLIPEVPRQLVTNCTQRLEQGPCKDLFQELTRLTHEYLSVAPFADYLDSIYFNRFLQWKWLERQPVTKNTFRQYRVLGKGGFGEVSGQARA

SEQ ID NO: 852722 - protein, 576 aa, Homo sapiens
MELENIVANTVLLKAREGGGGNRKGKSKKWRQMLQFPHISQCEELRLSLERDYHSLCERQPIGRLLFREFCATRPELSRCVAFLDGVAEYEVTPDDKRKACGRQLTQNFLSHTGPDLIPEVPRQLVTNCTQRLEQGPCKDLFQELTRLTHEYLSVAPFADYLDSIYFNRFLQWKWLERQPVTKNTFRQYRVLGKGGFGEVCACQVRATGKMYACKKLEKKRIKKRKGEAMALNEKQILEKVNSRFVVSLAYAYETKDALCLVLTLMNGGDLKFHIYHMGQAGFPEARAVFYAAEICCGLEDLHRERIVYRDLKPENILLDDHGHIRISDLGLAVHVPEGQTIKGRVGTVGYMAPEVVKNERYTFSPDWWALGCLLYEMIAGQSPFQQRKKKIKREEVERLVKEVPEEYSERFSPQARSLCSQLLCKDPAERLGCRGGSAREVKEHPLFKKLNFKRLGAGMLEPPFKPDPQAIYCKDVLDIEQFSTVKGVELEPTDQDFYQKFATGSVPIPWQNEMVETECFQELNVFGLDGSVPPDLDWKGQPPAPPKKGLLQRLFSRQDCCGNCSDSEEELPTRL

SEQ ID NO: 852723 - protein, 544 aa, Homo sapiens
MLQFPHISQCEELRLSLERDYHSLCERQPIGRLLFREFCATRPELSRCVAFLDGVAEYEVTPDDKRKACGRQLTQNFLSHTGPDLIPEVPRQLVTNCTQRLEQGPCKDLFQELTRLTHEYLSVAPFADYLDSIYFNRFLQWKWLERQPVTKNTFRQYRVLGKGGFGEVCACQVRATGKMYACKKLEKKRIKKRKGEAMALNEKQILEKVNSRFVVSLAYAYETKDALCLVLTLMNGGDLKFHIYHMGQAGFPEARAVFYAAEICCGLEDLHRERIVYRDLKPENILLDDHGHIRISDLGLAVHVPEGQTIKGRVGTVGYMAPEVVKNERYTFSPDWWALGCLLYEMIAGQSPFQQRKKKIKREEVERLVKEVPEEYSERFSPQARSLCSQLLCKDPAERLGCRGGSAREVKEHPLFKKLNFKRLGAGMLEPPFKPDPQAIYCKDVLDIEQFSTVKGVELEPTDQDFYQKFATGSVPIPWQNEMVETECFQELNVFGLDGSVPPDLDWKGQPPAPPKKGLLQRLFSRQDCCGNCSDSEEELPTRL

SEQ ID NO: 852724 - protein, 576 aa, Homo sapiens; identical to SEQ ID NO: 852722

SEQ ID NO: 852725 - protein, 505 aa, Homo sapiens
MELENIVANTVLLKAREGGGGNRKGKSKKWRQMLQFPHISQCEELRLSLERDYHSLCERQPIGRLLFREFCATRPELSRCVAFLDGVAEYEVTPDDKRKACGRQLTQNFLSHTGPDLIPEVPRQLVTNCTQRLEQGPCKDLFQELTRLTHEYLSVAPFADYLDSIYFNRFLQWKWLERQPVTKNTFRQYRVLGKGGFGEVCACQVRATGKMYACKKLEKKRIKKRKGEAMALNEKQILEKVNSRFVVSLAYAYETKDALCLVLTLMNGGDLKFHIYHMGQAGFPEARAVFYAAEICCGLEDLHRERIVYRDLKPENILLDDHGHIRISDLGLAVHVPEGQTIKGRVGTVGYMAPEVVKNERYTFSPDWWALGCLLYEMIAGQSPFQQRKKKIKREEVERLVKEVPEEYSERFSPQARSLCSQLLCKDPAERLGCRGGSAREVKEHPLFKKLNFKRLGAGMLEPPFKPDPQAIYCKDVLDIEQFSTVKGVELEPTDQDFHCPGRPR

SEQ ID NO: 852726 - protein, 402 aa, Homo sapiens
MELENIVANTVLLKAREGGGGNRKGKSKKWRQMLQFPHISQCEELRLSLERDYHSLCERQPIGRLLFREFCATRPELSRCVAFLDGVAEYEVTPDDKRKACGRQLTQNFLSHTGPDLIPEVPRQLVTNCTQRLEQGPCKDLFQELTRLTHEYLSVAPFADYLDSIYFNRFLQWKWLERQPVTKNTFRQYRVLGKGGFGEVCACQVRATGKMYACKKLEKKRIKKRKGEAMALNEKQILEKVNSRFVVSLAYAYETKDALCLVLTLMNGGDLKFHIYHMGQAGFPEARAVFYAAEICCGLEDLHRERIVYRDLKPENILLDDHGPGPSLGQRCVPSALLRGARGFLYLCICTNVYSDQSILNSRRRPGAPALAPGGSQPWLGERELAEEPLPNSRLLWPSLDG

SEQ ID NO: 852727 - protein, 176 aa, Homo sapiens
RAAPSRADRHPASALARDPGRRRGPAGQAAPQPMELENIVANTVLLKAREGEAAGWAAGPGCVERECAASELRRATQPSDPLGPRALRLTPRPDTSLSGPSSSSSAPAPGIRGPGRGGGQAAALAAGGGEGVKEGETKREGWDRSPRRACLRGKPPPGERCKDAPRARGPDPSTLA

SEQ ID NO: 852728 - protein, 576 aa, Homo sapiens; identical to SEQ ID NO: 852722

SEQ ID NO: 852729 - protein, 576 aa, Homo sapiens; identical to SEQ ID NO: 852722

SEQ ID NO: 852730 - protein, 560 aa, Homo sapiens
MELENIVANTVLLKAREGGGGNRKGKSKKWRQMLQFPHISQCEELRLSLERDYHSLCERQPIGRLLFREFCATRPELSRCVAFLDGVAEYEVTPDDKRKACGRQLTQNFLSHTGPDLIPEVPRQLVTNCTQRLEQGPCKDLFQELTRLTHEYLSVAPFADYLDSIYFNRFLQWKWLERQPVTKNTFRQYRVLGKGGFGEVCACQVRATGKMYACKKLEKKRIKKRKGEAMALNEKQILEKVNSRFVVSLAYAYETKDALCLVLTLMNGGDLKFHIYHMGQAGFPEARAVFYAAEICCGLEDLHRERIVYRDLKPENILLDDHGHIRISDLGLAVHVPEGQTIKGRVGTVGYMAPEVVKNERYTFSPDWWALGCLLYEMIAGQSPFQQRKKKIKREEVERLVKEVPEEYSERFSPQARSLCSQLLCKDPAERLGCRGGSAREVKEHPLFKKLNFKRLGAGMLEPPFKPDPQAIYCKDVLDIEQFSTVKGVELEPTDQDFYQKFATGSVPIPWQNEMVETECFQELNVFGLDGSVPPDLDWKGQPPAPPKKGLLQRLFSRQR

SEQ ID NO: 852731 - protein, 475 aa, Homo sapiens
MELENIVANTVLLKAREGGGGNRKGKSKKWRQMLQFPHISQCEELRLSLERDYHSLCERQPIGRLLFREFCATRPELSRCVAFLDGVAEYEVTPDDKRKACGRQLTQNFLSHTGPDLIPEVPRQLVTNCTQRLEQGPCKDLFQELTRLTHEYLSVAPFADYLDSIYFNRFLQWKWLERQPVTKNTFRQYRVLGKGGFGEVCACQVRATGKMYACKKLEKKRIKKRKGEAMALNEKQILEKVNSRFVVSLAYAYETKDALCLVLTLMNGGDLKFHIYHMGQAGFPEARAVFYAAEICCGLEDLHRERIVYRDLKPENILLDDHGHIRISDLGLAVHVPEGQTIKGRVGTVGYMAPEVVKNERYTFSPDWWALGCLLYEMIAGQSPFQQRKKKIKREEVERLVKEVPEEYSERFSPQARSLCSQLLCKDPAERLGCRGGSAREVKEHPLFKKLNFKRLGAGMLEPPFKPDVSAAHSC

SEQ ID NO: 852732 - protein, 420 aa, Homo sapiens
MELENIVANTVLLKAREGGGGNRKGKSKKWRQMLQFPHISQCEELRLSLERDYHSLCERQPIGRLLFREFCATRPELSRCVAFLDGVAEYEVTPDDKRKACGRQLTQNFLSHTGPDLIPEVPRQLVTNCTQRLEQGPCKDLFQELTRLTHEYLSVAPFADYLDSIYFNRFLQWKWLERQPVTKNTFRQYRVLGKGGFGEVCACQVRATGKMYACKKLEKKRIKKRKGEAMALNEKQILEKVNSRFVVSLAYAYETKDALCLVLTLMNGGDLKFHIYHMGQAGFPEARAVFYAAEICCGLEDLHRERIVYRDLKPENILLESQPVTKYTFRQYRVLGKGGFGEVCPCPVRATGKMYACKKLEKKRIKKRKGEALALNEKQILEKVNSRFVVSLAYAYETKDAVCLVLTLMNGATQVPQSVL

SEQ ID NO: 852733 - protein, 143 aa, Homo sapiens
MELENIVANTVLLKAREGGGGNRKGKSKKWRQMLQFPHISQCEELRLSLERDYHSLCERQPIGRLLFREFCATRPELSRCVAFLDGVAEYEVTPDDKRKACGRQLTQNFLSHTGPDLIPESYSSASFCVCVHVCVSRGILLRK

SEQ ID NO: 852734 - protein, 483 aa, Homo sapiens
MSGGGPSGGGPGGSGRARTSSFAEPGGGGGGGGGGPGGSASGPGGTGGGKASVGAMGGGVGASSSGGGPGGSGGGGSGGPGAGTSFPPPGVKLGRDSGKVTTVVATLGQGPERSQEVAYTDIKVIGNGSFGVVYQARLAETRELVAIKKVLQDKRFKNRELQIMRKLDHCNIVRLRYFFYSSGEKKDELYLNLVLEYVPETVYRVARHFTKAKLTIPILYVKVYMYQLFRSLAYIHSQGVCHRDIKPQNLLVDPDTAVLKLCDFGSAKQLVRGEPNVSYICSRYYRAPELIFGATDYTSSIDVWSAGCVLAELLLGQPIFPGDSGVDQLVEIIKVLGTPTREQIREMNPNYTEFKFPQIKAHPWTKVFKSRTPPEAIALCSSLLEYTPSSRLSPLEACAHSFFDELRCLGTQLPNNRPLPPLFNFSAGELSIQPSLNAILIPPHLRSPAGTTTLTPSSQALTETPTSSDWQSTDATPTLTNSS

SEQ ID NO: 852735 - protein, 383 aa, Homo sapiens
MSGGGPSGGGPGGSGRARTSSFAEPGGGGGGGGGGPGGSASGPGGTGGGKASVGAMGGGVGASSSGGGPGGSGGGGSGGPGAGTSFPPPGVKLGRDSGKVTTVVATLGQGPERSQEVAYTDIKVIGNGSFGVVYQARLAETRELVAIKKVLQDKRFKNRELQIMRKLDHCNIVRLRYFFYSSGEKKDELYLNLVLEYVPETVYRVARHFTKAKLTIPILYVKVYMYQLFRSLAYIHSQGVCHRDIKPQNLLVDPDTAVLKLCDFGSAKQLVRGEPNVSYICSRYYRAPELIFGATDYTSSIDVWSAGCVLAELLLGQPIFPGDSGVDQLVEIIKVLGTPTREQIREMNPNYTEFKFPQIKAHPWTKGSILKQQSKGSVYVGTT

SEQ ID NO: 852736 - protein, 158 aa, Homo sapiens
VAWPRCTVAVATLGQGPERSQEVAYTDIKVIGNGSFGVVYQARLAETRELVAIKKVLQDKRFKNRELQIMRKLDHCNIVRLRYFFYSSGEKKDELYLNLVLEYVPETVYRVARHFTKAKLTIPILYVRCTCTSSSATVRRARRTSCASKLYIYKTNSG

SEQ ID NO: 852737 - protein, 396 aa, Homo sapiens
MKTPADTGDSGKVTTVVATLGQGPERSQEVAYTDIKVIGNGSFGVVYQARLAETRELVAIKKVLQDKRFKNRELQIMRKLDHCNIVRLRYFFYSSGEKKDELYLNLVLEYVPETVYRVARHFTKAKLTIPILYVKVYMYQLFRSLAYIHSQGVCHRDIKPQNLLVDPDTAVLKLCDFGSAKQLVRGEPNVSYICSRYYRAPELIFGATDYTSSIDVWSAGCVLAELLLGQPIFPGDSGVDQLVEIIKVLGTPTREQIREMNPNYTEFKFPQIKAHPWTKVFKSRTPPEAIALCSSLLEYTPSSRLSPLEACAHSFFDELRCLGTQLPNNRPLPPLFNFSAGELSIQPSLNAILIPPHLRSPAGTTTLTPSSQALTETPTSSDWQSTDATPTLTNSS

SEQ ID NO: 852738 - protein, 389 aa, Homo sapiens
VAWPRCTVAVATLGQGPERSQEVAYTDIKVIGNGSFGVVYQARLAETRELVAIKKVLQDKRFKNRELQIMRKLDHCNIVRLRYFFYSSGEKKDELYLNLVLEYVPETVYRVARHFTKAKLTIPILYVKVYMYQLFRSLAYIHSQGVCHRDIKPQNLLVDPDTAVLKLCDFGSAKQLVRGEPNVSYICSRYYRAPELIFGATDYTSSIDVWSAGCVLAELLLGQPIFPGDSGVDQLVEIIKVLGTPTREQIREMNPNYTEFKFPQIKAHPWTKVFKSRTPPEAIALCSSLLEYTPSSRLSPLEACAHSFFDELRCLGTQLPNNRPLPPLFNFSAGELSIQPSLNAILIPPHLRSPAGTTTLTPSSQALTETPTSSDWQSTDATPTLTNSS

SEQ ID NO: 852739 - protein, 280 aa, Homo sapiens
MRSGAALHKAVTSLILYVEVYMYQLFRSLAYIHSQGVCHRDIKPQNLLVDPDTAVLKLCDFGSAKQLVRGEPNVSYICSRYYRAPELIFGATDYTSSIDVWSAGCVLAELLLGQPIFPGDSGVDQLVEIIKVLGTPTREQIREMNPNYTEFKFPQIKAHPWTKVFKSRTPPEAIALCSSLLEYTPSSRLSPLEACAHSFFDELRCLGTQLPNNRPLPPLFNFSAGELSIQPSLNAILIPPHLRSPAGTTTLTPSSQALTETPTSSDWQSTDATPTLTNSS

SEQ ID NO: 852740 - protein, 483 aa, Homo sapiens; identical to SEQ ID NO: 852734

SEQ ID NO: 852741 - protein, 137 aa, Homo sapiens
MNPNYTEFKFPQIKAHPWTKVFKSRTPPEAIALCSSLLEYTPSSRLSPLEACAHSFFDELRCLGTQLPNNRPLPPLFNFSAGELSIQPSLNAILIPPHLRSPAGTTTLTPSSQALTETPTSSDWQSTDATPTLTNSS

SEQ ID NO: 852742 - protein, 483 aa, Homo sapiens; identical to SEQ ID NO: 852734

SEQ ID NO: 852743 - protein, 483 aa, Homo sapiens; identical to SEQ ID NO: 852734

SEQ ID NO: 852744 - protein, 168 aa, Homo sapiens
LSGWALVSSFGRWGCGKQPVITCRRHCGSEITGVCQCPGHLTLMSPAPIPQVFKSRTPPEAIALCSSLLEYTPSSRLSPLEACAHSFFDELRCLGTQLPNNRPLPPLFNFSAGELSIQPSLNAILIPPHLRSPAGTTTLTPSSQALTETPTSSDWQSTDATPTLTNSS

SEQ ID NO: 852745 - protein, 263 aa, Homo sapiens
MSGGGPSGGGPGGSGRARTSSFAEPGGGGGGGGGGPGGSASGPGGTGGGKASVGAMGGGVGASSSGGGPGGSGGGGSGGPGAGTSFPPPGVKLGRDSGKVTTVVATLGQGPERSQEVAYTDIKVIGNGSFGVVYQARLAETRELVAIKKVLQDKRFKNRELQIMRKLDHCNIVRLRYFFYSSGEKKDELYLNLVLEYVPETVYRVARHFTKAKLTIPILYVKVYMYQLFRSLAYIHSQGVCHRDIKPQNLPGGPGEWRELLMS

SEQ ID NO: 852746 - protein, 87 aa, Homo sapiens
TSSPRTCWWTLTLLSSSSAILAGGPGACWVAEEAGGTPTLASRVPLPISSHSAKQLVRGEPNVSYICSRYYRAPELIFGATDYTSSI

SEQ ID NO: 852747 - protein, 102 aa, Homo sapiens
MSGGGPSGGGPGGSGRARTSSFAEPGGGGGGGGGGPGGSASGPGGTGGGKASVGAMGGGVGASSSGGGPGGSGGGGSGGPGAGTSFPPPGVKLGREYYVAPV

SEQ ID NO: 852748 - protein, 484 aa, Homo sapiens
MRRLWGQSVEPLDSLCFPGSGSGRPWLRTGSCEDQMNGRLQKVTGTFTTITHWEQDSRFYSPLDHSLRLIEDCGVVYQARLAEIQGWIVYPLCSPGDSGKVTTVVATLGQGPERSQEVAYTDIKVIGNGSFGVVYQARLAETRELVAIKKVLQDKRFKNRELQIMRKLDHCNIVRLRYFFYSSGEKKDELYLNLVLEYVPETVYRVARHFTKAKLTIPILYVKVYMYQLFRSLAYIHSQGVCHRDIKPQNLLVDPDTAVLKLCDFGSAKQLVRGEPNVSYICSRYYRAPELIFGATDYTSSIDVWSAGCVLAELLLGQPIFPGDSGVDQLVEIIKVLGTPTREQIREMNPNYTEFKFPQIKAHPWTKVFKSRTPPEAIALCSSLLEYTPSSRLSPLEACAHSFFDELRCLGTQLPNNRPLPPLFNFSAGELSIQPSLNAILIPPHLRSPAGTTTLTPSSQALTETPTSSDWQSTDATPTLTNSS

SEQ ID NO: 852749 - protein, 483 aa, Homo sapiens; identical to SEQ ID NO: 852734

SEQ ID NO: 852750 - protein, 483 aa, Homo sapiens; identical to SEQ ID NO: 852734

SEQ ID NO: 852751 - protein, 483 aa, Homo sapiens; identical to SEQ ID NO: 852734

SEQ ID NO: 852752 - protein, 483 aa, Homo sapiens; identical to SEQ ID NO: 852734

SEQ ID NO: 852753 - protein, 370 aa, Homo sapiens
MSGGGPSGGGPGGSGRARTSSFAEPGGGGGGGGGGPGGSASGPGGTGGGKASVGAMGGGVGASSSGGGPGGSGGGGSGGPGAGTSFPPPGVKLGRDSGKVTTVVATLGQGPERSQEVAYTDIKVIGNGSFGVVYQARLAETRELVAIKKVLQDKRFKNRELQIMRKLDHCNIVRLRYFFYSSGEKKDELYLNLVLEYVPETVYRVARHFTKAKLTIPILYVKVYMYQLFRSLAYIHSQGVCHRDIKPQNLLVDPDTAVLKLCDFGSAKQLVRGEPNVSYICSRYYRAPELIFGATDYTSSIDVWSAGCVLAELLLGQPIFPGDSGVDQLVEIIKVLGTPTREQIREMNPNYTEFKFPQIKAHPWTKVGQG

SEQ ID NO: 852754 - protein, 252 aa, Homo sapiens
MSGGGPSGGGPGGSGRARTSSFAEPGGGGGGGGGGPGGSASGPGGTGGGKASVGAMGGGVGASSSGGGPGGSGGGGSGGPGAGTSFPPPGVKLGRDSGKVTTVVATLGQGPERSQEVAYTDIKVIGNGSFGVVYQARLAETRELVAIKKVLQDKRFKNRELQIMRKLDHCNIVRLRYFFYSSGEKKDELYLNLVLEYVPETVYRVARHFTKAKLTIPILYVRCTCTSSSATVRRARRTSCASKLYIYKTNSG

SEQ ID NO: 852755 - protein, 50 aa, Homo sapiens
MSPAPIPQVFKSRTPPEAIALCSSLLEYTPSSRLSPLEACAHSFFDELRC

SEQ ID NO: 852756 - protein, 224 aa, Homo sapiens
MSSGKSARYNRFSGGPSNLPTPDVTTGTRMETTFGPAFSAVTTITKADGTSTYKQHCRTPSSSSTLAYSPRDEEDSMPPISTPRRSDSAISVRSLHSESSMSLRSTFSLPEEEEEPEPLVFAEQPSVKLCCQLCCSVFKDPVITTCGTRRGGDGLNQTTCPVAKQTTGGDKSRAEHWAHEHAAGRKKGRPTRGAEAPTHNGDKDDKPRQNNRKKDAGATQDDKT

SEQ ID NO: 852757 - protein, 122 aa, Homo sapiens
MSLRSTFSLPEEEEEPEPLVFAEQPSVKLCCQLCCSVFKDPVITTCGHTFCRRCALKSEKCPVDNVKLTVVVNNIAVAEQIGELFIHCRHGCRVAGSGKPPIFEVDPRGCPFTIKLSARKDH

SEQ ID NO: 852758 - protein, 670 aa, Homo sapiens
MSSGKSARYNRFSGGPSNLPTPDVTTGTRMETTFGPAFSAVTTITKADGTSTYKQHCRTPSSSSTLAYSPRDEEDSMPPISTPRRSDSAISVRSLHSESSMSLRSTFSLPEEEEEPEPLVFAEQPSVKLCCQLCCSVFKDPVITTCGHTFCRRCALKSEKCPVDNVKLTVVVNNIAVAEQIGELFIHCRHGCRVAGSGKPPIFEVDPRGCPFTIKLSARKDHEGSCDYRPVRCPNNPSCPPLLRMNLEAHLKECEHIKCPHSKYGCTFIGNQDTYETHLETCRFEGLKEFLQQTDDRFHEMHVALAQKDQEIAFLRSMLGKLSEKIDQLEKSLELKFDVLDENQSKLSEDLMEFRRDASMLNDELSHINARLNMGILGSYDPQQIFKCKGTFVGHQGPVWCLCVYSMGDLLFSGSSDKTIKVWDTCTTYKCQKTLEGHDGIVLALCIQGCKLYSGSADCTIIVWDIQNLQKVNTIRAHDNPVCTLVSSHNVLFSGSLKAIKVWDIVGTELKLKKELTGLNHWVRALVAAQSYLYSGSYQTIKIWDIRTLDCIHVLQTSGGSVYSIAVTNHHIVCGTYENLIHVWDIESKEQVRTLTGHVGTVYALAVISTPDQTKVFSASYDRSLRVWSMDNMICTQTLLRHQGSVTALAVSRGRLFSGAVDSTVKVWTC

SEQ ID NO: 852759 - protein, 641 aa, Homo sapiens
METTFGPAFSAVTTITKADGTSTYKQHCRTPSSSSTLAYSPRDEEDSMPPISTPRRSDSAISVRSLHSESSMSLRSTFSLPEEEEEPEPLVFAEQPSVKLCCQLCCSVFKDPVITTCGHTFCRRCALKSEKCPVDNVKLTVVVNNIAVAEQIGELFIHCRHGCRVAGSGKPPIFEVDPRGCPFTIKLSARKDHEGSCDYRPVRCPNNPSCPPLLRMNLEAHLKECEHIKCPHSKYGCTFIGNQDTYETHLETCRFEGLKEFLQQTDDRFHEMHVALAQKDQEIAFLRSMLGKLSEKIDQLEKSLELKFDVLDENQSKLSEDLMEFRRDASMLNDELSHINARLNMGILGSYDPQQIFKCKGTFVGHQGPVWCLCVYSMGDLLFSGSSDKTIKVWDTCTTYKCQKTLEGHDGIVLALCIQGCKLYSGSADCTIIVWDIQNLQKVNTIRAHDNPVCTLVSSHNVLFSGSLKAIKVWDIVGTELKLKKELTGLNHWVRALVAAQSYLYSGSYQTIKIWDIRTLDCIHVLQTSGGSVYSIAVTNHHIVCGTYENLIHVWDIESKEQVRTLTGHVGTVYALAVISTPDQTKVFSASYDRSLRVWSMDNMICTQTLLRHQGSVTALAVSRGRLFSGAVDSTVKVWTC

SEQ ID NO: 852760 - protein, 670 aa, Homo sapiens; identical to SEQ ID NO: 852758

SEQ ID NO: 852761 - protein, 362 aa, Homo sapiens
QRTQKTTARYEVWVVKKIDQLEKSLELKFDVLDENQSKLSEDLMEFRRDASMLNDELSHINARLNMGILGSYDPQQIFKCKGTFVGHQGPVWCLCVYSMGDLLFSGSSDKTIKVWDTCTTYKCQKTLEGHDGIVLALCIQGCKLYSGSADCTIIVWDIQNLQKVNTIRAHDNPVCTLVSSHNVLFSGSLKAIKVWDIVGTELKLKKELTGLNHWVRALVAAQSYLYSGSYQTIKIWDIRTLDCIHVLQTSGGSVYSIAVTNHHIVCGTYENLIHVWDIESKEQVRTLTGHVGTVYALAVISTPDQTKVFSASYDRSLRVWSMDNMICTQTLLRHQGSVTALAVSRGRLFSGAVDSTVKVWTC

SEQ ID NO: 852762 - protein, 608 aa, Homo sapiens
MSSGKSARYNRFSGGPSNLPTPDVTTGTRMETTFGPAFSAVTTITKADGTSTYKQHCRTPSSSSTLAYSPRDEEDSMPPISTPRRSDSAISVRSLHSESSMSLRSTFSLPEEEEEPEPLVFAEQPSVKLCCQLCCSVFKDPVITTCGHTFCRRCALKSEKCPVDNVKLTVVVNNIAVAEQIGELFIHCRHGCRVAGSGKPPIFEVDPRGCPFTIKLSARKDHEGSCDYRPVRCPNNPSCPPLLRMNLEAHLKECEHIKCPHSKYGCTFIGNQDTYETHLETCRFEGLKEFLQQTDDRFHEMHVALAQKDQEIAFLRSMLGKLSEKIDQLEKSLELKFDVLDENQSKLSEDLMEFRRDASMLNDELSHINARLNMGILGSYDPQQIFKCKGTFVGHQGPVWCLCVYSMGDLLFSGSSDKTIKVWDTCTTYKCQKTLEGHDGIVLALCIQGCKLYSGSADCTIIVWDIQNLQKVNTIRAHDNPVCTLVSSHNVLFSGSLKAIKVWDIVGTELKLKKELTGLNHWVRALVAAQSYLYSGSYQTIKIWDIRLDVTSKVVGAHHVCNPLWARTSGEGQDGTRQDGSGTETMSNAGWDNDKNGGQEETHRGGTH

SEQ ID NO: 852763 - protein, 427 aa, Homo sapiens
MSSGKSARYNRFSGGPSNLPTPDVTTGTRMETTFGPAFSAVTTITKADGTSTYKQHCRTPSSSSTLAYSPRDEEDSMPPISTPRRSDSAISVRSLHSESSMSLRSTFSLPEEEEEPEPLVFAEQPSVKLCCQLCCSVFKDPVITTCGHTFCRRCALKSEKCPVDNVKLTVVVNNIAVAEQIGELFIHCRHGCRVAGSGKPPIFEVDPRGCPFTIKLSARKDHEGSCDYRPVRCPNNPSCPPLLRMNLEAHLKECEHIKCPHSKYGCTFIGNQDTYETHLETCRFEGLKEFLQQTDDRFHEMHVALAQKDQEIAFLRSMLGKLSEKIDQLEKSLELKFDVLDENQSKLSEDLMEFRRDASMLNDELSHINARLNMGILGSYDPQQIFKCKGTFVGHQGPVWCLCVYSMGDCKPVAWPATCPASTWLPR

SEQ ID NO: 852764 - protein, 122 aa, Homo sapiens
MSSGKSARYNRFSGGPSNLPTPDVTTGTRMETTFGPAFSAVTTITKADGTSTYKQHCRTPSSSSTLAYSPRDEEDSMPPISTPRRSDSAISVRSLHSEELRREARRSPRQSTRPRAPAFHLC

SEQ ID NO: 852765 - protein, 81 aa, Homo sapiens
MSSGKSARYNRFSGGPSNLPTPDVTTGVRVCPSASPTSPGPPACPRDLVLPAELPAQSRPELGSQGSSVGGGVVCVCVCVR

SEQ ID NO: 852766 - protein, 570 aa, Homo sapiens
MSLRSTFSLPEEEEEPEPLVFAEQPSVKLCCQLCCSVFKDPVITTCGHTFCRRCALKSEKCPVDNVKLTVVVNNIAVAEQIGELFIHCRHGCRVAGSGKPPIFEVDPRGCPFTIKLSARKDHEGSCDYRPVRCPNNPSCPPLLRMNLEAHLKECEHIKCPHSKYGCTFIGNQDTYETHLETCRFEGLKEFLQQTDDRFHEMHVALAQKDQEIAFLRSMLGKLSEKIDQLEKSLELKFDVLDENQSKLSEDLMEFRRDASMLNDELSHINARLNMGILGSYDPQQIFKCKGTFVGHQGPVWCLCVYSMGDLLFSGSSDKTIKVWDTCTTYKCQKTLEGHDGIVLALCIQGCKLYSGSADCTIIVWDIQNLQKVNTIRAHDNPVCTLVSSHNVLFSGSLKAIKVWDIVGTELKLKKELTGLNHWVRALVAAQSYLYSGSYQTIKIWDIRTLDCIHVLQTSGGSVYSIAVTNHHIVCGTYENLIHVWDIESKEQVRTLTGHVGTVYALAVISTPDQTKVFSASYDRSLRVWSMDNMICTQTLLRHQGSVTALAVSRGRLFSGAVDSTVKVWTC

SEQ ID NO: 852767 - protein, 151 aa, Homo sapiens
GSRPGPERRGTTRPGGRSGLALPARASSPFPGRRPRGHHEAGWRRCRSRAAAGGRCFPRTVDASLEHELRQECPLQPLLRGAQQSSHPRRHHRGLLRPPSRPEWKRPSDPPFQPSPPSQKLTGPAPTSSTAGHPPPPAPLPTPRGTRRTAW

SEQ ID NO: 852768 - protein, 641 aa, Homo sapiens; identical to SEQ ID NO: 852759

SEQ ID NO: 852769 - protein, 594 aa, Homo sapiens
MPPISTPRRSDSAISVRSLHSESSMSLRSTFSLPEEEEEPEPLVFAEQPSVKLCCQLCCSVFKDPVITTCGHTFCRRCALKSEKCPVDNVKLTVVVNNIAVAEQIGELFIHCRHGCRVAGSGKPPIFEVDPRGCPFTIKLSARKDHEGSCDYRPVRCPNNPSCPPLLRMNLEAHLKECEHIKCPHSKYGCTFIGNQDTYETHLETCRFEGLKEFLQQTDDRFHEMHVALAQKDQEIAFLRSMLGKLSEKIDQLEKSLELKFDVLDENQSKLSEDLMEFRRDASMLNDELSHINARLNMGILGSYDPQQIFKCKGTFVGHQGPVWCLCVYSMGDLLFSGSSDKTIKVWDTCTTYKCQKTLEGHDGIVLALCIQGCKLYSGSADCTIIVWDIQNLQKVNTIRAHDNPVCTLVSSHNVLFSGSLKAIKVWDIVGTELKLKKELTGLNHWVRALVAAQSYLYSGSYQTIKIWDIRTLDCIHVLQTSGGSVYSIAVTNHHIVCGTYENLIHVWDIESKEQVRTLTGHVGTVYALAVISTPDQTKVFSASYDRSLRVWSMDNMICTQTLLRHQGSVTALAVSRGRLFSGAVDSTVKVWTC

SEQ ID NO: 852770 - protein, 670 aa, Homo sapiens; identical to SEQ ID NO: 852758

SEQ ID NO: 852771 - protein, 427 aa, Homo sapiens; identical to SEQ ID NO: 852763

SEQ ID NO: 852772 - protein, 457 aa, Homo sapiens
MSSGKSARYNRFSGGPSNLPTPDVTTGTRMETTFGPAFSAVTTITKADGTSTYKQHCRTPSSSSTLAYSPRDEEDSMPPISTPRRSDSAISVRSLHSESSMSLRSTFSLPEEEEEPEPLVFAEQPSVKLCCQLCCSVFKDPVITTCGHTFCRRCALKSEKCPVDNVKLTVVVNNIAVAEQIGELFIHCRHGCRVAGSGKPPIFEVDPRGCPFTIKLSARKDHEGSCDYRPVRCPNNPSCPPLLRMNLEAHLKECEHIKCPHSKYGCTFIGNQDTYETHLETCRFEGLKEFLQQTDDRFHEMHVALAQKDQEIAFLRSMLGKLSEKIDQLEKSLELKFDVLDENQSKLSEDLMEFRRDASMLNDELSPINAAAVNMGILSSYDLSQICSAKDLCGPPARVVFLRSPRVTALRPPVQAPGALPPFSSRGPGSGPPGTTGTPLWPPAPRPAFRSPRVGKI

SEQ ID NO: 852773 - protein, 113 aa, Homo sapiens
GSRPGPERRGTTRPGGRSGLALPARASSPFPGRRPRGHHEAGWRRCRSRAAAGGRCFPRTVDASLEHELRQECPLQPLLRGAQQSSHPRRHHRDQNGNDLRTRLFSRHHHHKS

SEQ ID NO: 852774 - protein, 151 aa, Homo sapiens
SCNILRLKKAHRRQAVLRHIFHTGSIKPELHALDFLIFFLFCSEYRPKIKGEHPGLSIGDVAKKLGEMWNNTAADDKQPYEKKAAKLKEKYEKDIAAYRAKGKPDAAKKGVVKAEKSKKKKEEEEDEEDEEDEEEEEDEEDEDEEEDDDDE

SEQ ID NO: 852775 - protein, 121 aa, Homo sapiens
PKRPPSAFFLFCSEYRPKIKGEHPGLSIGDVAKKLGEMWNNTAADDKQPYEKKAAKLKEKYEKDIAAYRAKGKPDAAKKGVVKAEKSKKKKEEEEDEEDEEDEEEEEDEEDEDEEEDDDDE

SEQ ID NO: 852776 - protein, 108 aa, Homo sapiens
LQSGESEEAASGSRSHSHWYIELHRDSARASESRTGTGRLCASLEEKYEKDIAAYRAKGKPDAAKKGVVKAEKSKKKKEEEEDEEDEEDEEEEEDEEDEDEEEDDDDE

SEQ ID NO: 852777 - protein, 144 aa, Homo sapiens
SLYQPNNFKCKKYKALSSPFILPQGFILPLFFLFCSEYRPKIKGEHPGLSIGDVAKKLGEMWNNTAADDKQPYEKKAAKLKEKYEKDIAAYRAKGKPDAAKKGVVKAEKSKKKKEEEEDEEDEEDEEEEEDEEDEDEEEDDDDE

SEQ ID NO: 852778 - protein, 94 aa, Homo sapiens
GYRAERVRRLRLAPALTAIEQPYEKKAAKLKEKYEKDIAAYRAKGKPDAAKKGVVKAEKSKKKKEEEEDEEDEEDEEEEEDEEDEDEEEDDDDE

SEQ ID NO: 852779 - protein, 219 aa, Homo sapiens
KLRLGTRLGVAQNKLEELKQQQKLDRQKELEKKRKLETNPDIKPSNVEPMEKEFGLCKTENKAKSGKQNSKKLYCQELKKVIEASDVVLEVLDARDPLGCRCPQVEEAIVQSGQKKLVLILNKSDLVPKENLESWLNYLKKELPTVVFRASTKPKDKGKITKRVKAKKNAAPFRSEVCFGKEGLWKLLGGFQETCSKAIRVGVIGEFQFITFYFLSVEI

SEQ ID NO: 852780 - protein, 162 aa, Homo sapiens
MAQYLSINDYSGHHRVRVTVILYSAERYLEEGYELMKSGFNLEELEKNNAQSIRAIKGPHLANSILFQSSGLTNGIIEEKDIHEELPKRKERKQEEREDDKDSDQETVDEEVDENSSGMFAAEETGEALSEETTAGEQSTRSFILDKIIEEDDAYDFSTDYV

SEQ ID NO: 852781 - protein, 537 aa, Homo sapiens
MTCHKRYKIQKKVREHHRKLRKEAKKRGHKKPRKDPGVPNSAPFKEALLREAELRKQRLEELKQQQKLDRQKELEKKRKLETNPDIKPSNVEPMEKEFGLCKTENKAKSGKQNSKKLYCQELKKVIEASDVVLEVLDARDPLGCRCPQVEEAIVQSGQKKLVLILNKSDLVPKENLESWLNYLKKELPTVVFRASTKPKDKGKITKRVKAKKNAAPFRSEVCFGKEGLWKLLGGFQETCSKAIRVGVIGFPNVGKSSIINSLKQEQMCNVGVSMGLTRSMQVVPLDKQITIIDSPSFIVSPLNSSSALALRSPASIEVVKPMEAASAILSQADARQVVLKYTVPGYRNSLEFFTVLAQRRGMHQKGGIPNVEGAAKLLWSEWTGASLAYYCHPPTSWTPPPYFNESIVVDMKSGFNLEELEKNNAQSIRAIKGPHLANSILFQSSGLTNGIIEEKDIHEELPKRKERKQEEREDDKDSDQETVDEEVDENSSGMFAAEETGEALSEETTAGEQSTRSFILDKIIEEDDAYDFSTDYV

SEQ ID NO: 852782 - protein, 550 aa, Homo sapiens [sequence omitted]

SEQ ID NO: 852783 - protein, 550 aa, Homo sapiens [sequence omitted]

SEQ ID NO: 852784 - protein, 537 aa, Homo sapiens; identical to SEQ ID NO: 852781

SEQ ID NO: 852785 - protein, 567 aa, Homo sapiens
MQVEAGGIGRGLCSFYSQYEKAKLKKASKRMTCHKRYKIQKKVREHHRKLRKEAKKRGHKKPRKDPGVPNSAPFKEALLREAELRKQRLEELKQQQKLDRQKELEKKRKLETNPDIKPSNVEPMEKEFGLCKTENKAKSGKQNSKKLYCQELKKVIEASDVVLEVLDARDPLGCRCPQVEEAIVQSGQKKLVLILNKSDLVPKENLESWLNYLKKELPTVVFRASTKPKDKGKITKRVKAKKNAAPFRSEVCFGKEGLWKLLGGFQETCSKAIRVGVIGFPNVGKSSIINSLKQEQMCNVGVSMGLTRSMQVVPLDKQITIIDSPSFIVSPLNSSSALALRSPASIEVVKPMEAASAILSQADARQVVLKYTVPGYRNSLEFFTVLAQRRGMHQKGGIPNVEGAAKLLWSEWTGASLAYYCHPPTSWTPPPYFNESIVVDMKSGFNLEELEKNNAQSIRAIKGPHLANSILFQSSGLTNGIIEEKDIHEELPKRKERKQEEREDDKDSDQETVDEEVDENSSGMFAAEETGEALSEETTAGEQSTRSFILDKIIEEDDAYDFSTDYV

SEQ ID NO: 852786 - protein, 537 aa, Homo sapiens; identical to SEQ ID NO: 852781

SEQ ID NO: 852787 - protein, 444 aa, Homo sapiens [sequence omitted]

SEQ ID NO: 852788 - protein, 550 aa, Homo sapiens [sequence omitted]

SEQ ID NO: 852789 - protein, 271 aa, Homo sapiens [sequence omitted]

SEQ ID NO: 852790 - protein, 377 aa, Homo sapiens
MCFFVELKKASKRMTCHKRYKIQKKVREHHRKLRKEAKKRGHKKPRKDPGVPNSAPFKEALLREAELRKQRLEELKQQQKLDRQKELEKKRKLETNPDIKPSNVEPMEKEFGLCKTENKAKSGKQNSKKLYCQELKKVIEASDVVLEVLDARDPLGCRCPQVEEAIVQSGQKKLVLILNKSDLVPKENLESWLNYLKKELPTVVFRASTKPKDKGKITKRVKAKKNAAPFRSEVCFGKEGLWKLLGGFQETCSKAIRVGVIGFPNVGKSSIINSLKQEQMCNVGVSMGLTRSMQVVPLDKQITIIDSPSFIVSPLNSSSALALRSPASIEVVKPMEAASAILSQADARQVKGPLLMSSLEPSSFIISILSRKILEVF

SEQ ID NO: 852791 - protein, 364 aa, Homo sapiens
MTCHKRYKIQKKVREHHRKLRKEAKKRGHKKPRKDPGVPNSAPFKEALLREAELRKQRLEELKQQQKLDRQKELEKKRKLETNPDIKPSNVEPMEKEFGLCKTENKAKSGKQNSKKLYCQELKKVIEASDVVLEVLDARDPLGCRCPQVEEAIVQSGQKKLVLILNKSDLVPKENLESWLNYLKKELPTVVFRASTKPKDKGKITKRVKAKKNAAPFRSEVCFGKEGLWKLLGGFQETCSKAIRVGVIGFPNVGKSSIINSLKQEQMCNVGVSMGLTRSMQVVPLDKQITIIDSPSFIVSPLNSSSALALRSPASIEVVKPMEAASAILSQADARQVKGPLLMSSLEPSSFIISILSRKILEVF

SEQ ID NO: 852792 - protein, 364 aa, Homo sapiens; identical to SEQ ID NO: 852791

SEQ ID NO: 852793 - protein, 543 aa, Homo sapiens
MCFFVELKKASKRMTCHKRYKIQKKVREHHRKLRKEAKKRGHKKPRKDPGVPNSAPFKEALLREAELRKQRLEELKQQQKLDRQKELEKKRKLETNPDIKPSNVEPMEKEFGLCKTENKAKSGKQNSKKLYCQELKKVIEASDVVLEVLDARDPLGCRCPQVEEAIVQSGQKKLVLILNKSDLVPKENLESWLNYLKKELPTVVFRASTKPKDKGKITKRVKAKKNAAPFRSEVCFGKEGLWKLLGGFQETCSKAIRVGVIGFPNVGKSSIINSLKQEQMCNVGVSMGLTRSMQVVPLDKQITIIDSPSFIVSPLNSSSALALRSPASIEVVKPMEAASAILSQADARQVVLKYTVPGYRNSLEFFTVLAQRRGMHQKGGIPNVEGAAKLLWSEWTGASLAYYCHPPTSWTPPPYFNESIVVDMKSGFNLEELEKNNAQSIRAIKGPHLANSILFQSSGLTNGIIEEKDIHEELPKRKERKQEEREDDKDSDQETVDEEVDENSSGMFAAEETGEALSEETTAGEAGKRGSNEAAWYRITFTF

SEQ ID NO: 852794 - protein, 508 aa, Homo sapiens
MCFFVELKKASKRMTCHKRYKIQKKVREHHRKLRKEAKKRGHKKPRKDPGVPNSAPFKEALLREAELRKQRLEELKQQQKLDRQKELEKKRKLETNPDIKPSNVEPMEKEFGLCKTENKAKSGKQNSKKLYCQELKKVIEASDVVLEVLDARDPLGCRCPQVEEAIVQSGQKKLVLILNKSDLVPKENLESWLNYLKKELPTVVFRASTKPKDKGKITKRVKAKKNAAPFRSEVCFGKEGLWKLLGGFQETCSKAIRVGVIGFPNVGKSSIINSLKQEQMCNVGVSMGLTRSMQVVPLDKQITIIDSPSFIVSPLNSSSALALRSPASIEVVKPMEAASAILSQADARQVVLKYTVPGYRNSLEFFTVLAQRRGMHQKGGIPNVEGAAKLLWSEWTGASLAYYCHPPTSWTPPPYFNESIVVDMKSGFNLEELEKNNAQSIRAIKGPHLANSILFQSSGLTNGIIEEKDIHEELPKRKERKQEEREDDKDSDQETVDEEVDVSVSSMS

SEQ ID NO: 852795 - protein, 400 aa, Homo sapiens
MCFFVELKKASKRMTCHKRYKIQKKVREHHRKLRKEAKKRGHKKPRKDPGVPNSAPFKEALLREAELRKQRLEELKQQQKLDRQKELEKKRKLETNPDIKPSNVEPMEKEFGLCKTENKAKSGKQNSKKLYCQELKKVIEASDVVLEVLDARDPLGCRCPQVEEAIVQSGQKKLVLILNKSDLVPKENLESWLNYLKKELPTVVFRASTKPKDKGKITKRVKAKKNAAPFRSEVCFGKEGLWKLLGGFQETCSKAIRVGVIGFPNVGKSSIINSLKQEQMCNVGVSMGLTRSMQVVPLDKQITIIDSPSLTNGIIEEKDIHEELPKRKERKQEEREDDKDSDQETVDEEVDENSSGMFAAEETGEALSEETTAGEQSTRSFILDKIIEEDDAYDFSTDYV

SEQ ID NO: 852796 - protein, 397 aa, Homo sapiens
MCFFVELKKASKRMTCHKRYKIQKKVREHHRKLRKEAKKRGHKKPRKDPGVPNSAPFKEALLREAELRKQRLEELKQQQKLDRQKELEKKRKLETNPDIKPSNVEPMEKEFGLCKTENKAKSGKQNSKKLYCQELKKVIEASDVVLEVLDARDPLGCRCPQVEEAIVQSGQKKLVLILNKSDLVPKENLESWLNYLKKELPTVVFRASTKPKDKGKITKRVKAKKNAAPFRSEVCFGKEGLWKLLGGFQETCSKAIRVGVIGFPNVGKSSIINSLKQEQMCNVGVSMGLTRSMQVVPLDKQITIIDSPSFIVSPLNSSSALALRSPASIEVVKPMEAASAILSQADARQVVLKYTVPGYRNSLEFFTVLAQRRGMHQKGGIPNVEGAAKLLWSEWTG

SEQ ID NO: 852797 - protein, 550 aa, Homo sapiens [sequence omitted]

SEQ ID NO: 852798 - protein, 550 aa, Homo sapiens [sequence omitted]

SEQ ID NO: 852799 - protein, 550 aa, Homo sapiens [sequence omitted]

SEQ ID NO: 852800 - protein, 543 aa, Homo sapiens; identical to SEQ ID NO: 852793

SEQ ID NO: 852801 - protein, 543 aa, Homo sapiens; identical to SEQ ID NO: 852793

SEQ ID NO: 852802 - protein, 532 aa, Homo sapiens
MCFFVELKKASKRMTCHKRYKIQKKVREHHRKLRKEAKKRGHKKPRKDPGVPNSAPFKEALLREAELRKQRLEELKQQQKLDRQKELEKKRKLETNPDIKPSNVEPMEKEFGLCKTENKAKSGKQNSKKLYCQELKKVIEASDVVLEVLDARDPLGCRCPQVEEAIVQSGQKKLVLILNKSDLVPKENLESWLNYLKKELPTVVFRASTKPKDKGKITKRVKAKKNAAPFRSEVCFGKEGLWKLLGGFQETCSKAIRVGVIGFPNVGKSSIINSLKQEQMCNVGVSMGLTRSMQVVPLDKQITIIDSPSFIVSPLNSSSALALRSPASIEVVKPMEAASAILSQADARQVVLKYTVPGYRNSLEFFTVLAQRRGMHQKGGIPNVEGAAKLLWSEWTGASLAYYCHPPTSWTPPPYFNESIVVDMKSGFNLEELEKNNAQSIRAIKGPHLANSILFQSSGLTNGIIEEKDIHEELPKRKERKQEEREDDKDSDQETVDEEVDENSSGMFAAEETILDKIIEEDDAYDFSTDYV

SEQ ID NO: 852803 - protein, 310 aa, Homo sapiens
MCFFVELKKASKRMTCHKRYKIQKKVREHHRKLRKEAKKRGHKKPRKDPGVPNSAPFKEALLREAELRKQRLEELKQQQKLDRQKELEKKRKLETNPDIKPSNVEPMEKEFGLCKTENKAKSGKQNSKKLYCQELKKVIEASDVVLEVLDARDPLGCRCPQVEEAIVQSGQKKLVLILNKSDLVPKENLESWLNYLKKELPTVVFRASTKPKDKGKITKRVKAKKNAAPFRSEVCFGKEGLWKLLGGFQETCSKAIRVGVIGFPNVGKSSIINSLKQEQMCNVGVSMGLTRACKLAPLDKPVTILKWPEL

SEQ ID NO: 852804 - protein, 294 aa, Homo sapiens
MCFFVELKKASKRMTCHKRYKIQKKVREHHRKLRKEAKKRGHKKPRKDPGVPNSAPFKEALLREAELRKQRLEELKQQQKLDRQKELEKKRKLETNPDIKPSNVEPMEKEFGLCKTENKAKSGKQNSKKLYCQELKKVIEASDVVLEVLDARDPLGCRCPQVEEAIVQSGQKKLVLILNKSDLVPKENLESWLNYLKKELPTVVFRASTKPKDKGKITKRVKAKKNAAPFRSEVCFGKEGLWKLLGGFQETCSKAIRVGVIGSKCGESSFHSFTDRCFVGFPGVQGRNVPGSPP

SEQ ID NO: 852805 - protein, 311 aa, Homo sapiens
MQVEAGGIGRGLCSFYSQYEKAKLKKASKRMTCHKRYKIQKKVREHHRKLRKEAKKRGHKKPRKDPGVPNSAPFKEALLREAELRKQRLEELKQQQKLDRQKELEKKRKLETNPDIKPSNVEPMEKEFGLCKTENKAKSGKQNSKKLYCQELKKVIEASDVVLEVLDARDPLGCRCPQVEEAIVQSGQKKLVLILNKSDLVPKENLESWLNYLKKELPTVVFRASTKPKDKGKITKRVKAKKNAAPFRSEVCFGKEGLWKLLGGFQETCSKAIRVGVIGSKCGESSFHSFTDRCFVGFPGVQGRNVPGSPP

SEQ ID NO: 852806 - protein, 126 aa, Homo sapiens
RGSSTTAGEQSTRSFILEAIKGPHLANSILFQSSGLTNGIIEEKDIHEELPKRKERKQEEREDDKDSDQETVDEEVDENSSGMFAAEETGEALSEETTAGEQSTRSFILDKIIEEDDAYDFSTDYV

SEQ ID NO: 852807 - protein, 549 aa, Homo sapiens
MKRPKLKKASKRMTCHKRYKIQKKVREHHRKLRKEAKKRGHKKPRKDPGVPNSAPFKEALLREAELRKQRLEELKQQQKLDRQKELEKKRKLETNPDIKPSNVEPMEKEFGLCKTENKAKSGKQNSKKLYCQELKKVIEASDVVLEVLDARDPLGCRCPQVEEAIVQSGQKKLVLILNKSDLVPKENLESWLNYLKKELPTVVFRASTKPKDKGKITKRVKAKKNAAPFRSEVCFGKEGLWKLLGGFQETCSKAIRVGVIGFPNVGKSSIINSLKQEQMCNVGVSMGLTRSMQVVPLDKQITIIDSPSFIVSPLNSSSALALRSPASIEVVKPMEAASAILSQADARQVVLKYTVPGYRNSLEFFTVLAQRRGMHQKGGIPNVEGAAKLLWSEWTGASLAYYCHPPTSWTPPPYFNESIVVDMKSGFNLEELEKNNAQSIRAIKGPHLANSILFQSSGLTNGIIEEKDIHEELPKRKERKQEEREDDKDSDQETVDEEVDENSSGMFAAEETGEALSEETTAGEQSTRSFILDKIIEEDDAYDFSTDYV

SEQ ID NO: 852808 - protein, 493 aa, Homo sapiens
KLRLGTRLGVAQNKLEELKQQQKLDRQKELEKKRKLETNPDIKPSNVEPMEKEFGLCKTENKAKSGKQNSKKLYCQELKKVIEASDVVLEVLDARDPLGCRCPQVEEAIVQSGQKKLVLILNKSDLVPKENLESWLNYLKKELPTVVFRASTKPKDKGKITKRVKAKKNAAPFRSEVCFGKEGLWKLLGGFQETCSKAIRVGVIGFPNVGKSSIINSLKQEQMCNVGVSMGLTRSMQVVPLDKQITIIDSPSFIVSPLNSSSALALRSPASIEVVKPMEAASAILSQADARQVVLKYTVPGYRNSLEFFTVLAQRRGMHQKGGIPNVEGAAKLLWSEWTGASLAYYCHPPTSWTPPPYFNESIVVDMKSGFNLEELEKNNAQSIRAIKGPHLANSILFQSSGLTNGIIEEKDIHEELPKRKERKQEEREDDKDSDQETVDEEVDENSSGMFAAEETGEALSEETTAGEQSTRSFILDKIIEEDDAYDFSTDYV

SEQ ID NO: 852809 - protein, 403 aa, Homo sapiens
KLRLGTRLGVAQNKVEEAIVQSGQKKLVLILNKSDLVPKENLESWLNYLKKELPTVVFRASTKPKDKGKITKRVKAKKNAAPFRSEVCFGKEGLWKLLGGFQETCSKAIRVGVIGFPNVGKSSIINSLKQEQMCNVGVSMGLTRSMQVVPLDKQITIIDSPSFIVSPLNSSSALALRSPASIEVVKPMEAASAILSQADARQVVLKYTVPGYRNSLEFFTVLAQRRGMHQKGGIPNVEGAAKLLWSEWTGASLAYYCHPPTSWTPPPYFNESIVVDMKSGFNLEELEKNNAQSIRAIKGPHLANSILFQSSGLTNGIIEEKDIHEELPKRKERKQEEREDDKDSDQETVDEEVDENSSGMFAAEETGEALSEETTAGEQSTRSFILDKIIEEDDAYDFSTDYV

SEQ ID NO: 852810 - protein, 397 aa, Homo sapiens; identical to SEQ ID NO: 852796

SEQ ID NO: 852811 - protein, 397 aa, Homo sapiens; identical to SEQ ID NO: 852796

SEQ ID NO: 852812 - protein, 176 aa, Homo sapiens [sequence omitted]

SEQ ID NO: 852813 - protein, 508 aa, Homo sapiens; identical to SEQ ID NO: 852794

SEQ ID NO: 852814 - protein, 550 aa, Homo sapiens [sequence omitted]

SEQ ID NO: 852815 - protein, 126 aa, Homo sapiens; identical to SEQ ID NO: 852806

SEQ ID NO: 852816 - protein, 550 aa, Homo sapiens [sequence omitted]

SEQ ID NO: 852817 - protein, 96 aa, Homo sapiens
LTFYSSLSLVSPPCHSGPPLLVLLRSFPFCGLCCPSHRSRFYSPRALFFRFGVRNLLRSVLFMSPRGFLFVVSALGAARLTAISFVGPPGPPSIVL

SEQ ID NO: 852818 - protein, 535 aa, Homo sapiens
MCFFVELKKASKRMTCHKRYKIQKKVREHHRKLRKEAKKRGHKKPRKDPGVPNSAPFKEALLREAELRKQRLEELKQQQKLDRQKELEKKRKLETNPDIKPSNVEPMEKEFGLCKTENKAKSGKQNSKKLYCQELKKVIEASDVVLEVLDARDPLGCRCPQVEEAIVQSGQKKLVLILNKSDLVPKENLESWLNYLKKELPTVVFRASTKPKDKGKITKRVKAKKNAAPFRSEVCFGKEGLWKLLGGFQETCSKAIRVGVIGFPNVGKSSIINSLKQEQMCNVGVSMGLTRSMQVVPLDKQITIIDSPSFIVSPLNSSSALALRSPASIEVVKPMEAASAILSQADARQVVLKYTVPGYRNSLEFFTVLAQRRGMHQKGGIPNVEGAAKLLWSEWTGASLAYYCHPPTSWTPPPYFNESIVVDMKSGFNLEELEKNNAQSIRAIKGPHLANSILFQSSGLTNGIIEEKDIHEELPKRKERKQEEREDDKDSDQETVDEEVDENSSGMFAAEETGEALSEETTAVYRKAGLSFGMK

SEQ ID NO: 852819 - protein, 397 aa, Homo sapiens; identical to SEQ ID NO: 852796

SEQ ID NO: 852820 - protein, 263 aa, Homo sapiens
MTCHKRYKIQKKVREHHRKLRKEAKKRGHKKPRKDPGVPNSAPFKEALLREAELRKQRLEELKQQQKLDRQKELEKKRKLETNPDIKPSNVEPMEKEFGLCKTENKAKSGKQNSKKLYCQELKKVIEASDVVLEVLDARDPLGCRCPQVEEAIVQSGQKKLVLILNKSDLVPKENLESWLNYLKKELPTVVFRASTKPKDKGKITKRVKAKKNAAPFRSEVCFGKEGLWKLLGGFQETCSKAIRVGVIGEFQFITFYFLSVEI

SEQ ID NO: 852821 - protein, 183 aa, Homo sapiens
MCFFVELKKASKRMTCHKRYKIQKKVREHHRKLRKEAKKRGHKKPRKDPGVPNSAPFKEALLREAELRKQRLEELKQQQKLDRQKELEKKRKLETNPDIKPSNVEPMEKEFGLCKTENKAKSGKQNSKKLYCQELKKVIEASDVVLEVLDARDPLGCRCPQVEEAIVQSGQKKLVLILNKSGE

SEQ ID NO: 852822 - protein, 212 aa, Homo sapiens
MLPGPASGRQDRGTKISPPAKKPNCYGGRKRKRCGSDSQRGGHTQPPSAQPATGDAERPGRHENRPHLGDPGRWFASAQARAPLPRMSSAAPNPPVAVSGASYAAAAVTMAHYKAADSKREQFRRYLEKSGVLDTLTKVLVALYEEPEKPNSALDFLKHHLGAATPENPEIELLRLELAEMKEKYEAIVEENKKLKAKLAQYEPPQEEKRAE

SEQ ID NO: 852823 - protein, 117 aa, Homo sapiens
  misc_feature (4)..(4): Xaa can be any naturally occurring amino acid
  misc_feature (7)..(8): Xaa can be any naturally occurring amino acid
FGTXSAXXPLAAVTMAHYKAADSKREQFRRYLEKSGVLDTLTKVLVALYEEPEKPNSALDFLKHHLGAATPENPEIELLRLELAEMKEKYEAIVEENKKLKAKLAQYEPPQEEKRAE

SEQ ID NO: 852824 - protein, 130 aa, Homo sapiens
MLPGPASGRQDRGTKISPPAKKPNCYGGRKRKRCGSDSQRGGHTQPPSAQPATGDAERPGRHENRPHLGDPGRWFASAQARAPLPRMSSAAPNPPVAVSGASYAAAAVTMAHYKAADSKREQFRSVGSLI

SEQ ID NO: 852825 - protein, 147 aa, Homo sapiens
RRGWGHAGGSKPLVGSGWEWGRARRFGREGPEVVRRRRGCRTPSAFFLLGSRALATDPRCLFRPPTRSVSSSGVLVALYEEPEKPNSALDFLKHHLGAATPENPEIELLRLELAEMKEKYEAIVEENKKLKAKLAQYEPPQEEKRAE

SEQ ID NO: 852826 - protein, 212 aa, Homo sapiens; identical to SEQ ID NO: 852822

SEQ ID NO: 852827 - protein, 84 aa, Homo sapiens
RRGWGHAGGSKPLVGSGWEWGRARRFGREGPEVVRRRRGCRTPSAFFLLGSRALATDPRCLFRPPTRSVSSSGGTWRSRGCWTR

SEQ ID NO: 852828 - protein, 140 aa, Homo sapiens
MLPGPASGRQDRGTKISPPAKKPNCYGGRKRKRCGSDSQRGGHTQPPSAQPATGDAERPGRHENRPHLGDPGRWFASAQARAPLPRMSSAAPNPPVAVSGASYAAAAVTMAHYKAADSKREQFRRYLEKSGVLDTLTKVF

SEQ ID NO: 852829 - protein, 212 aa, Homo sapiens; identical to SEQ ID NO: 852822

SEQ ID NO: 852830 - protein, 140 aa, Homo sapiens; identical to SEQ ID NO: 852828

SEQ ID NO: 852831 - protein, 108 aa, Homo sapiens
CESLTSLMACFPHKKTTWTQMKTSPFLQFPLTQQDSQHFQVKSPLRLAENWNFFCYFLQSYIDVSGQVIKNNSYYGLRCASHCLRALCMLTLEMGAVFQVRELKLGGN

SEQ ID NO: 852832 - protein, 222 aa, Homo sapiens
LFSPANGSGLPSPRGGKAATEARGSGKARGFGPSSHISGSRPNRQTMGAPATRRCVEWLLGLYFLSHIPITLFMDLQAVLPRELYPVEFRNLLKWYAKEFKDPLLQEPPAWFKSFLFCELVFQLPFFPIATYAFLKGSCKWIRTPAIIYSVHTMTTLIPILSTFLFEDFSKASGFKGQRPETLHERLTLVSVYAPYLLIPFILLIFMLRSPYYKYEEKRKKK

SEQ ID NO: 852833 - protein, 167 aa, Homo sapiens
SGFQLPLSGPAHASPAPNPTLVRCFPRALSLSQPLLPSGGGERFVSFKVTSSLGLRFPAIPPLAGCQCLREVVWMKWCPKSHVRFALSFWFFVCLFGRALKYQSDPKEKIRVEIDLSEGLAPWLVQLGRSQIVTASRSGSSNFQSSGVNCHLFRLALQYWVRVTMIS

SEQ ID NO: 852834 - protein, 77 aa, Homo sapiens
GRARWLTPVIPALWEAEAGGSRGLERLGSSDLPTSVSLSAGITDVNHWAQPKPSPSKGTGMNRPIGLRVGKGVWARL

SEQ ID NO: 852835 - protein, 222 aa, Homo sapiens; identical to SEQ ID NO: 852832

SEQ ID NO: 852836 - protein, 62 aa, Homo sapiens
YMYRACMYPLHVPLHDGQRAQIHALEGGEVKIFSRNQEDNTGKYPDIISRIPKIKLPPVTCK

SEQ ID NO: 852837 - protein, 919 aa, Homo sapiens
MQRSIMSFFHPKKEGKAKKPEKEASNSSRETEPPPKAALKEWNGVVSESDSPVKRPGRKAARVLGSEGEEEDEALSPAKGQKPALDCSQVSPPRPATSPENNASLSDTSPMDSSPSGIPKRRTARKQLPKRTIQEVLEEQSEDEDREAKRKKEEEEEETPKESLTEAEVATEKEGEDGDQPTTPPKPLKTSKAETPTESVSEPEVATKQELQEEEEQTKPPRRAPKTLSSFFTPRKPAVKKEVKEEEPGAPGKEGAAEGPLDPSGYNPAKNNYHPVEDACWKPGQKVPYLAVARTFEKIEEVSARLRMVETLSNLLRSVVALSPPDLLPVLYLSLNHLGPPQQGLELGVGDGVLLKAVAQATGRQLESVRAEAAEKGDVGLVAENSRSTQRLMLPPPPLTASGVFSKFRDIARLTGSASTAKKIDIIKGLFVACRHSEARFIARSLSGRLRLGLAEQSVLAALSQAVSLTPPGQEFPPAMVDAGKGKTAEARKTWLEEQGMILKQTFCEVPDLDRIIPVLLEHGLERLPEHCKLSPGIPLKPMLAHPTRGISEVLKRFEEAAFTCEYKYDGQRAQIHALEGGEVKIFSRNQEDNTGKYPDIISRIPKIKLPSVTSFILDTEAVAWDREKKQIQPFQVLTTRKRKEVDASEIQVQVCLYAFDLIYLNGESLVREPLSRRRQLLRENFVETEGEFVFATSLDTKDIEQIAEFLEQSVKDSCEGLMVKTLDVDATYEIAKRSHNWLKLKKDYLDGVGDTLDLVVIGAYLGRGKRAGRYGGFLLASYDEDSEELQAICKLGTGFSDEELEEHHQSLKALVLPSPRPYVRIDGAVIPDHWLDPSAVWEVKCADLSLSPIYPAARGLVDSDKGISLRFPRFIRVREDKQPEQATTSAQVACLYRKQSQIQNQQGEDSGSDPEDTY

SEQ ID NO: 852838 - protein, 919 aa, Homo sapiens; identical to SEQ ID NO: 852837

SEQ ID NO: 852839 - protein, 377 aa, Homo sapiens [sequence omitted]

SEQ ID NO: 852840 - protein, 331 aa, Homo sapiens
EDLESWCCFFTRTYQRIPKIKLPSVTSFILDTEAVAWDREKKQIQPFQVLTTRKRKEVDASEIQVQVCLYAFDLIYLNGESLVREPLSRRRQLLRENFVETEGEFVFATSLDTKDIEQIAEFLEQSVKDSCEGLMVKTLDVDATYEIAKRSHNWLKLKKDYLDGVGDTLDLVVIGAYLGRGKRAGRYGGFLLASYDEDSEELQAICKLGTGFSDEELEEHHQSLKALVLPSPRPYVRIDGAVIPDHWLDPSAVWEVKCADLSLSPIYPAARGLVDSDKGISLRFPRFIRVREDKQPEQATTSAQVACLYRKQSQIQNQQGEDSGSDPEDTY

SEQ ID NO: 852841 - protein, 263 aa, Homo sapiens
MSQSLFSLPALQSLVREPLSRRRQLLRENFVETEGEFVFATSLDTKDIEQIAEFLEQSVKDSCEGLMVKTLDVDATYEIAKRSHNWLKLKKDYLDGVGDTLDLVVIGAYLGRGKRAGRYGGFLLASYDEDSEELQAICKLGTGFSDEELEEHHQSLKALVLPSPRPYVRIDGAVIPDHWLDPSAVWEVKCADLSLSPIYPAARGLVDSDKGISLRFPRFIRVREDKQPEQATTSAQVACLYRKQSQIQNQQGEDSGSDPEDTY

SEQ ID NO: 852842 - protein, 358 aa, Homo sapiens
MQRSIMSFFHPKKEGKAKKPEKEASNSSRETEPPPKAALKEWNGVVSESDSPVKRPGRKAARVLGSEGEEEDEALSPAKGQKPALDCSQVSPPRPATSPENNASLSDTSPMDSSPSGIPKRRTARKQLPKRTIQEVLEEQSEDEDREAKRKKEEEEEETPKESLTEAEVATEKEGEDGDQPTTPPKPLKTSKAETPTESVSEPEVATKQELQEEEEQTKPPRRAPKTLSSFFTPRKPAVKKEVKEEEPGAPGKEGAAEGPLDPSGYNPAKNNYHPVEDACWKPGQKVPYLAVARTFEKIEEVSARLRMVETLSNLLRSVVALSPPDLLPVLYLSLNHLGAWVQGMSWTDPRVIIAFAF

SEQ ID NO: 852843 - protein, 274 aa, Homo sapiens
MQRSIMSFFHPKKEGKAKKPEKEASNSSRETEPPPKAALKEWNGVVSESDSPVKRPGRKAARVLGSEGEEEDEALSPAKGQKPALDCSQVSPPRPATSPENNASLSDTSPMDSSPSGIPKRRTARKQLPKRTIQEVLEEQSEDEDREAKRKKEEEEEETPKESLTEAEVATEKEGEDGDQPTTPPKPLKTSSTDPTTASELEVDQEAESRTMTETDKLAQKSQQASTSHHRTQVKKLKKRTGQQAGHRDPSYRFAGVSILDVTALVHNAKILTC

SEQ ID NO: 852844 - protein, 919 aa, Homo sapiens; identical to SEQ ID NO: 852837

SEQ ID NO: 852845 - protein, 357 aa, Homo sapiens
MKPMTKEEWDARQSIIRKEQLTDEEKCWTGRENSDANMQRSIMSFFHPKKEGKAKKPEKEASNSSRETEPPPKAALKEWNGVVSESDSPVKRPGRKAARVLGSEGEEEDEALSPAKGQKPALDCSQVSPPRPATSPENNASLSDTSPMDSSPSGIPKRRTARKQLPKRTIQEVLEEQSEDEDREAKRKKEEEEEETPKESLTEAEVATEKEGEDGDQPTTPPKPLKTSSTDPTTASELEVDQEAGGRTMTETDKLAQKSQQASTSHHRTQVKKLKKRTGQQAGHRDPSYRFAGVSILEDSPGAQRKDPNVLDELKYTSLYRGEIHNHSRFHYTQTQEHTQRWFYQSHRQFIKQETLS

SEQ ID NO: 852846 - protein, 956 aa, Homo sapiens
MKPMTKEEWDARQSIIRKEQLTDEEKCWTGRENSDANMQRSIMSFFHPKKEGKAKKPEKEASNSSRETEPPPKAALKEWNGVVSESDSPVKRPGRKAARVLGSEGEEEDEALSPAKGQKPALDCSQVSPPRPATSPENNASLSDTSPMDSSPSGIPKRRTARKQLPKRTIQEVLEEQSEDEDREAKRKKEEEEEETPKESLTEAEVATEKEGEDGDQPTTPPKPLKTSKAETPTESVSEPEVATKQELQEEEEQTKPPRRAPKTLSSFFTPRKPAVKKEVKEEEPGAPGKEGAAEGPLDPSGYNPAKNNYHPVEDACWKPGQKVPYLAVARTFEKIEEVSARLRMVETLSNLLRSVVALSPPDLLPVLYLSLNHLGPPQQGLELGVGDGVLLKAVAQATGRQLESVRAEAAEKGDVGLVAENSRSTQRLMLPPPPLTASGVFSKFRDIARLTGSASTAKKIDIIKGLFVACRHSEARFIARSLSGRLRLGLAEQSVLAALSQAVSLTPPGQEFPPAMVDAGKGKTAEARKTWLEEQGMILKQTFCEVPDLDRIIPVLLEHGLERLPEHCKLSPGIPLKPMLAHPTRGISEVLKRFEEAAFTCEYKYDGQRAQIHALEGGEVKIFSRNQEDNTGKYPDIISRIPKIKLPSVTSFILDTEAVAWDREKKQIQPFQVLTTRKRKEVDASEIQVQVCLYAFDLIYLNGESLVREPLSRRRQLLRENFVETEGEFVFATSLDTKDIEQIAEFLEQSVKDSCEGLMVKTLDVDATYEIAKRSHNWLKLKKDYLDGVGDTLDLVVIGAYLGRGKRAGRYGGFLLASYDEDSEELQAICKLGTGFSDEELEEHHQSLKALVLPSPRPYVRIDGAVIPDHWLDPSAVWEVKCADLSLSPIYPAARGLVDSDKGISLRFPRFIRVREDKQPEQATTSAQVACLYRKQSQIQNQQGEDSGSDPEDTY

SEQ ID NO: 852847 - protein, 889 aa, Homo sapiens
MQRSIMAALKEWNGVVSESDSPVKRPGRKAARVLGSEGEEEDEALSPAKGQKPALDCSQVSPPRPATSPENNASLSDTSPMDSSPSGIPKRRTARKQLPKRTIQEVLEEQSEDEDREAKRKKEEEEEETPKESLTEAEVATEKEGEDGDQPTTPPKPLKTSKAETPTESVSEPEVATKQELQEEEEQTKPPRRAPKTLSSFFTPRKPAVKKEVKEEEPGAPGKEGAAEGPLDPSGYNPAKNNYHPVEDACWKPGQKVPYLAVARTFEKIEEVSARLRMVETLSNLLRSVVALSPPDLLPVLYLSLNHLGPPQQGLELGVGDGVLLKAVAQATGRQLESVRAEAAEKGDVGLVAENSRSTQRLMLPPPPLTASGVFSKFRDIARLTGSASTAKKIDIIKGLFVACRHSEARFIARSLSGRLRLGLAEQSVLAALSQAVSLTPPGQEFPPAMVDAGKGKTAEARKTWLEEQGMILKQTFCEVPDLDRIIPVLLEHGLERLPEHCKLSPGIPLKPMLAHPTRGISEVLKRFEEAAFTCEYKYDGQRAQIHALEGGEVKIFSRNQEDNTGKYPDIISRIPKIKLPSVTSFILDTEAVAWDREKKQIQPFQVLTTRKRKEVDASEIQVQVCLYAFDLIYLNGESLVREPLSRRRQLLRENFVETEGEFVFATSLDTKDIEQIAEFLEQSVKDSCEGLMVKTLDVDATYEIAKRSHNWLKLKKDYLDGVGDTLDLVVIGAYLGRGKRAGRYGGFLLASYDEDSEELQAICKLGTGFSDEELEEHHQSLKALVLPSPRPYVRIDGAVIPDHWLDPSAVWEVKCADLSLSPIYPAARGLVDSDKGISLRFPRFIRVREDKQPEQATTSAQVACLYRKQSQIQNQQGEDSGSDPEDTY

SEQ ID NO: 852848 - protein, 801 aa, Homo sapiens
MQRSIMSFFHPKKEGKAKKPEKEASNSSRETEPPPKAALKEWNGVVSESDSPVKRPGRKAARVLGSEGEEEDEALSPAKGQKPALDCSQVSPPRPATSPENNASLSDTSPMDSSPSGIPKRRTARKQLPKRTIQEVLEEQSEDEDREAKRKKEEEEEETPKESLTEAEVATEKEGEDGDQPTTPPKPLKTSKAETPTESVSEPEVATKQELQEEEEQTKPPRRAPKTLSSFFTPRKPAVKKEVKEEEPGAPGKEGAAEGPLDPSGYNPAKNNYHPVEDACWKPGQKVPYLAVARTFEKIEEVSARLRMVETLSNLLRSVVALSPPDLLPVLYLSLNHLGPPQQGLELGVGDGVLLKAVAQATGRQLESVRAEAAEKGDVGLVAENSRSTQRLMLPPPPLTASGVFSKFRDIARLTGSASTAKKIDIIKGLFVACRHSEARFIARSLSGRLRLGLAEQSVLAALSQAVSLTPPGQEFPPAMVDAGKGKTAEARKTWLEEQGMILKQTFCEVPDLDRIIPVLLEHGLERLPEHCKLSPGIPLKPMLAHPTRGISEVLKRFEEAAFTCEYKYDGQRAQIHALEGGEVKIFSRNQEDNTGKYPDIISRIPKIKLPSVTSFILDTEAVAWDREKKQIQPFQVLTTRKRKEVDASEIQVQVCLYAFDLIYLNGESLVREPLSRRRQLLRENFVETEGEFVFATSLDTKDIEQIAEFLEQSVKDSCEGLMVKTLDVDATYEIAKRSHNWLKLKKDYLDGVGDTLDLVVIGAYLGRGKRAGRYGGFLLASYDEDSEELQAICKVLGNWG

SEQ ID NO: 852849 - protein, 230 aa, Homo sapiens
TVSLSPSSRSLALSLPLLSLMSCLSPQGLSFLSISHSSQLPPFSTFYFKGVLFLFPSFTFCFSFYFCLLQGGVLFLFPYFTSYFCLLQGGACFFPFLPLPSPPTLGLDFEIPDPLFLSSSAQLQALVLPSPRPYVRIDGAVIPDHWLDPSAVWEVKCADLSLSPIYPAARGLVDSDKGISLRFPRFIRVREDKQPEQATTSAQVACLYRKQSQIQNQQGEDSGSDPEDTY

SEQ ID NO: 852850 - protein, 85 aa, Homo sapiens
YGLDFVAKLLWQPVNFKSQGRGVLCEGVDSDKGISLRFPRFIRVREDKQPEQATTSAQVACLYRKQSQIQNQQGEDSGSDPEDTY

SEQ ID NO: 852851 - protein, 108 aa, Homo sapiens
EGLKGAACTGAVTVCRQRRGEGPEPSRGYISGCELSGMGAHEPARSDTPSPLPPQLGSSSRNGPFRKSWKSRVRTRTEKPRGRRRRKVSPQKERSVCVCVCVCVKPRG

SEQ ID NO: 852852 - protein, 152 aa, Homo sapiens
MGLSYSHEPHTDWAKYFKGKKIHGEIDIKVEQAEFSDLNLVAHANGGFSVDMEVLRNGVKVVRSLKPDFVLIRQHAFSMARNGDYRSLVIGLQYAGIPSVNSLHSVYNFCDKPWVFAQMVRLHKKLGTEEFPLIDQTFYPNHKEMVSLGKIE

SEQ ID NO: 852853 - protein, 705 aa, Homo sapiens
MNYLRRRLSDSNFMANLPNGYMTDLQRPQPPPPPPGAHSPGATPGPGTATAERSSGVAPAASPAAPSPGSSGGGGFFSSLSNAVKQTTAAAAATFSEQVGGGSGGAGRGGAASRVLLVIDEPHTDWAKYFKGKKIHGEIDIKVEQAEFSDLNLVAHANGGFSVDMEVLRNGVKVVRSLKPDFVLIRQHAFSMARNGDYRSLVIGLQYAGIPSVNSLHSVYNFCDKPWVFAQMVRLHKKLGTEEFPLIDQTFYPNHKEMLSSTTYPVVVKMGHAHSGMGKVKVDNQHDFQDIASVVALTKTYATAEPFIDAKYDVRVQKIGQNYKAYMRTSVSGNWKTNTGSAMLEQIAMSDRYKLWVDTCSEIFGGLDICAVEALHGKDGRDHIIEVVGSSMPLIGDHQDEDKQLIVELVVNKMAQALPRQRQRDASPGRGSHGQTPSPGALPLGRQTSQQPAGPPAQQRPPPQGGPPQPGPGPQRQGPPLQQRPPPQGQQHLSGLGPPAGSPLPQRLPSPTSAPQQPASQAAPPTQGQGRQSRPVAGGPGAPPAARPPASPSPQRQAGPPQATRQTSVSGPAPPKASGAPPGGQQRQGPPQKPPGPAGPTRQASQAGPVPRTGPPTTQQPRPSGPGPAGRPKPQLAQKPSQDVPPPATAAAGGPPHPQLNKSQSLTNAFNLPEPAPPRPSLSQDEVKAETIRSLRKSFASLFSD

SEQ ID NO: 852854 - protein, 705 aa, Homo sapiens; identical to SEQ ID NO: 852853

SEQ ID NO: 852855 - protein, 509 aa, Homo sapiens
LRLSEPMSRNGVKVVRSLKPDFVLIRQHAFSMARNGDYRSLVIGLQYAGIPSVNSLHSVYNFCDKPWVFAQMVRLHKKLGTEEFPLIDQTFYPNHKEMLSSTTYPVVVKMGHAHSGMGKVKVDNQHDFQDIASVVALTKTYATAEPFIDAKYDVRVQKIGQNYKAYMRTSVSGNWKTNTGSAMLEQIAMSDRYKLWVDTCSEIFGGLDICAVEALHGKDGRDHIIEVVGSSMPLIGDHQDEDKQLIVELVVNKMAQALPRQRQRDASPGRGSHGQTPSPGALPLGRQTSQQPAGPPAQQRPPPQGGPPQPGPGPQRQGPPLQQRPPPQGQQHLSGLGPPAGSPLPQRLPSPTSAPQQPASQAAPPTQGQGRQSRPVAGGPGAPPAARPPASPSPQRQAGPPQATRQTSVSGPAPPKASGAPPGGQQRQGPPQKPPGPAGPTRQASQAGPVPRTGPPTTQQPRPSGPGPAGRPKPQLAQKPSQDVPPPATAAAGGPPHPQLKASPAQAQP

SEQ ID NO: 852856 - protein, 137 aa, Homo sapiens
PPGPPRHLADPPSATSCPAQSLPCQTRPPATNPSLKLLARVLVLLSSGSSHSILILFLLLHILLAHLSLPANHHPSAFSGPFQLPSQLRRPPCPTQLLCLRLTCPTACPWSKPFLCPPRHLTLRLETSLLIFPFVSN

SEQ ID NO: 852857 - protein, 705 aa, Homo sapiens; identical to SEQ ID NO: 852853

SEQ ID NO: 852858 - protein, 669 aa, Homo sapiens
MNYLRRRLSDSNFMANLPNGYMTDLQRPQPPPPPPGAHSPGATPGPGTATAERSSGVAPAASPAAPSPGSSGGGGFFSSLSNAVKQTTAAAAATFSEQVGGGSGGAGRGGAASRVLLVIDEPHTDWAKYFKGKKIHGEIDIKVEQAEFSDLNLVAHANGGFSVDMEVLRNGVKVVRSLKPDFVLIRQHAFSMARNGDYRSLVIGLQYAGIPSVNSLHSVYNFCDKPWVFAQMVRLHKKLGTEEFPLIDQTFYPNHKEMLSSTTYPVVVKMGHAHSGMGKVKVDNQHDFQDIASVVALTKTYATAEPFIDAKYDVRVQKIGQNYKAYMRTSVSGNWKTNTGSAMLEQIAMSDRYKLWVDTCSEIFGGLDICAVEALHGKDGRDHIIEVVGSSMPLIGDHQDEDKQLIVELVVNKMAQALPRQRQRDASPGRGSHGQTPSPGALPLGRQTSQQPAGPPAQQRPPPQGGPPQPGPGPQRQGPPLQQRPPPQGQQHLSGLGPPAGSPLPQRLPSPTSAPQQPASQAAPPTQGQGRQSRPVAGGPGAPPAARPPASPSPQRQAGPPQATRQTSVSGPAPPKASGAPPGGQQRQGPPQKPPGPAGPTRQASQAGPVPRTGPPTTQQPRPSGPGPAGRPKPQLAQKPSQDVPPPATAAAGGPPHPQLKASPAQAQP

SEQ ID NO: 852859 - protein, 554 aa, Homo sapiens
LDTHVIFGIDEGLGSGIRLGQCHDTCDVLEVMLVVNLDLAHANGGFSVDMEVLRNGVKVVRSLKPDFVLIRQHAFSMARNGDYRSLVIGLQYAGIPSVNSLHSVYNFCDKPWVFAQMVRLHKKLGTEEFPLIDQTFYPNHKEMLSSTTYPVVVKMGHAHSGMGKVKVDNQHDFQDIASVVALTKTYATAEPFIDAKYDVRVQKIGQNYKAYMRTSVSGNWKTNTGSAMLEQIAMSDRYKLWVDTCSEIFGGLDICAVEALHGKDGRDHIIEVVGSSMPLIGDHQDEDKQLIVELVVNKMAQALPRQRQRDASPGRGSHGQTPSPGALPLGRQTSQQPAGPPAQQRPPPQGGPPQPGPGPQRQGPPLQQRPPPQGQQHLSGLGPPAGSPLPQRLPSPTSAPQQPASQAAPPTQGQGRQSRPVAGGPGAPPAARPPASPSPQRQAGPPQATRQTSVSGPAPPKASGAPPGGQQRQGPPQKPPGPAGPTRQASQAGPVPRTGPPTTQQPRPSGPGPAGRPKPQLAQKPSQDVPPPATAAAGGPPHPQLKASPAQAQP

SEQ ID NO: 852860 - protein, 119 aa, Homo sapiens
RQPFRHGRLWRAAAMALRYPMAVGLNKGHKVTKNVSKPRHSRRRGRLTKHTKFVRDMIREVCGFAPYERRAMELLKVSKDKRALKFIKKRVGTHIRAKRKREELSNVLAAMRKAAAKKD

SEQ ID NO: 852861 - protein, 4346 aa, Homo sapiens
MPVPDGSVAAAGLGLGLPAADSPGHYQLLLSGRALADRYRRIYTAALNDRDQGGGSAGHPASRNKKILNKKKLKRKQKSKSKVKTRSKSENLENTVIIPDIKLHSNPSAFNIYCNVRHCVLEWQKKEISLAAASKNSVQSGESDSDEEEESKEPPIKLPKIIEVGLCEVFELIKETRFSHPSLCLRSLQALLNVLQGQQPEVLQSEPPEVLESLFQLLLEITVRSTGMNDSTGQSLTALSCACLFSLVASWGETGRTLQAISAILTNNGSHACQTIQVPTILNSLQRSVQAVLVGKIQIQDWFSNGIKKAALMHKWPLKEISVDEDDQCLLQNDGFFLYLLCKDGLYKIGSGYSGTVRGHIYNSTSRIRNRKEKKSWLGYAQGYLLYRDVNNHSMTAIRISPETLEQDGTVMLPDCHTEGQNILFTDGEYINQIAASRDDGFVVRIFATSTEPVLQQELQLKLARKCLHACGISLFDLEKDLHIISTGFDEESAILGAGREFALMKTANGKIYYTGKYQSLGIKQGGPSAGKWVELPITKSPKIVHFSVGHDGSHALLVAEDGSIFFTGSASKGEDGESTKSRRQSKPYKPKKIIKMEGKIVVYTACNNGSSSVISKDGELYMFGKDAIYSDSSSLVTDLKGHFVTQVAMGKAHTCVLMKNGEVWTFGVNNKGQCGRDTGAMNQGGKGFGVENMATAMDEDLEEELDEKDEKSMMCPPGMHKWKLEQCMVCTVCGDCTGYGASCVSSGRPDRVPGGICGCGSGESGCAVCGCCKACARELDGQEARQRGILDAVKEMIPLDLLLAVPVPGVNIEEHLQLRQEEKRQRVIRRHRLEEGRGPLVFAGPIFMNHREQALARLRSHPAHVKHKRDKHKDGSGERGEKDASKITTYPPGSVRFDCELRAVQVSCGFHHSVVLMENGDVYTFGYGQHGQLGHGDVNSRGCPTLVQALPGPSTQVTAGSNHTAVLLMDGQVFTFGSFSKGQLGRPILDVPYWNAKPAPMPNIGSKYGRKATWIGASGDQTFLRIDEALINSHVLATSEIFASKHIIGLVPASISEPPPFKCLLINKVDGSCKTFNDSEQEDLQGFGVCLDPVYDVIWRFRPNTRELWCYNAVVADARLPSAADMQSRCSILSPELALPTGSRALTTRSHAALHILGCLDTLAAMQDLKMGVASTEEETQAVMKVYSKEDYSVVNRFESHGGGWGYSAHSVEAIRFSADTDILLGGLGLFGGRGEYTAKIKLFELGPDGGDHETDGDLLAETDVLAYDCAAREKYAMMFDEPVLLQAGWWYVAWARVSGPSSDCGSHGQASITTDDGVVFQFKSSKKSNNGTDVNAGQIPQLLYRLPTSDGSASKGKQQTSEPVHILKRSFARTVSVECFESLLSILHWSWTTLVLGVEELRGLKGFQFTATLLDLERLRFVGTCCLRLLRVYTCEIYPVSATGKAVVEETSKLAECIGKTRTLLRKILSEGVDHCMVKLDNDPQGYLSQPLSLLEAVLQECHNTFTACFHSFYPTPALQWACLCDLLNCLDQDIQEANFKTSSSRLLAAVMSALCHTSVKLTSIFPIAYDGEVLLRSIVKQVSTENDSTLVHRFPLLVAHMEKLSQSEENISGMTSFREVLEKMLVIVVLPVRNSLRRENELFSSHLVSNTCGLLASIVSELTASALGSEVDGLNSLHSVKASANRFTKTSQGRSWNTGNGSPDAICFSVDKPGIVVVGFSVYGGGGIHEYELEVLVDDSEHAGDSTHSHRWTSLELVKGTYTTDDSPSDIAEIRLDKVVPLKENVKYAVRLRNYGSRTANGDGGMTTVQCPDGVTFTFSTCSLSSNGTNQTRGQIPQILYYRSEFDGDLQSQLLSKANEEDKNCSRALSVVSTVVRASKDLLHRALAVDADDIPELLSSSSLFSMLLPLIIAYIGPVAAAIPKVAVEVFGLVQQLLPSVAILNQKYAPPAFNPNQSTDSTTGNQPEQGLSACTTSSHYAVIESEHPYKPACVMHYKVTFPECVRWMTIEFDPQCGTAQSEDVLRLLIPVRTVQNSGYGPKLTSVHENLNSWIELKKFSGSSGWPTMVLVLPGNEALFSLETASDYVKDDKASFYGFKCFAIGYEFSPGPDEGVIQLEKELANLGGVCAAALMKKDLALPIGNELEEDLEILEEAALQVCKTHSGILGKGLALSHSPTILEALEGNLPLQIQSNEQSFLDDFIACVPGSSGGRLARWLQPDSYADPQKTSLILNKDDIRCGWPTTITVQTKDQYGDVVHVPNMKVEVKAVPVSQKKMSLQQDQAKKPQRIPGSPAVTAASSNTDMTYGGLASPKLDVSYEPMIVKEARYIAITMMKVYENYSFEELRFASPTPKRPSENMLIRVNNDGTYCANWTPGAIGLYTLHVTIDGIEIDAGLEVKVKDPPKGMIPPGTQLVKPKSEPQPNKVRKFVAKDSAGLRIRSHPSLQSEQIGIVKVNGTITFIDEIHNDDGVWLRLNDETIKKYVPNMNGYTEAWCLSFNQHLGKSLLVPVDESKTNTDDFFKDINSCCPQEATMQEQDMPFLRGGPGMYKVVKTGPSGHNIRSCPNLRGIPIGMLVLGNKVKAVGEVTNSEGTWVQLDQNSMVEFCESDEGEAWSLARDRGGNQYLRHEDEQALLDQNSQTPPPSPFSVQAFNKGASCSAQGFDYGLGNSKGDRGNISTSSKPASTSGKSELSSKHSRSLKPDGRMSRTTADQKKPRGTESLSASESLILKSDAAKLRSDSHSRSLSPNHNTLQTLKSDGRMPSSSRAESPGPGSRLSSPKPKTLPANRSSPSGASSPRSSSPHDKNLPQKSTAPVKTKLDPPRERSKSDSYTLDPDTLRKKKMPLTEPLRGRSTSPKPKSVPKDSTDSPGSENRAPSPHVVQENLHSEVVEVCTSSTLKTNSLTDSTCDDSSEFKSVDEGSNKVHFSIGKAPLKDEQEMRASPKISRKCANRHTRPKKEKSSFLFKGDGSKPLEPAKQAMSPSVAECARAVFASFLWHEGIVHDAMACSSFLKFHPELSKEHAPIRSSLNSQQPTEEKETKLKNRHSLEISSALNMFNIAPHGPDISKMGSINKNKVLSMLKEPPLHEKCEDGKTETTFEMSMHNTMKSKSPLPLTLQHLVAFWEDISLATIKAASQNMIFPSPGSCAVLKKKECEKENKKSKKEKKKKEKAEVRPRGNLFGEMAQLAVGGPEKDTICELCGESHPYPVTYHMRQAHPGCGRYAGGQGYNSIGHFCGGWAGNCGDGGIGGSTWYLVCDRCREKYLREKQAAAREKVKQSRRKPMQVKTPRALPTMEAHQVIKANALFLLSLSSAAEPSILCYHPAKPFQSQLPSVKEGISEDLPVKMPCLYLQTLARHHHENFVGYQDDNLFQDEMRYLRSTSVPAPYISVTPDASPNVFEEPESNMKSMPPSLETSPITDTDLAKRTVFQRSYSVVASEYDKQHSILPARVKAIPRRRVNSGDTEVGSSLLRHPSPELSRLISAHSSLSKGERNFQWPVLAFVIQHHDLEGLEIAMKQALRKSACRVFAMEAFNWLLCNVIQTTSLHDILWHFVASLTPAPVEPEEEEDEENKTSKENSEQEKDTRVCEHPLSDIVIAGEAAHPLPHTFHRLLQTISDLMMSLPSGSSLQQMALRCWSLKFKQSDHQFLHQSNVFHHINNILSKSDDGDSEESFSISIQSGFEAMSQELCIVMCLKDLTSIVDIKTSSRPAMIGSLTDGSTETFWESGDEDKNKTKNITINCVKGINARYVSVHVDNSRDLGNKVTSMTFLTGKAVEDLCRIKQVDLDSRHIGWVTSELPGGDNHIIKIELKGPENTLRVRQVKVLGWKDGESTKIAGQISASVAQQRNCEAETLRVFRLITSQVFGKLISGDAEPTPEQEEKALLSSPEGEEKVYNATSDADLKEHMVGIIFSRSKLTNLQKQVCAHIVQAIRMEATRVREEWEHAISSKENANSQPNDEDASSDAYCFELLSMVLALSGSNVGRQYLAQQLTLLQDLFSLLHTASPRVQRQVTSLLRRVLPEVTPSRLASIIGVKSLPPADISDIIHSTEKGDWNKLGILDMFLGCIAKALTVQLKAKGTTITGTAGTTVGKGVTTVTLPMIFNSSYLRRGESHWWMKGSTPTQISEIIIKLIKDMAAGHLSEAWSRVTKNAIAETIIALTKMEEEFRSPVRCIATTRLWLALASLCVLDQDHVDRLSSGRWMGKDGQQKQMPMCDNHDDGETAAIILCNVCGNLCTDCDRFLHLHRRTKTHQRQVFKEEEEAIKVDLHEGCGRTKLFWLMALADSKTMKAMVEFREHTGKPTTSSSEACRFCGSRSGTELSAVGSVCSDADARNTLR

SEQ ID NO: 852862 - protein, 208 aa, Homo sapiens
TLEIPLANVYPCATSLKQDADDMCMICFTEALSAAPAIQLDCSHIFHLQCCRRVLENRWLGPRITFGFISCPICKNKINHIVLKDLLDPIKELYEDVRRKALMRLEYEGLHKSEAITTPGVRFYNDPAGYAMNRYAYYVCYKCRKAYFGGEARCDAEAGRGDDYDPRELICGACSDVSRAQMCPKHGTDFLEYKCRYCCSVAVFFCFG

SEQ ID NO: 852863 - protein, 4266 aa, Homo sapiens
MPVPDGSVAAAGLGLGLPAADSPGHYQLLLSGRALADRYRRIYTAALNDRDQGGGSAGHPASRNKKILNKKKLKRKQKSKSKVKTRSKSENLENTVIIPDIKLHSNPSAFNIYCNVRHCVLEWQKKEISLAAASKNSVQSGESDSDEEEESKEPPIKLPKIIEVGLCEVFELIKETRFSHPSLCLRSLQALLNVLQGQQPEVLQSEPPEVLESLFQLLLEITVRSTGMNDSTGQSLTALSCACLFSLVASWGETGRTLQAISAILTNNGSHACQTIQRLRNAIRAHQQEYKNYVHGKPPRGYEVPTILNSLQRSVQAVLVGKIQIQDWFSNGIKKAALMHKWPLKEISVDEDDQCLLQNDGFFLYLLCKDGLYKIGSGYSGTVRGHIYNSTSRIRNRKEKKSWLGYAQGYLLYRDVNNHSMTAIRISPETLEQDGTVMLPDCHTEGQNILFTDGEYINQIAASRDDGFVVRIFATSTEPVLQQELQLKLARKCLHACGISLFDLEKDLHIISTGFDEESAILGAGREFALMKTANGKIYYTGKYQSLGIKQGGPSAGKWVELPITKSPKIVHFSVGHDGSHALLVAEDGSIFFTGSASKGEDGESTKSRRQSKPYKPKKIIKMEGKIVVYTACNNGSSSVISKDGELYMFGKDAIYSDSSSLVTDLKGHFVTQVAMGKAHTCVLMKNGEVWTFGVNNKGQCGRDTGAMNQGGKGFGVENMATAMDEDLEEELDEKDEKSMMCPPGMHKWKLEQCMVCTVCGDCTGYGASCVSSGRPDRVPGGICGCGSGESGCAVCGCCKACARELDGQEARQRGILDAVKEMIPLDLLLAVPVPGVNIEEHLQLRQEEKRQRVIRRHRLEEGRGPLVFAGPIFMNHREQALARLRSHPAHVKHKRDKHKDGSGERGEKDASKITTYPPGSVRFDCELRAVQVSCGFHHSVVLMENGDVYTFGYGQHGQLGHGDVNSRGCPTLVQALPGPSTQVTAGSNHTAVLLMDGQVFTFGSFSKGQLGRPILDVPYWNAKPAPMPNIGSKYGRKATWIGASGDQTFLRIDEALINSHVLATSEIFASKHIIGLVPASISEPPPFKCLLINKVDGSCKTFNDSEQEDLQGFGVCLDPVYDVIWRFRPNTRELWCYNAVVADARLPSAADMQSRCSILSPELALPTGSRALTTRSHAALHILGCLDTLAAMQDLKMGVASTEEETQAVMKVYSKEDYSVVNRFESHGGGWGYSAHSVEAIRFSADTDILLGGLGLFGGRGEYTAKIKLFELGPDGGDHETDGDLLAETDVLAYDCAAREKYAMMFDEPVLLQAGWWYVAWARVSGPSSDCGSHGQASITTDDGVVFQFKSSKKSNNGTDVNAGQIPQLLYRLPTSDGSASKGKQQTSEPVHILKRSFARTVSVECFESLLSILHWSWTTLVLGVEELRGLKGFQFTATLLDLERLRFVGTCCLRLLRVYTCEIYPVSATGKAVVEETSKLAECIGKTRTLLRKILSEGVDHCMVKLDNDPQGYLSQPLSLLEAVLQECHNTFTACFHSFYPTPALQWACLCDLLNCLDQDIQEANFKTSSSRLLAAVMSALCHTSVKLTSIFPIAYDGEVLLRSIVKQVSTENDSTLVHRFPLLVAHMEKLSQSEENISGMTSFREVLEKMLVIVVLPVRNSLRRENELFSSHLVSNTCGLLASIVSELTASALGSEVDGLNSLHSVKASANRFTKTSQGRSWNTGNGSPDAICFSVDKPGIVVVGFSVYGGGGIHEYELEVLVDDSEHAGDSTHSHRWTSLELVKGTYTTDDSPSDIAEIRLDKVVPLKENVKYAVRLRNYGSRTANGDGGMTTVQCPDGVTFTFSTCSLSSNGTNQTRGQIPQILYYRSEFDGDLQSQLLSKANEEDKNCSRALSVVSTVVRASKDLLHRALAVDADDIPELLSSSSLFSMLLPLIIAYIGPVAAAIPKVAVEVFGLVQQLLPSVAILNQKYAPPAFNPNQSTDSTTGNQPEQGLSACTTSSHYAVIESEHPYKPACVMHYKVTFPECVRWMTIEFDPQCGTAQSEDVLRLLIPVRTVQNSGYGPKLTSVHENLNSWIELKKFSGSSGWPTMVLVLPGNEALFSLETASDYVKDDKASFYGFKCFAIGYEFSPGPDEGVIQLEKELANLGGVCAAALMKKDLALPIGNELEEDLEILEEAALQVCKTHSGILGKGLALSHSPTILEALEGNLPLQIQSNEQSFLDDFIACVPGSSGGRLARWLQPDSYADPQKTSLILNKDDIRCGWPTTITVQTKDQYGDVVHVPNMKVEVKAVPVSQKKMSLQQDQAKKPQRIPGSPAVTAASSNTDMTYGGLASPKLDVSYEPMIVKEARYIAITMMKVYENYSFEELRFASPTPKRPSENMLIRVNNDGTYCANWTPGAIGLYTLHVTIDGIEIDAGLEVKVKDPPKGMIPPGTQLVKPKSEPQPNKVRKFVAKDSAGLRIRSHPSLQSEQIGIVKVNGTITFIDEIHNDDGVWLRLNDETIKKYVPNMNGYTEAWCLSFNQHLGKSLLVPVDNIFNASQGVRDLDVFSWTSKAFFPQESKTNTDDFFKDINSCCPQEATMQEQDMPFLRGGPGMYKVVKTGPSGHNIRSCPNLRGIPIGMLVLGNKVKAVGEVTNSEGTWVQLDQNSMVEFCESDEGEAWSLARDRGGNQYLRHEDEQALLDQNSQTPPPSPFSVQAFNKGASCSAQGFDYGLGNSKVLTVLPTAGDQLSAILNSIQSRPNLPAPSIFDQAAKPPSSLVHSPFVFGQPLSFQQPQLQSDRGNISTSSKPASTSGKSELSSKHSRSLKPDGRMSRTTADQKKPRGTESLSASESLILKSDAAKLRSDSHSRSLSPNHNTLQTLKSDGRMPSSSRAESPGPGSRLSSPKPKTLPANRSSPSGASSPRSSSPHDKNLPQKSTAPVKTKLDPPRERSKSDSYTLDPDTLRKKKMPLTEPLRGRSTSPKPKSVPKDSTDSPGSENRAPSPHVVQENLHSEVVEVCTSSTLKTNSLTDSTCDDSSEFKSVDEGSNKVHFSIGKAPLKDEQEMRASPKISRKCANRHTRPKKEKSSFLFKGDGSKPLEPAKQAMSPSVAECARAVFASFLWHEGIVHDAMACSSFLKFHPELSKEHAPIRSSLNSQQPTEEKETKLKNRHSLEISSALNMFNIAPHGPDISKMGSINKNKVLSMLKEPPLHEKCEDGKTETTFEMSMHNTMKSKSPLPLTLQHLVAFWEDISLATIKAASQNMIFPSPGSCAVLKKKECEKENKKSKKEKKKKEKAEVRPRGNLFGEMAQLAVGGPEKDTICELCGESHPYPVTYHMRQAHPGCGRYAGGQGYNSIGHFCGGWAGNCGDGGIGGSTWYLVCDRCREKYLREKQAAAREKVKQSRRKPMQVKTPRALPTMEAHQVIKANALFLLSLSSAAEPSILCYHPAKPFQSQLPSVKEGISEDLPVKMPCLYLQTLARHHHENFVGYQDDNLFQDEMRYLRSTSVPAPYISVTPDASPNVFEEPESNMKSMPPSLETSPITDTDLAKRTVFQRSYSVVASEYDKQHSILPARVKAIPRRRVNSGDTEVGSSLLRHPSPELSRLISAHSSLSKGERNFQWPVLAFVIQHHDLEGLEIAMKQALRKSACRVFAMEAFNWLLCNVIQTTSLHDILWHFVASLTPAPVEPEEEEDEENKTSKENSEQEKDTRVCEHPLSDIVIAGEAAHPLPHTFHRLLQTISDLMMSLPSGSSLQQMALRCWSLKFKQSDHQFLHQSNVFHHINNILSKSDDGDSEESFSISIQSGFEAMSQELCIVMCLKDLTSIVDIKTSSRPAMIGSLTDGSTETFWESGDEDKNKTKNITINCVKGINARYVSVHVDNSRDLGNKVTSMTFLTGKAVEDLCRIKQVDLDSRHIGWVTSELPGGDNHIIKIELKGPENTLRVRQVKVLGWKDGESTKIAGQISASVAQQRNCEAETLRVFRLITSQVFGKLISGDAEPTPEQEEKALLSSPEGEEKVYNATSDADLKEHMVGIIFSRSKLTNLQKQVCAHIVQAIRMEATRVREEWEHAISSKENANSQPNDEDASSDAYCFELLSMVLALSGSNVGRQYLAQQLTLLQDLFSLLHTASPRVQRQVTSLLRRVLPEVTPSRLASIIGVKSLPPADISDIIHSTEKGDWNKLGILDMFLGCIAKALTVQLKAKGTTITGTAGTTVGKGVTTVTLPMIFNSSYLRRGESHWWMKGSTLPRSQRSSLNLSRIWQQVICQKLGPE

SEQ ID NO: 852864 - protein, 2026 aa, Homo sapiens
MMCRNFIRNISPFFPLFFKYFSMYDKQYKFCSYVFLFQCLVAKLSVSYNFINKFHCKMDHTGDRGNISTSSKPASTSGKSELSSKHSRSLKPDGRMSRTTADQKKPRGTESLSASESLILKSDAAKLRSDSHSRSLSPNHNTLQTLKSDGRMPSSSRAESPGPGSRLSSPKPKTLPANRSSPSGASSPRSSSPHDKNLPQKSTAPVKTKLDPPRERSKSDSYTLDPDTLRKKKMPLTEPLRGRSTSPKPKSVPKDSTDSPGSENRAPSPHVVQENLHSEVVEVCTSSTLKTNSLTDSTCDDSSEFKSVDEGSNKVHFSIGKAPLKDEQEMRASPKISRKCANRHTRPKKEKSSFLFKGDGSKPLEPAKQAMSPSVAECARAVFASFLWHEGIVHDAMACSSFLKFHPELSKEHAPIRSSLNSQQPTEEKETKLKNRHSLEISSALNMFNIAPHGPDISKMGSINKNKVLSMLKEPPLHEKCEDGKTETTFEMSMHNTMKSKSPLPLTLQHLVAFWEDISLATIKAASQNMIFPSPGSCAVLKKKECEKENKKSKKEKKKKEKAEVRPRGNLFGEMAQLAVGGPEKDTICELCGESHPYPVTYHMRQAHPGCGRYAGGQGYNSIGHFCGGWAGNCGDGGIGGSTWYLVCDRCREKYLREKQAAAREKVKQSRRKPMQVKTPRALPTMEAHQVIKANALFLLSLSSAAEPSILCYHPAKPFQSQLPSVKEGISEDLPVKMPCLYLQTLARHHHENFVGYQDDNLFQDEMRYLRSTSVPAPYISVTPDASPNVFEEPESNMKSMPPSLETSPITDTDLAKRTVFQRSYSVVASEYDKQHSILPARVKAIPRRRVNSGDTEVGSSLLRHPSPELSRLISAHSSLSKGERNFQWPVLAFVIQHHDLEGLEIAMKQALRKSACRVFAMEAFNWLLCNVIQTTSLHDILWHFVASLTPAPVEPEEEEDEENKTSKENSEQEKDTRVCEHPLSDIVIAGEAAHPLPHTFHRLLQTISDLMMSLPSGSSLQQMALRCWSLKFKQSDHQFLHQSNVFHHINNILSKSDDGDSEESFSISIQSGFEAMSQELCIVMCLKDLTSIVDIKTSSRPAMIGSLTDGSTETFWESGDEDKNKTKNITINCVKGINARYVSVHVDNSRDLGNKVTSMTFLTGKAVEDLCRIKQVDLDSRHIGWVTSELPGGDNHIIKIELKGPENTLRVRQVKVLGWKDGESTKIAGQISASVAQQRNCEAETLRVFRLITSQVFGKLISGDAEPTPEQEEKALLSSPEGEEKVYNATSDADLKEHMVGIIFSRSKLTNLQKQVCAHIVQAIRMEATRVREEWEHAISSKENANSQPNDEDASSDAYCFELLSMVLALSGSNVGRQYLAQQLTLLQDLFSLLHTASPRVQRQVTSLLRRVLPEVTPSRLASIIGVKSLPPADISDIIHSTEKGDWNKLGILDMFLGCIAKALTVQLKAKGTTITGTAGTTVGKGVTTVTLPMIFNSSYLRRGESHWWMKGSTPTQISEIIIKLIKDMAAGHLSEAWSRVTKNAIAETIIALTKMEEEFRSPVRCIATTRLWLALASLCVLDQDHVDRLSSGRWMGKDGQQKQMPMCDNHDDGETAAIILCNVCGNLCTDCDRFLHLHRRTKTHQRQVFKEEEEAIKVDLHEGCGRTKLFWLMALADSKTMKAMVEFREHTGKPTTSSSEACRFCGSRSGTELSAVGSVCSDADCQEYAKIACSKTHPCGHPCGGVKNEEHCLPCLHGCDKSATSLKQDADDMCMICFTEALSAAPAIQLDCSHIFHLQCCRRVLENRWLGPRITFGFISCPICKNKINHIVLKDLLDPIKELYEDVRRKALMRLEYEGLHKSEAITTPGVRFYNDPAGYAMNRYAYYVCYKCRKAYFGGEARCDAEAGRGDDYDPRELICGACSDVSRAQMCPKHGTDFLEYKCRYCCSVAVFFCFGTTHFCNACHDDFQRMTSIPKEELPHCPAGPKGKQLEGTECPLHVVHPPTGEEFALGCGVCRNAHTF

SEQ ID NO: 852865 - protein, 2180 aa, Homo sapiens
GIPLFVLHIHNDDGVWLRLNDETIKKYVPNMNGYTEAWCLSFNQHLGKSLLVPVDESKTNTDDFFKDINSCCPQEATMQEQDMPFLRGGPGMYKVVKTGPSGHNIRSCPNLRGIPIGMLVLGNKVKAVGEVTNSEGTWVQLDQNSMVEFCESDEGEAWSLARDRGGNQYLRHEDEQALLDQNSQTPPPSPFSVQAFNKGASCSAQGFDYGLGNSKGDRGNISTSSKPASTSGKSELSSKHSRSLKPDGRMSRTTADQKKPRGTESLSASESLILKSDAAKLRSDSHSRSLSPNHNTLQTLKSDGRMPSSSRAESPGPGSRLSSPKPKTLPANRSSPSGASSPRSSSPHDKNLPQKSTAPVKTKLDPPRERSKSDSYTLDPDTLRKKKMPLTEPLRGRSTSPKPKSVPKDSTDSPGSENRAPSPHVVQENLHSEVVEVCTSSTLKTNSLTDSTCDDSSEFKSVDEGSNKVHFSIGKAPLKDEQEMRASPKISRKCANRHTRPKKEKSSFLFKGDGSKPLEPAKQAMSPSVAECARAVFASFLWHEGIVHDAMACSSFLKFHPELSKEHAPIRSSLNSQQPTEEKETKLKNRHSLEISSALNMFNIAPHGPDISKMGSINKNKVLSMLKEPPLHEKCEDGKTETTFEMSMHNTMKSKSPLPLTLQHLVAFWEDISLATIKAASQNMIFPSPGSCAVLKKKECEKENKKSKKEKKKKEKAEVRPRGNLFGEMAQLAVGGPEKDTICELCGESHPYPVTYHMRQAHPGCGRYAGGQGYNSIGHFCGGWAGNCGDGGIGGSTWYLVCDRCREKYLREKQAAAREKVKQSRRKPMQVKTPRALPTMEAHQVIKANALFLLSLSSAAEPSILCYHPAKPFQSQLPSVKEGISEDLPVKMPCLYLQTLARHHHENFVGYQDDNLFQDEMRYLRSTSVPAPYISVTPDASPNVFEEPESNMKSMPPSLETSPITDTDLAKRTVFQRSYSVVASEYDKQHSILPARVKAIPRRRVNSGDTEVGSSLLRHPSPELSRLISAHSSLSKGERNFQWPVLAFVIQHHDLEGLEIAMKQALRKSACRVFAMEAFNWLLCNVIQTTSLHDILWHFVASLTPAPVEPEEEEDEENKTSKENSEQEKDTRVCEHPLSDIVIAGEAAHPLPHTFHRLLQTISDLMMSLPSGSSLQQMALRCWSLKFKQSDHQFLHQSNVFHHINNILSKSDDGDSEESFSISIQSGFEAMSQELCIVMCLKDLTSIVDIKTSSRPAMIGSLTDGSTETFWESGDEDKNKTKNITINCVKGINARYVSVHVDNSRDLGNKVTSMTFLTGKAVEDLCRIKQVDLDSRHIGWVTSELPGGDNHIIKIELKGPENTLRVRQVKVLGWKDGESTKIAGQISASVAQQRNCEAETLRVFRLITSQVFGKLISGDAEPTPEQEEKALLSSPEGEEKVYNATSDADLKEHMVGIIFSRSKLTNLQKQVCAHIVQAIRMEATRVREEWEHAISSKENANSQPNDEDASSDAYCFELLSMVLALSGSNVGRQYLAQQLTLLQDLFSLLHTASPRVQRQVTSLLRRVLPEVTPSRLASIIGVKSLPPADISDIIHSTEKGDWNKLGILDMFLGCIAKALTVQLKAKGTTITGTAGTTVGKGVTTVTLPMIFNSSYLRRGESHWWMKGSTPTQISEIIIKLIKDMAAGHLSEAWSRVTKNAIAETIIALTKMEEEFRSPVRCIATTRLWLALASLCVLDQDHVDRLSSGRWMGKDGQQKQMPMCDNHDDGETAAIILCNVCGNLCTDCDRFLHLHRRTKTHQRQVFKEEEEAIKVDLHEGCGRTKLFWLMALADSKTMKAMVEFREHTGKPTTSSSEACRFCGSRSGTELSAVGSVCSDADCQEYAKIACSKTHPCGHPCGGVKNEEHCLPCLHGCDKSATSLKQDADDMCMICFTEALSAAPAIQLDCSHIFHLQCCRRVLENRWLGPRITFGFISCPICKNKINHIVLKDLLDPIKELYEDVRRKALMRLEYEGLHKSEAITTPGVRFYNDPAGYAMNRYAYYVCYKCRKAYFGGEARCDAEAGRGDDYDPRELICGACSDVSRAQMCPKHGTDFLEYKCRYCCSVAVFFCFGTTHFCNACHDDFQRMTSIPKEELPHCPAGPKGKQLEGTECPLHVVHPPTGEEFALGCGVCRNAHTF

SEQ ID NO: 852866 - protein, 2197 aa, Homo sapiens
MQQPPFQSEQIGIVKVNGTITFIDEIHNDDGVWLRLNDETIKKYVPNMNGYTEAWCLSFNQHLGKSLLVPVDESKTNTDDFFKDINSCCPQEATMQEQDMPFLRGGPGMYKVVKTGPSGHNIRSCPNLRGIPIGMLVLGNKVKAVGEVTNSEGTWVQLDQNSMVEFCESDEGEAWSLARDRGGNQYLRHEDEQALLDQNSQTPPPSPFSVQAFNKGASCSAQGFDYGLGNSKGDRGNISTSSKPASTSGKSELSSKHSRSLKPDGRMSRTTADQKKPRGTESLSASESLILKSDAAKLRSDSHSRSLSPNHNTLQTLKSDGRMPSSSRAESPGPGSRLSSPKPKTLPANRSSPSGASSPRSSSPHDKNLPQKSTAPVKTKLDPPRERSKSDSYTLDPDTLRKKKMPLTEPLRGRSTSPKPKSVPKDSTDSPGSENRAPSPHVVQENLHSEVVEVCTSSTLKTNSLTDSTCDDSSEFKSVDEGSNKVHFSIGKAPLKDEQEMRASPKISRKCANRHTRPKKEKSSFLFKGDGSKPLEPAKQAMSPSVAECARAVFASFLWHEGIVHDAMACSSFLKFHPELSKEHAPIRSSLNSQQPTEEKETKLKNRHSLEISSALNMFNIAPHGPDISKMGSINKNKVLSMLKEPPLHEKCEDGKTETTFEMSMHNTMKSKSPLPLTLQHLVAFWEDISLATIKAASQNMIFPSPGSCAVLKKKECEKENKKSKKEKKKKEKAEVRPRGNLFGEMAQLAVGGPEKDTICELCGESHPYPVTYHMRQAHPGCGRYAGGQGYNSIGHFCGGWAGNCGDGGIGGSTWYLVCDRCREKYLREKQAAAREKVKQSRRKPMQVKTPRALPTMEAHQVIKANALFLLSLSSAAEPSILCYHPAKPFQSQLPSVKEGISEDLPVKMPCLYLQTLARHHHENFVGYQDDNLFQDEMRYLRSTSVPAPYISVTPDASPNVFEEPESNMKSMPPSLETSPITDTDLAKRTVFQRSYSVVASEYDKQHSILPARVKAIPRRRVNSGDTEVGSSLLRHPSPELSRLISAHSSLSKGERNFQWPVLAFVIQHHDLEGLEIAMKQALRKSACRVFAMEAFNWLLCNVIQTTSLHDILWHFVASLTPAPVEPEEEEDEENKTSKENSEQEKDTRVCEHPLSDIVIAGEAAHPLPHTFHRLLQTISDLMMSLPSGSSLQQMALRCWSLKFKQSDHQFLHQSNVFHHINNILSKSDDGDSEESFSISIQSGFEAMSQELCIVMCLKDLTSIVDIKTSSRPAMIGSLTDGSTETFWESGDEDKNKTKNITINCVKGINARYVSVHVDNSRDLGNKVTSMTFLTGKAVEDLCRIKQVDLDSRHIGWVTSELPGGDNHIIKIELKGPENTLRVRQVKVLGWKDGESTKIAGQISASVAQQRNCEAETLRVFRLITSQVFGKLISGDAEPTPEQEEKALLSSPEGEEKVYNATSDADLKEHMVGIIFSRSKLTNLQKQVCAHIVQAIRMEATRVREEWEHAISSKENANSQPNDEDASSDAYCFELLSMVLALSGSNVGRQYLAQQLTLLQDLFSLLHTASPRVQRQVTSLLRRVLPEVTPSRLASIIGVKSLPPADISDIIHSTEKGDWNKLGILDMFLGCIAKALTVQLKAKGTTITGTAGTTVGKGVTTVTLPMIFNSSYLRRGESHWWMKGSTPTQISEIIIKLIKDMAAGHLSEAWSRVTKNAIAETIIALTKMEEEFRSPVRCIATTRLWLALASLCVLDQDHVDRLSSGRWMGKDGQQKQMPMCDNHDDGETAAIILCNVCGNLCTDCDRFLHLHRRTKTHQRQVFKEEEEAIKVDLHEGCGRTKLFWLMALADSKTMKAMVEFREHTGKPTTSSSEACRFCGSRSGTELSAVGSVCSDADCQEYAKIACSKTHPCGHPCGGVKNEEHCLPCLHGCDKSATSLKQDADDMCMICFTEALSAAPAIQLDCSHIFHLQCCRRVLENRWLGPRITFGFISCPICKNKINHIVLKDLLDPIKELYEDVRRKALMRLEYEGLHKSEAITTPGVRFYNDPAGYAMNRYAYYVCYKCRKAYFGGEARCDAEAGRGDDYDPRELICGACSDVSRAQMCPKHGTDFLEYKCRYCCSVAVFFCFGTTHFCNACHDDFQRMTSIPKEELPHCPAGPKGKQLEGTECPLHVVHPPTGEEFALGCGVCRNAHTF

SEQ ID NO: 852867 - protein, 1977 aa, Homo sapiens
VKTGFLDGVDEKAMSVLESPYRDSAKGAPLAELSSKHSRSLKPDGRMSRTTADQKKPRGTESLSASESLILKSDAAKLRSDSHSRSLSPNHNTLQTLKSDGRMPSSSRAESPGPGSRLSSPKPKTLPANRSSPSGASSPRSSSPHDKNLPQKSTAPVKTKLDPPRERSKSDSYTLDPDTLRKKKMPLTEPLRGRSTSPKPKSVPKDSTDSPGSENRAPSPHVVQENLHSEVVEVCTSSTLKTNSLTDSTCDDSSEFKSVDEGSNKVHFSIGKAPLKDEQEMRASPKISRKCANRHTRPKKEKSSFLFKGDGSKPLEPAKQAMSPSVAECARAVFASFLWHEGIVHDAMACSSFLKFHPELSKEHAPIRSSLNSQQPTEEKETKLKNRHSLEISSALNMFNIAPHGPDISKMGSINKNKVLSMLKEPPLHEKCEDGKTETTFEMSMHNTMKSKSPLPLTLQHLVAFWEDISLATIKAASQNMIFPSPGSCAVLKKKECEKENKKSKKEKKKKEKAEVRPRGNLFGEMAQLAVGGPEKDTICELCGESHPYPVTYHMRQAHPGCGRYAGGQGYNSIGHFCGGWAGNCGDGGIGGSTWYLVCDRCREKYLREKQAAAREKVKQSRRKPMQVKTPRALPTMEAHQVIKANALFLLSLSSAAEPSILCYHPAKPFQSQLPSVKEGISEDLPVKMPCLYLQTLARHHHENFVGYQDDNLFQDEMRYLRSTSVPAPYISVTPDASPNVFEEPESNMKSMPPSLETSPITDTDLAKRTVFQRSYSVVASEYDKQHSILPARVKAIPRRRVNSGDTEVGSSLLRHPSPELSRLISAHSSLSKGERNFQWPVLAFVIQHHDLEGLEIAMKQALRKSACRVFAMEAFNWLLCNVIQTTSLHDILWHFVASLTPAPVEPEEEEDEENKTSKENSEQEKDTRVCEHPLSDIVIAGEAAHPLPHTFHRLLQTISDLMMSLPSGSSLQQMALRCWSLKFKQSDHQFLHQSNVFHHINNILSKSDDGDSEESFSISIQSGFEAMSQELCIVMCLKDLTSIVDIKTSSRPAMIGSLTDGSTETFWESGDEDKNKTKNITINCVKGINARYVSVHVDNSRDLGNKVTSMTFLTGKAVEDLCRIKQVDLDSRHIGWVTSELPGGDNHIIKIELKGPENTLRVRQVKVLGWKDGESTKIAGQISASVAQQRNCEAETLRVFRLITSQVFGKLISGDAEPTPEQEEKALLSSPEGEEKVYNATSDADLKEHMVGIIFSRSKLTNLQKQVCAHIVQAIRMEATRVREEWEHAISSKENANSQPNDEDASSDAYCFELLSMVLALSGSNVGRQYLAQQLTLLQDLFSLLHTASPRVQRQVTSLLRRVLPEVTPSRLASIIGVKSLPPADISDIIHSTEKGDWNKLGILDMFLGCIAKALTVQLKAKGTTITGTAGTTVGKGVTTVTLPMIFNSSYLRRGESHWWMKGSTPTQISEIIIKLIKDMAAGHLSEAWSRVTKNAIAETIIALTKMEEEFRSPVRCIATTRLWLALASLCVLDQDHVDRLSSGRWMGKDGQQKQMPMCDNHDDGETAAIILCNVCGNLCTDCDRFLHLHRRTKTHQRQVFKEEEEAIKVDLHEGCGRTKLFWLMALADSKTMKAMVEFREHTGKPTTSSSEACRFCGSRSGTELSAVGSVCSDADCQEYAKIACSKTHPCGHPCGGVKNEEHCLPCLHGCDKSATSLKQDADDMCMICFTEALSAAPAIQLDCSHIFHLQCCRRVLENRWLGPRITFGFISCPICKNKINHIVLKDLLDPIKELYEDVRRKALMRLEYEGLHKSEAITTPGVRFYNDPAGYAMNRYAYYVCYKCRKAYFGGEARCDAEAGRGDDYDPRELICGACSDVSRAQMCPKHGTDFLEYKCRYCCSVAVFFCFGTTHFCNACHDDFQRMTSIPKEELPHCPAGPKGKQLEGTECPLHVVHPPTGEEFALGCGVCRNAHTF

SEQ ID NO: 852868 - protein, 4206 aa, Homo sapiens
MPVPDGSVAAAGLGLGLPAADSPGHYQLLLSGRALADRYRRIYTAALNDRDQGGGSAGHPASRNKKILNKKKLKRKQKSKSKVKTRSKSENLENTVIIPDIKLHSNPSAFNIYCNVRHCVLEWQKKEISLAAASKNSVQSGESDSDEEEESKEPPIKLPKIIEVGLCEVFELIKETRFSHPSLCLRSLQALLNVLQGQQPEVLQSEPPEVLESLFQLLLEITVRSTGMNDSTGQSLTALSCACLFSLVASWGETGRTLQAISAILTNNGSHACQTIQRLRNAIRAHQQEYKNYVHGKPPRGYEVPTILNSLQRSVQAVLVGKIQIQDWFSNGIKKAALMHKWPLKEISVDEDDQCLLQNDGFFLYLLCKDGLYKIGSGYSGTVRGHIYNSTSRIRNRKEKKSWLGYAQGYLLYRDVNNHSMTAIRISPETLEQDGTVMLPDCHTEGQNILFTDGEYINQIAASRDDGFVVRIFATSTEPVLQQELQLKLARKCLHACGISLFDLEKDLHIISTGFDEESAILGAGREFALMKTANGKIYYTGKYQSLGIKQGGPSAGKWVELPITKSPKIVHFSVGHDGSHALLVAEDGSIFFTGSASKGEDGESTKSRRQSKPYKPKKIIKMEGKIVVYTACNNGSSSVISKDGELYMFGKDAIYSDSSSLVTDLKGHFVTQVAMGKAHTCVLMKNGEVWTFGVNNKGQCGRDTGAMNQGGKGFGVENMATAMDEDLEEELDEKDEKSMMCPPGMHKWKLEQCMVCTVCGDCTGYGASCVSSGRPDRVPGGICGCGSGESGCAVCGCCKACARELDGQEARQRGILDAVKEMIPLDLLLAVPVPGVNIEEHLQLRQEEKRQRVIRRHRLEEGRGPLVFAGPIFMNHREQALARLRSHPAHVKHKRDKHKDGSGERGEKDASKITTYPPGSVRFDCELRAVQVSCGFHHSVVLMENGDVYTFGYGQHGQLGHGDVNSRGCPTLVQALPGPSTQVTAGSNHTAVLLMDGQVFTFGSFSKGQLGRPILDVPYWNAKPAPMPNIGSKYGRKATWIGASGDQTFLRIDEALINSHVLATSEIFASKHIIGLVPASISEPPPFKCLLINKVDGSCKTFNDSEQEDLQGFGVCLDPVYDVIWRFRPNTRELWCYNAVVADARLPSAADMQSRCSILSPELALPTGSRALTTRSHAALHILGCLDTLAAMQDLKMGVASTEEETQAVMKVYSKEDYSVVNRFESHGGGWGYSAHSVEAIRFSADTDILLGGLGLFGGRGEYTAKIKLFELGPDGGDHETDGDLLAETDVLAYDCAAREKYAMMFDEPVLLQAGWWYVAWARVSGPSSDCGSHGQASITTDDGVVFQFKSSKKSNNGTDVNAGQIPQLLYRLPTSDGSASKGKQQTSEPVHILKRSFARTVSVECFESLLSILHWSWTTLVLGVEELRGLKGFQFTATLLDLERLRFVGTCCLRLLRVYTCEIYPVSATGKAVVEETSKLAECIGKTRTLLRKILSEGVDHCMVKLDNDPQGYLSQPLSLLEAVLQECHNTFTACFHSFYPTPALQWACLCDLLNCLDQDIQEANFKTSSSRLLAAVMSALCHTSVKLTSIFPIAYDGEVLLRSIVKQVSTENDSTLVHRFPLLVAHMEKLSQSEENISGMTSFREVLEKMLVIVVLPVRNSLRRENELFSSHLVSNTCGLLASIVSELTASALGSEVDGLNSLHSVKASANRFTKTSQGRSWNTGNGSPDAICFSVDKPGIVVVGFSVYGGGGIHEYELEVLVDDSEHAGDSTHSHRWTSLELVKGTYTTDDSPSDIAEIRLDKVVPLKENVKYAVRLRNYGSRTANGDGGMTTVQCPDGVTFTFSTCSLSSNGTNQTRGQIPQILYYRSEFDGDLQSQLLSKANEEDKNCSRALSVVSTVVRASKDLLHRALAVDADDIPELLSSSSLFSMLLPLIIAYIGPVAAAIPKVAVEVFGLVQQLLPSVAILNQKYAPPAFNPNQSTDSTTGNQPEQGLSACTTSSHYAVIESEHPYKPACVMHYKVTFPECVRWMTIEFDPQCGTAQSEDVLRLLIPVRTVQNSGYGPKLTSVHENLNSWIELKKFSGSSGWPTMVLVLPGNEALFSLETASDYVKDDKASFYGFKCFAIGYEFSPGPDEGVIQLEKELANLGGVCAAALMKKDLALPIGNELEEDLEILEEAALQVCKTHSGILGKGLALSHSPTILEALEGNLPLQIQSNEQSFLDDFIACVPGSSGGRLARWLQPDSYADPQKTSLILNKDDIRCGWPTTITVQTKDQYGDVVHVPNMKVEVKAVPVSQKKMSLQQDQAKKPQRIPGSPAVTAASSNTDMTYGGLASPKLDVSYEPMIVKEARYIAITMMKVYENYSFEELRFASPTPKRPSENMLIRVNNDGTYCANWTPGAIGLYTLHVTIDGIEIDAGLEVKVKDPPKGMIPPGTQLVKPKSEPQPNKVRKFVAKDSAGLRIRSHPSLQSEQIGIVKVNGTITFIDEIHNDDGVWLRLNDETIKKYVPNMNGYTEAWCLSFNQHLGKSLLVPVDNIFNASQGVRDLDVFSWTSKAFFPQESKTNTDDFFKDINSCCPQEATMQEQDMPFLRGGPGMYKVVKTGPSGHNIRSCPNLRGIPIGMLVLGNKVKAVGEVTNSEGTWVQLDQNSMVEFCESDEGEAWSLARDRGGNQYLRHEDEQALLDQNSQTPPPSPFSVQAFNKGASCSAQGFDYGLGNSKGDRGNISTSSKPASTSGKSELSSKHSRSLKPDGRMSRTTADQKKPRGTESLSASESLILKSDAAKLRSDSHSRSLSPNHNTLQTLKSDGRMPSSSRAESPGPGSRLSSPKPKTLPANRSSPSGASSPRSSSPHDKNLPQKSTAPVKTKLDPPRERSKSDSYTLDPDTLRKKKMPLTEPLRGRSTSPKPKSVPKDSTDSPGSENRAPSPHVVQENLHSEVVEVCTSSTLKTNSLTDSTCDDSSEFKSVDEGSNKVHFSIGKAPLKDEQEMRASPKISRKCANRHTRPKKEKSSFLFKGDGSKPLEPAKQAMSPSVAECARAVFASFLWHEGIVHDAMACSSFLKFHPELSKEHAPIRSSLNSQQPTEEKETKLKNRHSLEISSALNMFNIAPHGPDISKMGSINKNKVLSMLKEPPLHEKCEDGKTETTFEMSMHNTMKSKSPLPLTLQHLVAFWEDISLATIKAASQNMIFPSPGSCAVLKKKECEKENKKSKKEKKKKEKAEVRPRGNLFGEMAQLAVGGPEKDTICELCGESHPYPVTYHMRQAHPGCGRYAGGQGYNSIGHFCGGWAGNCGDGGIGGSTWYLVCDRCREKYLREKQAAAREKVKQSRRKPMQVKTPRALPTMEAHQVIKANALFLLSLSSAAEPSILCYHPAKPFQSQLPSVKEGISEDLPVKMPCLYLQTLARHHHENFVGYQDDNLFQDEMRYLRSTSVPAPYISVTPDASPNVFEEPESNMKSMPPSLETSPITDTDLAKRTVFQRSYSVVASEYDKQHSILPARVKAIPRRRVNSGDTEVGSSLLRHPSPELSRLISAHSSLSKGERNFQWPVLAFVIQHHDLEGLEIAMKQALRKSACRVFAMEAFNWLLCNVIQTTSLHDILWHFVASLTPAPVEPEEEEDEENKTSKENSEQEKDTRVCEHPLSDIVIAGEAAHPLPHTFHRLLQTISDLMMSLPSGSSLQQMALRCWSLKFKQSDHQFLHQSNVFHHINNILSKSDDGDSEESFSISIQSGFEAMSQELCIVMCLKDLTSIVDIKTSSRPAMIGSLTDGSTETFWESGDEDKNKTKNITINCVKGINARYVSVHVDNSRDLGNKVTSMTFLTGKAVEDLCRIKQVDLDSRHIGWVTSELPGGDNHIIKIELKGPENTLRVRQVKVLGWKDGESTKIAGQISASVAQQRNCEAETLRVFRLITSQVFGKLISGDAEPTPEQEEKALLSSPEGEEKVYNATSDADLKEHMVGIIFSRSKLTNLQKQVCAHIVQAIRMEATRVREEWEHAISSKENANSQPNDEDASSDAYCFELLSMVLALSGSNVGRQYLAQQLTLLQDLFSLLHTASPRVQRQVTSLLRRVLPEVTPSRLASIIGVKSLPPADISDIIHSTEKGDWNKLGILDMFLGCIAKALTVQLKAKGTTITGTAGTTVGKGVTTVTLPMIFNSSYLRRGESHWWMKGSTLPRSQRSSLNLSRIWQQVICQKLGPE

SEQ ID NO: 852869 - protein, 470 aa, Homo sapiens [sequence omitted]

SEQ ID NO: 852870 - protein, 252 aa, Homo sapiens
MCMICFTEALSAAPAIQLDCSHIFHLQCCRRVLENRWLGPRITFGFISCPICKNKINHIVLKDLLDPIKELYEDVRRKALMRLEYEGLHKSEAITTPGVRFYNDPAGYAMNRYAYYVCYKCRKAYFGGEARCDAEAGRGDDYDPRELICGACSDVSRAQMCPKHGTDFLEYKCRYCCSVAVFFCFGTTHFCNACHDDFQRMTSIPKEELPHCPAGPKGKQLEGTECPLHVVHPPTGEEFALGCGVCRNAHTF

SEQ ID NO: 852871 - protein, 3588 aa, Homo sapiens
MPVPDGSVAAAGLGLGLPAADSPGHYQLLLSGRALADRYRRIYTAALNDRDQGGGSAGHPASRNKKILNKKKLKRKQKSKSKVKTRSKSENLENTVIIPDIKLHSNPSAFNIYCNVRHCVLEWQKKEISLAAASKNSVQSGESDSDEEEESKEPPIKLPKIIEVGLCEVFELIKETRFSHPSLCLRSLQALLNVLQGQQPEVLQSEPPEVLESLFQLLLEITVRSTGMNDSTGQSLTALSCACLFSLVASWGETGRTLQAISAILTNNGSHACQTIQRLRNAIRAHQQEYKNYVHGKPPRGYEVPTILNSLQRSVQAVLVGKIQIQDWFSNGIKKAALMHKWPLKEISVDEDDQCLLQNDGFFLYLLCKDGLYKIGSGYSGTVRGHIYNSTSRIRNRKEKKSWLGYAQGYLLYRDVNNHSMTAIRISPETLEQDGTVMLPDCHTEGQNILFTDGEYINQIAASRDDGFVVRIFATSTEPVLQQELQLKLARKCLHACGISLFDLEKDLHIISTGFDEESAILGAGREFALMKTANGKIYYTGKYQSLGIKQGGPSAGKWVELPITKSPKIVHFSVGHDGSHALLVAEDGSIFFTGSASKGEDGESTKSRRQSKPYKPKKIIKMEGKIVVYTACNNGSSSVISKDGELYMFGKDAIYSDSSSLVTDLKGHFVTQVAMGKAHTCVLMKNGEVWTFGVNNKGQCGRDTGAMNQGGKGFGVENMATAMDEDLEEELDEKDEKSMMCPPGMHKWKLEQCMVCTVCGDCTGYGASCVSSGRPDRVPGGICGCGSGESGCAVCGCCKACARELDGQEARQRGILDAVKEMIPLDLLLAVPVPGVNIEEHLQLRQEEKRQRVIRRHRLEEGRGPLVFAGPIFMNHREQALARLRSHPAHVKHKRDKHKDGSGERGEKDASKITTYPPGSVRFDCELRAVQVSCGFHHSVVLMENGDVYTFGYGQHGQLGHGDVNSRGCPTLVQALPGPSTQVTAGSNHTAVLLMDGQVFTFGSFSKGQLGRPILDVPYWNAKPAPMPNIGSKYGRKATWIGASGDQTFLRIDEALINSHVLATSEIFASKHIIGLVPASISEPPPFKCLLINKVDGSCKTFNDSEQEDLQGFGVCLDPVYDVIWRFRPNTRELWCYNAVVADARLPSAADMQSRCSILSPELALPTGSRALTTRSHAALHILGCLDTLAAMQDLKMGVASTEEETQAVMKVYSKEDYSVVNRFESHGGGWGYSAHSVEAIRFSADTDILLGGLGLFGGRGEYTAKIKLFELGPDGGDHETDGDLLAETDVLAYDCAAREKYAMMFDEPVLLQAGWWYVAWARVSGPSSDCGSHGQASITTDDGVVFQFKSSKKSNNGTDVNAGQIPQLLYRLPTSDGSASKGKQQTSEPVHILKRSFARTVSVECFESLLSILHWSWTTLVLGVEELRGLKGFQFTATLLDLERLRFVGTCCLRLLRVYTCEIYPVSATGKAVVEETSKLAECIGKTRTLLRKILSEGVDHCMVKLDNDPQGYLSQPLSLLEAVLQECHNTFTACFHSFYPTPALQWACLCDLLNCLDQDIQEANFKTSSSRLLAAVMSALCHTSVKLTSIFPIAYDGEVLLRSIVKQVSTENDSTLVHRFPLLVAHMEKLSQSEENISGMTSFREVLEKMLVIVVLPVRNSLRRENELFSSHLVSNTCGLLASIVSELTASALGSEVDGLNSLHSVKASANRFTKTSQGRSWNTGNGSPDAICFSVDKPGIVVVGFSVYGGGGIHEYELEVLVDDSEHAGDSTHSHRWTSLELVKGTYTTDDSPSDIAEIRLDKVVPLKENVKYAVRLRNYGSRTANGDGGMTTVQCPDGVTFTFSTCSLSSNGTNQTRGQIPQILYYRSEFDGDLQSQLLSKANEEDKNCSRALSVVSTVVRASKDLLHRALAVDADDIPELLSSSSLFSMLLPLIIAYIGPVAAAIPKVAVEVFGLVQQLLPSVAILNQKYAPPAFNPNQSTDSTTGNQPEQGLSACTTSSHYAVIESEHPYKPACVMHYKVTFPECVRWMTIEFDPQCGTAQSEDVLRLLIPVRTVQNSGYGPKLTSVHENLNSWIELKKFSGSSGWPTMVLVLPGNEALFSLETASDYVKDDKASFYGFKCFAIGYEFSPGPDEGVIQLEKELANLGGVCAAALMKKDLALPIGNELEEDLEILEEAALQVCKTHSGILGKGLALSHSPTILEALEGNLPLQIQSNEQSFLDDFIACVPGSSGGRLARWLQPDSYADPQKTSLILNKDDIRCGWPTTITVQTKDQYGDVVHVPNMKVEVKAVPVSQKKMSLQQDQAKKPQRIPGSPAVTAASSNTDMTYGGLASPKLDVSYEPMIVKEARYIAITMMKVYENYSFEELRFASPTPKRPSENMLIRVNNDGTYCANWTPGAIGLYTLHVTIDGIEIDAGLEVKVKDPPKGMIPPGTQLVKPKSEPQPNKVRKFVAKDSAGLRIRSHPSLQSEQIGIVKVNGTITFIDEIHNDDGVWLRLNDETIKKYVPNMNGYTEAWCLSFNQHLGKSLLVPVDNIFNASQGVRDLDVFSWTSKAFFPQESKTNTDDFFKDINSCCPQEATMQEQDMPFLRGGPGMYKVVKTGPSGHNIRSCPNLRGIPIGMLVLGNKVKAVGEVTNSEGTWVQLDQNSMVEFCESDEGEAWSLARDRGGNQYLRHEDEQALLDQNSQTPPPSPFSVQAFNKGASCSAQGFDYGLGNSKGDRGNISTSSKPASTSGKSELSSKHSRSLKPDGRMSRTTADQKKPRGTESLSASESLILKSDAAKLRSDSHSRSLSPNHNTLQTLKSDGRMPSSSRAESPGPGSRLSSPKPKTLPANRSSPSGASSPRSSSPHDKNLPQKSTAPVKTKLDPPRERSKSDSYTLDPDTLRKKKMPLTEPLRGRSTSPKPKSVPKDSTDSPGSENRAPSPHVVQENLHSEVVEVCTSSTLKTNSLTDSTCDDSSEFKSVDEGSNKVHFSIGKAPLKDEQEMRASPKISRKCANRHTRPKKEKSSFLFKGDGSKPLEPAKQAMSPSVAECARAVFASFLWHEGIVHDAMACSSFLKFHPELSKEHAPIRSSLNSQQPTEEKETKLKNRHSLEISSALNMFNIAPHGPDISKMGSINKNKVLSMLKEPPLHEKCEDGKTETTFEMSMHNTMKSKSPLPLTLQHLVAFWEDISLATIKAASQNMIFPSPGSCAVLKKKECEKENKKSKKEKKKKEKAEVRPRGNLFGEMAQLAVGGPEKDTICELCGESHPYPVTYHMRQAHPGCGRYAGGQGYNSIGHFCGGWAGNCGDGGIGGSTWYLVCDRCREKYLREKQAAAREKVKQSRRKPMQVKTPRALPTMEAHQVIKANALFLLSLSSAAEPSILCYHPAKPFQSQLPSVKEGISEDLPVKMPCLYLQTLARHHHENFVGYQDDNLFQDEMRYLRSTSVPAPYISVTPDASPNVFEEPESNMKSMPPSLETSPITDTDLAKRTVFQRSYSVVASEYDKQHSILPAQEKCLTVKKTKTKNKAKNNTTTNPKNANKHKRGGPPPQTDPPARRHTTHDSAPGLTTSTRAGPPTDGDGQSQQPPATARGNT

SEQ ID NO: 852872 - protein, 3073 aa, Homo sapiens
MPVPDGSVAAAGLGLGLPAADSPGHYQLLLSGRALADRYRRIYTAALNDRDQGGGSAGHPASRNKKILNKKKLKRKQKSKSKVKTRSKSENLENTVIIPDIKLHSNPSAFNIYCNVRHCVLEWQKKEISLAAASKNSVQSGESDSDEEEESKEPPIKLPKIIEVGLCEVFELIKETRFSHPSLCLRSLQALLNVLQGQQPEVLQSEPPEVLESLFQLLLEITVRSTGMNDSTGQSLTALSCACLFSLVASWGETGRTLQAISAILTNNGSHACQTIQRLRNAIRAHQQEYKNYVHGKPPRGYEVPTILNSLQRSVQAVLVGKIQIQDWFSNGIKKAALMHKWPLKEISVDEDDQCLLQNDGFFLYLLCKDGLYKIGSGYSGTVRGHIYNSTSRIRNRKEKKSWLGYAQGYLLYRDVNNHSMTAIRISPETLEQDGTVMLPDCHTEGQNILFTDGEYINQIAASRDDGFVVRIFATSTEPVLQQELQLKLARKCLHACGISLFDLEKDLHIISTGFDEESAILGAGREFALMKTANGKIYYTGKYQSLGIKQGGPSAGKWVELPITKSPKIVHFSVGHDGSHALLVAEDGSIFFTGSASKGEDGESTKSRRQSKPYKPKKIIKMEGKIVVYTACNNGSSSVISKDGELYMFGKDAIYSDSSSLVTDLKGHFVTQVAMGKAHTCVLMKNGEVWTFGVNNKGQCGRDTGAMNQGGKGFGVENMATAMDEDLEEELDEKDEKSMMCPPGMHKWKLEQCMVCTVCGDCTGYGASCVSSGRPDRVPGGICGCGSGESGCAVCGCCKACARELDGQEARQRGILDAVKEMIPLDLLLAVPVPGVNIEEHLQLRQEEKRQRVIRRHRLEEGRGPLVFAGPIFMNHREQALARLRSHPAHVKHKRDKHKDGSGERGEKDASKITTYPPGSVRFDCELRAVQVSCGFHHSVVLMENGDVYTFGYGQHGQLGHGDVNSRGCPTLVQALPGPSTQVTAGSNHTAVLLMDGQVFTFGSFSKGQLGRPILDVPYWNAKPAPMPNIGSKYGRKATWIGASGDQTFLRIDEALINSHVLATSEIFASKHIIGLVPASISEPPPFKCLLINKVDGSCKTFNDSEQEDLQGFGVCLDPVYDVIWRFRPNTRELWCYNAVVADARLPSAADMQSRCSILSPELALPTGSRALTTRSHAALHILGCLDTLAAMQDLKMGVASTEEETQAVMKVYSKEDYSVVNRFESHGGGWGYSAHSVEAIRFSADTDILLGGLGLFGGRGEYTAKIKLFELGPDGGDHETDGDLLAETDVLAYDCAAREKYAMMFDEPVLLQAGWWYVAWARVSGPSSDCGSHGQASITTDDGVVFQFKSSKKSNNGTDVNAGQIPQLLYRLPTSDGSASKGKQQTSEPVHILKRSFARTVSVECFESLLSILHWSWTTLVLGVEELRGLKGFQFTATLLDLERLRFVGTCCLRLLRVYTCEIYPVSATGKAVVEETSKLAECIGKTRTLLRKILSEGVDHCMVKLDNDPQGYLSQPLSLLEAVLQECHNTFTACFHSFYPTPALQWACLCDLLNCLDQDIQEANFKTSSSRLLAAVMSALCHTSVKLTSIFPIAYDGEVLLRSIVKQVSTENDSTLVHRFPLLVAHMEKLSQSEENISGMTSFREVLEKMLVIVVLPVRNSLRRENELFSSHLVSNTCGLLASIVSELTASALGSEVDGLNSLHSVKASANRFTKTSQGRSWNTGNGSPDAICFSVDKPGIVVVGFSVYGGGGIHEYELEVLVDDSEHAGDSTHSHRWTSLELVKGTYTTDDSPSDIAEIRLDKVVPLKENVKYAVRLRNYGSRTANGDGGMTTVQCPDGVTFTFSTCSLSSNGTNQTRGQIPQILYYRSEFDGDLQSQLLSKANEEDKNCSRALSVVSTVVRASKDLLHRALAVDADDIPELLSSSSLFSMLLPLIIAYIGPVAAAIPKVAVEVFGLVQQLLPSVAILNQKYAPPAFNPNQSTDSTTGNQPEQGLSACTTSSHYAVIESEHPYKPACVMHYKVTFPECVRWMTIEFDPQCGTAQSEDVLRLLIPVRTVQNSGYGPKLTSVHENLNSWIELKKFSGSSGWPTMVLVLPGNEALFSLETASDYVKDDKASFYGFKCFAIGYEFSPGPDEGVIQLEKELANLGGVCAAALMKKDLALPIGNELEEDLEILEEAALQVCKTHSGILGKGLALSHSPTILEALEGNLPLQIQSNEQSFLDDFIACVPGSSGGRLARWLQPDSYADPQKTSLILNKDDIRCGWPTTITVQTKDQYGDVVHVPNMKVEVKAVPVSQKKMSLQQDQAKKPQRIPGSPAVTAASSNTDMTYGGLASPKLDVSYEPMIVKEARYIAITMMKVYENYSFEELRFASPTPKRPSENMLIRVNNDGTYCANWTPGAIGLYTLHVTIDGIEIDAGLEVKVKDPPKGMIPPGTQLVKPKSEPQPNKVRKFVAKDSAGLRIRSHPSLQSEQIGIVKVNGTITFIDEIHNDDGVWLRLNDETIKKYVPNMNGYTEAWCLSFNQHLGKSLLVPVDNIFNASQGVRDLDVFSWTSKAFFPQESKTNTDDFFKDINSCCPQEATMQEQDMPFLRGGPGMYKVVKTGPSGHNIRSCPNLRGIPIGMLVLGNKVKAVGEVTNSEGTWVQLDQNSMVEFCESDEGEAWSLARDRGGNQYLRHEDEQALLDQNSQTPPPSPFSVQAFNKGASCSAQGFDYGLGNSKVLTVLPTAGDQLSAILNSIQSRPNLPAPSIFDQAAKPPSSLVHSPFVFGQPLSFQQPQLQSDRGNISTSSKPASTSGKSELSSKHSRSLKPDGRMSRTTADQKKPRGTESLSASESLILKSDAAKLRSDSHSRSLSPNHNTLQTLKSDGRMPSSSRAESPGPGSRLSSPKPKTLPANRSSPSGASSPRSSSPHDKNLPQKSTAPVKTKLDPPRERSKSDSYTLDPDTLRKKKMPLTEPLRGRSTSPKPKSVPKDSTDSPGSENRAPSPHVVQENLHSEVVEVCTSSTLKTNSLTDSTCDDSSEFKSVVRMYLGELLFGLNFIGVLWASGTWMLASFPRFGKFSVIIS

SEQ ID NO: 852873 - protein, 163 aa, Homo sapiens
MPVPDGSVAAAGLGLGLPAADSPGHYQLLLSGRALADRYRRIYTAALNDRDQGGGSAGHPASRNKKILNKKKLKRKQKSKSKVKTRSKSENLENTVIIPDIKLHSNPSAFNIYCNVRHCVLEWQKKEISLAAASKNSVQSGESDSDEEEESKEPPIKLPKVSH

SEQ ID NO: 852874 - protein, 227 aa, Homo sapiens
MPVPDGSVAAAGLGLGLPAADSPGHYQLLLSGRALADRYRRIYTAALNDRDQGGGSAGHPASRNKKILNKKKLKRKQKSKSKVKTRSKSENLENTVIIPDIKLHSNPSAFNIYCNVRHCVLEWQKKEISLAAASKNSVQSGESDSDEEEESKEPPIKLPKIIEVGLCEVFELIKETRFSHPSLCLRSLQALLNVLQGQQPEVLQSEPPEVLGKSQGSFSEAFKSEYN

SEQ ID NO: 852875 - protein, 4206 aa, Homo sapiens; identical to SEQ ID NO: 852868

SEQ ID NO: 852876 - protein, 4339 aa, Homo sapiens
MPVPDGSVAAAGLGLGLPAADSPGHYQLLLSGRALADRYRRIYTAALNDRDQGGGSAGHPASRNKKILNKKKLKRKQKSKSKVKTRSKSENLENTVIIPDIKLHSNPSAFNIYCNVRHCVLEWQKKEISLAAASKNSVQSGESDSDEEEESKEPPIKLPKIIEVGLCEVFELIKETRFSHPSLCLRSLQALLNVLQGQQPEVLQSEPPEVLESLFQLLLEITVRSTGMNDSTGQSLTALSCACLFSLVASWGETGRTLQAISAILTNNGSHACQTIQRLRNAIRAHQQEYKNYVHGKPPRGYEVPTILNSLQRSVQAVLVGKIQIQDWFSNGIKKAALMHKWPLKEISVDEDDQCLLQNDGFFLYLLCKDGLYKIGSGYSGTVRGHIYNSTSRIRNRKEKKSWLGYAQGYLLYRDVNNHSMTAIRISPETLEQDGTVMLPDCHTEGQNILFTDGEYINQIAASRDDGFVVRIFATSTEPVLQQELQLKLARKCLHACGISLFDLEKDLHIISTGFDEESAILGAGREFALMKTANGKIYYTGKYQSLGIKQGGPSAGKWVELPITKSPKIVHFSVGHDGSHALLVAEDGSIFFTGSASKGEDGESTKSRRQSKPYKPKKIIKMEGKIVVYTACNNGSSSVISKDGELYMFGKDAIYSDSSSLVTDLKGHFVTQVAMGKAHTCVLMKNGEVWTFGVNNKGQCGRDTGAMNQGGKGFGVENMATAMDEDLEEELDEKDEKSMMCPPGMHKWKLEQCMVCTVCGDCTGYGASCVSSGRPDRVPGGICGCGSGESGCAVCGCCKACARELDGQEARQRGILDAVKEMIPLDLLLAVPVPGVNIEEHLQLRQEEKRQRVIRRHRLEEGRGPLVFAGPIFMNHREQALARLRSHPAHVKHKRDKHKDGSGERGEKDASKITTYPPGSVRFDCELRAVQVSCGFHHSVVLMENGDVYTFGYGQHGQLGHGDVNSRGCPTLVQALPGPSTQVTAGSNHTAVLLMDGQVFTFGSFSKGQLGRPILDVPYWNAKPAPMPNIGSKYGRKATWIGASGDQTFLRIDEALINSHVLATSEIFASKHIIGLVPASISEPPPFKCLLINKVDGSCKTFNDSEQEDLQGFGVCLDPVYDVIWRFRPNTRELWCYNAVVADARLPSAADMQSRCSILSPELALPTGSRALTTRSHAALHILGCLDTLAAMQDLKMGVASTEEETQAVMKVYSKEDYSVVNRFESHGGGWGYSAHSVEAIRFSADTDILLGGLGLFGGRGEYTAKIKLFELGPDGGDHETDGDLLAETDVLAYDCAAREKYAMMFDEPVLLQAGWWYVAWARVSGPSSDCGSHGQASITTDDGVVFQFKSSKKSNNGTDVNAGQIPQLLYRLPTSDGSASKGKQQTSEPVHILKRSFARTVSVECFESLLSILHWSWTTLVLGVEELRGLKGFQFTATLLDLERLRFVGTCCLRLLRVYTCEIYPVSATGKAVVEETSKLAECIGKTRTLLRKILSEGVDHCMVKLDNDPQGYLSQPLSLLEAVLQECHNTFTACFHSFYPTPALQWACLCDLLNCLDQDIQEANFKTSSSRLLAAVMSALCHTSVKLTSIFPIAYDGEVLLRSIVKQVSTENDSTLVHRFPLLVAHMEKLSQSEENISGMTSFREVLEKMLVIVVLPVRNSLRRENELFSSHLVSNTCGLLASIVSELTASALGSEVDGLNSLHSVKASANRFTKTSQGRSWNTGNGSPDAICFSVDKPGIVVVGFSVYGGGGIHEYELEVLVDDSEHAGDSTHSHRWTSLELVKGTYTTDDSPSDIAEIRLDKVVPLKENVKYAVRLRNYGSRTANGDGGMTTVQCPDGVTFTFSTCSLSSNGTNQTRGQIPQILYYRSEFDGDLQSQLLSKANEEDKNCSRALSVVSTVVRASKDLLHRALAVDADDIPELLSSSSLFSMLLPLIIAYIGPVAAAIPKVAVEVFGLVQQLLPSVAILNQKYAPPAFNPNQSTDSTTGNQPEQGLSACTTSSHYAVIESEHPYKPACVMHYKVTFPECVRWMTIEFDPQCGTAQSEDVLRLLIPVRTVQNSGYGPKLTSVHENLNSWIELKKFSGSSGWPTMVLVLPGNEALFSLETASDYVKDDKASFYGFKCFAIGYEFSPGPDEGVIQLEKELANLGGVCAAALMKKDLALPIGNELEEDLEILEEAALQVCKTHSGILGKGLALSHSPTILEALEGNLPLQIQSNEQSFLDDFIACVPGSSGGRLARWLQPDSYADPQKTSLILNKDDIRCGWPTTITVQTKDQYGDVVHVPNMKVEVKAVPVSQKKMSLQQDQAKKPQRIPGSPAVTAASSNTDMTYGGLASPKLDVSYEPMIVKEARYIAITMMKVYENYSFEELRFASPTPKRPSENMLIRVNNDGTYCANWTPGAIGLYTLHVTIDGIEIDAGLEVKVKDPPKGMIPPGTQLVKPKSEPQPNKVRKFVAKDSAGLRIRSHPSLQSEQIGIVKVNGTITFIDEIHNDDGVWLRLNDETIKKYVPNMNGYTEAWCLSFNQHLGKSLLVPVDNIFNASQGVRDLDVFSWTSKAFFPQESKTNTDDFFKDINSCCPQEATMQEQDMPFLRGGPGMYKVVKTGPSGHNIRSCPNLRGIPIGMLVLGNKVKAVGEVTNSEGTWVQLDQNSMVEFCESDEGEAWSLARDRGGNQYLRHEDEQALLDQNSQTPPPSPFSVQAFNKGASCSAQGFDYGLGNSKGDRGNISTSSKPASTSGKSELSSKHSRSLKPDGRMSRTTADQKKPRGTESLSASESLILKSDAAKLRSDSHSRSLSPNHNTLQTLKSDGRMPSSSRAESPGPGSRLSSPKPKTLPANRSSPSGASSPRSSSPHDKNLPQKSTAPVKTKLDPPRERSKSDSYTLDPDTLRKKKMPLTEPLRGRSTSPKPKSVPKDSTDSPGSENRAPSPHVVQENLHSEVVEVCTSSTLKTNSLTDSTCDDSSEFKSVDEGSNKVHFSIGKAPLKDEQEMRASPKISRKCANRHTRPKKEKSSFLFKGDGSKPLEPAKQAMSPSVAECARAVFASFLWHEGIVHDAMACSSFLKFHPELSKEHAPIRSSLNSQQPTEEKETKLKNRHSLEISSALNMFNIAPHGPDISKMGSINKNKVLSMLKEPPLHEKCEDGKTETTFEMSMHNTMKSKSPLPLTLQHLVAFWEDISLATIKAASQNMIFPSPGSCAVLKKKECEKENKKSKKEKKKKEKAEVRPRGNLFGEMAQLAVGGPEKDTICELCGESHPYPVTYHMRQAHPGCGRYAGGQGYNSIGHFCGGWAGNCGDGGIGGSTWYLVCDRCREKYLREKQAAAREKVKQSRRKPMQVKTPRALPTMEAHQASSENFVGYQDDNLFQDEMRYLRSTSVPAPYISVTPDASPNVFEEPESNMKSMPPSLETSPITDTDLAKRTVFQRSYSVVASEYDKQHSILPARVKAIPRRRVNSGDTEVGSSLLRHPSPELSRLISAHSSLSKGERNFQWPVLAFVIQHHDLEGLEIAMKQALRKSACRVFAMEAFNWLLCNVIQTTSLHDILWHFVASLTPAPVEPEEEEDEENKTSKENSEQEKDTRVCEHPLSDIVIAGEAAHPLPHTFHRLLQTISDLMMSLPSGSSLQQMALRCWSLKFKQSDHQFLHQSNVFHHINNILSKSDDGDSEESFSISIQSGFEAMSQELCIVMCLKDLTSIVDIKTSSRPAMIGSLTDGSTETFWESGDEDKNKTKNITINCVKGINARYVSVHVDNSRDLGNKVTSMTFLTGKAVEDLCRIKQVDLDSRHIGWVTSELPGGDNHIIKIELKGPENTLRVRQVKVLGWKDGESTKIAGQISASVAQQRNCEAETLRVFRLITSQVFGKLISGDAEPTPEQEEKALLSSPEGEEKVYNATSDADLKEHMVGIIFSRSKLTNLQKQVCAHIVQAIRMEATRVREEWEHAISSKENANSQPNDEDASSDAYCFELLSMVLALSGSNVGRQYLAQQLTLLQDLFSLLHTASPRVQRQVTSLLRRVLPEVTPSRLASIIGVKSLPPADISDIIHSTEKGDWNKLGILDMFLGCIAKALTVQLKAKGTTITGTAGTTVGKGVTTVTLPMIFNSSYLRRGESHWWMKGSTPTQISEIIIKLIKDMAAGHLSEAWSRVTKNAIAETIIALTKMEEEFRSPVRCIATTRLWLALASLCVLDQDHVDRLSSGRWMGKDGQQKQMPMCDNHDDGETAAIILCNVCGNLCTDCDRFLHLHRRTKTHQRQVFKEEEEAIKVDLHEGCGRTKLFWLMALADSKTMKAMVEFREHTGKPTTSSSEACRFCGSRSGTELSAVGSVCSDADARNTLR

SEQ ID NO: 852877 - protein, 2746 aa, Homo sapiens
TSPRLGGFPADLLQACRFEKPAWTPSLCQKYAPPAFNPNQSTDSTTGNQPEQGLSACTTSSHYAVIESEHPYKPACVMHYKVTFPECVRWMTIEFDPQCGTAQSEDVLRLLIPVRTVQNSGYGPKLTSVHENLNSWIELKKFSGSSGWPTMVLVLPGNEALFSLETASDYVKDDKASFYGFKCFAIGYEFSPGPDEGVIQLEKELANLGGVCAAALMKKDLALPIGNELEEDLEILEEAALQVCKTHSGILGKGLALSHSPTILEALEGNLPLQIQSNEQSFLDDFIACVPGSSGGRLARWLQPDSYADPQKTSLILNKDDIRCGWPTTITVQTKDQYGDVVHVPNMKVEVKAVPVSQKKMSLQQDQAKKPQRIPGSPAVTAASSNTDMTYGGLASPKLDVSYEPMIVKEARYIAITMMKVYENYSFEELRFASPTPKRPSENMLIRVNNDGTYCANWTPGAIGLYTLHVTIDGIEIDAGLEVKVKDPPKGMIPPGTQLVKPKSEPQPNKVRKFVAKDSAGLRIRSHPSLQSEQIGIVKVNGTITFIDEIHNDDGVWLRLNDETIKKYVPNMNGYTEAWCLSFNQHLGKSLLVPVDNIFNASQGVRDLDVFSWTSKAFFPQESKTNTDDFFKDINSCCPQEATMQEQDMPFLRGGPGMYKVVKTGPSGHNIRSCPNLRGIPIGMLVLGNKVKAVGEVTNSEGTWVQLDQNSMVEFCESDEGEAWSLARDRGGNQYLRHEDEQALLDQNSQTPPPSPFSVQAFNKGASCSAQGFDYGLGNSKGDRGNISTSSKPASTSGKSELSSKHSRSLKPDGRMSRTTADQKKPRGTESLSASESLILKSDAAKLRSDSHSRSLSPNHNTLQTLKSDGRMPSSSRAESPGPGSRLSSPKPKTLPANRSSPSGASSPRSSSPHDKNLPQKSTAPVKTKLDPPRERSKSDSYTLDPDTLRKKKMPLTEPLRGRSTSPKPKSVPKDSTDSPGSENRAPSPHVVQENLHSEVVEVCTSSTLKTNSLTDSTCDDSSEFKSVDEGSNKVHFSIGKAPLKDEQEMRASPKISRKCANRHTRPKKEKSSFLFKGDGSKPLEPAKQAMSPSVAECARAVFASFLWHEGIVHDAMACSSFLKFHPELSKEHAPIRSSLNSQQPTEEKETKLKNRHSLEISSALNMFNIAPHGPDISKMGSINKNKVLSMLKEPPLHEKCEDGKTETTFEMSMHNTMKSKSPLPLTLQHLVAFWEDISLATIKAASQNMIFPSPGSCAVLKKKECEKENKKSKKEKKKKEKAEVRPRGNLFGEMAQLAVGGPEKDTICELCGESHPYPVTYHMRQAHPGCGRYAGGQGYNSIGHFCGGWAGNCGDGGIGGSTWYLVCDRCREKYLREKQAAAREKVKQSRRKPMQVKTPRALPTMEAHQVIKANALFLLSLSSAAEPSILCYHPAKPFQSQLPSVKEGISEDLPVKMPCLYLQTLARHHHENFVGYQDDNLFQDEMRYLRSTSVPAPYISVTPDASPNVFEEPESNMKSMPPSLETSPITDTDLAKRTVFQRSYSVVASEYDKQHSILPARVKAIPRRRVNSGDTEVGSSLLRHPSPELSRLISAHSSLSKGERNFQWPVLAFVIQHHDLEGLEIAMKQALRKSACRVFAMEAFNWLLCNVIQTTSLHDILWHFVASLTPAPVEPEEEEDEENKTSKENSEQEKDTRVCEHPLSDIVIAGEAAHPLPHTFHRLLQTISDLMMSLPSGSSLQQMALRCWSLKFKQSDHQFLHQSNVFHHINNILSKSDDGDSEESFSISIQSGFEAMSQELCIVMCLKDLTSIVDIKTSSRPAMIGSLTDGSTETFWESGDEDKNKTKNITINCVKGINARYVSVHVDNSRDLGNKVTSMTFLTGKAVEDLCRIKQVDLDSRHIGWVTSELPGGDNHIIKIELKGPENTLRVRQVKVLGWKDGESTKIAGQISASVAQQRNCEAETLRVFRLITSQVFGKLISGDAEPTPEQEEKALLSSPEGEEKVYNATSDADLKEHMVGIIFSRSKLTNLQKQVCAHIVQAIRMEATRVREEWEHAISSKENANSQPNDEDASSDAYCFELLSMVLALSGSNVGRQYLAQQLTLLQDLFSLLHTASPRVQRQVTSLLRRVLPEVTPSRLASIIGVKSLPPADISDIIHSTEKGDWNKLGILDMFLGCIAKALTVQLKAKGTTITGTAGTTVGKGVTTVTLPMIFNSSYLRRGESHWWMKGSTPTQISEIIIKLIKDMAAGHLSEAWSRVTKNAIAETIIALTKMEEEFRSPVRCIATTRLWLALASLCVLDQDHVDRLSSGRWMGKDGQQKQMPMCDNHDDGETAAIILCNVCGNLCTDCDRFLHLHRRTKTHQRQVFKEEEEAIKVDLHEGCGRTKLFWLMALADSKTMKAMVEFREHTGKPTTSSSEACRFCGSRSGTELSAVGSVCSDADCQEYAKIACSKTHPCGHPCGGVKNEEHCLPCLHGCDKSATSLKQDADDMCMICFTEALSAAPAIQLDCSHIFHLQCCRRVLENRWLGPRITFGFISCPICKNKINHIVLKDLLDPIKELYEDVRRKALMRLEYEGLHKSEAITTPGVRFYNDPAGYAMNRYAYYVCYKCRKAYFGGEARCDAEAGRGDDYDPRELICGACSDVSRAQMCPKHGTDFLEYKCRYCCSVAVFFCFGTTHFCNACHDDFQRMTSIPKEELPHCPAGPKGKQLEGTECPLHVVHPPTGEEFALGCGVCRNAHTF

SEQ ID NO: 852878 - protein, 2103 aa, Homo sapiens
MQEQDMPFLRGGPGMYKVVKTGPSGHNIRSCPNLRGIPIGMLVLGNKVKAVGEVTNSEGTWVQLDQNSMVEFCESDEGEAWSLARDRGGNQYLRHEDEQALLDQNSQTPPPSPFSVQAFNKGASCSAQGFDYGLGNSKGDRGNISTSSKPASTSGKSELSSKHSRSLKPDGRMSRTTADQKKPRGTESLSASESLILKSDAAKLRSDSHSRSLSPNHNTLQTLKSDGRMPSSSRAESPGPGSRLSSPKPKTLPANRSSPSGASSPRSSSPHDKNLPQKSTAPVKTKLDPPRERSKSDSYTLDPDTLRKKKMPLTEPLRGRSTSPKPKSVPKDSTDSPGSENRAPSPHVVQENLHSEVVEVCTSSTLKTNSLTDSTCDDSSEFKSVDEGSNKVHFSIGKAPLKDEQEMRASPKISRKCANRHTRPKKEKSSFLFKGDGSKPLEPAKQAMSPSVAECARAVFASFLWHEGIVHDAMACSSFLKFHPELSKEHAPIRSSLNSQQPTEEKETKLKNRHSLEISSALNMFNIAPHGPDISKMGSINKNKVLSMLKEPPLHEKCEDGKTETTFEMSMHNTMKSKSPLPLTLQHLVAFWEDISLATIKAASQNMIFPSPGSCAVLKKKECEKENKKSKKEKKKKEKAEVRPRGNLFGEMAQLAVGGPEKDTICELCGESHPYPVTYHMRQAHPGCGRYAGGQGYNSIGHFCGGWAGNCGDGGIGGSTWYLVCDRCREKYLREKQAAAREKVKQSRRKPMQVKTPRALPTMEAHQVIKANALFLLSLSSAAEPSILCYHPAKPFQSQLPSVKEGISEDLPVKMPCLYLQTLARHHHENFVGYQDDNLFQDEMRYLRSTSVPAPYISVTPDASPNVFEEPESNMKSMPPSLETSPITDTDLAKRTVFQRSYSVVASEYDKQHSILPARVKAIPRRRVNSGDTEVGSSLLRHPSPELSRLISAHSSLSKGERNFQWPVLAFVIQHHDLEGLEIAMKQALRKSACRVFAMEAFNWLLCNVIQTTSLHDILWHFVASLTPAPVEPEEEEDEENKTSKENSEQEKDTRVCEHPLSDIVIAGEAAHPLPHTFHRLLQTISDLMMSLPSGSSLQQMALRCWSLKFKQSDHQFLHQSNVFHHINNILSKSDDGDSEESFSISIQSGFEAMSQELCIVMCLKDLTSIVDIKTSSRPAMIGSLTDGSTETFWESGDEDKNKTKNITINCVKGINARYVSVHVDNSRDLGNKVTSMTFLTGKAVEDLCRIKQVDLDSRHIGWVTSELPGGDNHIIKIELKGPENTLRVRQVKVLGWKDGESTKIAGQISASVAQQRNCEAETLRVFRLITSQVFGKLISGDAEPTPEQEEKALLSSPEGEEKVYNATSDADLKEHMVGIIFSRSKLTNLQKQVCAHIVQAIRMEATRVREEWEHAISSKENANSQPNDEDASSDAYCFELLSMVLALSGSNVGRQYLAQQLTLLQDLFSLLHTASPRVQRQVTSLLRRVLPEVTPSRLASIIGVKSLPPADISDIIHSTEKGDWNKLGILDMFLGCIAKALTVQLKAKGTTITGTAGTTVGKGVTTVTLPMIFNSSYLRRGESHWWMKGSTPTQISEIIIKLIKDMAAGHLSEAWSRVTKNAIAETIIALTKMEEEFRSPVRCIATTRLWLALASLCVLDQDHVDRLSSGRWMGKDGQQKQMPMCDNHDDGETAAIILCNVCGNLCTDCDRFLHLHRRTKTHQRQVFKEEEEAIKVDLHEGCGRTKLFWLMALADSKTMKAMVEFREHTGKPTTSSSEACRFCGSRSGTELSAVGSVCSDADCQEYAKIACSKTHPCGHPCGGVKNEEHCLPCLHGCDKSATSLKQDADDMCMICFTEALSAAPAIQLDCSHIFHLQCCRRVLENRWLGPRITFGFISCPICKNKINHIVLKDLLDPIKELYEDVRRKALMRLEYEGLHKSEAITTPGVRFYNDPAGYAMNRYAYYVCYKCRKAYFGGEARCDAEAGRGDDYDPRELICGACSDVSRAQMCPKHGTDFLEYKCRYCCSVAVFFCFGTTHFCNACHDDFQRMTSIPKEELPHCPAGPKGKQLEGTECPLHVVHPPTGEEFALGCGVCRNAHTF

SEQ ID NO: 852879 - protein, 4206 aa, Homo sapiens; identical to SEQ ID NO: 852868

SEQ ID NO: 852880 - protein, 4206 aa, Homo sapiens; identical to SEQ ID NO: 852868

SEQ ID NO: 852881 - protein, 4206 aa, Homo sapiens; identical to SEQ ID NO: 852868

SEQ ID NO: 852882 - protein, 274 aa, Homo sapiens
TLEIPLANVYPCATSLKQDADDMCMICFTEALSAAPAIQLDCSHIFHLQCCRRVLENRWLGPRITFGFISCPICKNKINHIVLKDLLDPIKELYEDVRRKALMRLEYEGLHKSEAITTPGVRFYNDPAGYAMNRYAYYVCYKCRKAYFGGEARCDAEAGRGDDYDPRELICGACSDVSRAQMCPKHGTDFLEYKCRYCCSVAVFFCFGTTHFCNACHDDFQRMTSIPKEELPHCPAGPKGKQLEGTECPLHVVHPPTGEEFALGCGVCRNAHTF

SEQ ID NO: 852883 - protein, 2737 aa, Homo sapiens
MPVPDGSVAAAGLGLGLPAADSPGHYQLLLSGRALADRYRRIYTAALNDRDQGGGSAGHPASRNKKILNKKKLKRKQKSKSKVKTRSKSENLENTVIIPDIKLHSNPSAFNIYCNVRHCVLEWQKKEISLAAASKNSVQSGESDSDEEEESKEPPIKLPKIIEVGLCEVFELIKETRFSHPSLCLRSLQALLNVLQGQQPEVLQSEPPEVLESLFQLLLEITVRSTGMNDSTGQSLTALSCACLFSLVASWGETGRTLQAISAILTNNGSHACQTIQRLRNAIRAHQQEYKNYVHGKPPRGYEVPTILNSLQRSVQAVLVGKIQIQDWFSNGIKKAALMHKWPLKEISVDEDDQCLLQNDGFFLYLLCKDGLYKIGSGYSGTVRGHIYNSTSRIRNRKEKKSWLGYAQGYLLYRDVNNHSMTAIRISPETLEQDGTVMLPDCHTEGQNILFTDGEYINQIAASRDDGFVVRIFATSTEPVLQQELQLKLARKCLHACGISLFDLEKDLHIISTGFDEESAILGAGREFALMKTANGKIYYTGKYQSLGIKQGGPSAGKWVELPITKSPKIVHFSVGHDGSHALLVAEDGSIFFTGSASKGEDGESTKSRRQSKPYKPKKIIKMEGKIVVYTACNNGSSSVISKDGELYMFGKDAIYSDSSSLVTDLKGHFVTQVAMGKAHTCVLMKNGEVWTFGVNNKGQCGRDTGAMNQGGKGFGVENMATAMDEDLEEELDEKDEKSMMCPPGMHKWKLEQCMVCTVCGDCTGYGASCVSSGRPDRVPGGICGCGSGESGCAVCGCCKACARELDGQEARQRGILDAVKEMIPLDLLLAVPVPGVNIEEHLQLRQEEKRQRVIRRHRLEEGRGPLVFAGPIFMNHREQALARLRSHPAHVKHKRDKHKDGSGERGEKDASKITTYPPGSVRFDCELRAVQVSCGFHHSVVLMENGDVYTFGYGQHGQLGHGDVNSRGCPTLVQALPGPSTQVTAGSNHTAVLLMDGQVFTFGSFSKGQLGRPILDVPYWNAKPAPMPNIGSKYGRKATWIGASGDQTFLRIDEALINSHVLATSEIFASKHIIGLVPASISEPPPFKCLLINKVDGSCKTFNDSEQEDLQGFGVCLDPVYDVIWRFRPNTRELWCYNAVVADARLPSAADMQSRCSILSPELALPTGSRALTTRSHAALHILGCLDTLAAMQDLKMGVASTEEETQAVMKVYSKEDYSVVNRFESHGGGWGYSAHSVEAIRFSADTDILLGGLGLFGGRGEYTAKIKLFELGPDGGDHETDGDLLAETDVLAYDCAAREKYAMMFDEPVLLQAGWWYVAWARVSGPSSDCGSHGQASITTDDGVVFQFKSSKKSNNGTDVNAGQIPQLLYRLPTSDGSASKGKQQTSEPVHILKRSFARTVSVECFESLLSILHWSWTTLVLGVEELRGLKGFQFTATLLDLERLRFVGTCCLRLLRVYTCEIYPVSATGKAVVEETSKLAECIGKTRTLLRKILSEGVDHCMVKLDNDPQGYLSQPLSLLEAVLQECHNTFTACFHSFYPTPALQWACLCDLLNCLDQDIQEANFKTSSSRLLAAVMSALCHTSVKLTSIFPIAYDGEVLLRSIVKQVSTENDSTLVHRFPLLVAHMEKLSQSEENISGMTSFREVLEKMLVIVVLPVRNSLRRENELFSSHLVSNTCGLLASIVSELTASALGSEVDGLNSLHSVKASANRFTKTSQGRSWNTGNGSPDAICFSVDKPGIVVVGFSVYGGGGIHEYELEVLVDDSEHAGDSTHSHRWTSLELVKGTYTTDDSPSDIAEIRLDKVVPLKENVKYAVRLRNYGSRTANGDGGMTTVQCPDGVTFTFSTCSLSSNGTNQTRGQIPQILYYRSEFDGDLQSQLLSKANEEDKNCSRALSVVSTVVRASKDLLHRALAVDADDIPELLSSSSLFSMLLPLIIAYIGPVAAAIPKVAVEVFGLVQQLLPSVAILNQKYAPPAFNPNQSTDSTTGNQPEQGLSACTTSSHYAVIESEHPYKPACVMHYKVTFPECVRWMTIEFDPQCGTAQSEDVLRLLIPVRTVQNSGYGPKLTSVHENLNSWIELKKFSGSSGWPTMVLVLPGNEALFSLETASDYVKDDKASFYGFKCFAIGYEFSPGPDEGVIQLEKELANLGGVCAAALMKKDLALPIGNELEEDLEILEEAALQVCKTHSGILGKGLALSHSPTILEALEGNLPLQIQSNEQSFLDDFIACVPGSSGGRLARWLQPDSYADPQKTSLILNKDDIRCGWPTTITVQTKDQYGDVVHVPNMKVEVKAVPVSQKKMSLQQDQAKKPQRIPGSPAVTAASSNTDMTYGGLASPKLDVSYEPMIVKEARYIAITMMKVYENYSFEELRFASPTPKRPSENMLIRVNNDGTYCANWTPGAIGLYTLHVTIDGIEIDAGLEVKVKDPPKGMIPPGTQLVKPKSEPQPNKVRKFVAKDSAGLRIRSHPSLQSEQIGIVKVNGTITFIDEIHNDDGVWLRLNDETIKKYVPNMNGYTEAWCLSFNQHLGKSLLVPVDNIFNASQGVRDLDVFSWTSKAFFPQESKTNTDDFFKDINSCCPQEATMQEQDMPFLRGGPGMYKVVKTGPSGHNIRSCPNLRGIPIGMLVLGNKVKAVGEVTNSEGTWVQLDQNSMVEFCESDEGEAWSLARDRGGNQYLRHEDEQALLDQNSQTPPPSPFSVQAFNKGASCSAQGFDYGLGNSKGRYLKVSLLLT

SEQ ID NO: 852884 - protein, 84 aa, Homo sapiens
SFYFSYQVTSLLRRVLPEVTPSRLASIIGVKSLPPADISDIIHSTEKGDWNKLGILDMFLGCIAKALTVQLKAKGTTITGTAGT

SEQ ID NO: 852885 - protein, 139 aa, Homo sapiens
MLPLSLLKTAQNHPMLVELKNGETYNGHLVSCDNWMNINLREVICTSRDGDKFWRMPECYIRGSTIKYLRIPDEIIDMVKEEVVAKGRGRGGLQQQKQQKGRGMGGAGRGVFGGRGRGGIPGTGRGQPEKKPGRQAGKQ

SEQ ID NO: 852886 - protein, 153 aa, Homo sapiens
TRGSGRVGRATRATMLPLSLLKTAQNHPMLVELKNGETYNGHLVSCDNWMNINLREVICTSRDGDKFWRMPECYIRGSTIKYLRIPDEIIDMVKEEVVAKGRGRGGLQQQKQQKGRGMGGAGRGVFGGRGRGGIPGTGRGQPEKKPGRQAGKQ

SEQ ID NO: 852887 - protein, 79 aa, Homo sapiens
MLPLSLLKTAQNHPMLVELKNGETYNGHLVSCDNWMNINLREVICTSRVGAAPTNGGGMQGVHTQPPPSLPGPHGRSQW

SEQ ID NO: 852888 - protein, 139 aa, Homo sapiens; identical to SEQ ID NO: 852885

SEQ ID NO: 852889 - protein, 139 aa, Homo sapiens; identical to SEQ ID NO: 852885

SEQ ID NO: 852890 - protein, 178 aa, Homo sapiens
GDPKAVCEGSACPAAVTRTGTDSATARRRTLPPPVPAGTMLPLSLLKTAQNHPMLVELKNGETYNGHLVSCDNWMNINLREVICTSRDGDKFWRMPECYIRGSTIKYLRIPDEIIDMVKEEVVAKGRGRGGLQQQKQQKGRGMGGAGRGVFGGRGRGGIPGTGRGQPEKKPGRQAGKQ

SEQ ID NO: 852891 - protein, 153 aa, Homo sapiens; identical to SEQ ID NO: 852886

SEQ ID NO: 852892 - protein, 174 aa, Homo sapiens
MLPLSLLKTAQNHPMLVELKNGETYNGHLVSCDNWMNINLREVICTSRVKNPNQREPHPRLEGAPVSHSEPGPRAEDEEPVFLDGDKFWRMPECYIRGSTIKYLRIPDEIIDMVKEEVVAKGRGRGGLQQQKQQKGRGMGGAGRGVFGGRGRGGIPGTGRGQPEKKPGRQAGKQ

SEQ ID NO: 852893 - protein, 137 aa, Homo sapiens
EVRSPPDMLLSLLKANPHVVELKWGDVQGHVSCELDELLRSSAQDTDGDKFWRMPECYIRGSTIKYLRIPDEIIDMVKEEVVAKGRGRGGLQQQKQQKGRGMGGAGRGVFGGRGRGGIPGTGRGQPEKKPGRQAGKQ

SEQ ID NO: 852894 - protein, 33 aa, Homo sapiens
MPECYIRGSTIKYLRIPDEIIDMVKEEVVAKGR

SEQ ID NO: 852895 - protein, 115 aa, Homo sapiens
  misc_feature (110)..(110): Xaa can be any naturally occurring amino acid
MLPLSLLKTAQNHPMLVELKNGETYNGHLVSCDNWMNINLREVICTSRDGDKFWRMPECYIRGSTIKYLRIPDEIIDMVKEEVVAKGRGTPEALASKLESGSGPVGWAGXFGPGW

SEQ ID NO: 852896 - protein, 139 aa, Homo sapiens; identical to SEQ ID NO: 852885

SEQ ID NO: 852897 - protein, 104 aa, Homo sapiens
MNINLREVICTSRDGDKFWRMPECYIRGSTIKYLRIPDEIIDMVKEEVVAKGRGRGGLQQQKQQKGRGMGGAGRGVFGGRGRGGIPGTGRGQPEKKPGRQAGKQ

SEQ ID NO: 852898 - protein, 121 aa, Homo sapiens
YGGYVHTDGPSVLSDEDWITLICEKYLQSVDGDKFWRMPECYIRGSTIKYLRIPDEIIDMVKEEVVAKGRGRGGLQQQKQQKGRGMGGAGRGVFGGRGRGGIPGTGRGQPEKKPGRQAGKQ

SEQ ID NO: 852899 - protein, 150 aa, Homo sapiens
GGVAGLRLCLVHREAPTRSGLWAAGEEPQPERAPSQAGGSPSQPLLSQAHGQRKEPVFLDGDKFWRMPECYIRGSTIKYLRIPDEIIDMVKEEVVAKGRGRGGLQQQKQQKGRGMGGAGRGVFGGRGRGGIPGTGRGQPEKKPGRQAGKQ

SEQ ID NO: 852900 - protein, 108 aa, Homo sapiens
MRGEERRGAASRLGDVPARVGGMRSLGPPGARSLPASRAHPWGREGGRLRTPARDLRESGAQRTGSGCSLALDGKWGIGWGAADPLTWITWCVSAGLRRPTTSSPSVD

SEQ ID NO: 852901 - protein, 108 aa, Homo sapiens; identical to SEQ ID NO: 852900

SEQ ID NO: 852902 - protein, 100 aa, Homo sapiens
SLQRAPSPGLPLHPGTLWSLVRPHDSLGLLSHLWGWSLSPGIWTLGAIDEAWLALLAAMCKTCVPGKAPLSLQRSSESHGRSQQSSKCRLGKSRGLCGGD

SEQ ID NO: 852903 - protein, 108 aa, Homo sapiens; identical to SEQ ID NO: 852900

SEQ ID NO: 852904 - protein, 132 aa, Homo sapiens
SLQRAPSPGLPLHPGTLWSLVRPHDSLGLLSHLWGWSLSPGIWTLGAIDEAWLALLAAMCKTCVPGKAPLSLQRSSESHGRSQQSSKCRLGKSRGLCGGWEGLIHIPTRKFSRTPACHLDPLEGPGSGWTTS

SEQ ID NO: 852905 - protein, 108 aa, Homo sapiens; identical to SEQ ID NO: 852900

SEQ ID NO: 852906 - protein, 108 aa, Homo sapiens; identical to SEQ ID NO: 852900

SEQ ID NO: 852907 - protein, 93 aa, Homo sapiens
HSCSSTQFKCNSGRCIPEHWTCDGDNDCGDYSDEKSCEGVTHVCDPSVKFGCKDSARCISKAWVCDGYQGLWHLVRTLLPQCVLMTHTHLTIA

SEQ ID NO: 852908 - protein, 108 aa, Homo sapiens; identical to SEQ ID NO: 852900

SEQ ID NO: 852909 - protein, 108 aa, Homo sapiens; identical to SEQ ID NO: 852900

SEQ ID NO: 852910 - protein, 108 aa, Homo sapiens; identical to SEQ ID NO: 852900

SEQ ID NO: 852911 - protein, 108 aa, Homo sapiens; identical to SEQ ID NO: 852900

SEQ ID NO: 852912 - protein, 108 aa, Homo sapiens; identical to SEQ ID NO: 852900

SEQ ID NO: 852913 - protein, 433 aa, Homo sapiens
MAEAQSGTGQLQEQKKGLLIAVSVSVDKIISHFGAARNLVQKAQLGDSRLSPDVGHLVLTTLCPALHALVADGLKPFRKDLITGQRRSSPWSVVEASVKPGSSTRSLGTLYSQVSRLAPLSSSRSRFHAFILGLLNTKQLELWFSSLQEDAGLLSLLYLPTGFFSLARGGCPSLSTELLLLLQPLSVLTFHLDLLFEHHHHLPLGPPQAPAPPGPPPALQQTMQAMLHFGGRLAQSLRGTSKEAASDPSDSPNLPTPGSWWEQLTQASRVYASGGTEGFPLSRWAPGRHGTAAEEGAQERPLPTDEMAPGRGLWLGRLFGVPGGPAENENGALKSRRPSSWLPPTVSVLALVKRGAPPEMPSPQELEASAPRMVQTHRAVRALCDHTAARPDQLSFRRGEVLRVITTVDEDWLRCGRDGMEGLVPVGYTSLVL

SEQ ID NO: 852914 - protein, 463 aa, Homo sapiens
AGTGPEFLRWQAGVRSSWSFAGVPGAQRLWMAEAQSGTGQLQEQKKGLLIAVSVSVDKIISHFGAARNLVQKAQLGDSRLSPDVGHLVLTTLCPALHALVADGLKPFRKDLITGQRRSSPWSVVEASVKPGSSTRSLGTLYSQVSRLAPLSSSRSRFHAFILGLLNTKQLELWFSSLQEDAGLLSLLYLPTGFFSLARGGCPSLSTELLLLLQPLSVLTFHLDLLFEHHHHLPLGPPQAPAPPGPPPALQQTMQAMLHFGGRLAQSLRGTSKEAASDPSDSPNLPTPGSWWEQLTQASRVYASGGTEGFPLSRWAPGRHGTAAEEGAQERPLPTDEMAPGRGLWLGRLFGVPGGPAENENGALKSRRPSSWLPPTVSVLALVKRGAPPEMPSPQELEASAPRMVQTHRAVRALCDHTAARPDQLSFRRGEVLRVITTVDEDWLRCGRDGMEGLVPVGYTSLVL

SEQ ID NO: 852915 - protein, 545 aa, Homo sapiens
MPRKIEEIKDFLLTARRKDAKSVKIKKNKDNVKFKVRCSRYLYTLVITDKEKAEKLKQSLPPGVGSEGTEMNQTHCLELYYIKILKKTGPAGQAGVRSSWSFAGVPGAQRLWMAEAQSGTGQLQEQKKGLLIAVSVSVDKIISHFGAARNLVQKAQLGDSRLSPDVGHLVLTTLCPALHALVADGLKPFRKDLITGQRRSSPWSVVEASVKPGSSTRSLGTLYSQVSRLAPLSSSRSRFHAFILGLLNTKQLELWFSSLQEDAGLLSLLYLPTGFFSLARGGCPSLSTELLLLLQPLSVLTFHLDLLFEHHHHLPLGPPQAPAPPGPPPALQQTMQAMLHFGGRLAQSLRGTSKEAASDPSDSPNLPTPGSWWEQLTQASRVYASGGTEGFPLSRWAPGRHGTAAEEGAQERPLPTDEMAPGRGLWLGRLFGVPGGPAENENGALKSRRPSSWLPPTVSVLALVKRGAPPEMPSPQELEASAPRMVQTHRAVRALCDHTAARPDQLSFRRGEVLRVITTVDEDWLRCGRDGMEGLVPVGYTSLVL

SEQ ID NO: 852916 - protein, 547 aa, Homo sapiens
MPPTCSPGLRRQDWAPGRCAGLHLPPRAPSSPALQALAGQAGGERGHPAPGVPGSWRWGLCPEGGHREPGWGWGTASAGKCARFHSGARVELPRASGGPAPPLPKTLRGHSTADPRRQLVREPGVLGITLGLLIAVSVSVDKIISHFGAARNLVQKAQLGDSRLSPDVGHLVLTTLCPALHALVADGLKPFRKDLITGQRRSSPWSVVEASVKPGSSTRSLGTLYSQVSRLAPLSSSRSRFHAFILGLLNTKQLELWFSSLQEDAGLLSLLYLPTGFFSLARGGCPSLSTELLLLLQPLSVLTFHLDLLFEHHHHLPLGPPQAPAPPGPPPALQQTMQAMLHFGGRLAQSLRGTSKEAASDPSDSPNLPTPGSWWEQLTQASRVYASGGTEGFPLSRWAPGRHGTAAEEGAQERPLPTDEMAPGRGLWLGRLFGVPGGPAENENGALKSRRPSSWLPPTVSVLALVKRGAPPEMPSPQELEASAPRMVQTHRAVRALCDHTAARPDQLSFRRGEVLRVITTVDEDWLRCGRDGMEGLVPVGYTSLVL

SEQ ID NO: 852917 - protein, 406 aa, Homo sapiens
MAEAQSGTGQLQEQKKGLLIAVSVSVDKIISHFGAARNLVQKVADGLKPFRKDLITGQRRSSPWSVVEASVKPGSSTRSLGTLYSQVSRLAPLSSSRSRFHAFILGLLNTKQLELWFSSLQEDAGLLSLLYLPTGFFSLARGGCPSLSTELLLLLQPLSVLTFHLDLLFEHHHHLPLGPPQAPAPPGPPPALQQTMQAMLHFGGRLAQSLRGTSKEAASDPSDSPNLPTPGSWWEQLTQASRVYASGGTEGFPLSRWAPGRHGTAAEEGAQERPLPTDEMAPGRGLWLGRLFGVPGGPAENENGALKSRRPSSWLPPTVSVLALVKRGAPPEMPSPQELEASAPRMVQTHRAVRALCDHTAARPDQLSFRRGEVLRVITTVDEDWLRCGRDGMEGLVPVGYTSLVL

SEQ ID NO: 852918 - protein, 441 aa, Homo sapiens
MPPTCSPGLRRQDWAPGRCAGLHLPPRAPSSPALQALAGQAGGERGHPAPGVPGSWRWGLCPEGGHREPGWGWGTASAGKCARFHSGARVELPRASGGPAPPLPKTLRGHSTADPRRQLVREPGVLGITLGLLIAVSVSVDKIISHFGAARNLVQKAQLGDSRLSPDVGHLVLTTLCPALHALVADGLKPFRKDLITGQRRSSPWSVVEASVKPGSSTRSLGTLYSQVSRLAPLSSSRSRFHAFILGLLNTKQLELWFSSLQEDAGSWWEQLTQASRVYASGGTEGFPLSRWAPGRHGTAAEEGAQERPLPTDEMAPGRGLWLGRLFGVPGGPAENENGALKSRRPSSWLPPTVSVLALVKRGAPPEMPSPQELEASAPRMVQTHRAVRALCDHTAARPDQLSFRRGEVLRVITTVDEDWLRCGRDGMEGLVPVGYTSLVL

SEQ ID NO: 852919 - protein, 482 aa, Homo sapiens
MPPTCSPGLRRQDWAPGRCAGLHLPPRAPSSPALQALAGQAGVRSSWSFAGVPGAQRLWMAEAQSGTGQLQEQKKGLLIAVSVSVDKIISHFGAARNLVQKAQLGDSRLSPDVGHLVLTTLCPALHALVADGLKPFRKDLITGQRRSSPWSVVEASVKPGSSTRSLGTLYSQVSRLAPLSSSRSRFHAFILGLLNTKQLELWFSSLQEDAGFFSLARGGCPSLSTELLLLLQPLSVLTFHLDLLFEHHHHLPLGPPQAPAPPGPPPALQQTMQAMLHFGGRLAQSLRGTSKEAASDPSDSPNLPTPGSWWEQLTQASRVYASGGTEGFPLSRWAPGRHGTAAEEGAQERPLPTDEMAPGRGLWLGRLFGVPGGPAENENGALKSRRPSSWLPPTVSVLALVKRGAPPEMPSPQELEASAPRMVQTHRAVRALCDHTAARPDQLSFRRGEVLRVITTVDEDWLRCGRDGMEGLVPVGYTSLVL

SEQ ID NO: 852920 - protein, 211 aa, Homo sapiens
MQAMLHFGGRLAQSLRGTSKEAASDPSDSPNLPTPGSWWEQLTQASRVYASGGTEGFPLSRWAPGRHGTAAEEGAQERPLPTDEMAPGRGLWLGRLFGVPGGPAENENGALKSRRPSSWLPPTVSVLALVKRGAPPEMPSPQELEASAPRMVQTHRAVRALCDHTAARPDQLSFRRGEVLRVITTVDEDWLRCGRDGMEGLVPVGYTSLVL

SEQ ID NO: 852921 - protein, 310 aa, Homo sapiens [sequence omitted]

SEQ ID NO: 852922 - protein, 411 aa, Homo sapiens
MAEAQSGTGQLQEQKKGLLIAVSVSVDKIISHFGAARNLVQKAQLGDSRLSPDVGHLVLTTLCPALHALVADGLKPFRKDLITGQRRSSPWSVVEASVKPGSSTRSLGTLYSQVSRLAPLSSSRSRFHAFILGLLNTKQLELWFSSLQEDAGLLSLLYLPTGFFSLARGGCPSLSTELLLLLQPLSVLTFHLDLLFEHHHHLPLGPPQAPAPPGPPPALQQTMQAMLHFGGRLAQSLRGTSKEAASDPSDSPNLPTPGSWWEQLTQASRVYASGGTEGFPLSRWAPGRHGTAAEEGAQERPLPAENENGALKSRRPSSWLPPTVSVLALVKRGAPPEMPSPQELEASAPRMVQTHRAVRALCDHTAARPDQLSFRRGEVLRVITTVDEDWLRCGRDGMEGLVPVGYTSLVL

SEQ ID NO: 852923 - protein, 398 aa, Homo sapiens
PRPPPPPVPPRRKKNRPGLQPIAEGQSEEGRAVSPAAGEEAPAAKEPGAQAGLEVRSSWSFAGVPGAQRLWMAEAQSGTGQLQEQKKGLLIAVSVSVDKIISHFGAARNLVQKAQLGDSRLSPDVGHLVLTTLCPALHALVADGLKPFRKDLITGQRRSSPWSVVEASVKPGSSTRSLGTLYSQVSRLAPLSSSRSRFHAFILGLLNTKQLELWFSSLQEDAGSWWEQLTQASRVYASGGTEGFPLSRWAPGRHGTAAEEGAQERPLPTDEMAPGRGLWLGRLFGVPGGPAENENGALKSRRPSSWLPPTVSVLALVKRGAPPEMPSPQELEASAPRMVQTHRAVRALCDHTAARPDQLSFRRGEVLRVITTVDEDWLRCGRDGMEGLVPVGYTSLVL

SEQ ID NO: 852924 - protein, 122 aa, Homo sapiens
MAEAQSGTGQLQEQKKGLLIAVSVSVDKIISHFGAARNLVQKAQLGDSRLSPDVGHLVLTTLCPALHALVADGLKPFRKDLITGQRRSSPWSVVEASVKPAPSSWSCGFPVSRKMQGAGGSS

SEQ ID NO: 852925 - protein, 136 aa, Homo sapiens
MPLSWASSTPSSWSCGFPVSRKMQACSPSCTCQQDFSPWPAVVVPPCPQSCCSCCSHCRCSLSTWTCSLSTTTTCPWAHLRPLPLQAHLQLCSRLCKPCCTLGAGWPRAFGGLPRKLLQTPLTLQTFPHQGAGGSS

SEQ ID NO: 852926 - protein, 492 aa, Homo sapiens
MPPTCSPGLRRQDWAPGRCAGLHLPPRAPSSPALQALAGQAGVRSSWSFAGVPGAQRLWMAEAQSGTGQLQEQKKGLLIAVSVSVDKIISHFGAARNLVQKAQLGDSRLSPDVGHLVLTTLCPALHALVADGLKPFRKDLITGQRRSSPWSVVEASVKPGSSTRSLGTLYSQVSRLAPLSSSRSRFHAFILGLLNTKQLELWFSSLQEDAGLLSLLYLPTGFFSLARGGCPSLSTELLLLLQPLSVLTFHLDLLFEHHHHLPLGPPQAPAPPGPPPALQQTMQAMLHFGGRLAQSLRGTSKEAASDPSDSPNLPTPGSWWEQLTQASRVYASGGTEGFPLSRWAPGRHGTAAEEGAQERPLPTDEMAPGRGLWLGRLFGVPGGPAENENGALKSRRPSSWLPPTVSVLALVKRGAPPEMPSPQELEASAPRMVQTHRAVRALCDHTAARPDQLSFRRGEVLRVITTVDEDWLRCGRDGMEGLVPVGYTSLVL

SEQ ID NO: 852927 - protein, 433 aa, Homo sapiens; identical to SEQ ID NO: 852913

SEQ ID NO: 852928 - protein, 427 aa, Homo sapiens
MRRVMELRGGCGNGWREVAGRCLEGSLEPSASRHLQAQLGDSRLSPDVGHLVLTTLCPALHALVADGLKPFRKDLITGQRRSSPWSVVEASVKPGSSTRSLGTLYSQVSRLAPLSSSRSRFHAFILGLLNTKQLELWFSSLQEDAGLLSLLYLPTGFFSLARGGCPSLSTELLLLLQPLSVLTFHLDLLFEHHHHLPLGPPQAPAPPGPPPALQQTMQAMLHFGGRLAQSLRGTSKEAASDPSDSPNLPTPGSWWEQLTQASRVYASGGTEGFPLSRWAPGRHGTAAEEGAQERPLPTDEMAPGRGLWLGRLFGVPGGPAENENGALKSRRPSSWLPPTVSVLALVKRGAPPEMPSPQELEASAPRMVQTHRAVRALCDHTAARPDQLSFRRGEVLRVITTVDEDWLRCGRDGMEGLVPVGYTSLVL

SEQ ID NO: 852929 - protein, 550 aa, Homo sapiens
PRPPPPPVPPRRKKNRPGLQPIAEGQSEEGRAVSPAAGEEAPAAKEPGAQAGLEVRSSWSFAGVPGAQRLWMAEAQSGTGQLQEQKKGLLIAVSVSVDKIISHFGAARNLVQKVKVAGEEAVGMRRVMELRGGCGNGWREVAGRCLEGSLEPSASRHLQAQLGDSRLSPDVGHLVLTTLCPALHALVADGLKPFRKDLITGQRRSSPWSVVEASVKPGSSTRSLGTLYSQVSRLAPLSSSRSRFHAFILGLLNTKQLELWFSSLQEDAGLLSLLYLPTGFFSLARGGCPSLSTELLLLLQPLSVLTFHLDLLFEHHHHLPLGPPQAPAPPGPPPALQQTMQAMLHFGGRLAQSLRGTSKEAASDPSDSPNLPTPGSWWEQLTQASRVYASGGTEGFPLSRWAPGRHGTAAEEGAQERPLPTDEMAPGRGLWLGRLFGVPGGPAENENGALKSRRPSSWLPPTVSVLALVKRGAPPEMPSPQELEASAPRMVQTHRAVRALCDHTAARPDQLSFRRGEVLRVITTVDEDWLRCGRDGMEGLVPVGYTSLVL

SEQ ID NO: 852930 - protein, 287 aa, Homo sapiens
MPPTCSPGLRRQDWAPGRCAGLHLPPRAPSSPALQALAGQAGVRSSWSFAGVPGAQRLWMAEAQSGTGQLQEQKKGLLIAVSVSVDKIISHFGAARNLVQKAQLGDSRLSPDVGHLVLTTLCPALHALVADGLKPFRKDLITGQRRSSPWSVVEASVKPAPSSWSCGFPVSRKMQACSPSCTCQQDFSPWPAVVVPPCPQSCCSCCSHCRCSLSTWTCSLSTTTTCPWAHLRPLPLQAHLQLCSRLCKPCCTLGAGWPRAFGGLPRKLLQTPLTLQTFPHQGAGGSS

SEQ ID NO: 852931 - protein, 350 aa, Homo sapiens
CHLGTYRLRIVFWRSTVRWPNTVRWPLGHAVSRLAPLSSSRSRFHAFILGLLNTKQLELWFSSLQEDAGLLSLLYLPTGFFSLARGGCPSLSTELLLLLQPLSVLTFHLDLLFEHHHHLPLGPPQAPAPPGPPPALQQTMQAMLHFGGRLAQSLRGTSKEAASDPSDSPNLPTPGSWWEQLTQASRVYASGGTEGFPLSRWAPGRHGTAAEEGAQERPLPTDEMAPGRGLWLGRLFGVPGGPAENENGALKSRRPSSWLPPTVSVLALVKRGAPPEMPSPQELEASAPRMVQTHRAVRALCDHTAARPDQLSFRRGEVLRVITTVDEDWLRCGRDGMEGLVPVGYTSLVL

SEQ ID NO: 852932 - protein, 433 aa, Homo sapiens; identical to SEQ ID NO: 852913

SEQ ID NO: 852933 - protein, 386 aa, Homo sapiens
MPPTCSPGLRRQDWAPGRCAGLHLPPRAPSSPALQALAGQAGVRSSWSFAGVPGAQRLWMAEAQSGTGQLQEQKKGLLIAVSVSVDKIISHFGAARNLVQKAQLGDSRLSPDVGHLVLTTLCPALHALVADGLKPFRKDLITGQRRSSPWSVVEASVKPGSSTRSLGTLYSQVSRLAPLSSSRSRFHAFILGLLNTKQLELWFSSLQEDAGSWWEQLTQASRVYASGGTEGFPLSRWAPGRHGTAAEEGAQERPLPTDEMAPGRGLWLGRLFGVPGGPAENENGALKSRRPSSWLPPTVSVLALVKRGAPPEMPSPQELEASAPRMVQTHRAVRALCDHTAARPDQLSFRRGEVLRVITTVDEDWLRCGRDGMEGLVPVGYTSLVL

SEQ ID NO: 852934 - protein, 91 aa, Homo sapiens
GTGHLFEVTVLRPVVLTTGSELQLAPVLASGGADPLPSHSTGPCVDCQLAIHAWRRGEVLRVITTVDEDWLRCGRDGMEGLVPVGYTSLVL

SEQ ID NO: 852935 - protein, 70 aa, Homo sapiens
HALVADGLKPFRKDLITGQRRSSPWSVVEASVKPGEPGGRGTRQCAGQGRAWLTAPHVLRLQHPLPWNPV

SEQ ID NO: 852936 - protein, 27 aa, Homo sapiens
MGPQRRVWLSSGNMVLSQFLGDIQWHL

SEQ ID NO: 852937 - protein, 538 aa, Homo sapiens
MAQKPLRLLACGDVEGKFDILFNRVQAIQKKSGNFDLLLCVGNFFGSTQDAEWEEYKTGIKKAPIQTYVLGANNQETVKYFQDADGCELAENITYLGRKGIFTGSSGLQIVYLSGTESLNEPVPGYSFSPKDVSSLRMMLCTTSQFKGVDILLTSPWPKCVGNFGNSSGEVDTKKCGSALVSSLATGLKPRYHFAALEKTYYERLPYRNHIILQENAQHATRFIALANVGNPEKKKYLYAFSIVPMKLMDAAELVKQPPDVTENPYRKSGQEASIGKQILAPVEESACQFFFDLNEKQGRKRSSTGRDSKSSPHPKQPRKPPQPPGPCWFCLASPEVEKHLVVNIGTHCYLALAKGGLSDDHVLILPIGHYQSVVELSAEVVEEVEKYKATLRRFFKSRGKWCVVFERNYKSHHLQLQVIPVPISCSTTDDIKDAFITQAQEQQIELLEIPEHSDIKQIAQPGAAYFYVELDTGEKLFHRIKKNFPLQFGREVLASEAILNVPDKSDWRQCQISKEDEETLARRFRKDFEPYDFTLDD

SEQ ID NO: 852938 - protein, 504 aa, Homo sapiens
MAQKPLRLLACGDVEGKFDILFNRVQAIQKKSGNFDLLLCVGNFFGSTQDAEWEEYKTGIKKGRKGIFTGSSGLQIVYLSGTESLNEPVPGYSFSPKDVSSLRMMLCTTSQFKGVDILLTSPWPKCVGNFGNSSGEVDTKKCGSALVSSLATGLKPRYHFAALEKTYYERLPYRNHIILQENAQHATRFIALANVGNPEKKKYLYAFSIVPMKLMDAAELVKQPPDVTENPYRKSGQEASIGKQILAPVEESACQFFFDLNEKQGRKRSSTGRDSKSSPHPKQPRKPPQPPGPCWFCLASPEVEKHLVVNIGTHCYLALAKGGLSDDHVLILPIGHYQSVVELSAEVVEEVEKYKATLRRFFKSRGKWCVVFERNYKSHHLQLQVIPVPISCSTTDDIKDAFITQAQEQQIELLEIPEHSDIKQIAQPGAAYFYVELDTGEKLFHRIKKNFPLQFGREVLASEAILNVPDKSDWRQCQISKEDEETLARRFRKDFEPYDFTLDD

SEQ ID NO: 852939 - protein, 383 aa, Homo sapiens
MLNGRSIRLASRKGEVDTKKCGSALVSSLATGLKPRYHFAALEKTYYERLPYRNHIILQENAQHATRFIALANVGNPEKKKYLYAFSIVPMKLMDAAELVKQPPDVTENPYRKSGQEASIGKQILAPVEESACQFFFDLNEKQGRKRSSTGRDSKSSPHPKQPRKPPQPPGPCWFCLASPEVEKHLVVNIGTHCYLALAKGGLSDDHVLILPIGHYQSVVELSAEVVEEVEKYKATLRRFFKSRGKWCVVFERNYKSHHLQLQVIPVPISCSTTDDIKDAFITQAQEQQIELLEIPEHSDIKQIAQPGAAYFYVELDTGEKLFHRIKKNFPLQFGREVLASEAILNVPDKSDWRQCQISKEDEETLARRFRKDFEPYDFTLDD

SEQ ID NO: 852940 - protein, 383 aa, Homo sapiens; identical to SEQ ID NO: 852939

SEQ ID NO: 852941 - protein, 538 aa, Homo sapiens; identical to SEQ ID NO: 852937

SEQ ID NO: 852942 - protein, 177 aa, Homo sapiens
MAQKPLRLLACGDVEGKFDILFNRVQAIQKKSGNFDLLLCVGNFFGSTQDAEWEEYKTGIKKAPIQTYVLGANNQETVKYFQDADGCELAENITYLGRKGIFTGSSGLQIVYLSGTESLNEPVPGYSFSPKDVSSLRMMLCTTSQFKGVDILLTSPWPKCVGNFGNSSVSSVCLVGI

SEQ ID NO: 852943 - protein, 538 aa, Homo sapiens; identical to SEQ ID NO: 852937

SEQ ID NO: 852944 - protein, 293 aa, Homo sapiens
MKLMDAAELVKQPPDVTENPYRKSGQEASIGKQILAPVEESACQFFFDLNEKQGRKRSSTGRDSKSSPHPKQPRKPPQPPGPCWFCLASPEVEKHLVVNIGTHCYLALAKGGLSDDHVLILPIGHYQSVVELSAEVVEEVEKYKATLRRFFKSRGKWCVVFERNYKSHHLQLQVIPVPISCSTTDDIKDAFITQAQEQQIELLEIPEHSDIKQIAQPGAAYFYVELDTGEKLFHRIKKNFPLQFGREVLASEAILNVPDKSDWRQCQISKEDEETLARRFRKDFEPYDFTLDD

SEQ ID NO: 852945 - protein, 498 aa, Homo sapiens
MAQKPLRLLACGDVEGKFDILFNRVQAIQKKSGNFDLLLCVGNFFGSTQDAEWEEYKTGIKKAPIQTYVLGANNQETVKYFQDADGCELAENITYLGRKGIFTGSSGLQIVYLSGTESLNEPVPGYSFSPKDVSSLRMMLCTTSQFKGVDILLTSPWPKCVGNFGNSSGEVDTKKCGSALVSSLATGLKPRYHFAALEKTYYERLPYRNHIILQENAQHATRFIALANVGNPEKKKYLYAFSIVPMKLMDAAELVKQPPDVTENPYRKSGQEASIGKQILAPVEESACQFFFDLNEKQGRKRSSTGRDSKSSPHPKQPRKPPQPPGPCWFCLASPEVEKHLVVNIGTHCYLALAKGGLSDDHVLILPIGHYQSVVELSAEVVEEVEKYKATLRRFFKSRGKWCVVFERNYKSHHLQLQIAQPGAAYFYVELDTGEKLFHRIKKNFPLQFGREVLASEAILNVPDKSDWRQCQISKEDEETLARRFRKDFEPYDFTLDD

SEQ ID NO: 852946 - protein, 345 aa, Homo sapiens
MAQKPLRLLACGDVEGKFDILFNRVQAIQKKSGNFDLLLCVGNFFGSTQDAEWEEYKTGIKKAPIQTYVLGANNQETVKYFQDADGCELAENITYLGRKGIFTGSSGLQIVYLSGTESLNEPVPGYSFSPKDVSSLRMMLCTTSQFKGVDILLTSPWPKCVGNFGNSSGEVDTKKCGSALVSSLATGLKPRYHFAALEKTYYERLPYRNHIILQENAQHATRFIALANVGNPEKKKYLYAFSIVPMKLMDAAELVKQPPDVTENPYRKSGQEASIGKQILAPVEESACQFFFDLNEKQGRKRSSTGRDSKSSPHPKQPRKPPQPPGPCWFCLDSSLGDSETPSQK

SEQ ID NO: 852947 - protein, 461 aa, Homo sapiens
AAGRKTGVQPFEVSPPTSCCLTVAVADPGVSEGFRGFGAGCEMPGRGRCPDCGSTELVEDSHYSQSQLVCSDCGCVVTEGVLTTTFSDEGNLREVTYSRSTGENEQVSRSQQRGLRRVRDLCRVLQLPPTFEDTAVAYYQQAYRHSGIRAARLQKKEVLVGCCVLITCRQHNWPLTMGAICTLLYADLDVFSSTYMQIVKLLGLDVPSLCLAELVKTYCSSFKLFQASPSVPAKYVEDKEKMLSRTMQLVELANETWLVTGRHPLPVITAATFLAWQSLQPADRLSCSLARFCKLANVDLPYPASSRLQELLAVLLRMAEQLAWLRVLRLDKRSVVKHIGDLLQHRQSLVRSAFRDGTAEVETREKEPPGWGQGQGEGEVGNNSLGLPQGKRPASPALLLPPCMLKSPKRICPVPPVSTVTGDENISDSEIEQYLRTPQEVRDFQRAQAARQAATSVPNPP

SEQ ID NO: 852948 - protein, 491 aa, Homo sapiens
AAGRKTGVQPFEVSPPTSCCLTVAVADPGVSEGFRGFGAGCEMPGRGRCPDCGSTELVEDSHYSQSQLVCSDCGCVVTEGVLTTTFSDEGNLREVTYSRSTGENEQVSRSQQRGLRRVRDLCRVLQLPPTFEDTAVAYYQQAYRHSGIRAARLQKKEVLVGCCVLITCRQHNWPLTMGAICTLLYADLDVFSSTYMQIVKLLGLDVPSLCLAELVKTYCSSLECSGTIIAHCSLELMELKRSAHLILPKCSFKLFQASPSVPAKYVEDKEKMLSRTMQLVELANETWLVTGRHPLPVITAATFLAWQSLQPADRLSCSLARFCKLANVDLPYPASSRLQELLAVLLRMAEQLAWLRVLRLDKRSVVKHIGDLLQHRQSLVRSAFRDGTAEVETREKEPPGWGQGQGEGEVGNNSLGLPQGKRPASPALLLPPCMLKSPKRICPVPPVSTVTGDENISDSEIEQYLRTPQEVRDFQRAQAARQAATSVPNPP

SEQ ID NO: 852949 - protein, 299 aa, Homo sapiens
  misc_feature (271)..(272): Xaa can be any naturally occurring amino acid
  misc_feature (286)..(286): Xaa can be any naturally occurring amino acid
  misc_feature (288)..(288): Xaa can be any naturally occurring amino acid
AAGRKTGVQPFEVSPPTSCCLTVAVADPGVSEGFRGFGAGCEMPGRGRCPDCGSTELVEDSHYSQSQLVCSDCGCVVTEGVLTTTFSDEGNLREVTYSRSTGENEQVSRSQQRGLRRVRDLCRVLQLPPTFEDTAVAYYQQAYRHSGIRAARLQKKEVLVGCCVLITCRQHNWPLTMGAICTLLYADLDVFSSTYMQIVKLLGLDVPSLCLAELVKTYCSSFKLFQASPSVPAKYVEDKEKMLSRTMQLVELANETWLVTGRHPLPVNQRXXNFSLALGNSPANLXKXGFQRFPLCPNF

SEQ ID NO: 852950 - protein, 461 aa, Homo sapiens; identical to SEQ ID NO: 852947

SEQ ID NO: 852951 - protein, 215 aa, Homo sapiens [sequence omitted]

SEQ ID NO: 852952 - protein, 546 aa, Homo sapiens
MGRRGSAPGNGRTLRGCERGGRRRRSAADSVMAEQVALSRTQVCGILREELFQGDAFHQSDTHIFIIMGASGDLAKKKIYPTIWWLFRDGLLPENTFIVGYARSRLTVADIRKQSEPFFKATPEEKLKLEDFFARNSYVAGQYDDAASYQRLNSHMNALHLGSQANRLFYLALPPTVYEAVTKNIHESCMSQIGWNRIIVEKPFGRDLQSSDRLSNHISSLFREDQIYRIDHYLGKEMVQNLMVLRFANRIFGPIWNRDNIACVILTFKEPFGTEGRGGYFDEFGIIRDVMQNHLLQMLCLVAMEKPASTNSDDVRDEKVKVLKCISEVQANNVVLGQYVGNPDGEGEATKGYLDDPTVPRGSTTATFAAVVLYVENERWDGVPFILRCGKALNERKAEVRLQFHDVAGDIFHQQCKRNELVIRVQPNEAVYTKMMTKKPGMFFNPEESELDLTYGNRYKNVKLPDAYERLILDVFCGSQMHFVRSDELREAWRIFTPLLHQIELEKPKPIPYIYGSRGPTEADELMKRVGFQYEGTYKWVNPHKL

SEQ ID NO: 852953 - protein, 542 aa, Homo sapiens
MKTIGWVRGRWLGCERGGRRRRSADSVMAEQVALSRTQVCGILREELFQGDAFHQSDTHIFIIMGASGDLAKKKIYPTIWWLFRDGLLPENTFIVGYARSRLTVADIRKQSEPFFKATPEEKLKLEDFFARNSYVAGQYDDAASYQRLNSHMNALHLGSQANRLFYLALPPTVYEAVTKNIHESCMSQIGWNRIIVEKPFGRDLQSSDRLSNHISSLFREDQIYRIDHYLGKEMVQNLMVLRFANRIFGPIWNRDNIACVILTFKEPFGTEGRGGYFDEFGIIRDVMQNHLLQMLCLVAMEKPASTNSDDVRDEKVKVLKCISEVQANNVVLGQYVGNPDGEGEATKGYLDDPTVPRGSTTATFAAVVLYVENERWDGVPFILRCGKALNERKAEVRLQFHDVAGDIFHQQCKRNELVIRVQPNEAVYTKMMTKKPGMFFNPEESELDLTYGNRYKNVKLPDAYERLILDVFCGSQMHFVRSDELREAWRIFTPLLHQIELEKPKPIPYIYGSRGPTEADELMKRVGFQYEGTYKWVNPHKL

SEQ ID NO: 852954 - protein, 542 aa, Homo sapiens; identical to SEQ ID NO: 852953

SEQ ID NO: 852955 - protein, 370 aa, Homo sapiens
MKTIGWVRGRWLGCERGGRRRRSADSVMAEQVALSRTQVCGILREELFQGDAFHQSDTHIFIIMGASGDLAKKKIYPTIWWLFRDGLLPENTFIVGYARSRLTVADIRKQSEPFFKATPEEKLKLEDFFARNSYVAGQYDDAASYQRLNSHMNALHLGSQANRLFYLALPPTVYEAVTKNIHESCMSQIGWNRIIVEKPFGRDLQSSDRLSNHISSLFREDQIYRIDHYLGKEMVQNLMVLRFANRIFGPIWNRDNIACVILTFKEPFGTEGRGGYFDEFGIIRDVMQNHLLQMLCLVAMEKPASTNSDDVRDEKVKVLKCISEVQANNVVLGQYVGNPDGEGEATKGYLDDPTVPRGSTTASSASATSW

SEQ ID NO: 852956 - protein, 560 aa, Homo sapiens
MKTIGWVRGRWLGCERGGRRRRSADSVMAEQVALSRTQVCGILREELFQGDAFHQSDTHIFIIMGASGDLAKKKIYPTIWWLFRDGLLPENTFIVGYARSRLTVADIRKQSEPFFKATPEEKLKLEDFFARNSYVAGQYDDAASYQRLNSHMNALHLGSQANRLFYLALPPTVYEAVTKNIHESCMSQIGWNRIIVEKPFGRDLQSSDRLSNHISSLFREDQIYRIDHYLGKEMVQNLMVLRFANRIFGPIWNRDNIACVILTFKEPFGTEGRGGYFDEFGIIRDVMQNHLLQMLCLVAMEKPASTNSDDVRDEKVKVLKCISEVQANNVVLGQYVGNPDGEGEATKGYLDDPTVPRGSTTATFAAVVLYVENERWDGMVMPSRPSKAELGMPCVRALELPLRHSRTGPHPERAGAEAALSSHVGVPFILRCGKALNERKAEVRLQFHDVAGDIFHQQCKRNELVIRVQPNEAVYTKMMTKKPGMFFNPEESELDLTYGNRYKNVKLPDAYERLILDVFCGSQMHFVRSDELREAWRIFTPLLHQIELEKPKPIPYIYGR

SEQ ID NO: 852957 - protein, 540 aa, Homo sapiens
MKTIGWVRGRWLGCERGGRRRRSADSVMAEQVALSRTQVCGILREELFQGDAFHQSDTHIFIIMGASGDLAKKKIYPTIWWLFRDGLLPENTFIVGYARSRLTVADIRKQSEPFFKATPEEKLKLEDFFARNSYVAGQYDDAASYQRLNSHMNALHLGSQANRLFYLALPPTVYEAVTKNIHESCMSQIGWNRIIVEKPFGRDLQSSDRLSNHISSLFREDQIYRIDHYLGKEMVQNLMVLRFANRIFGPIWNRDNIACVILTFKEPFGTEGRGGYFDEFGIIRDVMQNHLLQMLCLVAMEKPASTNSDDVRDEKVKVLKCISEVQANNVVLGQYVGNPDGEGEATKGYLDDPTVPRGSTTATFAAVVLYVENERWDGVPFILRCGKALNERKAEVRLQFHDVAGDIFHQQCKRNELVIRVQPNEAVYTKMMTKKPGMFFNPEESELDLTYGNRYKNVKLPDAYERLILDVFCGSQMHFVRSDELREAWRIFTPPCPGEVSTFTDIVRHSPMPSAQLSLDSKRSLFLFSHDTDKRYYHLS

SEQ ID NO: 852958 - protein, 438 aa, Homo sapiens
MKTIGWVRGRWLGCERGGRRRRSADSVMAEQVALSRTQVCGILREELFQGDAFHQSDTHIFIIMGASGDLAKKKIYPTIWWLFRDGLLPENTFIVGYARSRLTVADIRKQSEPFFKATPEEKLKLEDFFARNSYVAGQYDDAASYQRLNSHMNALHLGSQANRLFYLALPPTVYEAVTKNIHESCMSQIGWNRIIVEKPFGRDLQSSDRLSNHISSLFREDQIYRIDHYLGKEMVQNLMVLRFANRIFGPIWNRDNIACVILTFKEPFGTEGRGGYFDEFGIIRDVMQNHLLQMLCLVAMEKPASTNSDDVRDEKVKVLKCISEVQANNVVLGQYVGNPDGEGEATKGYLDDPTVPRGSTTATFAAVVLYVENERWDGVPFILRCGKALNERKAEVRLQFHDVAGDIFHQQCKRNELVIRVQPNEAVYTKMMTSLSAT

SEQ ID NO: 852959 - protein, 402 aa, Homo sapiens
MKTIGWVRGRWLGCERGGRRRRSADSVMAEQVALSRTQVCGILREELFQGDAFHQSDTHIFIIMGASGDLAKKKIYPTIWWLFRDGLLPENTFIVGYARSRLTVADIRKQSEPFFKATPEEKLKLEDFFARNSYVAGQYDDAASYQRLNSHMNALHLGSQANRLFYLALPPTVYEAVTKNIHESCMSQIGWNRIIVEKPFGRDLQSSDRLSNHISSLFREDQIYRIDHYLGKEMVQNLMVLRFANRIFGPIWNRDNIACVILTFKEPFGTEGRGGYFDEFGIIRDVMQNHLLQMLCLVAMEKPASTNSDDVRDEKTELGRHAHEGRVAPAIKTFRMRALVYASGSVPALVFCGRRSGSRSDRLVGLESLRGFWVLIVVYTASLGWTRNTSLVALAVLGGDVG

SEQ ID NO: 852960 - protein, 363 aa, Homo sapiens
MKTIGKVRGRWLGCERGGRRRRSADSVMAEQVALSRTQVCGILREELFQGDAFHQSDTHIFIIMGASGDLAKKKIYPTIWWLFRDGLLPENTFIVGYARSRLTVADIRKQSEPFFKATPEEKLKLEDFFARNSYVAGQYDDAASYQRLNSHMNALHLGSQANRLFYLALPPTVYEAVTKNIHESCMSQIGWNRIIVEKPFGRDLQSSDRLSNHISSLFREDQIYRIDHYLGKEMVQNLMVLRFANRIFGPIWNRDNIACVILTFKEPFGTEGRGGYFDEFGIIRDVMQNHLLQMLCLVAMEKPASTNSDDVRDEKTAAKVAVVDPRGTVGSSRYPLVASPSPSGFPTYCPTTTVVACTSEITQ

SEQ ID NO: 852961 - protein, 237 aa, Homo sapiens
  misc_feature (194)..(194): Xaa can be any naturally occurring amino acid
  misc_feature (202)..(202): Xaa can be any naturally occurring amino acid
  misc_feature (220)..(220): Xaa can be any naturally occurring amino acid
RTREAGEKCEAAVGPHPAPERSLSPPGSAGPRKLADSVMAEQVALSRTQVCGILREELFQGDAFHQSDTHIFIIMGASGDLAKKKIYPTIWWLFRDGLLPENTFIVGYARSRLTVADIRKQSEPFFKATPEEKLKLEDFFARNSYVAGQYDDAASYQRLNSHMNALHLGSQANRLFYLALPPTVYEAVTKNIHXTTLTQKGXNASTRETFGKELKKSWNXCANTIPLCFLEEPKYRI

SEQ ID NO: 852962 - protein, 546 aa, Homo sapiens; identical to SEQ ID NO: 852952

SEQ ID NO: 852963 - protein, 553 aa, Homo sapiens
RTREAGEKCEAAVGPHPAPERSLSPPGSAGPRKLADSVMAEQVALSRTQVCGILREELFQGDAFHQSDTHIFIIMGASGDLAKKKIYPTIWWLFRDGLLPENTFIVGYARSRLTVADIRKQSEPFFKATPEEKLKLEDFFARNSYVAGQYDDAASYQRLNSHMNALHLGSQANRLFYLALPPTVYEAVTKNIHESCMSQIGWNRIIVEKPFGRDLQSSDRLSNHISSLFREDQIYRIDHYLGKEMVQNLMVLRFANRIFGPIWNRDNIACVILTFKEPFGTEGRGGYFDEFGIIRDVMQNHLLQMLCLVAMEKPASTNSDDVRDEKVKVLKCISEVQANNVVLGQYVGNPDGEGEATKGYLDDPTVPRGSTTATFAAVVLYVENERWDGVPFILRCGKALNERKAEVRLQFHDVAGDIFHQQCKRNELVIRVQPNEAVYTKMMTKKPGMFFNPEESELDLTYGNRYKNVKLPDAYERLILDVFCGSQMHFVRSDELREAWRIFTPLLHQIELEKPKPIPYIYGSRGPTEADELMKRVGFQYEGTYKWVNPHKL

SEQ ID NO: 852964 - protein, 542 aa, Homo sapiens; identical to SEQ ID NO: 852953

SEQ ID NO: 852965 - protein, 595 aa, Homo sapiens
MKTIGWVRGRWLGCERGGRRRRSADSVMAEQVALSRTQVCGILREELFQGDAFHQSDTHIFIIMGASGDLAKKKIYPTIWWLFRDGLLPENTFIVGYARSRLTVADIRKQSEPFFKATPEEKLKLEDFFARNSYVAGQYDDAASYQRLNSHMNALHLGSQANRLFYLALPPTVYEAVTKNIHESCMSQIGWNRIIVEKPFGRDLQSSDRLSNHISSLFREDQIYRIDHYLGKEMVQNLMVLRFANRIFGPIWNRDNIACVILTFKEPFGTEGRGGYFDEFGIIRDVMQNHLLQMLCLVAMEKPASTNSDDVRDEKVKVLKCISEVQANNVVLGQYVGNPDGEGEATKGYLDDPTVPRGSTTATFAAVVLYVENERWDGVPFILRCGKALNERKAEVRLQFHDVAGDIFHQQCKRNELVIRVQPNEAVYTKMMTKKPGMFFNPEESELDLTYGNRYKNVKLPDARVGGRDKGEERGEHPRERICLWPCPPASVPLDIPCHQQHLEPPGCPLSHQLCTPWPPRATRRQPLCYKKSRRSSWDPSQPQCPAIKSANSPSCPLVICFPEDPLPCPTPQVTRVLPLWPLRSLLTSGSDPMS

SEQ ID NO: 852966 - protein, 432 aa, Homo sapiens
MKTIGWVRGRWLGCERGGRRRRSADSVMAEQVALSRTQVCGILREELFQGDAFHQSDTHIFIIMGASGDLAKKKIYPTIWWLFRDGLLPENTFIVGYARSRLTVADIRKQSEPFFKATPEEKLKLEDFFARNSYVAGQYDDAASYQRLNSHMNALHLGSQANRLFYLALPPTVYEAVTKNIHESCMSQIGWNRIIVEKPFGRDLQSSDRLSNHISSLFREDQIYRIDHYLGKEMVQNLMVLRFANRIFGPIWNRDNIACVILTFKEPFGTEGRGGYFDEFGIIRDVMQNHLLQMLCLVAMEKPASTNSDDVRDEKVKVLKCISEVQANNVVLGQYVGNPDGEGEATKGYLDDPTVPRGSTTAQPLCYKKSRRSSWDPSQPQCPAIKSANSPSCPLVICFPEDPLPCPTPQVTRVLPLWPLRSLLTSGSDPMS

SEQ ID NO: 852967 - protein, 289 aa, Homo sapiens
MGRRGSAPGNGRTLRGCERGGRRRRSAADSVMAEQVALSRTQVCGILREELFQGDAFHQSDTHIFIIMGASGDLAKKKIYPTIWWLFRDGLLPENTFIVGYARSRLTVADIRKQSEPFFKATPEEKLKLEDFFARNSYVAGQYDDAASYQRLNSHMNALHLGSQANRLFYLALPPTVYEAVTKNIHESCMSQIGWNRIIVEKPFGRDLQSSDRLSNHISSLFREDQIYRIDHYLGKEMVQNLMVLRFANRIFGPIWNRDNIACVILTFKEPFGTEGRGGYFDEFGIIRE

SEQ ID NO: 852968 - protein, 491 aa, Homo sapiens
GLVVSRDGAPDGGIEQMGLAMEHGGSYARAGGSSRGCWYYLRYFFLFVSLIQFLIILGLVLFMVYGNVHVSTESNLQATERRAEGLYSQLLGLTASQSNLTKELNFTTRAKDAIMQMWLNARRDLDRINASFRQCQGDRVIYTNNQRYMAAIILSEKQCRDQFKDMNKSCDGECKAAGSRGGGLPAQCSRQPPIFLGLLVLFSLALLFMLNQKVKTLEVEIAKEKTICTKDKESVLLNKRVAEEQLVECVKTRELQHQERQLAKEQLQKVQALCLPLDKDKFEMDLRNLWRDSIIPRSLDNLGYNLYHPLGSELASIRRACDHMPSLMSSKVEELARSLRADIERVARENSDLQRQKLEAQQGLRASQEAKQKVEKEAQAREAKLQAECSRQTQLALEEKAVLRKERDNLAKELEEKKREAEQLRMELAIRNSALDTCIKTKSQPMMPVSRPMGPVPNPQPIDPASLEEFKRKILESQRPPAGIPVAPSSG

SEQ ID NO: 852969 - protein, 458 aa, Homo sapiens
GLVVSRDGAPDGGIEQMGLAMEHGGSYARAGGSSRGCWYYLRYFFLFVSLIQFLIILGLVLFMVYGNVHVSTESNLQATERRAEGLYSQLLGLTASQSNLTKELNFTTRAKDAIMQMWLNARRDLDRINASFRQCQGDRVIYTNNQRYMAAIILSEKQCRDQFKDMNKSCDALLFMLNQKVKTLEVEIAKEKTICTKDKESVLLNKRVAEEQLVECVKTRELQHQERQLAKEQLQKVQALCLPLDKDKFEMDLRNLWRDSIIPRSLDNLGYNLYHPLGSELASIRRACDHMPSLMSSKVEELARSLRADIERVARENSDLQRQKLEAQQGLRASQEAKQKVEKEAQAREAKLQAECSRQTQLALEEKAVLRKERDNLAKELEEKKREAEQLRMELAIRNSALDTCIKTKSQPMMPVSRPMGPVPNPQPIDPASLEEFKRKILESQRPPAGIPVAPSSG

SEQ ID NO: 852970 - protein, 148 aa, Homo sapiens
MTSHRDAATTSRAMSTSHILMSHRRGDGITQTVMMSHTDTVTTHTMTTTPIDMAPTSHARMPFHTHFLPNSHLVSRSPDPGTRAKVPTGSHPLPHSPGPQHLPSSSFLASQPLPHPQCLDPEVRTGSHSPPLLERECFQDPLGALSRG

SEQ ID NO: 852971 - protein, 192 aa, Homo sapiens
GLVVSRDGAPDGGIEQMGLAMEHGGSYARAGGSSRGCWYYLRYFFLFVSLIQFLIILGLVLFMVYGNVHVSTESNLQATERRAEGLYSQLLGLTASQSNLTKELNFTTRAKDAIMQMWLNARRDLDRINASFRQCQGDRVIYTNNQRYMAAIILSEKQCRDQFKDMNKSCDALLFMLNQKVKTNRKPFTSAP

SEQ ID NO: 852972 - protein, 458 aa, Homo sapiens; identical to SEQ ID NO: 852969

SEQ ID NO: 852973 - protein, 148 aa, Homo sapiens; identical to SEQ ID NO: 852970

SEQ ID NO: 852974 - protein, 403 aa, Homo sapiens
GLVVSRDGAPDGGIEQMGLAMEHGGSYARAGGSSRGCWYYLRYFFLFVSLIQFLIILGLVLFMVYGNVHVSTESNLQATERRAEGLYSQLLGLTASQSNLTKELNFTTRAKDAIMQMWLNARRDLDRINASFRQCQGDRVIYTNNQRYMAAIILSEKQCRDQFKDMNKSCDALLFMLNQKVKTLEVEIAKEKTICTKDKESVLLNKRVAEEQLVECVKTRELQHQERQLAKEQLQKVQALCLPLDKDKFEMDLRNLWRDSIIPRSLDNLGYNLYHPLGSELASIRRACDHMPSLMSSKVEELARSLRADIERVARENSDLQRQKLEAQQGLRASQEAKQKVEKEAQAREAKLQAECSRQTQFLASQPLPHPQCLDPEVRTGSHSPPLLERECFQDPLGALSRG

SEQ ID NO: 852975 - protein, 233 aa, Homo sapiens
RLPRSPARPSCRPCRARRSSAAFPAESVSPRRWVGLGSAAMGKQNSKLRPEMLQDLRENTEFSELELQEWYKGFLKDCPTGILNVDEFKKIYANFFPYGDASKFAEHVFRTFDTNSDGTIDFREFIIALSVTSRGRLEQKLMWAFSMYDLDGNGYISREEMLEIVQAIYKMVSSVMKMPEDESTPEKRTEKIFRQMDTNNDGKLSLEEFIRGAKSDPSIVRLLQCDPSSASQF

SEQ ID NO: 852976 - protein, 233 aa, Homo sapiens; identical to SEQ ID NO: 852975

SEQ ID NO: 852977 - protein, 192 aa, Homo sapiens
RLPRSPARPSCRPCRARRSSAAFPAESVSPRRWVGLGSAAMGKQNSKLRPEMLQDLRENTEFSELELQEWYKGFLKDCPTGILNVDEFKKIYANFFPYGDASKFAEHVFRTFDTNSDGTIDFREFIIALSVTSRGRLEQKLMWAFSMYDLDGNGYISREEMLEIVQSTVQLCLVDPHLHQRKRMLREIKALA

SEQ ID NO: 852978 - protein, 214 aa, Homo sapiens
PDHSSLPLTPLGTQVGLGSAAMGKQNSKLRPEMLQDLRENTEFSELELQEWYKGFLKDCPTGILNVDEFKKIYANFFPYGDASKFAEHVFRTFDTNSDGTIDFREFIIALSVTSRGRLEQKLMWAFSMYDLDGNGYISREEMLEIVQAIYKMVSSVMKMPEDESTPEKRTEKIFRQMDTNNDGKLSLEEFIRGAKSDPSIVRLLQCDPSSASQF

SEQ ID NO: 852979 - protein, 100 aa, Homo sapiens
RLPRSPARPSCRPCRARRSSAAFPAESVSPRRWAIYKMVSSVMKMPEDESTPEKRTEKIFRQMDTNNDGKLSLEEFIRGAKSDPSIVRLLQCDPSSASQF

SEQ ID NO: 852980 - protein, 147 aa, Homo sapiens
MWKFPGGLSEPEEDIGDTAVREVFEETGIKSEFRSVLSIRQQHTNPGAFGKSDMYIICRLKPYSFTINFCQEECLRCEWMDLNDLAKTENTTPITSRVARLLLYGYREGFDKIDLTVEELPAVYTGLFYKLYHKELPENYKTMKGID

SEQ ID NO: 852981 - protein, 184 aa, Homo sapiens
IWATDESSGVEMRQPLSWGRWRAMLARTYGPGPSAGYRWASGAQGYVRNPPVGACDLQGELDRFGGISVRLARLDALDRLDAAAFQKGLQAAVQQWRSEGRTAVWLHIPILQSRFIAPAASLGFCFHHAESDSSTLTLWLREGPSRLPGYASHQVGVAGAVFDESTRKILVVQDRNKVSCFCFI

SEQ ID NO: 852982 - protein, 162 aa, Homo sapiens
VGELTLFFNPDQLKNMWKFPGGLSEPEEDIGDTAVREVFEETGIKSEFRSVLSIRQQHTNPGAFGKSDMYIICRLKPYSFTINFCQEECLRCEWMDLNDLAKTENTTPITSRVARLLLYGYREGFDKIDLTVEELPAVYTGLFYKLYHKELPENYKTMKGID

SEQ ID NO: 852983 - protein, 327 aa, Homo sapiens
IWATDESSGVEMRQPLSWGRWRAMLARTYGPGPSAGYRWASGAQGYVRNPPVGACDLQGELDRFGGISVRLARLDALDRLDAAAFQKGLQAAVQQWRSEGRTAVWLHIPILQSRFIAPAASLGFCFHHAESDSSTLTLWLREGPSRLPGYASHQVGVAGAVFDESTRKILVVQDRNKLKNMWKFPGGLSEPEEDIGDTAVREVFEETGIKSEFRSVLSIRQQHTNPGAFGKSDMYIICRLKPYSFTINFCQEECLRCEWMDLNDLAKTENTTPITSRVARLLLYGYREGFDKIDLTVEELPAVYTGLFYKLYHKELPENYKTMKGID

SEQ ID NO: 852984 - protein, 147 aa, Homo sapiens; identical to SEQ ID NO: 852980

SEQ ID NO: 852985 - protein, 327 aa, Homo sapiens; identical to SEQ ID NO: 852983

SEQ ID NO: 852986 - protein, 328 aa, Homo sapiens
CSEPPPSPETPLAWGLRTATPLPPESPPRHSLEEEPAGNWLQDALFLSAACSCNQHARRCRFNSELFRLSGGRSGGVCERCRHHTAGRHCHYCQPGFWRDPSQPIFSRRACRACQCHPIGATGGTCNQTSGQCTCKLGVTGLTCNRCGPGYQQSRSPRMPCQRIPEATTTLATTPGAYSSDPQCQNYCNMSDTRVHMSLRRYCQQDHVLRAQVLASEAAGPAWQRLAVRVLAVYKQRAQPVRRGDQDAWVPRADLTCGCLRLQPGTDYLLLGSAVGDPDPTRLILDRHGLALPWRPRWARPLKRLQQEERAGGCRGVRAPTPSPRPEH

SEQ ID NO: 852987 - protein, 239 aa, Homo sapiens
CSEPPPSPETPLAWGLRTATPLPPESPPRHSLEEEPAGNWLQDALFLSAACSCNQHARRCRFNSELFRLSGGRSGGVCERCRHHTAGRHCHYCQPGFWRDPSQPIFSRRACRACQCHPIGATGGTCNQTSGQCTCKLGVTGLTCNRCGPGYQQSRSPRMPCQRIPEATTTLATTPGAYSSDPQCQNYCNMSDTRVHMSLRRYCQQDHGECWGDRQLKATQLVLMTASKPPPFWPSTFSS

SEQ ID NO: 852988 - protein, 445 aa, Homo sapiens
AWWRIRHEAATPLPPESPPRHSLEEEPAGNWLQDALFLSAGAGSAVTMPVTFALLLLLGQATADPCYDPQGRPQFCLPPVTQLAAVAASCPQACALSPGNHLGARETCNGSLTLALGGPFLLTSVSLRFCTPGPPALILSAAWASGGPWRLLWHRPAWPGALGGPERVTFHSTPGPKATVAASHLRVEFGGQAGLAAAGLRGRCQCHGHAARCAARARPPRCTAATYHWPGVRELAAVPSRLALAAARPGPQPCLPCSCNQHARRCRFNSELFRLSGGRSGGVCERCRHHTAGRHCHYCQPGFWRDPSQPIFSRRACRACQCHPIGATGGTCNQTSGQCTCKLGVTGLTCNRCGPGYQQSRSPRMPCQRIPEATTTLATTPGAYSSDPQCQNYCNMSDTRVHMSLRRYCQQDHGECWGDRQLKATQLVLMTASKPPPFWPSTFSS

SEQ ID NO: 852989 - protein, 534 aa, Homo sapiens
AWWRIRHEAATPLPPESPPRHSLEEEPAGNWLQDALFLSAGAGSAVTMPVTFALLLLLGQATADPCYDPQGRPQFCLPPVTQLAAVAASCPQACALSPGNHLGARETCNGSLTLALGGPFLLTSVSLRFCTPGPPALILSAAWASGGPWRLLWHRPAWPGALGGPERVTFHSTPGPKATVAASHLRVEFGGQAGLAAAGLRGRCQCHGHAARCAARARPPRCTAATYHWPGVRELAAVPSRLALAAARPGPQPCLPCSCNQHARRCRFNSELFRLSGGRSGGVCERCRHHTAGRHCHYCQPGFWRDPSQPIFSRRACRACQCHPIGATGGTCNQTSGQCTCKLGVTGLTCNRCGPGYQQSRSPRMPCQRIPEATTTLATTPGAYSSDPQCQNYCNMSDTRVHMSLRRYCQQDHVLRAQVLASEAAGPAWQRLAVRVLAVYKQRAQPVRRGDQDAWVPRADLTCGCLRLQPGTDYLLLGSAVGDPDPTRLILDRHGLALPWRPRWARPLKRLQQEERAGGCRGVRAPTPSPRPEH

SEQ ID NO: 852990 - protein, 405 aa, Homo sapiens
SHTGGAQAGSAEGPAPESRSSTLTHTAWAPSSDMPPLMGGVSAPFHPPAADAPPSFRSDSLLSNPMSLSCSCQIWPPPTWYLRVQSRGSPLLCPRTPWGRAWGSGSQACQDWAHATPRKRWGQATADPCYDPQGRPQFCLPPVTQLAAVAASCPQACALSPGNHLGARETCNGSLTLALGGPFLLTSVSLRFCTPGPPALILSAAWASGGPWRLLWHRPAWPGALGGPERVTFHSTPGPKATVAASHLRVEFGGQAGLAAAGLRGRCQCHGHAARCAARARPPRCTAATYHWPGVRELPPSHRDWPWRLHAPDPNLAYPAPATSTPDAAGSTLSCSDCRAAGVGVFVSGAATTQLGGTATTANLGSGGTLASLSSAAGPAEPASATLLGQQEEPATRPVGSAPAS

SEQ ID NO: 852991 - protein, 805 aa, Homo sapiens
MWDQGGQPWQQWPLNQQQWMQSFQHQQDPSQIDWAALAQAWIAQREASGQQSMVEQPPGMMPNGQDMSTMESGPNNHGNFQGDSNFNRMWQPEWGMHQQPPHPPPDQPWMPPTPGPMDIVPPSEDSNSQDSGEFAPDNRHIFNQNNHNFGGPPDNFAVGPVNQFDYQHGAAFGPPQGGFHPPYWQPGPPGPPAPPQNRRERPSSFRDRQRSPIALPVKQEPPQIDAVKRRTLPAWIREGLEKMEREKQKKLEKERMEQQRSQLSKKEKKATEDAEGGDGPRLPQRSKFDSDEEEEDTENVEAASSGKVTRSPSPVPQEEHSDPEMTEEEKEYQMMLLTKMLLTEILLDVTDEEIYYVAKDAHRKATKAPAKQLAQSSALASLTGLGGLGGYGSGDSEDERSDRGSESSDTDDEELRHRIRQKQEAFWRKEKEQQLLHDKQMEEEKQQTERVTKEMNEFIHKEQNSLSLLEAREADGDVVNEKKRTPNETTSVLEPKKEHKEKEKQGRSRSGSSSSGSSSSNSRTSSTSSTVSSSSYSSSSGSSRTSSRSSSPKRKKRHSRSRSPTIKARRSRSRSYSRRIKIESNRARVKIRDRRRSNRNSIERERRRNRSPSRERRRSRSRSRDRRTNRASRSRSRDRRKIDDQRGNLSGNSHKHKGEAKEQERKKERSRSIDKDRKKKDKEREREQDKRKEKQKREEKDFKFSSQDDRLKRKRESERTFSRSGSISVKIIRHDSRQDSKKSTTKDSKKHSGSDSSGRSSSESPGSSKEKKAKKPKHSRSRSVEKSQRSGKKASRKHKSKSRSR

SEQ ID NO: 852992 - protein, 805 aa, Homo sapiens; identical to SEQ ID NO: 852991

SEQ ID NO: 852993 - protein, 805 aa, Homo sapiens; identical to SEQ ID NO: 852991

SEQ ID NO: 852994 - protein, 805 aa, Homo sapiens; identical to SEQ ID NO: 852991

SEQ ID NO: 852995 - protein, 814 aa, Homo sapiens
MWDQGGQPWQQWPLNQQQWMQSFQHQQDPSQIDWAALAQAWIAQREASGQQSMVEQPPGMMPNGQDMSTMESGPNNHGNFQGDSNFNRMWQPEWGMHQQPPHPPPDQPWMPPTPGPMDIVPPSEDSNSQDSGEFAPDNRHIFNQNNHNFGGPPDNFAVGPVNQFDYQHGAAFGPPQGGFHPPYWQPGPPGPPAPPQNRRERPSSFRDRQRSPIALPVKQEPPQIDAVKRRTLPAWIREGLEKMEREKQKKLEKERMEQQRSQLSKKEKKATEDAEGGDGPRLPQRSKFDSDEEEEDTENVEAASSGKVTRSPSPVPQEEHSDPEMTEEEKEYQMMLLTKMLLTEILLDVTDEEIYYVAKDAHRKATKAPAKQLAQSSALASLTGLGGLGGYGSGDSEDERSDRGSESSDTDDEELRHRIRQKQEAFWRKEKEQQLLHDKQMEEEKQQTERVTKEMNEFIHKEQNSLSLLEAREADGDVVNEKKRTPNETTSVLEPKKEHKEKEKQGRSRSGSSSSGSSSSNSRTSSTSSTVSSSSYSSSSGSSRTSSRSSSPKRKKRHSRSRSPTIKARRSRSRSYSRRIKIESNRARVKIRDRRRSNRNSIERERRRNRSPSRERRRSRSRSRDRRTNRASRSRSRDRRKIDDQRGNLSGNSHKHKGEAKEQERKKERSRSIDKDRKKKDKEREREQDKRKEKQKREEKDFKFSSQDDRLKRKRESERTFSRSGSISVKIIRHDSRQDSKKSTTKDSKKHSGSDSSGRSSSESPGSSKEKKAKKPKHSRSRSVEKSQRSGKKASRKHKSKSRSRSTTPPRRKR

SEQ ID NO: 852996 - protein, 814 aa, Homo sapiens; identical to SEQ ID NO: 852995

SEQ ID NO: 852997 - protein, 805 aa, Homo sapiens; identical to SEQ ID NO: 852991

SEQ ID NO: 852998 - protein, 805 aa, Homo sapiens; identical to SEQ ID NO: 852991

SEQ ID NO: 852999 - protein, 563 aa, Homo sapiens
MEREKQKKLEKERMEQQRSQLSKKEKKATEDAEGGDGPRLPQRSKFDSDEEEEDTENVEAASSGKVTRSPSPVPQEEHSDPEMTEEEKEYQMMLLTKMLLTEILLDVTDEEIYYVAKDAHRKATKAPAKQLAQSSALASLTGLGGLGGYGSGDSEDERSDRGSESSDTDDEELRHRIRQKQEAFWRKEKEQQLLHDKQMEEEKQQTERVTKEMNEFIHKEQNSLSLLEAREADGDVVNEKKRTPNETTSVLEPKKEHKEKEKQGRSRSGSSSSGSSSSNSRTSSTSSTVSSSSYSSSSGSSRTSSRSSSPKRKKRHSRSRSPTIKARRSRSRSYSRRIKIESNRARVKIRDRRRSNRNSIERERRRNRSPSRERRRSRSRSRDRRTNRASRSRSRDRRKIDDQRGNLSGNSHKHKGEAKEQERKKERSRSIDKDRKKKDKEREREQDKRKEKQKREEKDFKFSSQDDRLKRKRESERTFSRSGSISVKIIRHDSRQDSKKSTTKDSKKHSGSDSSGRSSSESPGSSKEKKAKKPKHSRSRSVEKSQRSGKKASRKHKSKSRSR

SEQ ID NO: 853000 - protein, 805 aa, Homo sapiens; identical to SEQ ID NO: 852991

SEQ ID NO: 853001 - protein, 465 aa, Homo sapiens
MWDQGGQPWQQWPLNQQQWMQSFQHQQDPSQIDWAALAQAWIAQREASGQQSMVEQPPGMMPNGQDMSTMESGPNNHGNFQGDSNFNRMWQPEWGMHQQPPHPPPDQPWMPPTPGPMDIVPPSEDSNSQDSGEFAPDNRHIFNQNNHNFGGPPDNFAVGPVNQFDYQHGAAFGPPQGGFHPPYWQPGPPGPPAPPQNRRERPSSFRDRQRSPIALPVKQEPPQIDAVKRRTLPAWIREGLEKMEREKQKKLEKERMEQQRSQLSKKEKKATEDAEGGDGPRLPQRSKFDSDEEEEDTENVEAASSGKVTRSPSPVPQEEHSDPEMTEEEKEYQMMLLTKMLLTEILLDVTDEEIYYVAKDAHRKATKAPAKQLAQSSALASLTGLGGLGGYGSGDSEDERSDRGSESSDTDDEELRHRIRQKQEAFWRKEKEQQLLHDKQMEEEKQQTEREGETERDRQTGRERE

SEQ ID NO: 853002 - protein, 745 aa, Homo sapiens
MWDQGGQPWQQWPLNQQQWMQSFQHQQDPSQIDWAALAQAWIAQREASGQQSMVEQPPGMMPNGQDMSTMESGPNNHGNFQGDSNFNRMWQPEWGMHQQPPHPPPDQPWMPPTPGPMDIVPPYWQPGPPGPPAPPQNRRERPSSFRDRQRSPIALPVKQEPPQIDAVKRRTLPAWIREGLEKMEREKQKKLEKERMEQQRSQLSKKEKKATEDAEGGDGPRLPQRSKFDSDEEEEDTENVEAASSGKVTRSPSPVPQEEHSDPEMTEEEKEYQMMLLTKMLLTEILLDVTDEEIYYVAKDAHRKATKAPAKQLAQSSALASLTGLGGLGGYGSGDSEDERSDRGSESSDTDDEELRHRIRQKQEAFWRKEKEQQLLHDKQMEEEKQQTERVTKEMNEFIHKEQNSLSLLEAREADGDVVNEKKRTPNETTSVLEPKKEHKEKEKQGRSRSGSSSSGSSSSNSRTSSTSSTVSSSSYSSSSGSSRTSSRSSSPKRKKRHSRSRSPTIKARRSRSRSYSRRIKIESNRARVKIRDRRRSNRNSIERERRRNRSPSRERRRSRSRSRDRRTNRASRSRSRDRRKIDDQRGNLSGNSHKHKGEAKEQERKKERSRSIDKDRKKKDKEREREQDKRKEKQKREEKDFKFSSQDDRLKRKRESERTFSRSGSISVKIIRHDSRQDSKKSTTKDSKKHSGSDSSGRSSSESPGSSKEKKAKKPKHSRSRSVEKSQRSGKKASRKHKSKSRSR

SEQ ID NO: 853003 - protein, 563 aa, Homo sapiens; identical to SEQ ID NO: 852999

SEQ ID NO: 853004 - protein, 423 aa, Homo sapiens [sequence omitted]

SEQ ID NO: 853005 - protein, 487 aa, Homo sapiens
FAAASTEDDRREEYQMMLLTKMLLTEILLDVTDEEIYYVAKDAHRKATKAPAKQLAQSSALASLTGLGGLGGYGSGDSEDERSDRGSESSDTDDEELRHRIRQKQEAFWRKEKEQQLLHDKQMEEEKQQTERVTKEMNEFIHKEQNSLSLLEAREADGDVVNEKKRTPNETTSVLEPKKEHKEKEKQGRSRSGSSSSGSSSSNSRTSSTSSTVSSSSYSSSSGSSRTSSRSSSPKRKKRHSRSRSPTIKARRSRSRSYSRRIKIESNRARVKIRDRRRSNRNSIERERRRNRSPSRERRRSRSRSRDRRTNRASRSRSRDRRKIDDQRGNLSGNSHKHKGEAKEQERKKERSRSIDKDRKKKDKEREREQDKRKEKQKREEKDFKFSSQDDRLKRKRESERTFSRSGSISVKIIRHDSRQDSKKSTTKDSKKHSGSDSSGRSSSESPGSSKEKKAKKPKHSRSRSVEKSQRSGKKASRKHKSKSRSR

SEQ ID NO: 853006 - protein, 282 aa, Homo sapiens
MWDQGGQPWQQWPLNQQQWMQSFQHQQDPSQIDWAALAQAWIAQREASGQQSMVEQPPGMMPNGQDMSTMESGPNNHGNFQGDSNFNRMWQPEWGMHQQPPHPPPDQPWMPPTPGPMDIVPPSEDSNSQDSGEFAPDNRHIFNQNNHNFGGPPDNFAVGPVNQFDYQHGAAFGPPQGGFHPPYWQPGPPGPPAPPQNRRERPSSFRDRQRSPIALPVKQEPPQIDAVKRRTLPAWIREGLEKMEREKQKKLEVLEVLVANKEDEIHLAVDQKQPHAERVLQF

SEQ ID NO: 853007 - protein, 413 aa, Homo sapiens
MWDQGGQPWQQWPLNQQQWMQSFQHQQDPSQIDWAALAQAWIAQREASGQQSMVEQPPGMMPNGQDMSTMESGPNNHGNFQGDSNFNRMWQPEWGMHQQPPHPPPDQPWMPPTPGPMDIVPPSEDSNSQDSGEFAPDNRHIFNQNNHNFGGPPDNFAVGPVNQFDYQHGAAFGPPQGGFHPPYWQPGPPGPPAPPQNRRERPSSFRDRQRSPIALPVKQEPPQIDAVKRRTLPAWIREGLEKMEREKQKKLEKERMEQQRSQLSKKEKKATEDAEGGDGPRLPQRSKFDSDEEEEDTENVEAASSGKVTRSPSPVPQEEHSDPEMTEEEKEYQMMLLTKMLLTEILLDVTDEEIYYVAKDAHRKATKGIFWCFWFCFSWGILVLMTILAFFCCPCWISTRYLNILLHVLTLKD

SEQ ID NO: 853008 - protein, 787 aa, Homo sapiens
MWDQGGQPWQQWPLNQQQWMQSFQHQQDPSQIDWAALAQAWIAQREASGQQSMVEQPPGMMPNGQDMSTMESGPNNHGNFQGDSNFNRMWQPEWGMHQQPPHPPPDQPWMPPTPGPMDIVPPSEDSNSQDSGEFAPDNRHIFNQNNHNFGGPPDNFAVGPVNQFDYQHGAAFGPPQGGFHPPYWQPGPPGPPAPPQNRRERPSSFRDRQRSPIALPVKQEPPQIDAVKRRTLPAWIREGLEKMEREKQKKLEKERMEQQRSQLSKKEKKATEDAEGGDGPRLPQRSKFDSDEEEEDTENVEAASSGKVTRSPSPVPQEEHSDPEMTEEEKEYQMMLLTKMLLTEILLDVTDEEIYYVAKDAHRKATKGGLGGYGSGDSEDERSDRGSESSDTDDEELRHRIRQKQEAFWRKEKEQQLLHDKQMEEEKQQTERVTKEMNEFIHKEQNSLSLLEAREADGDVVNEKKRTPNETTSVLEPKKEHKEKEKQGRSRSGSSSSGSSSSNSRTSSTSSTVSSSSYSSSSGSSRTSSRSSSPKRKKRHSRSRSPTIKARRSRSRSYSRRIKIESNRARVKIRDRRRSNRNSIERERRRNRSPSRERRRSRSRSRDRRTNRASRSRSRDRRKIDDQRGNLSGNSHKHKGEAKEQERKKERSRSIDKDRKKKDKEREREQDKRKEKQKREEKDFKFSSQDDRLKRKRESERTFSRSGSISVKIIRHDSRQDSKKSTTKDSKKHSGSDSSGRSSSESPGSSKEKKAKKPKHSRSRSVEKSQRSGKKASRKHKSKSRSR

SEQ ID NO: 853009 - protein, 805 aa, Homo sapiens; identical to SEQ ID NO: 852991

SEQ ID NO: 853010 - protein, 805 aa, Homo sapiens; identical to SEQ ID NO: 852991

SEQ ID NO: 853011 - protein, 805 aa, Homo sapiens; identical to SEQ ID NO: 852991

SEQ ID NO: 853012 - protein, 174 aa, Homo sapiens
MWDQGGQPWQQWPLNQQQWMQSFQHQQDPSQIDWAALAQAWIAQREASGQQSMVEQPPGMMPNGQDMSTMESGPNNHGNFQGDSNFNRMWQPEWGMHQQPPHPPPDQPWMPPTPGPMDIVPPSEDSNSQDSGEFAPDNRHIFNQNNHNFGGPPDNFAVGPVNQFDYQVKDILLL

SEQ ID NO: 853013 - protein, 805 aa, Homo sapiens; identical to SEQ ID NO: 852991

SEQ ID NO: 853014 - protein, 465 aa, Homo sapiens; identical to SEQ ID NO: 853001

SEQ ID NO: 853015 - protein, 618 aa, Homo sapiens
MALKKGMIFNGIFFKFTHKFVEIFYLTDLRIFFPRETDAVKRRTLPAWIREGLEKMEREKQKKLEKERMEQQRSQLSKKEKKATEDAEGGDGPRLPQRSKFDSDEEEEDTENVEAASSGKVTRSPSPVPQEEHSDPEMTEEEKEYQMMLLTKMLLTEILLDVTDEEIYYVAKDAHRKATKAPAKQLAQSSALASLTGLGGLGGYGSGDSEDERSDRGSESSDTDDEELRHRIRQKQEAFWRKEKEQQLLHDKQMEEEKQQTERVTKEMNEFIHKEQNSLSLLEAREADGDVVNEKKRTPNETTSVLEPKKEHKEKEKQGRSRSGSSSSGSSSSNSRTSSTSSTVSSSSYSSSSGSSRTSSRSSSPKRKKRHSRSRSPTIKARRSRSRSYSRRIKIESNRARVKIRDRRRSNRNSIERERRRNRSPSRERRRSRSRSRDRRTNRASRSRSRDRRKIDDQRGNLSGNSHKHKGEAKEQERKKERSRSIDKDRKKKDKEREREQDKRKEKQKREEKDFKFSSQDDRLKRKRESERTFSRSGSISVKIIRHDSRQDSKKSTTKDSKKHSGSDSSGRSSSESPGSSKEKKAKKPKHSRSRSVEKSQRSGKKASRKHKSKSRSR

SEQ ID NO: 853016 - protein, 676 aa, Homo sapiens
GGGFGYFFKPTCSLGSAWKAGHTDRGRVVALRGSPDYQHGAAFGPPQGGFHPPYWQPGPPGPPAPPQNRRERPSSFRDRQRSPIALPVKQEPPQIDAVKRRTLPAWIREGLEKMEREKQKKLEKERMEQQRSQLSKKEKKATEDAEGGDGPRLPQRSKFDSDEEEEDTENVEAASSGKVTRSPSPVPQEEHSDPEMTEEEKEYQMMLLTKMLLTEILLDVTDEEIYYVAKDAHRKATKAPAKQLAQSSALASLTGLGGLGGYGSGDSEDERSDRGSESSDTDDEELRHRIRQKQEAFWRKEKEQQLLHDKQMEEEKQQTERVTKEMNEFIHKEQNSLSLLEAREADGDVVNEKKRTPNETTSVLEPKKEHKEKEKQGRSRSGSSSSGSSSSNSRTSSTSSTVSSSSYSSSSGSSRTSSRSSSPKRKKRHSRSRSPTIKARRSRSRSYSRRIKIESNRARVKIRDRRRSNRNSIERERRRNRSPSRERRRSRSRSRDRRTNRASRSRSRDRRKIDDQRGNLSGNSHKHKGEAKEQERKKERSRSIDKDRKKKDKEREREQDKRKEKQKREEKDFKFSSQDDRLKRKRESERTFSRSGSISVKIIRHDSRQDSKKSTTKDSKKHSGSDSSGRSSSESPGSSKEKKAKKPKHSRSRSVEKSQRSGKKASRKHKSKSRSR

SEQ ID NO: 853017 - protein, 376 aa, Homo sapiens [sequence omitted]

SEQ ID NO: 853018 - protein, 120 aa, Homo sapiens
MSRRFTVTSLPPAGPARSPDPESRRHSVADPRHLPGEDVKVSPQGALIRGPLPGSEALGSGRNKANRLVVAPARGGGGGGGGGGGRGGGGRGGGRGGGGEGGGEASPDRQGSLPSRSKSN

SEQ ID NO: 853019 - protein, 124 aa, Homo sapiens
VGGVFLAGPVQGLVMEVTRRAQSIGEGKDPSGLRWRSSILGACTVSPQGALIRGPLPGSEALGSGRNKANRLVVAPARGGGGGGGGGGGRGGGGRGGGRGGGGEGGGEASPDRQGSLPSRSKSN

SEQ ID NO: 853020 - protein, 535 aa, Homo sapiens
RDQFDLTVGITDPEASGGGGCSASERLPPPFPGLEPESEGAAGGSEPEAGDSDTEGEDIFTGAAVVSKHQSPKITTSLLPINNGSKENGIHEEQDQEPQDLFADATVELSLDSTQNNQKKVLAKTLISLPPQEATNSSKPQPTYEELEEEEQEDQFDLTVGITDPEKIGDGMNAYVAYKVTTQTSLPLFRSKQFAVKRRFSDFLGLYEKLSEKHSQNGFIVPPPPEKSLIGMTKVKVGKEDSSSAEFLEKRRAALERYLQRIVNHPTMLQDPDVREFLEKEELPRAVGTQTLSGAGLLKMFNKATDAVSKMTIKMNESDIWFEEKLQEVECEEQRLRKLHAVVETLVNHRKELALNTAQFAKSLAMLGSSEDNTALSRALSQLAEVEEKIEQLHQEQANNDFFLLAELLSDYIRLLAIVRAAFDQRMKTWQRWQDAQATLQKKREAEARLLWANKPDKLQQAKDEILEWESRVTQYERDFERISTVVRKEVIRFEKEKSKDFKNHVIKYLETLLYSQQQLAKYWEAFLPEAKAIS

SEQ ID NO: 853021 - protein, 479 aa, Homo sapiens
MASGGGGCSASERLPPPFPGLEPESEGAAGGSEPEAGDSDTEGEDIFTGAAVVSKHQSPKITTSLLPINNGSKENGIHEEQDQEPQDLFADATVELSLDSTQNNQKKVLAKTLISLPPQEATNSSKPQPTYEELEEEEQEDQFDLTVGITDPEKIGDGMNAYVAYKVTTQTSLPLFRSKQFAVKRRFSDFLGLYEKLSEKHSQNGFIVPPPPEKSLIGMTKVKVGKEDSSSAEFLEKRRAALERYLQRIVNHPTMLQDPDVREFLEKEELPRAVGTQTLSGAGLLKMFNKATDAVSKMTIKMNESDIWFEEKLQEVECEEQRLRKLHAVVETLVNHRKELALNTAQFAKSLAMLGSSEDNTALSRALSQLAEVEEKIEQLHQEQANNDFFLLAELLSDYIRLLAIVRAAFDQRMKTWQRWQDAQATLQKKREAEARLLWANKPDKLQQAKDEILEWESYSQQQLAKYWEAFLPEAKAIS

SEQ ID NO: 853022 - protein, 536 aa, Homo sapiens
MASGGGGCSASERLPPPFPGLEPESEGAAGGSEPEAGDSDTEGEDIFTGAAVVSKHQSPKITTSLLPINNGSKENGIHEEQDQEPQDLFADATVELSLDSTQNNQKKVLAKTLISLPPQEATNSSKPQPTYEELEEEEQEDQFDLTVGITDPEKIGDGMNAYVAYKVTTQTSLPLFRSKQFAVKRRFSDFLGLYEKLSEKHSQNGFIVPPPPEKSLIGMTKVKVGKEDSSSAEFLEKRRAALERYLQRIVNHPTMLQDPDVREFLEKEEGQQITCHPCLLGLELPRAVGTQTLSGAGLLKMFNKATDAVSKMTIKMNESDIWFEEKLQEVECEEQRLRKLHAVVETLVNHRKELALNTAQFAKSLAMLGSSEDNTALSRALSQLAEVEEKIEQLHQEQANNDFFLLAELLSDYIRLLAIVRAAFDQRMKTWQRWQDAQATLQKKREAEARLLWANKPDKLQQAKDEILEWESRVTQYERDFERISTVVRKEVIRFEKEKSKDFKNHVIKYLETLLYSQQQLAKYWEAFLPEAKAIS

SEQ ID NO: 853023 - protein, 364 aa, Homo sapiens
MNAYVAYKVTTQTSLPLFRSKQFAVKRRFSDFLGLYEKLSEKHSQNGFIVPPPPEKSLIGMTKVKVGKEDSSSAEFLEKRRAALERYLQRIVNHPTMLQDPDVREFLEKEELPRAVGTQTLSGAGLLKMFNKATDAVSKMTIKMNESDIWFEEKLQEVECEEQRLRKLHAVVETLVNHRKELALNTAQFAKSLAMLGSSEDNTALSRALSQLAEVEEKIEQLHQEQANNDFFLLAELLSDYIRLLAIVRAAFDQRMKTWQRWQDAQATLQKKREAEARLLWANKPDKLQQAKDEILEWESRVTQYERDFERISTVVRKEVIRFEKEKSKDFKNHVIKYLETLLYSQQQLAKYWEAFLPEAKAIS

SEQ ID NO: 853024 - protein, 482 aa, Homo sapiens
SLFADDMIVYLEASKHQSPKITTSLLPINNGSKENGIHEEQDQEPQDLFADATVELSLDSTQNNQKKVLAKTLISLPPQEATNSSKPQPTYEELEEEEQEDQFDLTVGITDPEKIGDGMNAYVAYKVTTQTSLPLFRSKQFAVKRRFSDFLGLYEKLSEKHSQNGFIVPPPPEKSLIGMTKVKVGKEDSSSAEFLEKRRAALERYLQRIVNHPTMLQDPDVREFLEKEELPRAVGTQTLSGAGLLKMFNKATDAVSKMTIKMNESDIWFEEKLQEVECEEQRLRKLHAVVETLVNHRKELALNTAQFAKSLAMLGSSEDNTALSRALSQLAEVEEKIEQLHQEQANNDFFLLAELLSDYIRLLAIVRAAFDQRMKTWQRWQDAQATLQKKREAEARLLWANKPDKLQQAKDEILEWESRVTQYERDFERISTVVRKEVIRFEKEKSKDFKNHVIKYLETLLYSQQQLAKYWEAFLPEAKAIS

SEQ ID NO: 853025 - protein, 561 aa, Homo sapiens
MASGGGGCSASERLPPPFPGLEPESEGAAGGSEPEAGDSDTEGEDIFTGAAVVSKHQSPKITTSLLPINNGSKENGIHEEQDQEPQDLFAGSHSVAQAGVQWCGHGSLQPRPPRLSDLPTSTFWVARTTDATVELSLDSTQNNQKKVLAKTLISLPPQEATNSSKPQPTYEELEEEEQEDQFDLTVGITDPEKIGDGMNAYVAYKVTTQTSLPLFRSKQFAVKRRFSDFLGLYEKLSEKHSQNGFIVPPPPEKSLIGMTKVKVGKEDSSSAEFLEKRRAALERYLQRIVNHPTMLQDPDVREFLEKEELPRAVGTQTLSGAGLLKMFNKATDAVSKMTIKMNESDIWFEEKLQEVECEEQRLRKLHAVVETLVNHRKELALNTAQFAKSLAMLGSSEDNTALSRALSQLAEVEEKIEQLHQEQANNDFFLLAELLSDYIRLLAIVRAAFDQRMKTWQRWQDAQATLQKKREAEARLLWANKPDKLQQAKDEILEWESRVTQYERDFERISTVVRKEVIRFEKEKSKDFKNHVIKYLETLLYSQQQLAKYWEAFLPEAKAIS

SEQ ID NO: 853026 - protein, 364 aa, Homo sapiens; identical to SEQ ID NO: 853023

SEQ ID NO: 853027 - protein, 522 aa, Homo sapiens
MASGGGGCSASERLPPPFPGLEPESEGAAGGSEPEAGDSDTEGEDIFTGAAVVSKHQSPKITTSLLPINNGSKENGIHEEQDQEPQDLFADATVELSLDSTQNNQKKVLAKTLISLPPQEATNSSKPQPTYEELEEEEQEDQFDLTVGITDPEKIGDGMNAYVAYKVTTQTSLPLFRSKQFAVKRRFSDFLGLYEKLSEKHSQNGFIVPPPPEKSLIGMTKVKVGKEDSSSAEFLEKRRAALERYLQRIVNHPTMLQDPDVREFLEKEELPRAVGTQTLSGAGLLKMFNKATDAVSKMTIKMNESDIWFEEKLQEVECEEQRLRKLHAVVETLVNHRKELALNTAQFAKSLAMLGSSEDNTALSRALSQLAEVEEKIEQLHQEQANNDFFLLAELLSDYIRLLAIVRAAFDQRMKTWQRWQDAQATLQKKREAEARLLWANKPDKLQQAKDEILEWESRVTQYERDFERISTVVRKEVIRFEKEKSKDFKNHVIKYLETLLYSQQQLAKYWEAFLPEAKAIS

SEQ ID NO: 853028 - protein, 142 aa, Homo sapiens
GCTGPEGLTTSGGGGCSASERLPPPFPGLEPESEGAAGGSEPEAGDSDTEGEDIFTGAAVVSKHQSPKITTSLLPINNGSKENGIHEEQDQEPQDLFADATVELSLDSTQNNQKKVLARDYRREPPHPALSCFLKDLKASTQ

SEQ ID NO: 853029 - protein, 342 aa, Homo sapiens [sequence omitted]

SEQ ID NO: 853030 - protein, 457 aa, Homo sapiens
MASGGGGCSASERLPPPFPGLEPESEGAAGGSEPEAGDSDTEGEDIFTGAAVVSKHQSPKITTSLLPINNGSKENGIHEEQDQEPQDLFAGDGMNAYVAYKVTTQTSLPLFRSKQFAVKRRFSDFLGLYEKLSEKHSQNGFIVPPPPEKSLIGMTKVKVGKEDSSSAEFLEKRRAALERYLQRIVNHPTMLQDPDVREFLEKEELPRAVGTQTLSGAGLLKMFNKATDAVSKMTIKMNESDIWFEEKLQEVECEEQRLRKLHAVVETLVNHRKELALNTAQFAKSLAMLGSSEDNTALSRALSQLAEVEEKIEQLHQEQANNDFFLLAELLSDYIRLLAIVRAAFDQRMKTWQRWQDAQATLQKKREAEARLLWANKPDKLQQAKDEILEWESRVTQYERDFERISTVVRKEVIRFEKEKSKDFKNHVIKYLETLLYSQQQLAKYWEAFLPEAKAIS

SEQ ID NO: 853031 - protein, 364 aa, Homo sapiens; identical to SEQ ID NO: 853023

SEQ ID NO: 853032 - protein, 170 aa, Homo sapiens [sequence omitted]

SEQ ID NO: 853033 - protein, 159 aa, Homo sapiens
MDIVPSANMDPYKGARPAPVHLQAPQELLGLLPHVVVQGELLEDLLAEVVVEGPGAGVAGEADVLPRDVAVFLLHPVVQVVVLPGDPAGRGAVQHRQGDSEDGGQGAVHLGRDEGGPPVHLGQGVQRGVLAHLVPQAALGVDSEQVLPGQVSGGQDHTG

SEQ ID NO: 853034 - protein, 71 aa, Homo sapiens
TPPPPHEDLQVVQPTAESGRPDSPLLLASCGSAQCFSTWYILVPRSQTSDGRAQRGAAHAPCTPPAPSILY

SEQ ID NO: 853035 - protein, 328 aa, Homo sapiens
MGAAARLSAPRALVLWAALGAAAHIGPAPDPEDWWSYKDNLQGNFVPGPPFWGLVNAAWSLCAVGKRQSPVDVELKRVLYDPFLPPLRLSTGGEKLRGTLYNTGRHVSFLPAPRPVVNVSGGPLLYSHRLSELRLLFGARDGAGSEHQINHQGFSAEVQLIHFNQELYGNFSAASRGPNGLAILSLFVNVASTSNPFLSRLLNRDTITRISYKNDAYFLQDLSLELLFPESFGFITYQGSLSTPPCSETVTWILIDRALNITSLQMHSLRLLSQNPPSQIFQSLSGNSRPLQPLAHRALRGNRDPRHPERRCRGPNYRLHVDGVPHGR

SEQ ID NO: 853036 - protein, 328 aa, Homo sapiens; identical to SEQ ID NO: 853035

SEQ ID NO: 853037 - protein, 346 aa, Homo sapiens
MGAAARLSAPRALVLWAALGAAAHIGPAPDPEDWWSYKDNLQGNFVPGPPFWGLVNAAWSLCAVGKRQSPVDVELKRVLYDPFLPPLRLSTGGEKLRGTLYNTGRHVSFLPAPRPVVNVSGGPLLYSHRLSELRLLFGARDGAGSEHQINHQGFSAEVQLIHFNQELYGNFSAASRGPNGLAILSLFVNVASTSNPFLSRLLNRDTITRISYKNDAYFLQDLSLELLFPESFGFITYQGSLSTPPCSETVTWILIDRALNITSLQMHSLRLLSQNPPSQIFQSLSGNSRPLQPLAHRALRGNRDPRHPERRCRGPNYRLHAQCFSTWYILVPRSQTSDVDGVPHGR

SEQ ID NO: 853038 - protein, 345 aa, Homo sapiens [sequence omitted]

SEQ ID NO: 853039 - protein, 361 aa, Homo sapiens
LANLVKPVSAKLGNYSKILLGPRILDLSPVLPQTQESRSLAPPPLGSGSPDHSPLSRYQPWDPVSISDSLSSYSDPSPQGRPPFWGLVNAAWSLCAVGKRQSPVDVELKRVLYDPFLPPLRLSTGGEKLRGTLYNTGRHVSFLPAPRPVVNVSGGPLLYSHRLSELRLLFGARDGAGSEHQINHQGFSAEVQLIHFNQELYGNFSAASRGPNGLAILSLFVNVASTSNPFLSRLLNRDTITRISYKNDAYFLQDLSLELLFPESFGFITYQGSLSTPPCSETVTWILIDRALNITSLQMHSLRLLSQNPPSQIFQSLSGNSRPLQPLAHRALRGNRDPRHPERRCRGPNYRLHVDGVPHGR

SEQ ID NO: 853040 - protein, 280 aa, Homo sapiens
MGAAARLSAPRALVLWAALGAAAHIGPAPDPEDWWSYKDNLQGNFVPGPPFWGLVNAAWSLCAVGKRQSPVDVELKRVLYDPFLPPLRLSTGGEKLRGTLYNTGRHVSFLPAPRPVVNVSGGPLLYSHRLSELRLLFGARDGAGSEHQINHQGFSAEVQLIHFNQELYGNFSAASRGPNGLAILSLFVNVASTSNPFLSRLLNRDTITRISYKNDAYFLQDLSLELLFPESFGFITYQGSLSTPPCSETVTWILIDRALNITSLQMHSLSSEPGGILRAT

SEQ ID NO: 853041 - protein, 306 aa, Homo sapiens
MRTRHMQGWLEAVLSSLSKVSRKAHPLWQEGRLRPKDHVERGVGQGEVGQVDSVPAREVRGPDPEGAHGDDGVVALCEQCEVLGRGALEAIASEHHVPKGAVDALPAPGHVIAGDHKDREAAAGPEPVQGPLQVAGRPAPPSIRAHDTDIVPPAHVDPHEGRLPCPLGLQAPQELLGLLAHVVVQGELLEDLLAEVVVEGPGAGVAREADTAPRDVAVLLLHPVVQVVVLPGDPAGRGAVQHRQGDSEDGGQGAVHLGRDEGGPPVHLGQGVQRGVLAHLVPQAALGVDSEQVLPGQVSGGQDHTG

SEQ ID NO: 853042 - protein, 306 aa, Homo sapiens; identical to SEQ ID NO: 853041

SEQ ID NO: 853043 - protein, 306 aa, Homo sapiens; identical to SEQ ID NO: 853041

SEQ ID NO: 853044 - protein, 91 aa, Homo sapiens
APRGGVSCVTSPRPFTIHSQFPTLLPLQMHSLRLLSQNPPSQIFQSLSGNSRPLQPLAHRALRGNRDPRHPERRCRGPNYRLHVDGVPHGR

SEQ ID NO: 853045 - protein, 108 aa, Homo sapiens
APRGGVSCVTSPRPFTIHSQFPTLLPLQMHSLRLLSQNPPSQIFQSLSGNSRPLQPLAHRALRGNRDPRHPERRCRGPNYRLHGMVQSAPPLSLGLTLLYVSPLGVSV

SEQ ID NO: 853046 - protein, 328 aa, Homo sapiens; identical to SEQ ID NO: 853035

SEQ ID NO: 853047 - protein, 346 aa, Homo sapiens; identical to SEQ ID NO: 853037

SEQ ID NO: 853048 - protein, 328 aa, Homo sapiens; identical to SEQ ID NO: 853035

SEQ ID NO: 853049 - protein, 298 aa, Homo sapiens
RLKQGEEAGEEEVGEHEGPPFWGLVNAAWSLCAVGKRQSPVDVELKRVLYDPFLPPLRLSTGGEKLRGTLYNTGRHVSFLPAPRPVVNVSGGPLLYSHRLSELRLLFGARDGAGSEHQINHQGFSAEVQLIHFNQELYGNFSAASRGPNGLAILSLFVNVASTSNPFLSRLLNRDTITRISYKNDAYFLQDLSLELLFPESFGFITYQGSLSTPPCSETVTWILIDRALNITSLQMHSLRLLSQNPPSQIFQSLSGNSRPLQPLAHRALRGNRDPRHPERRCRGPNYRLHVDGVPHGR

SEQ ID NO: 853050 - protein, 211 aa, Homo sapiens
MGAAARLSAPRALVLWAALGAAAHIGPAPDPEDWWSYKDNLQGNFVPGPPFWGLVNAAWSLCAVGKRQSPVDVELKRVLYDPFLPPLRLSTGGEKLRGTLYNTGRHVSFLPAPRPVVNVSGGPLLYSHRLSELRLLFGARDGAGSEHQINHQGFSAEVQLIHFNQELYGNFSAASRGPNGLAILSLFVNVCQYLYPFLSRILNAQLKTTVT

SEQ ID NO: 853051 - protein, 306 aa, Homo sapiens; identical to SEQ ID NO: 853041

SEQ ID NO: 853052 - protein, 143 aa, Homo sapiens
APSVTSAIRNERLRNERPERAPSVTSPISVVVVVVEGPGAGVAREADTAPRDVAVLLLHPVVQVVVLPGDPAGRGAVQHRQGDSEDGGQGAVHLGRDEGGPPVHLGQGVQRGVLAHLVPQAALGVDSEQVLPGQVSGGQDHTG

SEQ ID NO: 853053 - protein, 529 aa, Homo sapiens
  misc_feature (521)..(521): Xaa can be any naturally occurring amino acid
  misc_feature (524)..(524): Xaa can be any naturally occurring amino acid
LTYEEVLKRNHMQYEIVIKVKPKQLVHHFEIDVDIFEPQGISKLDAQASFLPKELAAQTIKKSFSGKKGHVLFRPTVSQQQSCPTCSTSLLNGHFKVTYDVSRDKICDLLVANNHFAHFFAPQNLTNMNKNVVFVIDISGSMRGQKVKQTKEALLKILGDMQPGDYFDLVLFGTRVQSWKGSLVQASEANLQAAQDFVRGFSLDEATNLNGGLLRGIEILNQVQESLPELSNHASILIMLTDGDPTEGVTDRSQILKNVRNAIRGRFPLYNLGFGHNVDFNFLEVMSMENNGRAQRIYEDHDATQQLQGFYSQVAKPLLVDVDLQYPQDAVLALTQNHHKQYYEGSEIVVAGRIADNKQSSFKADVQAHGEGQEFSITCLVDEEEMKKLLRERGHMLENHVERLWAYLTIQELLAKRMKVDREERANLSSQALRMSLDYGFVTPLTSMSIRGMADQDGLKPTIDKPSEDSPPLEMLGPRRTFVLSALQPSPTHSSSNTQRLPDRVDRRGTQTLQFHSFHVXPVXRDNLL

SEQ ID NO: 853054 - protein, 1849 aa, Homo sapiens
MYEGKKTKNMFLTRALEKILADKEVKKAHHSQLRKACEVALEEIKAETEKQSPPHGEAKAGSSTLPPVKSKTNFIEADKYFLPFELACQSKCPRIVSTSLDCLQKLIAYGHLTGNAPDSTTPGKKLIDRIIETICGCFQGPQTDEGVQLQIIKALLTAVTSQHIEIHEGTVLQAVRTCYNIYLASKNLINQTTAKATLTQMLNVIFARMENQALQEAKQMEKERHRQHHHLLQSPVSHHEPESPQLRYLPPQTVDHISQEHEGDLDLHTNDVDKSLQDDTEPENGSDISSAENEQTEADQATAAETLSKNEVLYDGENHDCEEKPQDIVQNIVEEMVNIVVGDMGEGTTINASADGNIGTIEDGSDSENIQANGIPGTPISVAYTPSLPDDRLSVSSNDTQESGNSSGPSPGAKFSHILQKDAFLVFRSLCKLSMKPLSDGPPDPKSHELRSKILSLQLLLSILQNAGPIFRTNEMFINAIKQYLCVALSKNGVSSVPEVFELSLSIFLTLLSNFKTHLKMQIEVFFKEIFLYILETSTSSFDHKWMVIQTLTRICADAQSVVDIYVNYDCDLNAANIFERLVNDLSKIAQGRGSQELGMSNVQELSLRKKGLECLVSILKCMVEWSKDQYVNPNSQTTLGQEKPSEQEMSEIKHPETINRYGSLNSLESTSSSGIGSYSTQMSGTDNPEQFEVLKQQKEIIEQGIDLFNKKPKRGIQYLQEQGMLGTTPEDIAQFLHQEERLDSTQVGEFLGDNDKFNKEVMYAYVDQHDFSGKDFVSALRMFLEGFRLPGEAQKIDRLMEKFAARYLECNQGQTLFASADTAYVLAYSIIMLTTDLHSPQVKNKMTKEQYIKMNRGINDSKDLPEEYLSAIYNEIAGKKISMKETKELTIPTKSSKQNVASEKQRRLLYNLEMEQMAKTAKALMEAVSHVQAPFTSATHLEHVRPMFKLAWTPFLAAFSVGLQDCDDTEVASLCLEGIRCAIRIACIFSIQLERDAYVQALARFTLLTVSSGITEMKQKNIDTIKTLITVAHTDGNYLGNSWHEILKCISQLELAQLIGTGVKPRYISGTVRGREGSLTGTKDQAPDEFVGLGLVGGNVDWKQIASIQESIGETSSQSVVVAVDRIFTGSTRLDGNAIVDFVRWLCAVSMDELLSTTHPRMFSLQKIVEISYYNMGRIRLQWSRIWEVIGDHFNKVGCNPNEDVAIFAVDSLRQLSMKFLEKGELANFRFQKDFLRPFEHIMKRNRSPTIRDMVVRCIAQMVNSQAANIRSGWKNIFSVFHLAASDQDESIVELAFQTTGHIVTLVFEKHFPATIDSFQDAVKCLSEFACNAAFPDTSMEAIRLIRHCAKYVSDRPQAFKEYTSDDMNVAPEDRVWVRGWFPILFELSCIINRCKLDVRTRGLTVMFEIMKTYGHTYEKHWWQDLFRIVFRIFDNMKLPEQQTEKAEWMTTTCNHALYAICDVFTQYLEVLSDVLLDDIFAQLYWCVQQDNEQLARSGTNCLENVVILNGEKFTLEIWDKTCNCTLDIFKTTIPHALLTWRPNSGETAPPPPSPVSEKPLDTISQKSVDIHDSIQPRSVDNRPQAPLVSASAVNEEVSKIKSTAKFPEQKLFAALLIKCVVQLELIQTIDNIVFFPATSKKEDAENLAAAQRDAVDFDVRVDTQDQGMYRFLTSQQLFKLLDCLLESHRFAKAFNSNNEQRTALWKAGFKGKSKPNLLKQETSSLACGLRILFRMYMDESRVSAWEEVQQRLLNVCSEALSYFLTLTSESHREAWTNLLLLFLTKVLKISDNRFKAHASFYYPLLCEIMQFDLIPELRAVLRRFFLRIGVVFQISQPPEQELGINKQ

SEQ ID NO: 853055 - protein, 1849 aa, Homo sapiens; identical to SEQ ID NO: 853054

SEQ ID NO: 853056 - protein, 1849 aa, Homo sapiens; identical to SEQ ID NO: 853054

SEQ ID NO: 853057 - protein, 1347 aa, Homo sapiens
MYEGKKTKNMFLTRALEKILADKEVKKAHHSQLRKACEVALEEIKAETEKQSPPHGEAKAGSSTLPPVKSKTNFIEADKYFLPFELACQSKCPRIVSTSLDCLQKLIAYGHLTGNAPDSTTPGKKLIDRIIETICGCFQGPQTDEGVQLQIIKALLTAVTSQHIEIHEGTVLQAVRTCYNIYLASKNLINQTTAKATLTQMLNVIFARMENQALQEAKQMEKERHRQHHHLLQSPVSHHEPESPQLRYLPPQTVDHISQEHEGDLDLHTNDVDKSLQDDTEPENGSDISSAENEQTEADQATAAETLSKNEVLYDGENHDCEEKPQDIVQNIVEEMVNIVVGDMGEGTTINASADGNIGTIEDGSDSENIQANGIPGTPISVAYTPSLPDDRLSVSSNDTQESGNSSGPSPGAKFSHILQKDAFLVFRSLCKLSMKPLSDGPPDPKSHELRSKILSLQLLLSILQNAGPIFRTNEMFINAIKQYLCVALSKNGVSSVPEVFELSLSIFLTLLSNFKTHLKMQIEVFFKEIFLYILETSTSSFDHKWMVIQTLTRICADAQSVVDIYVNYDCDLNAANIFERLVNDLSKIAQGRGSQELGMSNVQELSLRKKGLECLVSILKCMVEWSKDQYVNPNSQTTLGQEKPSEQEMSEIKHPETINRYGSLNSLESTSSSGIGSYSTQMSGTDNPEQFEVLKQQKEIIEQGIDLFNKKPKRGIQYLQEQGMLGTTPEDIAQFLHQEERLDSTQVGEFLGDNDKFNKEVMYAYVDQHDFSGKDFVSALRMFLEGFRLPGEAQKIDRLMEKFAARYLECNQGQTLFASADTAYVLAYSIIMLTTDLHSPQVKNKMTKEQYIKMNRGINDSKDLPEEYLSAIYNEIAGKKISMKETKELTIPTKSSKQNVASEKQRRLLYNLEMEQMAKTAKALMEAVSHVQAPFTSATHLEHVRPMFKLAWTPFLAAFSVGLQDCDDTEVASLCLEGIRCAIRIACIFSIQLERDAYVQALARFTLLTVSSGITEMKQKNIDTIKTLITVAHTDGNYLGNSWHEILKCISQLELAQLIGTGVKPRYISGTVRGREGSLTGTKDQAPDEFVGLGLVGGNVDWKQIASIQESIGETSSQSVVVAVDRIFTGSTRLDGNAIVDFVRWLCAVSMDELLSTTHPRMFSLQKIVEISYYNMGRIRLQWSRIWEVIGDHFNKVGCNPNEDVAIFAVDSLRQLSMKFLEKGELANFRFQKDFLRPFEHIMKRNRSPTIRDMVVRCIAQMVNSQAANIRSGWKNIFSVFHLAASDQDESIVELAFQTTGHIVTLVFEKHFPATIDSFQDAVKCLSEFACNAAFPDTSFQGIHKR

SEQ ID NO: 853058 - protein, 252 aa, Homo sapiens [sequence omitted]

SEQ ID NO: 853059 - protein, 267 aa, Homo sapiens
YYLHLLYVKMSLDTISQKSVDIHDSIQPRSVDNRPQAPLVSASAVNEEVSKIKSTATTSKKEDAENLAAAQRDAVDFDVRVDTQDQGMYRFLTSQQLFKLLDCLLESHRFAKAFNSNNEQRTALWKAGFKGKSKPNLLKQETSSLACGLRILFRMYMDESRVSAWEEVQQRLLNVCSEALSYFLTLTSESHREAWTNLLLLFLTKVLKISDNRFKAHASFYYPLLCEIMQFDLIPELRAVLRRFFLRIGVVFQISQPPEQELGINKQ

SEQ ID NO: 853060 - protein, 180 aa, Homo sapiens
MYRFLTSQQLFKLLDCLLESHRFAKAFNSNNEQRTALWKAGFKGKSKPNLLKQETSSLACGLRILFRMYMDESRVSAWEEVQQRLLNVCSEALSYFLTLTSESHREAWTNLLLLFLTKVLKISDNRFKAHASFYYPLLCEIMQFDLIPELRAVLRRFFLRIGVVFQISQPPEQELGINKQ

SEQ ID NO: 853061 - protein, 1800 aa, Homo sapiens
MYEGKKTKNMFLTRALEKILADKEVKKAHHSQLRKACEVALEEIKAETEKQSPPHGEAKAGSSTLPPVKSKTNFIEADKYFLPFELACQSKCPRIVSTSLDCLQKLIAYGHLTGNAPDSTTPGKKLIDRIIETICGCFQGPQTDEGVQLQIIKALLTAVTSQHIEIHEGTVLQAVRTCYNIYLASKNLINQTTAKATLTQMLNVIFARMENQALQEAKQMEKERHRQHHHLLQSPVSHHEPESPQLRYLPPQTVDHISQEHEGDLDLHTNDVDKSLQDDTEPENGSDISSAENEQTEADQATAAETLSKNEVLYDGENHDCEEKPQDIVQNIVEEMVNIVVGDMGEGTTINASADGNIGTIEDGSDSENIQANGIPGTPISVAYTPSLPDDRLSVSSNDTQESGNSSGPSPGAKFSHILQKDAFLVFRSLCKLSMKPLSDGPPDPKSHELRSKILSLQLLLSILQNAGPIFRTNEMFINAIKQYLCVALSKNGVSSVPEVFELSLSIFLTLLSNFKTHLKMQIEVFFKEIFLYILETSTSSFDHKWMVIQTLTRICADAQSVVDIYVNYDCDLNAANIFERLVNDLSKIAQGRGSQELGMSNVQELSLRKKGLECLVSILKCMVEWSKDQYVNPNSQTTLGQEKPSEQEMSEIKHPETINRYGSLNSLESTSSSGIGSYSTQMSGTDNPEQFEVLKQQKEIIEQGIDLFNKKPKRGIQYLQEQGMLGTTPEDIAQFLHQEERLDSTQVGEFLGDNDKFNKEVMYAYVDQHDFSGKDFVSALRMFLEGFRLPGEAQKIDRLMEKFAARYLECNQGQTLFASADTAYVLAYSIIMLTTDLHSPQVKNKMTKEQYIKMNRGINDSKDLPEEYLSAIYNEIAGKKISMKETKELTIPTKSSKQNVASEKQRRLLYNLEMEQMAKTAKALMEAVSHVQAPFTSATHLEHVRPMFKLAWTPFLAAFSVGLQDCDDTEVASLCLEGIRCAIRIACIFSIQLERDAYVQALARFTLLTVSSGITEMKQKNIDTIKTLITVAHTDGNYLGNSWHEILKCISQLELAQLIGTGVKPRYISGTVRGREGSLTGTKDQAPDEFVGLGLVGGNVDWKQIASIQESIGETSSQSVVVAVDRIFTGSTRLDGNAIVDFVRWLCAVSMDELLSTTHPRMFSLQKIVEISYYNMGRIRLQWSRIWEVIGDHFNKVGCNPNEDVAIFAVDSLRQLSMKFLEKGELANFRFQKDFLRPFEHIMKRNRSPTIRDMVVRCIAQMVNSQAANIRSGWKNIFSVFHLAASDQDESIVELAFQTTGHIVTLVFEKHFPATIDSFQDAVKCLSEFACNAAFPDTSMEAIRLIRHCAKYVSDRPQAFKEYTSDDMNVAPEDRVWVRGWFPILFELSCIINRCKLDVRTRGLTVMFEIMKTYGHTYEKHWWQDLFRIVFRIFDNMKLPEQQTEKAEWMTTTCNHALYAICDVFTQYLEVLSDVLLDDIFAQLYWCVQQDNEQLARSGTNCLENVVILNGEKFTLEIWDKTCNCTLDIFKTTIPHALLTWRPNSGETAPPPPSPVSEKPLDTISQKSVDIHDSIQPRSVDNRPQAPLVSASAVNEEVSKIKSTAKFPEQKLFAALLIKCVVQLELIQTIDNIVFFPATSKKEDAENLAAAQRDAVDFDVRVDTQDQGMYRFLTSQQLFKLLDCLLESHRFAKAFNSNNEQRTALWKAGFKGKSKPNLLKQETSSLACGLRILFRMYMDESRVSAWEEVQQRLLNVCSEALSYFLTLTSESHREAWTNLLLLFLTKVLKISDNRTKRTL

SEQ ID NO: 853062 - protein, 1852 aa, Homo sapiens
  misc_feature (1852)..(1852): Xaa can be any naturally occurring amino acid
MYEGKKTKNMFLTRALEKILADKEVKKAHHSQLRKACEVALEEIKAETEKQSPPHGEAKAGSSTLPPVKSKTNFIEADKYFLPFELACQSKCPRIVSTSLDCLQKLIAYGHLTGNAPDSTTPGKKLIDRIIETICGCFQGPQTDEGVQLQIIKALLTAVTSQHIEIHEGTVLQAVRTCYNIYLASKNLINQTTAKATLTQMLNVIFARMENQALQEAKQMEKERHRQHHHLLQSPVSHHEPESPQLRYLPPQTVDHISQEHEGDLDLHTNDVDKSLQDDTEPENGSDISSAENEQTEADQATAAETLSKNEVLYDGENHDCEEKPQDIVQNIVEEMVNIVVGDMGEGTTINASADGNIGTIEDGSDSENIQANGIPGTPISVAYTPSLPDDRLSVSSNDTQESGNSSGPSPGAKFSHILQKDAFLVFRSLCKLSMKPLSDGPPDPKSHELRSKILSLQLLLSILQNAGPIFRTNEMFINAIKQYLCVALSKNGVSSVPEVFELSLSIFLTLLSNFKTHLKMQIEVFFKEIFLYILETSTSSFDHKWMVIQTLTRICADAQSVVDIYVNYDCDLNAANIFERLVNDLSKIAQGRGSQELGMSNVQELSLRKKGLECLVSILKCMVEWSKDQYVNPNSQTTLGQEKPSEQEMSEIKHPETINRYGSLNSLESTSSSGIGSYSTQMSGTDNPEQFEVLKQQKEIIEQGIDLFNKKPKRGIQYLQEQGMLGTTPEDIAQFLHQEERLDSTQVGEFLGDNDKFNKEVMYAYVDQHDFSGKDFVSALRMFLEGFRLPGEAQKIDRLMEKFAARYLECNQGQTLFASADTAYVLAYSIIMLTTDLHSPQVKNKMTKEQYIKMNRGINDSKDLPEEYLSAIYNEIAGKKISMKETKELTIPTKSSKQNVASEKQRRLLYNLEMEQMAKTAKALMEAVSHVQAPFTSATHLEHVRPMFKLAWTPFLAAFSVGLQDCDDTEVASLCLEGIRCAIRIACIFSIQLERDAYVQALARFTLLTVSSGITEMKQKNIDTIKTLITVAHTDGNYLGNSWHEILKCISQLELAQLIGTGVKPRYISGTVRGREGSLTGTKDQAPDEFVGLGLVGGNVDWKQIASIQESIGETSSQSVVVAVDRIFTGSTRLDGNAIVDFVRWLCAVSMDELLSTTHPRMFSLQKIVEISYYNMGRIRLQWSRIWEVIGDHFNKVGCNPNEDVAIFAVDSLRQLSMKFLEKGELANFRFQKDFLRPFEHIMKRNRSPTIRDMVVRCIAQMVNSQAANIRSGWKNIFSVFHLAASDQDESIVELAFQTTGHIVTLVFEKHFPATIDSFQDAVKCLSEFACNAAFPDTSMEAIRLIRHCAKYVSDRPQAFKEYTSDDMNVAPEDRVWVRGWFPILFELSCIINRCKLDVRTRGLTVMFEIMKTYGHTYEKHWWQDLFRIVFRIFDNMKLPEQQTEKAEWMTTTCNHALYAICDVFTQYLEVLSDVLLDDIFAQLYWCVQQDNEQLARSGTNCLENVVILNGEKFTLEIWDKTCNCTLDIFKTTIPHALLTWRPNSGETAPPPPSPVSEKPLDTISQKSVDIHDSIQPRSVDNRPQAPLVSASAVNEEVSKIKSTAKFPEQKLFAALLIKCVVQLELIQTIDNIVFFPATSKKEDAENLAAAQRDAVDFDVRVDTQDQGMYRFLTSQQLFKLLDCLLESHRFAKAFNSNNEQRTALWKAGFKGKSKPNLLKQETSSLACGLRILFRMYMDESRVSAWEEVQQRLLNVCSEALSYFLTLTSESHREAWTNLLLLFLTKVLKISDNRFADLLSFFTEFKKFSTGIYLKYWVQASFFVSLLLLFFEYHHMIMLISGWDPLERRRX

SEQ ID NO: 853063 - protein, 317 aa, Homo sapiens
MYEGKKTKNMFLTRALEKILADKEVKKAHHSQLRKACEVALEEIKAETEKQSPPHGEAKAGSSTLPPVKSKTNFIEADKYFLPFELACQSKCPRIVSTSLDCLQKLIAYGHLTGNAPDSTTPGKKLIDRIIETICGCFQGPQTDEGVQLQIIKALLTAVTSQHIEIHEGTVLQAVRTCYNIYLASKNLINQTTAKATLTQMLNVIFARMENQALQEAKQMEKERHRQHHHLLQSPVSHHEPESPQLRYLPPQTVDHISQEHEGDLDLHTNDVDKSLQDDTEPENGSDISSAENEQTEADQATAAESNLLEKGVWGVC

SEQ ID NO: 853064 - protein, 406 aa, Homo sapiens
MYEGKKTKNMFLTRALEKILADKEVKKAHHSQLRKACEVALEEIKAETEKQSPPHGEAKAGSSTLPPVKSKTNFIEADKYFLPFELACQSKCPRIVSTSLDCLQKLIAYGHLTGNAPDSTTPGKKLIDRIIETICGCFQGPQTDEGVQLQIIKALLTAVTSQHIEIHEGTVLQAVRTCYNIYLASKNLINQTTAKATLTQMLNVIFARMENQALQEAKQMEKERHRQHHHLLQSPVSHHEPESPQLRYLPPQTVDHISQEHEGDLDLHTNDVDKSLQDDTEPENGSDISSAENEQTEADQATAAETLSKNEVLYDGENHDCEEKPQDIVQNIVEEMVNIVVGDMGEGTTINASADGNIGTIEDGSDSENIPLIQSLIQSKTLTLFSSVKAERGEKAAGEKFEAIRG

SEQ ID NO: 853065 - protein, 1849 aa, Homo sapiens; identical to SEQ ID NO: 853054

SEQ ID NO: 853066 - protein, 1849 aa, Homo sapiens; identical to SEQ ID NO: 853054

SEQ ID NO: 853067 - protein, 1849 aa, Homo sapiens; identical to SEQ ID NO: 853054

SEQ ID NO: 853068 - protein, 1725 aa, Homo sapiens
MYEGKKTKNMFLTRALEKILADKEVKKAHHSQLRKACEVALEEIKAETEKQSPPHGEAKAGSSTLPPVKSKTNFIEADKYFLPFELACQSKCPRIVSTSLDCLQKLIAYGHLTGNAPDSTTPGKKLIDRIIETICGCFQGPQTDEGVQLQIIKALLTAVTSQHIEIHEGTVLQAVRTCYNIYLASKNLINQTTAKATLTQMLNVIFARMENQALQEAKQMEKERHRQHHHLLQSPVSHHEPESPQLRYLPPQTVDHISQEHEGDLDLHTNDVDKSLQDDTEPENGSDISSAENEQTEADQATAAETLSKNEVLYDGENHDCEEKPQDIVQNIVEEMVNIVVGDMGEGTTINASADGNIGTIEDGSDSENIQANGIPGTPISVAYTPSLPDDRLSVSSNDTQESGNSSGPSPGAKFSHILQKDAFLVFRSLCKLSMKPLSDGPPDPKSHELRSKILSLQLLLSILQNAGPIFRTNEMFINAIKQYLCVALSKNGVSSVPEVFELSLSIFLTLLSNFKTHLKMQIEVFFKEIFLYILETSTSSFDHKWMVIQTLTRICADAQSVVDIYVNYDCDLNAANIFERLVNDLSKIAQGRGSQELGMSNVQELSLRKKGLECLVSILKCMVEWSKDQYVNPNSQTTLGQEKPSEQEMSEIKHPETINRYGSLNSLESTSSSGIGSYSTQMSGTDNPEQFEVLKQQKEIIEQGIDLFNKKPKRGIQYLQEQGMLGTTPEDIAQFLHQEERLDSTQVGEFLGDNDKFNKEVMYAYVDQHDFSGKDFVSALRMFLEGFRLPGEAQKIDRLMEKFAARYLECNQGQTLFASADTAYVLAYSIIMLTTDLHSPQVKNKMTKEQYIKMNRGINDSKDLPEEYLSAIYNEIAGKKISMKETKELTIPTKSSKQNVASEKQRRLLYNLEMEQMAKTAKALMEAVSHVQAPFTSATHLEHVRPMFKLAWTPFLAAFSVGLQDCDDTEVASLCLEGIRCAIRIACIFSIQLERDAYVQALARFTLLTVSSGITEMKQKNIDTIKTLITVAHTDGNYLGNSWHEILKCISQLELAQLIGTGVKPRYISGTVRGREGSLTGTKDQAPDEFVGLGLVGGNVDWKQIASIQESIGETSSQSVVVAVDRIFTGSTRLDGNAIVDFVRWLCAVSMDELLSTTHPRMFSLQKIVEISYYNMGRIRLQWSRIWEVIGDHFNKVGCNPNEDVAIFAVDSLRQLSMKFLEKGELANFRFQKDFLRPFEHIMKRNRSPTIRDMVVRCIAQMVNSQAANIRSGWKNIFSVFHLAASDQDESIVELAFQTTGHIVTLVFEKHFPATIDSFQDAVKCLSEFACNAAFPDTSMEAIRLIRHCAKYVSDRPQAFKEYTSDDMNVAPEDRVWVRGWFPILFELSCIINRCKLDVRTRGLTVMFEIMKTYGHTYEKHWWQDLFRIVFRIFDNMKLPEQQTEKAEWMTTTCNHALYAICDVFTQYLEVLSDVLLDDIFAQLYWCVQQDNEQLARSGTNCLENVVILNGEKFTLEIWDKTCNCTLDIFKTTIPHALLTWRPNSGETAPPPPSPVSEKPLDTISQKSVDIHDSIQPRSVDNRPQAPLVSASAVNEEVSKIKSTAKFPEQKLFAALLIKCVVQLELIQTIDNIVFFPATSKKEDAENLAAAQRDAVDFDVRVDTQDQGMYRFLTSQQLFKLLDCLLESHRFAKAIQRQIQAQPSEAGDQQPGLWAAHSLPDVHG

SEQ ID NO: 853069 - protein, 1589 aa, Homo sapiens
MYEGKKTKNMFLTRALEKILADKEVKKAHHSQLRKACEVALEEIKAETEKQSPPHGEAKAGSSTLPPVKSKTNFIEADKYFLPFELACQSKCPRIVSTSLDCLQKLIAYGHLTGNAPDSTTPGKKLIDRIIETICGCFQGPQTDEGVQLQIIKALLTAVTSQHIEIHEGTVLQAVRTCYNIYLASKNLINQTTAKATLTQMLNVIFARMENQALQEAKQMEKERHRQHHHLLQSPVSHHEPESPQLRYLPPQTVDHISQEHEGDLDLHTNDVDKSLQDDTEPENGSDISSAENEQTEADQATAAETLSKNEVLYDGENHDCEEKPQDIVQNIVEEMVNIVVGDMGEGTTINASADGNIGTIEDGSDSENIQANGIPGTPISVAYTPSLPDDRLSVSSNDTQESGNSSGPSPGAKFSHILQKDAFLVFRSLCKLSMKPLSDGPPDPKSHELRSKILSLQLLLSILQNAGPIFRTNEMFINAIKQYLCVALSKNGVSSVPEVFELSLSIFLTLLSNFKTHLKMQIEVFFKEIFLYILETSTSSFDHKWMVIQTLTRICADAQSVVDIYVNYDCDLNAANIFERLVNDLSKIAQGRGSQELGMSNVQELSLRKKGLECLVSILKCMVEWSKDQYVNPNSQTTLGQEKPSEQEMSEIKHPETINRYGSLNSLESTSSSGIGSYSTQMSGTDNPEQFEVLKQQKEIIEQGIDLFNKKPKRGIQYLQEQGMLGTTPEDIAQFLHQEERLDSTQVGEFLGDNDKFNKEVMYAYVDQHDFSGKDFVSALRMFLEGFRLPGEAQKIDRLMEKFAARYLECNQGQTLFASADTAYVLAYSIIMLTTDLHSPQVKNKMTKEQYIKMNRGINDSKDLPEEYLSAIYNEIAGKKISMKETKELTIPTKSSKQNVASEKQRRLLYNLEMEQMAKTAKALMEAVSHVQAPFTSATHLEHVRPMFKLAWTPFLAAFSVGLQDCDDTEVASLCLEGIRCAIRIACIFSIQLERDAYVQALARFTLLTVSSGITEMKQKNIDTIKTLITVAHTDGNYLGNSWHEILKCISQLELAQLIGTGVKPRYISGTVRGREGSLTGTKDQAPDEFVGLGLVGGNVDWKQIASIQESIGETSSQSVVVAVDRIFTGSTRLDGNAIVDFVRWLCAVSMDELLSTTHPRMFSLQKIVEISYYNMGRIRLQWSRIWEVIGDHFNKVGCNPNEDVAIFAVDSLRQLSMKFLEKGELANFRFQKDFLRPFEHIMKRNRSPTIRDMVVRCIAQMVNSQAANIRSGWKNIFSVFHLAASDQDESIVELAFQTTGHIVTLVFEKHFPATIDSFQDAVKCLSEFACNAAFPDTSMEAIRLIRHCAKYVSDRPQAFKEYTSDDMNVAPEDRVWVRGWFPILFELSCIINRCKLDVRTRGLTVMFEIMKTYGHTYEKHWWQDLFRIVFRIFDNMKLPEQQTEKAEWMTTTCNHALYAICDVFTQYLEVLSDVLLDDIFAQLYWCVQQDNEQLARSGTNCLENVVILNGEKFTLEIWDKTCNCTLDIFKTTIPHALLTWRPNSGETAPPPPSPDTISQKSVDIHDSIQPRSVDNRPQAATGFCVCC

SEQ ID NO: 853070 - protein, 1623 aa, Homo sapiens
MYEGKKTKNMFLTRALEKILADKEVKKAHHSQLRKACEVALEEIKAETEKQSPPHGEAKAGSSTLPPVKSKTNFIEADKYFLPFELACQSKCPRIVSTSLDCLQKLIAYGHLTGNAPDSTTPGKKLIDRIIETICGCFQGPQTDEGVQLQIIKALLTAVTSQHIEIHEGTVLQAVRTCYNIYLASKNLINQTTAKATLTQMLNVIFARMENQALQEAKQMEKERHRQHHHLLQSPVSHHEPESPQLRYLPPQTVDHISQEHEGDLDLHTNDVDKSLQDDTEPENGSDISSAENEQTEADQATAAETLSKNEVLYDGENHDCEEKPQDIVQNIVEEMVNIVVGDMGEGTTINASADGNIGTIEDGSDSENIQANGIPGTPISVAYTPSLPDDRLSVSSNDTQESGNSSGPSPGAKFSHILQKDAFLVFRSLCKLSMKPLSDGPPDPKSHELRSKILSLQLLLSILQNAGPIFRTNEMFINAIKQYLCVALSKNGVSSVPEVFELSLSIFLTLLSNFKTHLKMQIEVFFKEIFLYILETSTSSFDHKWMVIQTLTRICADAQSVVDIYVNYDCDLNAANIFERLVNDLSKIAQGRGSQELGMSNVQELSLRKKGLECLVSILKCMVEWSKDQYVNPNSQTTLGQEKPSEQEMSEIKHPETINRYGSLNSLESTSSSGIGSYSTQMSGTDNPEQFEVLKQQKEIIEQGIDLFNKKPKRGIQYLQEQGMLGTTPEDIAQFLHQEERLDSTQVGEFLGDNDKFNKEVMYAYVDQHDFSGKDFVSALRMFLEGFRLPGEAQKIDRLMEKFAARYLECNQGQTLFASADTAYVLAYSIIMLTTDLHSPQVKNKMTKEQYIKMNRGINDSKDLPEEYLSAIYNEIAGKKISMKETKELTIPTKSSKQNVASEKQRRLLYNLEMEQMAKTAKALMEAVSHVQAPFTSATHLEHVRPMFKLAWTPFLAAFSVGLQDCDDTEVASLCLEGIRCAIRIACIFSIQLERDAYVQALARFTLLTVSSGITEMKQKNIDTIKTLITVAHTDGNYLGNSWHEILKCISQLELAQLIGTGVKPRYISGTVRGREGSLTGTKDQAPDEFVGLGLVGGNVDWKQIASIQESIGETSSQSVVVAVDRIFTGSTRLDGNAIVDFVRWLCAVSMDELLSTTHPRMFSLQKIVEISYYNMGRIRLQWSRIWEVIGDHFNKVGCNPNEDVAIFAVDSLRQLSMKFLEKGELANFRFQKDFLRPFEHIMKRNRSPTIRDMVVRCIAQMVNSQAANIRSGWKNIFSVFHLAASDQDESIVELAFQTTGHIVTLVFEKHFPATIDSFQDAVKCLSEFACNAAFPDTSMEAIRLIRHCAKYVSDRPQAFKEYTSDDMNVAPEDRVWVRGWFPILFELSCIINRCKLDVRTRGLTVMFEIMKTYGHTYEKHWWQDLFRIVFRIFDNMKLPEQQTEKAEWMTTTCNHALYAICDVFTQYLEVLSDVLLDDIFAQLYWCVQQDNEQLARSGTNCLENVVILNGEKFTLEIWDKTCNCTLDIFKTTIPHALLTWRPNSGETAPPPPSPVSEKPLDTISQKSVDIHDSIQPRSVDNRPQAPLVSASAVNEEVSKIKSTATGTHPDYRQHCLLPSHK

SEQ ID NO: 853071 - protein, 814 aa, Homo sapiens
MYEGKKTKNMFLTRALEKILADKEVKKAHHSQLRKACEVALEEIKAETEKQSPPHGEAKAGSSTLPPVKSKTNFIEADKYFLPFELACQSKCPRIVSTSLDCLQKLIAYGHLTGNAPDSTTPGKKLIDRIIETICGCFQGPQTDEGVQLQIIKALLTAVTSQHIEIHEGTVLQAVRTCYNIYLASKNLINQTTAKATLTQMLNVIFARMENQALQEAKQMEKERHRQHHHLLQSPVSHHEPESPQLRYLPPQTVDHISQEHEGDLDLHTNDVDKSLQDDTEPENGSDISSAENEQTEADQATAAETLSKNEVLYDGENHDCEEKPQDIVQNIVEEMVNIVVGDMGEGTTINASADGNIGTIEDGSDSENIQANGIPGTPISVAYTPSLPDDRLSVSSNDTQESGNSSGPSPGAKFSHILQKDAFLVFRSLCKLSMKPLSDGPPDPKSHELRSKILSLQLLLSILQNAGPIFRTNEMFINAIKQYLCVALSKNGVSSVPEVFELSLSIFLTLLSNFKTHLKMQIEVFFKEIFLYILETSTSSFDHKWMVIQTLTRICADAQSVVDIYVNYDCDLNAANIFERLVNDLSKIAQGRGSQELGMSNVQELSLRKKGLECLVSILKCMVEWSKDQYVNPNSQTTLGQEKPSEQEMSEIKHPETINRYGSLNSLESTSSSGIGSYSTQMSGTDNPEQFEVLKQQKEIIEQGIDLFNKKPKRGIQYLQEQGMLGTTPEDIAQFLHQEERLDSTQVGEFLGDNDKFNKEVMYAYVDQHDFSGKDFVSALRMFLEGFRLPGEAQKIDRLMEKFAARYLECNQG

SEQ ID NO: 853072 - protein, 186 aa, Homo sapiens
MRHTIVDILTMKSQEKANLGENMEKSCASKEEVKEVSIEDTGVDVDPEKLEMESKLHRNLLFQDCEKEQDNKTKDPTHDVKTPNTETRTSCLIKYNVSTTPYLQSVKKKVQFDGTNSAFKELKFLTPVRRSRRLQEKTSKLPDMLKDHYPCVSSLEQLTELGRETDAFVCRPNAALCRVYYEADTT

SEQ ID NO: 853073 - protein, 164 aa, Homo sapiens [sequence omitted]

SEQ ID NO: 853074 - protein, 494 aa, Homo sapiens [sequence omitted]

SEQ ID NO: 853075 - protein, 700 aa, Homo sapiens
MSTPAVPQDLQLPPSQRAQSAFKEQRRQKLKEHLLRRKTLFAYKQENEMLSSRDQRVVTSEDQVQEGTKVLKLKTKMADKENMKRPAESKNNTVVGKHCIPLKPSNELTNSTVVIDTHKPKDSNQTPHLLLTEDDPQSQHMTLSQAFHLKNNSKKKQMTTEKQKQDANMPKKPVLGSYRGQIVQSKINSFRKPLQVKDESSAATKKLSATIPKATKPQPVNTSSVTVKSNRSSNMTATTKFVSTTSQNTQLVRPPIRSHHSNTRDTVKQGISRTSANVTIRKGPHEKELLQSKTALSSVKTSSSQGIIRNKTLSRSIASEVVARPASLSNDKLMEKSEPVDQRRHTAGKAIVDSRSAQPKETSEERKARLSEWKAGKGRVLKRPPNSVVTQHEPAGQNEKPVGSFWTTMAEEDEQRLFTEKVNNTFSECLNLINEGCPKEDILVTLNDLIKNIPDAKKLVKYWICLALIEPITSPIENIIAIYEKAILAGAQPIEEMRHTIVDILTMKSQEKANLGENMEKSCASKEEVKEVSIEDTGVDVDPEKLEMESKLHRNLLFQDCEKEQDNKTKDPTHDVKTPNTETRTSCLIKYNVSTTPYLQSVKKKVQFDGTNSAFKELKFLTPVRRSRRLQEKTSKLPDMLKDHYPCVSSLEQLTELMLSPNTVVKQGLEPPSFVGWFLGWDDDYWSVDPLDRAMAELAA

SEQ ID NO: 853076 - protein, 494 aa, Homo sapiens [sequence omitted]

SEQ ID NO: 853077 - protein, 682 aa, Homo sapiens [sequence omitted]

SEQ ID NO: 853078 - protein, 682 aa, Homo sapiens [sequence omitted]

SEQ ID NO: 853079 - protein, 186 aa, Homo sapiens; identical to SEQ ID NO: 853072

SEQ ID NO: 853080 - protein, 682 aa, Homo sapiens [sequence omitted]

SEQ ID NO: 853081 - protein, 682 aa, Homo sapiens [sequence omitted]

SEQ ID NO: 853082 - protein, 103 aa, Homo sapiens
MLKAAAKRPELSGLLKFNNYGILSESPLTSQRTTWLLYQSPSFIPGFAYPSRCLKTIGGVYKQARKKHYIQQLRYGRSEVNVPGSSSKARATVCGRYNDNGAV

SEQ ID NO: 853083 - protein, 109 aa, Homo sapiens
NGKRRFLASCFQGDVDFFPSPVSPLPGATAEPSGKGCIYMAEVKSMFREVLPKQGPLFVEDIMTMVLCKPKLLPLKSLTLEKLEKMHQAAQNTIRQQEMAEKDQRQITH

SEQ ID NO: 853084 - protein, 103 aa, Homo sapiens; identical to SEQ ID NO: 853082

SEQ ID NO: 853085 - protein, 469 aa, Homo sapiens [sequence omitted]

SEQ ID NO: 853086 - protein, 469 aa, Homo sapiens [sequence omitted]

SEQ ID NO: 853087 - protein, 469 aa, Homo sapiens [sequence omitted]

SEQ ID NO: 853088 - protein, 283 aa, Homo sapiens
MLRDLNLGEMKSGVPVLAVSLALEGKASHREMTSKLLSDLCGTVMSTTDVEKSFDKLLKDLPELALDTPRAPQLVGQFIARAVGDGILCNTYIDSYKGTVDCVQARAALDKATVLLSMSKGGKRKDSVWGSGGGQQSVNHLVKEIDMLLKEYLLSGDISEAEHCLKELEVPHFHHELVYEAIIMVLESTGESTFKMILDLLKSLWKSSTITVDQMKRGYERIYNEIPDINLDVPHSYSVLERFVEECFQAGIISKQLRDLCPSRGRKRFVSEGDGGRLKPESY

SEQ ID NO: 853089 - protein, 283 aa, Homo sapiens; identical to SEQ ID NO: 853088

SEQ ID NO: 853090 - protein, 469 aa, Homo sapiens [sequence omitted]

SEQ ID NO: 853091 - protein, 263 aa, Homo sapiens
MDVENEQILNVNPADPDNLSDSLFSGDEENAGTEEVKNEINGNWISASSINEARINAKAKRRLRKNSSRDSGRGDSVSDSGSDALRSGLTVPTSPKGRLLDRRSRSGKGRGLPKKGGAGGKGVWGTPGQVYDVEEVDVKDPNYDDDQENCVYETVVLPLDERAFEKTLTPIIQEYFEHGDTNEVAEMLRDLNLGEMKSGVPVLAVSLALEGKASHREMTSKLLSDLCGTVMSTTDVESVKIVCGALEVGSNLSITLLKRLICC

SEQ ID NO: 853092 - protein, 336 aa, Homo sapiens
LVTLRIPQGLFPSKENCVYETVVLPLDERAFEKTLTPIIQEYFEHGDTNEVAEMLRDLNLGEMKSGVPVLAVSLALEGKASHREMTSKLLSDLCGTVMSTTDVEKSFDKLLKDLPELALDTPRAPQLVGQFIARAVGDGILCNTYIDSYKGTVDCVQARAALDKATVLLSMSKGGKRKDSVWGSGGGQQSVNHLVKEIDMLLKEYLLSGDISEAEHCLKELEVPHFHHELVYEAIIMVLESTGESTFKMILDLLKSLWKSSTITVDQMKRGYERIYNEIPDINLDVPHSYSVLERFVEECFQAGIISKQLRDLCPSRGRKRFVSEGDGGRLKPESY

SEQ ID NO: 853093 - protein, 433 aa, Homo sapiens [sequence omitted]

SEQ ID NO: 853094 - protein, 326 aa, Homo sapiens
  misc_feature (9)..(9): Xaa can be any naturally occurring amino acid
LNRYQVALXPLQTPATPERAFEKTLTPIIQEYFEHGDTNEVAEMLRDLNLGEMKSGVPVLAVSLALEGKASHREMTSKLLSDLCGTVMSTTDVEKSFDKLLKDLPELALDTPRAPQLVGQFIARAVGDGILCNTYIDSYKGTVDCVQARAALDKATVLLSMSKGGKRKDSVWGSGGGQQSVNHLVKEIDMLLKEYLLSGDISEAEHCLKELEVPHFHHELVYEAIIMVLESTGESTFKMILDLLKSLWKSSTITVDQMKRGYERIYNEIPDINLDVPHSYSVLERFVEECFQAGIISKQLRDLCPSRGRKRFVSEGDGGRLKPESY

SEQ ID NO: 853095 - protein, 469 aa, Homo sapiens [sequence omitted]

SEQ ID NO: 853096 - protein, 292 aa, Homo sapiens [sequence omitted]

SEQ ID NO: 853097 - protein, 469 aa, Homo sapiens [sequence omitted]

SEQ ID NO: 853098 - protein, 469 aa, Homo sapiens [sequence omitted]

SEQ ID NO: 853099 - protein, 455 aa, Homo sapiens [sequence omitted]

SEQ ID NO: 853100 - protein, 469 aa, Homo sapiens [sequence omitted]

SEQ ID NO: 853101 - protein, 469 aa, Homo sapiens [sequence omitted]

SEQ ID NO: 853102 - protein, 283 aa, Homo sapiens; identical to SEQ ID NO: 853088

SEQ ID NO: 853103 - protein, 337 aa, Homo sapiens [sequence omitted]

SEQ ID NO: 853104 - protein, 354 aa, Homo sapiens
MDVENEQILNVNPADPDNLSDSLFSGDEENAGTEEVKNEINGNWISASSINEARINAKAKRRLRKNSSRDSGRGDSVSDSGSDALRSGLTVPTSPKGRLLDRRSRSGKGRGLPKKGGAGGKGVWGTPGQVYDVEEVDVKDPNYDDDQENCVYETVVLPLDERAFEKTLTPIIQEYFEHGDTNEVAEMLRDLNLGEMKSGVPVLAVSLALEGKASHREMTSKLLSDLCGTVMSTTDVEKSFDKLLKDLPELALDTPRAPQLVGQFIARAVGDGILCNTYIDSYKGTVDCVQASTGRAAFEGCGRQMPADKHSAGGGGRRRGVNVVSLWKHVEQLSSSWSSGFFDELVGLKLDGQL

SEQ ID NO: 853105 - protein, 108 aa, Homo sapiens
SLSQPSLRQGTLQTRRLPLTDLSQLFCLSGRCWARTVEMSEKKQPVDLGLLEEDDEFEEFPAEDWAGLDEDEDAHVWEDNWDDDNVEDDFSNQLRAELEKHGYKMETS

SEQ ID NO: 853106 - protein, 120 aa, Homo sapiens
TLEDKDLLLDTDMPQSNCCIAFRHCWLNCPFTWHATHGKVKGEGDFLLHVALTKRADPAELRTIFLKYASIEKNGEFFMSPNDFVTRYLNIFGESQPNPKTVELLSGVVDQTKDGLGWLR

SEQ ID NO: 853107 - protein, 77 aa, Homo sapiens
DHYLREESRRHGVTAASAMIVSFLRPPQPHRTDWAGLDEDEDAHVWEDNWDDDNVEDDFSNQLRAELEKHGYKMETS

SEQ ID NO: 853108 - protein, 85 aa, Homo sapiens
MSEKKQPVDLGLLEEDDEFEEFPAEDWAGLDEDEDAHVWEDNWDDDNVEDDFSNQLRAELEKHGYKMDTLHPEDTLHPEDTLHPE

SEQ ID NO: 853109 - protein, 68 aa, Homo sapiens
RGSLNIRPGLLEEDDEFEEFPAEDWAGLDEDEDAHVWEDNWDDDNVEDDFSNQLRAELEKHGYKMETS

SEQ ID NO: 853110 - protein, 119 aa, Homo sapiens [sequence omitted]

SEQ ID NO: 853111 - protein, 104 aa, Homo sapiens
AQAGLHCCCWEEGKVCLLWHQQCRARLEGCGGCAGCSAQVDPGKQPLDAEWREPLSTARHQSPWRNRQGEVRPSSGSKQTGRGWGRGSGTRPPTLLRLCFYQSL

SEQ ID NO: 853112 - protein, 913 aa, Homo sapiens
MGDSRDLCPHLDSIGEVTKEDLLLKSKGTCQSCGVTGPNLWACLQVACPYVGCGESFADHSTIHAQAKKHNLTVNLTTFRLWCYACEKEVFLEQRLAAPLLGSSSKFSEQDSPPPSHPLKAVPIAVADEGESESEDDDLKPRGLTGMKNLGNSCYMNAALQALSNCPPLTQFFLECGGLVRTDKKPALCKSYQKLVSEVWHKKRPSYVVPTSLSHGIKLVNPMFRGYAQQDTQEFLRCLMDQLHEELKEPVVATVALTEARDSDSSDTDEKREGDRSPSEDEFLSCDSSSDRGEGDGQGRGGGSSQAETELLIPDEAGRVISEKERMKDRKFSWGQQRTNSEQVDEDADVDTAMAALDQPAEAQPPSPRSSSPCRTPEPDNDAHLRSSSRPCSPVHHHEGHAKLSSSPPRASPVRMAPSYVLKKAQVLSAGSRRRKEQRYRSVISDIFDGSILSLVQCLTCDRVSTTVETFQDLSLPIPGKEDLAKLHSAIYQNVPAKPGACGDSYAAQGWLAFIVEYIRRFVVSCTPSWFWGPVVTLEDCLAAFFAADELKGDNMYSCERCKKLRNGVKYCKVLRLPEILCIHLKRFRHEVMYSFKINSHVSFPLEGLDLRPFLAKECTSQITTYDLLSVICHHGTAGSGHYIAYCQNVINGQWYEFDDQYVTEVHETVVQNAEGYVLFYRKSSEEAMRERQQVVSLAAMREPSLLRFYVSREWLNKFNTFAEPGPITNQTFLCSHGGIPPHKYHYIDDLVVILPQNVWEHLYNRFGGGPAVNHLYVCSICQVEIEALAKRRRIEIDTFIKLNKAFQAEESPGVIYCISMQWFREWEAFVKGKDNEPPGPIDNSRIAQVKGSGHVQLKQGADYGQISEETWTYLNSLYGGGPEIAIRQSVAQPLGPENLHGEQKIEAETRAV

SEQ ID NO: 853113 - protein, 913 aa, Homo sapiens; identical to SEQ ID NO: 853112

SEQ ID NO: 853114 - protein, 913 aa, Homo sapiens; identical to SEQ ID NO: 853112

SEQ ID NO: 853115 - protein, 687 aa, Homo sapiens
MGDSRDLCPHLDSIGEVTKEDLLLKSKGTCQSCGVTGPNLWACLQVACPYVGCGESFADHSTIHAQAKKHNLTVNLTTFRLWCYACEKEVFLEQRLAAPLLGSSSKFSEQDSPPPSHPLKAVPIAVADEGESESEDDDLKPRGLTGMKNLGNSCYMNAALQALSNCPPLTQFFLECGGLVRTDKKPALCKSYQKLVSEVWHKKRPSYVVPTSLSHGIKLVNPMFRGYAQQDTQEFLRCLMDQLHEELKEPVVATVALTEARDSDSSDTDEKREGDRSPSEDEFLSCDSSSDRGEGDGQGRGGGSSQAETELLIPDEAGRVISEKERMKDRKFSWGQQRTNSEQVDEDADVDTAMAALDQPAEAQPPSPRSSSPCRTPVPLEGLDLRPFLAKECTSQITTYDLLSVICHHGTAGSGHYIAYCQNVINGQWYEFDDQYVTEVHETVVQNAEGYVLFYRKSSEEAMRERQQVVSLAAMREPSLLRFYVSREWLNKFNTFAEPGPITNQTFLCSHGGIPPHKYHYIDDLVVILPQNVWEHLYNRFGGGPAVNHLYVCSICQVEIEALAKRRRIEIDTFIKLNKAFQAEESPGVIYCISMQWFREWEAFVKGKDNEPPGPIDNSRIAQVKGSGHVQLKQGADYGQISEETWTYLNSLYGGGPEIAIRQSVAQPLGPENLHGEQKIEAETRAV

SEQ ID NO: 853116 - protein, 358 aa, Homo sapiens [sequence omitted]

SEQ ID NO: 853117 - protein, 913 aa, Homo sapiens; identical to SEQ ID NO: 853112

SEQ ID NO: 853118 - protein, 879 aa, Homo sapiens
MGDSRDLCPHLDSIGEVTKEDLLLKSKGTCQSCGVTGPNLWACLQVACPYVGCGESFADHSTIHAQAKKHNLTVNLTTFRLWCYACEKEVFLEQRLAAPLLGSSSKFSEQDSPPPSHPLKAVPIAVADEGESESEDDDLKPRGLTGMKNLGNSCYMNAALQALSNCPPLTQFFLECGGLVRTDKKPALCKSYQKLVSEVWHKKRPSYVVPTSLSHGIKLVNPMFRGYAQQDTQEFLRCLMDQLHEELKEPVVATVALTEARDSDSSDTDEKREGDRSPSEDEFLSCDSSSDRGEGDGQGRGGGSSQAETELLIPDEAGRVISEKERMKDRKFSWGQQRTNSEQVDEDADVDTAMAALDQPAEAQPPSPRSSSPCRTPEPDNDAHLRSSSRPCSPVHHHEGHAKLSSSPPRASPVRMAPSYVLKKAQVLSAGSRRRKEQRYRSVISDIFDGSILSLVQCLTCDRVSTTVETFQDLSLPIPGKEDLAKLHSAIYQNVPAKPGACGDSYAAQGWLAFIVEYIRRFVVSCTPSWFWGPVVTLEDCLAAFFAADELKGDNMYSCERCKKLRNGVKYCKVLRLPEILCIHLKRFRHEVMYSFKINSHVSFPLEGLDLRPFLAKECTSQITTYDLLSVICHHGTAGSGHYIAYCQNVINGQWYEFDDQYVTEVHETVVQNAEGYVLFYRKSSEEAMRERQQVVSLAAMREPSLLRFYVSREWLNKFNTFAEPGPITNQTFLCSHGGIPPHKYHYIDDLVVILPQNVWEHLYNRFGGGPAVNHLYVCSICQVEIEALAKRRRIEIDTFIKLNKAFQAEESPGVIYCISMQWFREWEAFVKGKDNEPPGPIDNSRIAQVKGSGHVQLKQGADYEQHKVFREQQENSKA

SEQ ID NO: 853119 - protein, 913 aa, Homo sapiens; identical to SEQ ID NO: 853112

SEQ ID NO: 853120 - protein, 913 aa, Homo sapiens; identical to SEQ ID NO: 853112

SEQ ID NO: 853121 - protein, 229 aa, Homo sapiens
MGGEVSGVQLFVISFVRMIIECVHIYVSREWLNKFNTFAEPGPITNQTFLCSHGGIPPHKYHYIDDLVVILPQNVWEHLYNRFGGGPAVNHLYVCSICQVEIEALAKRRRIEIDTFIKLNKAFQAEESPGVIYCISMQWFREWEAFVKGKDNEPPGPIDNSRIAQVKGSGHVQLKQGADYGQISEETWTYLNSLYGGGPEIAIRQSVAQPLGPENLHGEQKIEAETRAV

SEQ ID NO: 853122 - protein, 143 aa, Homo sapiens
ISCVLEIPSAGSSDCHRGALGGSGASSIRDFTLTPRPGAAPLGMALLLWRVEGMAGAEPEPAVSVAEPPGPIDNSRIAQVKGSGHVQLKQGADYGQISEETWTYLNSLYGGGPEIAIRQSVAQPLGPENLHGEQKIEAETRAV

SEQ ID NO: 853123 - protein, 546 aa, Homo sapiens
MGDSRDLCPHLDSIGEVTKEDLLLKSKGTCQSCGVTGPNLWACLQVACPYVGCGESFADHSTIHAQAKKHNLTVNLTTFRLWCYACEKEVFLEQRLAAPLLGSSSKFSEQDSPPPSHPLKAVPIAVADEGESESEDDDLKPRGLTGMKNLGNSCYMNAALQALSNCPPLTQFFLECGGLVRTDKKPALCKSYQKLVSEVWHKKRPSYVVPTSLSHGIKLVNPMFRGYAQQDTQEFLRCLMDQLHEELKEPVVATVALTEARDSDSSDTDEKREGDRSPSEDEFLSCDSSSDRGEGDGQGRGGGSSQAETELLIPDEAGRVISEKERMKDRKFSWGQQRTNSEQVDEDADVDTAMAALDQPAEAQPPSPRSSSPCRTPEPDNDAHLRSSSRPCSPVHHHEGHAKLSSSPPRASPVRMAPSYVLKKAQVLSAGSRRRKEQRYRSVISDIFDGSILSLVQCLTCDRVSTTVETFQDLSLPIPGKEDLAKLHSAIYQNVPAKPGACGDSYAAQGWLAFIVEYIRRCAHLATTGRHGLGLSWFSWAGDSTQ

SEQ ID NO: 853124 - protein, 655 aa, Homo sapiens
MERKVLALQARKKRTKAKKDKAQRKSETQHRGSAPHSESDLPEQEEEILGSDDDEQEDPNDYCKGGYHLVKIGDLFNGRYHVIRKLGWGHFSTVWLSWDIQGKKFVAMKVVKSAEHYTETALDEIRLLKSVRNSDPNDPNREMVVQLLDDFKISGVNGTHICMVFEVLGHHLLKWIIKSNYQGLPLPCVKKIIQQVLQGLDYLHTKCRIIHTDIKPENILLSVNEQYIRRLAAEATEWQRSGAPPPSGSAVSTAPQPKPADKMSKNKKKKLKKKQKRQAELLEKRMQEIEEMEKESGPGQKRPNKQEESESPVERPLKENPPNKMTQEKLEESSTIGQDQTLMERDTEGGAAEINCNGVIEVINYTQNSNNETLRHKEDLHNANDCDVQNLNQESSFLSSQNGDSSTSQETDSCTPITSEVSDTMVCQSSSTVGQSFSEQHISQLQESIRAEIPCEDEQEQEHNGPLDNKGKSTAGNFLVNPLEPKNAEKLKVKIADLGNACWVHKHFTEDIQTRQYRSLEVLIGSGYNTPADIWSTACMAFELATGDYLFEPHSGEEYTRDEDHIALIIELLGKVPRKLIVAGKYSKEFFTKKGDLKHITKLKPWGLFEVLVEKYEWSQEEAAGFTDFLLPMLELIPEKRATAAECLRHPWLNS

SEQ ID NO: 853125 - protein, 871 aa, Homo sapiens
RAASWGGGGAGLRAECERARFWAAAGAGVAATRVRRRLAITGLTMERKGERWSGLRHEGQWSPGRGPGQRRELRLTAAVRFPDVRRPSTEVAPPHTPCLWAAGPRPSVRASSGAGRSRPLFPARPARALGPLQGPALGGRRRPPPARPLTRPETPPAHPARALLCAPWAASPTAGRLAGARSRPRGRPRSRAWRPCWVSTLTLVASFPPHSPFIHPSLLQVLALQARKKRTKAKKDKAQRKSETQHRGSAPHSESDLPEQEEEILGSDDDEQEDPNDYCKGGYHLVKIGDLFNGRYHVIRKLGWGHFSTVWLSWDIQGKKFVAMKVVKSAEHYTETALDEIRLLKSVRNSDPNDPNREMVVQLLDDFKISGVNGTHICMVFEVLGHHLLKWIIKSNYQGLPLPCVKKIIQQVLQGLDYLHTKCRIIHTDIKPENILLSVNEQYIRRLAAEATEWQRSGAPPPSGSAVSTAPQPKPADKMSKNKKKKLKKKQKRQAELLEKRMQEIEEMEKESGPGQKRPNKQEESESPVERPLKENPPNKMTQEKLEESSTIGQDQTLMERDTEGGAAEINCNGVIEVINYTQNSNNETLRHKEDLHNANDCDVQNLNQESSFLSSQNGDSSTSQETDSCTPITSEVSDTMVCQSSSTVGQSFSEQHISQLQESIRAEIPCEDEQEQEHNGPLDNKGKSTAGNFLVNPLEPKNAEKLKVKIADLGNACWVHKHFTEDIQTRQYRSLEVLIGSGYNTPADIWSTACMAFELATGDYLFEPHSGEEYTRDEDHIALIIELLGKVPRKLIVAGKYSKEFFTKKGDLKHITKLKPWGLFEVLVEKYEWSQEEAAGFTDFLLPMLELIPEKRATAAECLRHPWLNS

SEQ ID NO: 853126 - protein, 639 aa, Homo sapiens
MGIFVSFLRSETQHRGSAPHSESDLPEQEEEILGSDDDEQEDPNDYCKGGYHLVKIGDLFNGRYHVIRKLGWGHFSTVWLSWDIQGKKFVAMKVVKSAEHYTETALDEIRLLKSVRNSDPNDPNREMVVQLLDDFKISGVNGTHICMVFEVLGHHLLKWIIKSNYQGLPLPCVKKIIQQVLQGLDYLHTKCRIIHTDIKPENILLSVNEQYIRRLAAEATEWQRSGAPPPSGSAVSTAPQPKPADKMSKNKKKKLKKKQKRQAELLEKRMQEIEEMEKESGPGQKRPNKQEESESPVERPLKENPPNKMTQEKLEESSTIGQDQTLMERDTEGGAAEINCNGVIEVINYTQNSNNETLRHKEDLHNANDCDVQNLNQESSFLSSQNGDSSTSQETDSCTPITSEVSDTMVCQSSSTVGQSFSEQHISQLQESIRAEIPCEDEQEQEHNGPLDNKGKSTAGNFLVNPLEPKNAEKLKVKIADLGNACWVHKHFTEDIQTRQYRSLEVLIGSGYNTPADIWSTACMAFELATGDYLFEPHSGEEYTRDEDHIALIIELLGKVPRKLIVAGKYSKEFFTKKGDLKHITKLKPWGLFEVLVEKYEWSQEEAAGFTDFLLPMLELIPEKRATAAECLRHPWLNS

SEQ ID NO: 853127 - protein, 367 aa, Homo sapiens
MFSHVFMSLSISSRKCFNLVRNVSVLSLTHICIYLFLFVCSLEESSTIGQDQTLMERDTEGGAAEINCNGVIEVINYTQNSNNETLRHKEDLHNANDCDVQNLNQESSFLSSQNGDSSTSQETDSCTPITSEVSDTMVCQSSSTVGQSFSEQHISQLQESIRAEIPCEDEQEQEHNGPLDNKGKSTAGNFLVNPLEPKNAEKLKVKIADLGNACWVHKHFTEDIQTRQYRSLEVLIGSGYNTPADIWSTACMAFELATGDYLFEPHSGEEYTRDEDHIALIIELLGKVPRKLIVAGKYSKEFFTKKGDLKHITKLKPWGLFEVLVEKYEWSQEEAAGFTDFLLPMLELIPEKRATAAECLRHPWLNS

SEQ ID NO: 853128 - protein, 350 aa, Homo sapiens
MFSHVFMSLSISSRKCFNLVRNVSVLSLTHICIYLFLFVCSLEESSTIGQDQTLMERDTEGGAAEINCNGVIEVINYTQNSNNETLRHKEDLHNANDCDVQNLNQESSFLSSQNGDSSTSQETDSCTPITSEVSDTMVCQSSSTVGQSFSEQHISQLQESIRAEIPCEDEQEQEHNGPLDNKGKSTAGNFLVNPLEPKNHKHFTEDIQTRQYRSLEVLIGSGYNTPADIWSTACMAFELATGDYLFEPHSGEEYTRDEDHIALIIELLGKVPRKLIVAGKYSKEFFTKKGDLKHITKLKPWGLFEVLVEKYEWSQEEAAGFTDFLLPMLELIPEKRATAAECLRHPWLNS

SEQ ID NO: 853129 - protein, 699 aa, Homo sapiens
RAASWGGGGAGLRAECERARFWAAAGAGVAATRVRRRLAITGLTMERKVLALQARKKRTKAKKDKAQRKSETQHRGSAPHSESDLPEQEEEILGSDDDEQEDPNDYCKGGYHLVKIGDLFNGRYHVIRKLGWGHFSTVWLSWDIQGKKFVAMKVVKSAEHYTETALDEIRLLKSVRNSDPNDPNREMVVQLLDDFKISGVNGTHICMVFEVLGHHLLKWIIKSNYQGLPLPCVKKIIQQVLQGLDYLHTKCRIIHTDIKPENILLSVNEQYIRRLAAEATEWQRSGAPPPSGSAVSTAPQPKPADKMSKNKKKKLKKKQKRQAELLEKRMQEIEEMEKESGPGQKRPNKQEESESPVERPLKENPPNKMTQEKLEESSTIGQDQTLMERDTEGGAAEINCNGVIEVINYTQNSNNETLRHKEDLHNANDCDVQNLNQESSFLSSQNGDSSTSQETDSCTPITSEVSDTMVCQSSSTVGQSFSEQHISQLQESIRAEIPCEDEQEQEHNGPLDNKGKSTAGNFLVNPLEPKNAEKLKVKIADLGNACWVHKHFTEDIQTRQYRSLEVLIGSGYNTPADIWSTACMAFELATGDYLFEPHSGEEYTRDEDHIALIIELLGKVPRKLIVAGKYSKEFFTKKGDLKHITKLKPWGLFEVLVEKYEWSQEEAAGFTDFLLPMLELIPEKRATAAECLRHPWLNS

SEQ ID NO: 853130 - protein, 74 aa, Homo sapiens
ELSQGCRRHSAAVALFSGISSNMGSKKSVKPAASSCDHSYFSTENLKKAPRFQLRDMFQVTFFLIQHVHLGLLT

SEQ ID NO: 853131 - protein, 533 aa, Homo sapiens
RAASWGGGGAGLRAECERARFWAAAGAGVAATRVRRRLAITGLTMERKVLALQARKKRTKAKKDKAQRKSETQHRGSAPHSESDLPEQEEEILGSDDDEQEDPNDYCKGGYHLVKIGDLFNGRYHVIRKLGWGHFSTVWLSWDIQGKKFVAMKVVKSAEHYTETALDEIRLLKSVRNSDPNDPNREMVVQLLDDFKISGVNGTHICMVFEVLGHHLLKWIIKSNYQGLPLPCVKKIIQQVLQGLDYLHTKCRIIHTDIKPENILLSVNEQYIRRLAAEATEWQRSGAPPPSGSAVSTAPQPKPADKMSKNKKKKLKKKQKRQAELLEKRMQEIEEMEKESGPGQKRPNKQEESESPVERPLKENPPNKMTQEKLEESSTIGQDQTLMERDTEGGAAEINCNGVIEVINYTQNSNNETLRHKEDLHNANDCDVQNLNQESSFLSSQNGDSSTSQETDSCTPITSEVSDTMVCQSSSTVGQSFSEQHISQLQESIRAEIPCEDEQEQEHNGPLDNKVLLMMPVVCRKIHGWKFSC

SEQ ID NO: 853132 - protein, 699 aa, Homo sapiens; identical to SEQ ID NO: 853129

SEQ ID NO: 853133 - protein, 681 aa, Homo sapiens
RAASWGGGGAGLRAECERARFWAAAGAGVAATRVRRRLAITGLTMERKVLALQARKKRTKAKKDKAQRKSETQHRGSAPHSESDLPEQEEEILGSDDDEQEDPNDYCKGGYHLVKIGDLFNGRYHVIRKLGWGHFSTVWLSWDIQGKKFVAMKVVKSAEHYTETALDEIRLLKSVRNSDPNDPNREMVVQLLDDFKISGVNGTHICMVFEVLGHHLLKWIIKSNYQGLPLPCVKKIIQQVLQGLDYLHTKCRIIHTDIKPENILLSVNEQYIRRLAAEATEWQRSGAPPPSGSAVSTAPQPKPADKMSKNKKKKLKKKQKRQAELLEKRMQEIEEMEKESGPGQKRPNKQEESESPVERPLKENPPNKMTQEKLEESSTIGQDQTLMERDTEGGAAEINCNGVIEVINYTQNSNNETLRHKEDLHNANDCDVPSQETDSCTPITSEVSDTMVCQSSSTVGQSFSEQHISQLQESIRAEIPCEDEQEQEHNGPLDNKGKSTAGNFLVNPLEPKNAEKLKVKIADLGNACWVHKHFTEDIQTRQYRSLEVLIGSGYNTPADIWSTACMAFELATGDYLFEPHSGEEYTRDEDHIALIIELLGKVPRKLIVAGKYSKEFFTKKGDLKHITKLKPWGLFEVLVEKYEWSQEEAAGFTDFLLPMLELIPEKRATAAECLRHPWLNS

SEQ ID NO: 853134 - protein, 699 aa, Homo sapiens; identical to SEQ ID NO: 853129

SEQ ID NO: 853135 - protein, 198 aa, Homo sapiens
MSISQLQESIRAEIPCEDEQEQEHNGPLDNKGKSTAGNFLVNPLEPKNAEKLKVKIADLGNACWVHKHFTEDIQTRQYRSLEVLIGSGYNTPADIWSTACMAFELATGDYLFEPHSGEEYTRDEDHIALIIELLGKVPRKLIVAGKYSKEFFTKKVEKYEWSQEEAAGFTDFLLPMLELIPEKRATAAECLRHPWLNS

SEQ ID NO: 853136 - protein, 721 aa, Homo sapiens
RAASWGGGGAGLRAECERARFWAAAGAGVAATRVRRRLAITGLTMERKVLALQARKKRTKAKKDKAQRKSETQHRGSAPHSESDLPEQEEEILGSDDDEQEDPNDYCKGGYHLVKIGDLFNGRYHVIRKLGWGHFSTVWLSWDIQGKKFVAMKVVKSAEHYTETALDEIRLLKSVRNSDPNDPNREMVVQLLDDFKISGVNGTHICMVFEVLGHHLLKWIIKSNYQGLPLPCVKKIIQQVLQGLDYLHTKCRIIHTDIKPENILLSVNEQYIRRLAAEATEWQRSGAPPPSGSAVSTAPQPKPADKMSKNKKKKLKKKQKRQAELLEKRMQEIEEMEKESGPGQKRPNKQEESESPVERPLKENPPNKMTQEKLEESSTIGQDQTLMERDTEGGAAEINCNGVIEVINYTQNSNNETLRHKEDLHNANDCDVQNLNQESSFLSSQNGDSSTSQETDSCTPITSEVSDTMVCQSSSTVGQSFSEQHISQLQESIRAEIPCEDEQEQEHNGPLDNKGKSTAGNFLVNPLEPKNAEKLKVKIADLGNACWVHKHFTEDIQTRQYRSLEVLIGSGYNTPADIWSTACMAFELATGDYLFEPHSGEEYTRDEDHIALIIELLGKVPRKLIVAGKYSKEFFTKKGLKHITKLKPCGHKRATKREKVREDARQKAGGLNRIIKPMVEDDPEEEEPRARGNTEPGVNSKAEKSTAKSKANRDDLSILTQ

SEQ ID NO: 853137 - protein, 852 aa, Homo sapiens
MKPMLKDFSNLLLVVLCDYVLGEAEYLLLREPGHVALSNDTVYVDFQYFDGANGTLRNVSVLLLEANTNQTVTTKYLLTNQSQGTLKFECFYFKEAGDYWFTMTPEATDNSTPFPWWEKSAFLKVEWPVFHVDLNRSAKAAEGTFQVGLFTSQPLCPFPVDKPNIVVDVIFTNSLPEARRNSRQPLEIRTSKRTELAQGQWVEFGCAPLGPEAYVTVVLKLLGRDSVITSTGPIDLAQKFGYKLVMVPELTCESGVEVTVLPPPCTFVQGVVTVFKEAPRYPGKRTIHLAENSLPLGERRTIFNCTLFDMGKNKYCFDFGISSRSHFSAKEECMLIQRNTETWGLWQPWSQCSATCGDGVRERRRVCLTSFPSSPVCPGMSLEASLCSLEECAAFQPSSPSPLQPQGPVKSNNIVTVTGISLCLFIIIATVLITLWRRFGRPAKCSTPARHNSIHSPSFRKNSDEENICELSEQRGSFSDGGDGPTGSPGDTGIPLTYRRSGPVPPEDDASGSESFQSNAQKIIPPLFSYRLAQQQLKEMKKKGLTETTKVYHVSQSPLTDTAIDAAPSAPLDLESPEEAAANKFRIKSPFPEQPAVSAGERPPSRLDLNVTQASCAISPSQTLIRKSQARHVGSRGGPSERSHARNAHFRRTASFHEARQARPFRERSMSTLTPRQAPAYSSRTRTCEQAEDRFRPQSRGAHLFPEKLEHFQEASGTRGPLNPLPKSYTLGQPLRKPDLGDHQAGLVAGIERTEPHRARRGPSPSHKSVSRKQSSPISPKDNYQRVSSLSPSQCRKDKCQSFPTHPEFAFYDNTSFGLTEAEQRMLDLPGYFGSNEEDETTSTLSVEKLVI

SEQ ID NO: 853138 - protein, 852 aa, Homo sapiens; identical to SEQ ID NO: 853137

SEQ ID NO: 853139 - protein, 852 aa, Homo sapiens; identical to SEQ ID NO: 853137

SEQ ID NO: 853140 - protein, 488 aa, Homo sapiens
WRSTSPPLSLPVRLATRPDGLGLLPVSLESFPAIQPISSSAPGPVKSNNIVTVTGISLCLFIIIATVLITLWRRFGRPAKCSTPARHNSIHSPSFRKNSDEENICELSEQRGSFSDGGDGPTGSPGDTGIPLTYRRSGPVPPEDDASGSESFQSNAQKIIPPLFSYRLAQQQLKEMKKKGLTETTKVYHVSQSPLTDTAIDAAPSAPLDLESPEEAAANKFRIKSPFPEQPAVSAGERPPSRLDLNVTQASCAISPSQTLIRKSQARHVGSRGGPSERSHARNAHFRRTASFHEARQARPFRERSMSTLTPRQAPAYSSRTRTCEQAEDRFRPQSRGAHLFPEKLEHFQEASGTRGPLNPLPKSYTLGQPLRKPDLGDHQAGLVAGIERTEPHRARRGPSPSHKSVSRKQSSPISPKDNYQRVSSLSPSQCRKDKCQSFPTHPEFAFYDNTSFGLTEAEQRMLDLPGYFGSNEEDETTSTLSVEKLVI

SEQ ID NO: 853141 - protein, 135 aa, Homo sapiens
PAGLWEPNAAGSGRAVWDAGCLALYLAAPEPSRPPRHAPGRPGVAARQSRKVRSALRILVFAPVPRDSWRLLWGREMPPDSATSPQPEGAGGRWRPLPTPASAPGDAFKGYWSPHFGVPNLSEPGSALAQMLPSD

SEQ ID NO: 853142 - protein, 211 aa, Homo sapiens
QRLLRRRKAARPSRLLRFLGGGGMEARFTRGKSALLERALARPRTEVSLSAFALLFSELVQHCQSRVFSVAELQSRLAALGRQVGARVLDALVAREKGARRETKVLGALLFVKGAVWKALFGKEADKLEQANDDARTFYIIEREPLINTYISVPKENSTLNCASFTAGIVEAVLTHSGFPAKVTAHWHKGTTLMIKFEEAVIARDRALEGR

SEQ ID NO: 853143 - protein, 376 aa, Homo sapiens
TLHPLYSGFPQGAGRKVPEGRLCWSAGRGRSDCPYPLVVPHLCHLPALDLTPLPPYTSFLVTPVGGGAGRKALSQLNRLHARGLGGFGLLFCSPSCLSSHLVPTPASPLPAEGIRLPPPLIYLVTCNRGVFYAHLFASGKSALEHTTVAWVEGVPGPLAVLPPFLPACSPSHCPRHLHFLVSPQGGGGMEARFTRGKSALLERALARPRTEVSLSAFALLFSELVQHCQSRVFSVAELQSRLAALGRQVGARVLDALVAREKGARRETKVLGALLFVKGAVWKALFGKEADKLEQANDDARTFYIIEREPLINTYISVPKENSTLNCASFTAGIVEAVLTHSGFPAKVTAHWHKGTTLMIKFEEAVIARDRALEGR

SEQ ID NO: 853144 - protein, 188 aa, Homo sapiens
MEARFTRGKSALLERALARPRTEVSLSAFALLFSELVQHCQSRVFSVAELQSRLAALGRQVGARVLDALVAREKGARRETKVLGALLFVKGAVWKALFGKEADKLEQANDDARTFYIIEREPLINTYISVPKENSTLNCASFTAGIVEAVLTHSGFPAKVTAHWHKGTTLMIKFEEAVIARDRALEGR

SEQ ID NO: 853145 - protein, 312 aa, Homo sapiens
TLHPLYSGFPQGAGRKVPEGRLCWSAGRGRSDCPYPLVVPHLCHLPALDLTPLPPYTSFLVTPVGGGAGRKALSQLNRLHARGLGGFGLLFCSPSCLSSHLVPTPASPLPAEGIRLPPPLIYLVTCNRGVFYAHLFASGKSALEHTTVAWVEGVPGPLAVSPSFPPGLLPFPLPLTPALPGLPAGWRRHGGALHAREVGAAGARAGAAAHRVVKGAVWKALFGKEADKLEQANDDARTFYIIEREPLINTYISVPKENSTLNCASFTAGIVEAVLTHSGFPAKVTAHWHKGTTLMIKFEEAVIARDRALEGR

SEQ ID NO: 853146 - protein, 211 aa, Homo sapiens; identical to SEQ ID NO: 853142

SEQ ID NO: 853147 - protein, 268 aa, Homo sapiens
QRLLRRRKAARPSRLLRFLVRPYPPPCPRRASSAPRPLPRGRVGPGLGSRRPRSRARSLRPPSGGCEEGGFLPSVEGGGGMEARFTRGKSALLERALARPRTEVSLSAFALLFSELVQHCQSRVFSVAELQSRLAALGRQVGARVLDALVAREKGARRETKVLGALLFVKGAVWKALFGKEADKLEQANDDARTFYIIEREPLINTYISVPKENSTLNCASFTAGIVEAVLTHSGFPAKVTAHWHKGTTLMIKFEEAVIARDRALEGR

SEQ ID NO: 853148 - protein, 151 aa, Homo sapiens
GRASARSICADFPRVKRASSRRQVGARVLDALVAREKGARRETKVLGALLFVKGAVWKALFGKEADKLEQANDDARTFYIIEREPLINTYISVPKENSTLNCASFTAGIVEAVLTHSGFPAKVTAHWHKGTTLMIKFEEAVIARDRALEGR

SEQ ID NO: 853149 - protein, 320 aa, Homo sapiens
TLHPLYSGFPQGAGRKVPEGRLCWSAGRGRSDCPYPLVVPHLCHLPALDLTPLPPYTSFLVTPVGGGAGRKALSQLNRLHARGLGGFGLLFCSPSCLSSHLVPTPASPLPAEGIRLPPPLIYLVTCNRGVFYAHLFASGKSALEHTTVAWVEGVPGPLAVLPPFLPACSPSHCPRHLHFLVSPQGGGGMEARFTRGKSALLERALARPRTEVSLSAFALLFSELVQHCQSRVFSVAELQSRLAALGRQVGARVLDALVAREKGARRETKVLGALLFVKGAVWKALFGKEAASRRASWRRCSHTAASLPRSRRTGTRAPRS

SEQ ID NO: 853150 - protein, 1450 aa, Homo sapiens
QAIAEKQPSQEVKMEAKMEVDQPEPADTQPEDISESKVEDCKMESTETEERSTELKTEIKEEEDQPSTSATQSSPAPGQSKKKIFKPEELRQALMPTLEALYRQDPESLPFRQPVDPQLLGIPDYFDIVKSPMDLSTIKRKLDTGQYQEPWQYVDDIWLMFNNAWLYNRKTSRVYKYCSKLSEVFEQEIDPVMQSLGYCCGRKLEFSPQTLCCYGKQLCTIPRDATYYSYQNRYHFCEKCFNEIQGESVSLGDDPSQPQTTINKEQFSKRKNDTLDPELFVECTECGRKMHQICVLHHEIIWPAGFVCDGCLKKSARTRKENKFSAKRLPSTRLGTFLENRVNDFLRRQNHPESGEVTVRVVHASDKTVEVKPGMKARFVDSGEMAESFPYRTKALFAFEEIDGVDLCFFGMHVQEYGSDCPPPNQRRVYISYLDSVHFFRPKCLRTAVYHEILIGYLEYVKKLGYTTGHIWACPPSEGDDYIFHCHPPDQKIPKPKRLQEWYKKMLDKAVSERIVHDYKDIFKQATEDRLTSAKELPYFEGDFWPNVLEESIKELEQEEEERKREENTSNESTDVTKGDSKNAKKKNNKKTSKNKSSLSRGNKKKPGMPNVSNDLSQKLYATMEKHKEVFFVIRLIAGPAANSLPPIVDPDPLIPCDLMDGRDAFLTLARDKHLEFSSLRRAQWSTMCMLVELHTQSQDRFVYTCNECKHHVETRWHCTVCEDYDLCITCYNTKNHDHKMEKLGLGLDDESNNQQAAATQSPGDSRRLSIQRCIQSLVHACQCRNANCSLPSCQKMKRVVQHTKGCKRKTNGGCPICKQLIALCCYHAKHCQENKCPVPFCLNIKQKLRQQQLQHRLQQAQMLRRRMASMQRTGVVGQQQGLPSPTPATPTTPTGQQPTTPQTPQPTSQPQPTPPNSMPPYLPRTQAAGPVSQGKAAGQVTPPTPPQTAQPPLPGPPPAAVEMAMQIQRAAETQRQMAHVQIFQRPIQHQMPPMTPMAPMGMNPPPMTRGPSGHLEPGMGPTGMQQQPPWSQGGLPQPQQLQSGMPRPAMMSVAQHGQPLNMAPQPGLGQVGISPLKPGTVSQQALQNLLRTLRSPSSPLQQQQVLSILHANPQLLAAFIKQRAAKYANSNPQPIPGQPGMPQGQPGLQPPTMPGQQGVHSNPAMQNMNPMQAGVQRAGLPQQQPQQQLQPPMGGMSPQAQQMNMNHNTMPSQFRDILRRQQMMQQQQQQGAGPGIGPGMANHNQFQQPQGVGYPPQQQQRMQHHMQQMQQGNMGQIGQLPQALGAEAGASLQAYQQRLLQQQMGSPVQPNPMSPQQHMLPNQAQSPHLQGQQIPNSLSNQVRSPQPVPSPRPQSQPPHSSPSPRMQPQPSPHHVSPQTSSPHPGLVAAQANPMEQGHFASPDQNSMLSQLASNPGMANLHGASATDLGLSTDNSDLNSNLSQSTLDIH

SEQ ID NO: 853151 - protein, 1450 aa, Homo sapiens
QAIAEKQPSQEVKMEAKMEVDQPEPADTQPEDISESKVEDCKMESTETEERSTELKTEIKEEEDQPSTSATQSSPAPGQSKKKIFKPEELRQALMPTLEALYRQDPESLPFRQPVDPQLLGIPDYFDIVKSPMDLSTIKRKLDTGQYQEPWQYVDDIWLMFNNAWLYNRKTSRVYKYCSKLSEVFEQEIDPVMQSLGYCCGRKLEFSPQTLCCYGKQLCTIPRDATYYSYQNRYHFCEKCFNEIQGESVSLGDDPSQPQTTINKEQFSKRKNDTLDPELFVECTECGRKMHQICVLHHEIIWPAGFVCDGCLKKSARTRKENKFSAKRLPSTRLGTFLENRVNDFLRRQNHPESGEVTVRVVHASDKTVEVKPGMKARFVDSGEMAESFPYRTKALFAFEEIDGVDLCFFGMHVQEYGSDCPPPNQRRVYISYLDSVHFFRPKCLRTAVYHEILIGYLEYVKKLGYTTGHIWACPPSEGDDYIFHCHPPDQKIPKPKRLQEWYKKMLDKAVSERIVHDYKDIFKQATEDRLTSAKELPYFEGDFWPNVLEESIKELEQEEEERKREENTSNESTDVTKGDSKNAKKKNNKKTSKNKSSLSRGNKKKPGMPNVSNDLSQKLYATMEKHKEVFFVIRLIAGPAANSLPPIVDPDPLIPCDLMDGRDAFLTLARDKHLEFSSLRRAQWSTMCMLVELHTQSQDRFVYTCNECKHHVETRWHCTVCEDYDLCITCYNTKNHDHKMEKLGLGLDDESNNQQAAATQSPGDSRRLSIQRCIQSLVHACQCRNANCSLPSCQKMKRVVQHTKGCKRKTNGGCPICKQLIALCCYHAKHCQENKCPVPFCLNIKQKLRQQQLQHRLQQAQMLRRRMASMQRTGVVGQQQGLPSPTPATPTTPTGQQPTTPQTPQPTADASATVVTVVEPYLDPDRDPPRAQGSSCLTISAASRGGARCSATPSRAPTCSSGNGNADSESSGDAAPDGPRANFSKANPTPDAPDDSHGPHGYEPTSHDQRSQWAFGARDGTDRDAATATLEPRRIASAPATTVWDAKASHDVSGPAWSTFEHGSTTRIGPGRYQPTKPGTVSQQALQNLLRTLRSPSSPLQQQQVLSILHANPQLLAAFIKQRAAKYANSNPQPIPGQPGMPQGQPGLQPPTMPGQQGVHSNPAMQNMNPMQAGVQRAGLPQQQPQQQLQPPMGGMSPQAQQMNMNHNTMPSQFRDILRRQQMMQQQQQQGAGPGIGPGMANHNQFQQPQGVGYPPQQQQRMQHHMQQMQQGNMGQIGQLPQALGAEAGASLQAYQQRLLQQQMGSPVQPNPMSPQQHMLPNQAQSPHLQGQQIPNSLSNQVRSPQPVPSPRPQSQPPHSSPSPRMQPQPSPHHVSPQTSSPHPGLVAAQANPMEQGHFASPDQNSMLSQLASNPGMANLHGASATDLGLSTDNSDLNSNLSQSTLDIH

SEQ ID NO: 853152 - protein, 1532 aa, Homo sapiens
QAIAEKQPSQEVKMEAKMEVDQPEPADTQPEDISESKVEDCKMESTETEERSTELKTEIKEEEDQPSTSATQSSPAPGQSKKKIFKPEELRQALMPTLEALYRQDPESLPFRQPVDPQLLGIPDYFDIVKSPMDLSTIKRKLDTGQYQEPWQYVDDIWLMFNNAWLYNRKTSRVYKYCSKLSEVFEQEIDPVMQSLGYCCGRKLEFSPQTLCCYGKQLCTIPRDATYYSYQNRYHFCEKCFNEIQGESVSLGDDPSQPQTTINKEQFSKRKNDTLDPELFVECTECGRKMHQICVLHHEIIWPAGFVCDGCLKKSARTRKENKFSAKRLPSTRLGTFLENRVNDFLRRQNHPESGEVTVRVVHASDKTVEVKPGMKARFVDSGEMAESFPYRTKALFAFEEIDGVDLCFFGMHVQEYGSDCPPPNQRRVYISYLDSVHFFRPKCLRTAVYHEILIGYLEYVKKLGYTTGHIWACPPSEGDDYIFHCHPPDQKIPKPKRLQEWYKKMLDKAVSERIVHDYKDIFKQATEDRLTSAKELPYFEGDFWPNVLEESIKELEQEEEERKREENTSNESTDVTKGDSKNAKKKNNKKTSKNKSSLSRGNKKKPGMPNVSNDLSQKLYATMEKHKEVFFVIRLIAGPAANSLPPIVDPDPLIPCDLMDGRDAFLTLARDKHLEFSSLRRAQWSTMCMLVELHTQSQDRFVYTCNECKHHVETRWHCTVCEVGTGLWEGGGELRRVVLRGHAATYFIEACGMLGAVASCLRGRAEEASFCSTKGAFLAQTISKILLNDLNLGEFTCTSCFFPEDYDLCITCYNTKNHDHKMEKLGLGLDDESNNQQAAATQSPGDSRRLSIQRCIQSLVHACQCRNANCSLPSCQKMKRVVQHTKGCKRKTNGGCPICKQLIALCCYHAKHCQENKCPVPFCLNIKQKLRQQQLQHRLQQAQMLRRRMASMQRTGVVGQQQGLPSPTPATPTTPTGQQPTTPQTPQPTSQPQPTPPNSMPPYLPRTQAAGPVSQGKAAGQVTPPTPPQTAQPPLPGPPPAAVEMAMQIQRAAETQRQMAHVQIFQRPIQHQMPPMTPMAPMGMNPPPMTRGPSGHLEPGMGPTGMQQQPPWSQGGLPQPQQLQSGMPRPAMMSVAQHGQPLNMAPQPGLGQVGISPLKPGTVSQQALQNLLRTLRSPSSPLQQQQVLSILHANPQLLAAFIKQRAAKYANSNPQPIPGQPGMPQGQPGLQPPTMPGQQGVHSNPAMQNMNPMQAGVQRAGLPQQQPQQQLQPPMGGMSPQAQQMNMNHNTMPSQFRDILRRQQMMQQQQQQGAGPGIGPGMANHNQFQQPQGVGYPPQQQQRMQHHMQQMQQGNMGQIGQLPQALGAEAGASLQAYQQRLLQQQMGSPVQPNPMSPQQHMLPNQAQSPHLQGQQIPNSLSNQVRSPQPVPSPRPQSQPPHSSPSPRMQPQPSPHHVSPQTSSPHPGLVAAQANPMEQGHFASPDQNSMLSQLASNPGMANLHGASATDLGLSTDNSDLNSNLSQSTLDIH

SEQ ID NO: 853153 - protein, 882 aa, Homo sapiens
QAIRLGSVTKGDSKNAKKKNNKKTSKNKSSLSRGNKKKPGMPNVSNDLSQKLYATMEKHKEVFFVIRLIAGPAANSLPPIVDPDPLIPCDLMDGRDAFLTLARDKHLEFSSLRRAQWSTMCMLVELHTQSQDRFVYTCNECKHHVETRWHCTVCEDYDLCITCYNTKNHDHKMEKLGLGLDDESNNQQAAATQSPGDSRRLSIQRCIQSLVHACQCRNANCSLPSCQKMKRVVQHTKGCKRKTNGGCPICKQLIALCCYHAKHCQENKCPVPFCLNIKQKLRQQQLQHRLQQAQMLRRRMASMQRTGVVGQQQGLPSPTPATPTTPTGQQPTTPQTPQPTSQPQPTPPNSMPPYLPRTQAAGPVSQGKAAGQVTPPTPPQTAQPPLPGPPPAAVEMAMQIQRAAETQRQMAHVQIFQRPIQHQMPPMTPMAPMGMNPPPMTRGPSGHLEPGMGPTGMQQQPPWSQGGLPQPQQLQSGMPRPAMMSVAQHGQPLNMAPQPGLGQVGISPLKPGTVSQQALQNLLRTLRSPSSPLQQQQVLSILHANPQLLAAFIKQRAAKYANSNPQPIPGQPGMPQGQPGLQPPTMPGQQGVHSNPAMQNMNPMQAGVQRAGLPQQQPQQQLQPPMGGMSPQAQQMNMNHNTMPSQFRDILRRQQMMQQQQQQGAGPGIGPGMANHNQFQQPQGVGYPPQQQQRMQHHMQQMQQGNMGQIGQLPQALGAEAGASLQAYQQRLLQQQMGSPVQPNPMSPQQHMLPNQAQSPHLQGQQIPNSLSNQVRSPQPVPSPRPQSQPPHSSPSPRMQPQPSPHHVSPQTSSPHPGLVAAQANPMEQGHFASPDQNSMLSQLASNPGMANLHGASATDLGLSTDNSDLNSNLSQSTLDIH

SEQ ID NO: 853154 - protein, 835 aa, Homo sapiens
DSRDPSRVPEKHKEVFFVIRLIAGPAANSLPPIVDPDPLIPCDLMDGRDAFLTLARDKHLEFSSLRRAQWSTMCMLVELHTQSQDRFVYTCNECKHHVETRWHCTVCEDYDLCITCYNTKNHDHKMEKLGLGLDDESNNQQAAATQSPGDSRRLSIQRCIQSLVHACQCRNANCSLPSCQKMKRVVQHTKGCKRKTNGGCPICKQLIALCCYHAKHCQENKCPVPFCLNIKQKLRQQQLQHRLQQAQMLRRRMASMQRTGVVGQQQGLPSPTPATPTTPTGQQPTTPQTPQPTSQPQPTPPNSMPPYLPRTQAAGPVSQGKAAGQVTPPTPPQTAQPPLPGPPPAAVEMAMQIQRAAETQRQMAHVQIFQRPIQHQMPPMTPMAPMGMNPPPMTRGPSGHLEPGMGPTGMQQQPPWSQGGLPQPQQLQSGMPRPAMMSVAQHGQPLNMAPQPGLGQVGISPLKPGTVSQQALQNLLRTLRSPSSPLQQQQVLSILHANPQLLAAFIKQRAAKYANSNPQPIPGQPGMPQGQPGLQPPTMPGQQGVHSNPAMQNMNPMQAGVQRAGLPQQQPQQQLQPPMGGMSPQAQQMNMNHNTMPSQFRDILRRQQMMQQQQQQGAGPGIGPGMANHNQFQQPQGVGYPPQQQQRMQHHMQQMQQGNMGQIGQLPQALGAEAGASLQAYQQRLLQQQMGSPVQPNPMSPQQHMLPNQAQSPHLQGQQIPNSLSNQVRSPQPVPSPRPQSQPPHSSPSPRMQPQPSPHHVSPQTSSPHPGLVAAQANPMEQGHFASPDQNSMLSQLASNPGMANLHGASATDLGLSTDNSDLNSNLSQSTLDIH

SEQ ID NO: 853155 - protein, 873 aa, Homo sapiens
MDGRDAFLTLARDKHLEFSSLRRAQWSTMCMLVELHTQSQDRFVYTCNECKHHVETRWHCTVCEVGTGLWEGGGELRRVVLRGHAATYFIEACGMLGAVASCLRGRAEEASFCSTKGAFLAQTISKILLNDLNLGEFTCTSCFFPEDYDLCITCYNTKNHDHKMEKLGLGLDDESNNQQAAATQSPGDSRRLSIQRCIQSLVHACQCRNANCSLPSCQKMKRVVQHTKGCKRKTNGGCPICKQLIALCCYHAKHCQENKCPVPFCLNIKQKLRQQQLQHRLQQAQMLRRRMASMQRTGVVGQQQGLPSPTPATPTTPTGQQPTTPQTPQPTSQPQPTPPNSMPPYLPRTQAAGPVSQGKAAGQVTPPTPPQTAQPPLPGPPPAAVEMAMQIQRAAETQRQMAHVQIFQRPIQHQMPPMTPMAPMGMNPPPMTRGPSGHLEPGMGPTGMQQQPPWSQGGLPQPQQLQSGMPRPAMMSVAQHGQPLNMAPQPGLGQVGISPLKPGTVSQQALQNLLRTLRSPSSPLQQQQVLSILHANPQLLAAFIKQRAAKYANSNPQPIPGQPGMPQGQPGLQPPTMPGQQGVHSNPAMQNMNPMQAGVQRAGLPQQQPQQQLQPPMGGMSPQAQQMNMNHNTMPSQFRDILRRQQMMQQQQQQGAGPGIGPGMANHNQFQQPQGVGYPPQQQQRMQHHMQQMQQGNMGQIGQLPQALGAEAGASLQAYQQRLLQQQMGSPVQPNPMSPQQHMLPNQAQSPHLQGQQIPNSLSNQVRSPQPVPSPRPQSQPPHSSPSPRMQPQPSPHHVSPQTSSPHPGLVAAQANPMEQGHFASPDQNSMLSQLASNPGMANLHGASATDLGLSTDNSDLNSNLSQSTLDIH

SEQ ID NO: 853156 - protein, 167 aa, Homo sapiens
CIRVWDAVFLFHLFQVSSQPVSVSVSSEDPMSPQQHMLPNQAQSPHLQGQQIPNSLSNQVRSPQPVPSPRPQSQPPHSSPSPRMQPQPSPHHVSPQTSSPHPGLVAAQANPMEQGHFASPDQNSMLSQLASNPGMANLHGASATDLGLSTDNSDLNSNLSQSTLDIH

SEQ ID NO: 853157 - protein, 375 aa, Homo sapiens
QAIAEKQPSQEVKMEAKMEVDQPEPADTQPEDISESKVEDCKMESTETEERSTELKTEIKEEEDQPSTSATQSSPAPGQSKKKIFKPEELRQALMPTLEALYRQDPESLPFRQPVDPQLLGIPDYFDIVKSPMDLSTIKRKLDTGQYQEPWQYVDDIWLMFNNAWLYNRKTSRVYKYCSKLSEVFEQEIDPVMQSLGYCCGRKLEFSPQTLCCYGKQLCTIPRDATYYSYQNRYHFCEKCFNEIQGESVSLGDDPSQPQTTINKEQFSKRKNDTLDPELFVECTECGRKMHQICVLHHEIIWPAGFVCDGCLKKSARTRKENKFSAKRLPSTRLGTFLENRVNDFLRRQNHPESGEVTVRVVHASDKTVVYSGIL

SEQ ID NO: 853158 - protein, 233 aa, Homo sapiens
QAIAEKQPSQEVKMEAKMEVDQPEPADTQPEDISESKVEDCKMESTETEERSTELKTEIKEEEDQPSTSATQSSPAPGQSKKKIFKPEELRQALMPTLEALYRQDPESLPFRQPVDPQLLGIPDYFDIVKSPMDLSTIKRKLDTGQYQEPWQYVDDIWLMFNNAWLYNRKTSRVYKYCSKLSEVFEQEIDPVMQSLGYCCGRKLEFSPQTLCCYGKQLCTIPRDATYYSYQNR

SEQ ID NO: 853159 - protein, 146 aa, Homo sapiens
MKQQRTAAGGGRRAQATRASRRGAPADGSTKQDRQTQGGTAATDQNARGTPGRQQQKEDSATSNKSRKQDRPDEWKLTQAATGTDTAAEQARAKSPGQSGRQGQTDTQTQPPQHRPDASRGRDQHEHEATGKCSKKYQQRARPKRQ

SEQ ID NO: 853160 - protein, 146 aa, Homo sapiens; identical to SEQ ID NO: 853159

SEQ ID NO: 853161 - protein, 1485 aa, Homo sapiens
MPATSTFPAIYNSERQVLHCPSTTSIDVISRRPIAEKHAFPGTQYGCRALSVVHPGKPYILRPEAVFQTSVVARLLPWASTETEERSTELKTEIKEEEDQPSTSATQSSPAPGQSKKKIFKPEELRQALMPTLEALYRQDPESLPFRQPVDPQLLGIPDYFDIVKSPMDLSTIKRKLDTGQYQEPWQYVDDIWLMFNNAWLYNRKTSRVYKYCSKLSEVFEQEIDPVMQSLGYCCGRKLEFSPQTLCCYGKQLCTIPRDATYYSYQNRYHFCEKCFNEIQGESVSLGDDPSQPQTTINKEQFSKRKNDTLDPELFVECTECGRKMHQICVLHHEIIWPAGFVCDGCLKKSARTRKENKFSAKRLPSTRLGTFLENRVNDFLRRQNHPESGEVTVRVVHASDKTVEVKPGMKARFVDSGEMAESFPYRTKALFAFEEIDGVDLCFFGMHVQEYGSDCPPPNQRRVYISYLDSVHFFRPKCLRTAVYHEILIGYLEYVKKLGYTTGHIWACPPSEGDDYIFHCHPPDQKIPKPKRLQEWYKKMLDKAVSERIVHDYKDIFKQATEDRLTSAKELPYFEGDFWPNVLEESIKELEQEEEERKREENTSNESTDVTKGDSKNAKKKNNKKTSKNKSSLSRGNKKKPGMPNVSNDLSQKLYATMEKHKEVFFVIRLIAGPAANSLPPIVDPDPLIPCDLMDGRDAFLTLARDKHLEFSSLRRAQWSTMCMLVELHTQSQDRFVYTCNECKHHVETRWHCTVCEDYDLCITCYNTKNHDHKMEKLGLGLDDESNNQQAAATQSPGDSRRLSIQRCIQSLVHACQCRNANCSLPSCQKMKRVVQHTKGCKRKTNGGCPICKQLIALCCYHAKHCQENKCPVPFCLNIKQKLRQQQLQHRLQQAQMLRRRMASMQRTGVVGQQQGLPSPTPATPTTPTGQQPTTPQTPQPTSQPQPTPPNSMPPYLPRTQAAGPVSQGKAAGQVTPPTPPQTAQPPLPGPPPAAVEMAMQIQRAAETQRQMAHVQIFQRPIQHQMPPMTPMAPMGMNPPPMTRGPSGHLEPGMGPTGMQQQPPWSQGGLPQPQQLQSGMPRPAMMSVAQHGQPLNMAPQPGLGQVGISPLKPGTVSQQALQNLLRTLRSPSSPLQQQQVLSILHANPQLLAAFIKQRAAKYANSNPQPIPGQPGMPQGQPGLQPPTMPGQQGVHSNPAMQNMNPMQAGVQRAGLPQQQPQQQLQPPMGGMSPQAQQMNMNHNTMPSQFRDILRRQQMMQQQQQQGAGPGIGPGMANHNQFQQPQGVGYPPQQQQRMQHHMQQMQQGNMGQIGQLPQALGAEAGASLQAYQQRLLQQQMGSPVQPNPMSPQQHMLPNQAQSPHLQGQQIPNSLSNQVRSPQPVPSPRPQSQPPHSSPSPRMQPQPSPHHVSPQTSSPHPGLVAAQANPMEQGHFASPDQNSMLSQLASNPGMANLHGASATDLGLSTDNSDLNSNLSQSTLDIH

SEQ ID NO: 853162 - protein, 934 aa, Homo sapiens
MFSQDIFKQATEDRLTSAKELPYFEGDFWPNVLEESIKELEQEEEERKREENTSNESTDVTKGDSKNAKKKNNKKTSKNKSSLSRGNKKKPGMPNVSNDLSQKLYATMEKHKEVFFVIRLIAGPAANSLPPIVDPDPLIPCDLMDGRDAFLTLARDKHLEFSSLRRAQWSTMCMLVELHTQSQDRFVYTCNECKHHVETRWHCTVCEDYDLCITCYNTKNHDHKMEKLGLGLDDESNNQQAAATQSPGDSRRLSIQRCIQSLVHACQCRNANCSLPSCQKMKRVVQHTKGCKRKTNGGCPICKQLIALCCYHAKHCQENKCPVPFCLNIKQKLRQQQLQHRLQQAQMLRRRMASMQRTGVVGQQQGLPSPTPATPTTPTGQQPTTPQTPQPTSQPQPTPPNSMPPYLPRTQAAGPVSQGKAAGQVTPPTPPQTAQPPLPGPPPAAVEMAMQIQRAAETQRQMAHVQIFQRPIQHQMPPMTPMAPMGMNPPPMTRGPSGHLEPGMGPTGMQQQPPWSQGGLPQPQQLQSGMPRPAMMSVAQHGQPLNMAPQPGLGQVGISPLKPGTVSQQALQNLLRTLRSPSSPLQQQQVLSILHANPQLLAAFIKQRAAKYANSNPQPIPGQPGMPQGQPGLQPPTMPGQQGVHSNPAMQNMNPMQAGVQRAGLPQQQPQQQLQPPMGGMSPQAQQMNMNHNTMPSQFRDILRRQQMMQQQQQQGAGPGIGPGMANHNQFQQPQGVGYPPQQQQRMQHHMQQMQQGNMGQIGQLPQALGAEAGASLQAYQQRLLQQQMGSPVQPNPMSPQQHMLPNQAQSPHLQGQQIPNSLSNQVRSPQPVPSPRPQSQPPHSSPSPRMQPQPSPHHVSPQTSSPHPGLVAAQANPMEQGHFASPDQNSMLSQLASNPGMANLHGASATDLGLSTDNSDLNSNLSQSTLDIH

SEQ ID NO: 853163 - protein, 791 aa, Homo sapiens
MDGRDAFLTLARDKHLEFSSLRRAQWSTMCMLVELHTQSQDRFVYTCNECKHHVETRWHCTVCEDYDLCITCYNTKNHDHKMEKLGLGLDDESNNQQAAATQSPGDSRRLSIQRCIQSLVHACQCRNANCSLPSCQKMKRVVQHTKGCKRKTNGGCPICKQLIALCCYHAKHCQENKCPVPFCLNIKQKLRQQQLQHRLQQAQMLRRRMASMQRTGVVGQQQGLPSPTPATPTTPTGQQPTTPQTPQPTSQPQPTPPNSMPPYLPRTQAAGPVSQGKAAGQVTPPTPPQTAQPPLPGPPPAAVEMAMQIQRAAETQRQMAHVQIFQRPIQHQMPPMTPMAPMGMNPPPMTRGPSGHLEPGMGPTGMQQQPPWSQGGLPQPQQLQSGMPRPAMMSVAQHGQPLNMAPQPGLGQVGISPLKPGTVSQQALQNLLRTLRSPSSPLQQQQVLSILHANPQLLAAFIKQRAAKYANSNPQPIPGQPGMPQGQPGLQPPTMPGQQGVHSNPAMQNMNPMQAGVQRAGLPQQQPQQQLQPPMGGMSPQAQQMNMNHNTMPSQFRDILRRQQMMQQQQQQGAGPGIGPGMANHNQFQQPQGVGYPPQQQQRMQHHMQQMQQGNMGQIGQLPQALGAEAGASLQAYQQRLLQQQMGSPVQPNPMSPQQHMLPNQAQSPHLQGQQIPNSLSNQVRSPQPVPSPRPQSQPPHSSPSPRMQPQPSPHHVSPQTSSPHPGLVAAQANPMEQGHFASPDQNSMLSQLASNPGMANLHGASATDLGLSTDNSDLNSNLSQSTLDIH

SEQ ID NO: 853164 - protein, 1450 aa, Homo sapiens; identical to SEQ ID NO: 853150

SEQ ID NO: 853165 - protein, 1154 aa, Homo sapiens
QAIAEKQPSQEVKMEAKMEVDQPEPADTQPEDISESKVEDCKMESTETEERSTELKTEIKEEEDQPSTSATQSSPAPGQSKKKIFKPEELRQALMPTLEALYRQDPESLPFRQPVDPQLLGIPDYFDIVKSPMDLSTIKRKLDTGQYQEPWQYVDDIWLMFNNAWLYNRKTSRVYKYCSKLSEVFEQEIDPVMQSLGYCCGRKLEFSPQTLCCYGKQLCTIPRDATYYSYQNRYHFCEKCFNEIQGESVSLGDDPSQPQTTINKEQFSKRKNDTLDPELFVECTECGRKMHQICVLHHEIIWPAGFVCDGCLKKSARTRKENKFSAKRLPSTRLGTFLENRVNDFLRRQNHPESGEVTVRVVHASDKTVEVKPGMKARFVDSGEMAESFPYRTKALFAFEEIDGVDLCFFGMHVQEYGSDCPPPNQRRVYISYLDSVHFFRPKCLRTAVYHEILIGYLEYVKKLGYTTGHIWACPPSEGDDYIFHCHPPDQKIPKPKRLQEWYKKMLDKAVSERIVHDYKDIFKQATEDRLTSAKELPYFEGDFWPNVLEESIKELEQEEEERKREENTSNESTDVTKGDSKNAKKKNNKKTSKNKSSLSRGNKKKPGMPNVSNDLSQKLYATMEKHKEVFFVIRLIAGPAANSLPPIVDPDPLIPCDLMDGRDAFLTLARDKHLEFSSLRRAQWSTMCMLVELHTQSQDRFVYTCNECKHHVETRWHCTVCEDYDLCITCYNTKNHDHKMEKLGLGLDDESNNQQAAATQSPGDSRRLSIQRCIQSLVHACQCRNANCSLPSCQKMKRVVQHTKGCKRKTNGGCPICKQLIALCCYHAKHCQENKCPVPFCLNIKQKLRQQQLQHRLQQAQMLRRRMASMQRTGVVGQQQGLPSPTPATPTTPTGQQPTTPQTPQPTSQPQPTPPNSMPPYLPRTQAAGPVSQGKAAGQVTPPTPPQTAQPPLPGPPPAAVEMAMQIQRAAETQRQMAHVQIFQRPIQHQMPPMTPMAPMGMNPPPMTRGPSGHLEPGMGPTGMQQQPPWSQGGLPQPQQLQSGMPRPAMMSVAQHGQPLNMAPQPGLGQVGISPLKPGTVSQQALQNLLRTLRSPSSPLQQQQVLSILHANPQLLAAFIKQRAAKYANTANLPCAASWESSIPSDLASSSGS

SEQ ID NO: 853166 - protein, 305 aa, Homo sapiens
QAIAEKQPSQEVKMEAKMEVDQPEPADTQPEDISESKVEDCKMESTETEERSTELKTEIKEEEDQPSTSATQSSPAPGQSKKKIFKPEELRQALMPTLEALYRQDPESLPFRQPVDPQLLGIPDYFDIVKSPMDLSTIKRKLDTGQYQEPWQYVDDIWLMFNNAWLYNRKTSRVYKYCSKLSEVFEQEIDPVMQSLGYCCGRKLEFSPQTLCCYGKQLCTIPRDATYYSYQNRYHFCEKCFNEIQGESVSLGDDPSQPQTTINKEQFSKRKNDTLDPELFVECTECGRKMHQICVLHHEIIWPAG

SEQ ID NO: 853167 - protein, 146 aa, Homo sapiens; identical to SEQ ID NO: 853159

SEQ ID NO: 853168 - protein, 146 aa, Homo sapiens; identical to SEQ ID NO: 853159

SEQ ID NO: 853169 - protein, 37 aa, Homo sapiens
PGLEVSGRRNLREILGTRVEVVVHMDTDDTDVCVTQK

SEQ ID NO: 853170 - protein, 496 aa, Homo sapiens
LWGHSASATLPGSRPSPAWCAARQLFARAGPPAAGSGQTMRPPSPLPARWLCVLAGALAWALGPAGGQAARLQEECDYVQMIEVQHKQCLEEAQLENETIGCSKMWDNLTCWPATPRGQVVVLACPLIFKLFSSIQGRNVSRSCTDEGWTHLEPGPYPIACGLDDKAASLDEQQTMFYGSVKTGYTIGYGLSLATLLVATAILSLFRKLHCTRNYIHMHLFISFILRAAAVFIKDLALFDSGESDQCSEGSVGCKAAMVFFQYCVMANFFWLLVEGLYLYTLLAVSFFSERKYFWGYILIGWGVPSTFTMVWTIARIHFEDYGCWDTINSSLWWIIKGPILTSILVNFILFICIIRILLQKLRPPDIRKSDSSPYSRLARSTLLLIPLFGVHYIMFAFFPDNFKPEVKMVFELVVGSFQGFVVAILYCFLNGEVQAELRRKWRRWHLQGVLGWNPKYRHPSGGSNGATCSTQVSMLTRVSPGARRSSSFQAEVSLV

SEQ ID NO: 853171 - protein, 461 aa, Homo sapiens
ALGPQRQRHSARLPAIARLVRRPPALCPRGAARRGLRADHAPAKSAARPLAMRAGRRPRLGPWAGGCSKMWDNLTCWPATPRGQVVVLACPLIFKLFSSIQGRNVSRSCTDEGWTHLEPGPYPIACGLDDKAASLDEQQTMFYGSVKTGYTIGYGLSLATLLVATAILSLFRKLHCTRNYIHMHLFISFILRAAAVFIKDLALFDSGESDQCSEGSVGCKAAMVFFQYCVMANFFWLLVEGLYLYTLLAVSFFSERKYFWGYILIGWGVPSTFTMVWTIARIHFEDYGCWDTINSSLWWIIKGPILTSILVNFILFICIIRILLQKLRPPDIRKSDSSPYSRLARSTLLLIPLFGVHYIMFAFFPDNFKPEVKMVFELVVGSFQGFVVAILYCFLNGEVQAELRRKWRRWHLQGVLGWNPKYRHPSGGSNGATCSTQVSMLTRVSPGARRSSSFQAEVSLV

SEQ ID NO: 853172 - protein, 277 aa, Homo sapiens
ALGPQRQRHSARLPAIARLVRRPPALCPRGAARRGLRADHAPAKSAARPLAMRAGRRPRLGPWAGGCSKMWDNLTCWPATPRGQVVVLACPLIFKLFSSIQGRNVSRSCTDEGWTHLEPGPYPIACGLDDKAASLDEQQTMFYGSVKTGYTIGYGLSLATLLVATAILSLFRKLHCTRNYIHMHLFISFILRAAAVFIKDLALFDSGESDQCSEGSVGCKAAMVFFQYCVMANFFWLLVEGLYLYTLLAVSFFSERKYFWGGTQHIHHGVDHRQDPF

SEQ ID NO: 853173 - protein, 239 aa, Homo sapiens
MVFFQYCVMANFFWLLVEGLYLYTLLAVSFFSERKYFWGYILIGWGVPSTFTMVWTIARIHFEDYGCWDTINSSLWWIIKGPILTSILVNFILFICIIRILLQKLRPPDIRKSDSSPYSRLARSTLLLIPLFGVHYIMFAFFPDNFKPEVKMVFELVVGSFQGFVVAILYCFLNGEVQAELRRKWRRWHLQGVLGWNPKYRHPSGGSNGATCSTQVSMLTRVSPGARRSSSFQAEVSLV

SEQ ID NO: 853174 - protein, 239 aa, Homo sapiens; identical to SEQ ID NO: 853173

SEQ ID NO: 853175 - protein, 516 aa, Homo sapiens
RSLRRVVVVVVVALARLTHASSSSALAQAPRWRLVGGYAAGGRGGRGSLSGRPGRISRRRRRRPRWGRAAEAARASCCALALGLLGGQAARLQEECDYVQMIEVQHKQCLEEAQLENETIGCSKMWDNLTCWPATPRGQVVVLACPLIFKLFSSIQGRNVSRSCTDEGWTHLEPGPYPIACGLDDKAASLDEQQTMFYGSVKTGYTIGYGLSLATLLVATAILSLFRKLHCTRNYIHMHLFISFILRAAAVFIKDLALFDSGESDQCSEGSVGCKAAMVFFQYCVMANFFWLLVEGLYLYTLLAVSFFSERKYFWGYILIGWGVPSTFTMVWTIARIHFEDYGCWDTINSSLWWIIKGPILTSILVNFILFICIIRILLQKLRPPDIRKSDSSPYSRLARSTLLLIPLFGVHYIMFAFFPDNFKPEVKMVFELVVGSFQGFVVAILYCFLNGEVQAELRRKWRRWHLQGVLGWNPKYRHPSGGSNGATCSTQVSMLTRVSPGARRSSSFQAEVSLV

SEQ ID NO: 853176 - protein, 312 aa, Homo sapiens
LWGHSASATLPGSRPSPAWCAARQLFARAGPPAAGSGQTMRPPSPLPARWLCVLAGALAWALGPAGGQAARLQEECDYVQMIEVQHKQCLEEAQLENETIGCSKMWDNLTCWPATPRGQVVVLACPLIFKLFSSIQGRNVSRSCTDEGWTHLEPGPYPIACGLDDKAASLDEQQTMFYGSVKTGYTIGYGLSLATLLVATAILSLFRKLHCTRNYIHMHLFISFILRAAAVFIKDLALFDSGESDQCSEGSVGCKAAMVFFQYCVMANFFWLLVEGLYLYTLLAVSFFSERKYFWGGTQHIHHGVDHRQDPF

SEQ ID NO: 853177 - protein, 187 aa, Homo sapiens [sequence omitted]

SEQ ID NO: 853178 - protein, 312 aa, Homo sapiens; identical to SEQ ID NO: 853176

SEQ ID NO: 853179 - protein, 383 aa, Homo sapiens
PGSSEPLTSASRVAGTTDLSLDYASQPANLQFPHIMPLAEDIKGSCFQSGNKRNHEPFIAPERFGNSSVGFGSNSHSQAPEKVTLLVDGTRFVVNPQIFTAHPDTMLGRMFGPGREYNFTRPNEKGEYEIAEGISATVFRTVLDYYKTGIINCPDGISIPDLRDTCDYLCINFDFNTIRCQDLSALLHELSNDGAHKQFDHYLEELILPIMVGCAKKGERECHIVVLTDEDSVDWDEDHPPPMGEEYSQILYSSKLYRFFKYIENRDVAKTVLKERGLKNIRIGIEGYPTCKEKIKRRPGGRSEVIYNYVQRPFIQMSWEKEEGKSRHVDFQCVRSKSLTNLVAAGDDVLEDQEILMHHPPQVDELDRLNAPLSQMASNDFQD

SEQ ID NO: 853180 - protein, 419 aa, Homo sapiens
MNVHRGSDSDRLLRQEASCLVDDTLAVAQEKEANSLASSGPHNLTYPLGPRNEDLSLDYASQPANLQFPHIMPLAEDIKGSCFQSGNKRNHEPFIAPERFGNSSVGFGSNSHSQAPEKVTLLVDGTRFVVNPQIFTAHPDTMLGRMFGPGREYNFTRPNEKGEYEIAEGISATVFRTVLDYYKTGIINCPDGISIPDLRDTCDYLCINFDFNTIRCQDLSALLHELSNDGAHKQFDHYLEELILPIMVGCAKKGERECHIVVLTDEDSVDWDEDHPPPMGEEYSQILYSSKLYRFFKYIENRDVAKTVLKERGLKNIRIGIEGYPTCKEKIKRRPGGRSEVIYNYVQRPFIQMSWEKEEGKSRHVDFQCVRSKSLTNLVAAGDDVLEDQEILMHHPPQVDELDRLNAPLSQMASNDFQD

SEQ ID NO: 853181 - protein, 375 aa, Homo sapiens
MNVHRGSDSDRLLRQEASCLVDDTLAVAQEKEANSLASSGPHNLTYPLGPRNEERFGNSSVGFGSNSHSQAPEKVTLLVDGTRFVVNPQIFTAHPDTMLGRMFGPGREYNFTRPNEKGEYEIAEGISATVFRTVLDYYKTGIINCPDGISIPDLRDTCDYLCINFDFNTIRCQDLSALLHELSNDGAHKQFDHYLEELILPIMVGCAKKGERECHIVVLTDEDSVDWDEDHPPPMGEEYSQILYSSKLYRFFKYIENRDVAKTVLKERGLKNIRIGIEGYPTCKEKIKRRPGGRSEVIYNYVQRPFIQMSWEKEEGKSRHVDFQCVRSKSLTNLVAAGDDVLEDQEILMHHPPQVDELDRLNAPLSQMASNDFQD

SEQ ID NO: 853182 - protein, 253 aa, Homo sapiens
MNVHRGSDSDRLLRQEASCLVDDTLAVAQEKEANSLASSGPHNLTYPLGPRNEGALLHELSNDGAHKQFDHYLEELILPIMVGCAKKGERECHIVVLTDEDSVDWDEDHPPPMGEEYSQILYSSKLYRFFKYIENRDVAKTVLKERGLKNIRIGIEGYPTCKEKIKRRPGGRSEVIYNYVQRPFIQMSWEKEEGKSRHVDFQCVRSKSLTNLVAAGDDVLEDQEILMHHPPQVDELDRLNAPLSQMASNDFQD

SEQ ID NO: 853183 - protein, 383 aa, Homo sapiens; identical to SEQ ID NO: 853179

SEQ ID NO: 853184 - protein, 383 aa, Homo sapiens; identical to SEQ ID NO: 853179

SEQ ID NO: 853185 - protein, 173 aa, Homo sapiens
MVGCAKKGERECHIVVLTDEDSVDWDEDHPPPMGEEYSQILYSSKLYRFFKYIENRDVAKTVLKERGLKNIRIGIEGYPTCKEKIKRRPGGRSEVIYNYVQRPFIQMSWEKEEGKSRHVDFQCVRSKSLTNLVAAGDDVLEDQEILMHHPPQVDELDRLNAPLSQMASNDFQD

SEQ ID NO: 853186 - protein, 383 aa, Homo sapiens; identical to SEQ ID NO: 853179

SEQ ID NO: 853187 - protein, 197 aa, Homo sapiens [sequence omitted]

SEQ ID NO: 853188 - protein, 364 aa, Homo sapiens
MASRLLHRLRHALAGDGPGEAAASPEAEQFPESSELEDDDAEGLSSRLSGTLSFTSAEDDEDDEDEDDEEAGPDQLPLGDGTSGEDAERSPPPDGQWGSQLLARQLQDFWKKSRNTLAPQRLLFEVTSANVVKDPPSKYVLYTLAVIGPGPPDCQPAQISRRYSDFERLHRNLQRQFRGPMAAISFPRKRLRRNFTAETIARRSRAFEQFLGHLQAVPELRHAPDLQDFFVLPELRRAQSLTCTGLYREALALWANAWQLQAQLGTPSGPDRPLLTLAGLAVCHQELEDPGEARACCEKALQLLGDKSLHPLLAPFLEAHVRLSWRLGLDKRQSEARLQALQEAGLTPTPPPSLKELLIKEVLD

SEQ ID NO: 853189 - protein, 364 aa, Homo sapiens; identical to SEQ ID NO: 853188

SEQ ID NO: 853190 - protein, 364 aa, Homo sapiens; identical to SEQ ID NO: 853188

SEQ ID NO: 853191 - protein, 398 aa, Homo sapiens
  misc_feature (1)..(1): Xaa can be any naturally occurring amino acid
  misc_feature (4)..(4): Xaa can be any naturally occurring amino acid
XGYXKQAVADPDPRTGDSCWGAARPGARAYPGTRRCMAPLCRLRHALAGDGPGEAAASPEAEQFPESSELEDDDAEGLSSRLSGTLSFTSAEDDEDDEDEDDEEAGPDQLPLGDGTSGEDAERSPPPDGQWGSQLLARQLQDFWKKSRNTLAPQRLLFEVTSANVVKDPPSKYGLYTLAVIGPGPPDCQPAQISRRYSDFERLHRNLQRQFRGPMAAISFPRKRLRRNFTAETIARRSRAFEQFLGHLQAVPELRHAPDLQDFFVLPELRRAQSLTCTGLYREALALWANAWQLQAQLGTPSGPDRPLLTLAGLAVCHQELEDPGEARACCEKALQLLGDKSLHPLLAPFLEAHVRLSWRLGLDKRQSEARLQALQEAGLTPTPPPSLKELLIKEVLD

SEQ ID NO: 853192 - protein, 244 aa, Homo sapiens
MGRERARGQLAFALTPTLPVLYTLAVIGPGPPDCQPAQISRRYSDFERLHRNLQRQFRGPMAAISFPRKRLRRNFTAETIARRSRAFEQFLGHLQAVPELRHAPDLQDFFVLPELRRAQSLTCTGLYREALALWANAWQLQAQLGTPSGPDRPLLTLAGLAVCHQELEDPGEARACCEKALQLLGDKSLHPLLAPFLEAHVRLSWRLGLDKRQSEARLQALQEAGLTPTPPPSLKELLIKEVLD

SEQ ID NO: 853193 - protein, 317 aa, Homo sapiens
MASRLLHRLRHALAGDGPGEAAASPEAEQFPESSELEDDDAEGLSSRLSGTLSFTSAEDDEDDEDEDDEEAGPDQLPLGDGTSGEDAERSPPPDGQWGSQLLARQLQDFWKKSRNTLAPQRLLFEVTSANVVKDPPSKYVLYTLAVIGPGPPDCQPAQISRRYSDFERLHRNLQRQFRGPMAAISFPRKRLRRNFTAETIARRSRAFEQFLGHLQAVPELRHAPDLQDFFVLPELRRAQSLTCTGLYREALALWANAWQLQAQLGTPSGPDRPLLTLAGLAVCHQELEDPGEAGVEKLFWGSPWGLWAWVGGANRGT

SEQ ID NO: 853194 - protein, 110 aa, Homo sapiens
MHRGTQEGAMASRLLHRLRHALAGDGPGEAAASPEAEQFPESSELEDDDAEGLSSRLSGTLSFTSAEDDEDDEDEDDEEAGPDQLPLGDGTSGEDAGECRRTEAGTLGLD

SEQ ID NO: 853195 - protein, 441 aa, Homo sapiens
MASRLLHRLRHALAGDGPGEAAASPEAEQFPESSELEDDDAEGLSSRLSGTLSFTSAEDDEDDEDEDDEEAGPDQLPLGDGTSGEDAERSPPPDGQWGSQLLARQLQDFWKKSRNTLAPQRLLFEVTSANVVKDPPSKYVRQGLAMLPRLVSNSWPEAVLLPQPPKVLGLQRGLSEELMLYGKGVQKKGQQPRALKLISVFLSSCCLGPGSFQTNLRLYTLAVIGPGPPDCQPAQISRRYSDFERLHRNLQRQFRGPMAAISFPRKRLRRNFTAETIARRSRAFEQFLGHLQAVPELRHAPDLQDFFVLPELRRAQSLTCTGLYREALALWANAWQLQAQLGTPSGPDRPLLTLAGLAVCHQELEDPGEARACCEKALQLLGDKSLHPLLAPFLEAHVRLSWRLGLDKRQSEARLQALQEAGLTPTPPPSLKELLIKEVLD

SEQ ID NO: 853196 - protein, 146 aa, Homo sapiens
MASRLLHRLRHALAGDGPGEAAASPEAEQFPESSELEDDDAEGLSSRLSGTLSFTSAEDDEDDEDEDDEEAGPDQLPLGDGTSGEDAERSPPPDGQWGSQLLARQLQDFWKKSRNTLAPQRLLFEVTSANVVKDPPSKYVCSTPSP

SEQ ID NO: 853197 - protein, 506 aa, Homo sapiens
EAGLAAGSCPERRSERPEPGGALQNPADLHGLRGAAPGPLGRGAPLNAPWDAGGRGARGGARDIGRVLSPSGEERGPRLSGLGGKRCWLGPLVRKTSDCQGVGPHRAPPSPVRAPPLLLLRRAGVPLLRDPVHSVARSPQGAMASRLLHRLRHALAGDGPGEAAASPEAEQFPESSELEDDDAEGLSSRLSGTLSFTSAEDDEDDEDEDDEEAGPDQLPLGDGTSGEDAERSPPPDGQWGSQLLARQLQDFWKKSRNTLAPQRLLFEVTSANVVKDPPSKYVLYTLAVIGPGPPDCQPAQISRRYSDFERLHRNLQRQFRGPMAAISFPRKRLRRNFTAETIARRSRAFEQFLGHLQAVPELRHAPDLQDFFVLPELRRAQSLTCTGLYREALALWANAWQLQAQLGTPSGPDRPLLTLAGLAVCHQELEDPGEARACCEKALQLLGDKSLHPLLAPFLEAHVRLSWRLGLDKRQSEARLQALQEAGLTPTPPPSLKELLIKEVLD

SEQ ID NO: 853198 - protein, 184 aa, Homo sapiens
MAAISFPRKRLRRNFTAETIARRSRAFEQFLGHLQAVPELRHAPDLQDFFVLPELRRAQSLTCTGLYREALALWANAWQLQAQLGTPSGPDRPLLTLAGLAVCHQELEDPGEARACCEKALQLLGDKSLHPLLAPFLEAHVRLSWRLGLDKRQSEARLQALQEAGLTPTPPPSLKELLIKEVLD

SEQ ID NO: 853199 - protein, 317 aa, Homo sapiens; identical to SEQ ID NO: 853193

SEQ ID NO: 853200 - protein, 261 aa, Homo sapiens
TALSAFTAIPAVLAAPAMGLELFLDLVSQPSRAVYIFAKKNGIPLELRTVDLVKGQHKSKEFLQINSLGKLPTLKDGDFILTESSAILIYLSCKYQTPDHWYPSDLQARARVHEYLGWHADCIRGTFGIPLWVQVLGPLIGVQVPEEKVERNRTAMDQALQWLEDKFLGDRPFLAGQQVTLADLMALEELMQPVALGYELFEGRPRLAAWRGRVEAFLGAELCQEAHSIILSILEQAAKKTLPTPSPEAYQAMLLRIARIP

SEQ ID NO: 853201 - protein, 195 aa, Homo sapiens
MRFSKCKAEGPAKSRCPSSAILIYLSCKYQTPDHWYPSDLQARARVHEYLGWHADCIRGTFGIPLWVQVLGPLIGVQVPEEKVERNRTAMDQALQWLEDKFLGDRPFLAGQQVTLADLMALEELMQPVALGYELFEGRPRLAAWRGRVEAFLGAELCQEAHSIILSILEQAAKKTLPTPSPEAYQAMLLRIARIP

SEQ ID NO: 853202 - protein, 295 aa, Homo sapiens
TALSAFTAIPAVLAAPAMGLELFLDLVSQPSRAVYIFAKKNGIPLELRTVDLVKGQHKSKEFLQINSLGKLPTLKDGDFILTERLTGVSTSQGGCWHITEMRFSKCKAEGPAKSRCPSSAILIYLSCKYQTPDHWYPSDLQARARVHEYLGWHADCIRGTFGIPLWVQVLGPLIGVQVPEEKVERNRTAMDQALQWLEDKFLGDRPFLAGQQVTLADLMALEELMQPVALGYELFEGRPRLAAWRGRVEAFLGAELCQEAHSIILSILEQAAKKTLPTPSPEAYQAMLLRIARIP

SEQ ID NO: 853203 - protein, 261 aa, Homo sapiens; identical to SEQ ID NO: 853200

SEQ ID NO: 853204 - protein, 322 aa, Homo sapiens
TALSAFTAIPAVLAAPAMGLELFLDLVSQPSRAVYIFAKKNGIPLELRTVDLVKGQHKSKEFLQINSLGKLPTLKDGDFILTESSAILIYLSCKYQTPDHWYPSDLQARARVHEYLGWHADCIRGTFGIPLWVQVLGPLIGVQVPEEKVERNRTAMDQALQWLEDKFLGDRPFLAGQQVTLADLMALEELMQPVALGYELFEGRPRLAAWRGRVEAFLGAELCQEAHSIILSILEQAAKKPGSPEGSGMGARRLATRIHSVTYLPLFIFPSCPSPFSPASCEALHRQDTQCPWQCCYSSGAAYITSKRLNLQYIKSSYKSVT

SEQ ID NO: 853205 - protein, 160 aa, Homo sapiens
TALSAFTAIPAVLAAPAMGLELFLDLVSQPSRAVYIFAKKNGIPLELRTVDLVKGQHKSKEFLQINSLGKLPTLKDGDFILTERCPPSLTPHRIRSPCDLGSPHWPRAPVALPYPMGQRGRGKARDLAGRGGSRLSSRHFGRPRRADHEVRRPRPSWLTP

SEQ ID NO: 853206 - protein, 157 aa, Homo sapiens
  misc_feature (43)..(43): Xaa can be any naturally occurring amino acid
  misc_feature (54)..(54): Xaa can be any naturally occurring amino acid
IPPLWGGGVLGLFGKKKTFKIGAPPQGGEKGGPPKPKGQFPNXSSGEGPKIPPXLETQPSQHPHQRPIRLCCFESPGSPEGSGMGARRLATRIHSVTYLPLFIFPSCPSPFSPASCEALHRQDTQCPWQCCYSSGAAYITSKRLNLQYIKSSYKSVT

SEQ ID NO: 853207 - protein, 297 aa, Homo sapiens
TALSAFTAIPAVLAAPAMGLELFLDLVSQPSRAVYIFAKKNGIPLELRTVDLVKGQHKSKEFLQINSLGKLPTLKDGDFILTERALLAYHRDEVLKMQSRRSSQESVPKATKTGGDSLEDSAILIYLSCKYQTPDHWYPSDLQARARVHEYLGWHADCIRGTFGIPLWVQVLGPLIGVQVPEEKVERNRTAMDQALQWLEDKFLGDRPFLAGQQVTLADLMALEELMQPVALGYELFEGRPRLAAWRGRVEAFLGAELCQEAHSIILSILEQAAKKTLPTPSPEAYQAMLLRIARIP

SEQ ID NO: 853208 - protein, 108 aa, Homo sapiens
ASWNRRPRKPSQHPHQRPIRLCCFESPGSPEGSGMGARRLATRIHSVTYLPLFIFPSCPSPFSPASCEALHRQDTQCPWQCCYSSGAAYITSKRLNLQYIKSSYKSVT

SEQ ID NO: 853209 - protein, 340 aa, Homo sapiens
MSELEQLRQEAEQLRNQIRDARKACGDSTLTQITAGLDPVGRIQMRTRRTLRGHLAKIYAMHWGTDSRLLVSASQDGKLIIWDSYTTNKVHAIPLRSSWVMTCAYAPSGNFVACGGLDNICSIYSLKTREGNVRVSRELPGHTGYLSCCRFLDDNQIITSSGDTTCALWDIETGQQTVGFAGHSGDVMSLSLAPDGRTFVSGACDASIKLWDVRDSMCRQTFIGHESDINAVAFFPNGYAFTTGSDDATCRLFDLRADQELLMYSHDNIICGITSVAFSRSGRLLLAGYDDFNCNIWDAMKGDRAGVLAGHDNRVSCLGVTDDGMAVATGSWDSFLKIWN

SEQ ID NO: 853210 - protein, 358 aa, Homo sapiens
MSELEQLRQEAEQLRNQIRDARKACGDSTLTQITAGLDPVGRIQMRTRRTLRGHLAKIYAMHWGTDSRLLVSASQDGKLIIWDSYTTNKVHAIPLRSSWVMTCAYAPSGNFVACGGLDNICSIYSLKTREGNVRVSRELPGHTGYLSCCRFLDDNQIITSSGDTTCALWDIETGGIPRAGDATCALWDIETGQQTVGFAGHSGDVMSLSLAPDGRTFVSGACDASIKLWDVRDSMCRQTFIGHESDINAVAFFPNGYAFTTGSDDATCRLFDLRADQELLMYSHDNIICGITSVAFSRSGRLLLAGYDDFNCNIWDAMKGDRAGVLAGHDNRVSCLGVTDDGMAVATGSWDSFLKIWN

SEQ ID NO: 853211 - protein, 105 aa, Homo sapiens
PPPPPRRKTAPPAHRQRPPPQSPTATGTFAGKRSPLAPQPQFPPGEPLFLRSPGAGLLGADVTPQTSAPFPSCPVAPKPGRGTGEPSPPTVRALPRTISEVFARP

SEQ ID NO: 853212 - protein, 340 aa, Homo sapiens; identical to SEQ ID NO: 853209

SEQ ID NO: 853213 - protein, 265 aa, Homo sapiens
  misc_feature (250)..(250): Xaa can be any naturally occurring amino acid
  misc_feature (258)..(258): Xaa can be any naturally occurring amino acid
MSELEQLRQEAEQLRNQIRDARKACGDSTLTQITAGLDPVGRIQMRTRRTLRGHLAKIYAMHWGTDSRLLVSASQDGKLIIWDSYTTNKVHAIPLRSSWVMTCAYAPSGNFVACGGLDNICSIYSLKTREGNVRVSRELPGHTGYLSCCRFLDDNQIITSSGDTTCALWDIETGQQTVGFAGHSGDVMSLSLAPDGRTFVSGACDASIKLWDVRDSMCRQTFIGQLKSRTSNAKLAFLPPTGNALQPTGXPEPNANVXPPSFPNP

SEQ ID NO: 853214 - protein, 172 aa, Homo sapiens
MSELEQLRQEAEQLRNQIRDARKACGDSTLTQITAGLDPVGRIQMRTRRTLRGHLAKIYAMHWGTDSRLLVSASQDGKLIIWDSYTTNKVHAIPLRSSWVMTCAYAPSGNFVACGGLDNICSIYSLKTREGNVRVSRELPGHTGYLCFRFLDDTKSPALGQMCRDPLDHRST

SEQ ID NO: 853215 - protein, 589 aa, Homo sapiens
MDLIDILWRQDIDLGVSREVFDFSQRRKEYELEKQKKLEKERQEQLQKEQEKAFFAQLQLDEETGEFLPIQPAQHIQSETSGSANYSQVAHIPKSDALYFDDCMQLLAQTFPFVDDNEVSSATFQSLVPDIPGHIESPVFIATNQAQSPETSVAQVAPVDLDGMQQDIEQVWEELLSIPELQCLNIENDKLVETTMVPSPEAKLTEVDNYHFYSSIPSMEKEVGNCSPHFLNAFEDSFSSILSTEDPNQLTVNSLNSDATVNTDFGDEFYSAFIAEPSISNSMPSPATLSHSLSELLNGPIDVSDLSLCKAFNQNHPESTAEFNDSDSGISLNTSPSVASPEHSVESSSYGDTLLGLSDSEVEELDSAPGSVKQNGPKTPVHSSGDMVQPLSPSQGQSTHVHDAQCENTPEKELPVSPGHRKTPFTKDKHSSRLEAHLTRDELRAKALHIPFPVEKIINLPVVDFNEMMSKEQFNEAQLALIRDIRRRGKNKVAAQNCRKRKLENIVELEQDLDHLKDEKEKLLKEKGENDKSLHLLKKQLSTLYLEVFSMLRDEDGKPYSPSEYSLQQTRDGNVFLVPKSKKPDVKKN

SEQ ID NO: 853216 - protein, 505 aa, Homo sapiens
MKRQVAHIPKSDALYFDDCMQLLAQTFPFVDDNEVSSATFQSLVPDIPGHIESPVFIATNQAQSPETSVAQVAPVDLDGMQQDIEQVWEELLSIPELQCLNIENDKLVETTMVPSPEAKLTEVDNYHFYSSIPSMEKEVGNCSPHFLNAFEDSFSSILSTEDPNQLTVNSLNSDATVNTDFGDEFYSAFIAEPSISNSMPSPATLSHSLSELLNGPIDVSDLSLCKAFNQNHPESTAEFNDSDSGISLNTSPSVASPEHSVESSSYGDTLLGLSDSEVEELDSAPGSVKQNGPKTPVHSSGDMVQPLSPSQGQSTHVHDAQCENTPEKELPVSPGHRKTPFTKDKHSSRLEAHLTRDELRAKALHIPFPVEKIINLPVVDFNEMMSKEQFNEAQLALIRDIRRRGKNKVAAQNCRKRKLENIVELEQDLDHLKDEKEKLLKEKGENDKSLHLLKKQLSTLYLEVFSMLRDEDGKPYSPSEYSLQQTRDGNVFLVPKSKKPDVKKN

SEQ ID NO: 853217 - protein, 587 aa, Homo sapiens
MMDLELPPPGLPSQQDMDLIDILWRQDIDLGVSREVFDFSQRRKEYELEKQKKLEKERQEQLREFLPIQPAQHIQSETSGSANYSQVAHIPKSDALYFDDCMQLLAQTFPFVDDNEVSSATFQSLVPDIPGHIESPVFIATNQAQSPETSVAQVAPVDLDGMQQDIEQVWEELLSIPELQCLNIENDKLVETTMVPSPEAKLTEVDNYHFYSSIPSMEKEVGNCSPHFLNAFEDSFSSILSTEDPNQLTVNSLNSDATVNTDFGDEFYSAFIAEPSISNSMPSPATLSHSLSELLNGPIDVSDLSLCKAFNQNHPESTAEFNDSDSGISLNTSPSVASPEHSVESSSYGDTLLGLSDSEVEELDSAPGSVKQNGPKTPVHSSGDMVQPLSPSQGQSTHVHDAQCENTPEKELPVSPGHRKTPFTKDKHSSRLEAHLTRDELRAKALHIPFPVEKIINLPVVDFNEMMSKEQFNEAQLALIRDIRRRGKNKVAAQNCRKRKLENIVELEQDLDHLKDEKEKLLKEKGENDKSLHLLKKQLSTLYLEVFSMLRDEDGKPYSPSEYSLQQTRDGNVFLVPKSKKPDVKKN

SEQ ID NO: 853218 - protein, 174 aa, Homo sapiens
MTTYSGYLLSTHGPQLIMMDLELPPPGLPSQQDMDLIDILWRQDIDLGVSREVFDFSQRRKEYELEKQKKLEKERQEQLQKEQEKAFFAQLQLDEETGEFLPIQPAQHIQSETSGSANYSQVAHIPKSDALYFDDCMQLLAQTFPFVDDNEVRYKITWLIEKLHHNYKITIYSM

SEQ ID NO: 853219 - protein, 612 aa, Homo sapiens
MMDLELPPPGLPSQQDMDLIDILWRQDIDLGVSREVFDFSQRRKEYELEKQKKLEKERQEQLQKEQEKAFFAQLQLDEETGEFLPIQPAQHIQSETSGSANYSQVAHIPKSDALYFDDCMQLLAQTFPFVDDNEVSSATFQSLVPDIPGHIESPVFIATNQAQSPETSVAQVAPVDLDGMQQDIEQVWEELLSIPELQYKLPSHQCLNIENDKLVETTMVPSPEAKLTEVDNYHFYSSIPSMEKEVGNCSPHFLNAFEDSFSSILSTEDPNQLTVNSLNSDATVNTDFGDEFYSAFIAEPSISNSMPSPATLSHSLSELLNGPIDVSDLSLCKAFNQNHPESTAEFNDSDSGISLNTSPSVASPEHSVESSSYGDTLLGLSDSEVEELDSAPGSVKQNGPKTPVHSSGDMVQPLSPSQGQSTHVHDAQCENTPEKELPVSPGHRKTPFTKDKHSSRLEAHLTRDELRAKALHIPFPVEKIINLPVVDFNEMMSKEQFNEAQLALIRDIRRRGKNKVAAQNCRKRKLENIVELEQDLDHLKDEKEKLLKEKGENDKSLHLLKKQLSTLYLEVFSMLRDEDGKPYSPSEYSLQQTRDGNVFLVPKSKKPDVKKN

SEQ ID NO: 853220 - protein, 141 aa, Homo sapiens
MDLIDILWRQDIDLGVSREVFDFSQRRKEYELEKQKKLEKERQEQLQKEQEKAFFAQLQLDEETGEFLPIQPAQHIQSETSGSANYSQVAHIPKSDALYFDDCMQLLAQTFPFVDDNEVRYKITWLIEKLHHNYKITIYSM

SEQ ID NO: 853221 - protein, 575 aa, Homo sapiens
MMDLELPPPGLPSQQDMDLIDILWRQDIDLGVSREVFDFSQRRKEYELEKQKKLEKERQEQLQKEQEKAFFAQLQLDEETGEFLPIQPAQHIQSETSGSANYSQVSSATFQSLVPDIPGHIESPVFIATNQAQSPETSVAQVAPVDLDGMQQDIEQVWEELLSIPELQCLNIENDKLVETTMVPSPEAKLTEVDNYHFYSSIPSMEKEVGNCSPHFLNAFEDSFSSILSTEDPNQLTVNSLNSDATVNTDFGDEFYSAFIAEPSISNSMPSPATLSHSLSELLNGPIDVSDLSLCKAFNQNHPESTAEFNDSDSGISLNTSPSVASPEHSVESSSYGDTLLGLSDSEVEELDSAPGSVKQNGPKTPVHSSGDMVQPLSPSQGQSTHVHDAQCENTPEKELPVSPGHRKTPFTKDKHSSRLEAHLTRDELRAKALHIPFPVEKIINLPVVDFNEMMSKEQFNEAQLALIRDIRRRGKNKVAAQNCRKRKLENIVELEQDLDHLKDEKEKLLKEKGENDKSLHLLKKQLSTLYLEVFSMLRDEDGKPYSPSEYSLQQTRDGNVFLVPKSKKPDVKKN

SEQ ID NO: 853222 - protein, 95 aa, Homo sapiens
RRGRTLAPPLWGGRRSGAGARRRVADYRVPGSPEEPPTQPPPPPPPPPEPPCPRRASAAGTGPPSGSPNTRSTAHHDGLGAAAAGTPVPAGHGFD

SEQ ID NO: 853223 - protein, 367 aa, Homo sapiens
MMDLELPPPGLPSQQDMDLIDILWRQDIDLGVSREVFDFSQRRKEYELEKQKKLEKERQEQLQKEQEKAFFAQLQLDEETGEFLPIQPAQHIQSETSGSANYSQVAHIPKSDALYFDDCMQLLAQTFPFVDDNEVSSATFQSLVPDIPGHIESPVFIATNQAQSPETSVAQVAPVDLDGMQQDIEQVWEELLSIPELQCLNIENDKLVETTMVPSPEAKLTEVDNYHFYSSIPSMEKEVGNCSPHFLNAFEDSFSSILSTEDPNQLTVNSLNSDATVNTDFGDEFYSAFIAEPSISNSMPSPATLSHSLSELLNGPIDVSDLSLCKAFNQNTLKAQRIPEFLSPGFPFNKSPGFPQNPGDLPLGNLL

SEQ ID NO: 853224 - protein, 605 aa, Homo sapiens
MMDLELPPPGLPSQQDMDLIDILWRQDIDLGVSREVFDFSQRRKEYELEKQKKLEKERQEQLQKEQEKAFFAQLQLDEETGEFLPIQPAQHIQSETSGSANYSQVAHIPKSDALYFDDCMQLLAQTFPFVDDNEVSSATFQSLVPDIPGHIESPVFIATNQAQSPETSVAQVAPVDLDGMQQDIEQVWEELLSIPELQCLNIENDKLVETTMVPSPEAKLTEVDNYHFYSSIPSMEKEVGNCSPHFLNAFEDSFSSILSTEDPNQLTVNSLNSDATVNTDFGDEFYSAFIAEPSISNSMPSPATLSHSLSELLNGPIDVSDLSLCKAFNQNHPESTAEFNDSDSGISLNTSPSVASPEHSVESSSYGDTLLGLSDSEVEELDSAPGSVKQNGPKTPVHSSGDMVQPLSPSQGQSTHVHDAQCENTPEKELPVSPGHRKTPFTKDKHSSRLEAHLTRDELRAKALHIPFPVEKIINLPVVDFNEMMSKEQFNEAQLALIRDIRRRGKNKVAAQNCRKRKLENIVELEQDLDHLKDEKEKLLKEKGENDKSLHLLKKQLSTLYLEVFSMLRDEDGKPYSPSEYSLQQTRDGNVFLVPKSKKPDVKKN

SEQ ID NO: 853225 - protein, 235 aa, Homo sapiens
MMDLELPPPGLPSQQDMDLIDILWRQDIDLGVSREVFDFSQRRKEYELEKQKKLEKERQEQLQKEQEKAFFAQLQLDEETGEFLPIQPAQHIQSETSGSANYSQVAHIPKSDALYFDDCMQLLAQTFPFVDDNEVSSATFQSLVPDIPGHIESPVFIATNQAQSPETSVAQVAPVDLDGMQQDIEQVWEELLSIPELQALTMLPRLVSNSWTWDPSASASQSAGITGVSHCAWPW

SEQ ID NO: 853226 - protein, 622 aa, Homo sapiens
MTTYSGYLLSTHGPQLIMMDLELPPPGLPSQQDMDLIDILWRQDIDLGVSREVFDFSQRRKEYELEKQKKLEKERQEQLQKEQEKAFFAQLQLDEETGEFLPIQPAQHIQSETSGSANYSQVAHIPKSDALYFDDCMQLLAQTFPFVDDNEVSSATFQSLVPDIPGHIESPVFIATNQAQSPETSVAQVAPVDLDGMQQDIEQVWEELLSIPELQCLNIENDKLVETTMVPSPEAKLTEVDNYHFYSSIPSMEKEVGNCSPHFLNAFEDSFSSILSTEDPNQLTVNSLNSDATVNTDFGDEFYSAFIAEPSISNSMPSPATLSHSLSELLNGPIDVSDLSLCKAFNQNHPESTAEFNDSDSGISLNTSPSVASPEHSVESSSYGDTLLGLSDSEVEELDSAPGSVKQNGPKTPVHSSGDMVQPLSPSQGQSTHVHDAQCENTPEKELPVSPGHRKTPFTKDKHSSRLEAHLTRDELRAKALHIPFPVEKIINLPVVDFNEMMSKEQFNEAQLALIRDIRRRGKNKVAAQNCRKRKLENIVELEQDLDHLKDEKEKLLKEKGENDKSLHLLKKQLSTLYLEVFSMLRDEDGKPYSPSEYSLQQTRDGNVFLVPKSKKPDVKKN

SEQ ID NO: 853227 - protein, 589 aa, Homo sapiens; identical to SEQ ID NO: 853215

SEQ ID NO: 853228 - protein, 605 aa, Homo sapiens; identical to SEQ ID NO: 853224

SEQ ID NO: 853229 - protein, 505 aa, Homo sapiens; identical to SEQ ID NO: 853216

SEQ ID NO: 853230 - protein, 587 aa, Homo sapiens
MMDLELPPPGLPSQQDMDLIDILWRQDIDLGVSREVFDFSQRRKEYELEKQKKLEKERQEQLQKEQEKAFFAQLQLDEETGEFLPIQPAQHIQSETSGSANYSQVAHIPKSDALYFDDCMQLLAQTFPFVDDNEVSSATFQSLVPDIPGHIESPVFIATNQAQSPETSVAQVAPVDLDGMQQDIEQVWEELLSIPELQCLNIENDKLVETTMVPSPEAKLTEVDNYHFYSSIPSMEKEVGNCSPHFLNAFEDSFSSILSTEDPNQLTVNSLNSDATVNTDFGDEFYSAFIAEPSISNSMPSPATLSHSLSELLNGPIDVSDLSLCKAFNLNTSPSVASPEHSVESSSYGDTLLGLSDSEVEELDSAPGSVKQNGPKTPVHSSGDMVQPLSPSQGQSTHVHDAQCENTPEKELPVSPGHRKTPFTKDKHSSRLEAHLTRDELRAKALHIPFPVEKIINLPVVDFNEMMSKEQFNEAQLALIRDIRRRGKNKVAAQNCRKRKLENIVELEQDLDHLKDEKEKLLKEKGENDKSLHLLKKQLSTLYLEVFSMLRDEDGKPYSPSEYSLQQTRDGNVFLVPKSKKPDVKKN

SEQ ID NO: 853231 - protein, 605 aa, Homo sapiens; identical to SEQ ID NO: 853224

SEQ ID NO: 853232 - protein, 580 aa, Homo sapiens
MMDLELPPPGLPSQQDMDLIDILWRQDIDLGVSREVFDFSQRRKEYELEKQKKLEKERQEQLQKEQEKAFFAQLQLDEETGEFLPIQPAQHIQSETSGSANYSQVAHIPKSDALYFDDCMQLLAQTFPFVDDNEVSSATFQSLVPDIPGHIESPVFIATNQAQSPETSVAQVAPVDLDGMQQDIEQVWEELLSIPELQCLNIENDKLVETTMVPSPEAKLTEVDNYHFYSSIPSMEKEVGNCSPHFLNAFEDSFSSILSTEDPNQLTVNSLNSDATVNTDFGDEFYSAFIAEPSISNSMPSPATLSHSLSELLNGPIDVSDLSLCKAFNQNHPESTAEFNDSDSGISLNTSPSVASPEHSVESSSYGDTLLGLSDSEVEELDSAPGSVKQNGPKTPVHSSGDMVQPLSPSQGQSTHVHDAQCENTPEKELPVSPGHRKTPFTKDKHSSRLEAHLTRDELRAKALHIPFPVEKIINLPVVDFNEMMSKEQFNEAQLALIRDIRFSHLFPDIPGHIESPVFIATNQAQSPETSVAQVAPVDLDGMQQDIEQVWEELLSIPEFSVLILKMTSRLRPRRRGREF

SEQ ID NO: 853233 - protein, 126 aa, Homo sapiens
MTTYSGYLLSTHGPQLIMMDLELPPPGLPSQQDMDLIDILWRQDIDLGVSREVFDFSQRRKEYELEKQKKLEKERQEQLQKEQEKAFFAQLQLDEETGEFLPIQPAQHIQSETSGSANYSQCPHSQ

SEQ ID NO: 853234 - protein, 516 aa, Homo sapiens [sequence omitted]

SEQ ID NO: 853235 - protein, 516 aa, Homo sapiens [sequence omitted]

SEQ ID NO: 853236 - protein, 131 aa, Homo sapiens
GPPRPGFCPARADSRKSGSGSRGVTVTPRRINFQRLMLHEKATKKTKEKETRMALPQGCLTFKDVAIEFSLEEWKCLNPAQRALYRAVMLENYRNLESVGLTSKDSWYMRKKPGRGRGKQRRQEWFFLRVY

SEQ ID NO: 853237 - protein, 131 aa, Homo sapiens; identical to SEQ ID NO: 853236

SEQ ID NO: 853238 - protein, 266 aa, Homo sapiens
MHGRKDDAQKQPVKNQLGLNPQSHLPELQLFQAEGKIYKYDHMEKSVNSSSLVSPPQRISSTVKTHISHTYECNFVDSLFTQKEKANIGTEHYKCNERGKAFHQGLHFTIHQIIHTKETQFKCDICGKIFNKKSNLASHQRIHTGEKPYKCNECGKVFHNMSHLAQHRRIHTGEKPYKCNECGKVFNQISHLAQHQRIHTGEKPYKCNECGKVFHQISHLAQHRTIHTGEKPYECNKCGKVFSRNSYLVQHLIIHTGEKPYRCNVL

SEQ ID NO: 853239 - protein, 516 aa, Homo sapiens [sequence omitted]

SEQ ID NO: 853240 - protein, 266 aa, Homo sapiens; identical to SEQ ID NO: 853238

SEQ ID NO: 853241 - protein, 1402 aa, Homo sapiens
KGPEVDIEGPEGKLKGPKFKMPDVHFKSPQISMSDIDLNLKGPKIKGDMDISVPKLEGDLKGPKVDVKGPKVGIDTPDIDIHGPEGKLKGPKFKMPDLHLKAPKISMPEVDLNLKGPKVKGDMDISLPKVEGDLKGPEVDIKGPKVDIDVPDVDVQGPDWHLKMPKVKMPKFSMPGFKGEGPDVDVNLPKADIDVSGPKVDVDVPDVNIEGPDAKLKGPKFKMPEMSIKAPKISMPDIDLNLKGPKVKGDVDVTLPKVEGDLKGPEADIKGPKVDINTPDVDVHGPDWHLKMPKVKMPKFSMPGFKGEGPDVDVSLPKADIDVSGPKVDVDIPDVNIEGPDAKLKGPKFKMPEINIKAPKISIPDVDLDLKGPKVKGDFDVSVPKVEGTLKGPEVDLKGPRLDFEGPDAKLSGPSLKMPSLEISAPKVTAPDVDLHLKAPKIGFSGPKLEGGEVDLKGPKVEAPSLDVHMDSPDINIEGPDVKIPKFKKPKFGFGAKSPKADIKSPSLDVTVPEAELNLETPEISVGGKGKKSKFKMPKIHMSGPKIKAKKQGFDLNVPGGEIDASLKAPDVDVNIAGPDAALKVDVKSPKTKKTMFGKMYFPDVEFDIKSPKFKAEAPLPSPKLEGELQAPDLELSLPAIHVEGLDIKAKAPKVKMPDVDISVPKIEGDLKGPKVQANLGAPDINIEGLDAKVKTPSFGISAPQVSIPDVNVNLKGPKIKGDVPSVGLEGPDVDLQGPEAKIKFPKFSMPKIGIPGVKMEGGGAEVHAQLPSLEGDLRGPDVKLEGPDVSLKGPGVDLPSVNLSMPKVSGPDLDLNLKGPSLKGDLDASVPSMKVHAPGLNLSGVGGKMQVGGDGVKVPGIDATTKLNVGAPDVTLRGPSLQGDLAVSGDIKCPKVSVGAPDLSLEASEGSIKLPKMKLPQFGISTPGSDLHVNAKGPQVSGELKGPGVDVNLKGPRISAPNVDFNLEGPKVKGSLGATGEIKGPTVGGGLPGIGVQGLEGNLQMPGIKSSGCDVNLPGVNVKLPTGQISGPEIKGGLKGSEVGFHGAAPDISVKGPAFNMASPESDFGINLKGPKIKGGADVSGGVSAPDISLGEGHLSVKGSGGEWKGPQVSSALNLDTSKFAGGLHFSGPKVEGGVKGGQIGLQAPGLSVSGPQGHLESGSGKVTFPKMKIPKFTFSGRELVGREMGVDVHFPKAEASIQAGAGDGEWEESEVKLKKSKIKMPKFNFSKPKGKGGVTGSPEASISGSKGDLKSSKASLGSLEGEAEAEASSPKGKFSLFKSKKPRHRSNSFSDEREFSGPSTPTGTLEFEGGEVSLEGGKVKGKHGKLKFGTFGGLGSKSKGHYEVTGSDDETGKLQGSGVSLASKKSRLSSSSSNDSGNKVGIQLPEVELSVSTKKE

SEQ ID NO: 853242 - protein, 1402 aa, Homo sapiens; identical to SEQ ID NO: 853241

SEQ ID NO: 853243 - protein, 1402 aa, Homo sapiens; identical to SEQ ID NO: 853241

SEQ ID NO: 853244 - protein, 1402 aa, Homo sapiens; identical to SEQ ID NO: 853241

SEQ ID NO: 853245 - protein, 790 aa, Homo sapiens
ADLEIPGKALPKLEGELQAPDLELSLPAIHVEGLDIKAKAPKVKMPDVDISVPKIEGDLKGPKVQANLGAPDINIEGLDAKVKTPSFGISAPQVSIPDVNVNLKGPKIKGDVPSVGLEGPDVDLQGPEAKIKFPKFSMPKIGIPGVKMEGGGAEVHAQLPSLEGDLRGPDVKLEGPDVSLKGPGVDLPSVNLSMPKVSGPDLDLNLKGPSLKGDLDASVPSMKVHAPGLNLSGVGGKMQVGGDGVKVPGIDATTKLNVGAPDVTLRGPSLQGDLAVSGDIKCPKVSVGAPDLSLEASEGSIKLPKMKLPQFGISTPGSDLHVNAKGPQVSGELKGPGVDVNLKGPRISAPNVDFNLEGPKVKGSLGATGEIKGPTVGGGLPGIGVQGLEGNLQMPGIKSSGCDVNLPGVNVKLPTGQISGPEIKGGLKGSEVGFHGAAPDISVKGPAFNMASPESDFGINLKGPKIKGGADVSGGVSAPDISLGEGHLSVKGSGGEWKGPQVSSALNLDTSKFAGGLHFSGPKVEGGVKGGQIGLQAPGLSVSGPQGHLESGSGKVTFPKMKIPKFTFSGRELVGREMGVDVHFPKAEASIQAGAGDGEWEESEVKLKKSKIKMPKFNFSKPKGKGGVTGSPEASISGSKGDLKSSKASLGSLEGEAEAEASSPKGKFSLFKSKKPRHRSNSFSDEREFSGPSTPTGTLEFEGGEVSLEGGKVKGKHGKLKFGTFGGLGSKSKGHYEVTGSDDETGKLQGSGVSLASKKSRLSSSSSNDSGNKVGIQLPEVELSVSTKKE

SEQ ID NO: 853246 - protein, 653 aa, Homo sapiens
MPKIGIPGVKMEGGGAEVHAQLPSLEGDLRGPDVKLEGPDVSLKGPGVDLPSVNLSMPKVSGPDLDLNLKGPSLKGDLDASVPSMKVHAPGLNLSGVGGKMQVGGDGVKVPGIDATTKLNVGAPDVTLRGPSLQGDLAVSGDIKCPKVSVGAPDLSLEASEGSIKLPKMKLPQFGISTPGSDLHVNAKGPQVSGELKGPGVDVNLKGPRISAPNVDFNLEGPKVKGSLGATGEIKGPTVGGGLPGIGVQGLEGNLQMPGIKSSGCDVNLPGVNVKLPTGQISGPEIKGGLKGSEVGFHGAAPDISVKGPAFNMASPESDFGINLKGPKIKGGADVSGGVSAPDISLGEGHLSVKGSGGEWKGPQVSSALNLDTSKFAGGLHFSGPKVEGGVKGGQIGLQAPGLSVSGPQGHLESGSGKVTFPKMKIPKFTFSGRELVGREMGVDVHFPKAEASIQAGAGDGEWEESEVKLKKSKIKMPKFNFSKPKGKGGVTGSPEASISGSKGDLKSSKASLGSLEGEAEAEASSPKGKFSLFKSKKPRHRSNSFSDEREFSGPSTPTGTLEFEGGEVSLEGGKVKGKHGKLKFGTFGGLGSKSKGHYEVTGSDDETGKLQGSGVSLASKKSRLSSSSSNDSGNKVGIQLPEVELSVSTKKE

SEQ ID NO: 853247 - protein, 389 aa, Homo sapiens
EWKGPQVSSALNLDTSKFAGGLHFSGPKVEGGVKGGQIGLQAPGKGCLGLSLHQIVGINLKGPKIKGGADVSGGVSAPDISLGEGHLSVKGSGGEWKGPQVSSALNLDTSKFAGGLHFSGPKVEGGVKGGQIGLQAPGLSVSGPQGHLESGSGKVTFPKMKIPKFTFSGRELVGREMGVDVHFPKAEASIQAGAGDGEWEESEVKLKKSKIKMPKFNFSKPKGKGGVTGSPEASISGSKGDLKSSKASLGSLEGEAEAEASSPKGKFSLFKSKKPRHRSNSFSDEREFSGPSTPTGTLEFEGGEVSLEGGKVKGKHGKLKFGTFGGLGSKSKGHYEVTGSDDETGKLQGSGVSLASKKSRLSSSSSNDSGNKVGIQLPEVELSVSTKKE

SEQ ID NO: 853248 - protein, 1402 aa, Homo sapiens; identical to SEQ ID NO: 853241

SEQ ID NO: 853249 - protein, 1402 aa, Homo sapiens; identical to SEQ ID NO: 853241

SEQ ID NO: 853250 - protein, 1402 aa, Homo sapiens; identical to SEQ ID NO: 853241

SEQ ID NO: 853251 - protein, 412 aa, Homo sapiens
KLRCVQVESRGDLGSFHSPPEPLTLKCPSPRSALGRFISISGPEIKGGLKGSEVGFHGAAPDISVKGPAFNMASPESDFGINLKGPKIKGGADVSGGVSAPDISLGEGHLSVKGSGGEWKGPQVSSALNLDTSKFAGGLHFSGPKVEGGVKGGQIGLQAPGLSVSGPQGHLESGSGKVTFPKMKIPKFTFSGRELVGREMGVDVHFPKAEASIQAGAGDGEWEESEVKLKKSKIKMPKFNFSKPKGKGGVTGSPEASISGSKGDLKSSKASLGSLEGEAEAEASSPKGKFSLFKSKKPRHRSNSFSDEREFSGPSTPTGTLEFEGGEVSLEGGKVKGKHGKLKFGTFGGLGSKSKGHYEVTGSDDETGKLQGSGVSLASKKSRLSSSSSNDSGNKVGIQLPEVELSVSTKKE

SEQ ID NO: 853252 - protein, 1402 aa, Homo sapiens; identical to SEQ ID NO: 853241

SEQ ID NO: 853253 - protein, 287 aa, Homo sapiens
MWGITAMWGIRGGLHFSGPKVEGGVKGGQIGLQAPGLSVSGPQGHLESGSGKVTFPKMKIPKFTFSGRELVGREMGVDVHFPKAEASIQAGAGDGEWEESEVKLKKSKIKMPKFNFSKPKGKGGVTGSPEASISGSKGDLKSSKASLGSLEGEAEAEASSPKGKFSLFKSKKPRHRSNSFSDEREFSGPSTPTGTLEFEGGEVSLEGGKVKGKHGKLKFGTFGGLGSKSKGHYEVTGSDDETGKLQGSGVSLASKKSRLSSSSSNDSGNKVGIQLPEVELSVSTKKE

SEQ ID NO: 853254 - protein, 104 aa, Homo sapiens
MTWRVVAHSSTVSILSAIAGDCQDETCCHRGSHELSHTWNPSDTHTYHNEPQNPVQKLRRRESQGQDNCLQPAALLGEDASRPPFWPFSPHPFPHPRLHPNPPW

SEQ ID NO: 853255 - protein, 93 aa, Homo sapiens
WLVWISAFYYQVLIHGFTQSLLLDDAGSVLATATSWDELEIQEEAESGSSVTSKIRLPAQVSRDHGLKKGINCSVEKKKDFRKSFNIQLLRNS

SEQ ID NO: 853256 - protein, 962 aa, Homo sapiens [sequence omitted]

SEQ ID NO: 853257 - protein, 962 aa, Homo sapiens [sequence omitted]

SEQ ID NO: 853258 - protein, 962 aa, Homo sapiens [sequence omitted]

SEQ ID NO: 853259 - protein, 797 aa, Homo sapiens
MATAATSPALKRLDLRDPAALFETHGAEEIRGLERQVRAEIEHKKEELRQMVGERYRDLIEAADTIGQMRRCAVGLVDAVKATDQYCARLRQAGSAAPRPPRAQQPQQPSQEKFYSMAAQIKLLLEIPEKIWSSMEASQCLHATQLYLLCCHLHSLLQLDSSSSRYSPVLSRFPILIRQVAAASHFRSTILHESKMLLKCQGVSDQAVAEALCSIMLLEESSPRQALTDFLLARKATIQKLLNQPHHGAGIKAQICSLVELLATTLKQAHALFYTLPEGLLPDPALPCGLLFSTLETITGQHPAGKGTGVLQEEMKLCSWFKHLPASIVEFQPTLRTLAHPISQEYLKDTLQKWIHMCNEDIKNGITNLLMYVKSMKGLAGIRDAMWELLTSESTNHSWDVLCRRLLEKPLLFWEDMMQQLFLDRLQTLTKEGFDSISSSSKELLVSALQELESSTSNSPSNKHIHFEYNMSLFLWSESPNDLPSDAAWVSVANRGQFASSGLSMKAQAISPCVQNFCSALDSKLKVKLDDLLAYLPSDDSSLPKDVSPTQAKSSAFDRYADAGTVQEMLRTQSVACIKHIVDCIRAELQSIEEGVQGQQDALNSAKLHSVLFMARLCQSLGELCPHLKQCILGKSESSEKPAREFRALRKQGKVKTQEIIPTQAKWQEVKEVLLQQSVMGYQVWSSAVVKVLIHGFTQSLLLDDAGSVLATATSWDELEIQEEAESGSSVTSKIRLPAQPSWYVQSFLFSLCQEINRVGGHALPKVTLQEMLKSCMVQVVAAYEKLSEEKQIKVGV
